United States Patent Application Publication US 2018/0305689 A1 - sequence listing, part 117

SEQ ID NO: 1672362 - RNA, 19 nt, Artificial Sequence
  Description of Artificial Sequence: Synthetic oligonucleotide
  Antisense strand to SEQ ID NO: 1672361
uagcccagauuacugucag

SEQ ID NO: 1672363 - RNA, 19 nt, Artificial Sequence
  Description of Artificial Sequence: Synthetic oligonucleotide
  Sense strand starting at position 910 of SEQ ID NO: 1561443
gacaguaaucugggcuauc

SEQ ID NO: 1672364 - RNA, 19 nt, Artificial Sequence
  Description of Artificial Sequence: Synthetic oligonucleotide
  Antisense strand to SEQ ID NO: 1672363
gauagcccagauuacuguc

SEQ ID NO: 1672365 - RNA, 19 nt, Artificial Sequence
  Description of Artificial Sequence: Synthetic oligonucleotide
  Sense strand starting at position 911 of SEQ ID NO: 1561443
acaguaaucugggcuauca

SEQ ID NO: 1672366 - RNA, 19 nt, Artificial Sequence
  Description of Artificial Sequence: Synthetic oligonucleotide
  Antisense strand to SEQ ID NO: 1672365
ugauagcccagauuacugu

SEQ ID NO: 1672367 - RNA, 19 nt, Artificial Sequence
  Description of Artificial Sequence: Synthetic oligonucleotide
  Sense strand starting at position 913 of SEQ ID NO: 1561443
aguaaucugggcuaucaug

SEQ ID NO: 1672368 - RNA, 19 nt, Artificial Sequence
  Description of Artificial Sequence: Synthetic oligonucleotide
  Antisense strand to SEQ ID NO: 1672367
caugauagcccagauuacu

SEQ ID NO: 1672369 - RNA, 19 nt, Artificial Sequence
  Description of Artificial Sequence: Synthetic oligonucleotide
  Sense strand starting at position 919 of SEQ ID NO: 1561443
cugggcuaucaugaaagua

SEQ ID NO: 1672370 - RNA, 19 nt, Artificial Sequence
  Description of Artificial Sequence: Synthetic oligonucleotide
  Antisense strand to SEQ ID NO: 1672369
uacuuucaugauagcccag

SEQ ID NO: 1672371 - RNA, 19 nt, Artificial Sequence
  Description of Artificial Sequence: Synthetic oligonucleotide
  Sense strand starting at position 927 of SEQ ID NO: 1561443
ucaugaaaguaaucagagu

SEQ ID NO: 1672372 - RNA, 19 nt, Artificial Sequence
  Description of Artificial Sequence: Synthetic oligonucleotide
  Antisense strand to SEQ ID NO: 1672371
acucugauuacuuucauga

SEQ ID NO: 1672373 - RNA, 19 nt, Artificial Sequence
  Description of Artificial Sequence: Synthetic oligonucleotide
  Sense strand starting at position 942 of SEQ ID NO: 1561443
gagugacugcuagagagua

SEQ ID NO: 1672374 - RNA, 19 nt, Artificial Sequence
  Description of Artificial Sequence: Synthetic oligonucleotide
  Antisense strand to SEQ ID NO: 1672373
uacucucuagcagucacuc

SEQ ID NO: 1672375 - RNA, 19 nt, Artificial Sequence
  Description of Artificial Sequence: Synthetic oligonucleotide
  Sense strand starting at position 1204 of SEQ ID NO: 1561443
cugcccuucguguuguaga

SEQ ID NO: 1672376 - RNA, 19 nt, Artificial Sequence
  Description of Artificial Sequence: Synthetic oligonucleotide
  Antisense strand to SEQ ID NO: 1672375
ucuacaacacgaagggcag

SEQ ID NO: 1672377 - RNA, 19 nt, Artificial Sequence
  Description of Artificial Sequence: Synthetic oligonucleotide
  Sense strand starting at position 1211 of SEQ ID NO: 1561443
ucguguuguagagacagga

SEQ ID NO: 1672378 - RNA, 19 nt, Artificial Sequence
  Description of Artificial Sequence: Synthetic oligonucleotide
  Antisense strand to SEQ ID NO: 1672377
uccugucucuacaacacga

SEQ ID NO: 1672379 - RNA, 19 nt, Artificial Sequence
  Description of Artificial Sequence: Synthetic oligonucleotide
  Sense strand starting at position 1666 of SEQ ID NO: 1561443
cuucuaggccucuaagaag

SEQ ID NO: 1672380 - RNA, 19 nt, Artificial Sequence
  Description of Artificial Sequence: Synthetic oligonucleotide
  Antisense strand to SEQ ID NO: 1672379
cuucuuagaggccuagaag

SEQ ID NO: 1672381 - RNA, 19 nt, Artificial Sequence
  Description of Artificial Sequence: Synthetic oligonucleotide
  Sense strand starting at position 2255 of SEQ ID NO: 1561443
gguaaacgaguuugauaaa

SEQ ID NO: 1672382 - RNA, 19 nt, Artificial Sequence
  Description of Artificial Sequence: Synthetic oligonucleotide
  Antisense strand to SEQ ID NO: 1672381
uuuaucaaacucguuuacc

SEQ ID NO: 1672383 - RNA, 19 nt, Artificial Sequence
  Description of Artificial Sequence: Synthetic oligonucleotide
  Sense strand starting at position 2321 of SEQ ID NO: 1561443
gugacauucccauguacca

SEQ ID NO: 1672384 - RNA, 19 nt, Artificial Sequence
  Description of Artificial Sequence: Synthetic oligonucleotide
  Antisense strand to SEQ ID NO: 1672383
ugguacaugggaaugucac

SEQ ID NO: 1672385 - RNA, 19 nt, Artificial Sequence
  Description of Artificial Sequence: Synthetic oligonucleotide
  Sense strand starting at position 2435 of SEQ ID NO: 1561443
ggagccauucccgggacau

SEQ ID NO: 1672386 - RNA, 19 nt, Artificial Sequence
  Description of Artificial Sequence: Synthetic oligonucleotide
  Antisense strand to SEQ ID NO: 1672385
augucccgggaauggcucc

SEQ ID NO: 1672387 - RNA, 19 nt, Artificial Sequence
  Description of Artificial Sequence: Synthetic oligonucleotide
  Sense strand starting at position 2436 of SEQ ID NO: 1561443
gagccauucccgggacaug

SEQ ID NO: 1672388 - RNA, 19 nt, Artificial Sequence
  Description of Artificial Sequence: Synthetic oligonucleotide
  Antisense strand to SEQ ID NO: 1672387
caugucccgggaauggcuc

SEQ ID NO: 1672389 - RNA, 19 nt, Artificial Sequence
  Description of Artificial Sequence: Synthetic oligonucleotide
  Sense strand starting at position 2804 of SEQ ID NO: 1561443
gugggaauuucuuagaauu

SEQ ID NO: 1672390 - RNA, 19 nt, Artificial Sequence
  Description of Artificial Sequence: Synthetic oligonucleotide
  Antisense strand to SEQ ID NO: 1672389
aauucuaagaaauucccac

SEQ ID NO: 1672391 - RNA, 19 nt, Artificial Sequence
  Description of Artificial Sequence: Synthetic oligonucleotide
  Sense strand starting at position 2806 of SEQ ID NO: 1561443
gggaauuucuuagaauugg

SEQ ID NO: 1672392 - RNA, 19 nt, Artificial Sequence
  Description of Artificial Sequence: Synthetic oligonucleotide
  Antisense strand to SEQ ID NO: 1672391
ccaauucuaagaaauuccc

SEQ ID NO: 1672393 - RNA, 19 nt, Artificial Sequence
  Description of Artificial Sequence: Synthetic oligonucleotide
  Sense strand starting at position 2889 of SEQ ID NO: 1561443
gauuuaauguggcaaugag

SEQ ID NO: 1672394 - RNA, 19 nt, Artificial Sequence
  Description of Artificial Sequence: Synthetic oligonucleotide
  Antisense strand to SEQ ID NO: 1672393
cucauugccacauuaaauc

SEQ ID NO: 1672395 - RNA, 19 nt, Artificial Sequence
  Description of Artificial Sequence: Synthetic oligonucleotide
  Sense strand starting at position 2893 of SEQ ID NO: 1561443
uaauguggcaaugagugua

SEQ ID NO: 1672396 - RNA, 19 nt, Artificial Sequence
  Description of Artificial Sequence: Synthetic oligonucleotide
  Antisense strand to SEQ ID NO: 1672395
uacacucauugccacauua

SEQ ID NO: 1672397 - RNA, 19 nt, Artificial Sequence
  Description of Artificial Sequence: Synthetic oligonucleotide
  Sense strand starting at position 2898 of SEQ ID NO: 1561443
uggcaaugaguguauaauu

SEQ ID NO: 1672398 - RNA, 19 nt, Artificial Sequence
  Description of Artificial Sequence: Synthetic oligonucleotide
  Antisense strand to SEQ ID NO: 1672397
aauuauacacucauugcca

SEQ ID NO: 1672399 - RNA, 19 nt, Artificial Sequence
  Description of Artificial Sequence: Synthetic oligonucleotide
  Sense strand starting at position 2939 of SEQ ID NO: 1561443
caaaucuagcgucauggga

SEQ ID NO: 1672400 - RNA, 19 nt, Artificial Sequence
  Description of Artificial Sequence: Synthetic oligonucleotide
  Antisense strand to SEQ ID NO: 1672399
ucccaugacgcuagauuug

SEQ ID NO: 1672401 - RNA, 19 nt, Artificial Sequence
  Description of Artificial Sequence: Synthetic oligonucleotide
  Sense strand starting at position 3082 of SEQ ID NO: 1561443
guguuucuuuaauuagaga

SEQ ID NO: 1672402 - RNA, 19 nt, Artificial Sequence
  Description of Artificial Sequence: Synthetic oligonucleotide
  Antisense strand to SEQ ID NO: 1672401
ucucuaauuaaagaaacac

SEQ ID NO: 1672403 - RNA, 19 nt, Artificial Sequence
  Description of Artificial Sequence: Synthetic oligonucleotide
  Sense strand starting at position 3101 of SEQ ID NO: 1561443
guggaauaauuauuaggua

SEQ ID NO: 1672404 - RNA, 19 nt, Artificial Sequence
  Description of Artificial Sequence: Synthetic oligonucleotide
  Antisense strand to SEQ ID NO: 1672403
uaccuaauaauuauuccac

SEQ ID NO: 1672405 - RNA, 19 nt, Artificial Sequence
  Description of Artificial Sequence: Synthetic oligonucleotide
  Sense strand starting at position 3180 of SEQ ID NO: 1561443
uggcuuugcccagaagagu

SEQ ID NO: 1672406 - RNA, 19 nt, Artificial Sequence
  Description of Artificial Sequence: Synthetic oligonucleotide
  Antisense strand to SEQ ID NO: 1672405
acucuucugggcaaagcca

SEQ ID NO: 1672407 - RNA, 19 nt, Artificial Sequence
  Description of Artificial Sequence: Synthetic oligonucleotide
  Sense strand starting at position 3207 of SEQ ID NO: 1561443
ugucauccugacugggauu

SEQ ID NO: 1672408 - RNA, 19 nt, Artificial Sequence
  Description of Artificial Sequence: Synthetic oligonucleotide
  Antisense strand to SEQ ID NO: 1672407
aaucccagucaggaugaca

SEQ ID NO: 1672409 - RNA, 19 nt, Artificial Sequence
  Description of Artificial Sequence: Synthetic oligonucleotide
  Sense strand starting at position 3334 of SEQ ID NO: 1561443
gugcuauuccuauaucacu

SEQ ID NO: 1672410 - RNA, 19 nt, Artificial Sequence
  Description of Artificial Sequence: Synthetic oligonucleotide
  Antisense strand to SEQ ID NO: 1672409
agugauauaggaauagcac

SEQ ID NO: 1672411 - RNA, 19 nt, Artificial Sequence
  Description of Artificial Sequence: Synthetic oligonucleotide
  Sense strand starting at position 3342 of SEQ ID NO: 1561443
ccuauaucacugugaguau

SEQ ID NO: 1672412 - RNA, 19 nt, Artificial Sequence
  Description of Artificial Sequence: Synthetic oligonucleotide
  Antisense strand to SEQ ID NO: 1672411
auacucacagugauauagg

SEQ ID NO: 1672413 - RNA, 19 nt, Artificial Sequence
  Description of Artificial Sequence: Synthetic oligonucleotide
  Sense strand starting at position 3345 of SEQ ID NO: 1561443
auaucacugugaguauaaa

SEQ ID NO: 1672414 - RNA, 19 nt, Artificial Sequence
  Description of Artificial Sequence: Synthetic oligonucleotide
  Antisense strand to SEQ ID NO: 1672413
uuuauacucacagugauau

SEQ ID NO: 1672415 - RNA, 19 nt, Artificial Sequence
  Description of Artificial Sequence: Synthetic oligonucleotide
  Sense strand starting at position 3413 of SEQ ID NO: 1561443
ugcagugguccuuaaagaa

SEQ ID NO: 1672416 - RNA, 19 nt, Artificial Sequence
  Description of Artificial Sequence: Synthetic oligonucleotide
  Antisense strand to SEQ ID NO: 1672415
uucuuuaaggaccacugca

SEQ ID NO: 1672417 - RNA, 19 nt, Artificial Sequence
  Description of Artificial Sequence: Synthetic oligonucleotide
  Sense strand starting at position 3715 of SEQ ID NO: 1561443
cuguuaaaguauuccuaca

SEQ ID NO: 1672418 - RNA, 19 nt, Artificial Sequence
  Description of Artificial Sequence: Synthetic oligonucleotide
  Antisense strand to SEQ ID NO: 1672417
uguaggaauacuuuaacag

SEQ ID NO: 1672419 - RNA, 19 nt, Artificial Sequence
  Description of Artificial Sequence: Synthetic oligonucleotide
  Sense strand starting at position 3717 of SEQ ID NO: 1561443
guuaaaguauuccuacauc

SEQ ID NO: 1672420 - RNA, 19 nt, Artificial Sequence
  Description of Artificial Sequence: Synthetic oligonucleotide
  Antisense strand to SEQ ID NO: 1672419
gauguaggaauacuuuaac

SEQ ID NO: 1672421 - RNA, 19 nt, Artificial Sequence
  Description of Artificial Sequence: Synthetic oligonucleotide
  Sense strand starting at position 3852 of SEQ ID NO: 1561443
cgugguuuacaauaacaac

SEQ ID NO: 1672422 - RNA, 19 nt, Artificial Sequence
  Description of Artificial Sequence: Synthetic oligonucleotide
  Antisense strand to SEQ ID NO: 1672421
guuguuauuguaaaccacg

SEQ ID NO: 1672423 - RNA, 19 nt, Artificial Sequence
  Description of Artificial Sequence: Synthetic oligonucleotide
  Sense strand starting at position 3878 of SEQ ID NO: 1561443
ccuuaauugugguugauag

SEQ ID NO: 1672424 - RNA, 19 nt, Artificial Sequence
  Description of Artificial Sequence: Synthetic oligonucleotide
  Antisense strand to SEQ ID NO: 1672423
cuaucaaccacaauuaagg

SEQ ID NO: 1672425 - RNA, 19 nt, Artificial Sequence
  Description of Artificial Sequence: Synthetic oligonucleotide
  Sense strand starting at position 83 of SEQ ID NO: 1561444
ccuggucagucugcagaga

SEQ ID NO: 1672426 - RNA, 19 nt, Artificial Sequence
  Description of Artificial Sequence: Synthetic oligonucleotide
  Antisense strand to SEQ ID NO: 1672425
ucucugcagacugaccagg

SEQ ID NO: 1672427 - RNA, 19 nt, Artificial Sequence
  Description of Artificial Sequence: Synthetic oligonucleotide
  Sense strand starting at position 177 of SEQ ID NO: 1561444
cugagaagccuuggccaca

SEQ ID NO: 1672428 - RNA, 19 nt, Artificial Sequence
  Description of Artificial Sequence: Synthetic oligonucleotide
  Antisense strand to SEQ ID NO: 1672427
uguggccaaggcuucucag

SEQ ID NO: 1672429 - RNA, 19 nt, Artificial Sequence
  Description of Artificial Sequence: Synthetic oligonucleotide
  Sense strand starting at position 178 of SEQ ID NO: 1561444
ugagaagccuuggccacau

SEQ ID NO: 1672430 - RNA, 19 nt, Artificial Sequence
  Description of Artificial Sequence: Synthetic oligonucleotide
  Antisense strand to SEQ ID NO: 1672429
auguggccaaggcuucuca

SEQ ID NO: 1672431 - RNA, 19 nt, Artificial Sequence
  Description of Artificial Sequence: Synthetic oligonucleotide
  Sense strand starting at position 189 of SEQ ID NO: 1561444
ggccacaugcuagaucaua

SEQ ID NO: 1672432 - RNA, 19 nt, Artificial Sequence
  Description of Artificial Sequence: Synthetic oligonucleotide
  Antisense strand to SEQ ID NO: 1672431
uaugaucuagcauguggcc

SEQ ID NO: 1672433 - RNA, 19 nt, Artificial Sequence
  Description of Artificial Sequence: Synthetic oligonucleotide
  Sense strand starting at position 197 of SEQ ID NO: 1561444
gcuagaucauaaucucugu

SEQ ID NO: 1672434 - RNA, 19 nt, Artificial Sequence
  Description of Artificial Sequence: Synthetic oligonucleotide
  Antisense strand to SEQ ID NO: 1672433
acagagauuaugaucuagc

SEQ ID NO: 1672435 - RNA, 19 nt, Artificial Sequence
  Description of Artificial Sequence: Synthetic oligonucleotide
  Sense strand starting at position 201 of SEQ ID NO: 1561444
gaucauaaucucuguacga

SEQ ID NO: 1672436 - RNA, 19 nt, Artificial Sequence
  Description of Artificial Sequence: Synthetic oligonucleotide
  Antisense strand to SEQ ID NO: 1672435
ucguacagagauuaugauc

SEQ ID NO: 1672437 - RNA, 19 nt, Artificial Sequence
  Description of Artificial Sequence: Synthetic oligonucleotide
  Sense strand starting at position 202 of SEQ ID NO: 1561444
aucauaaucucuguacgac

SEQ ID NO: 1672438 - RNA, 19 nt, Artificial Sequence
  Description of Artificial Sequence: Synthetic oligonucleotide
  Antisense strand to SEQ ID NO: 1672437
gucguacagagauuaugau

SEQ ID NO: 1672439 - RNA, 19 nt, Artificial Sequence
  Description of Artificial Sequence: Synthetic oligonucleotide
  Sense strand starting at position 288 of SEQ ID NO: 1561444
gagaccuguccuugaccuu

SEQ ID NO: 1672440 - RNA, 19 nt, Artificial Sequence
  Description of Artificial Sequence: Synthetic oligonucleotide
  Antisense strand to SEQ ID NO: 1672439
aaggucaaggacaggucuc

SEQ ID NO: 1672441 - RNA, 19 nt, Artificial Sequence
  Description of Artificial Sequence: Synthetic oligonucleotide
  Sense strand starting at position 327 of SEQ ID NO: 1561444
cuauuauuaucauugugag

SEQ ID NO: 1672442 - RNA, 19 nt, Artificial Sequence
  Description of Artificial Sequence: Synthetic oligonucleotide
  Antisense strand to SEQ ID NO: 1672441
cucacaaugauaauaauag

SEQ ID NO: 1672443 - RNA, 19 nt, Artificial Sequence
  Description of Artificial Sequence: Synthetic oligonucleotide
  Sense strand starting at position 496 of SEQ ID NO: 1561444
auacucuuagcaggucaaa

SEQ ID NO: 1672444 - RNA, 19 nt, Artificial Sequence
  Description of Artificial Sequence: Synthetic oligonucleotide
  Antisense strand to SEQ ID NO: 1672443
uuugaccugcuaagaguau

SEQ ID NO: 1672445 - RNA, 19 nt, Artificial Sequence
  Description of Artificial Sequence: Synthetic oligonucleotide
  Sense strand starting at position 912 of SEQ ID NO: 1561444
ucaacuucucagggaacca

SEQ ID NO: 1672446 - RNA, 19 nt, Artificial Sequence
  Description of Artificial Sequence: Synthetic oligonucleotide
  Antisense strand to SEQ ID NO: 1672445
ugguucccugagaaguuga

SEQ ID NO: 1672447 - RNA, 19 nt, Artificial Sequence
  Description of Artificial Sequence: Synthetic oligonucleotide
  Sense strand starting at position 924 of SEQ ID NO: 1561444
ggaaccauuccgggucuga

SEQ ID NO: 1672448 - RNA, 19 nt, Artificial Sequence
  Description of Artificial Sequence: Synthetic oligonucleotide
  Antisense strand to SEQ ID NO: 1672447
ucagacccggaaugguucc

SEQ ID NO: 1672449 - RNA, 19 nt, Artificial Sequence
  Description of Artificial Sequence: Synthetic oligonucleotide
  Sense strand starting at position 982 of SEQ ID NO: 1561444
aauuguagguuccugaacu

SEQ ID NO: 1672450 - RNA, 19 nt, Artificial Sequence
  Description of Artificial Sequence: Synthetic oligonucleotide
  Antisense strand to SEQ ID NO: 1672449
aguucaggaaccuacaauu

SEQ ID NO: 1672451 - RNA, 19 nt, Artificial Sequence
  Description of Artificial Sequence: Synthetic oligonucleotide
  Sense strand starting at position 1035 of SEQ ID NO: 1561444
guaacuuugccuuggacaa

SEQ ID NO: 1672452 - RNA, 19 nt, Artificial Sequence
  Description of Artificial Sequence: Synthetic oligonucleotide
  Antisense strand to SEQ ID NO: 1672451
uuguccaaggcaaaguuac

SEQ ID NO: 1672453 - RNA, 19 nt, Artificial Sequence
  Description of Artificial Sequence: Synthetic oligonucleotide
  Sense strand starting at position 1107 of SEQ ID NO: 1561444
gacuuaagacucugggcuu

SEQ ID NO: 1672454 - RNA, 19 nt, Artificial Sequence
  Description of Artificial Sequence: Synthetic oligonucleotide
  Antisense strand to SEQ ID NO: 1672453
aagcccagagucuuaaguc

SEQ ID NO: 1672455 - RNA, 19 nt, Artificial Sequence
  Description of Artificial Sequence: Synthetic oligonucleotide
  Sense strand starting at position 1114 of SEQ ID NO: 1561444
gacucugggcuuuguauuu

SEQ ID NO: 1672456 - RNA, 19 nt, Artificial Sequence
  Description of Artificial Sequence: Synthetic oligonucleotide
  Antisense strand to SEQ ID NO: 1672455
aaauacaaagcccagaguc

SEQ ID NO: 1672457 - RNA, 19 nt, Artificial Sequence
  Description of Artificial Sequence: Synthetic oligonucleotide
  Sense strand starting at position 1120 of SEQ ID NO: 1561444
gggcuuuguauuugcucaa

SEQ ID NO: 1672458 - RNA, 19 nt, Artificial Sequence
  Description of Artificial Sequence: Synthetic oligonucleotide
  Antisense strand to SEQ ID NO: 1672457
uugagcaaauacaaagccc

SEQ ID NO: 1672459 - RNA, 19 nt, Artificial Sequence
  Description of Artificial Sequence: Synthetic oligonucleotide
  Sense strand starting at position 1121 of SEQ ID NO: 1561444
ggcuuuguauuugcucaaa

SEQ ID NO: 1672460 - RNA, 19 nt, Artificial Sequence
  Description of Artificial Sequence: Synthetic oligonucleotide
  Antisense strand to SEQ ID NO: 1672459
uuugagcaaauacaaagcc

SEQ ID NO: 1672461 - RNA, 19 nt, Artificial Sequence
  Description of Artificial Sequence: Synthetic oligonucleotide
  Sense strand starting at position 1123 of SEQ ID NO: 1561444
cuuuguauuugcucaaagu

SEQ ID NO: 1672462 - RNA, 19 nt, Artificial Sequence
  Description of Artificial Sequence: Synthetic oligonucleotide
  Antisense strand to SEQ ID NO: 1672461
acuuugagcaaauacaaag

SEQ ID NO: 1672463 - RNA, 19 nt, Artificial Sequence
  Description of Artificial Sequence: Synthetic oligonucleotide
  Sense strand starting at position 1248 of SEQ ID NO: 1561444
guucucagugcugacuuua

SEQ ID NO: 1672464 - RNA, 19 nt, Artificial Sequence
  Description of Artificial Sequence: Synthetic oligonucleotide
  Antisense strand to SEQ ID NO: 1672463
uaaagucagcacugagaac

SEQ ID NO: 1672465 - RNA, 19 nt, Artificial Sequence
  Description of Artificial Sequence: Synthetic oligonucleotide
  Sense strand starting at position 1558 of SEQ ID NO: 1561444
cgucacauuuccguacaca

SEQ ID NO: 1672466 - RNA, 19 nt, Artificial Sequence
  Description of Artificial Sequence: Synthetic oligonucleotide
  Antisense strand to SEQ ID NO: 1672465
uguguacggaaaugugacg

SEQ ID NO: 1672467 - RNA, 19 nt, Artificial Sequence
  Description of Artificial Sequence: Synthetic oligonucleotide
  Sense strand starting at position 2067 of SEQ ID NO: 1561444
gcgcucugcacucuggaua

SEQ ID NO: 1672468 - RNA, 19 nt, Artificial Sequence
  Description of Artificial Sequence: Synthetic oligonucleotide
  Antisense strand to SEQ ID NO: 1672467
uauccagagugcagagcgc

SEQ ID NO: 1672469 - RNA, 19 nt, Artificial Sequence
  Description of Artificial Sequence: Synthetic oligonucleotide
  Sense strand starting at position 2072 of SEQ ID NO: 1561444
cugcacucuggauaaugua

SEQ ID NO: 1672470 - RNA, 19 nt, Artificial Sequence
  Description of Artificial Sequence: Synthetic oligonucleotide
  Antisense strand to SEQ ID NO: 1672469
uacauuauccagagugcag

SEQ ID NO: 1672471 - RNA, 19 nt, Artificial Sequence
  Description of Artificial Sequence: Synthetic oligonucleotide
  Sense strand starting at position 2080 of SEQ ID NO: 1561444
uggauaauguaguuuccaa

SEQ ID NO: 1672472 - RNA, 19 nt, Artificial Sequence
  Description of Artificial Sequence: Synthetic oligonucleotide
  Antisense strand to SEQ ID NO: 1672471
uuggaaacuacauuaucca

SEQ ID NO: 1672473 - RNA, 19 nt, Artificial Sequence
  Description of Artificial Sequence: Synthetic oligonucleotide
  Sense strand starting at position 2107 of SEQ ID NO: 1561444
ggagcucuucggagugugu

SEQ ID NO: 1672474 - RNA, 19 nt, Artificial Sequence
  Description of Artificial Sequence: Synthetic oligonucleotide
  Antisense strand to SEQ ID NO: 1672473
acacacuccgaagagcucc

SEQ ID NO: 1672475 - RNA, 19 nt, Artificial Sequence
  Description of Artificial Sequence: Synthetic oligonucleotide
  Sense strand starting at position 2240 of SEQ ID NO: 1561444
uucccagauuucugggaag

SEQ ID NO: 1672476 - RNA, 19 nt, Artificial Sequence
  Description of Artificial Sequence: Synthetic oligonucleotide
  Antisense strand to SEQ ID NO: 1672475
cuucccagaaaucugggaa

SEQ ID NO: 1672477 - RNA, 19 nt, Artificial Sequence
  Description of Artificial Sequence: Synthetic oligonucleotide
  Sense strand starting at position 2243 of SEQ ID NO: 1561444
ccagauuucugggaagugu

SEQ ID NO: 1672478 - RNA, 19 nt, Artificial Sequence
  Description of Artificial Sequence: Synthetic oligonucleotide
  Antisense strand to SEQ ID NO: 1672477
acacuucccagaaaucugg

SEQ ID NO: 1672479 - RNA, 19 nt, Artificial Sequence
  Description of Artificial Sequence: Synthetic oligonucleotide
  Sense strand starting at position 2263 of SEQ ID NO: 1561444
uuccguaacugaucacuua

SEQ ID NO: 1672480 - RNA, 19 nt, Artificial Sequence
  Description of Artificial Sequence: Synthetic oligonucleotide
  Antisense strand to SEQ ID NO: 1672479
uaagugaucaguuacggaa

SEQ ID NO: 1672481 - RNA, 19 nt, Artificial Sequence
  Description of Artificial Sequence: Synthetic oligonucleotide
  Sense strand starting at position 2264 of SEQ ID NO: 1561444
uccguaacugaucacuuaa

SEQ ID NO: 1672482 - RNA, 19 nt, Artificial Sequence
  Description of Artificial Sequence: Synthetic oligonucleotide
  Antisense strand to SEQ ID NO: 1672481
uuaagugaucaguuacgga

SEQ ID NO: 1672483 - RNA, 19 nt, Artificial Sequence
  Description of Artificial Sequence: Synthetic oligonucleotide
  Sense strand starting at position 2266 of SEQ ID NO: 1561444
cguaacugaucacuuaagu

SEQ ID NO: 1672484 - RNA, 19 nt, Artificial Sequence
  Description of Artificial Sequence: Synthetic oligonucleotide
  Antisense strand to SEQ ID NO: 1672483
acuuaagugaucaguuacg

SEQ ID NO: 1672485 - RNA, 19 nt, Artificial Sequence
  Description of Artificial Sequence: Synthetic oligonucleotide
  Sense strand starting at position 2271 of SEQ ID NO: 1561444
cugaucacuuaaguguuua

SEQ ID NO: 1672486 - RNA, 19 nt, Artificial Sequence
  Description of Artificial Sequence: Synthetic oligonucleotide
  Antisense strand to SEQ ID NO: 1672485
uaaacacuuaagugaucag

SEQ ID NO: 1672487 - RNA, 19 nt, Artificial Sequence
  Description of Artificial Sequence: Synthetic oligonucleotide
  Sense strand starting at position 2275 of SEQ ID NO: 1561444
ucacuuaaguguuuagaga

SEQ ID NO: 1672488 - RNA, 19 nt, Artificial Sequence
  Description of Artificial Sequence: Synthetic oligonucleotide
  Antisense strand to SEQ ID NO: 1672487
ucucuaaacacuuaaguga

SEQ ID NO: 1672489 - RNA, 19 nt, Artificial Sequence
  Description of Artificial Sequence: Synthetic oligonucleotide
  Sense strand starting at position 2276 of SEQ ID NO: 1561444
cacuuaaguguuuagagac

SEQ ID NO: 1672490 - RNA, 19 nt, Artificial Sequence
  Description of Artificial Sequence: Synthetic oligonucleotide
  Antisense strand to SEQ ID NO: 1672489
gucucuaaacacuuaagug

SEQ ID NO: 1672491 - RNA, 19 nt, Artificial Sequence
  Description of Artificial Sequence: Synthetic oligonucleotide
  Sense strand starting at position 2932 of SEQ ID NO: 1561444
gaagucuaauuggucuauu

SEQ ID NO: 1672492 - RNA, 19 nt, Artificial Sequence
  Description of Artificial Sequence: Synthetic oligonucleotide
  Antisense strand to SEQ ID NO: 1672491
aauagaccaauuagacuuc

SEQ ID NO: 1672493 - RNA, 19 nt, Artificial Sequence
  Description of Artificial Sequence: Synthetic oligonucleotide
  Sense strand starting at position 3057 of SEQ ID NO: 1561444
gggucuuauguuuagguuu

SEQ ID NO: 1672494 - RNA, 19 nt, Artificial Sequence
  Description of Artificial Sequence: Synthetic oligonucleotide
  Antisense strand to SEQ ID NO: 1672493
aaaccuaaacauaagaccc

SEQ ID NO: 1672495 - RNA, 19 nt, Artificial Sequence
  Description of Artificial Sequence: Synthetic oligonucleotide
  Sense strand starting at position 3205 of SEQ ID NO: 1561444
uugguagccuuguugagau

SEQ ID NO: 1672496 - RNA, 19 nt, Artificial Sequence
  Description of Artificial Sequence: Synthetic oligonucleotide
  Antisense strand to SEQ ID NO: 1672495
aucucaacaaggcuaccaa

SEQ ID NO: 1672497 - RNA, 19 nt, Artificial Sequence
  Description of Artificial Sequence: Synthetic oligonucleotide
  Sense strand starting at position 3207 of SEQ ID NO: 1561444
gguagccuuguugagauca

SEQ ID NO: 1672498 - RNA, 19 nt, Artificial Sequence
  Description of Artificial Sequence: Synthetic oligonucleotide
  Antisense strand to SEQ ID NO: 1672497
ugaucucaacaaggcuacc

SEQ ID NO: 1672499 - RNA, 19 nt, Artificial Sequence
  Description of Artificial Sequence: Synthetic oligonucleotide
  Sense strand starting at position 3217 of SEQ ID NO: 1561444
uugagaucauuugaccaua

SEQ ID NO: 1672500 - RNA, 19 nt, Artificial Sequence
  Description of Artificial Sequence: Synthetic oligonucleotide
  Antisense strand to SEQ ID NO: 1672499
uauggucaaaugaucucaa

SEQ ID NO: 1672501 - RNA, 19 nt, Artificial Sequence
  Description of Artificial Sequence: Synthetic oligonucleotide
  Sense strand starting at position 3332 of SEQ ID NO: 1561444
uuugcauguugacuuugaa

SEQ ID NO: 1672502 - RNA, 19 nt, Artificial Sequence
  Description of Artificial Sequence: Synthetic oligonucleotide
  Antisense strand to SEQ ID NO: 1672501
uucaaagucaacaugcaaa

SEQ ID NO: 1672503 - RNA, 19 nt, Artificial Sequence
  Description of Artificial Sequence: Synthetic oligonucleotide
  Sense strand starting at position 3335 of SEQ ID NO: 1561444
gcauguugacuuugaauuc

SEQ ID NO: 1672504 - RNA, 19 nt, Artificial Sequence
  Description of Artificial Sequence: Synthetic oligonucleotide
  Antisense strand to SEQ ID NO: 1672503
gaauucaaagucaacaugc

SEQ ID NO: 1672505 - RNA, 19 nt, Artificial Sequence
  Description of Artificial Sequence: Synthetic oligonucleotide
  Sense strand starting at position 2 of SEQ ID NO: 1561445
cuauguaggcagugacaau

SEQ ID NO: 1672506 - RNA, 19 nt, Artificial Sequence
  Description of Artificial Sequence: Synthetic oligonucleotide
  Antisense strand to SEQ ID NO: 1672505
auugucacugccuacauag

SEQ ID NO: 1672507 - RNA, 19 nt, Artificial Sequence
  Description of Artificial Sequence: Synthetic oligonucleotide
  Sense strand starting at position 147 of SEQ ID NO: 1561445
cauuaaguugccuguaaga

SEQ ID NO: 1672508 - RNA, 19 nt, Artificial Sequence
  Description of Artificial Sequence: Synthetic oligonucleotide
  Antisense strand to SEQ ID NO: 1672507
ucuuacaggcaacuuaaug

SEQ ID NO: 1672509 - RNA, 19 nt, Artificial Sequence
  Description of Artificial Sequence: Synthetic oligonucleotide
  Sense strand starting at position 149 of SEQ ID NO: 1561445
uuaaguugccuguaagacu

SEQ ID NO: 1672510 - RNA, 19 nt, Artificial Sequence
  Description of Artificial Sequence: Synthetic oligonucleotide
  Antisense strand to SEQ ID NO: 1672509
agucuuacaggcaacuuaa

SEQ ID NO: 1672511 - RNA, 19 nt, Artificial Sequence
  Description of Artificial Sequence: Synthetic oligonucleotide
  Sense strand starting at position 174 of SEQ ID NO: 1561445
ucugaauucuucccuggga

SEQ ID NO: 1672512 - RNA, 19 nt, Artificial Sequence
  Description of Artificial Sequence: Synthetic oligonucleotide
  Antisense strand to SEQ ID NO: 1672511
ucccagggaagaauucaga

SEQ ID NO: 1672513 - RNA, 19 nt, Artificial Sequence
  Description of Artificial Sequence: Synthetic oligonucleotide
  Sense strand starting at position 177 of SEQ ID NO: 1561445
gaauucuucccugggagcu

SEQ ID NO: 1672514 - RNA, 19 nt, Artificial Sequence
  Description of Artificial Sequence: Synthetic oligonucleotide
  Antisense strand to SEQ ID NO: 1672513
agcucccagggaagaauuc

SEQ ID NO: 1672515 - RNA, 19 nt, Artificial Sequence
  Description of Artificial Sequence: Synthetic oligonucleotide
  Sense strand starting at position 302 of SEQ ID NO: 1561445
gagaaagucuugccaauag

SEQ ID NO: 1672516 - RNA, 19 nt, Artificial Sequence
  Description of Artificial Sequence: Synthetic oligonucleotide
  Antisense strand to SEQ ID NO: 1672515
cuauuggcaagacuuucuc

SEQ ID NO: 1672517 - RNA, 19 nt, Artificial Sequence
  Description of Artificial Sequence: Synthetic oligonucleotide
  Sense strand starting at position 456 of SEQ ID NO: 1561445
uccauuccuccuggguaaa

SEQ ID NO: 1672518 - RNA, 19 nt, Artificial Sequence
  Description of Artificial Sequence: Synthetic oligonucleotide
  Antisense strand to SEQ ID NO: 1672517
uuuacccaggaggaaugga

SEQ ID NO: 1672519 - RNA, 19 nt, Artificial Sequence
  Description of Artificial Sequence: Synthetic oligonucleotide
  Sense strand starting at position 457 of SEQ ID NO: 1561445
ccauuccuccuggguaaau

SEQ ID NO: 1672520 - RNA, 19 nt, Artificial Sequence
  Description of Artificial Sequence: Synthetic oligonucleotide
  Antisense strand to SEQ ID NO: 1672519
auuuacccaggaggaaugg

SEQ ID NO: 1672521 - RNA, 19 nt, Artificial Sequence
  Description of Artificial Sequence: Synthetic oligonucleotide
  Sense strand starting at position 697 of SEQ ID NO: 1561445
guggcugugauauaagagu

SEQ ID NO: 1672522 - RNA, 19 nt, Artificial Sequence
  Description of Artificial Sequence: Synthetic oligonucleotide
  Antisense strand to SEQ ID NO: 1672521
acucuuauaucacagccac

SEQ ID NO: 1672523 - RNA, 19 nt, Artificial Sequence
  Description of Artificial Sequence: Synthetic oligonucleotide
  Sense strand starting at position 741 of SEQ ID NO: 1561445
ccuaguauggccgagguca

SEQ ID NO: 1672524 - RNA, 19 nt, Artificial Sequence
  Description of Artificial Sequence: Synthetic oligonucleotide
  Antisense strand to SEQ ID NO: 1672523
ugaccucggccauacuagg

SEQ ID NO: 1672525 - RNA, 19 nt, Artificial Sequence
  Description of Artificial Sequence: Synthetic oligonucleotide
  Sense strand starting at position 934 of SEQ ID NO: 1561445
gagucugcugccucaguuu

SEQ ID NO: 1672526 - RNA, 19 nt, Artificial Sequence
  Description of Artificial Sequence: Synthetic oligonucleotide
  Antisense strand to SEQ ID NO: 1672525
aaacugaggcagcagacuc

SEQ ID NO: 1672527 - RNA, 19 nt, Artificial Sequence
  Description of Artificial Sequence: Synthetic oligonucleotide
  Sense strand starting at position 1180 of SEQ ID NO: 1561445
ggaagaggcugacuuuaca

SEQ ID NO: 1672528 - RNA, 19 nt, Artificial Sequence
  Description of Artificial Sequence: Synthetic oligonucleotide
  Antisense strand to SEQ ID NO: 1672527
uguaaagucagccucuucc

SEQ ID NO: 1672529 - RNA, 19 nt, Artificial Sequence
  Description of Artificial Sequence: Synthetic oligonucleotide
  Sense strand starting at position 1196 of SEQ ID NO: 1561445
acaggacugugucccugau

SEQ ID NO: 1672530 - RNA, 19 nt, Artificial Sequence
  Description of Artificial Sequence: Synthetic oligonucleotide
  Antisense strand to SEQ ID NO: 1672529
aucagggacacaguccugu

SEQ ID NO: 1672531 - RNA, 19 nt, Artificial Sequence
  Description of Artificial Sequence: Synthetic oligonucleotide
  Sense strand starting at position 1200 of SEQ ID NO: 1561445
gacugugucccugauagga

SEQ ID NO: 1672532 - RNA, 19 nt, Artificial Sequence
  Description of Artificial Sequence: Synthetic oligonucleotide
  Antisense strand to SEQ ID NO: 1672531
uccuaucagggacacaguc

SEQ ID NO: 1672533 - RNA, 19 nt, Artificial Sequence
  Description of Artificial Sequence: Synthetic oligonucleotide
  Sense strand starting at position 1209 of SEQ ID NO: 1561445
ccugauaggaucugguaag

SEQ ID NO: 1672534 - RNA, 19 nt, Artificial Sequence
  Description of Artificial Sequence: Synthetic oligonucleotide
  Antisense strand to SEQ ID NO: 1672533
cuuaccagauccuaucagg

SEQ ID NO: 1672535 - RNA, 19 nt, Artificial Sequence
  Description of Artificial Sequence: Synthetic oligonucleotide
  Sense strand starting at position 1263 of SEQ ID NO: 1561445
ccaggugaccuuggacuau

SEQ ID NO: 1672536 - RNA, 19 nt, Artificial Sequence
  Description of Artificial Sequence: Synthetic oligonucleotide
  Antisense strand to SEQ ID NO: 1672535
auaguccaaggucaccugg

SEQ ID NO: 1672537 - RNA, 19 nt, Artificial Sequence
  Description of Artificial Sequence: Synthetic oligonucleotide
  Sense strand starting at position 1433 of SEQ ID NO: 1561445
gucccuucuuucuuggaaa

SEQ ID NO: 1672538 - RNA, 19 nt, Artificial Sequence
  Description of Artificial Sequence: Synthetic oligonucleotide
  Antisense strand to SEQ ID NO: 1672537
uuuccaagaaagaagggac

SEQ ID NO: 1672539 - RNA, 19 nt, Artificial Sequence
  Description of Artificial Sequence: Synthetic oligonucleotide
  Sense strand starting at position 1466 of SEQ ID NO: 1561445
guguccucgcaaugauuuc

SEQ ID NO: 1672540 - RNA, 19 nt, Artificial Sequence
  Description of Artificial Sequence: Synthetic oligonucleotide
  Antisense strand to SEQ ID NO: 1672539
gaaaucauugcgaggacac

SEQ ID NO: 1672541 - RNA, 19 nt, Artificial Sequence
  Description of Artificial Sequence: Synthetic oligonucleotide
  Sense strand starting at position 1739 of SEQ ID NO: 1561445
ugcuuuaggacuuguguga

SEQ ID NO: 1672542 - RNA, 19 nt, Artificial Sequence
  Description of Artificial Sequence: Synthetic oligonucleotide
  Antisense strand to SEQ ID NO: 1672541
ucacacaaguccuaaagca

SEQ ID NO: 1672543 - RNA, 19 nt, Artificial Sequence
  Description of Artificial Sequence: Synthetic oligonucleotide
  Sense strand starting at position 1743 of SEQ ID NO: 1561445
uuaggacuugugugacuag

SEQ ID NO: 1672544 - RNA, 19 nt, Artificial Sequence
  Description of Artificial Sequence: Synthetic oligonucleotide
  Antisense strand to SEQ ID NO: 1672543
cuagucacacaaguccuaa

SEQ ID NO: 1672545 - RNA, 19 nt, Artificial Sequence
  Description of Artificial Sequence: Synthetic oligonucleotide
  Sense strand starting at position 1746 of SEQ ID NO: 1561445
ggacuugugugacuaggag

SEQ ID NO: 1672546 - RNA, 19 nt, Artificial Sequence
  Description of Artificial Sequence: Synthetic oligonucleotide
  Antisense strand to SEQ ID NO: 1672545
cuccuagucacacaagucc

SEQ ID NO: 1672547 - RNA, 19 nt, Artificial Sequence
  Description of Artificial Sequence: Synthetic oligonucleotide
  Sense strand starting at position 1972 of SEQ ID NO: 1561445
cccuaacgccaauggaaau

SEQ ID NO: 1672548 - RNA, 19 nt, Artificial Sequence
  Description of Artificial Sequence: Synthetic oligonucleotide
  Antisense strand to SEQ ID NO: 1672547
auuuccauuggcguuaggg

SEQ ID NO: 1672549 - RNA, 19 nt, Artificial Sequence
  Description of Artificial Sequence: Synthetic oligonucleotide
  Sense strand starting at position 1982 of SEQ ID NO: 1561445
aauggaaauggucgcuacu

SEQ ID NO: 1672550 - RNA, 19 nt, Artificial Sequence
  Description of Artificial Sequence: Synthetic oligonucleotide
  Antisense strand to SEQ ID NO: 1672549
aguagcgaccauuuccauu

SEQ ID NO: 1672551 - RNA, 19 nt, Artificial Sequence
  Description of Artificial Sequence: Synthetic oligonucleotide
  Sense strand starting at position 1984 of SEQ ID NO: 1561445
uggaaauggucgcuacuaa

SEQ ID NO: 1672552 - RNA, 19 nt, Artificial Sequence
  Description of Artificial Sequence: Synthetic oligonucleotide
  Antisense strand to SEQ ID NO: 1672551
uuaguagcgaccauuucca

SEQ ID NO: 1672553 - RNA, 19 nt, Artificial Sequence
  Description of Artificial Sequence: Synthetic oligonucleotide
  Sense strand starting at position 1985 of SEQ ID NO: 1561445
ggaaauggucgcuacuaaa

SEQ ID NO: 1672554 - RNA, 19 nt, Artificial Sequence
  Description of Artificial Sequence: Synthetic oligonucleotide
  Antisense strand to SEQ ID NO: 1672553
uuuaguagcgaccauuucc

SEQ ID NO: 1672555 - RNA, 19 nt, Artificial Sequence
  Description of Artificial Sequence: Synthetic oligonucleotide
  Sense strand starting at position 2084 of SEQ ID NO: 1561445
ugucauuugacgcagagcu

SEQ ID NO: 1672556 - RNA, 19 nt, Artificial Sequence
  Description of Artificial Sequence: Synthetic oligonucleotide
  Antisense strand to SEQ ID NO: 1672555
agcucugcgucaaaugaca

SEQ ID NO: 1672557 - RNA, 19 nt, Artificial Sequence
  Description of Artificial Sequence: Synthetic oligonucleotide
  Sense strand starting at position 2110 of SEQ ID NO: 1561445
uaauguaguuucccagguu

SEQ ID NO: 1672558 - RNA, 19 nt, Artificial Sequence
  Description of Artificial Sequence: Synthetic oligonucleotide
  Antisense strand to SEQ ID NO: 1672557
aaccugggaaacuacauua

SEQ ID NO: 1672559 - RNA, 19 nt, Artificial Sequence
  Description of Artificial Sequence: Synthetic oligonucleotide
  Sense strand starting at position 2362 of SEQ ID NO: 1561445
agaaauguuaauuaagcgu

SEQ ID NO: 1672560 - RNA, 19 nt, Artificial Sequence
  Description of Artificial Sequence: Synthetic oligonucleotide
  Antisense strand to SEQ ID NO: 1672559
acgcuuaauuaacauuucu

SEQ ID NO: 1672561 - RNA, 19 nt, Artificial Sequence
  Description of Artificial Sequence: Synthetic oligonucleotide
  Sense strand starting at position 2500 of SEQ ID NO: 1561445
aacccugggccugguuaaa

SEQ ID NO: 1672562 - RNA, 19 nt, Artificial Sequence
  Description of Artificial Sequence: Synthetic oligonucleotide
  Antisense strand to SEQ ID NO: 1672561
uuuaaccaggcccaggguu

SEQ ID NO: 1672563 - RNA, 19 nt, Artificial Sequence
  Description of Artificial Sequence: Synthetic oligonucleotide
  Sense strand starting at position 2530 of SEQ ID NO: 1561445
gaccaaaccgguuauguua

SEQ ID NO: 1672564 - RNA, 19 nt, Artificial Sequence
  Description of Artificial Sequence: Synthetic oligonucleotide
  Antisense strand to SEQ ID NO: 1672563
uaacauaaccgguuugguc

SEQ ID NO: 1672565 - RNA, 19 nt, Artificial Sequence
  Description of Artificial Sequence: Synthetic oligonucleotide
  Sense strand starting at position 2736 of SEQ ID NO: 1561445
ggagcuugguaguuggaga

SEQ ID NO: 1672566 - RNA, 19 nt, Artificial Sequence
  Description of Artificial Sequence: Synthetic oligonucleotide
  Antisense strand to SEQ ID NO: 1672565
ucuccaacuaccaagcucc

SEQ ID NO: 1672567 - RNA, 19 nt, Artificial Sequence
  Description of Artificial Sequence: Synthetic oligonucleotide
  Sense strand starting at position 2737 of SEQ ID NO: 1561445
gagcuugguaguuggagau

SEQ ID NO: 1672568 - RNA, 19 nt, Artificial Sequence
  Description of Artificial Sequence: Synthetic oligonucleotide
  Antisense strand to SEQ ID NO: 1672567
aucuccaacuaccaagcuc

SEQ ID NO: 1672569 - RNA, 19 nt, Artificial Sequence
  Description of Artificial Sequence: Synthetic oligonucleotide
  Sense strand starting at position 2741 of SEQ ID NO: 1561445
uugguaguuggagauguga

SEQ ID NO: 1672570 - RNA, 19 nt, Artificial Sequence
  Description of Artificial Sequence: Synthetic oligonucleotide
  Antisense strand to SEQ ID NO: 1672569
ucacaucuccaacuaccaa

SEQ ID NO: 1672571 - RNA, 19 nt, Artificial Sequence
  Description of Artificial Sequence: Synthetic oligonucleotide
  Sense strand starting at position 2743 of SEQ ID NO: 1561445
gguaguuggagaugugagu

SEQ ID NO: 1672572 - RNA, 19 nt, Artificial Sequence
  Description of Artificial Sequence: Synthetic oligonucleotide
  Antisense strand to SEQ ID NO: 1672571
acucacaucuccaacuacc

SEQ ID NO: 1672573 - RNA, 19 nt, Artificial Sequence
  Description of Artificial Sequence: Synthetic oligonucleotide
  Sense strand starting at position 2828 of SEQ ID NO: 1561445
ugggaagccaggugauuaa

SEQ ID NO: 1672574 - RNA, 19 nt, Artificial Sequence
  Description of Artificial Sequence: Synthetic oligonucleotide
  Antisense strand to SEQ ID NO: 1672573
uuaaucaccuggcuuccca

SEQ ID NO: 1672575 - RNA, 19 nt, Artificial Sequence
  Description of Artificial Sequence: Synthetic oligonucleotide
  Sense strand starting at position 2839 of SEQ ID NO: 1561445
gugauuaacagauagucga

SEQ ID NO: 1672576 - RNA, 19 nt, Artificial Sequence
  Description of Artificial Sequence: Synthetic oligonucleotide
  Antisense strand to SEQ ID NO: 1672575
ucgacuaucuguuaaucac

SEQ ID NO: 1672577 - RNA, 19 nt, Artificial Sequence
  Description of Artificial Sequence: Synthetic oligonucleotide
  Sense strand starting at position 3535 of SEQ ID NO: 1561445
ccuuguuugaaagguauug

SEQ ID NO: 1672578 - RNA, 19 nt, Artificial Sequence
  Description of Artificial Sequence: Synthetic oligonucleotide
  Antisense strand to SEQ ID NO: 1672577
caauaccuuucaaacaagg

SEQ ID NO: 1672579 - RNA, 19 nt, Artificial Sequence
  Description of Artificial Sequence: Synthetic oligonucleotide
  Sense strand starting at position 3545 of SEQ ID NO: 1561445
aagguauuguguccagaau

SEQ ID NO: 1672580 - RNA, 19 nt, Artificial Sequence
  Description of Artificial Sequence: Synthetic oligonucleotide
  Antisense strand to SEQ ID NO: 1672579
auucuggacacaauaccuu

SEQ ID NO: 1672581 - RNA, 19 nt, Artificial Sequence
  Description of Artificial Sequence: Synthetic oligonucleotide
  Sense strand starting at position 3546 of SEQ ID NO: 1561445
agguauuguguccagaauu

SEQ ID NO: 1672582 - RNA, 19 nt, Artificial Sequence
  Description of Artificial Sequence: Synthetic oligonucleotide
  Antisense strand to SEQ ID NO: 1672581
aauucuggacacaauaccu

SEQ ID NO: 1672583 - RNA, 19 nt, Artificial Sequence
  Description of Artificial Sequence: Synthetic oligonucleotide
  Sense strand starting at position 3676 of SEQ ID NO: 1561445
guguucagaugugucuaga

SEQ ID NO: 1672584 - RNA, 19 nt, Artificial Sequence
  Description of Artificial Sequence: Synthetic oligonucleotide
  Antisense strand to SEQ ID NO: 1672583
ucuagacacaucugaacac

SEQ ID NO: 1672585 - RNA, 19 nt, Artificial Sequence
  Description of Artificial Sequence: Synthetic oligonucleotide
  Sense strand starting at position 334 of SEQ ID NO: 1561446
agaagauccucccgccaga

SEQ ID NO: 1672586 - RNA, 19 nt, Artificial Sequence
  Description of Artificial Sequence: Synthetic oligonucleotide
  Antisense strand to SEQ ID NO: 1672585
ucuggcgggaggaucuucu

SEQ ID NO: 1672587 - RNA, 19 nt, Artificial Sequence
  Description of Artificial Sequence: Synthetic oligonucleotide
  Sense strand starting at position 476 of SEQ ID NO: 1561446
ccaggaggcucauguaaga

SEQ ID NO: 1672588 - RNA, 19 nt, Artificial Sequence
  Description of Artificial Sequence: Synthetic oligonucleotide
  Antisense strand to SEQ ID NO: 1672587
ucuuacaugagccuccugg

SEQ ID NO: 1672589 - RNA, 19 nt, Artificial Sequence
  Description of Artificial Sequence: Synthetic oligonucleotide
  Sense strand starting at position 812 of SEQ ID NO: 1561446
gggagaguucagggagguu

SEQ ID NO: 1672590 - RNA, 19 nt, Artificial Sequence
  Description of Artificial Sequence: Synthetic oligonucleotide
  Antisense strand to SEQ ID NO: 1672589
aaccucccugaacucuccc

SEQ ID NO: 1672591 - RNA, 19 nt, Artificial Sequence
  Description of Artificial Sequence: Synthetic oligonucleotide
  Sense strand starting at position 1200 of SEQ ID NO: 1561446
cugucuuaucaccaggaca

SEQ ID NO: 1672592 - RNA, 19 nt, Artificial Sequence
  Description of Artificial Sequence: Synthetic oligonucleotide
  Antisense strand to SEQ ID NO: 1672591
uguccuggugauaagacag

SEQ ID NO: 1672593 - RNA, 19 nt, Artificial Sequence
  Description of Artificial Sequence: Synthetic oligonucleotide
  Sense strand starting at position 1221 of SEQ ID NO: 1561446
ggugcuaacguauaaguga

SEQ ID NO: 1672594 - RNA, 19 nt, Artificial Sequence
  Description of Artificial Sequence: Synthetic oligonucleotide
  Antisense strand to SEQ ID NO: 1672593
ucacuuauacguuagcacc

SEQ ID NO: 1672595 - RNA, 19 nt, Artificial Sequence
  Description of Artificial Sequence: Synthetic oligonucleotide
  Sense strand starting at position 1472 of SEQ ID NO: 1561446
gccuuuaggguagagucaa

SEQ ID NO: 1672596 - RNA, 19 nt, Artificial Sequence
  Description of Artificial Sequence: Synthetic oligonucleotide
  Antisense strand to SEQ ID NO: 1672595
uugacucuacccuaaaggc

SEQ ID NO: 1672597 - RNA, 19 nt, Artificial Sequence
  Description of Artificial Sequence: Synthetic oligonucleotide
  Sense strand starting at position 2240 of SEQ ID NO: 1561446
gcggcuugccauuggauau

SEQ ID NO: 1672598 - RNA, 19 nt, Artificial Sequence
  Description of Artificial Sequence: Synthetic oligonucleotide
  Antisense strand to SEQ ID NO: 1672597
auauccaauggcaagccgc

SEQ ID NO: 1672599 - RNA, 19 nt, Artificial Sequence
  Description of Artificial Sequence: Synthetic oligonucleotide
  Sense strand starting at position 2241 of SEQ ID NO: 1561446
cggcuugccauuggauauu

SEQ ID NO: 1672600 - RNA, 19 nt, Artificial Sequence
  Description of Artificial Sequence: Synthetic oligonucleotide
  Antisense strand to SEQ ID NO: 1672599
aauauccaauggcaagccg

SEQ ID NO: 1672601 - RNA, 19 nt, Artificial Sequence
  Description of Artificial Sequence: Synthetic oligonucleotide
  Sense strand starting at position 2244 of SEQ ID NO: 1561446
cuugccauuggauauuaau

SEQ ID NO: 1672602 - RNA, 19 nt, Artificial Sequence
  Description of Artificial Sequence: Synthetic oligonucleotide
  Antisense strand to SEQ ID NO: 1672601
auuaauauccaauggcaag

SEQ ID NO: 1672603 - RNA, 19 nt, Artificial Sequence
  Description of Artificial Sequence: Synthetic oligonucleotide
  Sense strand starting at position 2247 of SEQ ID NO: 1561446
gccauuggauauuaauaac

SEQ ID NO: 1672604 - RNA, 19 nt, Artificial Sequence
  Description of Artificial Sequence: Synthetic oligonucleotide
  Antisense strand to SEQ ID NO: 1672603
guuauuaauauccaauggc

SEQ ID NO: 1672605 - RNA, 19 nt, Artificial Sequence
  Description of Artificial Sequence: Synthetic oligonucleotide
  Sense strand starting at position 2296 of SEQ ID NO: 1561446
cguauaauguauuacauac

SEQ ID NO: 1672606 - RNA, 19 nt, Artificial Sequence
  Description of Artificial Sequence: Synthetic oligonucleotide
  Antisense strand to SEQ ID NO: 1672605
guauguaauacauuauacg

SEQ ID NO: 1672607 - RNA, 19 nt, Artificial Sequence
  Description of Artificial Sequence: Synthetic oligonucleotide
  Sense strand starting at position 2721 of SEQ ID NO: 1561446
uuaauauacuguuguagga

SEQ ID NO: 1672608 - RNA, 19 nt, Artificial Sequence
  Description of Artificial Sequence: Synthetic oligonucleotide
  Antisense strand to SEQ ID NO: 1672607
uccuacaacaguauauuaa

SEQ ID NO: 1672609 - RNA, 19 nt, Artificial Sequence
  Description of Artificial Sequence: Synthetic oligonucleotide
  Sense strand starting at position 2723 of SEQ ID NO: 1561446
aauauacuguuguaggaua

SEQ ID NO: 1672610 - RNA, 19 nt, Artificial Sequence
  Description of Artificial Sequence: Synthetic oligonucleotide
  Antisense strand to SEQ ID NO: 1672609
uauccuacaacaguauauu

SEQ ID NO: 1672611 - RNA, 19 nt, Artificial Sequence
  Description of Artificial Sequence: Synthetic oligonucleotide
  Sense strand starting at position 2796 of SEQ ID NO: 1561446
augagcuccucuccaaaga

SEQ ID NO: 1672612 - RNA, 19 nt, Artificial Sequence
  Description of Artificial Sequence: Synthetic oligonucleotide
  Antisense strand to SEQ ID NO: 1672611
ucuuuggagaggagcucau

SEQ ID NO: 1672613 - RNA, 19 nt, Artificial Sequence
  Description of Artificial Sequence: Synthetic oligonucleotide
  Sense strand starting at position 2813 of SEQ ID NO: 1561446
gaaccaauguuuccguaua

SEQ ID NO: 1672614 - RNA, 19 nt, Artificial Sequence
  Description of Artificial Sequence: Synthetic oligonucleotide
  Antisense strand to SEQ ID NO: 1672613
uauacggaaacauugguuc

SEQ ID NO: 1672615 - RNA, 19 nt, Artificial Sequence
  Description of Artificial Sequence: Synthetic oligonucleotide
  Sense strand starting at position 2815 of SEQ ID NO: 1561446
accaauguuuccguauauu

SEQ ID NO: 1672616 - RNA, 19 nt, Artificial Sequence
  Description of Artificial Sequence: Synthetic oligonucleotide
  Antisense strand to SEQ ID NO: 1672615
aauauacggaaacauuggu

SEQ ID NO: 1672617 - RNA, 19 nt, Artificial Sequence
  Description of Artificial Sequence: Synthetic oligonucleotide
  Sense strand starting at position 132 of SEQ ID NO: 1561447
uggagucccuguguucaga

SEQ ID NO: 1672618 - RNA, 19 nt, Artificial Sequence
  Description of Artificial Sequence: Synthetic oligonucleotide
  Antisense strand to SEQ ID NO: 1672617
ucugaacacagggacucca

SEQ ID NO: 1672619 - RNA, 19 nt, Artificial Sequence
  Description of Artificial Sequence: Synthetic oligonucleotide
  Sense strand starting at position 836 of SEQ ID NO: 1561447
gguguugccucagcaagga

SEQ ID NO: 1672620 - RNA, 19 nt, Artificial Sequence
  Description of Artificial Sequence: Synthetic oligonucleotide
  Antisense strand to SEQ ID NO: 1672619
uccuugcugaggcaacacc

SEQ ID NO: 1672621 - RNA, 19 nt, Artificial Sequence
  Description of Artificial Sequence: Synthetic oligonucleotide
  Sense strand starting at position 850 of SEQ ID NO: 1561447
aaggaaucccauugcuagu

SEQ ID NO: 1672622 - RNA, 19 nt, Artificial Sequence
  Description of Artificial Sequence: Synthetic oligonucleotide
  Antisense strand to SEQ ID NO: 1672621
acuagcaaugggauuccuu

SEQ ID NO: 1672623 - RNA, 19 nt, Artificial Sequence
  Description of Artificial Sequence: Synthetic oligonucleotide
  Sense strand starting at position 907 of SEQ ID NO: 1561447
uuucuagggaaccgugaaa

SEQ ID NO: 1672624 - RNA, 19 nt, Artificial Sequence
  Description of Artificial Sequence: Synthetic oligonucleotide
  Antisense strand to SEQ ID NO: 1672623
uuucacgguucccuagaaa

SEQ ID NO: 1672625 - RNA, 19 nt, Artificial Sequence
  Description of Artificial Sequence: Synthetic oligonucleotide
  Sense strand starting at position 925 of SEQ ID NO: 1561447
agaauauauuuccgugguu

SEQ ID NO: 1672626 - RNA, 19 nt, Artificial Sequence
  Description of Artificial Sequence: Synthetic oligonucleotide
  Antisense strand to SEQ ID NO: 1672625
aaccacggaaauauauucu

SEQ ID NO: 1672627 - RNA, 19 nt, Artificial Sequence
  Description of Artificial Sequence: Synthetic oligonucleotide
  Sense strand starting at position 926 of SEQ ID NO: 1561447
gaauauauuuccgugguuu

SEQ ID NO: 1672628 - RNA, 19 nt, Artificial Sequence
  Description of Artificial Sequence: Synthetic oligonucleotide
  Antisense strand to SEQ ID NO: 1672627
aaaccacggaaauauauuc

SEQ ID NO: 1672629 - RNA, 19 nt, Artificial Sequence
  Description of Artificial Sequence: Synthetic oligonucleotide
  Sense strand starting at position 2007 of SEQ ID NO: 1561447
ccgcgcuucugauuggaca

SEQ ID NO: 1672630 - RNA, 19 nt, Artificial Sequence
  Description of Artificial Sequence: Synthetic oligonucleotide
  Antisense strand to SEQ ID NO: 1672629
uguccaaucagaagcgcgg

SEQ ID NO: 1672631 - RNA, 19 nt, Artificial Sequence
  Description of Artificial Sequence: Synthetic oligonucleotide
  Sense strand starting at position 2009 of SEQ ID NO: 1561447
gcgcuucugauuggacagu

SEQ ID NO: 1672632 - RNA, 19 nt, Artificial Sequence
  Description of Artificial Sequence: Synthetic oligonucleotide
  Antisense strand to SEQ ID NO: 1672631
acuguccaaucagaagcgc

SEQ ID NO: 1672633 - RNA, 19 nt, Artificial Sequence
  Description of Artificial Sequence: Synthetic oligonucleotide
  Sense strand starting at position 2039 of SEQ ID NO: 1561447
cggcgacucugauuggaga

SEQ ID NO: 1672634 - RNA, 19 nt, Artificial Sequence
  Description of Artificial Sequence: Synthetic oligonucleotide
  Antisense strand to SEQ ID NO: 1672633
ucuccaaucagagucgccg

SEQ ID NO: 1672635 - RNA, 19 nt, Artificial Sequence
  Description of Artificial Sequence: Synthetic oligonucleotide
  Sense strand starting at position 2040 of SEQ ID NO: 1561447
ggcgacucugauuggagaa

SEQ ID NO: 1672636 - RNA, 19 nt, Artificial Sequence
  Description of Artificial Sequence: Synthetic oligonucleotide
  Antisense strand to SEQ ID NO: 1672635
uucuccaaucagagucgcc

SEQ ID NO: 1672637 - RNA, 19 nt, Artificial Sequence
  Description of Artificial Sequence: Synthetic oligonucleotide
  Sense strand starting at position 2041 of SEQ ID NO: 1561447
gcgacucugauuggagaau

SEQ ID NO: 1672638 - RNA, 19 nt, Artificial Sequence
  Description of Artificial Sequence: Synthetic oligonucleotide
  Antisense strand to SEQ ID NO: 1672637
auucuccaaucagagucgc

SEQ ID NO: 1672639 - RNA, 19 nt, Artificial Sequence
  Description of Artificial Sequence: Synthetic oligonucleotide
  Sense strand starting at position 2042 of SEQ ID NO: 1561447
cgacucugauuggagaauu

SEQ ID NO: 1672640 - RNA, 19 nt, Artificial Sequence
  Description of Artificial Sequence: Synthetic oligonucleotide
  Antisense strand to SEQ ID NO: 1672639
aauucuccaaucagagucg

SEQ ID NO: 1672641 - RNA, 19 nt, Artificial Sequence
  Description of Artificial Sequence: Synthetic oligonucleotide
  Sense strand starting at position 2113 of SEQ ID NO: 1561447
gggcgucccucauuggaua

SEQ ID NO: 1672642 - RNA, 19 nt, Artificial Sequence
  Description of Artificial Sequence: Synthetic oligonucleotide
  Antisense strand to SEQ ID NO: 1672641
uauccaaugagggacgccc

SEQ ID NO: 1672643 - RNA, 19 nt, Artificial Sequence
  Description of Artificial Sequence: Synthetic oligonucleotide
  Sense strand starting at position 2340 of SEQ ID NO: 1561447
gugggaacuccagacuagu

SEQ ID NO: 1672644 - RNA, 19 nt, Artificial Sequence
  Description of Artificial Sequence: Synthetic oligonucleotide
  Antisense strand to SEQ ID NO: 1672643
acuagucuggaguucccac

SEQ ID NO: 1672645 - RNA, 19 nt, Artificial Sequence
  Description of Artificial Sequence: Synthetic oligonucleotide
  Sense strand starting at position 2350 of SEQ ID NO: 1561447
cagacuaguuuccucacga

SEQ ID NO: 1672646 - RNA, 19 nt, Artificial Sequence
  Description of Artificial Sequence: Synthetic oligonucleotide
  Antisense strand to SEQ ID NO: 1672645
ucgugaggaaacuagucug

SEQ ID NO: 1672647 - RNA, 19 nt, Artificial Sequence
  Description of Artificial Sequence: Synthetic oligonucleotide
  Sense strand starting at position 2351 of SEQ ID NO: 1561447
agacuaguuuccucacgag

SEQ ID NO: 1672648 - RNA, 19 nt, Artificial Sequence
  Description of Artificial Sequence: Synthetic oligonucleotide
  Antisense strand to SEQ ID NO: 1672647
cucgugaggaaacuagucu

SEQ ID NO: 1672649 - RNA, 19 nt, Artificial Sequence
  Description of Artificial Sequence: Synthetic oligonucleotide
  Sense strand starting at position 2590 of SEQ ID NO: 1561447
gcaggagcuuugcucaaau

SEQ ID NO: 1672650 - RNA, 19 nt, Artificial Sequence
  Description of Artificial Sequence: Synthetic oligonucleotide
  Antisense strand to SEQ ID NO: 1672649
auuugagcaaagcuccugc

SEQ ID NO: 1672651 - RNA, 19 nt, Artificial Sequence
  Description of Artificial Sequence: Synthetic oligonucleotide
  Sense strand starting at position 2592 of SEQ ID NO: 1561447
aggagcuuugcucaaauca

SEQ ID NO: 1672652 - RNA, 19 nt, Artificial Sequence
  Description of Artificial Sequence: Synthetic oligonucleotide
  Antisense strand to SEQ ID NO: 1672651
ugauuugagcaaagcuccu

SEQ ID NO: 1672653 - RNA, 19 nt, Artificial Sequence
  Description of Artificial Sequence: Synthetic oligonucleotide
  Sense strand starting at position 3681 of SEQ ID NO: 1561447
ggaagucuauaauauugca

SEQ ID NO: 1672654 - RNA, 19 nt, Artificial Sequence
  Description of Artificial Sequence: Synthetic oligonucleotide
  Antisense strand to SEQ ID NO: 1672653
ugcaauauuauagacuucc

SEQ ID NO: 1672655 - RNA, 19 nt, Artificial Sequence
  Description of Artificial Sequence: Synthetic oligonucleotide
  Sense strand starting at position 3719 of SEQ ID NO: 1561447
gccacugaacuuuagacuu

SEQ ID NO: 1672656 - RNA, 19 nt, Artificial Sequence
  Description of Artificial Sequence: Synthetic oligonucleotide
  Antisense strand to SEQ ID NO: 1672655
aagucuaaaguucaguggc

SEQ ID NO: 1672657 - RNA, 19 nt, Artificial Sequence
  Description of Artificial Sequence: Synthetic oligonucleotide
  Sense strand starting at position 3743 of SEQ ID NO: 1561447
ugaugaacaugguaaauau

SEQ ID NO: 1672658 - RNA, 19 nt, Artificial Sequence
  Description of Artificial Sequence: Synthetic oligonucleotide
  Antisense strand to SEQ ID NO: 1672657
auauuuaccauguucauca

SEQ ID NO: 1672659 - RNA, 19 nt, Artificial Sequence
  Description of Artificial Sequence: Synthetic oligonucleotide
  Sense strand starting at position 3813 of SEQ ID NO: 1561447
aggcuauauuucuaaggau

SEQ ID NO: 1672660 - RNA, 19 nt, Artificial Sequence
  Description of Artificial Sequence: Synthetic oligonucleotide
  Antisense strand to SEQ ID NO: 1672659
auccuuagaaauauagccu

SEQ ID NO: 1672661 - RNA, 19 nt, Artificial Sequence
  Description of Artificial Sequence: Synthetic oligonucleotide
  Sense strand starting at position 3874 of SEQ ID NO: 1561447
guuuaaaugaauuggauug

SEQ ID NO: 1672662 - RNA, 19 nt, Artificial Sequence
  Description of Artificial Sequence: Synthetic oligonucleotide
  Antisense strand to SEQ ID NO: 1672661
caauccaauucauuuaaac

SEQ ID NO: 1672663 - RNA, 19 nt, Artificial Sequence
  Description of Artificial Sequence: Synthetic oligonucleotide
  Sense strand starting at position 3888 of SEQ ID NO: 1561447
gauugaaccuuaggaggga

SEQ ID NO: 1672664 - RNA, 19 nt, Artificial Sequence
  Description of Artificial Sequence: Synthetic oligonucleotide
  Antisense strand to SEQ ID NO: 1672663
ucccuccuaagguucaauc

SEQ ID NO: 1672665 - RNA, 19 nt, Artificial Sequence
  Description of Artificial Sequence: Synthetic oligonucleotide
  Sense strand starting at position 3976 of SEQ ID NO: 1561447
gaucccgacucacuguaaa

SEQ ID NO: 1672666 - RNA, 19 nt, Artificial Sequence
  Description of Artificial Sequence: Synthetic oligonucleotide
  Antisense strand to SEQ ID NO: 1672665
uuuacagugagucgggauc

SEQ ID NO: 1672667 - RNA, 19 nt, Artificial Sequence
  Description of Artificial Sequence: Synthetic oligonucleotide
  Sense strand starting at position 73 of SEQ ID NO: 1561448
uggaguuaccagcaacuga

SEQ ID NO: 1672668 - RNA, 19 nt, Artificial Sequence
  Description of Artificial Sequence: Synthetic oligonucleotide
  Antisense strand to SEQ ID NO: 1672667
ucaguugcugguaacucca

SEQ ID NO: 1672669 - RNA, 19 nt, Artificial Sequence
  Description of Artificial Sequence: Synthetic oligonucleotide
  Sense strand starting at position 91 of SEQ ID NO: 1561448
agauguaggcgguaauaug

SEQ ID NO: 1672670 - RNA, 19 nt, Artificial Sequence
  Description of Artificial Sequence: Synthetic oligonucleotide
  Antisense strand to SEQ ID NO: 1672669
cauauuaccgccuacaucu

SEQ ID NO: 1672671 - RNA, 19 nt, Artificial Sequence
  Description of Artificial Sequence: Synthetic oligonucleotide
  Sense strand starting at position 145 of SEQ ID NO: 1561448
ugcagugcagcugagaaua

SEQ ID NO: 1672672 - RNA, 19 nt, Artificial Sequence
  Description of Artificial Sequence: Synthetic oligonucleotide
  Antisense strand to SEQ ID NO: 1672671
uauucucagcugcacugca

SEQ ID NO: 1672673 - RNA, 19 nt, Artificial Sequence
  Description of Artificial Sequence: Synthetic oligonucleotide
  Sense strand starting at position 236 of SEQ ID NO: 1561448
cccgaauagucacuagcaa

SEQ ID NO: 1672674 - RNA, 19 nt, Artificial Sequence
  Description of Artificial Sequence: Synthetic oligonucleotide
  Antisense strand to SEQ ID NO: 1672673
uugcuagugacuauucggg

SEQ ID NO: 1672675 - RNA, 19 nt, Artificial Sequence
  Description of Artificial Sequence: Synthetic oligonucleotide
  Sense strand starting at position 237 of SEQ ID NO: 1561448
ccgaauagucacuagcaag

SEQ ID NO: 1672676 - RNA, 19 nt, Artificial Sequence
  Description of Artificial Sequence: Synthetic oligonucleotide
  Antisense strand to SEQ ID NO: 1672675
cuugcuagugacuauucgg

SEQ ID NO: 1672677 - RNA, 19 nt, Artificial Sequence
  Description of Artificial Sequence: Synthetic oligonucleotide
  Sense strand starting at position 248 of SEQ ID NO: 1561448
cuagcaagcaguggaauua

SEQ ID NO: 1672678 - RNA, 19 nt, Artificial Sequence
  Description of Artificial Sequence: Synthetic oligonucleotide
  Antisense strand to SEQ ID NO: 1672677
uaauuccacugcuugcuag

SEQ ID NO: 1672679 - RNA, 19 nt, Artificial Sequence
  Description of Artificial Sequence: Synthetic oligonucleotide
  Sense strand starting at position 282 of SEQ ID NO: 1561448
auaucccuaugagugaaua

SEQ ID NO: 1672680 - RNA, 19 nt, Artificial Sequence
  Description of Artificial Sequence: Synthetic oligonucleotide
  Antisense strand to SEQ ID NO: 1672679
uauucacucauagggauau

SEQ ID NO: 1672681 - RNA, 19 nt, Artificial Sequence
  Description of Artificial Sequence: Synthetic oligonucleotide
  Sense strand starting at position 1533 of SEQ ID NO: 1561448
gcccaaagucugcauccaa

SEQ ID NO: 1672682 - RNA, 19 nt, Artificial Sequence
  Description of Artificial Sequence: Synthetic oligonucleotide
  Antisense strand to SEQ ID NO: 1672681
uuggaugcagacuuugggc

SEQ ID NO: 1672683 - RNA, 19 nt, Artificial Sequence
  Description of Artificial Sequence: Synthetic oligonucleotide
  Sense strand starting at position 1724 of SEQ ID NO: 1561448
uacgacuuuccagggaaug

SEQ ID NO: 1672684 - RNA, 19 nt, Artificial Sequence
  Description of Artificial Sequence: Synthetic oligonucleotide
  Antisense strand to SEQ ID NO: 1672683
cauucccuggaaagucgua

SEQ ID NO: 1672685 - RNA, 19 nt, Artificial Sequence
  Description of Artificial Sequence: Synthetic oligonucleotide
  Sense strand starting at position 1725 of SEQ ID NO: 1561448
acgacuuuccagggaauga

SEQ ID NO: 1672686 - RNA, 19 nt, Artificial Sequence
  Description of Artificial Sequence: Synthetic oligonucleotide
  Antisense strand to SEQ ID NO: 1672685
ucauucccuggaaagucgu

SEQ ID NO: 1672687 - RNA, 19 nt, Artificial Sequence
  Description of Artificial Sequence: Synthetic oligonucleotide
  Sense strand starting at position 1830 of SEQ ID NO: 1561448
gggaguuucagcguguucu

SEQ ID NO: 1672688 - RNA, 19 nt, Artificial Sequence
  Description of Artificial Sequence: Synthetic oligonucleotide
  Antisense strand to SEQ ID NO: 1672687
agaacacgcugaaacuccc

SEQ ID NO: 1672689 - RNA, 19 nt, Artificial Sequence
  Description of Artificial Sequence: Synthetic oligonucleotide
  Sense strand starting at position 1842 of SEQ ID NO: 1561448
guguucuggccgcuuccaa

SEQ ID NO: 1672690 - RNA, 19 nt, Artificial Sequence
  Description of Artificial Sequence: Synthetic oligonucleotide
  Antisense strand to SEQ ID NO: 1672689
uuggaagcggccagaacac

SEQ ID NO: 1672691 - RNA, 19 nt, Artificial Sequence
  Description of Artificial Sequence: Synthetic oligonucleotide
  Sense strand starting at position 2080 of SEQ ID NO: 1561448
gcucaucucugauuggaga

SEQ ID NO: 1672692 - RNA, 19 nt, Artificial Sequence
  Description of Artificial Sequence: Synthetic oligonucleotide
  Antisense strand to SEQ ID NO: 1672691
ucuccaaucagagaugagc

SEQ ID NO: 1672693 - RNA, 19 nt, Artificial Sequence
  Description of Artificial Sequence: Synthetic oligonucleotide
  Sense strand starting at position 2082 of SEQ ID NO: 1561448
ucaucucugauuggagagu

SEQ ID NO: 1672694 - RNA, 19 nt, Artificial Sequence
  Description of Artificial Sequence: Synthetic oligonucleotide
  Antisense strand to SEQ ID NO: 1672693
acucuccaaucagagauga

SEQ ID NO: 1672695 - RNA, 19 nt, Artificial Sequence
  Description of Artificial Sequence: Synthetic oligonucleotide
  Sense strand starting at position 2127 of SEQ ID NO: 1561448
auuggacaguucuuuagac

SEQ ID NO: 1672696 - RNA, 19 nt, Artificial Sequence
  Description of Artificial Sequence: Synthetic oligonucleotide
  Antisense strand to SEQ ID NO: 1672695
gucuaaagaacuguccaau

SEQ ID NO: 1672697 - RNA, 19 nt, Artificial Sequence
  Description of Artificial Sequence: Synthetic oligonucleotide
  Sense strand starting at position 2128 of SEQ ID NO: 1561448
uuggacaguucuuuagacu

SEQ ID NO: 1672698 - RNA, 19 nt, Artificial Sequence
  Description of Artificial Sequence: Synthetic oligonucleotide
  Antisense strand to SEQ ID NO: 1672697
agucuaaagaacuguccaa

SEQ ID NO: 1672699 - RNA, 19 nt, Artificial Sequence
  Description of Artificial Sequence: Synthetic oligonucleotide
  Sense strand starting at position 2129 of SEQ ID NO: 1561448
uggacaguucuuuagacuc

SEQ ID NO: 1672700 - RNA, 19 nt, Artificial Sequence
  Description of Artificial Sequence: Synthetic oligonucleotide
  Antisense strand to SEQ ID NO: 1672699
gagucuaaagaacugucca

SEQ ID NO: 1672701 - RNA, 19 nt, Artificial Sequence
  Description of Artificial Sequence: Synthetic oligonucleotide
  Sense strand starting at position 2228 of SEQ ID NO: 1561448
uuccuaauuggucauguuu

SEQ ID NO: 1672702 - RNA, 19 nt, Artificial Sequence
  Description of Artificial Sequence: Synthetic oligonucleotide
  Antisense strand to SEQ ID NO: 1672701
aaacaugaccaauuaggaa

SEQ ID NO: 1672703 - RNA, 19 nt, Artificial Sequence
  Description of Artificial Sequence: Synthetic oligonucleotide
  Sense strand starting at position 2438 of SEQ ID NO: 1561448
ggucuccuuccugaaauga

SEQ ID NO: 1672704 - RNA, 19 nt, Artificial Sequence
  Description of Artificial Sequence: Synthetic oligonucleotide
  Antisense strand to SEQ ID NO: 1672703
ucauuucaggaaggagacc

SEQ ID NO: 1672705 - RNA, 19 nt, Artificial Sequence
  Description of Artificial Sequence: Synthetic oligonucleotide
  Sense strand starting at position 2448 of SEQ ID NO: 1561448
cugaaaugaaagugguacu

SEQ ID NO: 1672706 - RNA, 19 nt, Artificial Sequence
  Description of Artificial Sequence: Synthetic oligonucleotide
  Antisense strand to SEQ ID NO: 1672705
aguaccacuuucauuucag

SEQ ID NO: 1672707 - RNA, 19 nt, Artificial Sequence
  Description of Artificial Sequence: Synthetic oligonucleotide
  Sense strand starting at position 2609 of SEQ ID NO: 1561448
gggucaagugagugaccaa

SEQ ID NO: 1672708 - RNA, 19 nt, Artificial Sequence
  Description of Artificial Sequence: Synthetic oligonucleotide
  Antisense strand to SEQ ID NO: 1672707
uuggucacucacuugaccc

SEQ ID NO: 1672709 - RNA, 19 nt, Artificial Sequence
  Description of Artificial Sequence: Synthetic oligonucleotide
  Sense strand starting at position 2659 of SEQ ID NO: 1561448
gcacaauugcuagaacuga

SEQ ID NO: 1672710 - RNA, 19 nt, Artificial Sequence
  Description of Artificial Sequence: Synthetic oligonucleotide
  Antisense strand to SEQ ID NO: 1672709
ucaguucuagcaauugugc

SEQ ID NO: 1672711 - RNA, 19 nt, Artificial Sequence
  Description of Artificial Sequence: Synthetic oligonucleotide
  Sense strand starting at position 2674 of SEQ ID NO: 1561448
cugaacucuugagccauua

SEQ ID NO: 1672712 - RNA, 19 nt, Artificial Sequence
  Description of Artificial Sequence: Synthetic oligonucleotide
  Antisense strand to SEQ ID NO: 1672711
uaauggcucaagaguucag

SEQ ID NO: 1672713 - RNA, 19 nt, Artificial Sequence
  Description of Artificial Sequence: Synthetic oligonucleotide
  Sense strand starting at position 3072 of SEQ ID NO: 1561448
acuguauccuaggucaaua

SEQ ID NO: 1672714 - RNA, 19 nt, Artificial Sequence
  Description of Artificial Sequence: Synthetic oligonucleotide
  Antisense strand to SEQ ID NO: 1672713
uauugaccuaggauacagu

SEQ ID NO: 1672715 - RNA, 19 nt, Artificial Sequence
  Description of Artificial Sequence: Synthetic oligonucleotide
  Sense strand starting at position 3074 of SEQ ID NO: 1561448
uguauccuaggucaauauu

SEQ ID NO: 1672716 - RNA, 19 nt, Artificial Sequence
  Description of Artificial Sequence: Synthetic oligonucleotide
  Antisense strand to SEQ ID NO: 1672715
aauauugaccuaggauaca

SEQ ID NO: 1672717 - RNA, 19 nt, Artificial Sequence
  Description of Artificial Sequence: Synthetic oligonucleotide
  Sense strand starting at position 3123 of SEQ ID NO: 1561448
ccucacaguuucucaagua

SEQ ID NO: 1672718 - RNA, 19 nt, Artificial Sequence
  Description of Artificial Sequence: Synthetic oligonucleotide
  Antisense strand to SEQ ID NO: 1672717
uacuugagaaacugugagg

SEQ ID NO: 1672719 - RNA, 19 nt, Artificial Sequence
  Description of Artificial Sequence: Synthetic oligonucleotide
  Sense strand starting at position 3154 of SEQ ID NO: 1561448
acgaauaucuguguaccua

SEQ ID NO: 1672720 - RNA, 19 nt, Artificial Sequence
  Description of Artificial Sequence: Synthetic oligonucleotide
  Antisense strand to SEQ ID NO: 1672719
uagguacacagauauucgu

SEQ ID NO: 1672721 - RNA, 19 nt, Artificial Sequence
  Description of Artificial Sequence: Synthetic oligonucleotide
  Sense strand starting at position 3155 of SEQ ID NO: 1561448
cgaauaucuguguaccuau

SEQ ID NO: 1672722 - RNA, 19 nt, Artificial Sequence
  Description of Artificial Sequence: Synthetic oligonucleotide
  Antisense strand to SEQ ID NO: 1672721
auagguacacagauauucg

SEQ ID NO: 1672723 - RNA, 19 nt, Artificial Sequence
  Description of Artificial Sequence: Synthetic oligonucleotide
  Sense strand starting at position 3158 of SEQ ID NO: 1561448
auaucuguguaccuaugaa

SEQ ID NO: 1672724 - RNA, 19 nt, Artificial Sequence
  Description of Artificial Sequence: Synthetic oligonucleotide
  Antisense strand to SEQ ID NO: 1672723
uucauagguacacagauau

SEQ ID NO: 1672725 - RNA, 19 nt, Artificial Sequence
  Description of Artificial Sequence: Synthetic oligonucleotide
  Sense strand starting at position 3251 of SEQ ID NO: 1561448
gaggcauaaucccuggaag

SEQ ID NO: 1672726 - RNA, 19 nt, Artificial Sequence
  Description of Artificial Sequence: Synthetic oligonucleotide
  Antisense strand to SEQ ID NO: 1672725
cuuccagggauuaugccuc

SEQ ID NO: 1672727 - RNA, 19 nt, Artificial Sequence
  Description of Artificial Sequence: Synthetic oligonucleotide
  Sense strand starting at position 3254 of SEQ ID NO: 1561448
gcauaaucccuggaagccu

SEQ ID NO: 1672728 - RNA, 19 nt, Artificial Sequence
  Description of Artificial Sequence: Synthetic oligonucleotide
  Antisense strand to SEQ ID NO: 1672727
aggcuuccagggauuaugc

SEQ ID NO: 1672729 - RNA, 19 nt, Artificial Sequence
  Description of Artificial Sequence: Synthetic oligonucleotide
  Sense strand starting at position 3326 of SEQ ID NO: 1561448
gaggcuauuccguauacug

SEQ ID NO: 1672730 - RNA, 19 nt, Artificial Sequence
  Description of Artificial Sequence: Synthetic oligonucleotide
  Antisense strand to SEQ ID NO: 1672729
caguauacggaauagccuc

SEQ ID NO: 1672731 - RNA, 19 nt, Artificial Sequence
  Description of Artificial Sequence: Synthetic oligonucleotide
  Sense strand starting at position 3337 of SEQ ID NO: 1561448
guauacugugaucacggaa

SEQ ID NO: 1672732 - RNA, 19 nt, Artificial Sequence
  Description of Artificial Sequence: Synthetic oligonucleotide
  Antisense strand to SEQ ID NO: 1672731
uuccgugaucacaguauac

SEQ ID NO: 1672733 - RNA, 19 nt, Artificial Sequence
  Description of Artificial Sequence: Synthetic oligonucleotide
  Sense strand starting at position 3459 of SEQ ID NO: 1561448
ugcuacugacagugaucaa

SEQ ID NO: 1672734 - RNA, 19 nt, Artificial Sequence
  Description of Artificial Sequence: Synthetic oligonucleotide
  Antisense strand to SEQ ID NO: 1672733
uugaucacugucaguagca

SEQ ID NO: 1672735 - RNA, 19 nt, Artificial Sequence
  Description of Artificial Sequence: Synthetic oligonucleotide
  Sense strand starting at position 3460 of SEQ ID NO: 1561448
gcuacugacagugaucaag

SEQ ID NO: 1672736 - RNA, 19 nt, Artificial Sequence
  Description of Artificial Sequence: Synthetic oligonucleotide
  Antisense strand to SEQ ID NO: 1672735
cuugaucacugucaguagc

SEQ ID NO: 1672737 - RNA, 19 nt, Artificial Sequence
  Description of Artificial Sequence: Synthetic oligonucleotide
  Sense strand starting at position 3462 of SEQ ID NO: 1561448
uacugacagugaucaaggu

SEQ ID NO: 1672738 - RNA, 19 nt, Artificial Sequence
  Description of Artificial Sequence: Synthetic oligonucleotide
  Antisense strand to SEQ ID NO: 1672737
accuugaucacugucagua

SEQ ID NO: 1672739 - RNA, 19 nt, Artificial Sequence
  Description of Artificial Sequence: Synthetic oligonucleotide
  Sense strand starting at position 3618 of SEQ ID NO: 1561448
agaguuaaguuaccuuuga

SEQ ID NO: 1672740 - RNA, 19 nt, Artificial Sequence
  Description of Artificial Sequence: Synthetic oligonucleotide
  Antisense strand to SEQ ID NO: 1672739
ucaaagguaacuuaacucu

SEQ ID NO: 1672741 - RNA, 19 nt, Artificial Sequence
  Description of Artificial Sequence: Synthetic oligonucleotide
  Sense strand starting at position 3619 of SEQ ID NO: 1561448
gaguuaaguuaccuuugaa

SEQ ID NO: 1672742 - RNA, 19 nt, Artificial Sequence
  Description of Artificial Sequence: Synthetic oligonucleotide
  Antisense strand to SEQ ID NO: 1672741
uucaaagguaacuuaacuc

SEQ ID NO: 1672743 - RNA, 19 nt, Artificial Sequence
  Description of Artificial Sequence: Synthetic oligonucleotide
  Sense strand starting at position 3622 of SEQ ID NO: 1561448
uuaaguuaccuuugaagca

SEQ ID NO: 1672744 - RNA, 19 nt, Artificial Sequence
  Description of Artificial Sequence: Synthetic oligonucleotide
  Antisense strand to SEQ ID NO: 1672743
ugcuucaaagguaacuuaa

SEQ ID NO: 1672745 - RNA, 19 nt, Artificial Sequence
  Description of Artificial Sequence: Synthetic oligonucleotide
  Sense strand starting at position 3716 of SEQ ID NO: 1561448
aauugagacgugcauuaca

SEQ ID NO: 1672746 - RNA, 19 nt, Artificial Sequence
  Description of Artificial Sequence: Synthetic oligonucleotide
  Antisense strand to SEQ ID NO: 1672745
uguaaugcacgucucaauu

SEQ ID NO: 1672747 - RNA, 19 nt, Artificial Sequence
  Description of Artificial Sequence: Synthetic oligonucleotide
  Sense strand starting at position 71 of SEQ ID NO: 1561449
gguuagugcgacugagaag

SEQ ID NO: 1672748 - RNA, 19 nt, Artificial Sequence
  Description of Artificial Sequence: Synthetic oligonucleotide
  Antisense strand to SEQ ID NO: 1672747
cuucucagucgcacuaacc

SEQ ID NO: 1672749 - RNA, 19 nt, Artificial Sequence
  Description of Artificial Sequence: Synthetic oligonucleotide
  Sense strand starting at position 229 of SEQ ID NO: 1561449
uugagaugucuuggaaggu

SEQ ID NO: 1672750 - RNA, 19 nt, Artificial Sequence
  Description of Artificial Sequence: Synthetic oligonucleotide
  Antisense strand to SEQ ID NO: 1672749
accuuccaagacaucucaa

SEQ ID NO: 1672751 - RNA, 19 nt, Artificial Sequence
  Description of Artificial Sequence: Synthetic oligonucleotide
  Sense strand starting at position 233 of SEQ ID NO: 1561449
gaugucuuggaagguugaa

SEQ ID NO: 1672752 - RNA, 19 nt, Artificial Sequence
  Description of Artificial Sequence: Synthetic oligonucleotide
  Antisense strand to SEQ ID NO: 1672751
uucaaccuuccaagacauc

SEQ ID NO: 1672753 - RNA, 19 nt, Artificial Sequence
  Description of Artificial Sequence: Synthetic oligonucleotide
  Sense strand starting at position 284 of SEQ ID NO: 1561449
guguacugauuugcauaua

SEQ ID NO: 1672754 - RNA, 19 nt, Artificial Sequence
  Description of Artificial Sequence: Synthetic oligonucleotide
  Antisense strand to SEQ ID NO: 1672753
uauaugcaaaucaguacac

SEQ ID NO: 1672755 - RNA, 19 nt, Artificial Sequence
  Description of Artificial Sequence: Synthetic oligonucleotide
  Sense strand starting at position 390 of SEQ ID NO: 1561449
uuaagauacccucacucgu

SEQ ID NO: 1672756 - RNA, 19 nt, Artificial Sequence
  Description of Artificial Sequence: Synthetic oligonucleotide
  Antisense strand to SEQ ID NO: 1672755
acgagugaggguaucuuaa

SEQ ID NO: 1672757 - RNA, 19 nt, Artificial Sequence
  Description of Artificial Sequence: Synthetic oligonucleotide
  Sense strand starting at position 798 of SEQ ID NO: 1561449
cgguaccuaccugaucaua

SEQ ID NO: 1672758 - RNA, 19 nt, Artificial Sequence
  Description of Artificial Sequence: Synthetic oligonucleotide
  Antisense strand to SEQ ID NO: 1672757
uaugaucagguagguaccg

SEQ ID NO: 1672759 - RNA, 19 nt, Artificial Sequence
  Description of Artificial Sequence: Synthetic oligonucleotide
  Sense strand starting at position 800 of SEQ ID NO: 1561449
guaccuaccugaucauaca

SEQ ID NO: 1672760 - RNA, 19 nt, Artificial Sequence
  Description of Artificial Sequence: Synthetic oligonucleotide
  Antisense strand to SEQ ID NO: 1672759
uguaugaucagguagguac

SEQ ID NO: 1672761 - RNA, 19 nt, Artificial Sequence
  Description of Artificial Sequence: Synthetic oligonucleotide
  Sense strand starting at position 943 of SEQ ID NO: 1561449
gggaguaauauguacguau

SEQ ID NO: 1672762 - RNA, 19 nt, Artificial Sequence
  Description of Artificial Sequence: Synthetic oligonucleotide
  Antisense strand to SEQ ID NO: 1672761
auacguacauauuacuccc

SEQ ID NO: 1672763 - RNA, 19 nt, Artificial Sequence
  Description of Artificial Sequence: Synthetic oligonucleotide
  Sense strand starting at position 945 of SEQ ID NO: 1561449
gaguaauauguacguauag

SEQ ID NO: 1672764 - RNA, 19 nt, Artificial Sequence
  Description of Artificial Sequence: Synthetic oligonucleotide
  Antisense strand to SEQ ID NO: 1672763
cuauacguacauauuacuc

SEQ ID NO: 1672765 - RNA, 19 nt, Artificial Sequence
  Description of Artificial Sequence: Synthetic oligonucleotide
  Sense strand starting at position 947 of SEQ ID NO: 1561449
guaauauguacguauagua

SEQ ID NO: 1672766 - RNA, 19 nt, Artificial Sequence
  Description of Artificial Sequence: Synthetic oligonucleotide
  Antisense strand to SEQ ID NO: 1672765
uacuauacguacauauuac

SEQ ID NO: 1672767 - RNA, 19 nt, Artificial Sequence
  Description of Artificial Sequence: Synthetic oligonucleotide
  Sense strand starting at position 969 of SEQ ID NO: 1561449
uguauuuacugagacuaau

SEQ ID NO: 1672768 - RNA, 19 nt, Artificial Sequence
  Description of Artificial Sequence: Synthetic oligonucleotide
  Antisense strand to SEQ ID NO: 1672767
auuagucucaguaaauaca

SEQ ID NO: 1672769 - RNA, 19 nt, Artificial Sequence
  Description of Artificial Sequence: Synthetic oligonucleotide
  Sense strand starting at position 983 of SEQ ID NO: 1561449
cuaauacaguuguugcaua

SEQ ID NO: 1672770 - RNA, 19 nt, Artificial Sequence
  Description of Artificial Sequence: Synthetic oligonucleotide
  Antisense strand to SEQ ID NO: 1672769
uaugcaacaacuguauuag

SEQ ID NO: 1672771 - RNA, 19 nt, Artificial Sequence
  Description of Artificial Sequence: Synthetic oligonucleotide
  Sense strand starting at position 988 of SEQ ID NO: 1561449
acaguuguugcauagaaag

SEQ ID NO: 1672772 - RNA, 19 nt, Artificial Sequence
  Description of Artificial Sequence: Synthetic oligonucleotide
  Antisense strand to SEQ ID NO: 1672771
cuuucuaugcaacaacugu

SEQ ID NO: 1672773 - RNA, 19 nt, Artificial Sequence
  Description of Artificial Sequence: Synthetic oligonucleotide
  Sense strand starting at position 990 of SEQ ID NO: 1561449
aguuguugcauagaaagac

SEQ ID NO: 1672774 - RNA, 19 nt, Artificial Sequence
  Description of Artificial Sequence: Synthetic oligonucleotide
  Antisense strand to SEQ ID NO: 1672773
gucuuucuaugcaacaacu

SEQ ID NO: 1672775 - RNA, 19 nt, Artificial Sequence
  Description of Artificial Sequence: Synthetic oligonucleotide
  Sense strand starting at position 1168 of SEQ ID NO: 1561449
auuguauggugacuccaga

SEQ ID NO: 1672776 - RNA, 19 nt, Artificial Sequence
  Description of Artificial Sequence: Synthetic oligonucleotide
  Antisense strand to SEQ ID NO: 1672775
ucuggagucaccauacaau

SEQ ID NO: 1672777 - RNA, 19 nt, Artificial Sequence
  Description of Artificial Sequence: Synthetic oligonucleotide
  Sense strand starting at position 1175 of SEQ ID NO: 1561449
ggugacuccagaugcuuua

SEQ ID NO: 1672778 - RNA, 19 nt, Artificial Sequence
  Description of Artificial Sequence: Synthetic oligonucleotide
  Antisense strand to SEQ ID NO: 1672777
uaaagcaucuggagucacc

SEQ ID NO: 1672779 - RNA, 19 nt, Artificial Sequence
  Description of Artificial Sequence: Synthetic oligonucleotide
  Sense strand starting at position 2323 of SEQ ID NO: 1561449
ggcgaguauguggacaaga

SEQ ID NO: 1672780 - RNA, 19 nt, Artificial Sequence
  Description of Artificial Sequence: Synthetic oligonucleotide
  Antisense strand to SEQ ID NO: 1672779
ucuuguccacauacucgcc

SEQ ID NO: 1672781 - RNA, 19 nt, Artificial Sequence
  Description of Artificial Sequence: Synthetic oligonucleotide
  Sense strand starting at position 2325 of SEQ ID NO: 1561449
cgaguauguggacaagaua

SEQ ID NO: 1672782 - RNA, 19 nt, Artificial Sequence
  Description of Artificial Sequence: Synthetic oligonucleotide
  Antisense strand to SEQ ID NO: 1672781
uaucuuguccacauacucg

SEQ ID NO: 1672783 - RNA, 19 nt, Artificial Sequence
  Description of Artificial Sequence: Synthetic oligonucleotide
  Sense strand starting at position 2888 of SEQ ID NO: 1561449
ugggaucauguaugcauau

SEQ ID NO: 1672784 - RNA, 19 nt, Artificial Sequence
  Description of Artificial Sequence: Synthetic oligonucleotide
  Antisense strand to SEQ ID NO: 1672783
auaugcauacaugauccca

SEQ ID NO: 1672785 - RNA, 19 nt, Artificial Sequence
  Description of Artificial Sequence: Synthetic oligonucleotide
  Sense strand starting at position 2889 of SEQ ID NO: 1561449
gggaucauguaugcauauu

SEQ ID NO: 1672786 - RNA, 19 nt, Artificial Sequence
  Description of Artificial Sequence: Synthetic oligonucleotide
  Antisense strand to SEQ ID NO: 1672785
aauaugcauacaugauccc

SEQ ID NO: 1672787 - RNA, 19 nt, Artificial Sequence
  Description of Artificial Sequence: Synthetic oligonucleotide
  Sense strand starting at position 2967 of SEQ ID NO: 1561449
agccaaagcugauuaauug

SEQ ID NO: 1672788 - RNA, 19 nt, Artificial Sequence
  Description of Artificial Sequence: Synthetic oligonucleotide
  Antisense strand to SEQ ID NO: 1672787
caauuaaucagcuuuggcu

SEQ ID NO: 1672789 - RNA, 19 nt, Artificial Sequence
  Description of Artificial Sequence: Synthetic oligonucleotide
  Sense strand starting at position 2968 of SEQ ID NO: 1561449
gccaaagcugauuaauugu

SEQ ID NO: 1672790 - RNA, 19 nt, Artificial Sequence
  Description of Artificial Sequence: Synthetic oligonucleotide
  Antisense strand to SEQ ID NO: 1672789
acaauuaaucagcuuuggc

SEQ ID NO: 1672791 - RNA, 19 nt, Artificial Sequence
  Description of Artificial Sequence: Synthetic oligonucleotide
  Sense strand starting at position 2976 of SEQ ID NO: 1561449
ugauuaauugucuagugca

SEQ ID NO: 1672792 - RNA, 19 nt, Artificial Sequence
  Description of Artificial Sequence: Synthetic oligonucleotide
  Antisense strand to SEQ ID NO: 1672791
ugcacuagacaauuaauca

SEQ ID NO: 1672793 - RNA, 19 nt, Artificial Sequence
  Description of Artificial Sequence: Synthetic oligonucleotide
  Sense strand starting at position 3019 of SEQ ID NO: 1561449
cuacauuucugguggagaa

SEQ ID NO: 1672794 - RNA, 19 nt, Artificial Sequence
  Description of Artificial Sequence: Synthetic oligonucleotide
  Antisense strand to SEQ ID NO: 1672793
uucuccaccagaaauguag

SEQ ID NO: 1672795 - RNA, 19 nt, Artificial Sequence
  Description of Artificial Sequence: Synthetic oligonucleotide
  Sense strand starting at position 3230 of SEQ ID NO: 1561449
aaaugauuauguuugguga

SEQ ID NO: 1672796 - RNA, 19 nt, Artificial Sequence
  Description of Artificial Sequence: Synthetic oligonucleotide
  Antisense strand to SEQ ID NO: 1672795
ucaccaaacauaaucauuu

SEQ ID NO: 1672797 - RNA, 19 nt, Artificial Sequence
  Description of Artificial Sequence: Synthetic oligonucleotide
  Sense strand starting at position 3233 of SEQ ID NO: 1561449
ugauuauguuuggugagga

SEQ ID NO: 1672798 - RNA, 19 nt, Artificial Sequence
  Description of Artificial Sequence: Synthetic oligonucleotide
  Antisense strand to SEQ ID NO: 1672797
uccucaccaaacauaauca

SEQ ID NO: 1672799 - RNA, 19 nt, Artificial Sequence
  Description of Artificial Sequence: Synthetic oligonucleotide
  Sense strand starting at position 3454 of SEQ ID NO: 1561449
gauguuauuugagaucuau

SEQ ID NO: 1672800 - RNA, 19 nt, Artificial Sequence
  Description of Artificial Sequence: Synthetic oligonucleotide
  Antisense strand to SEQ ID NO: 1672799
auagaucucaaauaacauc

SEQ ID NO: 1672801 - RNA, 19 nt, Artificial Sequence
  Description of Artificial Sequence: Synthetic oligonucleotide
  Sense strand starting at position 3462 of SEQ ID NO: 1561449
uugagaucuaugugugaac

SEQ ID NO: 1672802 - RNA, 19 nt, Artificial Sequence
  Description of Artificial Sequence: Synthetic oligonucleotide
  Antisense strand to SEQ ID NO: 1672801
guucacacauagaucucaa

SEQ ID NO: 1672803 - RNA, 19 nt, Artificial Sequence
  Description of Artificial Sequence: Synthetic oligonucleotide
  Sense strand starting at position 3463 of SEQ ID NO: 1561449
ugagaucuaugugugaaca

SEQ ID NO: 1672804 - RNA, 19 nt, Artificial Sequence
  Description of Artificial Sequence: Synthetic oligonucleotide
  Antisense strand to SEQ ID NO: 1672803
uguucacacauagaucuca

SEQ ID NO: 1672805 - RNA, 19 nt, Artificial Sequence
  Description of Artificial Sequence: Synthetic oligonucleotide
  Sense strand starting at position 3464 of SEQ ID NO: 1561449
gagaucuaugugugaacac

SEQ ID NO: 1672806 - RNA, 19 nt, Artificial Sequence
  Description of Artificial Sequence: Synthetic oligonucleotide
  Antisense strand to SEQ ID NO: 1672805
guguucacacauagaucuc

SEQ ID NO: 1672807 - RNA, 19 nt, Artificial Sequence
  Description of Artificial Sequence: Synthetic oligonucleotide
  Sense strand starting at position 3511 of SEQ ID NO: 1561449
aucgcuaaacucuagggaa

SEQ ID NO: 1672808 - RNA, 19 nt, Artificial Sequence
  Description of Artificial Sequence: Synthetic oligonucleotide
  Antisense strand to SEQ ID NO: 1672807
uucccuagaguuuagcgau

SEQ ID NO: 1672809 - RNA, 19 nt, Artificial Sequence
  Description of Artificial Sequence: Synthetic oligonucleotide
  Sense strand starting at position 3622 of SEQ ID NO: 1561449
ggccauccuaguggacaaa

SEQ ID NO: 1672810 - RNA, 19 nt, Artificial Sequence
  Description of Artificial Sequence: Synthetic oligonucleotide
  Antisense strand to SEQ ID NO: 1672809
uuuguccacuaggauggcc

SEQ ID NO: 1672811 - RNA, 19 nt, Artificial Sequence
  Description of Artificial Sequence: Synthetic oligonucleotide
  Sense strand starting at position 3623 of SEQ ID NO: 1561449
gccauccuaguggacaaau

SEQ ID NO: 1672812 - RNA, 19 nt, Artificial Sequence
  Description of Artificial Sequence: Synthetic oligonucleotide
  Antisense strand to SEQ ID NO: 1672811
auuuguccacuaggauggc

SEQ ID NO: 1672813 - RNA, 19 nt, Artificial Sequence
  Description of Artificial Sequence: Synthetic oligonucleotide
  Sense strand starting at position 3636 of SEQ ID NO: 1561449
acaaaugaaugggacauua

SEQ ID NO: 1672814 - RNA, 19 nt, Artificial Sequence
  Description of Artificial Sequence: Synthetic oligonucleotide
  Antisense strand to SEQ ID NO: 1672813
uaaugucccauucauuugu

SEQ ID NO: 1672815 - RNA, 19 nt, Artificial Sequence
  Description of Artificial Sequence: Synthetic oligonucleotide
  Sense strand starting at position 3658 of SEQ ID NO: 1561449
uccaaccugccugguaaua

SEQ ID NO: 1672816 - RNA, 19 nt, Artificial Sequence
  Description of Artificial Sequence: Synthetic oligonucleotide
  Antisense strand to SEQ ID NO: 1672815
uauuaccaggcagguugga

SEQ ID NO: 1672817 - RNA, 19 nt, Artificial Sequence
  Description of Artificial Sequence: Synthetic oligonucleotide
  Sense strand starting at position 3717 of SEQ ID NO: 1561449
accuauaaggaagguguua

SEQ ID NO: 1672818 - RNA, 19 nt, Artificial Sequence
  Description of Artificial Sequence: Synthetic oligonucleotide
  Antisense strand to SEQ ID NO: 1672817
uaacaccuuccuuauaggu

SEQ ID NO: 1672819 - RNA, 19 nt, Artificial Sequence
  Description of Artificial Sequence: Synthetic oligonucleotide
  Sense strand starting at position 3719 of SEQ ID NO: 1561449
cuauaaggaagguguuacu

SEQ ID NO: 1672820 - RNA, 19 nt, Artificial Sequence
  Description of Artificial Sequence: Synthetic oligonucleotide
  Antisense strand to SEQ ID NO: 1672819
aguaacaccuuccuuauag

SEQ ID NO: 1672821 - RNA, 19 nt, Artificial Sequence
  Description of Artificial Sequence: Synthetic oligonucleotide
  Sense strand starting at position 3728 of SEQ ID NO: 1561449
agguguuacuaucuaucac

SEQ ID NO: 1672822 - RNA, 19 nt, Artificial Sequence
  Description of Artificial Sequence: Synthetic oligonucleotide
  Antisense strand to SEQ ID NO: 1672821
gugauagauaguaacaccu

SEQ ID NO: 1672823 - RNA, 19 nt, Artificial Sequence
  Description of Artificial Sequence: Synthetic oligonucleotide
  Sense strand starting at position 3763 of SEQ ID NO: 1561449
aacauauggugaucugugu

SEQ ID NO: 1672824 - RNA, 19 nt, Artificial Sequence
  Description of Artificial Sequence: Synthetic oligonucleotide
  Antisense strand to SEQ ID NO: 1672823
acacagaucaccauauguu

SEQ ID NO: 1672825 - RNA, 19 nt, Artificial Sequence
  Description of Artificial Sequence: Synthetic oligonucleotide
  Sense strand starting at position 3923 of SEQ ID NO: 1561449
ugugaauagcauuaaucau

SEQ ID NO: 1672826 - RNA, 19 nt, Artificial Sequence
  Description of Artificial Sequence: Synthetic oligonucleotide
  Antisense strand to SEQ ID NO: 1672825
augauuaaugcuauucaca

SEQ ID NO: 1672827 - RNA, 19 nt, Artificial Sequence
  Description of Artificial Sequence: Synthetic oligonucleotide
  Sense strand starting at position 97 of SEQ ID NO: 1561450
ggugauauuagauaguguu

SEQ ID NO: 1672828 - RNA, 19 nt, Artificial Sequence
  Description of Artificial Sequence: Synthetic oligonucleotide
  Antisense strand to SEQ ID NO: 1672827
aacacuaucuaauaucacc

SEQ ID NO: 1672829 - RNA, 19 nt, Artificial Sequence
  Description of Artificial Sequence: Synthetic oligonucleotide
  Sense strand starting at position 160 of SEQ ID NO: 1561450
gauaucuuagaaugguuaa

SEQ ID NO: 1672830 - RNA, 19 nt, Artificial Sequence
  Description of Artificial Sequence: Synthetic oligonucleotide
  Antisense strand to SEQ ID NO: 1672829
uuaaccauucuaagauauc

SEQ ID NO: 1672831 - RNA, 19 nt, Artificial Sequence
  Description of Artificial Sequence: Synthetic oligonucleotide
  Sense strand starting at position 310 of SEQ ID NO: 1561450
gcaguucuccagcaucaca

SEQ ID NO: 1672832 - RNA, 19 nt, Artificial Sequence
  Description of Artificial Sequence: Synthetic oligonucleotide
  Antisense strand to SEQ ID NO: 1672831
ugugaugcuggagaacugc

SEQ ID NO: 1672833 - RNA, 19 nt, Artificial Sequence
  Description of Artificial Sequence: Synthetic oligonucleotide
  Sense strand starting at position 391 of SEQ ID NO: 1561450
ggccacauccucgaagguu

SEQ ID NO: 1672834 - RNA, 19 nt, Artificial Sequence
  Description of Artificial Sequence: Synthetic oligonucleotide
  Antisense strand to SEQ ID NO: 1672833
aaccuucgaggauguggcc

SEQ ID NO: 1672835 - RNA, 19 nt, Artificial Sequence
  Description of Artificial Sequence: Synthetic oligonucleotide
  Sense strand starting at position 415 of SEQ ID NO: 1561450
gcccuaaagcauugcaaac

SEQ ID NO: 1672836 - RNA, 19 nt, Artificial Sequence
  Description of Artificial Sequence: Synthetic oligonucleotide
  Antisense strand to SEQ ID NO: 1672835
guuugcaaugcuuuagggc

SEQ ID NO: 1672837 - RNA, 19 nt, Artificial Sequence
  Description of Artificial Sequence: Synthetic oligonucleotide
  Sense strand starting at position 754 of SEQ ID NO: 1561450
ggaucaugggcccgugaca

SEQ ID NO: 1672838 - RNA, 19 nt, Artificial Sequence
  Description of Artificial Sequence: Synthetic oligonucleotide
  Antisense strand to SEQ ID NO: 1672837
ugucacgggcccaugaucc

SEQ ID NO: 1672839 - RNA, 19 nt, Artificial Sequence
  Description of Artificial Sequence: Synthetic oligonucleotide
  Sense strand starting at position 784 of SEQ ID NO: 1561450
agagaaauacuugguaagu

SEQ ID NO: 1672840 - RNA, 19 nt, Artificial Sequence
  Description of Artificial Sequence: Synthetic oligonucleotide
  Antisense strand to SEQ ID NO: 1672839
acuuaccaaguauuucucu

SEQ ID NO: 1672841 - RNA, 19 nt, Artificial Sequence
  Description of Artificial Sequence: Synthetic oligonucleotide
  Sense strand starting at position 785 of SEQ ID NO: 1561450
gagaaauacuugguaagug

SEQ ID NO: 1672842 - RNA, 19 nt, Artificial Sequence
  Description of Artificial Sequence: Synthetic oligonucleotide
  Antisense strand to SEQ ID NO: 1672841
cacuuaccaaguauuucuc

SEQ ID NO: 1672843 - RNA, 19 nt, Artificial Sequence
  Description of Artificial Sequence: Synthetic oligonucleotide
  Sense strand starting at position 790 of SEQ ID NO: 1561450
auacuugguaagugaauga

SEQ ID NO: 1672844 - RNA, 19 nt, Artificial Sequence
  Description of Artificial Sequence: Synthetic oligonucleotide
  Antisense strand to SEQ ID NO: 1672843
ucauucacuuaccaaguau

SEQ ID NO: 1672845 - RNA, 19 nt, Artificial Sequence
  Description of Artificial Sequence: Synthetic oligonucleotide
  Sense strand starting at position 794 of SEQ ID NO: 1561450
uugguaagugaaugacuga

SEQ ID NO: 1672846 - RNA, 19 nt, Artificial Sequence
  Description of Artificial Sequence: Synthetic oligonucleotide
  Antisense strand to SEQ ID NO: 1672845
ucagucauucacuuaccaa

SEQ ID NO: 1672847 - RNA, 19 nt, Artificial Sequence
  Description of Artificial Sequence: Synthetic oligonucleotide
  Sense strand starting at position 807 of SEQ ID NO: 1561450
gacugauuuccguggcguu

SEQ ID NO: 1672848 - RNA, 19 nt, Artificial Sequence
  Description of Artificial Sequence: Synthetic oligonucleotide
  Antisense strand to SEQ ID NO: 1672847
aacgccacggaaaucaguc

SEQ ID NO: 1672849 - RNA, 19 nt, Artificial Sequence
  Description of Artificial Sequence: Synthetic oligonucleotide
  Sense strand starting at position 808 of SEQ ID NO: 1561450
acugauuuccguggcguuu

SEQ ID NO: 1672850 - RNA, 19 nt, Artificial Sequence
  Description of Artificial Sequence: Synthetic oligonucleotide
  Antisense strand to SEQ ID NO: 1672849
aaacgccacggaaaucagu

SEQ ID NO: 1672851 - RNA, 19 nt, Artificial Sequence
  Description of Artificial Sequence: Synthetic oligonucleotide
  Sense strand starting at position 825 of SEQ ID NO: 1561450
uuauuaauugcuuggguuu

SEQ ID NO: 1672852 - RNA, 19 nt, Artificial Sequence
  Description of Artificial Sequence: Synthetic oligonucleotide
  Antisense strand to SEQ ID NO: 1672851
aaacccaagcaauuaauaa

SEQ ID NO: 1672853 - RNA, 19 nt, Artificial Sequence
  Description of Artificial Sequence: Synthetic oligonucleotide
  Sense strand starting at position 826 of SEQ ID NO: 1561450
uauuaauugcuuggguuua

SEQ ID NO: 1672854 - RNA, 19 nt, Artificial Sequence
  Description of Artificial Sequence: Synthetic oligonucleotide
  Antisense strand to SEQ ID NO: 1672853
uaaacccaagcaauuaaua

SEQ ID NO: 1672855 - RNA, 19 nt, Artificial Sequence
  Description of Artificial Sequence: Synthetic oligonucleotide
  Sense strand starting at position 828 of SEQ ID NO: 1561450
uuaauugcuuggguuuaga

SEQ ID NO: 1672856 - RNA, 19 nt, Artificial Sequence
  Description of Artificial Sequence: Synthetic oligonucleotide
  Antisense strand to SEQ ID NO: 1672855
ucuaaacccaagcaauuaa

SEQ ID NO: 1672857 - RNA, 19 nt, Artificial Sequence
  Description of Artificial Sequence: Synthetic oligonucleotide
  Sense strand starting at position 831 of SEQ ID NO: 1561450
auugcuuggguuuagaaca

SEQ ID NO: 1672858 - RNA, 19 nt, Artificial Sequence
  Description of Artificial Sequence: Synthetic oligonucleotide
  Antisense strand to SEQ ID NO: 1672857
uguucuaaacccaagcaau

SEQ ID NO: 1672859 - RNA, 19 nt, Artificial Sequence
  Description of Artificial Sequence: Synthetic oligonucleotide
  Sense strand starting at position 981 of SEQ ID NO: 1561450
ccaucugaugccuggaaau

SEQ ID NO: 1672860 - RNA, 19 nt, Artificial Sequence
  Description of Artificial Sequence: Synthetic oligonucleotide
  Antisense strand to SEQ ID NO: 1672859
auuuccaggcaucagaugg

SEQ ID NO: 1672861 - RNA, 19 nt, Artificial Sequence
  Description of Artificial Sequence: Synthetic oligonucleotide
  Sense strand starting at position 1215 of SEQ ID NO: 1561450
aaaugagucccauggauuc

SEQ ID NO: 1672862 - RNA, 19 nt, Artificial Sequence
  Description of Artificial Sequence: Synthetic oligonucleotide
  Antisense strand to SEQ ID NO: 1672861
gaauccaugggacucauuu

SEQ ID NO: 1672863 - RNA, 19 nt, Artificial Sequence
  Description of Artificial Sequence: Synthetic oligonucleotide
  Sense strand starting at position 1227 of SEQ ID NO: 1561450
uggauucaggcuugucuga

SEQ ID NO: 1672864 - RNA, 19 nt, Artificial Sequence
  Description of Artificial Sequence: Synthetic oligonucleotide
  Antisense strand to SEQ ID NO: 1672863
ucagacaagccugaaucca

SEQ ID NO: 1672865 - RNA, 19 nt, Artificial Sequence
  Description of Artificial Sequence: Synthetic oligonucleotide
  Sense strand starting at position 1827 of SEQ ID NO: 1561450
cgcagcgcucuggaagaaa

SEQ ID NO: 1672866 - RNA, 19 nt, Artificial Sequence
  Description of Artificial Sequence: Synthetic oligonucleotide
  Antisense strand to SEQ ID NO: 1672865
uuucuuccagagcgcugcg

SEQ ID NO: 1672867 - RNA, 19 nt, Artificial Sequence
  Description of Artificial Sequence: Synthetic oligonucleotide
  Sense strand starting at position 1845 of SEQ ID NO: 1561450
acgggaaugcuccaagucu

SEQ ID NO: 1672868 - RNA, 19 nt, Artificial Sequence
  Description of Artificial Sequence: Synthetic oligonucleotide
  Antisense strand to SEQ ID NO: 1672867
agacuuggagcauucccgu

SEQ ID NO: 1672869 - RNA, 19 nt, Artificial Sequence
  Description of Artificial Sequence: Synthetic oligonucleotide
  Sense strand starting at position 2602 of SEQ ID NO: 1561450
cugugcucugccucaguua

SEQ ID NO: 1672870 - RNA, 19 nt, Artificial Sequence
  Description of Artificial Sequence: Synthetic oligonucleotide
  Antisense strand to SEQ ID NO: 1672869
uaacugaggcagagcacag

SEQ ID NO: 1672871 - RNA, 19 nt, Artificial Sequence
  Description of Artificial Sequence: Synthetic oligonucleotide
  Sense strand starting at position 2632 of SEQ ID NO: 1561450
gcccauguucugccuguua

SEQ ID NO: 1672872 - RNA, 19 nt, Artificial Sequence
  Description of Artificial Sequence: Synthetic oligonucleotide
  Antisense strand to SEQ ID NO: 1672871
uaacaggcagaacaugggc

SEQ ID NO: 1672873 - RNA, 19 nt, Artificial Sequence
  Description of Artificial Sequence: Synthetic oligonucleotide
  Sense strand starting at position 3101 of SEQ ID NO: 1561450
gguaacugcuuccuaacga

SEQ ID NO: 1672874 - RNA, 19 nt, Artificial Sequence
  Description of Artificial Sequence: Synthetic oligonucleotide
  Antisense strand to SEQ ID NO: 1672873
ucguuaggaagcaguuacc

SEQ ID NO: 1672875 - RNA, 19 nt, Artificial Sequence
  Description of Artificial Sequence: Synthetic oligonucleotide
  Sense strand starting at position 3193 of SEQ ID NO: 1561450
cugugugaccagcagaaua

SEQ ID NO: 1672876 - RNA, 19 nt, Artificial Sequence
  Description of Artificial Sequence: Synthetic oligonucleotide
  Antisense strand to SEQ ID NO: 1672875
uauucugcuggucacacag

SEQ ID NO: 1672877 - RNA, 19 nt, Artificial Sequence
  Description of Artificial Sequence: Synthetic oligonucleotide
  Sense strand starting at position 3204 of SEQ ID NO: 1561450
gcagaauauggcugaggag

SEQ ID NO: 1672878 - RNA, 19 nt, Artificial Sequence
  Description of Artificial Sequence: Synthetic oligonucleotide
  Antisense strand to SEQ ID NO: 1672877
cuccucagccauauucugc

SEQ ID NO: 1672879 - RNA, 19 nt, Artificial Sequence
  Description of Artificial Sequence: Synthetic oligonucleotide
  Sense strand starting at position 3302 of SEQ ID NO: 1561450
gauguugcucuagaggaca

SEQ ID NO: 1672880 - RNA, 19 nt, Artificial Sequence
  Description of Artificial Sequence: Synthetic oligonucleotide
  Antisense strand to SEQ ID NO: 1672879
uguccucuagagcaacauc

SEQ ID NO: 1672881 - RNA, 19 nt, Artificial Sequence
  Description of Artificial Sequence: Synthetic oligonucleotide
  Sense strand starting at position 3473 of SEQ ID NO: 1561450
gacagccuucugcaaguuu

SEQ ID NO: 1672882 - RNA, 19 nt, Artificial Sequence
  Description of Artificial Sequence: Synthetic oligonucleotide
  Antisense strand to SEQ ID NO: 1672881
aaacuugcagaaggcuguc

SEQ ID NO: 1672883 - RNA, 19 nt, Artificial Sequence
  Description of Artificial Sequence: Synthetic oligonucleotide
  Sense strand starting at position 3517 of SEQ ID NO: 1561450
gcuccugaauuccugaaac

SEQ ID NO: 1672884 - RNA, 19 nt, Artificial Sequence
  Description of Artificial Sequence: Synthetic oligonucleotide
  Antisense strand to SEQ ID NO: 1672883
guuucaggaauucaggagc

SEQ ID NO: 1672885 - RNA, 19 nt, Artificial Sequence
  Description of Artificial Sequence: Synthetic oligonucleotide
  Sense strand starting at position 3551 of SEQ ID NO: 1561450
gacgauacauggucauugu

SEQ ID NO: 1672886 - RNA, 19 nt, Artificial Sequence
  Description of Artificial Sequence: Synthetic oligonucleotide
  Antisense strand to SEQ ID NO: 1672885
acaaugaccauguaucguc

SEQ ID NO: 1672887 - RNA, 19 nt, Artificial Sequence
  Description of Artificial Sequence: Synthetic oligonucleotide
  Sense strand starting at position 3552 of SEQ ID NO: 1561450
acgauacauggucauuguu

SEQ ID NO: 1672888 - RNA, 19 nt, Artificial Sequence
  Description of Artificial Sequence: Synthetic oligonucleotide
  Antisense strand to SEQ ID NO: 1672887
aacaaugaccauguaucgu

SEQ ID NO: 1672889 - RNA, 19 nt, Artificial Sequence
  Description of Artificial Sequence: Synthetic oligonucleotide
  Sense strand starting at position 3554 of SEQ ID NO: 1561450
gauacauggucauuguuuc

SEQ ID NO: 1672890 - RNA, 19 nt, Artificial Sequence
  Description of Artificial Sequence: Synthetic oligonucleotide
  Antisense strand to SEQ ID NO: 1672889
gaaacaaugaccauguauc

SEQ ID NO: 1672891 - RNA, 19 nt, Artificial Sequence
  Description of Artificial Sequence: Synthetic oligonucleotide
  Sense strand starting at position 3575 of SEQ ID NO: 1561450
gugacuaagguuugagauc

SEQ ID NO: 1672892 - RNA, 19 nt, Artificial Sequence
  Description of Artificial Sequence: Synthetic oligonucleotide
  Antisense strand to SEQ ID NO: 1672891
gaucucaaaccuuagucac

SEQ ID NO: 1672893 - RNA, 19 nt, Artificial Sequence
  Description of Artificial Sequence: Synthetic oligonucleotide
  Sense strand starting at position 3591 of SEQ ID NO: 1561450
aucauuuguuaggcagcaa

SEQ ID NO: 1672894 - RNA, 19 nt, Artificial Sequence
  Description of Artificial Sequence: Synthetic oligonucleotide
  Antisense strand to SEQ ID NO: 1672893
uugcugccuaacaaaugau

SEQ ID NO: 1672895 - RNA, 19 nt, Artificial Sequence
  Description of Artificial Sequence: Synthetic oligonucleotide
  Sense strand starting at position 3595 of SEQ ID NO: 1561450
uuuguuaggcagcaagaga

SEQ ID NO: 1672896 - RNA, 19 nt, Artificial Sequence
  Description of Artificial Sequence: Synthetic oligonucleotide
  Antisense strand to SEQ ID NO: 1672895
ucucuugcugccuaacaaa

SEQ ID NO: 1672897 - RNA, 19 nt, Artificial Sequence
  Description of Artificial Sequence: Synthetic oligonucleotide
  Sense strand starting at position 3650 of SEQ ID NO: 1561450
ccugcuucucaggguaaag

SEQ ID NO: 1672898 - RNA, 19 nt, Artificial Sequence
  Description of Artificial Sequence: Synthetic oligonucleotide
  Antisense strand to SEQ ID NO: 1672897
cuuuacccugagaagcagg

SEQ ID NO: 1672899 - RNA, 19 nt, Artificial Sequence
  Description of Artificial Sequence: Synthetic oligonucleotide
  Sense strand starting at position 3652 of SEQ ID NO: 1561450
ugcuucucaggguaaagau

SEQ ID NO: 1672900 - RNA, 19 nt, Artificial Sequence
  Description of Artificial Sequence: Synthetic oligonucleotide
  Antisense strand to SEQ ID NO: 1672899
aucuuuacccugagaagca

SEQ ID NO: 1672901 - RNA, 19 nt, Artificial Sequence
  Description of Artificial Sequence: Synthetic oligonucleotide
  Sense strand starting at position 3664 of SEQ ID NO: 1561450
uaaagaucaugaggaggaa

SEQ ID NO: 1672902 - RNA, 19 nt, Artificial Sequence
  Description of Artificial Sequence: Synthetic oligonucleotide
  Antisense strand to SEQ ID NO: 1672901
uuccuccucaugaucuuua

SEQ ID NO: 1672903 - RNA, 19 nt, Artificial Sequence
  Description of Artificial Sequence: Synthetic oligonucleotide
  Sense strand starting at position 3676 of SEQ ID NO: 1561450
ggaggaaucuacuuuccug

SEQ ID NO: 1672904 - RNA, 19 nt, Artificial Sequence
  Description of Artificial Sequence: Synthetic oligonucleotide
  Antisense strand to SEQ ID NO: 1672903
caggaaaguagauuccucc

SEQ ID NO: 1672905 - RNA, 19 nt, Artificial Sequence
  Description of Artificial Sequence: Synthetic oligonucleotide
  Sense strand starting at position 3918 of SEQ ID NO: 1561450
gcaucuucuguagugcgau

SEQ ID NO: 1672906 - RNA, 19 nt, Artificial Sequence
  Description of Artificial Sequence: Synthetic oligonucleotide
  Antisense strand to SEQ ID NO: 1672905
aucgcacuacagaagaugc

SEQ ID NO: 1672907 - RNA, 19 nt, Artificial Sequence
  Description of Artificial Sequence: Synthetic oligonucleotide
  Sense strand starting at position 290 of SEQ ID NO: 1561451
agauguucucuagaucagu

SEQ ID NO: 1672908 - RNA, 19 nt, Artificial Sequence
  Description of Artificial Sequence: Synthetic oligonucleotide
  Antisense strand to SEQ ID NO: 1672907
acugaucuagagaacaucu

SEQ ID NO: 1672909 - RNA, 19 nt, Artificial Sequence
  Description of Artificial Sequence: Synthetic oligonucleotide
  Sense strand starting at position 293 of SEQ ID NO: 1561451
uguucucuagaucaguauu

SEQ ID NO: 1672910 - RNA, 19 nt, Artificial Sequence
  Description of Artificial Sequence: Synthetic oligonucleotide
  Antisense strand to SEQ ID NO: 1672909
aauacugaucuagagaaca

SEQ ID NO: 1672911 - RNA, 19 nt, Artificial Sequence
  Description of Artificial Sequence: Synthetic oligonucleotide
  Sense strand starting at position 495 of SEQ ID NO: 1561451
gacagaggcuugcccuauu

SEQ ID NO: 1672912 - RNA, 19 nt, Artificial Sequence
  Description of Artificial Sequence: Synthetic oligonucleotide
  Antisense strand to SEQ ID NO: 1672911
aauagggcaagccucuguc

SEQ ID NO: 1672913 - RNA, 19 nt, Artificial Sequence
  Description of Artificial Sequence: Synthetic oligonucleotide
  Sense strand starting at position 772 of SEQ ID NO: 1561451
gagugagaucuaggugaug

SEQ ID NO: 1672914 - RNA, 19 nt, Artificial Sequence
  Description of Artificial Sequence: Synthetic oligonucleotide
  Antisense strand to SEQ ID NO: 1672913
caucaccuagaucucacuc

SEQ ID NO: 1672915 - RNA, 19 nt, Artificial Sequence
  Description of Artificial Sequence: Synthetic oligonucleotide
  Sense strand starting at position 822 of SEQ ID NO: 1561451
uuuccuuggugguaaauuu

SEQ ID NO: 1672916 - RNA, 19 nt, Artificial Sequence
  Description of Artificial Sequence: Synthetic oligonucleotide
  Antisense strand to SEQ ID NO: 1672915
aaauuuaccaccaaggaaa

SEQ ID NO: 1672917 - RNA, 19 nt, Artificial Sequence
  Description of Artificial Sequence: Synthetic oligonucleotide
  Sense strand starting at position 862 of SEQ ID NO: 1561451
acucaugcauucgauggua

SEQ ID NO: 1672918 - RNA, 19 nt, Artificial Sequence
  Description of Artificial Sequence: Synthetic oligonucleotide
  Antisense strand to SEQ ID NO: 1672917
uaccaucgaaugcaugagu

SEQ ID NO: 1672919 - RNA, 19 nt, Artificial Sequence
  Description of Artificial Sequence: Synthetic oligonucleotide
  Sense strand starting at position 865 of SEQ ID NO: 1561451
caugcauucgaugguauca

SEQ ID NO: 1672920 - RNA, 19 nt, Artificial Sequence
  Description of Artificial Sequence: Synthetic oligonucleotide
  Antisense strand to SEQ ID NO: 1672919
ugauaccaucgaaugcaug

SEQ ID NO: 1672921 - RNA, 19 nt, Artificial Sequence
  Description of Artificial Sequence: Synthetic oligonucleotide
  Sense strand starting at position 867 of SEQ ID NO: 1561451
ugcauucgaugguaucaga

SEQ ID NO: 1672922 - RNA, 19 nt, Artificial Sequence
  Description of Artificial Sequence: Synthetic oligonucleotide
  Antisense strand to SEQ ID NO: 1672921
ucugauaccaucgaaugca

SEQ ID NO: 1672923 - RNA, 19 nt, Artificial Sequence
  Description of Artificial Sequence: Synthetic oligonucleotide
  Sense strand starting at position 878 of SEQ ID NO: 1561451
guaucagauccaugugcuc

SEQ ID NO: 1672924 - RNA, 19 nt, Artificial Sequence
  Description of Artificial Sequence: Synthetic oligonucleotide
  Antisense strand to SEQ ID NO: 1672923
gagcacauggaucugauac

SEQ ID NO: 1672925 - RNA, 19 nt, Artificial Sequence
  Description of Artificial Sequence: Synthetic oligonucleotide
  Sense strand starting at position 883 of SEQ ID NO: 1561451
agauccaugugcucucgaa

SEQ ID NO: 1672926 - RNA, 19 nt, Artificial Sequence
  Description of Artificial Sequence: Synthetic oligonucleotide
  Antisense strand to SEQ ID NO: 1672925
uucgagagcacauggaucu

SEQ ID NO: 1672927 - RNA, 19 nt, Artificial Sequence
  Description of Artificial Sequence: Synthetic oligonucleotide
  Sense strand starting at position 887 of SEQ ID NO: 1561451
ccaugugcucucgaacaac

SEQ ID NO: 1672928 - RNA, 19 nt, Artificial Sequence
  Description of Artificial Sequence: Synthetic oligonucleotide
  Antisense strand to SEQ ID NO: 1672927
guuguucgagagcacaugg

SEQ ID NO: 1672929 - RNA, 19 nt, Artificial Sequence
  Description of Artificial Sequence: Synthetic oligonucleotide
  Sense strand starting at position 981 of SEQ ID NO: 1561451
ugaagugcucaccgggaca

SEQ ID NO: 1672930 - RNA, 19 nt, Artificial Sequence
  Description of Artificial Sequence: Synthetic oligonucleotide
  Antisense strand to SEQ ID NO: 1672929
ugucccggugagcacuuca

SEQ ID NO: 1672931 - RNA, 19 nt, Artificial Sequence
  Description of Artificial Sequence: Synthetic oligonucleotide
  Sense strand starting at position 1065 of SEQ ID NO: 1561451
cagagaugcuguuccuuau

SEQ ID NO: 1672932 - RNA, 19 nt, Artificial Sequence
  Description of Artificial Sequence: Synthetic oligonucleotide
  Antisense strand to SEQ ID NO: 1672931
auaaggaacagcaucucug

SEQ ID NO: 1672933 - RNA, 19 nt, Artificial Sequence
  Description of Artificial Sequence: Synthetic oligonucleotide
  Sense strand starting at position 1068 of SEQ ID NO: 1561451
agaugcuguuccuuauaga

SEQ ID NO: 1672934 - RNA, 19 nt, Artificial Sequence
  Description of Artificial Sequence: Synthetic oligonucleotide
  Antisense strand to SEQ ID NO: 1672933
ucuauaaggaacagcaucu

SEQ ID NO: 1672935 - RNA, 19 nt, Artificial Sequence
  Description of Artificial Sequence: Synthetic oligonucleotide
  Sense strand starting at position 1069 of SEQ ID NO: 1561451
gaugcuguuccuuauagag

SEQ ID NO: 1672936 - RNA, 19 nt, Artificial Sequence
  Description of Artificial Sequence: Synthetic oligonucleotide
  Antisense strand to SEQ ID NO: 1672935
cucuauaaggaacagcauc

SEQ ID NO: 1672937 - RNA, 19 nt, Artificial Sequence
  Description of Artificial Sequence: Synthetic oligonucleotide
  Sense strand starting at position 1071 of SEQ ID NO: 1561451
ugcuguuccuuauagagaa

SEQ ID NO: 1672938 - RNA, 19 nt, Artificial Sequence
  Description of Artificial Sequence: Synthetic oligonucleotide
  Antisense strand to SEQ ID NO: 1672937
uucucuauaaggaacagca

SEQ ID NO: 1672939 - RNA, 19 nt, Artificial Sequence
  Description of Artificial Sequence: Synthetic oligonucleotide
  Sense strand starting at position 1984 of SEQ ID NO: 1561451
gcucaccuccuguaaauga

SEQ ID NO: 1672940 - RNA, 19 nt, Artificial Sequence
  Description of Artificial Sequence: Synthetic oligonucleotide
  Antisense strand to SEQ ID NO: 1672939
ucauuuacaggaggugagc

SEQ ID NO: 1672941 - RNA, 19 nt, Artificial Sequence
  Description of Artificial Sequence: Synthetic oligonucleotide
  Sense strand starting at position 2010 of SEQ ID NO: 1561451
gcccgcguucagucugauu

SEQ ID NO: 1672942 - RNA, 19 nt, Artificial Sequence
  Description of Artificial Sequence: Synthetic oligonucleotide
  Antisense strand to SEQ ID NO: 1672941
aaucagacugaacgcgggc

SEQ ID NO: 1672943 - RNA, 19 nt, Artificial Sequence
  Description of Artificial Sequence: Synthetic oligonucleotide
  Sense strand starting at position 2045 of SEQ ID NO: 1561451
caaccagagucugaaguua

SEQ ID NO: 1672944 - RNA, 19 nt, Artificial Sequence
  Description of Artificial Sequence: Synthetic oligonucleotide
  Antisense strand to SEQ ID NO: 1672943
uaacuucagacucugguug

SEQ ID NO: 1672945 - RNA, 19 nt, Artificial Sequence
  Description of Artificial Sequence: Synthetic oligonucleotide
  Sense strand starting at position 2125 of SEQ ID NO: 1561451
gggugaaguuacgacguua

SEQ ID NO: 1672946 - RNA, 19 nt, Artificial Sequence
  Description of Artificial Sequence: Synthetic oligonucleotide
  Antisense strand to SEQ ID NO: 1672945
uaacgucguaacuucaccc

SEQ ID NO: 1672947 - RNA, 19 nt, Artificial Sequence
  Description of Artificial Sequence: Synthetic oligonucleotide
  Sense strand starting at position 2179 of SEQ ID NO: 1561451
ggccaucagucugauuugu

SEQ ID NO: 1672948 - RNA, 19 nt, Artificial Sequence
  Description of Artificial Sequence: Synthetic oligonucleotide
  Antisense strand to SEQ ID NO: 1672947
acaaaucagacugauggcc

SEQ ID NO: 1672949 - RNA, 19 nt, Artificial Sequence
  Description of Artificial Sequence: Synthetic oligonucleotide
  Sense strand starting at position 2211 of SEQ ID NO: 1561451
uuuccuaucugccagcaga

SEQ ID NO: 1672950 - RNA, 19 nt, Artificial Sequence
  Description of Artificial Sequence: Synthetic oligonucleotide
  Antisense strand to SEQ ID NO: 1672949
ucugcuggcagauaggaaa

SEQ ID NO: 1672951 - RNA, 19 nt, Artificial Sequence
  Description of Artificial Sequence: Synthetic oligonucleotide
  Sense strand starting at position 2398 of SEQ ID NO: 1561451
agacuagaaugcuccuauu

SEQ ID NO: 1672952 - RNA, 19 nt, Artificial Sequence
  Description of Artificial Sequence: Synthetic oligonucleotide
  Antisense strand to SEQ ID NO: 1672951
aauaggagcauucuagucu

SEQ ID NO: 1672953 - RNA, 19 nt, Artificial Sequence
  Description of Artificial Sequence: Synthetic oligonucleotide
  Sense strand starting at position 2401 of SEQ ID NO: 1561451
cuagaaugcuccuauugga

SEQ ID NO: 1672954 - RNA, 19 nt, Artificial Sequence
  Description of Artificial Sequence: Synthetic oligonucleotide
  Antisense strand to SEQ ID NO: 1672953
uccaauaggagcauucuag

SEQ ID NO: 1672955 - RNA, 19 nt, Artificial Sequence
  Description of Artificial Sequence: Synthetic oligonucleotide
  Sense strand starting at position 2590 of SEQ ID NO: 1561451
ggacguaguuaagagcaua

SEQ ID NO: 1672956 - RNA, 19 nt, Artificial Sequence
  Description of Artificial Sequence: Synthetic oligonucleotide
  Antisense strand to SEQ ID NO: 1672955
uaugcucuuaacuacgucc

SEQ ID NO: 1672957 - RNA, 19 nt, Artificial Sequence
  Description of Artificial Sequence: Synthetic oligonucleotide
  Sense strand starting at position 2593 of SEQ ID NO: 1561451
cguaguuaagagcauagau

SEQ ID NO: 1672958 - RNA, 19 nt, Artificial Sequence
  Description of Artificial Sequence: Synthetic oligonucleotide
  Antisense strand to SEQ ID NO: 1672957
aucuaugcucuuaacuacg

SEQ ID NO: 1672959 - RNA, 19 nt, Artificial Sequence
  Description of Artificial Sequence: Synthetic oligonucleotide
  Sense strand starting at position 2668 of SEQ ID NO: 1561451
uaaggccaauucgugauaa

SEQ ID NO: 1672960 - RNA, 19 nt, Artificial Sequence
  Description of Artificial Sequence: Synthetic oligonucleotide
  Antisense strand to SEQ ID NO: 1672959
uuaucacgaauuggccuua

SEQ ID NO: 1672961 - RNA, 19 nt, Artificial Sequence
  Description of Artificial Sequence: Synthetic oligonucleotide
  Sense strand starting at position 2669 of SEQ ID NO: 1561451
aaggccaauucgugauaau

SEQ ID NO: 1672962 - RNA, 19 nt, Artificial Sequence
  Description of Artificial Sequence: Synthetic oligonucleotide
  Antisense strand to SEQ ID NO: 1672961
auuaucacgaauuggccuu

SEQ ID NO: 1672963 - RNA, 19 nt, Artificial Sequence
  Description of Artificial Sequence: Synthetic oligonucleotide
  Sense strand starting at position 2670 of SEQ ID NO: 1561451
aggccaauucgugauaauu

SEQ ID NO: 1672964 - RNA, 19 nt, Artificial Sequence
  Description of Artificial Sequence: Synthetic oligonucleotide
  Antisense strand to SEQ ID NO: 1672963
aauuaucacgaauuggccu

SEQ ID NO: 1672965 - RNA, 19 nt, Artificial Sequence
  Description of Artificial Sequence: Synthetic oligonucleotide
  Sense strand starting at position 2672 of SEQ ID NO: 1561451
gccaauucgugauaauuuc

SEQ ID NO: 1672966 - RNA, 19 nt, Artificial Sequence
  Description of Artificial Sequence: Synthetic oligonucleotide
  Antisense strand to SEQ ID NO: 1672965
gaaauuaucacgaauuggc

SEQ ID NO: 1672967 - RNA, 19 nt, Artificial Sequence
  Description of Artificial Sequence: Synthetic oligonucleotide
  Sense strand starting at position 2923 of SEQ ID NO: 1561451
guacuaauguguccggaau

SEQ ID NO: 1672968 - RNA, 19 nt, Artificial Sequence
  Description of Artificial Sequence: Synthetic oligonucleotide
  Antisense strand to SEQ ID NO: 1672967
auuccggacacauuaguac

SEQ ID NO: 1672969 - RNA, 19 nt, Artificial Sequence
  Description of Artificial Sequence: Synthetic oligonucleotide
  Sense strand starting at position 122 of SEQ ID NO: 1561452
ucaggugaauagucuaguu

SEQ ID NO: 1672970 - RNA, 19 nt, Artificial Sequence
  Description of Artificial Sequence: Synthetic oligonucleotide
  Antisense strand to SEQ ID NO: 1672969
aacuagacuauucaccuga

SEQ ID NO: 1672971 - RNA, 19 nt, Artificial Sequence
  Description of Artificial Sequence: Synthetic oligonucleotide
  Sense strand starting at position 124 of SEQ ID NO: 1561452
aggugaauagucuaguuaa

SEQ ID NO: 1672972 - RNA, 19 nt, Artificial Sequence
  Description of Artificial Sequence: Synthetic oligonucleotide
  Antisense strand to SEQ ID NO: 1672971
uuaacuagacuauucaccu

SEQ ID NO: 1672973 - RNA, 19 nt, Artificial Sequence
  Description of Artificial Sequence: Synthetic oligonucleotide
  Sense strand starting at position 343 of SEQ ID NO: 1561452
uuaaauggcucaugauaaa

SEQ ID NO: 1672974 - RNA, 19 nt, Artificial Sequence
  Description of Artificial Sequence: Synthetic oligonucleotide
  Antisense strand to SEQ ID NO: 1672973
uuuaucaugagccauuuaa

SEQ ID NO: 1672975 - RNA, 19 nt, Artificial Sequence
  Description of Artificial Sequence: Synthetic oligonucleotide
  Sense strand starting at position 346 of SEQ ID NO: 1561452
aauggcucaugauaaagua

SEQ ID NO: 1672976 - RNA, 19 nt, Artificial Sequence
  Description of Artificial Sequence: Synthetic oligonucleotide
  Antisense strand to SEQ ID NO: 1672975
uacuuuaucaugagccauu

SEQ ID NO: 1672977 - RNA, 19 nt, Artificial Sequence
  Description of Artificial Sequence: Synthetic oligonucleotide
  Sense strand starting at position 389 of SEQ ID NO: 1561452
cuuaacaacuagugaaugu

SEQ ID NO: 1672978 - RNA, 19 nt, Artificial Sequence
  Description of Artificial Sequence: Synthetic oligonucleotide
  Antisense strand to SEQ ID NO: 1672977
acauucacuaguuguuaag

SEQ ID NO: 1672979 - RNA, 19 nt, Artificial Sequence
  Description of Artificial Sequence: Synthetic oligonucleotide
  Sense strand starting at position 393 of SEQ ID NO: 1561452
acaacuagugaauguaguu

SEQ ID NO: 1672980 - RNA, 19 nt, Artificial Sequence
  Description of Artificial Sequence: Synthetic oligonucleotide
  Antisense strand to SEQ ID NO: 1672979
aacuacauucacuaguugu

SEQ ID NO: 1672981 - RNA, 19 nt, Artificial Sequence
  Description of Artificial Sequence: Synthetic oligonucleotide
  Sense strand starting at position 402 of SEQ ID NO: 1561452
gaauguaguuaaggguuaa

SEQ ID NO: 1672982 - RNA, 19 nt, Artificial Sequence
  Description of Artificial Sequence: Synthetic oligonucleotide
  Antisense strand to SEQ ID NO: 1672981
uuaacccuuaacuacauuc

SEQ ID NO: 1672983 - RNA, 19 nt, Artificial Sequence
  Description of Artificial Sequence: Synthetic oligonucleotide
  Sense strand starting at position 406 of SEQ ID NO: 1561452
guaguuaaggguuaaagac

SEQ ID NO: 1672984 - RNA, 19 nt, Artificial Sequence
  Description of Artificial Sequence: Synthetic oligonucleotide
  Antisense strand to SEQ ID NO: 1672983
gucuuuaacccuuaacuac

SEQ ID NO: 1672985 - RNA, 19 nt, Artificial Sequence
  Description of Artificial Sequence: Synthetic oligonucleotide
  Sense strand starting at position 744 of SEQ ID NO: 1561452
agauguucucuagaucagu

SEQ ID NO: 1672986 - RNA, 19 nt, Artificial Sequence
  Description of Artificial Sequence: Synthetic oligonucleotide
  Antisense strand to SEQ ID NO: 1672985
acugaucuagagaacaucu

SEQ ID NO: 1672987 - RNA, 19 nt, Artificial Sequence
  Description of Artificial Sequence: Synthetic oligonucleotide
  Sense strand starting at position 747 of SEQ ID NO: 1561452
uguucucuagaucaguauu

SEQ ID NO: 1672988 - RNA, 19 nt, Artificial Sequence
  Description of Artificial Sequence: Synthetic oligonucleotide
  Antisense strand to SEQ ID NO: 1672987
aauacugaucuagagaaca

SEQ ID NO: 1672989 - RNA, 19 nt, Artificial Sequence
  Description of Artificial Sequence: Synthetic oligonucleotide
  Sense strand starting at position 949 of SEQ ID NO: 1561452
gacagaggcuugcccuauu

SEQ ID NO: 1672990 - RNA, 19 nt, Artificial Sequence
  Description of Artificial Sequence: Synthetic oligonucleotide
  Antisense strand to SEQ ID NO: 1672989
aauagggcaagccucuguc

SEQ ID NO: 1672991 - RNA, 19 nt, Artificial Sequence
  Description of Artificial Sequence: Synthetic oligonucleotide
  Sense strand starting at position 1226 of SEQ ID NO: 1561452
gagugagaucuaggugaug

SEQ ID NO: 1672992 - RNA, 19 nt, Artificial Sequence
  Description of Artificial Sequence: Synthetic oligonucleotide
  Antisense strand to SEQ ID NO: 1672991
caucaccuagaucucacuc

SEQ ID NO: 1672993 - RNA, 19 nt, Artificial Sequence
  Description of Artificial Sequence: Synthetic oligonucleotide
  Sense strand starting at position 1276 of SEQ ID NO: 1561452
uuuccuuggugguaaauuu

SEQ ID NO: 1672994 - RNA, 19 nt, Artificial Sequence
  Description of Artificial Sequence: Synthetic oligonucleotide
  Antisense strand to SEQ ID NO: 1672993
aaauuuaccaccaaggaaa

SEQ ID NO: 1672995 - RNA, 19 nt, Artificial Sequence
  Description of Artificial Sequence: Synthetic oligonucleotide
  Sense strand starting at position 1316 of SEQ ID NO: 1561452
acucaugcauucgauggua

SEQ ID NO: 1672996 - RNA, 19 nt, Artificial Sequence
  Description of Artificial Sequence: Synthetic oligonucleotide
  Antisense strand to SEQ ID NO: 1672995
uaccaucgaaugcaugagu

SEQ ID NO: 1672997 - RNA, 19 nt, Artificial Sequence
  Description of Artificial Sequence: Synthetic oligonucleotide
  Sense strand starting at position 1319 of SEQ ID NO: 1561452
caugcauucgaugguauca

SEQ ID NO: 1672998 - RNA, 19 nt, Artificial Sequence
  Description of Artificial Sequence: Synthetic oligonucleotide
  Antisense strand to SEQ ID NO: 1672997
ugauaccaucgaaugcaug

SEQ ID NO: 1672999 - RNA, 19 nt, Artificial Sequence
  Description of Artificial Sequence: Synthetic oligonucleotide
  Sense strand starting at position 1321 of SEQ ID NO: 1561452
ugcauucgaugguaucaga

SEQ ID NO: 1673000 - RNA, 19 nt, Artificial Sequence
  Description of Artificial Sequence: Synthetic oligonucleotide
  Antisense strand to SEQ ID NO: 1672999
ucugauaccaucgaaugca

SEQ ID NO: 1673001 - RNA, 19 nt, Artificial Sequence
  Description of Artificial Sequence: Synthetic oligonucleotide
  Sense strand starting at position 1332 of SEQ ID NO: 1561452
guaucagauccaugugcuc

SEQ ID NO: 1673002 - RNA, 19 nt, Artificial Sequence
  Description of Artificial Sequence: Synthetic oligonucleotide
  Antisense strand to SEQ ID NO: 1673001
gagcacauggaucugauac

SEQ ID NO: 1673003 - RNA, 19 nt, Artificial Sequence
  Description of Artificial Sequence: Synthetic oligonucleotide
  Sense strand starting at position 1337 of SEQ ID NO: 1561452
agauccaugugcucucgaa

SEQ ID NO: 1673004 - RNA, 19 nt, Artificial Sequence
  Description of Artificial Sequence: Synthetic oligonucleotide
  Antisense strand to SEQ ID NO: 1673003
uucgagagcacauggaucu

SEQ ID NO: 1673005 - RNA, 19 nt, Artificial Sequence
  Description of Artificial Sequence: Synthetic oligonucleotide
  Sense strand starting at position 1341 of SEQ ID NO: 1561452
ccaugugcucucgaacaac

SEQ ID NO: 1673006 - RNA, 19 nt, Artificial Sequence
  Description of Artificial Sequence: Synthetic oligonucleotide
  Antisense strand to SEQ ID NO: 1673005
guuguucgagagcacaugg

SEQ ID NO: 1673007 - RNA, 19 nt, Artificial Sequence
  Description of Artificial Sequence: Synthetic oligonucleotide
  Sense strand starting at position 1435 of SEQ ID NO: 1561452
ugaagugcucaccgggaca

SEQ ID NO: 1673008 - RNA, 19 nt, Artificial Sequence
  Description of Artificial Sequence: Synthetic oligonucleotide
  Antisense strand to SEQ ID NO: 1673007
ugucccggugagcacuuca

SEQ ID NO: 1673009 - RNA, 19 nt, Artificial Sequence
  Description of Artificial Sequence: Synthetic oligonucleotide
  Sense strand starting at position 1519 of SEQ ID NO: 1561452
cagagaugcuguuccuuau

SEQ ID NO: 1673010 - RNA, 19 nt, Artificial Sequence
  Description of Artificial Sequence: Synthetic oligonucleotide
  Antisense strand to SEQ ID NO: 1673009
auaaggaacagcaucucug

SEQ ID NO: 1673011 - RNA, 19 nt, Artificial Sequence
  Description of Artificial Sequence: Synthetic oligonucleotide
  Sense strand starting at position 1522 of SEQ ID NO: 1561452
agaugcuguuccuuauaga

SEQ ID NO: 1673012 - RNA, 19 nt, Artificial Sequence
  Description of Artificial Sequence: Synthetic oligonucleotide
  Antisense strand to SEQ ID NO: 1673011
ucuauaaggaacagcaucu

SEQ ID NO: 1673013 - RNA, 19 nt, Artificial Sequence
  Description of Artificial Sequence: Synthetic oligonucleotide
  Sense strand starting at position 1523 of SEQ ID NO: 1561452
gaugcuguuccuuauagag

SEQ ID NO: 1673014 - RNA, 19 nt, Artificial Sequence
  Description of Artificial Sequence: Synthetic oligonucleotide
  Antisense strand to SEQ ID NO: 1673013
cucuauaaggaacagcauc

SEQ ID NO: 1673015 - RNA, 19 nt, Artificial Sequence
  Description of Artificial Sequence: Synthetic oligonucleotide
  Sense strand starting at position 1525 of SEQ ID NO: 1561452
ugcuguuccuuauagagaa

SEQ ID NO: 1673016 - RNA, 19 nt, Artificial Sequence
  Description of Artificial Sequence: Synthetic oligonucleotide
  Antisense strand to SEQ ID NO: 1673015
uucucuauaaggaacagca

SEQ ID NO: 1673017 - RNA, 19 nt, Artificial Sequence
  Description of Artificial Sequence: Synthetic oligonucleotide
  Sense strand starting at position 2438 of SEQ ID NO: 1561452
gcucaccuccuguaaauga

SEQ ID NO: 1673018 - RNA, 19 nt, Artificial Sequence
  Description of Artificial Sequence: Synthetic oligonucleotide
  Antisense strand to SEQ ID NO: 1673017
ucauuuacaggaggugagc

SEQ ID NO: 1673019 - RNA, 19 nt, Artificial Sequence
  Description of Artificial Sequence: Synthetic oligonucleotide
  Sense strand starting at position 2464 of SEQ ID NO: 1561452
gcccgcguucagucugauu

SEQ ID NO: 1673020 - RNA, 19 nt, Artificial Sequence
  Description of Artificial Sequence: Synthetic oligonucleotide
  Antisense strand to SEQ ID NO: 1673019
aaucagacugaacgcgggc

SEQ ID NO: 1673021 - RNA, 19 nt, Artificial Sequence
  Description of Artificial Sequence: Synthetic oligonucleotide
  Sense strand starting at position 2499 of SEQ ID NO: 1561452
caaccagagucugaaguua

SEQ ID NO: 1673022 - RNA, 19 nt, Artificial Sequence
  Description of Artificial Sequence: Synthetic oligonucleotide
  Antisense strand to SEQ ID NO: 1673021
uaacuucagacucugguug

SEQ ID NO: 1673023 - RNA, 19 nt, Artificial Sequence
  Description of Artificial Sequence: Synthetic oligonucleotide
  Sense strand starting at position 2579 of SEQ ID NO: 1561452
gggugaaguuacgacguua

SEQ ID NO: 1673024 - RNA, 19 nt, Artificial Sequence
  Description of Artificial Sequence: Synthetic oligonucleotide
  Antisense strand to SEQ ID NO: 1673023
uaacgucguaacuucaccc

SEQ ID NO: 1673025 - RNA, 19 nt, Artificial Sequence
  Description of Artificial Sequence: Synthetic oligonucleotide
  Sense strand starting at position 2633 of SEQ ID NO: 1561452
ggccaucagucugauuugu

SEQ ID NO: 1673026 - RNA, 19 nt, Artificial Sequence
  Description of Artificial Sequence: Synthetic oligonucleotide
  Antisense strand to SEQ ID NO: 1673025
acaaaucagacugauggcc

SEQ ID NO: 1673027 - RNA, 19 nt, Artificial Sequence
  Description of Artificial Sequence: Synthetic oligonucleotide
  Sense strand starting at position 2665 of SEQ ID NO: 1561452
uuuccuaucugccagcaga

SEQ ID NO: 1673028 - RNA, 19 nt, Artificial Sequence
  Description of Artificial Sequence: Synthetic oligonucleotide
  Antisense strand to SEQ ID NO: 1673027
ucugcuggcagauaggaaa

SEQ ID NO: 1673029 - RNA, 19 nt, Artificial Sequence
  Description of Artificial Sequence: Synthetic oligonucleotide
  Sense strand starting at position 2852 of SEQ ID NO: 1561452
agacuagaaugcuccuauu

SEQ ID NO: 1673030 - RNA, 19 nt, Artificial Sequence
  Description of Artificial Sequence: Synthetic oligonucleotide
  Antisense strand to SEQ ID NO: 1673029
aauaggagcauucuagucu

SEQ ID NO: 1673031 - RNA, 19 nt, Artificial Sequence
  Description of Artificial Sequence: Synthetic oligonucleotide
  Sense strand starting at position 2855 of SEQ ID NO: 1561452
cuagaaugcuccuauugga

SEQ ID NO: 1673032 - RNA, 19 nt, Artificial Sequence
  Description of Artificial Sequence: Synthetic oligonucleotide
  Antisense strand to SEQ ID NO: 1673031
uccaauaggagcauucuag

SEQ ID NO: 1673033 - RNA, 19 nt, Artificial Sequence
  Description of Artificial Sequence: Synthetic oligonucleotide
  Sense strand starting at position 3044 of SEQ ID NO: 1561452
ggacguaguuaagagcaua

SEQ ID NO: 1673034 - RNA, 19 nt, Artificial Sequence
  Description of Artificial Sequence: Synthetic oligonucleotide
  Antisense strand to SEQ ID NO: 1673033
uaugcucuuaacuacgucc

SEQ ID NO: 1673035 - RNA, 19 nt, Artificial Sequence
  Description of Artificial Sequence: Synthetic oligonucleotide
  Sense strand starting at position 3047 of SEQ ID NO: 1561452
cguaguuaagagcauagau

SEQ ID NO: 1673036 - RNA, 19 nt, Artificial Sequence
  Description of Artificial Sequence: Synthetic oligonucleotide
  Antisense strand to SEQ ID NO: 1673035
aucuaugcucuuaacuacg

SEQ ID NO: 1673037 - RNA, 19 nt, Artificial Sequence
  Description of Artificial Sequence: Synthetic oligonucleotide
  Sense strand starting at position 3122 of SEQ ID NO: 1561452
uaaggccaauucgugauaa

SEQ ID NO: 1673038 - RNA, 19 nt, Artificial Sequence
  Description of Artificial Sequence: Synthetic oligonucleotide
  Antisense strand to SEQ ID NO: 1673037
uuaucacgaauuggccuua

SEQ ID NO: 1673039 - RNA, 19 nt, Artificial Sequence
  Description of Artificial Sequence: Synthetic oligonucleotide
  Sense strand starting at position 3123 of SEQ ID NO: 1561452
aaggccaauucgugauaau

SEQ ID NO: 1673040 - RNA, 19 nt, Artificial Sequence
  Description of Artificial Sequence: Synthetic oligonucleotide
  Antisense strand to SEQ ID NO: 1673039
auuaucacgaauuggccuu

SEQ ID NO: 1673041 - RNA, 19 nt, Artificial Sequence
  Description of Artificial Sequence: Synthetic oligonucleotide
  Sense strand starting at position 3124 of SEQ ID NO: 1561452
aggccaauucgugauaauu

SEQ ID NO: 1673042 - RNA, 19 nt, Artificial Sequence
  Description of Artificial Sequence: Synthetic oligonucleotide
  Antisense strand to SEQ ID NO: 1673041
aauuaucacgaauuggccu

SEQ ID NO: 1673043 - RNA, 19 nt, Artificial Sequence
  Description of Artificial Sequence: Synthetic oligonucleotide
  Sense strand starting at position 3126 of SEQ ID NO: 1561452
gccaauucgugauaauuuc

SEQ ID NO: 1673044 - RNA, 19 nt, Artificial Sequence
  Description of Artificial Sequence: Synthetic oligonucleotide
  Antisense strand to SEQ ID NO: 1673043
gaaauuaucacgaauuggc

SEQ ID NO: 1673045 - RNA, 19 nt, Artificial Sequence
  Description of Artificial Sequence: Synthetic oligonucleotide
  Sense strand starting at position 3377 of SEQ ID NO: 1561452
guacuaauguguccggaau

SEQ ID NO: 1673046 - RNA, 19 nt, Artificial Sequence
  Description of Artificial Sequence: Synthetic oligonucleotide
  Antisense strand to SEQ ID NO: 1673045
auuccggacacauuaguac

SEQ ID NO: 1673047 - RNA, 19 nt, Artificial Sequence
  Description of Artificial Sequence: Synthetic oligonucleotide
  Sense strand starting at position 122 of SEQ ID NO: 1561453
ucaggugaauagucuaguu

SEQ ID NO: 1673048 - RNA, 19 nt, Artificial Sequence
  Description of Artificial Sequence: Synthetic oligonucleotide
  Antisense strand to SEQ ID NO: 1673047
aacuagacuauucaccuga

SEQ ID NO: 1673049 - RNA, 19 nt, Artificial Sequence
  Description of Artificial Sequence: Synthetic oligonucleotide
  Sense strand starting at position 124 of SEQ ID NO: 1561453
aggugaauagucuaguuaa

SEQ ID NO: 1673050 - RNA, 19 nt, Artificial Sequence
  Description of Artificial Sequence: Synthetic oligonucleotide
  Antisense strand to SEQ ID NO: 1673049
uuaacuagacuauucaccu

SEQ ID NO: 1673051 - RNA, 19 nt, Artificial Sequence
  Description of Artificial Sequence: Synthetic oligonucleotide
  Sense strand starting at position 343 of SEQ ID NO: 1561453
uuaaauggcucaugauaaa

SEQ ID NO: 1673052 - RNA, 19 nt, Artificial Sequence
  Description of Artificial Sequence: Synthetic oligonucleotide
  Antisense strand to SEQ ID NO: 1673051
uuuaucaugagccauuuaa

SEQ ID NO: 1673053 - RNA, 19 nt, Artificial Sequence
  Description of Artificial Sequence: Synthetic oligonucleotide
  Sense strand starting at position 346 of SEQ ID NO: 1561453
aauggcucaugauaaagua

SEQ ID NO: 1673054 - RNA, 19 nt, Artificial Sequence
  Description of Artificial Sequence: Synthetic oligonucleotide
  Antisense strand to SEQ ID NO: 1673053
uacuuuaucaugagccauu

SEQ ID NO: 1673055 - RNA, 19 nt, Artificial Sequence
  Description of Artificial Sequence: Synthetic oligonucleotide
  Sense strand starting at position 389 of SEQ ID NO: 1561453
cuuaacaacuagugaaugu

SEQ ID NO: 1673056 - RNA, 19 nt, Artificial Sequence
  Description of Artificial Sequence: Synthetic oligonucleotide
  Antisense strand to SEQ ID NO: 1673055
acauucacuaguuguuaag

SEQ ID NO: 1673057 - RNA, 19 nt, Artificial Sequence
  Description of Artificial Sequence: Synthetic oligonucleotide
  Sense strand starting at position 393 of SEQ ID NO: 1561453
acaacuagugaauguaguu

SEQ ID NO: 1673058 - RNA, 19 nt, Artificial Sequence
  Description of Artificial Sequence: Synthetic oligonucleotide
  Antisense strand to SEQ ID NO: 1673057
aacuacauucacuaguugu

SEQ ID NO: 1673059 - RNA, 19 nt, Artificial Sequence
  Description of Artificial Sequence: Synthetic oligonucleotide
  Sense strand starting at position 402 of SEQ ID NO: 1561453
gaauguaguuaaggguuaa

SEQ ID NO: 1673060 - RNA, 19 nt, Artificial Sequence
  Description of Artificial Sequence: Synthetic oligonucleotide
  Antisense strand to SEQ ID NO: 1673059
uuaacccuuaacuacauuc

SEQ ID NO: 1673061 - RNA, 19 nt, Artificial Sequence
  Description of Artificial Sequence: Synthetic oligonucleotide
  Sense strand starting at position 406 of SEQ ID NO: 1561453
guaguuaaggguuaaagac

SEQ ID NO: 1673062 - RNA, 19 nt, Artificial Sequence
  Description of Artificial Sequence: Synthetic oligonucleotide
  Antisense strand to SEQ ID NO: 1673061
gucuuuaacccuuaacuac

SEQ ID NO: 1673063 - RNA, 19 nt, Artificial Sequence
  Description of Artificial Sequence: Synthetic oligonucleotide
  Sense strand starting at position 744 of SEQ ID NO: 1561453
agauguucucuagaucagu

SEQ ID NO: 1673064 - RNA, 19 nt, Artificial Sequence
  Description of Artificial Sequence: Synthetic oligonucleotide
  Antisense strand to SEQ ID NO: 1673063
acugaucuagagaacaucu

SEQ ID NO: 1673065 - RNA, 19 nt, Artificial Sequence
  Description of Artificial Sequence: Synthetic oligonucleotide
  Sense strand starting at position 747 of SEQ ID NO: 1561453
uguucucuagaucaguauu

SEQ ID NO: 1673066 - RNA, 19 nt, Artificial Sequence
  Description of Artificial Sequence: Synthetic oligonucleotide
  Antisense strand to SEQ ID NO: 1673065
aauacugaucuagagaaca

SEQ ID NO: 1673067 - RNA, 19 nt, Artificial Sequence
  Description of Artificial Sequence: Synthetic oligonucleotide
  Sense strand starting at position 949 of SEQ ID NO: 1561453
gacagaggcuugcccuauu

SEQ ID NO: 1673068 - RNA, 19 nt, Artificial Sequence
  Description of Artificial Sequence: Synthetic oligonucleotide
  Antisense strand to SEQ ID NO: 1673067
aauagggcaagccucuguc

SEQ ID NO: 1673069 - RNA, 19 nt, Artificial Sequence
  Description of Artificial Sequence: Synthetic oligonucleotide
  Sense strand starting at position 1226 of SEQ ID NO: 1561453
gagugagaucuaggugaug

SEQ ID NO: 1673070 - RNA, 19 nt, Artificial Sequence
  Description of Artificial Sequence: Synthetic oligonucleotide
  Antisense strand to SEQ ID NO: 1673069
caucaccuagaucucacuc

SEQ ID NO: 1673071 - RNA, 19 nt, Artificial Sequence
  Description of Artificial Sequence: Synthetic oligonucleotide
  Sense strand starting at position 1276 of SEQ ID NO: 1561453
uuuccuuggugguaaauuu

SEQ ID NO: 1673072 - RNA, 19 nt, Artificial Sequence
  Description of Artificial Sequence: Synthetic oligonucleotide
  Antisense strand to SEQ ID NO: 1673071
aaauuuaccaccaaggaaa

SEQ ID NO: 1673073 - RNA, 19 nt, Artificial Sequence
  Description of Artificial Sequence: Synthetic oligonucleotide
  Sense strand starting at position 1316 of SEQ ID NO: 1561453
acucaugcauucgauggua

SEQ ID NO: 1673074 - RNA, 19 nt, Artificial Sequence
  Description of Artificial Sequence: Synthetic oligonucleotide
  Antisense strand to SEQ ID NO: 1673073
uaccaucgaaugcaugagu

SEQ ID NO: 1673075 - RNA, 19 nt, Artificial Sequence
  Description of Artificial Sequence: Synthetic oligonucleotide
  Sense strand starting at position 1319 of SEQ ID NO: 1561453
caugcauucgaugguauca

SEQ ID NO: 1673076 - RNA, 19 nt, Artificial Sequence
  Description of Artificial Sequence: Synthetic oligonucleotide
  Antisense strand to SEQ ID NO: 1673075
ugauaccaucgaaugcaug

SEQ ID NO: 1673077 - RNA, 19 nt, Artificial Sequence
  Description of Artificial Sequence: Synthetic oligonucleotide
  Sense strand starting at position 1321 of SEQ ID NO: 1561453
ugcauucgaugguaucaga

SEQ ID NO: 1673078 - RNA, 19 nt, Artificial Sequence
  Description of Artificial Sequence: Synthetic oligonucleotide
  Antisense strand to SEQ ID NO: 1673077
ucugauaccaucgaaugca

SEQ ID NO: 1673079 - RNA, 19 nt, Artificial Sequence
  Description of Artificial Sequence: Synthetic oligonucleotide
  Sense strand starting at position 1332 of SEQ ID NO: 1561453
guaucagauccaugugcuc

SEQ ID NO: 1673080 - RNA, 19 nt, Artificial Sequence
  Description of Artificial Sequence: Synthetic oligonucleotide
  Antisense strand to SEQ ID NO: 1673079
gagcacauggaucugauac

SEQ ID NO: 1673081 - RNA, 19 nt, Artificial Sequence
  Description of Artificial Sequence: Synthetic oligonucleotide
  Sense strand starting at position 1337 of SEQ ID NO: 1561453
agauccaugugcucucgaa

SEQ ID NO: 1673082 - RNA, 19 nt, Artificial Sequence
  Description of Artificial Sequence: Synthetic oligonucleotide
  Antisense strand to SEQ ID NO: 1673081
uucgagagcacauggaucu

SEQ ID NO: 1673083 - RNA, 19 nt, Artificial Sequence
  Description of Artificial Sequence: Synthetic oligonucleotide
  Sense strand starting at position 1341 of SEQ ID NO: 1561453
ccaugugcucucgaacaac

SEQ ID NO: 1673084 - RNA, 19 nt, Artificial Sequence
  Description of Artificial Sequence: Synthetic oligonucleotide
  Antisense strand to SEQ ID NO: 1673083
guuguucgagagcacaugg

SEQ ID NO: 1673085 - RNA, 19 nt, Artificial Sequence
  Description of Artificial Sequence: Synthetic oligonucleotide
  Sense strand starting at position 1435 of SEQ ID NO: 1561453
ugaagugcucaccgggaca

SEQ ID NO: 1673086 - RNA, 19 nt, Artificial Sequence
  Description of Artificial Sequence: Synthetic oligonucleotide
  Antisense strand to SEQ ID NO: 1673085
ugucccggugagcacuuca

SEQ ID NO: 1673087 - RNA, 19 nt, Artificial Sequence
  Description of Artificial Sequence: Synthetic oligonucleotide
  Sense strand starting at position 1519 of SEQ ID NO: 1561453
cagagaugcuguuccuuau

SEQ ID NO: 1673088 - RNA, 19 nt, Artificial Sequence
  Description of Artificial Sequence: Synthetic oligonucleotide
  Antisense strand to SEQ ID NO: 1673087
auaaggaacagcaucucug

SEQ ID NO: 1673089 - RNA, 19 nt, Artificial Sequence
  Description of Artificial Sequence: Synthetic oligonucleotide
  Sense strand starting at position 1522 of SEQ ID NO: 1561453
agaugcuguuccuuauaga

SEQ ID NO: 1673090 - RNA, 19 nt, Artificial Sequence
  Description of Artificial Sequence: Synthetic oligonucleotide
  Antisense strand to SEQ ID NO: 1673089
ucuauaaggaacagcaucu

SEQ ID NO: 1673091 - RNA, 19 nt, Artificial Sequence
  Description of Artificial Sequence: Synthetic oligonucleotide
  Sense strand starting at position 1523 of SEQ ID NO: 1561453
gaugcuguuccuuauagag

SEQ ID NO: 1673092 - RNA, 19 nt, Artificial Sequence
  Description of Artificial Sequence: Synthetic oligonucleotide
  Antisense strand to SEQ ID NO: 1673091
cucuauaaggaacagcauc

SEQ ID NO: 1673093 - RNA, 19 nt, Artificial Sequence
  Description of Artificial Sequence: Synthetic oligonucleotide
  Sense strand starting at position 1525 of SEQ ID NO: 1561453
ugcuguuccuuauagagaa

SEQ ID NO: 1673094 - RNA, 19 nt, Artificial Sequence
  Description of Artificial Sequence: Synthetic oligonucleotide
  Antisense strand to SEQ ID NO: 1673093
uucucuauaaggaacagca

SEQ ID NO: 1673095 - RNA, 19 nt, Artificial Sequence
  Description of Artificial Sequence: Synthetic oligonucleotide
  Sense strand starting at position 2438 of SEQ ID NO: 1561453
gcucaccuccuguaaauga

SEQ ID NO: 1673096 - RNA, 19 nt, Artificial Sequence
  Description of Artificial Sequence: Synthetic oligonucleotide
  Antisense strand to SEQ ID NO: 1673095
ucauuuacaggaggugagc

SEQ ID NO: 1673097 - RNA, 19 nt, Artificial Sequence
  Description of Artificial Sequence: Synthetic oligonucleotide
  Sense strand starting at position 2464 of SEQ ID NO: 1561453
gcccgcguucagucugauu

SEQ ID NO: 1673098 - RNA, 19 nt, Artificial Sequence
  Description of Artificial Sequence: Synthetic oligonucleotide
  Antisense strand to SEQ ID NO: 1673097
aaucagacugaacgcgggc

SEQ ID NO: 1673099 - RNA, 19 nt, Artificial Sequence
  Description of Artificial Sequence: Synthetic oligonucleotide
  Sense strand starting at position 2499 of SEQ ID NO: 1561453
caaccagagucugaaguua

SEQ ID NO: 1673100 - RNA, 19 nt, Artificial Sequence
  Description of Artificial Sequence: Synthetic oligonucleotide
  Antisense strand to SEQ ID NO: 1673099
uaacuucagacucugguug

SEQ ID NO: 1673101 - RNA, 19 nt, Artificial Sequence
  Description of Artificial Sequence: Synthetic oligonucleotide
  Sense strand starting at position 2579 of SEQ ID NO: 1561453
gggugaaguuacgacguua

SEQ ID NO: 1673102 - RNA, 19 nt, Artificial Sequence
  Description of Artificial Sequence: Synthetic oligonucleotide
  Antisense strand to SEQ ID NO: 1673101
uaacgucguaacuucaccc

SEQ ID NO: 1673103 - RNA, 19 nt, Artificial Sequence
  Description of Artificial Sequence: Synthetic oligonucleotide
  Sense strand starting at position 2633 of SEQ ID NO: 1561453
ggccaucagucugauuugu

SEQ ID NO: 1673104 - RNA, 19 nt, Artificial Sequence
  Description of Artificial Sequence: Synthetic oligonucleotide
  Antisense strand to SEQ ID NO: 1673103
acaaaucagacugauggcc

SEQ ID NO: 1673105 - RNA, 19 nt, Artificial Sequence
  Description of Artificial Sequence: Synthetic oligonucleotide
  Sense strand starting at position 2665 of SEQ ID NO: 1561453
uuuccuaucugccagcaga

SEQ ID NO: 1673106 - RNA, 19 nt, Artificial Sequence
  Description of Artificial Sequence: Synthetic oligonucleotide
  Antisense strand to SEQ ID NO: 1673105
ucugcuggcagauaggaaa

SEQ ID NO: 1673107 - RNA, 19 nt, Artificial Sequence
  Description of Artificial Sequence: Synthetic oligonucleotide
  Sense strand starting at position 2852 of SEQ ID NO: 1561453
agacuagaaugcuccuauu

SEQ ID NO: 1673108 - RNA, 19 nt, Artificial Sequence
  Description of Artificial Sequence: Synthetic oligonucleotide
  Antisense strand to SEQ ID NO: 1673107
aauaggagcauucuagucu

SEQ ID NO: 1673109 - RNA, 19 nt, Artificial Sequence
  Description of Artificial Sequence: Synthetic oligonucleotide
  Sense strand starting at position 2855 of SEQ ID NO: 1561453
cuagaaugcuccuauugga

SEQ ID NO: 1673110 - RNA, 19 nt, Artificial Sequence
  Description of Artificial Sequence: Synthetic oligonucleotide
  Antisense strand to SEQ ID NO: 1673109
uccaauaggagcauucuag

SEQ ID NO: 1673111 - RNA, 19 nt, Artificial Sequence
  Description of Artificial Sequence: Synthetic oligonucleotide
  Sense strand starting at position 3044 of SEQ ID NO: 1561453
ggacguaguuaagagcaua

SEQ ID NO: 1673112 - RNA, 19 nt, Artificial Sequence
  Description of Artificial Sequence: Synthetic oligonucleotide
  Antisense strand to SEQ ID NO: 1673111
uaugcucuuaacuacgucc

SEQ ID NO: 1673113 - RNA, 19 nt, Artificial Sequence
  Description of Artificial Sequence: Synthetic oligonucleotide
  Sense strand starting at position 3047 of SEQ ID NO: 1561453
cguaguuaagagcauagau

SEQ ID NO: 1673114 - RNA, 19 nt, Artificial Sequence
  Description of Artificial Sequence: Synthetic oligonucleotide
  Antisense strand to SEQ ID NO: 1673113
aucuaugcucuuaacuacg

SEQ ID NO: 1673115 - RNA, 19 nt, Artificial Sequence
  Description of Artificial Sequence: Synthetic oligonucleotide
  Sense strand starting at position 3122 of SEQ ID NO: 1561453
uaaggccaauucgugauaa

SEQ ID NO: 1673116 - RNA, 19 nt, Artificial Sequence
  Description of Artificial Sequence: Synthetic oligonucleotide
  Antisense strand to SEQ ID NO: 1673115
uuaucacgaauuggccuua

SEQ ID NO: 1673117 - RNA, 19 nt, Artificial Sequence
  Description of Artificial Sequence: Synthetic oligonucleotide
  Sense strand starting at position 3123 of SEQ ID NO: 1561453
aaggccaauucgugauaau

SEQ ID NO: 1673118 - RNA, 19 nt, Artificial Sequence
  Description of Artificial Sequence: Synthetic oligonucleotide
  Antisense strand to SEQ ID NO: 1673117
auuaucacgaauuggccuu

SEQ ID NO: 1673119 - RNA, 19 nt, Artificial Sequence
  Description of Artificial Sequence: Synthetic oligonucleotide
  Sense strand starting at position 3124 of SEQ ID NO: 1561453
aggccaauucgugauaauu

SEQ ID NO: 1673120 - RNA, 19 nt, Artificial Sequence
  Description of Artificial Sequence: Synthetic oligonucleotide
  Antisense strand to SEQ ID NO: 1673119
aauuaucacgaauuggccu

SEQ ID NO: 1673121 - RNA, 19 nt, Artificial Sequence
  Description of Artificial Sequence: Synthetic oligonucleotide
  Sense strand starting at position 3126 of SEQ ID NO: 1561453
gccaauucgugauaauuuc

SEQ ID NO: 1673122 - RNA, 19 nt, Artificial Sequence
  Description of Artificial Sequence: Synthetic oligonucleotide
  Antisense strand to SEQ ID NO: 1673121
gaaauuaucacgaauuggc

SEQ ID NO: 1673123 - RNA, 19 nt, Artificial Sequence
  Description of Artificial Sequence: Synthetic oligonucleotide
  Sense strand starting at position 3377 of SEQ ID NO: 1561453
guacuaauguguccggaau

SEQ ID NO: 1673124 - RNA, 19 nt, Artificial Sequence
  Description of Artificial Sequence: Synthetic oligonucleotide
  Antisense strand to SEQ ID NO: 1673123
auuccggacacauuaguac

SEQ ID NO: 1673125 - RNA, 19 nt, Artificial Sequence
  Description of Artificial Sequence: Synthetic oligonucleotide
  Sense strand starting at position 104 of SEQ ID NO: 1561454
acaucugugccuugcauua

SEQ ID NO: 1673126 - RNA, 19 nt, Artificial Sequence
  Description of Artificial Sequence: Synthetic oligonucleotide
  Antisense strand to SEQ ID NO: 1673125
uaaugcaaggcacagaugu

SEQ ID NO: 1673127 - RNA, 19 nt, Artificial Sequence
  Description of Artificial Sequence: Synthetic oligonucleotide
  Sense strand starting at position 219 of SEQ ID NO: 1561454
gcaugagaacggcagcauu

SEQ ID NO: 1673128 - RNA, 19 nt, Artificial Sequence
  Description of Artificial Sequence: Synthetic oligonucleotide
  Antisense strand to SEQ ID NO: 1673127
aaugcugccguucucaugc

SEQ ID NO: 1673129 - RNA, 19 nt, Artificial Sequence
  Description of Artificial Sequence: Synthetic oligonucleotide
  Sense strand starting at position 240 of SEQ ID NO: 1561454
acaagauaaugcuccugaa

SEQ ID NO: 1673130 - RNA, 19 nt, Artificial Sequence
  Description of Artificial Sequence: Synthetic oligonucleotide
  Antisense strand to SEQ ID NO: 1673129
uucaggagcauuaucuugu

SEQ ID NO: 1673131 - RNA, 19 nt, Artificial Sequence
  Description of Artificial Sequence: Synthetic oligonucleotide
  Sense strand starting at position 243 of SEQ ID NO: 1561454
agauaaugcuccugaaauc

SEQ ID NO: 1673132 - RNA, 19 nt, Artificial Sequence
  Description of Artificial Sequence: Synthetic oligonucleotide
  Antisense strand to SEQ ID NO: 1673131
gauuucaggagcauuaucu

SEQ ID NO: 1673133 - RNA, 19 nt, Artificial Sequence
  Description of Artificial Sequence: Synthetic oligonucleotide
  Sense strand starting at position 591 of SEQ ID NO: 1561454
ucaggugaauagucuaguu

SEQ ID NO: 1673134 - RNA, 19 nt, Artificial Sequence
  Description of Artificial Sequence: Synthetic oligonucleotide
  Antisense strand to SEQ ID NO: 1673133
aacuagacuauucaccuga

SEQ ID NO: 1673135 - RNA, 19 nt, Artificial Sequence
  Description of Artificial Sequence: Synthetic oligonucleotide
  Sense strand starting at position 593 of SEQ ID NO: 1561454
aggugaauagucuaguuaa

SEQ ID NO: 1673136 - RNA, 19 nt, Artificial Sequence
  Description of Artificial Sequence: Synthetic oligonucleotide
  Antisense strand to SEQ ID NO: 1673135
uuaacuagacuauucaccu

SEQ ID NO: 1673137 - RNA, 19 nt, Artificial Sequence
  Description of Artificial Sequence: Synthetic oligonucleotide
  Sense strand starting at position 812 of SEQ ID NO: 1561454
uuaaauggcucaugauaaa

SEQ ID NO: 1673138 - RNA, 19 nt, Artificial Sequence
  Description of Artificial Sequence: Synthetic oligonucleotide
  Antisense strand to SEQ ID NO: 1673137
uuuaucaugagccauuuaa

SEQ ID NO: 1673139 - RNA, 19 nt, Artificial Sequence
  Description of Artificial Sequence: Synthetic oligonucleotide
  Sense strand starting at position 815 of SEQ ID NO: 1561454
aauggcucaugauaaagua

SEQ ID NO: 1673140 - RNA, 19 nt, Artificial Sequence
  Description of Artificial Sequence: Synthetic oligonucleotide
  Antisense strand to SEQ ID NO: 1673139
uacuuuaucaugagccauu

SEQ ID NO: 1673141 - RNA, 19 nt, Artificial Sequence
  Description of Artificial Sequence: Synthetic oligonucleotide
  Sense strand starting at position 858 of SEQ ID NO: 1561454
cuuaacaacuagugaaugu

SEQ ID NO: 1673142 - RNA, 19 nt, Artificial Sequence
  Description of Artificial Sequence: Synthetic oligonucleotide
  Antisense strand to SEQ ID NO: 1673141
acauucacuaguuguuaag

SEQ ID NO: 1673143 - RNA, 19 nt, Artificial Sequence
  Description of Artificial Sequence: Synthetic oligonucleotide
  Sense strand starting at position 862 of SEQ ID NO: 1561454
acaacuagugaauguaguu

SEQ ID NO: 1673144 - RNA, 19 nt, Artificial Sequence
  Description of Artificial Sequence: Synthetic oligonucleotide
  Antisense strand to SEQ ID NO: 1673143
aacuacauucacuaguugu

SEQ ID NO: 1673145 - RNA, 19 nt, Artificial Sequence
  Description of Artificial Sequence: Synthetic oligonucleotide
  Sense strand starting at position 871 of SEQ ID NO: 1561454
gaauguaguuaaggguuaa

SEQ ID NO: 1673146 - RNA, 19 nt, Artificial Sequence
  Description of Artificial Sequence: Synthetic oligonucleotide
  Antisense strand to SEQ ID NO: 1673145
uuaacccuuaacuacauuc

SEQ ID NO: 1673147 - RNA, 19 nt, Artificial Sequence
  Description of Artificial Sequence: Synthetic oligonucleotide
  Sense strand starting at position 875 of SEQ ID NO: 1561454
guaguuaaggguuaaagac

SEQ ID NO: 1673148 - RNA, 19 nt, Artificial Sequence
  Description of Artificial Sequence: Synthetic oligonucleotide
  Antisense strand to SEQ ID NO: 1673147
gucuuuaacccuuaacuac

SEQ ID NO: 1673149 - RNA, 19 nt, Artificial Sequence
  Description of Artificial Sequence: Synthetic oligonucleotide
  Sense strand starting at position 1213 of SEQ ID NO: 1561454
agauguucucuagaucagu

SEQ ID NO: 1673150 - RNA, 19 nt, Artificial Sequence
  Description of Artificial Sequence: Synthetic oligonucleotide
  Antisense strand to SEQ ID NO: 1673149
acugaucuagagaacaucu

SEQ ID NO: 1673151 - RNA, 19 nt, Artificial Sequence
  Description of Artificial Sequence: Synthetic oligonucleotide
  Sense strand starting at position 1216 of SEQ ID NO: 1561454
uguucucuagaucaguauu

SEQ ID NO: 1673152 - RNA, 19 nt, Artificial Sequence
  Description of Artificial Sequence: Synthetic oligonucleotide
  Antisense strand to SEQ ID NO: 1673151
aauacugaucuagagaaca

SEQ ID NO: 1673153 - RNA, 19 nt, Artificial Sequence
  Description of Artificial Sequence: Synthetic oligonucleotide
  Sense strand starting at position 1418 of SEQ ID NO: 1561454
gacagaggcuugcccuauu

SEQ ID NO: 1673154 - RNA, 19 nt, Artificial Sequence
  Description of Artificial Sequence: Synthetic oligonucleotide
  Antisense strand to SEQ ID NO: 1673153
aauagggcaagccucuguc

SEQ ID NO: 1673155 - RNA, 19 nt, Artificial Sequence
  Description of Artificial Sequence: Synthetic oligonucleotide
  Sense strand starting at position 1695 of SEQ ID NO: 1561454
gagugagaucuaggugaug

SEQ ID NO: 1673156 - RNA, 19 nt, Artificial Sequence
  Description of Artificial Sequence: Synthetic oligonucleotide
  Antisense strand to SEQ ID NO: 1673155
caucaccuagaucucacuc

SEQ ID NO: 1673157 - RNA, 19 nt, Artificial Sequence
  Description of Artificial Sequence: Synthetic oligonucleotide
  Sense strand starting at position 1745 of SEQ ID NO: 1561454
uuuccuuggugguaaauuu

SEQ ID NO: 1673158 - RNA, 19 nt, Artificial Sequence
  Description of Artificial Sequence: Synthetic oligonucleotide
  Antisense strand to SEQ ID NO: 1673157
aaauuuaccaccaaggaaa

SEQ ID NO: 1673159 - RNA, 19 nt, Artificial Sequence
  Description of Artificial Sequence: Synthetic oligonucleotide
  Sense strand starting at position 1785 of SEQ ID NO: 1561454
acucaugcauucgauggua

SEQ ID NO: 1673160 - RNA, 19 nt, Artificial Sequence
  Description of Artificial Sequence: Synthetic oligonucleotide
  Antisense strand to SEQ ID NO: 1673159
uaccaucgaaugcaugagu

SEQ ID NO: 1673161 - RNA, 19 nt, Artificial Sequence
  Description of Artificial Sequence: Synthetic oligonucleotide
  Sense strand starting at position 1788 of SEQ ID NO: 1561454
caugcauucgaugguauca

SEQ ID NO: 1673162 - RNA, 19 nt, Artificial Sequence
  Description of Artificial Sequence: Synthetic oligonucleotide
  Antisense strand to SEQ ID NO: 1673161
ugauaccaucgaaugcaug

SEQ ID NO: 1673163 - RNA, 19 nt, Artificial Sequence
  Description of Artificial Sequence: Synthetic oligonucleotide
  Sense strand starting at position 1790 of SEQ ID NO: 1561454
ugcauucgaugguaucaga

SEQ ID NO: 1673164 - RNA, 19 nt, Artificial Sequence
  Description of Artificial Sequence: Synthetic oligonucleotide
  Antisense strand to SEQ ID NO: 1673163
ucugauaccaucgaaugca

SEQ ID NO: 1673165 - RNA, 19 nt, Artificial Sequence
  Description of Artificial Sequence: Synthetic oligonucleotide
  Sense strand starting at position 1801 of SEQ ID NO: 1561454
guaucagauccaugugcuc

SEQ ID NO: 1673166 - RNA, 19 nt, Artificial Sequence
  Description of Artificial Sequence: Synthetic oligonucleotide
  Antisense strand to SEQ ID NO: 1673165
gagcacauggaucugauac

SEQ ID NO: 1673167 - RNA, 19 nt, Artificial Sequence
  Description of Artificial Sequence: Synthetic oligonucleotide
  Sense strand starting at position 1806 of SEQ ID NO: 1561454
agauccaugugcucucgaa

SEQ ID NO: 1673168 - RNA, 19 nt, Artificial Sequence
  Description of Artificial Sequence: Synthetic oligonucleotide
  Antisense strand to SEQ ID NO: 1673167
uucgagagcacauggaucu

SEQ ID NO: 1673169 - RNA, 19 nt, Artificial Sequence
  Description of Artificial Sequence: Synthetic oligonucleotide
  Sense strand starting at position 1810 of SEQ ID NO: 1561454
ccaugugcucucgaacaac

SEQ ID NO: 1673170 - RNA, 19 nt, Artificial Sequence
  Description of Artificial Sequence: Synthetic oligonucleotide
  Antisense strand to SEQ ID NO: 1673169
guuguucgagagcacaugg

SEQ ID NO: 1673171 - RNA, 19 nt, Artificial Sequence
  Description of Artificial Sequence: Synthetic oligonucleotide
  Sense strand starting at position 1904 of SEQ ID NO: 1561454
ugaagugcucaccgggaca

SEQ ID NO: 1673172 - RNA, 19 nt, Artificial Sequence
  Description of Artificial Sequence: Synthetic oligonucleotide
  Antisense strand to SEQ ID NO: 1673171
ugucccggugagcacuuca

SEQ ID NO: 1673173 - RNA, 19 nt, Artificial Sequence
  Description of Artificial Sequence: Synthetic oligonucleotide
  Sense strand starting at position 1988 of SEQ ID NO: 1561454
cagagaugcuguuccuuau

SEQ ID NO: 1673174 - RNA, 19 nt, Artificial Sequence
  Description of Artificial Sequence: Synthetic oligonucleotide
  Antisense strand to SEQ ID NO: 1673173
auaaggaacagcaucucug

SEQ ID NO: 1673175 - RNA, 19 nt, Artificial Sequence
  Description of Artificial Sequence: Synthetic oligonucleotide
  Sense strand starting at position 1991 of SEQ ID NO: 1561454
agaugcuguuccuuauaga

SEQ ID NO: 1673176 - RNA, 19 nt, Artificial Sequence
  Description of Artificial Sequence: Synthetic oligonucleotide
  Antisense strand to SEQ ID NO: 1673175
ucuauaaggaacagcaucu

SEQ ID NO: 1673177 - RNA, 19 nt, Artificial Sequence
  Description of Artificial Sequence: Synthetic oligonucleotide
  Sense strand starting at position 1992 of SEQ ID NO: 1561454
gaugcuguuccuuauagag

SEQ ID NO: 1673178 - RNA, 19 nt, Artificial Sequence
  Description of Artificial Sequence: Synthetic oligonucleotide
  Antisense strand to SEQ ID NO: 1673177
cucuauaaggaacagcauc

SEQ ID NO: 1673179 - RNA, 19 nt, Artificial Sequence
  Description of Artificial Sequence: Synthetic oligonucleotide
  Sense strand starting at position 1994 of SEQ ID NO: 1561454
ugcuguuccuuauagagaa

SEQ ID NO: 1673180 - RNA, 19 nt, Artificial Sequence
  Description of Artificial Sequence: Synthetic oligonucleotide
  Antisense strand to SEQ ID NO: 1673179
uucucuauaaggaacagca

SEQ ID NO: 1673181 - RNA, 19 nt, Artificial Sequence
  Description of Artificial Sequence: Synthetic oligonucleotide
  Sense strand starting at position 2907 of SEQ ID NO: 1561454
gcucaccuccuguaaauga

SEQ ID NO: 1673182 - RNA, 19 nt, Artificial Sequence
  Description of Artificial Sequence: Synthetic oligonucleotide
  Antisense strand to SEQ ID NO: 1673181
ucauuuacaggaggugagc

SEQ ID NO: 1673183 - RNA, 19 nt, Artificial Sequence
  Description of Artificial Sequence: Synthetic oligonucleotide
  Sense strand starting at position 2933 of SEQ ID NO: 1561454
gcccgcguucagucugauu

SEQ ID NO: 1673184 - RNA, 19 nt, Artificial Sequence
  Description of Artificial Sequence: Synthetic oligonucleotide
  Antisense strand to SEQ ID NO: 1673183
aaucagacugaacgcgggc

SEQ ID NO: 1673185 - RNA, 19 nt, Artificial Sequence
  Description of Artificial Sequence: Synthetic oligonucleotide
  Sense strand starting at position 2968 of SEQ ID NO: 1561454
caaccagagucugaaguua

SEQ ID NO: 1673186 - RNA, 19 nt, Artificial Sequence
  Description of Artificial Sequence: Synthetic oligonucleotide
  Antisense strand to SEQ ID NO: 1673185
uaacuucagacucugguug

SEQ ID NO: 1673187 - RNA, 19 nt, Artificial Sequence
  Description of Artificial Sequence: Synthetic oligonucleotide
  Sense strand starting at position 3102 of SEQ ID NO: 1561454
ggccaucagucugauuugu

SEQ ID NO: 1673188 - RNA, 19 nt, Artificial Sequence
  Description of Artificial Sequence: Synthetic oligonucleotide
  Antisense strand to SEQ ID NO: 1673187
acaaaucagacugauggcc

SEQ ID NO: 1673189 - RNA, 19 nt, Artificial Sequence
  Description of Artificial Sequence: Synthetic oligonucleotide
  Sense strand starting at position 3321 of SEQ ID NO: 1561454
agacuagaaugcuccuauu

SEQ ID NO: 1673190 - RNA, 19 nt, Artificial Sequence
  Description of Artificial Sequence: Synthetic oligonucleotide
  Antisense strand to SEQ ID NO: 1673189
aauaggagcauucuagucu

SEQ ID NO: 1673191 - RNA, 19 nt, Artificial Sequence
  Description of Artificial Sequence: Synthetic oligonucleotide
  Sense strand starting at position 3324 of SEQ ID NO: 1561454
cuagaaugcuccuauugga

SEQ ID NO: 1673192 - RNA, 19 nt, Artificial Sequence
  Description of Artificial Sequence: Synthetic oligonucleotide
  Antisense strand to SEQ ID NO: 1673191
uccaauaggagcauucuag

SEQ ID NO: 1673193 - RNA, 19 nt, Artificial Sequence
  Description of Artificial Sequence: Synthetic oligonucleotide
  Sense strand starting at position 3513 of SEQ ID NO: 1561454
ggacguaguuaagagcaua

SEQ ID NO: 1673194 - RNA, 19 nt, Artificial Sequence
  Description of Artificial Sequence: Synthetic oligonucleotide
  Antisense strand to SEQ ID NO: 1673193
uaugcucuuaacuacgucc

SEQ ID NO: 1673195 - RNA, 19 nt, Artificial Sequence
  Description of Artificial Sequence: Synthetic oligonucleotide
  Sense strand starting at position 3516 of SEQ ID NO: 1561454
cguaguuaagagcauagau

SEQ ID NO: 1673196 - RNA, 19 nt, Artificial Sequence
  Description of Artificial Sequence: Synthetic oligonucleotide
  Antisense strand to SEQ ID NO: 1673195
aucuaugcucuuaacuacg

SEQ ID NO: 1673197 - RNA, 19 nt, Artificial Sequence
  Description of Artificial Sequence: Synthetic oligonucleotide
  Sense strand starting at position 3591 of SEQ ID NO: 1561454
uaaggccaauucgugauaa

SEQ ID NO: 1673198 - RNA, 19 nt, Artificial Sequence
  Description of Artificial Sequence: Synthetic oligonucleotide
  Antisense strand to SEQ ID NO: 1673197
uuaucacgaauuggccuua

SEQ ID NO: 1673199 - RNA, 19 nt, Artificial Sequence
  Description of Artificial Sequence: Synthetic oligonucleotide
  Sense strand starting at position 3593 of SEQ ID NO: 1561454
aggccaauucgugauaauu

SEQ ID NO: 1673200 - RNA, 19 nt, Artificial Sequence
  Description of Artificial Sequence: Synthetic oligonucleotide
  Antisense strand to SEQ ID NO: 1673199
aauuaucacgaauuggccu

SEQ ID NO: 1673201 - RNA, 19 nt, Artificial Sequence
  Description of Artificial Sequence: Synthetic oligonucleotide
  Sense strand starting at position 3595 of SEQ ID NO: 1561454
gccaauucgugauaauuuc

SEQ ID NO: 1673202 - RNA, 19 nt, Artificial Sequence
  Description of Artificial Sequence: Synthetic oligonucleotide
  Antisense strand to SEQ ID NO: 1673201
gaaauuaucacgaauuggc

SEQ ID NO: 1673203 - RNA, 19 nt, Artificial Sequence
  Description of Artificial Sequence: Synthetic oligonucleotide
  Sense strand starting at position 3846 of SEQ ID NO: 1561454
guacuaauguguccggaau

SEQ ID NO: 1673204 - RNA, 19 nt, Artificial Sequence
  Description of Artificial Sequence: Synthetic oligonucleotide
  Antisense strand to SEQ ID NO: 1673203
auuccggacacauuaguac

SEQ ID NO: 1673205 - RNA, 19 nt, Artificial Sequence
  Description of Artificial Sequence: Synthetic oligonucleotide
  Sense strand starting at position 715 of SEQ ID NO: 1561455
uacuuaaaugucgagcuua

SEQ ID NO: 1673206 - RNA, 19 nt, Artificial Sequence
  Description of Artificial Sequence: Synthetic oligonucleotide
  Antisense strand to SEQ ID NO: 1673205
uaagcucgacauuuaagua

SEQ ID NO: 1673207 - RNA, 19 nt, Artificial Sequence
  Description of Artificial Sequence: Synthetic oligonucleotide
  Sense strand starting at position 1067 of SEQ ID NO: 1561455
uggauauuuauucguggua

SEQ ID NO: 1673208 - RNA, 19 nt, Artificial Sequence
  Description of Artificial Sequence: Synthetic oligonucleotide
  Antisense strand to SEQ ID NO: 1673207
uaccacgaauaaauaucca

SEQ ID NO: 1673209 - RNA, 19 nt, Artificial Sequence
  Description of Artificial Sequence: Synthetic oligonucleotide
  Sense strand starting at position 1070 of SEQ ID NO: 1561455
auauuuauucgugguacug

SEQ ID NO: 1673210 - RNA, 19 nt, Artificial Sequence
  Description of Artificial Sequence: Synthetic oligonucleotide
  Antisense strand to SEQ ID NO: 1673209
caguaccacgaauaaauau

SEQ ID NO: 1673211 - RNA, 19 nt, Artificial Sequence
  Description of Artificial Sequence: Synthetic oligonucleotide
  Sense strand starting at position 1082 of SEQ ID NO: 1561455
gguacuggauggucaacau

SEQ ID NO: 1673212 - RNA, 19 nt, Artificial Sequence
  Description of Artificial Sequence: Synthetic oligonucleotide
  Antisense strand to SEQ ID NO: 1673211
auguugaccauccaguacc

SEQ ID NO: 1673213 - RNA, 19 nt, Artificial Sequence
  Description of Artificial Sequence: Synthetic oligonucleotide
  Sense strand starting at position 1170 of SEQ ID NO: 1561455
gguaaauucgauuauucua

SEQ ID NO: 1673214 - RNA, 19 nt, Artificial Sequence
  Description of Artificial Sequence: Synthetic oligonucleotide
  Antisense strand to SEQ ID NO: 1673213
uagaauaaucgaauuuacc

SEQ ID NO: 1673215 - RNA, 19 nt, Artificial Sequence
  Description of Artificial Sequence: Synthetic oligonucleotide
  Sense strand starting at position 1186 of SEQ ID NO: 1561455
cuaguauuaguguguaaac

SEQ ID NO: 1673216 - RNA, 19 nt, Artificial Sequence
  Description of Artificial Sequence: Synthetic oligonucleotide
  Antisense strand to SEQ ID NO: 1673215
guuuacacacuaauacuag

SEQ ID NO: 1673217 - RNA, 19 nt, Artificial Sequence
  Description of Artificial Sequence: Synthetic oligonucleotide
  Sense strand starting at position 1197 of SEQ ID NO: 1561455
guguaaacccuccauccuu

SEQ ID NO: 1673218 - RNA, 19 nt, Artificial Sequence
  Description of Artificial Sequence: Synthetic oligonucleotide
  Antisense strand to SEQ ID NO: 1673217
aaggauggaggguuuacac

SEQ ID NO: 1673219 - RNA, 19 nt, Artificial Sequence
  Description of Artificial Sequence: Synthetic oligonucleotide
  Sense strand starting at position 1221 of SEQ ID NO: 1561455
caggaagccugguuaugaa

SEQ ID NO: 1673220 - RNA, 19 nt, Artificial Sequence
  Description of Artificial Sequence: Synthetic oligonucleotide
  Antisense strand to SEQ ID NO: 1673219
uucauaaccaggcuuccug

SEQ ID NO: 1673221 - RNA, 19 nt, Artificial Sequence
  Description of Artificial Sequence: Synthetic oligonucleotide
  Sense strand starting at position 1289 of SEQ ID NO: 1561455
gaguauucuuagguuucuu

SEQ ID NO: 1673222 - RNA, 19 nt, Artificial Sequence
  Description of Artificial Sequence: Synthetic oligonucleotide
  Antisense strand to SEQ ID NO: 1673221
aagaaaccuaagaauacuc

SEQ ID NO: 1673223 - RNA, 19 nt, Artificial Sequence
  Description of Artificial Sequence: Synthetic oligonucleotide
  Sense strand starting at position 1294 of SEQ ID NO: 1561455
uucuuagguuucuuuagua

SEQ ID NO: 1673224 - RNA, 19 nt, Artificial Sequence
  Description of Artificial Sequence: Synthetic oligonucleotide
  Antisense strand to SEQ ID NO: 1673223
uacuaaagaaaccuaagaa

SEQ ID NO: 1673225 - RNA, 19 nt, Artificial Sequence
  Description of Artificial Sequence: Synthetic oligonucleotide
  Sense strand starting at position 1298 of SEQ ID NO: 1561455
uagguuucuuuaguagaaa

SEQ ID NO: 1673226 - RNA, 19 nt, Artificial Sequence
  Description of Artificial Sequence: Synthetic oligonucleotide
  Antisense strand to SEQ ID NO: 1673225
uuucuacuaaagaaaccua

SEQ ID NO: 1673227 - RNA, 19 nt, Artificial Sequence
  Description of Artificial Sequence: Synthetic oligonucleotide
  Sense strand starting at position 1301 of SEQ ID NO: 1561455
guuucuuuaguagaaagac

SEQ ID NO: 1673228 - RNA, 19 nt, Artificial Sequence
  Description of Artificial Sequence: Synthetic oligonucleotide
  Antisense strand to SEQ ID NO: 1673227
gucuuucuacuaaagaaac

SEQ ID NO: 1673229 - RNA, 19 nt, Artificial Sequence
  Description of Artificial Sequence: Synthetic oligonucleotide
  Sense strand starting at position 1384 of SEQ ID NO: 1561455
accuuucuaccggaacgua

SEQ ID NO: 1673230 - RNA, 19 nt, Artificial Sequence
  Description of Artificial Sequence: Synthetic oligonucleotide
  Antisense strand to SEQ ID NO: 1673229
uacguuccgguagaaaggu

SEQ ID NO: 1673231 - RNA, 19 nt, Artificial Sequence
  Description of Artificial Sequence: Synthetic oligonucleotide
  Sense strand starting at position 1457 of SEQ ID NO: 1561455
augaaacacucguuugcau

SEQ ID NO: 1673232 - RNA, 19 nt, Artificial Sequence
  Description of Artificial Sequence: Synthetic oligonucleotide
  Antisense strand to SEQ ID NO: 1673231
augcaaacgaguguuucau

SEQ ID NO: 1673233 - RNA, 19 nt, Artificial Sequence
  Description of Artificial Sequence: Synthetic oligonucleotide
  Sense strand starting at position 1459 of SEQ ID NO: 1561455
gaaacacucguuugcauaa

SEQ ID NO: 1673234 - RNA, 19 nt, Artificial Sequence
  Description of Artificial Sequence: Synthetic oligonucleotide
  Antisense strand to SEQ ID NO: 1673233
uuaugcaaacgaguguuuc

SEQ ID NO: 1673235 - RNA, 19 nt, Artificial Sequence
  Description of Artificial Sequence: Synthetic oligonucleotide
  Sense strand starting at position 1629 of SEQ ID NO: 1561455
aaacguugccuuggagacu

SEQ ID NO: 1673236 - RNA, 19 nt, Artificial Sequence
  Description of Artificial Sequence: Synthetic oligonucleotide
  Antisense strand to SEQ ID NO: 1673235
agucuccaaggcaacguuu

SEQ ID NO: 1673237 - RNA, 19 nt, Artificial Sequence
  Description of Artificial Sequence: Synthetic oligonucleotide
  Sense strand starting at position 1846 of SEQ ID NO: 1561455
uaaggagguuccucgauua

SEQ ID NO: 1673238 - RNA, 19 nt, Artificial Sequence
  Description of Artificial Sequence: Synthetic oligonucleotide
  Antisense strand to SEQ ID NO: 1673237
uaaucgaggaaccuccuua

SEQ ID NO: 1673239 - RNA, 19 nt, Artificial Sequence
  Description of Artificial Sequence: Synthetic oligonucleotide
  Sense strand starting at position 2323 of SEQ ID NO: 1561455
ucaggaugcucauuagaaa

SEQ ID NO: 1673240 - RNA, 19 nt, Artificial Sequence
  Description of Artificial Sequence: Synthetic oligonucleotide
  Antisense strand to SEQ ID NO: 1673239
uuucuaaugagcauccuga

SEQ ID NO: 1673241 - RNA, 19 nt, Artificial Sequence
  Description of Artificial Sequence: Synthetic oligonucleotide
  Sense strand starting at position 2367 of SEQ ID NO: 1561455
ucaggauucucuccaguug

SEQ ID NO: 1673242 - RNA, 19 nt, Artificial Sequence
  Description of Artificial Sequence: Synthetic oligonucleotide
  Antisense strand to SEQ ID NO: 1673241
caacuggagagaauccuga

SEQ ID NO: 1673243 - RNA, 19 nt, Artificial Sequence
  Description of Artificial Sequence: Synthetic oligonucleotide
  Sense strand starting at position 2368 of SEQ ID NO: 1561455
caggauucucuccaguuga

SEQ ID NO: 1673244 - RNA, 19 nt, Artificial Sequence
  Description of Artificial Sequence: Synthetic oligonucleotide
  Antisense strand to SEQ ID NO: 1673243
ucaacuggagagaauccug

SEQ ID NO: 1673245 - RNA, 19 nt, Artificial Sequence
  Description of Artificial Sequence: Synthetic oligonucleotide
  Sense strand starting at position 2424 of SEQ ID NO: 1561455
ucgaucacgucuuuagaac

SEQ ID NO: 1673246 - RNA, 19 nt, Artificial Sequence
  Description of Artificial Sequence: Synthetic oligonucleotide
  Antisense strand to SEQ ID NO: 1673245
guucuaaagacgugaucga

SEQ ID NO: 1673247 - RNA, 19 nt, Artificial Sequence
  Description of Artificial Sequence: Synthetic oligonucleotide
  Sense strand starting at position 2425 of SEQ ID NO: 1561455
cgaucacgucuuuagaacu

SEQ ID NO: 1673248 - RNA, 19 nt, Artificial Sequence
  Description of Artificial Sequence: Synthetic oligonucleotide
  Antisense strand to SEQ ID NO: 1673247
aguucuaaagacgugaucg

SEQ ID NO: 1673249 - RNA, 19 nt, Artificial Sequence
  Description of Artificial Sequence: Synthetic oligonucleotide
  Sense strand starting at position 2519 of SEQ ID NO: 1561455
ucgauacuuucuguaaaua

SEQ ID NO: 1673250 - RNA, 19 nt, Artificial Sequence
  Description of Artificial Sequence: Synthetic oligonucleotide
  Antisense strand to SEQ ID NO: 1673249
uauuuacagaaaguaucga

SEQ ID NO: 1673251 - RNA, 19 nt, Artificial Sequence
  Description of Artificial Sequence: Synthetic oligonucleotide
  Sense strand starting at position 2520 of SEQ ID NO: 1561455
cgauacuuucuguaaauau

SEQ ID NO: 1673252 - RNA, 19 nt, Artificial Sequence
  Description of Artificial Sequence: Synthetic oligonucleotide
  Antisense strand to SEQ ID NO: 1673251
auauuuacagaaaguaucg

SEQ ID NO: 1673253 - RNA, 19 nt, Artificial Sequence
  Description of Artificial Sequence: Synthetic oligonucleotide
  Sense strand starting at position 3012 of SEQ ID NO: 1561455
ucacuuauucugugcagaa

SEQ ID NO: 1673254 - RNA, 19 nt, Artificial Sequence
  Description of Artificial Sequence: Synthetic oligonucleotide
  Antisense strand to SEQ ID NO: 1673253
uucugcacagaauaaguga

SEQ ID NO: 1673255 - RNA, 19 nt, Artificial Sequence
  Description of Artificial Sequence: Synthetic oligonucleotide
  Sense strand starting at position 3039 of SEQ ID NO: 1561455
gacuguuggacuuguggua

SEQ ID NO: 1673256 - RNA, 19 nt, Artificial Sequence
  Description of Artificial Sequence: Synthetic oligonucleotide
  Antisense strand to SEQ ID NO: 1673255
uaccacaaguccaacaguc

SEQ ID NO: 1673257 - RNA, 19 nt, Artificial Sequence
  Description of Artificial Sequence: Synthetic oligonucleotide
  Sense strand starting at position 3063 of SEQ ID NO: 1561455
uuaguugaaucuucggguu

SEQ ID NO: 1673258 - RNA, 19 nt, Artificial Sequence
  Description of Artificial Sequence: Synthetic oligonucleotide
  Antisense strand to SEQ ID NO: 1673257
aacccgaagauucaacuaa

SEQ ID NO: 1673259 - RNA, 19 nt, Artificial Sequence
  Description of Artificial Sequence: Synthetic oligonucleotide
  Sense strand starting at position 3069 of SEQ ID NO: 1561455
gaaucuucggguuauauug

SEQ ID NO: 1673260 - RNA, 19 nt, Artificial Sequence
  Description of Artificial Sequence: Synthetic oligonucleotide
  Antisense strand to SEQ ID NO: 1673259
caauauaacccgaagauuc

SEQ ID NO: 1673261 - RNA, 19 nt, Artificial Sequence
  Description of Artificial Sequence: Synthetic oligonucleotide
  Sense strand starting at position 3076 of SEQ ID NO: 1561455
cggguuauauugguaucuu

SEQ ID NO: 1673262 - RNA, 19 nt, Artificial Sequence
  Description of Artificial Sequence: Synthetic oligonucleotide
  Antisense strand to SEQ ID NO: 1673261
aagauaccaauauaacccg

SEQ ID NO: 1673263 - RNA, 19 nt, Artificial Sequence
  Description of Artificial Sequence: Synthetic oligonucleotide
  Sense strand starting at position 3100 of SEQ ID NO: 1561455
uacugagucuuccuaugug

SEQ ID NO: 1673264 - RNA, 19 nt, Artificial Sequence
  Description of Artificial Sequence: Synthetic oligonucleotide
  Antisense strand to SEQ ID NO: 1673263
cacauaggaagacucagua

SEQ ID NO: 1673265 - RNA, 19 nt, Artificial Sequence
  Description of Artificial Sequence: Synthetic oligonucleotide
  Sense strand starting at position 3104 of SEQ ID NO: 1561455
gagucuuccuaugugugaa

SEQ ID NO: 1673266 - RNA, 19 nt, Artificial Sequence
  Description of Artificial Sequence: Synthetic oligonucleotide
  Antisense strand to SEQ ID NO: 1673265
uucacacauaggaagacuc

SEQ ID NO: 1673267 - RNA, 19 nt, Artificial Sequence
  Description of Artificial Sequence: Synthetic oligonucleotide
  Sense strand starting at position 3105 of SEQ ID NO: 1561455
agucuuccuaugugugaau

SEQ ID NO: 1673268 - RNA, 19 nt, Artificial Sequence
  Description of Artificial Sequence: Synthetic oligonucleotide
  Antisense strand to SEQ ID NO: 1673267
auucacacauaggaagacu

SEQ ID NO: 1673269 - RNA, 19 nt, Artificial Sequence
  Description of Artificial Sequence: Synthetic oligonucleotide
  Sense strand starting at position 3106 of SEQ ID NO: 1561455
gucuuccuaugugugaaua

SEQ ID NO: 1673270 - RNA, 19 nt, Artificial Sequence
  Description of Artificial Sequence: Synthetic oligonucleotide
  Antisense strand to SEQ ID NO: 1673269
uauucacacauaggaagac

SEQ ID NO: 1673271 - RNA, 19 nt, Artificial Sequence
  Description of Artificial Sequence: Synthetic oligonucleotide
  Sense strand starting at position 3107 of SEQ ID NO: 1561455
ucuuccuaugugugaauau

SEQ ID NO: 1673272 - RNA, 19 nt, Artificial Sequence
  Description of Artificial Sequence: Synthetic oligonucleotide
  Antisense strand to SEQ ID NO: 1673271
auauucacacauaggaaga

SEQ ID NO: 1673273 - RNA, 19 nt, Artificial Sequence
  Description of Artificial Sequence: Synthetic oligonucleotide
  Sense strand starting at position 3208 of SEQ ID NO: 1561455
ggguaaaguuauucccaug

SEQ ID NO: 1673274 - RNA, 19 nt, Artificial Sequence
  Description of Artificial Sequence: Synthetic oligonucleotide
  Antisense strand to SEQ ID NO: 1673273
caugggaauaacuuuaccc

SEQ ID NO: 1673275 - RNA, 19 nt, Artificial Sequence
  Description of Artificial Sequence: Synthetic oligonucleotide
  Sense strand starting at position 3243 of SEQ ID NO: 1561455
gggaucacauucucaguuu

SEQ ID NO: 1673276 - RNA, 19 nt, Artificial Sequence
  Description of Artificial Sequence: Synthetic oligonucleotide
  Antisense strand to SEQ ID NO: 1673275
aaacugagaaugugauccc

SEQ ID NO: 1673277 - RNA, 19 nt, Artificial Sequence
  Description of Artificial Sequence: Synthetic oligonucleotide
  Sense strand starting at position 3428 of SEQ ID NO: 1561455
guucuauucuaauugagaa

SEQ ID NO: 1673278 - RNA, 19 nt, Artificial Sequence
  Description of Artificial Sequence: Synthetic oligonucleotide
  Antisense strand to SEQ ID NO: 1673277
uucucaauuagaauagaac

SEQ ID NO: 1673279 - RNA, 19 nt, Artificial Sequence
  Description of Artificial Sequence: Synthetic oligonucleotide
  Sense strand starting at position 3738 of SEQ ID NO: 1561455
uggagauggcuccauugca

SEQ ID NO: 1673280 - RNA, 19 nt, Artificial Sequence
  Description of Artificial Sequence: Synthetic oligonucleotide
  Antisense strand to SEQ ID NO: 1673279
ugcaauggagccaucucca

SEQ ID NO: 1673281 - RNA, 19 nt, Artificial Sequence
  Description of Artificial Sequence: Synthetic oligonucleotide
  Sense strand starting at position 3814 of SEQ ID NO: 1561455
uuuccuguagaauguugaa

SEQ ID NO: 1673282 - RNA, 19 nt, Artificial Sequence
  Description of Artificial Sequence: Synthetic oligonucleotide
  Antisense strand to SEQ ID NO: 1673281
uucaacauucuacaggaaa

SEQ ID NO: 1673283 - RNA, 19 nt, Artificial Sequence
  Description of Artificial Sequence: Synthetic oligonucleotide
  Sense strand starting at position 3902 of SEQ ID NO: 1561455
ugaauaucacguuagcugu

SEQ ID NO: 1673284 - RNA, 19 nt, Artificial Sequence
  Description of Artificial Sequence: Synthetic oligonucleotide
  Antisense strand to SEQ ID NO: 1673283
acagcuaacgugauauuca

SEQ ID NO: 1673285 - RNA, 19 nt, Artificial Sequence
  Description of Artificial Sequence: Synthetic oligonucleotide
  Sense strand starting at position 458 of SEQ ID NO: 1561456
accgucacucaguaacaaa

SEQ ID NO: 1673286 - RNA, 19 nt, Artificial Sequence
  Description of Artificial Sequence: Synthetic oligonucleotide
  Antisense strand to SEQ ID NO: 1673285
uuuguuacugagugacggu

SEQ ID NO: 1673287 - RNA, 19 nt, Artificial Sequence
  Description of Artificial Sequence: Synthetic oligonucleotide
  Sense strand starting at position 496 of SEQ ID NO: 1561456
gacauuuacugaggacuga

SEQ ID NO: 1673288 - RNA, 19 nt, Artificial Sequence
  Description of Artificial Sequence: Synthetic oligonucleotide
  Antisense strand to SEQ ID NO: 1673287
ucaguccucaguaaauguc

SEQ ID NO: 1673289 - RNA, 19 nt, Artificial Sequence
  Description of Artificial Sequence: Synthetic oligonucleotide
  Sense strand starting at position 510 of SEQ ID NO: 1561456
acugauaugucagaaguag

SEQ ID NO: 1673290 - RNA, 19 nt, Artificial Sequence
  Description of Artificial Sequence: Synthetic oligonucleotide
  Antisense strand to SEQ ID NO: 1673289
cuacuucugacauaucagu

SEQ ID NO: 1673291 - RNA, 19 nt, Artificial Sequence
  Description of Artificial Sequence: Synthetic oligonucleotide
  Sense strand starting at position 542 of SEQ ID NO: 1561456
auauauacaugcucaguua

SEQ ID NO: 1673292 - RNA, 19 nt, Artificial Sequence
  Description of Artificial Sequence: Synthetic oligonucleotide
  Antisense strand to SEQ ID NO: 1673291
uaacugagcauguauauau

SEQ ID NO: 1673293 - RNA, 19 nt, Artificial Sequence
  Description of Artificial Sequence: Synthetic oligonucleotide
  Sense strand starting at position 734 of SEQ ID NO: 1561456
guugaaauccaauggcacu

SEQ ID NO: 1673294 - RNA, 19 nt, Artificial Sequence
  Description of Artificial Sequence: Synthetic oligonucleotide
  Antisense strand to SEQ ID NO: 1673293
agugccauuggauuucaac

SEQ ID NO: 1673295 - RNA, 19 nt, Artificial Sequence
  Description of Artificial Sequence: Synthetic oligonucleotide
  Sense strand starting at position 824 of SEQ ID NO: 1561456
gaccauaggugcguaucau

SEQ ID NO: 1673296 - RNA, 19 nt, Artificial Sequence
  Description of Artificial Sequence: Synthetic oligonucleotide
  Antisense strand to SEQ ID NO: 1673295
augauacgcaccuaugguc

SEQ ID NO: 1673297 - RNA, 19 nt, Artificial Sequence
  Description of Artificial Sequence: Synthetic oligonucleotide
  Sense strand starting at position 833 of SEQ ID NO: 1561456
ugcguaucaucacucauua

SEQ ID NO: 1673298 - RNA, 19 nt, Artificial Sequence
  Description of Artificial Sequence: Synthetic oligonucleotide
  Antisense strand to SEQ ID NO: 1673297
uaaugagugaugauacgca

SEQ ID NO: 1673299 - RNA, 19 nt, Artificial Sequence
  Description of Artificial Sequence: Synthetic oligonucleotide
  Sense strand starting at position 1036 of SEQ ID NO: 1561456
gacgcaguuucgccauauu

SEQ ID NO: 1673300 - RNA, 19 nt, Artificial Sequence
  Description of Artificial Sequence: Synthetic oligonucleotide
  Antisense strand to SEQ ID NO: 1673299
aauauggcgaaacugcguc

SEQ ID NO: 1673301 - RNA, 19 nt, Artificial Sequence
  Description of Artificial Sequence: Synthetic oligonucleotide
  Sense strand starting at position 1341 of SEQ ID NO: 1561456
gucugauacuugucccuag

SEQ ID NO: 1673302 - RNA, 19 nt, Artificial Sequence
  Description of Artificial Sequence: Synthetic oligonucleotide
  Antisense strand to SEQ ID NO: 1673301
cuagggacaaguaucagac

SEQ ID NO: 1673303 - RNA, 19 nt, Artificial Sequence
  Description of Artificial Sequence: Synthetic oligonucleotide
  Sense strand starting at position 1342 of SEQ ID NO: 1561456
ucugauacuugucccuaga

SEQ ID NO: 1673304 - RNA, 19 nt, Artificial Sequence
  Description of Artificial Sequence: Synthetic oligonucleotide
  Antisense strand to SEQ ID NO: 1673303
ucuagggacaaguaucaga

SEQ ID NO: 1673305 - RNA, 19 nt, Artificial Sequence
  Description of Artificial Sequence: Synthetic oligonucleotide
  Sense strand starting at position 1358 of SEQ ID NO: 1561456
agagccugaucuccuguau

SEQ ID NO: 1673306 - RNA, 19 nt, Artificial Sequence
  Description of Artificial Sequence: Synthetic oligonucleotide
  Antisense strand to SEQ ID NO: 1673305
auacaggagaucaggcucu

SEQ ID NO: 1673307 - RNA, 19 nt, Artificial Sequence
  Description of Artificial Sequence: Synthetic oligonucleotide
  Sense strand starting at position 1391 of SEQ ID NO: 1561456
ccgccauaugaccagaaga

SEQ ID NO: 1673308 - RNA, 19 nt, Artificial Sequence
  Description of Artificial Sequence: Synthetic oligonucleotide
  Antisense strand to SEQ ID NO: 1673307
ucuucuggucauauggcgg

SEQ ID NO: 1673309 - RNA, 19 nt, Artificial Sequence
  Description of Artificial Sequence: Synthetic oligonucleotide
  Sense strand starting at position 1472 of SEQ ID NO: 1561456
uuacguaccuaagaugacu

SEQ ID NO: 1673310 - RNA, 19 nt, Artificial Sequence
  Description of Artificial Sequence: Synthetic oligonucleotide
  Antisense strand to SEQ ID NO: 1673309
agucaucuuagguacguaa

SEQ ID NO: 1673311 - RNA, 19 nt, Artificial Sequence
  Description of Artificial Sequence: Synthetic oligonucleotide
  Sense strand starting at position 1798 of SEQ ID NO: 1561456
gacugauagucccuggaga

SEQ ID NO: 1673312 - RNA, 19 nt, Artificial Sequence
  Description of Artificial Sequence: Synthetic oligonucleotide
  Antisense strand to SEQ ID NO: 1673311
ucuccagggacuaucaguc

SEQ ID NO: 1673313 - RNA, 19 nt, Artificial Sequence
  Description of Artificial Sequence: Synthetic oligonucleotide
  Sense strand starting at position 1799 of SEQ ID NO: 1561456
acugauagucccuggagaa

SEQ ID NO: 1673314 - RNA, 19 nt, Artificial Sequence
  Description of Artificial Sequence: Synthetic oligonucleotide
  Antisense strand to SEQ ID NO: 1673313
uucuccagggacuaucagu

SEQ ID NO: 1673315 - RNA, 19 nt, Artificial Sequence
  Description of Artificial Sequence: Synthetic oligonucleotide
  Sense strand starting at position 1800 of SEQ ID NO: 1561456
cugauagucccuggagaag

SEQ ID NO: 1673316 - RNA, 19 nt, Artificial Sequence
  Description of Artificial Sequence: Synthetic oligonucleotide
  Antisense strand to SEQ ID NO: 1673315
cuucuccagggacuaucag

SEQ ID NO: 1673317 - RNA, 19 nt, Artificial Sequence
  Description of Artificial Sequence: Synthetic oligonucleotide
  Sense strand starting at position 2398 of SEQ ID NO: 1561456
aggcuaagguagguaaaua

SEQ ID NO: 1673318 - RNA, 19 nt, Artificial Sequence
  Description of Artificial Sequence: Synthetic oligonucleotide
  Antisense strand to SEQ ID NO: 1673317
uauuuaccuaccuuagccu

SEQ ID NO: 1673319 - RNA, 19 nt, Artificial Sequence
  Description of Artificial Sequence: Synthetic oligonucleotide
  Sense strand starting at position 2408 of SEQ ID NO: 1561456
agguaaauagcuugagucu

SEQ ID NO: 1673320 - RNA, 19 nt, Artificial Sequence
  Description of Artificial Sequence: Synthetic oligonucleotide
  Antisense strand to SEQ ID NO: 1673319
agacucaagcuauuuaccu

SEQ ID NO: 1673321 - RNA, 19 nt, Artificial Sequence
  Description of Artificial Sequence: Synthetic oligonucleotide
  Sense strand starting at position 2409 of SEQ ID NO: 1561456
gguaaauagcuugagucug

SEQ ID NO: 1673322 - RNA, 19 nt, Artificial Sequence
  Description of Artificial Sequence: Synthetic oligonucleotide
  Antisense strand to SEQ ID NO: 1673321
cagacucaagcuauuuacc

SEQ ID NO: 1673323 - RNA, 19 nt, Artificial Sequence
  Description of Artificial Sequence: Synthetic oligonucleotide
  Sense strand starting at position 2440 of SEQ ID NO: 1561456
gcucgcuuggugucacaaa

SEQ ID NO: 1673324 - RNA, 19 nt, Artificial Sequence
  Description of Artificial Sequence: Synthetic oligonucleotide
  Antisense strand to SEQ ID NO: 1673323
uuugugacaccaagcgagc

SEQ ID NO: 1673325 - RNA, 19 nt, Artificial Sequence
  Description of Artificial Sequence: Synthetic oligonucleotide
  Sense strand starting at position 2578 of SEQ ID NO: 1561456
acuugaaguguccauccuu

SEQ ID NO: 1673326 - RNA, 19 nt, Artificial Sequence
  Description of Artificial Sequence: Synthetic oligonucleotide
  Antisense strand to SEQ ID NO: 1673325
aaggauggacacuucaagu

SEQ ID NO: 1673327 - RNA, 19 nt, Artificial Sequence
  Description of Artificial Sequence: Synthetic oligonucleotide
  Sense strand starting at position 2768 of SEQ ID NO: 1561456
aggaauaggccaugaccua

SEQ ID NO: 1673328 - RNA, 19 nt, Artificial Sequence
  Description of Artificial Sequence: Synthetic oligonucleotide
  Antisense strand to SEQ ID NO: 1673327
uaggucauggccuauuccu

SEQ ID NO: 1673329 - RNA, 19 nt, Artificial Sequence
  Description of Artificial Sequence: Synthetic oligonucleotide
  Sense strand starting at position 2869 of SEQ ID NO: 1561456
cuuuauuacggcuggcaga

SEQ ID NO: 1673330 - RNA, 19 nt, Artificial Sequence
  Description of Artificial Sequence: Synthetic oligonucleotide
  Antisense strand to SEQ ID NO: 1673329
ucugccagccguaauaaag

SEQ ID NO: 1673331 - RNA, 19 nt, Artificial Sequence
  Description of Artificial Sequence: Synthetic oligonucleotide
  Sense strand starting at position 2870 of SEQ ID NO: 1561456
uuuauuacggcuggcagaa

SEQ ID NO: 1673332 - RNA, 19 nt, Artificial Sequence
  Description of Artificial Sequence: Synthetic oligonucleotide
  Antisense strand to SEQ ID NO: 1673331
uucugccagccguaauaaa

SEQ ID NO: 1673333 - RNA, 19 nt, Artificial Sequence
  Description of Artificial Sequence: Synthetic oligonucleotide
  Sense strand starting at position 2882 of SEQ ID NO: 1561456
ggcagaauuuaacaauauu

SEQ ID NO: 1673334 - RNA, 19 nt, Artificial Sequence
  Description of Artificial Sequence: Synthetic oligonucleotide
  Antisense strand to SEQ ID NO: 1673333
aauauuguuaaauucugcc

SEQ ID NO: 1673335 - RNA, 19 nt, Artificial Sequence
  Description of Artificial Sequence: Synthetic oligonucleotide
  Sense strand starting at position 2900 of SEQ ID NO: 1561456
uaccacaggucuuugagaa

SEQ ID NO: 1673336 - RNA, 19 nt, Artificial Sequence
  Description of Artificial Sequence: Synthetic oligonucleotide
  Antisense strand to SEQ ID NO: 1673335
uucucaaagaccuguggua

SEQ ID NO: 1673337 - RNA, 19 nt, Artificial Sequence
  Description of Artificial Sequence: Synthetic oligonucleotide
  Sense strand starting at position 2921 of SEQ ID NO: 1561456
uuuggcuucuaagagggau

SEQ ID NO: 1673338 - RNA, 19 nt, Artificial Sequence
  Description of Artificial Sequence: Synthetic oligonucleotide
  Antisense strand to SEQ ID NO: 1673337
aucccucuuagaagccaaa

SEQ ID NO: 1673339 - RNA, 19 nt, Artificial Sequence
  Description of Artificial Sequence: Synthetic oligonucleotide
  Sense strand starting at position 2923 of SEQ ID NO: 1561456
uggcuucuaagagggauua

SEQ ID NO: 1673340 - RNA, 19 nt, Artificial Sequence
  Description of Artificial Sequence: Synthetic oligonucleotide
  Antisense strand to SEQ ID NO: 1673339
uaaucccucuuagaagcca

SEQ ID NO: 1673341 - RNA, 19 nt, Artificial Sequence
  Description of Artificial Sequence: Synthetic oligonucleotide
  Sense strand starting at position 3249 of SEQ ID NO: 1561456
cgguauacucaccagcagu

SEQ ID NO: 1673342 - RNA, 19 nt, Artificial Sequence
  Description of Artificial Sequence: Synthetic oligonucleotide
  Antisense strand to SEQ ID NO: 1673341
acugcuggugaguauaccg

SEQ ID NO: 1673343 - RNA, 19 nt, Artificial Sequence
  Description of Artificial Sequence: Synthetic oligonucleotide
  Sense strand starting at position 3549 of SEQ ID NO: 1561456
gacuaaacugugggagcua

SEQ ID NO: 1673344 - RNA, 19 nt, Artificial Sequence
  Description of Artificial Sequence: Synthetic oligonucleotide
  Antisense strand to SEQ ID NO: 1673343
uagcucccacaguuuaguc

SEQ ID NO: 1673345 - RNA, 19 nt, Artificial Sequence
  Description of Artificial Sequence: Synthetic oligonucleotide
  Sense strand starting at position 3591 of SEQ ID NO: 1561456
uuuaucacggcucacagau

SEQ ID NO: 1673346 - RNA, 19 nt, Artificial Sequence
  Description of Artificial Sequence: Synthetic oligonucleotide
  Antisense strand to SEQ ID NO: 1673345
aucugugagccgugauaaa

SEQ ID NO: 1673347 - RNA, 19 nt, Artificial Sequence
  Description of Artificial Sequence: Synthetic oligonucleotide
  Sense strand starting at position 3600 of SEQ ID NO: 1561456
gcucacagauacuugagaa

SEQ ID NO: 1673348 - RNA, 19 nt, Artificial Sequence
  Description of Artificial Sequence: Synthetic oligonucleotide
  Antisense strand to SEQ ID NO: 1673347
uucucaaguaucugugagc

SEQ ID NO: 1673349 - RNA, 19 nt, Artificial Sequence
  Description of Artificial Sequence: Synthetic oligonucleotide
  Sense strand starting at position 3610 of SEQ ID NO: 1561456
acuugagaauguuagcaca

SEQ ID NO: 1673350 - RNA, 19 nt, Artificial Sequence
  Description of Artificial Sequence: Synthetic oligonucleotide
  Antisense strand to SEQ ID NO: 1673349
ugugcuaacauucucaagu

SEQ ID NO: 1673351 - RNA, 19 nt, Artificial Sequence
  Description of Artificial Sequence: Synthetic oligonucleotide
  Sense strand starting at position 3674 of SEQ ID NO: 1561456
cuaauuaaaugugaaggaa

SEQ ID NO: 1673352 - RNA, 19 nt, Artificial Sequence
  Description of Artificial Sequence: Synthetic oligonucleotide
  Antisense strand to SEQ ID NO: 1673351
uuccuucacauuuaauuag

SEQ ID NO: 1673353 - RNA, 19 nt, Artificial Sequence
  Description of Artificial Sequence: Synthetic oligonucleotide
  Sense strand starting at position 3686 of SEQ ID NO: 1561456
gaaggaacgucuuugaaga

SEQ ID NO: 1673354 - RNA, 19 nt, Artificial Sequence
  Description of Artificial Sequence: Synthetic oligonucleotide
  Antisense strand to SEQ ID NO: 1673353
ucuucaaagacguuccuuc

SEQ ID NO: 1673355 - RNA, 19 nt, Artificial Sequence
  Description of Artificial Sequence: Synthetic oligonucleotide
  Sense strand starting at position 3797 of SEQ ID NO: 1561456
ugauaaagcugccaaugaa

SEQ ID NO: 1673356 - RNA, 19 nt, Artificial Sequence
  Description of Artificial Sequence: Synthetic oligonucleotide
  Antisense strand to SEQ ID NO: 1673355
uucauuggcagcuuuauca

SEQ ID NO: 1673357 - RNA, 19 nt, Artificial Sequence
  Description of Artificial Sequence: Synthetic oligonucleotide
  Sense strand starting at position 3809 of SEQ ID NO: 1561456
caaugaauggcauggucua

SEQ ID NO: 1673358 - RNA, 19 nt, Artificial Sequence
  Description of Artificial Sequence: Synthetic oligonucleotide
  Antisense strand to SEQ ID NO: 1673357
uagaccaugccauucauug

SEQ ID NO: 1673359 - RNA, 19 nt, Artificial Sequence
  Description of Artificial Sequence: Synthetic oligonucleotide
  Sense strand starting at position 3810 of SEQ ID NO: 1561456
aaugaauggcauggucuau

SEQ ID NO: 1673360 - RNA, 19 nt, Artificial Sequence
  Description of Artificial Sequence: Synthetic oligonucleotide
  Antisense strand to SEQ ID NO: 1673359
auagaccaugccauucauu

SEQ ID NO: 1673361 - RNA, 19 nt, Artificial Sequence
  Description of Artificial Sequence: Synthetic oligonucleotide
  Sense strand starting at position 3891 of SEQ ID NO: 1561456
ugcugauuccauuggguuu

SEQ ID NO: 1673362 - RNA, 19 nt, Artificial Sequence
  Description of Artificial Sequence: Synthetic oligonucleotide
  Antisense strand to SEQ ID NO: 1673361
aaacccaauggaaucagca

SEQ ID NO: 1673363 - RNA, 19 nt, Artificial Sequence
  Description of Artificial Sequence: Synthetic oligonucleotide
  Sense strand starting at position 3932 of SEQ ID NO: 1561456
gcuugcuugcgacagaucu

SEQ ID NO: 1673364 - RNA, 19 nt, Artificial Sequence
  Description of Artificial Sequence: Synthetic oligonucleotide
  Antisense strand to SEQ ID NO: 1673363
agaucugucgcaagcaagc

SEQ ID NO: 1673365 - RNA, 19 nt, Artificial Sequence
  Description of Artificial Sequence: Synthetic oligonucleotide
  Sense strand starting at position 86 of SEQ ID NO: 1561457
agccaauagggucaguuua

SEQ ID NO: 1673366 - RNA, 19 nt, Artificial Sequence
  Description of Artificial Sequence: Synthetic oligonucleotide
  Antisense strand to SEQ ID NO: 1673365
uaaacugacccuauuggcu

SEQ ID NO: 1673367 - RNA, 19 nt, Artificial Sequence
  Description of Artificial Sequence: Synthetic oligonucleotide
  Sense strand starting at position 88 of SEQ ID NO: 1561457
ccaauagggucaguuuaga

SEQ ID NO: 1673368 - RNA, 19 nt, Artificial Sequence
  Description of Artificial Sequence: Synthetic oligonucleotide
  Antisense strand to SEQ ID NO: 1673367
ucuaaacugacccuauugg

SEQ ID NO: 1673369 - RNA, 19 nt, Artificial Sequence
  Description of Artificial Sequence: Synthetic oligonucleotide
  Sense strand starting at position 101 of SEQ ID NO: 1561457
uuuagauucugcggucuga

SEQ ID NO: 1673370 - RNA, 19 nt, Artificial Sequence
  Description of Artificial Sequence: Synthetic oligonucleotide
  Antisense strand to SEQ ID NO: 1673369
ucagaccgcagaaucuaaa

SEQ ID NO: 1673371 - RNA, 19 nt, Artificial Sequence
  Description of Artificial Sequence: Synthetic oligonucleotide
  Sense strand starting at position 151 of SEQ ID NO: 1561457
gggacccagcguuagaaau

SEQ ID NO: 1673372 - RNA, 19 nt, Artificial Sequence
  Description of Artificial Sequence: Synthetic oligonucleotide
  Antisense strand to SEQ ID NO: 1673371
auuucuaacgcuggguccc

SEQ ID NO: 1673373 - RNA, 19 nt, Artificial Sequence
  Description of Artificial Sequence: Synthetic oligonucleotide
  Sense strand starting at position 153 of SEQ ID NO: 1561457
gacccagcguuagaaauaa

SEQ ID NO: 1673374 - RNA, 19 nt, Artificial Sequence
  Description of Artificial Sequence: Synthetic oligonucleotide
  Antisense strand to SEQ ID NO: 1673373
uuauuucuaacgcuggguc

SEQ ID NO: 1673375 - RNA, 19 nt, Artificial Sequence
  Description of Artificial Sequence: Synthetic oligonucleotide
  Sense strand starting at position 195 of SEQ ID NO: 1561457
gguguacucucgccaucac

SEQ ID NO: 1673376 - RNA, 19 nt, Artificial Sequence
  Description of Artificial Sequence: Synthetic oligonucleotide
  Antisense strand to SEQ ID NO: 1673375
gugauggcgagaguacacc

SEQ ID NO: 1673377 - RNA, 19 nt, Artificial Sequence
  Description of Artificial Sequence: Synthetic oligonucleotide
  Sense strand starting at position 196 of SEQ ID NO: 1561457
guguacucucgccaucacu

SEQ ID NO: 1673378 - RNA, 19 nt, Artificial Sequence
  Description of Artificial Sequence: Synthetic oligonucleotide
  Antisense strand to SEQ ID NO: 1673377
agugauggcgagaguacac

SEQ ID NO: 1673379 - RNA, 19 nt, Artificial Sequence
  Description of Artificial Sequence: Synthetic oligonucleotide
  Sense strand starting at position 515 of SEQ ID NO: 1561457
gcuugcagcugguaacaau

SEQ ID NO: 1673380 - RNA, 19 nt, Artificial Sequence
  Description of Artificial Sequence: Synthetic oligonucleotide
  Antisense strand to SEQ ID NO: 1673379
auuguuaccagcugcaagc

SEQ ID NO: 1673381 - RNA, 19 nt, Artificial Sequence
  Description of Artificial Sequence: Synthetic oligonucleotide
  Sense strand starting at position 641 of SEQ ID NO: 1561457
uuuccaucugaauguaaug

SEQ ID NO: 1673382 - RNA, 19 nt, Artificial Sequence
  Description of Artificial Sequence: Synthetic oligonucleotide
  Antisense strand to SEQ ID NO: 1673381
cauuacauucagauggaaa

SEQ ID NO: 1673383 - RNA, 19 nt, Artificial Sequence
  Description of Artificial Sequence: Synthetic oligonucleotide
  Sense strand starting at position 646 of SEQ ID NO: 1561457
aucugaauguaauguguca

SEQ ID NO: 1673384 - RNA, 19 nt, Artificial Sequence
  Description of Artificial Sequence: Synthetic oligonucleotide
  Antisense strand to SEQ ID NO: 1673383
ugacacauuacauucagau

SEQ ID NO: 1673385 - RNA, 19 nt, Artificial Sequence
  Description of Artificial Sequence: Synthetic oligonucleotide
  Sense strand starting at position 811 of SEQ ID NO: 1561457
gcaggugaaucauguuaua

SEQ ID NO: 1673386 - RNA, 19 nt, Artificial Sequence
  Description of Artificial Sequence: Synthetic oligonucleotide
  Antisense strand to SEQ ID NO: 1673385
uauaacaugauucaccugc

SEQ ID NO: 1673387 - RNA, 19 nt, Artificial Sequence
  Description of Artificial Sequence: Synthetic oligonucleotide
  Sense strand starting at position 814 of SEQ ID NO: 1561457
ggugaaucauguuauaaag

SEQ ID NO: 1673388 - RNA, 19 nt, Artificial Sequence
  Description of Artificial Sequence: Synthetic oligonucleotide
  Antisense strand to SEQ ID NO: 1673387
cuuuauaacaugauucacc

SEQ ID NO: 1673389 - RNA, 19 nt, Artificial Sequence
  Description of Artificial Sequence: Synthetic oligonucleotide
  Sense strand starting at position 965 of SEQ ID NO: 1561457
ggguucuuauucuugagga

SEQ ID NO: 1673390 - RNA, 19 nt, Artificial Sequence
  Description of Artificial Sequence: Synthetic oligonucleotide
  Antisense strand to SEQ ID NO: 1673389
uccucaagaauaagaaccc

SEQ ID NO: 1673391 - RNA, 19 nt, Artificial Sequence
  Description of Artificial Sequence: Synthetic oligonucleotide
  Sense strand starting at position 969 of SEQ ID NO: 1561457
ucuuauucuugaggaaagu

SEQ ID NO: 1673392 - RNA, 19 nt, Artificial Sequence
  Description of Artificial Sequence: Synthetic oligonucleotide
  Antisense strand to SEQ ID NO: 1673391
acuuuccucaagaauaaga

SEQ ID NO: 1673393 - RNA, 19 nt, Artificial Sequence
  Description of Artificial Sequence: Synthetic oligonucleotide
  Sense strand starting at position 1155 of SEQ ID NO: 1561457
uggaguaaguaaucgaaau

SEQ ID NO: 1673394 - RNA, 19 nt, Artificial Sequence
  Description of Artificial Sequence: Synthetic oligonucleotide
  Antisense strand to SEQ ID NO: 1673393
auuucgauuacuuacucca

SEQ ID NO: 1673395 - RNA, 19 nt, Artificial Sequence
  Description of Artificial Sequence: Synthetic oligonucleotide
  Sense strand starting at position 1156 of SEQ ID NO: 1561457
ggaguaaguaaucgaaaua

SEQ ID NO: 1673396 - RNA, 19 nt, Artificial Sequence
  Description of Artificial Sequence: Synthetic oligonucleotide
  Antisense strand to SEQ ID NO: 1673395
uauuucgauuacuuacucc

SEQ ID NO: 1673397 - RNA, 19 nt, Artificial Sequence
  Description of Artificial Sequence: Synthetic oligonucleotide
  Sense strand starting at position 1168 of SEQ ID NO: 1561457
cgaaauaagucugggugga

SEQ ID NO: 1673398 - RNA, 19 nt, Artificial Sequence
  Description of Artificial Sequence: Synthetic oligonucleotide
  Antisense strand to SEQ ID NO: 1673397
uccacccagacuuauuucg

SEQ ID NO: 1673399 - RNA, 19 nt, Artificial Sequence
  Description of Artificial Sequence: Synthetic oligonucleotide
  Sense strand starting at position 1169 of SEQ ID NO: 1561457
gaaauaagucuggguggag

SEQ ID NO: 1673400 - RNA, 19 nt, Artificial Sequence
  Description of Artificial Sequence: Synthetic oligonucleotide
  Antisense strand to SEQ ID NO: 1673399
cuccacccagacuuauuuc

SEQ ID NO: 1673401 - RNA, 19 nt, Artificial Sequence
  Description of Artificial Sequence: Synthetic oligonucleotide
  Sense strand starting at position 1229 of SEQ ID NO: 1561457
aagguugcuuuacggagaa

SEQ ID NO: 1673402 - RNA, 19 nt, Artificial Sequence
  Description of Artificial Sequence: Synthetic oligonucleotide
  Antisense strand to SEQ ID NO: 1673401
uucuccguaaagcaaccuu

SEQ ID NO: 1673403 - RNA, 19 nt, Artificial Sequence
  Description of Artificial Sequence: Synthetic oligonucleotide
  Sense strand starting at position 1231 of SEQ ID NO: 1561457
gguugcuuuacggagaagu

SEQ ID NO: 1673404 - RNA, 19 nt, Artificial Sequence
  Description of Artificial Sequence: Synthetic oligonucleotide
  Antisense strand to SEQ ID NO: 1673403
acuucuccguaaagcaacc

SEQ ID NO: 1673405 - RNA, 19 nt, Artificial Sequence
  Description of Artificial Sequence: Synthetic oligonucleotide
  Sense strand starting at position 1233 of SEQ ID NO: 1561457
uugcuuuacggagaaguuu

SEQ ID NO: 1673406 - RNA, 19 nt, Artificial Sequence
  Description of Artificial Sequence: Synthetic oligonucleotide
  Antisense strand to SEQ ID NO: 1673405
aaacuucuccguaaagcaa

SEQ ID NO: 1673407 - RNA, 19 nt, Artificial Sequence
  Description of Artificial Sequence: Synthetic oligonucleotide
  Sense strand starting at position 1448 of SEQ ID NO: 1561457
acgccagauucucagauga

SEQ ID NO: 1673408 - RNA, 19 nt, Artificial Sequence
  Description of Artificial Sequence: Synthetic oligonucleotide
  Antisense strand to SEQ ID NO: 1673407
ucaucugagaaucuggcgu

SEQ ID NO: 1673409 - RNA, 19 nt, Artificial Sequence
  Description of Artificial Sequence: Synthetic oligonucleotide
  Sense strand starting at position 1638 of SEQ ID NO: 1561457
cccaaagguugcuuuccaa

SEQ ID NO: 1673410 - RNA, 19 nt, Artificial Sequence
  Description of Artificial Sequence: Synthetic oligonucleotide
  Antisense strand to SEQ ID NO: 1673409
uuggaaagcaaccuuuggg

SEQ ID NO: 1673411 - RNA, 19 nt, Artificial Sequence
  Description of Artificial Sequence: Synthetic oligonucleotide
  Sense strand starting at position 1677 of SEQ ID NO: 1561457
agcggaugaaaguacucaa

SEQ ID NO: 1673412 - RNA, 19 nt, Artificial Sequence
  Description of Artificial Sequence: Synthetic oligonucleotide
  Antisense strand to SEQ ID NO: 1673411
uugaguacuuucauccgcu

SEQ ID NO: 1673413 - RNA, 19 nt, Artificial Sequence
  Description of Artificial Sequence: Synthetic oligonucleotide
  Sense strand starting at position 2309 of SEQ ID NO: 1561457
agaggaugcuccuccaaag

SEQ ID NO: 1673414 - RNA, 19 nt, Artificial Sequence
  Description of Artificial Sequence: Synthetic oligonucleotide
  Antisense strand to SEQ ID NO: 1673413
cuuuggaggagcauccucu

SEQ ID NO: 1673415 - RNA, 19 nt, Artificial Sequence
  Description of Artificial Sequence: Synthetic oligonucleotide
  Sense strand starting at position 2529 of SEQ ID NO: 1561457
gcucgacccugucucuauu

SEQ ID NO: 1673416 - RNA, 19 nt, Artificial Sequence
  Description of Artificial Sequence: Synthetic oligonucleotide
  Antisense strand to SEQ ID NO: 1673415
aauagagacagggucgagc

SEQ ID NO: 1673417 - RNA, 19 nt, Artificial Sequence
  Description of Artificial Sequence: Synthetic oligonucleotide
  Sense strand starting at position 2531 of SEQ ID NO: 1561457
ucgacccugucucuauuaa

SEQ ID NO: 1673418 - RNA, 19 nt, Artificial Sequence
  Description of Artificial Sequence: Synthetic oligonucleotide
  Antisense strand to SEQ ID NO: 1673417
uuaauagagacagggucga

SEQ ID NO: 1673419 - RNA, 19 nt, Artificial Sequence
  Description of Artificial Sequence: Synthetic oligonucleotide
  Sense strand starting at position 2941 of SEQ ID NO: 1561457
ccuggagccuuuccaugau

SEQ ID NO: 1673420 - RNA, 19 nt, Artificial Sequence
  Description of Artificial Sequence: Synthetic oligonucleotide
  Antisense strand to SEQ ID NO: 1673419
aucauggaaaggcuccagg

SEQ ID NO: 1673421 - RNA, 19 nt, Artificial Sequence
  Description of Artificial Sequence: Synthetic oligonucleotide
  Sense strand starting at position 2944 of SEQ ID NO: 1561457
ggagccuuuccaugauucu

SEQ ID NO: 1673422 - RNA, 19 nt, Artificial Sequence
  Description of Artificial Sequence: Synthetic oligonucleotide
  Antisense strand to SEQ ID NO: 1673421
agaaucauggaaaggcucc

SEQ ID NO: 1673423 - RNA, 19 nt, Artificial Sequence
  Description of Artificial Sequence: Synthetic oligonucleotide
  Sense strand starting at position 2970 of SEQ ID NO: 1561457
uaaaccugccagugauaga

SEQ ID NO: 1673424 - RNA, 19 nt, Artificial Sequence
  Description of Artificial Sequence: Synthetic oligonucleotide
  Antisense strand to SEQ ID NO: 1673423
ucuaucacuggcagguuua

SEQ ID NO: 1673425 - RNA, 19 nt, Artificial Sequence
  Description of Artificial Sequence: Synthetic oligonucleotide
  Sense strand starting at position 2983 of SEQ ID NO: 1561457
gauagauggcauggucugu

SEQ ID NO: 1673426 - RNA, 19 nt, Artificial Sequence
  Description of Artificial Sequence: Synthetic oligonucleotide
  Antisense strand to SEQ ID NO: 1673425
acagaccaugccaucuauc

SEQ ID NO: 1673427 - RNA, 19 nt, Artificial Sequence
  Description of Artificial Sequence: Synthetic oligonucleotide
  Sense strand starting at position 3254 of SEQ ID NO: 1561457
gguguuagccaagaugauc

SEQ ID NO: 1673428 - RNA, 19 nt, Artificial Sequence
  Description of Artificial Sequence: Synthetic oligonucleotide
  Antisense strand to SEQ ID NO: 1673427
gaucaucuuggcuaacacc

SEQ ID NO: 1673429 - RNA, 19 nt, Artificial Sequence
  Description of Artificial Sequence: Synthetic oligonucleotide
  Sense strand starting at position 3651 of SEQ ID NO: 1561457
ucgugauuugcccaucuca

SEQ ID NO: 1673430 - RNA, 19 nt, Artificial Sequence
  Description of Artificial Sequence: Synthetic oligonucleotide
  Antisense strand to SEQ ID NO: 1673429
ugagaugggcaaaucacga

SEQ ID NO: 1673431 - RNA, 19 nt, Artificial Sequence
  Description of Artificial Sequence: Synthetic oligonucleotide
  Sense strand starting at position 3662 of SEQ ID NO: 1561457
ccaucucagccuugcagaa

SEQ ID NO: 1673432 - RNA, 19 nt, Artificial Sequence
  Description of Artificial Sequence: Synthetic oligonucleotide
  Antisense strand to SEQ ID NO: 1673431
uucugcaaggcugagaugg

SEQ ID NO: 1673433 - RNA, 19 nt, Artificial Sequence
  Description of Artificial Sequence: Synthetic oligonucleotide
  Sense strand starting at position 3963 of SEQ ID NO: 1561457
caaagaaucugugucacag

SEQ ID NO: 1673434 - RNA, 19 nt, Artificial Sequence
  Description of Artificial Sequence: Synthetic oligonucleotide
  Antisense strand to SEQ ID NO: 1673433
cugugacacagauucuuug

SEQ ID NO: 1673435 - RNA, 19 nt, Artificial Sequence
  Description of Artificial Sequence: Synthetic oligonucleotide
  Sense strand starting at position 3965 of SEQ ID NO: 1561457
aagaaucugugucacagau

SEQ ID NO: 1673436 - RNA, 19 nt, Artificial Sequence
  Description of Artificial Sequence: Synthetic oligonucleotide
  Antisense strand to SEQ ID NO: 1673435
aucugugacacagauucuu

SEQ ID NO: 1673437 - RNA, 19 nt, Artificial Sequence
  Description of Artificial Sequence: Synthetic oligonucleotide
  Sense strand starting at position 3967 of SEQ ID NO: 1561457
gaaucugugucacagauaa

SEQ ID NO: 1673438 - RNA, 19 nt, Artificial Sequence
  Description of Artificial Sequence: Synthetic oligonucleotide
  Antisense strand to SEQ ID NO: 1673437
uuaucugugacacagauuc

SEQ ID NO: 1673439 - RNA, 19 nt, Artificial Sequence
  Description of Artificial Sequence: Synthetic oligonucleotide
  Sense strand starting at position 3969 of SEQ ID NO: 1561457
aucugugucacagauaagu

SEQ ID NO: 1673440 - RNA, 19 nt, Artificial Sequence
  Description of Artificial Sequence: Synthetic oligonucleotide
  Antisense strand to SEQ ID NO: 1673439
acuuaucugugacacagau

SEQ ID NO: 1673441 - RNA, 19 nt, Artificial Sequence
  Description of Artificial Sequence: Synthetic oligonucleotide
  Sense strand starting at position 3971 of SEQ ID NO: 1561457
cugugucacagauaaguuc

SEQ ID NO: 1673442 - RNA, 19 nt, Artificial Sequence
  Description of Artificial Sequence: Synthetic oligonucleotide
  Antisense strand to SEQ ID NO: 1673441
gaacuuaucugugacacag

SEQ ID NO: 1673443 - RNA, 19 nt, Artificial Sequence
  Description of Artificial Sequence: Synthetic oligonucleotide
  Sense strand starting at position 233 of SEQ ID NO: 1561458
ccaccugacaggugguuau

SEQ ID NO: 1673444 - RNA, 19 nt, Artificial Sequence
  Description of Artificial Sequence: Synthetic oligonucleotide
  Antisense strand to SEQ ID NO: 1673443
auaaccaccugucaggugg

SEQ ID NO: 1673445 - RNA, 19 nt, Artificial Sequence
  Description of Artificial Sequence: Synthetic oligonucleotide
  Sense strand starting at position 243 of SEQ ID NO: 1561458
ggugguuauucucugcauc

SEQ ID NO: 1673446 - RNA, 19 nt, Artificial Sequence
  Description of Artificial Sequence: Synthetic oligonucleotide
  Antisense strand to SEQ ID NO: 1673445
gaugcagagaauaaccacc

SEQ ID NO: 1673447 - RNA, 19 nt, Artificial Sequence
  Description of Artificial Sequence: Synthetic oligonucleotide
  Sense strand starting at position 245 of SEQ ID NO: 1561458
ugguuauucucugcauccu

SEQ ID NO: 1673448 - RNA, 19 nt, Artificial Sequence
  Description of Artificial Sequence: Synthetic oligonucleotide
  Antisense strand to SEQ ID NO: 1673447
aggaugcagagaauaacca

SEQ ID NO: 1673449 - RNA, 19 nt, Artificial Sequence
  Description of Artificial Sequence: Synthetic oligonucleotide
  Sense strand starting at position 352 of SEQ ID NO: 1561458
cuguauuuguuugaaauac

SEQ ID NO: 1673450 - RNA, 19 nt, Artificial Sequence
  Description of Artificial Sequence: Synthetic oligonucleotide
  Antisense strand to SEQ ID NO: 1673449
guauuucaaacaaauacag

SEQ ID NO: 1673451 - RNA, 19 nt, Artificial Sequence
  Description of Artificial Sequence: Synthetic oligonucleotide
  Sense strand starting at position 416 of SEQ ID NO: 1561458
aguguagagucuuaauuag

SEQ ID NO: 1673452 - RNA, 19 nt, Artificial Sequence
  Description of Artificial Sequence: Synthetic oligonucleotide
  Antisense strand to SEQ ID NO: 1673451
cuaauuaagacucuacacu

SEQ ID NO: 1673453 - RNA, 19 nt, Artificial Sequence
  Description of Artificial Sequence: Synthetic oligonucleotide
  Sense strand starting at position 476 of SEQ ID NO: 1561458
aagucuuaauuagggaaag

SEQ ID NO: 1673454 - RNA, 19 nt, Artificial Sequence
  Description of Artificial Sequence: Synthetic oligonucleotide
  Antisense strand to SEQ ID NO: 1673453
cuuucccuaauuaagacuu

SEQ ID NO: 1673455 - RNA, 19 nt, Artificial Sequence
  Description of Artificial Sequence: Synthetic oligonucleotide
  Sense strand starting at position 588 of SEQ ID NO: 1561458
agguaaguuacgggucuaa

SEQ ID NO: 1673456 - RNA, 19 nt, Artificial Sequence
  Description of Artificial Sequence: Synthetic oligonucleotide
  Antisense strand to SEQ ID NO: 1673455
uuagacccguaacuuaccu

SEQ ID NO: 1673457 - RNA, 19 nt, Artificial Sequence
  Description of Artificial Sequence: Synthetic oligonucleotide
  Sense strand starting at position 592 of SEQ ID NO: 1561458
aaguuacgggucuaacuuu

SEQ ID NO: 1673458 - RNA, 19 nt, Artificial Sequence
  Description of Artificial Sequence: Synthetic oligonucleotide
  Antisense strand to SEQ ID NO: 1673457
aaaguuagacccguaacuu

SEQ ID NO: 1673459 - RNA, 19 nt, Artificial Sequence
  Description of Artificial Sequence: Synthetic oligonucleotide
  Sense strand starting at position 855 of SEQ ID NO: 1561458
uccuguacaugucuaacuu

SEQ ID NO: 1673460 - RNA, 19 nt, Artificial Sequence
  Description of Artificial Sequence: Synthetic oligonucleotide
  Antisense strand to SEQ ID NO: 1673459
aaguuagacauguacagga

SEQ ID NO: 1673461 - RNA, 19 nt, Artificial Sequence
  Description of Artificial Sequence: Synthetic oligonucleotide
  Sense strand starting at position 856 of SEQ ID NO: 1561458
ccuguacaugucuaacuuu

SEQ ID NO: 1673462 - RNA, 19 nt, Artificial Sequence
  Description of Artificial Sequence: Synthetic oligonucleotide
  Antisense strand to SEQ ID NO: 1673461
aaaguuagacauguacagg

SEQ ID NO: 1673463 - RNA, 19 nt, Artificial Sequence
  Description of Artificial Sequence: Synthetic oligonucleotide
  Sense strand starting at position 871 of SEQ ID NO: 1561458
cuuucuuuauggcccaaga

SEQ ID NO: 1673464 - RNA, 19 nt, Artificial Sequence
  Description of Artificial Sequence: Synthetic oligonucleotide
  Antisense strand to SEQ ID NO: 1673463
ucuugggccauaaagaaag

SEQ ID NO: 1673465 - RNA, 19 nt, Artificial Sequence
  Description of Artificial Sequence: Synthetic oligonucleotide
  Sense strand starting at position 892 of SEQ ID NO: 1561458
uggccuucuugcccagaua

SEQ ID NO: 1673466 - RNA, 19 nt, Artificial Sequence
  Description of Artificial Sequence: Synthetic oligonucleotide
  Antisense strand to SEQ ID NO: 1673465
uaucugggcaagaaggcca

SEQ ID NO: 1673467 - RNA, 19 nt, Artificial Sequence
  Description of Artificial Sequence: Synthetic oligonucleotide
  Sense strand starting at position 893 of SEQ ID NO: 1561458
ggccuucuugcccagauaa

SEQ ID NO: 1673468 - RNA, 19 nt, Artificial Sequence
  Description of Artificial Sequence: Synthetic oligonucleotide
  Antisense strand to SEQ ID NO: 1673467
uuaucugggcaagaaggcc

SEQ ID NO: 1673469 - RNA, 19 nt, Artificial Sequence
  Description of Artificial Sequence: Synthetic oligonucleotide
  Sense strand starting at position 1104 of SEQ ID NO: 1561458
ccucccuugcgauggauuu

SEQ ID NO: 1673470 - RNA, 19 nt, Artificial Sequence
  Description of Artificial Sequence: Synthetic oligonucleotide
  Antisense strand to SEQ ID NO: 1673469
aaauccaucgcaagggagg

SEQ ID NO: 1673471 - RNA, 19 nt, Artificial Sequence
  Description of Artificial Sequence: Synthetic oligonucleotide
  Sense strand starting at position 1121 of SEQ ID NO: 1561458
uuugcuucuuucgcuaaua

SEQ ID NO: 1673472 - RNA, 19 nt, Artificial Sequence
  Description of Artificial Sequence: Synthetic oligonucleotide
  Antisense strand to SEQ ID NO: 1673471
uauuagcgaaagaagcaaa

SEQ ID NO: 1673473 - RNA, 19 nt, Artificial Sequence
  Description of Artificial Sequence: Synthetic oligonucleotide
  Sense strand starting at position 1122 of SEQ ID NO: 1561458
uugcuucuuucgcuaauaa

SEQ ID NO: 1673474 - RNA, 19 nt, Artificial Sequence
  Description of Artificial Sequence: Synthetic oligonucleotide
  Antisense strand to SEQ ID NO: 1673473
uuauuagcgaaagaagcaa

SEQ ID NO: 1673475 - RNA, 19 nt, Artificial Sequence
  Description of Artificial Sequence: Synthetic oligonucleotide
  Sense strand starting at position 1123 of SEQ ID NO: 1561458
ugcuucuuucgcuaauaac

SEQ ID NO: 1673476 - RNA, 19 nt, Artificial Sequence
  Description of Artificial Sequence: Synthetic oligonucleotide
  Antisense strand to SEQ ID NO: 1673475
guuauuagcgaaagaagca

SEQ ID NO: 1673477 - RNA, 19 nt, Artificial Sequence
  Description of Artificial Sequence: Synthetic oligonucleotide
  Sense strand starting at position 1234 of SEQ ID NO: 1561458
uuaugaaaugcagggcaaa

SEQ ID NO: 1673478 - RNA, 19 nt, Artificial Sequence
  Description of Artificial Sequence: Synthetic oligonucleotide
  Antisense strand to SEQ ID NO: 1673477
uuugcccugcauuucauaa

SEQ ID NO: 1673479 - RNA, 19 nt, Artificial Sequence
  Description of Artificial Sequence: Synthetic oligonucleotide
  Sense strand starting at position 1255 of SEQ ID NO: 1561458
cuggaaaucuagggauuua

SEQ ID NO: 1673480 - RNA, 19 nt, Artificial Sequence
  Description of Artificial Sequence: Synthetic oligonucleotide
  Antisense strand to SEQ ID NO: 1673479
uaaaucccuagauuuccag

SEQ ID NO: 1673481 - RNA, 19 nt, Artificial Sequence
  Description of Artificial Sequence: Synthetic oligonucleotide
  Sense strand starting at position 1384 of SEQ ID NO: 1561458
gacugaggaucccacagau

SEQ ID NO: 1673482 - RNA, 19 nt, Artificial Sequence
  Description of Artificial Sequence: Synthetic oligonucleotide
  Antisense strand to SEQ ID NO: 1673481
aucugugggauccucaguc

SEQ ID NO: 1673483 - RNA, 19 nt, Artificial Sequence
  Description of Artificial Sequence: Synthetic oligonucleotide
  Sense strand starting at position 1992 of SEQ ID NO: 1561458
gauugacaguucucacgac

SEQ ID NO: 1673484 - RNA, 19 nt, Artificial Sequence
  Description of Artificial Sequence: Synthetic oligonucleotide
  Antisense strand to SEQ ID NO: 1673483
gucgugagaacugucaauc

SEQ ID NO: 1673485 - RNA, 19 nt, Artificial Sequence
  Description of Artificial Sequence: Synthetic oligonucleotide
  Sense strand starting at position 2476 of SEQ ID NO: 1561458
acaagucaagaacgguauu

SEQ ID NO: 1673486 - RNA, 19 nt, Artificial Sequence
  Description of Artificial Sequence: Synthetic oligonucleotide
  Antisense strand to SEQ ID NO: 1673485
aauaccguucuugacuugu

SEQ ID NO: 1673487 - RNA, 19 nt, Artificial Sequence
  Description of Artificial Sequence: Synthetic oligonucleotide
  Sense strand starting at position 2498 of SEQ ID NO: 1561458
auaucaaauguguggaaga

SEQ ID NO: 1673488 - RNA, 19 nt, Artificial Sequence
  Description of Artificial Sequence: Synthetic oligonucleotide
  Antisense strand to SEQ ID NO: 1673487
ucuuccacacauuugauau

SEQ ID NO: 1673489 - RNA, 19 nt, Artificial Sequence
  Description of Artificial Sequence: Synthetic oligonucleotide
  Sense strand starting at position 2499 of SEQ ID NO: 1561458
uaucaaauguguggaagaa

SEQ ID NO: 1673490 - RNA, 19 nt, Artificial Sequence
  Description of Artificial Sequence: Synthetic oligonucleotide
  Antisense strand to SEQ ID NO: 1673489
uucuuccacacauuugaua

SEQ ID NO: 1673491 - RNA, 19 nt, Artificial Sequence
  Description of Artificial Sequence: Synthetic oligonucleotide
  Sense strand starting at position 2591 of SEQ ID NO: 1561458
cuugaacuagugcagauaa

SEQ ID NO: 1673492 - RNA, 19 nt, Artificial Sequence
  Description of Artificial Sequence: Synthetic oligonucleotide
  Antisense strand to SEQ ID NO: 1673491
uuaucugcacuaguucaag

SEQ ID NO: 1673493 - RNA, 19 nt, Artificial Sequence
  Description of Artificial Sequence: Synthetic oligonucleotide
  Sense strand starting at position 2682 of SEQ ID NO: 1561458
acucuuaacuguugaaaug

SEQ ID NO: 1673494 - RNA, 19 nt, Artificial Sequence
  Description of Artificial Sequence: Synthetic oligonucleotide
  Antisense strand to SEQ ID NO: 1673493
cauuucaacaguuaagagu

SEQ ID NO: 1673495 - RNA, 19 nt, Artificial Sequence
  Description of Artificial Sequence: Synthetic oligonucleotide
  Sense strand starting at position 2748 of SEQ ID NO: 1561458
ggauuugacucugggagcu

SEQ ID NO: 1673496 - RNA, 19 nt, Artificial Sequence
  Description of Artificial Sequence: Synthetic oligonucleotide
  Antisense strand to SEQ ID NO: 1673495
agcucccagagucaaaucc

SEQ ID NO: 1673497 - RNA, 19 nt, Artificial Sequence
  Description of Artificial Sequence: Synthetic oligonucleotide
  Sense strand starting at position 2758 of SEQ ID NO: 1561458
cugggagcucaacauacuu

SEQ ID NO: 1673498 - RNA, 19 nt, Artificial Sequence
  Description of Artificial Sequence: Synthetic oligonucleotide
  Antisense strand to SEQ ID NO: 1673497
aaguauguugagcucccag

SEQ ID NO: 1673499 - RNA, 19 nt, Artificial Sequence
  Description of Artificial Sequence: Synthetic oligonucleotide
  Sense strand starting at position 2848 of SEQ ID NO: 1561458
cauguaaaguuaguuuaag

SEQ ID NO: 1673500 - RNA, 19 nt, Artificial Sequence
  Description of Artificial Sequence: Synthetic oligonucleotide
  Antisense strand to SEQ ID NO: 1673499
cuuaaacuaacuuuacaug

SEQ ID NO: 1673501 - RNA, 19 nt, Artificial Sequence
  Description of Artificial Sequence: Synthetic oligonucleotide
  Sense strand starting at position 3249 of SEQ ID NO: 1561458
augguaaauucugauucua

SEQ ID NO: 1673502 - RNA, 19 nt, Artificial Sequence
  Description of Artificial Sequence: Synthetic oligonucleotide
  Antisense strand to SEQ ID NO: 1673501
uagaaucagaauuuaccau

SEQ ID NO: 1673503 - RNA, 19 nt, Artificial Sequence
  Description of Artificial Sequence: Synthetic oligonucleotide
  Sense strand starting at position 3251 of SEQ ID NO: 1561458
gguaaauucugauucuaug

SEQ ID NO: 1673504 - RNA, 19 nt, Artificial Sequence
  Description of Artificial Sequence: Synthetic oligonucleotide
  Antisense strand to SEQ ID NO: 1673503
cauagaaucagaauuuacc

SEQ ID NO: 1673505 - RNA, 19 nt, Artificial Sequence
  Description of Artificial Sequence: Synthetic oligonucleotide
  Sense strand starting at position 3352 of SEQ ID NO: 1561458
ucagaaugggcucggugua

SEQ ID NO: 1673506 - RNA, 19 nt, Artificial Sequence
  Description of Artificial Sequence: Synthetic oligonucleotide
  Antisense strand to SEQ ID NO: 1673505
uacaccgagcccauucuga

SEQ ID NO: 1673507 - RNA, 19 nt, Artificial Sequence
  Description of Artificial Sequence: Synthetic oligonucleotide
  Sense strand starting at position 3542 of SEQ ID NO: 1561458
aggcuagccuuagaaacua

SEQ ID NO: 1673508 - RNA, 19 nt, Artificial Sequence
  Description of Artificial Sequence: Synthetic oligonucleotide
  Antisense strand to SEQ ID NO: 1673507
uaguuucuaaggcuagccu

SEQ ID NO: 1673509 - RNA, 19 nt, Artificial Sequence
  Description of Artificial Sequence: Synthetic oligonucleotide
  Sense strand starting at position 3573 of SEQ ID NO: 1561458
uccaaagugggucguagaa

SEQ ID NO: 1673510 - RNA, 19 nt, Artificial Sequence
  Description of Artificial Sequence: Synthetic oligonucleotide
  Antisense strand to SEQ ID NO: 1673509
uucuacgacccacuuugga

SEQ ID NO: 1673511 - RNA, 19 nt, Artificial Sequence
  Description of Artificial Sequence: Synthetic oligonucleotide
  Sense strand starting at position 3652 of SEQ ID NO: 1561458
auuguccuuucuguguaaa

SEQ ID NO: 1673512 - RNA, 19 nt, Artificial Sequence
  Description of Artificial Sequence: Synthetic oligonucleotide
  Antisense strand to SEQ ID NO: 1673511
uuuacacagaaaggacaau

SEQ ID NO: 1673513 - RNA, 19 nt, Artificial Sequence
  Description of Artificial Sequence: Synthetic oligonucleotide
  Sense strand starting at position 3765 of SEQ ID NO: 1561458
cgucuugggccacauauaa

SEQ ID NO: 1673514 - RNA, 19 nt, Artificial Sequence
  Description of Artificial Sequence: Synthetic oligonucleotide
  Antisense strand to SEQ ID NO: 1673513
uuauauguggcccaagacg

SEQ ID NO: 1673515 - RNA, 19 nt, Artificial Sequence
  Description of Artificial Sequence: Synthetic oligonucleotide
  Sense strand starting at position 3915 of SEQ ID NO: 1561458
aagcuugcuguaggucaua

SEQ ID NO: 1673516 - RNA, 19 nt, Artificial Sequence
  Description of Artificial Sequence: Synthetic oligonucleotide
  Antisense strand to SEQ ID NO: 1673515
uaugaccuacagcaagcuu

SEQ ID NO: 1673517 - RNA, 19 nt, Artificial Sequence
  Description of Artificial Sequence: Synthetic oligonucleotide
  Sense strand starting at position 3918 of SEQ ID NO: 1561458
cuugcuguaggucauaaga

SEQ ID NO: 1673518 - RNA, 19 nt, Artificial Sequence
  Description of Artificial Sequence: Synthetic oligonucleotide
  Antisense strand to SEQ ID NO: 1673517
ucuuaugaccuacagcaag

SEQ ID NO: 1673519 - RNA, 19 nt, Artificial Sequence
  Description of Artificial Sequence: Synthetic oligonucleotide
  Sense strand starting at position 3960 of SEQ ID NO: 1561458
gccucauacugagaaggaa

SEQ ID NO: 1673520 - RNA, 19 nt, Artificial Sequence
  Description of Artificial Sequence: Synthetic oligonucleotide
  Antisense strand to SEQ ID NO: 1673519
uuccuucucaguaugaggc

SEQ ID NO: 1673521 - RNA, 19 nt, Artificial Sequence
  Description of Artificial Sequence: Synthetic oligonucleotide
  Sense strand starting at position 3978 of SEQ ID NO: 1561458
aggaaugcaugcucagaaa

SEQ ID NO: 1673522 - RNA, 19 nt, Artificial Sequence
  Description of Artificial Sequence: Synthetic oligonucleotide
  Antisense strand to SEQ ID NO: 1673521
uuucugagcaugcauuccu

SEQ ID NO: 1673523 - RNA, 19 nt, Artificial Sequence
  Description of Artificial Sequence: Synthetic oligonucleotide
  Sense strand starting at position 48 of SEQ ID NO: 1561459
ucaguaacagccuaagauu

SEQ ID NO: 1673524 - RNA, 19 nt, Artificial Sequence
  Description of Artificial Sequence: Synthetic oligonucleotide
  Antisense strand to SEQ ID NO: 1673523
aaucuuaggcuguuacuga

SEQ ID NO: 1673525 - RNA, 19 nt, Artificial Sequence
  Description of Artificial Sequence: Synthetic oligonucleotide
  Sense strand starting at position 57 of SEQ ID NO: 1561459
gccuaagauuggguaacca

SEQ ID NO: 1673526 - RNA, 19 nt, Artificial Sequence
  Description of Artificial Sequence: Synthetic oligonucleotide
  Antisense strand to SEQ ID NO: 1673525
ugguuacccaaucuuaggc

SEQ ID NO: 1673527 - RNA, 19 nt, Artificial Sequence
  Description of Artificial Sequence: Synthetic oligonucleotide
  Sense strand starting at position 75 of SEQ ID NO: 1561459
aucaaugugucccuaagga

SEQ ID NO: 1673528 - RNA, 19 nt, Artificial Sequence
  Description of Artificial Sequence: Synthetic oligonucleotide
  Antisense strand to SEQ ID NO: 1673527
uccuuagggacacauugau

SEQ ID NO: 1673529 - RNA, 19 nt, Artificial Sequence
  Description of Artificial Sequence: Synthetic oligonucleotide
  Sense strand starting at position 123 of SEQ ID NO: 1561459
gagcgucccaaaggguaaa

SEQ ID NO: 1673530 - RNA, 19 nt, Artificial Sequence
  Description of Artificial Sequence: Synthetic oligonucleotide
  Antisense strand to SEQ ID NO: 1673529
uuuacccuuugggacgcuc

SEQ ID NO: 1673531 - RNA, 19 nt, Artificial Sequence
  Description of Artificial Sequence: Synthetic oligonucleotide
  Sense strand starting at position 256 of SEQ ID NO: 1561459
gguugauaaucacuagauc

SEQ ID NO: 1673532 - RNA, 19 nt, Artificial Sequence
  Description of Artificial Sequence: Synthetic oligonucleotide
  Antisense strand to SEQ ID NO: 1673531
gaucuagugauuaucaacc

SEQ ID NO: 1673533 - RNA, 19 nt, Artificial Sequence
  Description of Artificial Sequence: Synthetic oligonucleotide
  Sense strand starting at position 355 of SEQ ID NO: 1561459
gccacaucaccuuguaaag

SEQ ID NO: 1673534 - RNA, 19 nt, Artificial Sequence
  Description of Artificial Sequence: Synthetic oligonucleotide
  Antisense strand to SEQ ID NO: 1673533
cuuuacaaggugauguggc

SEQ ID NO: 1673535 - RNA, 19 nt, Artificial Sequence
  Description of Artificial Sequence: Synthetic oligonucleotide
  Sense strand starting at position 772 of SEQ ID NO: 1561459
cguagagugucagguucuu

SEQ ID NO: 1673536 - RNA, 19 nt, Artificial Sequence
  Description of Artificial Sequence: Synthetic oligonucleotide
  Antisense strand to SEQ ID NO: 1673535
aagaaccugacacucuacg

SEQ ID NO: 1673537 - RNA, 19 nt, Artificial Sequence
  Description of Artificial Sequence: Synthetic oligonucleotide
  Sense strand starting at position 1245 of SEQ ID NO: 1561459
ggaggucaccuuugggaau

SEQ ID NO: 1673538 - RNA, 19 nt, Artificial Sequence
  Description of Artificial Sequence: Synthetic oligonucleotide
  Antisense strand to SEQ ID NO: 1673537
auucccaaaggugaccucc

SEQ ID NO: 1673539 - RNA, 19 nt, Artificial Sequence
  Description of Artificial Sequence: Synthetic oligonucleotide
  Sense strand starting at position 1275 of SEQ ID NO: 1561459
accggaaauuuaggcauuu

SEQ ID NO: 1673540 - RNA, 19 nt, Artificial Sequence
  Description of Artificial Sequence: Synthetic oligonucleotide
  Antisense strand to SEQ ID NO: 1673539
aaaugccuaaauuuccggu

SEQ ID NO: 1673541 - RNA, 19 nt, Artificial Sequence
  Description of Artificial Sequence: Synthetic oligonucleotide
  Sense strand starting at position 1328 of SEQ ID NO: 1561459
acgggagucguagguuuga

SEQ ID NO: 1673542 - RNA, 19 nt, Artificial Sequence
  Description of Artificial Sequence: Synthetic oligonucleotide
  Antisense strand to SEQ ID NO: 1673541
ucaaaccuacgacucccgu

SEQ ID NO: 1673543 - RNA, 19 nt, Artificial Sequence
  Description of Artificial Sequence: Synthetic oligonucleotide
  Sense strand starting at position 1357 of SEQ ID NO: 1561459
ccaguacguuuggaagacu

SEQ ID NO: 1673544 - RNA, 19 nt, Artificial Sequence
  Description of Artificial Sequence: Synthetic oligonucleotide
  Antisense strand to SEQ ID NO: 1673543
agucuuccaaacguacugg

SEQ ID NO: 1673545 - RNA, 19 nt, Artificial Sequence
  Description of Artificial Sequence: Synthetic oligonucleotide
  Sense strand starting at position 1943 of SEQ ID NO: 1561459
cgcggaguuguugaacauu

SEQ ID NO: 1673546 - RNA, 19 nt, Artificial Sequence
  Description of Artificial Sequence: Synthetic oligonucleotide
  Antisense strand to SEQ ID NO: 1673545
aauguucaacaacuccgcg

SEQ ID NO: 1673547 - RNA, 19 nt, Artificial Sequence
  Description of Artificial Sequence: Synthetic oligonucleotide
  Sense strand starting at position 1976 of SEQ ID NO: 1561459
ugcagaguuccugauugga

SEQ ID NO: 1673548 - RNA, 19 nt, Artificial Sequence
  Description of Artificial Sequence: Synthetic oligonucleotide
  Antisense strand to SEQ ID NO: 1673547
uccaaucaggaacucugca

SEQ ID NO: 1673549 - RNA, 19 nt, Artificial Sequence
  Description of Artificial Sequence: Synthetic oligonucleotide
  Sense strand starting at position 1978 of SEQ ID NO: 1561459
cagaguuccugauuggaug

SEQ ID NO: 1673550 - RNA, 19 nt, Artificial Sequence
  Description of Artificial Sequence: Synthetic oligonucleotide
  Antisense strand to SEQ ID NO: 1673549
cauccaaucaggaacucug

SEQ ID NO: 1673551 - RNA, 19 nt, Artificial Sequence
  Description of Artificial Sequence: Synthetic oligonucleotide
  Sense strand starting at position 2021 of SEQ ID NO: 1561459
cccugauugggugaugauu

SEQ ID NO: 1673552 - RNA, 19 nt, Artificial Sequence
  Description of Artificial Sequence: Synthetic oligonucleotide
  Antisense strand to SEQ ID NO: 1673551
aaucaucacccaaucaggg

SEQ ID NO: 1673553 - RNA, 19 nt, Artificial Sequence
  Description of Artificial Sequence: Synthetic oligonucleotide
  Sense strand starting at position 2023 of SEQ ID NO: 1561459
cugauugggugaugauuca

SEQ ID NO: 1673554 - RNA, 19 nt, Artificial Sequence
  Description of Artificial Sequence: Synthetic oligonucleotide
  Antisense strand to SEQ ID NO: 1673553
ugaaucaucacccaaucag

SEQ ID NO: 1673555 - RNA, 19 nt, Artificial Sequence
  Description of Artificial Sequence: Synthetic oligonucleotide
  Sense strand starting at position 2080 of SEQ ID NO: 1561459
ugcgguauguggcugagua

SEQ ID NO: 1673556 - RNA, 19 nt, Artificial Sequence
  Description of Artificial Sequence: Synthetic oligonucleotide
  Antisense strand to SEQ ID NO: 1673555
uacucagccacauaccgca

SEQ ID NO: 1673557 - RNA, 19 nt, Artificial Sequence
  Description of Artificial Sequence: Synthetic oligonucleotide
  Sense strand starting at position 2081 of SEQ ID NO: 1561459
gcgguauguggcugaguaa

SEQ ID NO: 1673558 - RNA, 19 nt, Artificial Sequence
  Description of Artificial Sequence: Synthetic oligonucleotide
  Antisense strand to SEQ ID NO: 1673557
uuacucagccacauaccgc

SEQ ID NO: 1673559 - RNA, 19 nt, Artificial Sequence
  Description of Artificial Sequence: Synthetic oligonucleotide
  Sense strand starting at position 2082 of SEQ ID NO: 1561459
cgguauguggcugaguaaa

SEQ ID NO: 1673560 - RNA, 19 nt, Artificial Sequence
  Description of Artificial Sequence: Synthetic oligonucleotide
  Antisense strand to SEQ ID NO: 1673559
uuuacucagccacauaccg

SEQ ID NO: 1673561 - RNA, 19 nt, Artificial Sequence
  Description of Artificial Sequence: Synthetic oligonucleotide
  Sense strand starting at position 2084 of SEQ ID NO: 1561459
guauguggcugaguaaaga

SEQ ID NO: 1673562 - RNA, 19 nt, Artificial Sequence
  Description of Artificial Sequence: Synthetic oligonucleotide
  Antisense strand to SEQ ID NO: 1673561
ucuuuacucagccacauac

SEQ ID NO: 1673563 - RNA, 19 nt, Artificial Sequence
  Description of Artificial Sequence: Synthetic oligonucleotide
  Sense strand starting at position 2226 of SEQ ID NO: 1561459
uggcguguuucugcacuca

SEQ ID NO: 1673564 - RNA, 19 nt, Artificial Sequence
  Description of Artificial Sequence: Synthetic oligonucleotide
  Antisense strand to SEQ ID NO: 1673563
ugagugcagaaacacgcca

SEQ ID NO: 1673565 - RNA, 19 nt, Artificial Sequence
  Description of Artificial Sequence: Synthetic oligonucleotide
  Sense strand starting at position 2474 of SEQ ID NO: 1561459
uaugacagcgaucaucuau

SEQ ID NO: 1673566 - RNA, 19 nt, Artificial Sequence
  Description of Artificial Sequence: Synthetic oligonucleotide
  Antisense strand to SEQ ID NO: 1673565
auagaugaucgcugucaua

SEQ ID NO: 1673567 - RNA, 19 nt, Artificial Sequence
  Description of Artificial Sequence: Synthetic oligonucleotide
  Sense strand starting at position 2992 of SEQ ID NO: 1561459
ggaucagaaccuggugaug

SEQ ID NO: 1673568 - RNA, 19 nt, Artificial Sequence
  Description of Artificial Sequence: Synthetic oligonucleotide
  Antisense strand to SEQ ID NO: 1673567
caucaccagguucugaucc

SEQ ID NO: 1673569 - RNA, 19 nt, Artificial Sequence
  Description of Artificial Sequence: Synthetic oligonucleotide
  Sense strand starting at position 3138 of SEQ ID NO: 1561459
aauguaaagucgugaccua

SEQ ID NO: 1673570 - RNA, 19 nt, Artificial Sequence
  Description of Artificial Sequence: Synthetic oligonucleotide
  Antisense strand to SEQ ID NO: 1673569
uaggucacgacuuuacauu

SEQ ID NO: 1673571 - RNA, 19 nt, Artificial Sequence
  Description of Artificial Sequence: Synthetic oligonucleotide
  Sense strand starting at position 3139 of SEQ ID NO: 1561459
auguaaagucgugaccuaa

SEQ ID NO: 1673572 - RNA, 19 nt, Artificial Sequence
  Description of Artificial Sequence: Synthetic oligonucleotide
  Antisense strand to SEQ ID NO: 1673571
uuaggucacgacuuuacau

SEQ ID NO: 1673573 - RNA, 19 nt, Artificial Sequence
  Description of Artificial Sequence: Synthetic oligonucleotide
  Sense strand starting at position 3163 of SEQ ID NO: 1561459
uugucauguucccaaaccu

SEQ ID NO: 1673574 - RNA, 19 nt, Artificial Sequence
  Description of Artificial Sequence: Synthetic oligonucleotide
  Antisense strand to SEQ ID NO: 1673573
agguuugggaacaugacaa

SEQ ID NO: 1673575 - RNA, 19 nt, Artificial Sequence
  Description of Artificial Sequence: Synthetic oligonucleotide
  Sense strand starting at position 3219 of SEQ ID NO: 1561459
gucugacccucacagauuu

SEQ ID NO: 1673576 - RNA, 19 nt, Artificial Sequence
  Description of Artificial Sequence: Synthetic oligonucleotide
  Antisense strand to SEQ ID NO: 1673575
aaaucugugagggucagac

SEQ ID NO: 1673577 - RNA, 19 nt, Artificial Sequence
  Description of Artificial Sequence: Synthetic oligonucleotide
  Sense strand starting at position 3896 of SEQ ID NO: 1561459
ugauccacuuagguaagaa

SEQ ID NO: 1673578 - RNA, 19 nt, Artificial Sequence
  Description of Artificial Sequence: Synthetic oligonucleotide
  Antisense strand to SEQ ID NO: 1673577
uucuuaccuaaguggauca

SEQ ID NO: 1673579 - RNA, 19 nt, Artificial Sequence
  Description of Artificial Sequence: Synthetic oligonucleotide
  Sense strand starting at position 3972 of SEQ ID NO: 1561459
ugcuuuccuucugugguua

SEQ ID NO: 1673580 - RNA, 19 nt, Artificial Sequence
  Description of Artificial Sequence: Synthetic oligonucleotide
  Antisense strand to SEQ ID NO: 1673579
uaaccacagaaggaaagca

SEQ ID NO: 1673581 - RNA, 19 nt, Artificial Sequence
  Description of Artificial Sequence: Synthetic oligonucleotide
  Sense strand starting at position 3973 of SEQ ID NO: 1561459
gcuuuccuucugugguuau

SEQ ID NO: 1673582 - RNA, 19 nt, Artificial Sequence
  Description of Artificial Sequence: Synthetic oligonucleotide
  Antisense strand to SEQ ID NO: 1673581
auaaccacagaaggaaagc

SEQ ID NO: 1673583 - RNA, 19 nt, Artificial Sequence
  Description of Artificial Sequence: Synthetic oligonucleotide
  Sense strand starting at position 3977 of SEQ ID NO: 1561459
uccuucugugguuauguau

SEQ ID NO: 1673584 - RNA, 19 nt, Artificial Sequence
  Description of Artificial Sequence: Synthetic oligonucleotide
  Antisense strand to SEQ ID NO: 1673583
auacauaaccacagaagga

SEQ ID NO: 1673585 - RNA, 19 nt, Artificial Sequence
  Description of Artificial Sequence: Synthetic oligonucleotide
  Sense strand starting at position 17 of SEQ ID NO: 1561460
gggccagaaucuguccuaa

SEQ ID NO: 1673586 - RNA, 19 nt, Artificial Sequence
  Description of Artificial Sequence: Synthetic oligonucleotide
  Antisense strand to SEQ ID NO: 1673585
uuaggacagauucuggccc

SEQ ID NO: 1673587 - RNA, 19 nt, Artificial Sequence
  Description of Artificial Sequence: Synthetic oligonucleotide
  Sense strand starting at position 19 of SEQ ID NO: 1561460
gccagaaucuguccuaacu

SEQ ID NO: 1673588 - RNA, 19 nt, Artificial Sequence
  Description of Artificial Sequence: Synthetic oligonucleotide
  Antisense strand to SEQ ID NO: 1673587
aguuaggacagauucuggc

SEQ ID NO: 1673589 - RNA, 19 nt, Artificial Sequence
  Description of Artificial Sequence: Synthetic oligonucleotide
  Sense strand starting at position 40 of SEQ ID NO: 1561460
aaagguucugcauggguca

SEQ ID NO: 1673590 - RNA, 19 nt, Artificial Sequence
  Description of Artificial Sequence: Synthetic oligonucleotide
  Antisense strand to SEQ ID NO: 1673589
ugacccaugcagaaccuuu

SEQ ID NO: 1673591 - RNA, 19 nt, Artificial Sequence
  Description of Artificial Sequence: Synthetic oligonucleotide
  Sense strand starting at position 770 of SEQ ID NO: 1561460
gucacaauaucuuuccagu

SEQ ID NO: 1673592 - RNA, 19 nt, Artificial Sequence
  Description of Artificial Sequence: Synthetic oligonucleotide
  Antisense strand to SEQ ID NO: 1673591
acuggaaagauauugugac

SEQ ID NO: 1673593 - RNA, 19 nt, Artificial Sequence
  Description of Artificial Sequence: Synthetic oligonucleotide
  Sense strand starting at position 828 of SEQ ID NO: 1561460
ucuacucuccacugugaua

SEQ ID NO: 1673594 - RNA, 19 nt, Artificial Sequence
  Description of Artificial Sequence: Synthetic oligonucleotide
  Antisense strand to SEQ ID NO: 1673593
uaucacaguggagaguaga

SEQ ID NO: 1673595 - RNA, 19 nt, Artificial Sequence
  Description of Artificial Sequence: Synthetic oligonucleotide
  Sense strand starting at position 2160 of SEQ ID NO: 1561460
gaggauuccugaucuuuag

SEQ ID NO: 1673596 - RNA, 19 nt, Artificial Sequence
  Description of Artificial Sequence: Synthetic oligonucleotide
  Antisense strand to SEQ ID NO: 1673595
cuaaagaucaggaauccuc

SEQ ID NO: 1673597 - RNA, 19 nt, Artificial Sequence
  Description of Artificial Sequence: Synthetic oligonucleotide
  Sense strand starting at position 2255 of SEQ ID NO: 1561460
cggguuugagcgaguguga

SEQ ID NO: 1673598 - RNA, 19 nt, Artificial Sequence
  Description of Artificial Sequence: Synthetic oligonucleotide
  Antisense strand to SEQ ID NO: 1673597
ucacacucgcucaaacccg

SEQ ID NO: 1673599 - RNA, 19 nt, Artificial Sequence
  Description of Artificial Sequence: Synthetic oligonucleotide
  Sense strand starting at position 2285 of SEQ ID NO: 1561460
cucaaaguuugaccugaug

SEQ ID NO: 1673600 - RNA, 19 nt, Artificial Sequence
  Description of Artificial Sequence: Synthetic oligonucleotide
  Antisense strand to SEQ ID NO: 1673599
caucaggucaaacuuugag

SEQ ID NO: 1673601 - RNA, 19 nt, Artificial Sequence
  Description of Artificial Sequence: Synthetic oligonucleotide
  Sense strand starting at position 2288 of SEQ ID NO: 1561460
aaaguuugaccugauguuu

SEQ ID NO: 1673602 - RNA, 19 nt, Artificial Sequence
  Description of Artificial Sequence: Synthetic oligonucleotide
  Antisense strand to SEQ ID NO: 1673601
aaacaucaggucaaacuuu

SEQ ID NO: 1673603 - RNA, 19 nt, Artificial Sequence
  Description of Artificial Sequence: Synthetic oligonucleotide
  Sense strand starting at position 2294 of SEQ ID NO: 1561460
ugaccugauguuugggauu

SEQ ID NO: 1673604 - RNA, 19 nt, Artificial Sequence
  Description of Artificial Sequence: Synthetic oligonucleotide
  Antisense strand to SEQ ID NO: 1673603
aaucccaaacaucagguca

SEQ ID NO: 1673605 - RNA, 19 nt, Artificial Sequence
  Description of Artificial Sequence: Synthetic oligonucleotide
  Sense strand starting at position 2300 of SEQ ID NO: 1561460
gauguuugggauuguugag

SEQ ID NO: 1673606 - RNA, 19 nt, Artificial Sequence
  Description of Artificial Sequence: Synthetic oligonucleotide
  Antisense strand to SEQ ID NO: 1673605
cucaacaaucccaaacauc

SEQ ID NO: 1673607 - RNA, 19 nt, Artificial Sequence
  Description of Artificial Sequence: Synthetic oligonucleotide
  Sense strand starting at position 2306 of SEQ ID NO: 1561460
ugggauuguugagugaaug

SEQ ID NO: 1673608 - RNA, 19 nt, Artificial Sequence
  Description of Artificial Sequence: Synthetic oligonucleotide
  Antisense strand to SEQ ID NO: 1673607
cauucacucaacaauccca

SEQ ID NO: 1673609 - RNA, 19 nt, Artificial Sequence
  Description of Artificial Sequence: Synthetic oligonucleotide
  Sense strand starting at position 2307 of SEQ ID NO: 1561460
gggauuguugagugaaugu

SEQ ID NO: 1673610 - RNA, 19 nt, Artificial Sequence
  Description of Artificial Sequence: Synthetic oligonucleotide
  Antisense strand to SEQ ID NO: 1673609
acauucacucaacaauccc

SEQ ID NO: 1673611 - RNA, 19 nt, Artificial Sequence
  Description of Artificial Sequence: Synthetic oligonucleotide
  Sense strand starting at position 2347 of SEQ ID NO: 1561460
ugugauugugccuaagagg

SEQ ID NO: 1673612 - RNA, 19 nt, Artificial Sequence
  Description of Artificial Sequence: Synthetic oligonucleotide
  Antisense strand to SEQ ID NO: 1673611
ccucuuaggcacaaucaca

SEQ ID NO: 1673613 - RNA, 19 nt, Artificial Sequence
  Description of Artificial Sequence: Synthetic oligonucleotide
  Sense strand starting at position 2381 of SEQ ID NO: 1561460
agcauugagguauaacguu

SEQ ID NO: 1673614 - RNA, 19 nt, Artificial Sequence
  Description of Artificial Sequence: Synthetic oligonucleotide
  Antisense strand to SEQ ID NO: 1673613
aacguuauaccucaaugcu

SEQ ID NO: 1673615 - RNA, 19 nt, Artificial Sequence
  Description of Artificial Sequence: Synthetic oligonucleotide
  Sense strand starting at position 2417 of SEQ ID NO: 1561460
gucgaaagugcugauaauu

SEQ ID NO: 1673616 - RNA, 19 nt, Artificial Sequence
  Description of Artificial Sequence: Synthetic oligonucleotide
  Antisense strand to SEQ ID NO: 1673615
aauuaucagcacuuucgac

SEQ ID NO: 1673617 - RNA, 19 nt, Artificial Sequence
  Description of Artificial Sequence: Synthetic oligonucleotide
  Sense strand starting at position 2492 of SEQ ID NO: 1561460
aagcuaaguggugaauaau

SEQ ID NO: 1673618 - RNA, 19 nt, Artificial Sequence
  Description of Artificial Sequence: Synthetic oligonucleotide
  Antisense strand to SEQ ID NO: 1673617
auuauucaccacuuagcuu

SEQ ID NO: 1673619 - RNA, 19 nt, Artificial Sequence
  Description of Artificial Sequence: Synthetic oligonucleotide
  Sense strand starting at position 2548 of SEQ ID NO: 1561460
auuggaguggcaugcaaau

SEQ ID NO: 1673620 - RNA, 19 nt, Artificial Sequence
  Description of Artificial Sequence: Synthetic oligonucleotide
  Antisense strand to SEQ ID NO: 1673619
auuugcaugccacuccaau

SEQ ID NO: 1673621 - RNA, 19 nt, Artificial Sequence
  Description of Artificial Sequence: Synthetic oligonucleotide
  Sense strand starting at position 2584 of SEQ ID NO: 1561460
uuaauuaaacgagaguguu

SEQ ID NO: 1673622 - RNA, 19 nt, Artificial Sequence
  Description of Artificial Sequence: Synthetic oligonucleotide
  Antisense strand to SEQ ID NO: 1673621
aacacucucguuuaauuaa

SEQ ID NO: 1673623 - RNA, 19 nt, Artificial Sequence
  Description of Artificial Sequence: Synthetic oligonucleotide
  Sense strand starting at position 2590 of SEQ ID NO: 1561460
aaacgagaguguuucgaag

SEQ ID NO: 1673624 - RNA, 19 nt, Artificial Sequence
  Description of Artificial Sequence: Synthetic oligonucleotide
  Antisense strand to SEQ ID NO: 1673623
cuucgaaacacucucguuu

SEQ ID NO: 1673625 - RNA, 19 nt, Artificial Sequence
  Description of Artificial Sequence: Synthetic oligonucleotide
  Sense strand starting at position 2596 of SEQ ID NO: 1561460
gaguguuucgaaggaacuu

SEQ ID NO: 1673626 - RNA, 19 nt, Artificial Sequence
  Description of Artificial Sequence: Synthetic oligonucleotide
  Antisense strand to SEQ ID NO: 1673625
aaguuccuucgaaacacuc

SEQ ID NO: 1673627 - RNA, 19 nt, Artificial Sequence
  Description of Artificial Sequence: Synthetic oligonucleotide
  Sense strand starting at position 2597 of SEQ ID NO: 1561460
aguguuucgaaggaacuuu

SEQ ID NO: 1673628 - RNA, 19 nt, Artificial Sequence
  Description of Artificial Sequence: Synthetic oligonucleotide
  Antisense strand to SEQ ID NO: 1673627
aaaguuccuucgaaacacu

SEQ ID NO: 1673629 - RNA, 19 nt, Artificial Sequence
  Description of Artificial Sequence: Synthetic oligonucleotide
  Sense strand starting at position 2665 of SEQ ID NO: 1561460
cuuaaauagggcuguuaag

SEQ ID NO: 1673630 - RNA, 19 nt, Artificial Sequence
  Description of Artificial Sequence: Synthetic oligonucleotide
  Antisense strand to SEQ ID NO: 1673629
cuuaacagcccuauuuaag

SEQ ID NO: 1673631 - RNA, 19 nt, Artificial Sequence
  Description of Artificial Sequence: Synthetic oligonucleotide
  Sense strand starting at position 2765 of SEQ ID NO: 1561460
uuagguuaggcacaguuau

SEQ ID NO: 1673632 - RNA, 19 nt, Artificial Sequence
  Description of Artificial Sequence: Synthetic oligonucleotide
  Antisense strand to SEQ ID NO: 1673631
auaacugugccuaaccuaa

SEQ ID NO: 1673633 - RNA, 19 nt, Artificial Sequence
  Description of Artificial Sequence: Synthetic oligonucleotide
  Sense strand starting at position 2772 of SEQ ID NO: 1561460
aggcacaguuauccucauu

SEQ ID NO: 1673634 - RNA, 19 nt, Artificial Sequence
  Description of Artificial Sequence: Synthetic oligonucleotide
  Antisense strand to SEQ ID NO: 1673633
aaugaggauaacugugccu

SEQ ID NO: 1673635 - RNA, 19 nt, Artificial Sequence
  Description of Artificial Sequence: Synthetic oligonucleotide
  Sense strand starting at position 2818 of SEQ ID NO: 1561460
guuuaucuaugagucugga

SEQ ID NO: 1673636 - RNA, 19 nt, Artificial Sequence
  Description of Artificial Sequence: Synthetic oligonucleotide
  Antisense strand to SEQ ID NO: 1673635
uccagacucauagauaaac

SEQ ID NO: 1673637 - RNA, 19 nt, Artificial Sequence
  Description of Artificial Sequence: Synthetic oligonucleotide
  Sense strand starting at position 2821 of SEQ ID NO: 1561460
uaucuaugagucuggacua

SEQ ID NO: 1673638 - RNA, 19 nt, Artificial Sequence
  Description of Artificial Sequence: Synthetic oligonucleotide
  Antisense strand to SEQ ID NO: 1673637
uaguccagacucauagaua

SEQ ID NO: 1673639 - RNA, 19 nt, Artificial Sequence
  Description of Artificial Sequence: Synthetic oligonucleotide
  Sense strand starting at position 2835 of SEQ ID NO: 1561460
gacuaaauccuaggugucu

SEQ ID NO: 1673640 - RNA, 19 nt, Artificial Sequence
  Description of Artificial Sequence: Synthetic oligonucleotide
  Antisense strand to SEQ ID NO: 1673639
agacaccuaggauuuaguc

SEQ ID NO: 1673641 - RNA, 19 nt, Artificial Sequence
  Description of Artificial Sequence: Synthetic oligonucleotide
  Sense strand starting at position 2836 of SEQ ID NO: 1561460
acuaaauccuaggugucuu

SEQ ID NO: 1673642 - RNA, 19 nt, Artificial Sequence
  Description of Artificial Sequence: Synthetic oligonucleotide
  Antisense strand to SEQ ID NO: 1673641
aagacaccuaggauuuagu

SEQ ID NO: 1673643 - RNA, 19 nt, Artificial Sequence
  Description of Artificial Sequence: Synthetic oligonucleotide
  Sense strand starting at position 2848 of SEQ ID NO: 1561460
gugucuuaauuccuuaaug

SEQ ID NO: 1673644 - RNA, 19 nt, Artificial Sequence
  Description of Artificial Sequence: Synthetic oligonucleotide
  Antisense strand to SEQ ID NO: 1673643
cauuaaggaauuaagacac

SEQ ID NO: 1673645 - RNA, 19 nt, Artificial Sequence
  Description of Artificial Sequence: Synthetic oligonucleotide
  Sense strand starting at position 2850 of SEQ ID NO: 1561460
gucuuaauuccuuaaugag

SEQ ID NO: 1673646 - RNA, 19 nt, Artificial Sequence
  Description of Artificial Sequence: Synthetic oligonucleotide
  Antisense strand to SEQ ID NO: 1673645
cucauuaaggaauuaagac

SEQ ID NO: 1673647 - RNA, 19 nt, Artificial Sequence
  Description of Artificial Sequence: Synthetic oligonucleotide
  Sense strand starting at position 2873 of SEQ ID NO: 1561460
ggcguucucagguuguaug

SEQ ID NO: 1673648 - RNA, 19 nt, Artificial Sequence
  Description of Artificial Sequence: Synthetic oligonucleotide
  Antisense strand to SEQ ID NO: 1673647
cauacaaccugagaacgcc

SEQ ID NO: 1673649 - RNA, 19 nt, Artificial Sequence
  Description of Artificial Sequence: Synthetic oligonucleotide
  Sense strand starting at position 2896 of SEQ ID NO: 1561460
uugugaaguaauggagaau

SEQ ID NO: 1673650 - RNA, 19 nt, Artificial Sequence
  Description of Artificial Sequence: Synthetic oligonucleotide
  Antisense strand to SEQ ID NO: 1673649
auucuccauuacuucacaa

SEQ ID NO: 1673651 - RNA, 19 nt, Artificial Sequence
  Description of Artificial Sequence: Synthetic oligonucleotide
  Sense strand starting at position 2917 of SEQ ID NO: 1561460
uacugacgucuccaaagau

SEQ ID NO: 1673652 - RNA, 19 nt, Artificial Sequence
  Description of Artificial Sequence: Synthetic oligonucleotide
  Antisense strand to SEQ ID NO: 1673651
aucuuuggagacgucagua

SEQ ID NO: 1673653 - RNA, 19 nt, Artificial Sequence
  Description of Artificial Sequence: Synthetic oligonucleotide
  Sense strand starting at position 3006 of SEQ ID NO: 1561460
uaaaguaauuggguaccaa

SEQ ID NO: 1673654 - RNA, 19 nt, Artificial Sequence
  Description of Artificial Sequence: Synthetic oligonucleotide
  Antisense strand to SEQ ID NO: 1673653
uugguacccaauuacuuua

SEQ ID NO: 1673655 - RNA, 19 nt, Artificial Sequence
  Description of Artificial Sequence: Synthetic oligonucleotide
  Sense strand starting at position 3185 of SEQ ID NO: 1561460
gggcauaacaaaugugaac

SEQ ID NO: 1673656 - RNA, 19 nt, Artificial Sequence
  Description of Artificial Sequence: Synthetic oligonucleotide
  Antisense strand to SEQ ID NO: 1673655
guucacauuuguuaugccc

SEQ ID NO: 1673657 - RNA, 19 nt, Artificial Sequence
  Description of Artificial Sequence: Synthetic oligonucleotide
  Sense strand starting at position 3579 of SEQ ID NO: 1561460
guaauaaugugauccuaau

SEQ ID NO: 1673658 - RNA, 19 nt, Artificial Sequence
  Description of Artificial Sequence: Synthetic oligonucleotide
  Antisense strand to SEQ ID NO: 1673657
auuaggaucacauuauuac

SEQ ID NO: 1673659 - RNA, 19 nt, Artificial Sequence
  Description of Artificial Sequence: Synthetic oligonucleotide
  Sense strand starting at position 3678 of SEQ ID NO: 1561460
gccaguacagacugagaaa

SEQ ID NO: 1673660 - RNA, 19 nt, Artificial Sequence
  Description of Artificial Sequence: Synthetic oligonucleotide
  Antisense strand to SEQ ID NO: 1673659
uuucucagucuguacuggc

SEQ ID NO: 1673661 - RNA, 19 nt, Artificial Sequence
  Description of Artificial Sequence: Synthetic oligonucleotide
  Sense strand starting at position 3841 of SEQ ID NO: 1561460
ugagaucucccguaguccu

SEQ ID NO: 1673662 - RNA, 19 nt, Artificial Sequence
  Description of Artificial Sequence: Synthetic oligonucleotide
  Antisense strand to SEQ ID NO: 1673661
aggacuacgggagaucuca

SEQ ID NO: 1673663 - RNA, 19 nt, Artificial Sequence
  Description of Artificial Sequence: Synthetic oligonucleotide
  Sense strand starting at position 3920 of SEQ ID NO: 1561460
agcagagauccuggcgaca

SEQ ID NO: 1673664 - RNA, 19 nt, Artificial Sequence
  Description of Artificial Sequence: Synthetic oligonucleotide
  Antisense strand to SEQ ID NO: 1673663
ugucgccaggaucucugcu

SEQ ID NO: 1673665 - RNA, 19 nt, Artificial Sequence
  Description of Artificial Sequence: Synthetic oligonucleotide
  Sense strand starting at position 99 of SEQ ID NO: 1561461
gcaguaaauuacuccuaug

SEQ ID NO: 1673666 - RNA, 19 nt, Artificial Sequence
  Description of Artificial Sequence: Synthetic oligonucleotide
  Antisense strand to SEQ ID NO: 1673665
cauaggaguaauuuacugc

SEQ ID NO: 1673667 - RNA, 19 nt, Artificial Sequence
  Description of Artificial Sequence: Synthetic oligonucleotide
  Sense strand starting at position 265 of SEQ ID NO: 1561461
ggcaccuuucuuggagaag

SEQ ID NO: 1673668 - RNA, 19 nt, Artificial Sequence
  Description of Artificial Sequence: Synthetic oligonucleotide
  Antisense strand to SEQ ID NO: 1673667
cuucuccaagaaaggugcc

SEQ ID NO: 1673669 - RNA, 19 nt, Artificial Sequence
  Description of Artificial Sequence: Synthetic oligonucleotide
  Sense strand starting at position 428 of SEQ ID NO: 1561461
gggccagaaucuguccuaa

SEQ ID NO: 1673670 - RNA, 19 nt, Artificial Sequence
  Description of Artificial Sequence: Synthetic oligonucleotide
  Antisense strand to SEQ ID NO: 1673669
uuaggacagauucuggccc

SEQ ID NO: 1673671 - RNA, 19 nt, Artificial Sequence
  Description of Artificial Sequence: Synthetic oligonucleotide
  Sense strand starting at position 430 of SEQ ID NO: 1561461
gccagaaucuguccuaacu

SEQ ID NO: 1673672 - RNA, 19 nt, Artificial Sequence
  Description of Artificial Sequence: Synthetic oligonucleotide
  Antisense strand to SEQ ID NO: 1673671
aguuaggacagauucuggc

SEQ ID NO: 1673673 - RNA, 19 nt, Artificial Sequence
  Description of Artificial Sequence: Synthetic oligonucleotide
  Sense strand starting at position 451 of SEQ ID NO: 1561461
aaagguucugcauggguca

SEQ ID NO: 1673674 - RNA, 19 nt, Artificial Sequence
  Description of Artificial Sequence: Synthetic oligonucleotide
  Antisense strand to SEQ ID NO: 1673673
ugacccaugcagaaccuuu

SEQ ID NO: 1673675 - RNA, 19 nt, Artificial Sequence
  Description of Artificial Sequence: Synthetic oligonucleotide
  Sense strand starting at position 1181 of SEQ ID NO: 1561461
gucacaauaucuuuccagu

SEQ ID NO: 1673676 - RNA, 19 nt, Artificial Sequence
  Description of Artificial Sequence: Synthetic oligonucleotide
  Antisense strand to SEQ ID NO: 1673675
acuggaaagauauugugac

SEQ ID NO: 1673677 - RNA, 19 nt, Artificial Sequence
  Description of Artificial Sequence: Synthetic oligonucleotide
  Sense strand starting at position 1239 of SEQ ID NO: 1561461
ucuacucuccacugugaua

SEQ ID NO: 1673678 - RNA, 19 nt, Artificial Sequence
  Description of Artificial Sequence: Synthetic oligonucleotide
  Antisense strand to SEQ ID NO: 1673677
uaucacaguggagaguaga

SEQ ID NO: 1673679 - RNA, 19 nt, Artificial Sequence
  Description of Artificial Sequence: Synthetic oligonucleotide
  Sense strand starting at position 2571 of SEQ ID NO: 1561461
gaggauuccugaucuuuag

SEQ ID NO: 1673680 - RNA, 19 nt, Artificial Sequence
  Description of Artificial Sequence: Synthetic oligonucleotide
  Antisense strand to SEQ ID NO: 1673679
cuaaagaucaggaauccuc

SEQ ID NO: 1673681 - RNA, 19 nt, Artificial Sequence
  Description of Artificial Sequence: Synthetic oligonucleotide
  Sense strand starting at position 2666 of SEQ ID NO: 1561461
cggguuugagcgaguguga

SEQ ID NO: 1673682 - RNA, 19 nt, Artificial Sequence
  Description of Artificial Sequence: Synthetic oligonucleotide
  Antisense strand to SEQ ID NO: 1673681
ucacacucgcucaaacccg

SEQ ID NO: 1673683 - RNA, 19 nt, Artificial Sequence
  Description of Artificial Sequence: Synthetic oligonucleotide
  Sense strand starting at position 2683 of SEQ ID NO: 1561461
gaccgaguuuguccucaaa

SEQ ID NO: 1673684 - RNA, 19 nt, Artificial Sequence
  Description of Artificial Sequence: Synthetic oligonucleotide
  Antisense strand to SEQ ID NO: 1673683
uuugaggacaaacucgguc

SEQ ID NO: 1673685 - RNA, 19 nt, Artificial Sequence
  Description of Artificial Sequence: Synthetic oligonucleotide
  Sense strand starting at position 2696 of SEQ ID NO: 1561461
cucaaaguuugaccugaug

SEQ ID NO: 1673686 - RNA, 19 nt, Artificial Sequence
  Description of Artificial Sequence: Synthetic oligonucleotide
  Antisense strand to SEQ ID NO: 1673685
caucaggucaaacuuugag

SEQ ID NO: 1673687 - RNA, 19 nt, Artificial Sequence
  Description of Artificial Sequence: Synthetic oligonucleotide
  Sense strand starting at position 2699 of SEQ ID NO: 1561461
aaaguuugaccugauguuu

SEQ ID NO: 1673688 - RNA, 19 nt, Artificial Sequence
  Description of Artificial Sequence: Synthetic oligonucleotide
  Antisense strand to SEQ ID NO: 1673687
aaacaucaggucaaacuuu

SEQ ID NO: 1673689 - RNA, 19 nt, Artificial Sequence
  Description of Artificial Sequence: Synthetic oligonucleotide
  Sense strand starting at position 2705 of SEQ ID NO: 1561461
ugaccugauguuugggauu

SEQ ID NO: 1673690 - RNA, 19 nt, Artificial Sequence
  Description of Artificial Sequence: Synthetic oligonucleotide
  Antisense strand to SEQ ID NO: 1673689
aaucccaaacaucagguca

SEQ ID NO: 1673691 - RNA, 19 nt, Artificial Sequence
  Description of Artificial Sequence: Synthetic oligonucleotide
  Sense strand starting at position 2711 of SEQ ID NO: 1561461
gauguuugggauuguugag

SEQ ID NO: 1673692 - RNA, 19 nt, Artificial Sequence
  Description of Artificial Sequence: Synthetic oligonucleotide
  Antisense strand to SEQ ID NO: 1673691
cucaacaaucccaaacauc

SEQ ID NO: 1673693 - RNA, 19 nt, Artificial Sequence
  Description of Artificial Sequence: Synthetic oligonucleotide
  Sense strand starting at position 2717 of SEQ ID NO: 1561461
ugggauuguugagugaaug

SEQ ID NO: 1673694 - RNA, 19 nt, Artificial Sequence
  Description of Artificial Sequence: Synthetic oligonucleotide
  Antisense strand to SEQ ID NO: 1673693
cauucacucaacaauccca

SEQ ID NO: 1673695 - RNA, 19 nt, Artificial Sequence
  Description of Artificial Sequence: Synthetic oligonucleotide
  Sense strand starting at position 2718 of SEQ ID NO: 1561461
gggauuguugagugaaugu

SEQ ID NO: 1673696 - RNA, 19 nt, Artificial Sequence
  Description of Artificial Sequence: Synthetic oligonucleotide
  Antisense strand to SEQ ID NO: 1673695
acauucacucaacaauccc

SEQ ID NO: 1673697 - RNA, 19 nt, Artificial Sequence
  Description of Artificial Sequence: Synthetic oligonucleotide
  Sense strand starting at position 2758 of SEQ ID NO: 1561461
ugugauugugccuaagagg

SEQ ID NO: 1673698 - RNA, 19 nt, Artificial Sequence
  Description of Artificial Sequence: Synthetic oligonucleotide
  Antisense strand to SEQ ID NO: 1673697
ccucuuaggcacaaucaca

SEQ ID NO: 1673699 - RNA, 19 nt, Artificial Sequence
  Description of Artificial Sequence: Synthetic oligonucleotide
  Sense strand starting at position 2792 of SEQ ID NO: 1561461
agcauugagguauaacguu

SEQ ID NO: 1673700 - RNA, 19 nt, Artificial Sequence
  Description of Artificial Sequence: Synthetic oligonucleotide
  Antisense strand to SEQ ID NO: 1673699
aacguuauaccucaaugcu

SEQ ID NO: 1673701 - RNA, 19 nt, Artificial Sequence
  Description of Artificial Sequence: Synthetic oligonucleotide
  Sense strand starting at position 2828 of SEQ ID NO: 1561461
gucgaaagugcugauaauu

SEQ ID NO: 1673702 - RNA, 19 nt, Artificial Sequence
  Description of Artificial Sequence: Synthetic oligonucleotide
  Antisense strand to SEQ ID NO: 1673701
aauuaucagcacuuucgac

SEQ ID NO: 1673703 - RNA, 19 nt, Artificial Sequence
  Description of Artificial Sequence: Synthetic oligonucleotide
  Sense strand starting at position 2903 of SEQ ID NO: 1561461
aagcuaaguggugaauaau

SEQ ID NO: 1673704 - RNA, 19 nt, Artificial Sequence
  Description of Artificial Sequence: Synthetic oligonucleotide
  Antisense strand to SEQ ID NO: 1673703
auuauucaccacuuagcuu

SEQ ID NO: 1673705 - RNA, 19 nt, Artificial Sequence
  Description of Artificial Sequence: Synthetic oligonucleotide
  Sense strand starting at position 2959 of SEQ ID NO: 1561461
auuggaguggcaugcaaau

SEQ ID NO: 1673706 - RNA, 19 nt, Artificial Sequence
  Description of Artificial Sequence: Synthetic oligonucleotide
  Antisense strand to SEQ ID NO: 1673705
auuugcaugccacuccaau

SEQ ID NO: 1673707 - RNA, 19 nt, Artificial Sequence
  Description of Artificial Sequence: Synthetic oligonucleotide
  Sense strand starting at position 2995 of SEQ ID NO: 1561461
uuaauuaaacgagaguguu

SEQ ID NO: 1673708 - RNA, 19 nt, Artificial Sequence
  Description of Artificial Sequence: Synthetic oligonucleotide
  Antisense strand to SEQ ID NO: 1673707
aacacucucguuuaauuaa

SEQ ID NO: 1673709 - RNA, 19 nt, Artificial Sequence
  Description of Artificial Sequence: Synthetic oligonucleotide
  Sense strand starting at position 3001 of SEQ ID NO: 1561461
aaacgagaguguuucgaag

SEQ ID NO: 1673710 - RNA, 19 nt, Artificial Sequence
  Description of Artificial Sequence: Synthetic oligonucleotide
  Antisense strand to SEQ ID NO: 1673709
cuucgaaacacucucguuu

SEQ ID NO: 1673711 - RNA, 19 nt, Artificial Sequence
  Description of Artificial Sequence: Synthetic oligonucleotide
  Sense strand starting at position 3007 of SEQ ID NO: 1561461
gaguguuucgaaggaacuu

SEQ ID NO: 1673712 - RNA, 19 nt, Artificial Sequence
  Description of Artificial Sequence: Synthetic oligonucleotide
  Antisense strand to SEQ ID NO: 1673711
aaguuccuucgaaacacuc

SEQ ID NO: 1673713 - RNA, 19 nt, Artificial Sequence
  Description of Artificial Sequence: Synthetic oligonucleotide
  Sense strand starting at position 3008 of SEQ ID NO: 1561461
aguguuucgaaggaacuuu

SEQ ID NO: 1673714 - RNA, 19 nt, Artificial Sequence
  Description of Artificial Sequence: Synthetic oligonucleotide
  Antisense strand to SEQ ID NO: 1673713
aaaguuccuucgaaacacu

SEQ ID NO: 1673715 - RNA, 19 nt, Artificial Sequence
  Description of Artificial Sequence: Synthetic oligonucleotide
  Sense strand starting at position 3076 of SEQ ID NO: 1561461
cuuaaauagggcuguuaag

SEQ ID NO: 1673716 - RNA, 19 nt, Artificial Sequence
  Description of Artificial Sequence: Synthetic oligonucleotide
  Antisense strand to SEQ ID NO: 1673715
cuuaacagcccuauuuaag

SEQ ID NO: 1673717 - RNA, 19 nt, Artificial Sequence
  Description of Artificial Sequence: Synthetic oligonucleotide
  Sense strand starting at position 3176 of SEQ ID NO: 1561461
uuagguuaggcacaguuau

SEQ ID NO: 1673718 - RNA, 19 nt, Artificial Sequence
  Description of Artificial Sequence: Synthetic oligonucleotide
  Antisense strand to SEQ ID NO: 1673717
auaacugugccuaaccuaa

SEQ ID NO: 1673719 - RNA, 19 nt, Artificial Sequence
  Description of Artificial Sequence: Synthetic oligonucleotide
  Sense strand starting at position 3183 of SEQ ID NO: 1561461
aggcacaguuauccucauu

SEQ ID NO: 1673720 - RNA, 19 nt, Artificial Sequence
  Description of Artificial Sequence: Synthetic oligonucleotide
  Antisense strand to SEQ ID NO: 1673719
aaugaggauaacugugccu

SEQ ID NO: 1673721 - RNA, 19 nt, Artificial Sequence
  Description of Artificial Sequence: Synthetic oligonucleotide
  Sense strand starting at position 3229 of SEQ ID NO: 1561461
guuuaucuaugagucugga

SEQ ID NO: 1673722 - RNA, 19 nt, Artificial Sequence
  Description of Artificial Sequence: Synthetic oligonucleotide
  Antisense strand to SEQ ID NO: 1673721
uccagacucauagauaaac

SEQ ID NO: 1673723 - RNA, 19 nt, Artificial Sequence
  Description of Artificial Sequence: Synthetic oligonucleotide
  Sense strand starting at position 3232 of SEQ ID NO: 1561461
uaucuaugagucuggacua

SEQ ID NO: 1673724 - RNA, 19 nt, Artificial Sequence
  Description of Artificial Sequence: Synthetic oligonucleotide
  Antisense strand to SEQ ID NO: 1673723
uaguccagacucauagaua

SEQ ID NO: 1673725 - RNA, 19 nt, Artificial Sequence
  Description of Artificial Sequence: Synthetic oligonucleotide
  Sense strand starting at position 3246 of SEQ ID NO: 1561461
gacuaaauccuaggugucu

SEQ ID NO: 1673726 - RNA, 19 nt, Artificial Sequence
  Description of Artificial Sequence: Synthetic oligonucleotide
  Antisense strand to SEQ ID NO: 1673725
agacaccuaggauuuaguc

SEQ ID NO: 1673727 - RNA, 19 nt, Artificial Sequence
  Description of Artificial Sequence: Synthetic oligonucleotide
  Sense strand starting at position 3247 of SEQ ID NO: 1561461
acuaaauccuaggugucuu

SEQ ID NO: 1673728 - RNA, 19 nt, Artificial Sequence
  Description of Artificial Sequence: Synthetic oligonucleotide
  Antisense strand to SEQ ID NO: 1673727
aagacaccuaggauuuagu

SEQ ID NO: 1673729 - RNA, 19 nt, Artificial Sequence
  Description of Artificial Sequence: Synthetic oligonucleotide
  Sense strand starting at position 3259 of SEQ ID NO: 1561461
gugucuuaauuccuuaaug

SEQ ID NO: 1673730 - RNA, 19 nt, Artificial Sequence
  Description of Artificial Sequence: Synthetic oligonucleotide
  Antisense strand to SEQ ID NO: 1673729
cauuaaggaauuaagacac

SEQ ID NO: 1673731 - RNA, 19 nt, Artificial Sequence
  Description of Artificial Sequence: Synthetic oligonucleotide
  Sense strand starting at position 3261 of SEQ ID NO: 1561461
gucuuaauuccuuaaugag

SEQ ID NO: 1673732 - RNA, 19 nt, Artificial Sequence
  Description of Artificial Sequence: Synthetic oligonucleotide
  Antisense strand to SEQ ID NO: 1673731
cucauuaaggaauuaagac

SEQ ID NO: 1673733 - RNA, 19 nt, Artificial Sequence
  Description of Artificial Sequence: Synthetic oligonucleotide
  Sense strand starting at position 3284 of SEQ ID NO: 1561461
ggcguucucagguuguaug

SEQ ID NO: 1673734 - RNA, 19 nt, Artificial Sequence
  Description of Artificial Sequence: Synthetic oligonucleotide
  Antisense strand to SEQ ID NO: 1673733
cauacaaccugagaacgcc

SEQ ID NO: 1673735 - RNA, 19 nt, Artificial Sequence
  Description of Artificial Sequence: Synthetic oligonucleotide
  Sense strand starting at position 3307 of SEQ ID NO: 1561461
uugugaaguaauggagaau

SEQ ID NO: 1673736 - RNA, 19 nt, Artificial Sequence
  Description of Artificial Sequence: Synthetic oligonucleotide
  Antisense strand to SEQ ID NO: 1673735
auucuccauuacuucacaa

SEQ ID NO: 1673737 - RNA, 19 nt, Artificial Sequence
  Description of Artificial Sequence: Synthetic oligonucleotide
  Sense strand starting at position 3328 of SEQ ID NO: 1561461
uacugacgucuccaaagau

SEQ ID NO: 1673738 - RNA, 19 nt, Artificial Sequence
  Description of Artificial Sequence: Synthetic oligonucleotide
  Antisense strand to SEQ ID NO: 1673737
aucuuuggagacgucagua

SEQ ID NO: 1673739 - RNA, 19 nt, Artificial Sequence
  Description of Artificial Sequence: Synthetic oligonucleotide
  Sense strand starting at position 3417 of SEQ ID NO: 1561461
uaaaguaauuggguaccaa

SEQ ID NO: 1673740 - RNA, 19 nt, Artificial Sequence
  Description of Artificial Sequence: Synthetic oligonucleotide
  Antisense strand to SEQ ID NO: 1673739
uugguacccaauuacuuua

SEQ ID NO: 1673741 - RNA, 19 nt, Artificial Sequence
  Description of Artificial Sequence: Synthetic oligonucleotide
  Sense strand starting at position 3596 of SEQ ID NO: 1561461
gggcauaacaaaugugaac

SEQ ID NO: 1673742 - RNA, 19 nt, Artificial Sequence
  Description of Artificial Sequence: Synthetic oligonucleotide
  Antisense strand to SEQ ID NO: 1673741
guucacauuuguuaugccc

SEQ ID NO: 1673743 - RNA, 19 nt, Artificial Sequence
  Description of Artificial Sequence: Synthetic oligonucleotide
  Sense strand starting at position 3668 of SEQ ID NO: 1561461
uuaauuuacugugaucuug

SEQ ID NO: 1673744 - RNA, 19 nt, Artificial Sequence
  Description of Artificial Sequence: Synthetic oligonucleotide
  Antisense strand to SEQ ID NO: 1673743
caagaucacaguaaauuaa

SEQ ID NO: 1673745 - RNA, 19 nt, Artificial Sequence
  Description of Artificial Sequence: Synthetic oligonucleotide
  Sense strand starting at position 138 of SEQ ID NO: 1561462
ggacuagcuuugccaacau

SEQ ID NO: 1673746 - RNA, 19 nt, Artificial Sequence
  Description of Artificial Sequence: Synthetic oligonucleotide
  Antisense strand to SEQ ID NO: 1673745
auguuggcaaagcuagucc

SEQ ID NO: 1673747 - RNA, 19 nt, Artificial Sequence
  Description of Artificial Sequence: Synthetic oligonucleotide
  Sense strand starting at position 410 of SEQ ID NO: 1561462
gggagaaauuacugagaag

SEQ ID NO: 1673748 - RNA, 19 nt, Artificial Sequence
  Description of Artificial Sequence: Synthetic oligonucleotide
  Antisense strand to SEQ ID NO: 1673747
cuucucaguaauuucuccc

SEQ ID NO: 1673749 - RNA, 19 nt, Artificial Sequence
  Description of Artificial Sequence: Synthetic oligonucleotide
  Sense strand starting at position 427 of SEQ ID NO: 1561462
agugguaugagggaagcau

SEQ ID NO: 1673750 - RNA, 19 nt, Artificial Sequence
  Description of Artificial Sequence: Synthetic oligonucleotide
  Antisense strand to SEQ ID NO: 1673749
augcuucccucauaccacu

SEQ ID NO: 1673751 - RNA, 19 nt, Artificial Sequence
  Description of Artificial Sequence: Synthetic oligonucleotide
  Sense strand starting at position 454 of SEQ ID NO: 1561462
cuggcaaaguucuuuguau

SEQ ID NO: 1673752 - RNA, 19 nt, Artificial Sequence
  Description of Artificial Sequence: Synthetic oligonucleotide
  Antisense strand to SEQ ID NO: 1673751
auacaaagaacuuugccag

SEQ ID NO: 1673753 - RNA, 19 nt, Artificial Sequence
  Description of Artificial Sequence: Synthetic oligonucleotide
  Sense strand starting at position 455 of SEQ ID NO: 1561462
uggcaaaguucuuuguaua

SEQ ID NO: 1673754 - RNA, 19 nt, Artificial Sequence
  Description of Artificial Sequence: Synthetic oligonucleotide
  Antisense strand to SEQ ID NO: 1673753
uauacaaagaacuuugcca

SEQ ID NO: 1673755 - RNA, 19 nt, Artificial Sequence
  Description of Artificial Sequence: Synthetic oligonucleotide
  Sense strand starting at position 456 of SEQ ID NO: 1561462
ggcaaaguucuuuguauag

SEQ ID NO: 1673756 - RNA, 19 nt, Artificial Sequence
  Description of Artificial Sequence: Synthetic oligonucleotide
  Antisense strand to SEQ ID NO: 1673755
cuauacaaagaacuuugcc

SEQ ID NO: 1673757 - RNA, 19 nt, Artificial Sequence
  Description of Artificial Sequence: Synthetic oligonucleotide
  Sense strand starting at position 472 of SEQ ID NO: 1561462
uagaucuaagaguguuaca

SEQ ID NO: 1673758 - RNA, 19 nt, Artificial Sequence
  Description of Artificial Sequence: Synthetic oligonucleotide
  Antisense strand to SEQ ID NO: 1673757
uguaacacucuuagaucua

SEQ ID NO: 1673759 - RNA, 19 nt, Artificial Sequence
  Description of Artificial Sequence: Synthetic oligonucleotide
  Sense strand starting at position 518 of SEQ ID NO: 1561462
uuauauaggcucuauguau

SEQ ID NO: 1673760 - RNA, 19 nt, Artificial Sequence
  Description of Artificial Sequence: Synthetic oligonucleotide
  Antisense strand to SEQ ID NO: 1673759
auacauagagccuauauaa

SEQ ID NO: 1673761 - RNA, 19 nt, Artificial Sequence
  Description of Artificial Sequence: Synthetic oligonucleotide
  Sense strand starting at position 525 of SEQ ID NO: 1561462
ggcucuauguaucuauuga

SEQ ID NO: 1673762 - RNA, 19 nt, Artificial Sequence
  Description of Artificial Sequence: Synthetic oligonucleotide
  Antisense strand to SEQ ID NO: 1673761
ucaauagauacauagagcc

SEQ ID NO: 1673763 - RNA, 19 nt, Artificial Sequence
  Description of Artificial Sequence: Synthetic oligonucleotide
  Sense strand starting at position 649 of SEQ ID NO: 1561462
guagcuaggacuuauaggu

SEQ ID NO: 1673764 - RNA, 19 nt, Artificial Sequence
  Description of Artificial Sequence: Synthetic oligonucleotide
  Antisense strand to SEQ ID NO: 1673763
accuauaaguccuagcuac

SEQ ID NO: 1673765 - RNA, 19 nt, Artificial Sequence
  Description of Artificial Sequence: Synthetic oligonucleotide
  Sense strand starting at position 704 of SEQ ID NO: 1561462
auguauuuaugguagaguu

SEQ ID NO: 1673766 - RNA, 19 nt, Artificial Sequence
  Description of Artificial Sequence: Synthetic oligonucleotide
  Antisense strand to SEQ ID NO: 1673765
aacucuaccauaaauacau

SEQ ID NO: 1673767 - RNA, 19 nt, Artificial Sequence
  Description of Artificial Sequence: Synthetic oligonucleotide
  Sense strand starting at position 854 of SEQ ID NO: 1561462
uuggaacuaugcuuuggua

SEQ ID NO: 1673768 - RNA, 19 nt, Artificial Sequence
  Description of Artificial Sequence: Synthetic oligonucleotide
  Antisense strand to SEQ ID NO: 1673767
uaccaaagcauaguuccaa

SEQ ID NO: 1673769 - RNA, 19 nt, Artificial Sequence
  Description of Artificial Sequence: Synthetic oligonucleotide
  Sense strand starting at position 861 of SEQ ID NO: 1561462
uaugcuuugguagggauau

SEQ ID NO: 1673770 - RNA, 19 nt, Artificial Sequence
  Description of Artificial Sequence: Synthetic oligonucleotide
  Antisense strand to SEQ ID NO: 1673769
auaucccuaccaaagcaua

SEQ ID NO: 1673771 - RNA, 19 nt, Artificial Sequence
  Description of Artificial Sequence: Synthetic oligonucleotide
  Sense strand starting at position 927 of SEQ ID NO: 1561462
cagccacucggguauauau

SEQ ID NO: 1673772 - RNA, 19 nt, Artificial Sequence
  Description of Artificial Sequence: Synthetic oligonucleotide
  Antisense strand to SEQ ID NO: 1673771
auauauacccgaguggcug

SEQ ID NO: 1673773 - RNA, 19 nt, Artificial Sequence
  Description of Artificial Sequence: Synthetic oligonucleotide
  Sense strand starting at position 946 of SEQ ID NO: 1561462
uuugacacuguuuaguaaa

SEQ ID NO: 1673774 - RNA, 19 nt, Artificial Sequence
  Description of Artificial Sequence: Synthetic oligonucleotide
  Antisense strand to SEQ ID NO: 1673773
uuuacuaaacagugucaaa

SEQ ID NO: 1673775 - RNA, 19 nt, Artificial Sequence
  Description of Artificial Sequence: Synthetic oligonucleotide
  Sense strand starting at position 948 of SEQ ID NO: 1561462
ugacacuguuuaguaaagu

SEQ ID NO: 1673776 - RNA, 19 nt, Artificial Sequence
  Description of Artificial Sequence: Synthetic oligonucleotide
  Antisense strand to SEQ ID NO: 1673775
acuuuacuaaacaguguca

SEQ ID NO: 1673777 - RNA, 19 nt, Artificial Sequence
  Description of Artificial Sequence: Synthetic oligonucleotide
  Sense strand starting at position 954 of SEQ ID NO: 1561462
uguuuaguaaaguggaaga

SEQ ID NO: 1673778 - RNA, 19 nt, Artificial Sequence
  Description of Artificial Sequence: Synthetic oligonucleotide
  Antisense strand to SEQ ID NO: 1673777
ucuuccacuuuacuaaaca

SEQ ID NO: 1673779 - RNA, 19 nt, Artificial Sequence
  Description of Artificial Sequence: Synthetic oligonucleotide
  Sense strand starting at position 983 of SEQ ID NO: 1561462
ggcaauucugcugguaaau

SEQ ID NO: 1673780 - RNA, 19 nt, Artificial Sequence
  Description of Artificial Sequence: Synthetic oligonucleotide
  Antisense strand to SEQ ID NO: 1673779
auuuaccagcagaauugcc

SEQ ID NO: 1673781 - RNA, 19 nt, Artificial Sequence
  Description of Artificial Sequence: Synthetic oligonucleotide
  Sense strand starting at position 1027 of SEQ ID NO: 1561462
gaaagaauguggcuguguu

SEQ ID NO: 1673782 - RNA, 19 nt, Artificial Sequence
  Description of Artificial Sequence: Synthetic oligonucleotide
  Antisense strand to SEQ ID NO: 1673781
aacacagccacauucuuuc

SEQ ID NO: 1673783 - RNA, 19 nt, Artificial Sequence
  Description of Artificial Sequence: Synthetic oligonucleotide
  Sense strand starting at position 1073 of SEQ ID NO: 1561462
cuaauagggcaucauuacu

SEQ ID NO: 1673784 - RNA, 19 nt, Artificial Sequence
  Description of Artificial Sequence: Synthetic oligonucleotide
  Antisense strand to SEQ ID NO: 1673783
aguaaugaugcccuauuag

SEQ ID NO: 1673785 - RNA, 19 nt, Artificial Sequence
  Description of Artificial Sequence: Synthetic oligonucleotide
  Sense strand starting at position 1125 of SEQ ID NO: 1561462
gggagaauauagcaaagaa

SEQ ID NO: 1673786 - RNA, 19 nt, Artificial Sequence
  Description of Artificial Sequence: Synthetic oligonucleotide
  Antisense strand to SEQ ID NO: 1673785
uucuuugcuauauucuccc

SEQ ID NO: 1673787 - RNA, 19 nt, Artificial Sequence
  Description of Artificial Sequence: Synthetic oligonucleotide
  Sense strand starting at position 1252 of SEQ ID NO: 1561462
ggaguauaaugccuagaga

SEQ ID NO: 1673788 - RNA, 19 nt, Artificial Sequence
  Description of Artificial Sequence: Synthetic oligonucleotide
  Antisense strand to SEQ ID NO: 1673787
ucucuaggcauuauacucc

SEQ ID NO: 1673789 - RNA, 19 nt, Artificial Sequence
  Description of Artificial Sequence: Synthetic oligonucleotide
  Sense strand starting at position 1255 of SEQ ID NO: 1561462
guauaaugccuagagaagu

SEQ ID NO: 1673790 - RNA, 19 nt, Artificial Sequence
  Description of Artificial Sequence: Synthetic oligonucleotide
  Antisense strand to SEQ ID NO: 1673789
acuucucuaggcauuauac

SEQ ID NO: 1673791 - RNA, 19 nt, Artificial Sequence
  Description of Artificial Sequence: Synthetic oligonucleotide
  Sense strand starting at position 1263 of SEQ ID NO: 1561462
ccuagagaaguauacguaa

SEQ ID NO: 1673792 - RNA, 19 nt, Artificial Sequence
  Description of Artificial Sequence: Synthetic oligonucleotide
  Antisense strand to SEQ ID NO: 1673791
uuacguauacuucucuagg

SEQ ID NO: 1673793 - RNA, 19 nt, Artificial Sequence
  Description of Artificial Sequence: Synthetic oligonucleotide
  Sense strand starting at position 1270 of SEQ ID NO: 1561462
aaguauacguaagugauaa

SEQ ID NO: 1673794 - RNA, 19 nt, Artificial Sequence
  Description of Artificial Sequence: Synthetic oligonucleotide
  Antisense strand to SEQ ID NO: 1673793
uuaucacuuacguauacuu

SEQ ID NO: 1673795 - RNA, 19 nt, Artificial Sequence
  Description of Artificial Sequence: Synthetic oligonucleotide
  Sense strand starting at position 1271 of SEQ ID NO: 1561462
aguauacguaagugauaaa

SEQ ID NO: 1673796 - RNA, 19 nt, Artificial Sequence
  Description of Artificial Sequence: Synthetic oligonucleotide
  Antisense strand to SEQ ID NO: 1673795
uuuaucacuuacguauacu

SEQ ID NO: 1673797 - RNA, 19 nt, Artificial Sequence
  Description of Artificial Sequence: Synthetic oligonucleotide
  Sense strand starting at position 1301 of SEQ ID NO: 1561462
ugugacuuacccugccaca

SEQ ID NO: 1673798 - RNA, 19 nt, Artificial Sequence
  Description of Artificial Sequence: Synthetic oligonucleotide
  Antisense strand to SEQ ID NO: 1673797
uguggcaggguaagucaca

SEQ ID NO: 1673799 - RNA, 19 nt, Artificial Sequence
  Description of Artificial Sequence: Synthetic oligonucleotide
  Sense strand starting at position 1398 of SEQ ID NO: 1561462
gggccucuaucggucacau

SEQ ID NO: 1673800 - RNA, 19 nt, Artificial Sequence
  Description of Artificial Sequence: Synthetic oligonucleotide
  Antisense strand to SEQ ID NO: 1673799
augugaccgauagaggccc

SEQ ID NO: 1673801 - RNA, 19 nt, Artificial Sequence
  Description of Artificial Sequence: Synthetic oligonucleotide
  Sense strand starting at position 1400 of SEQ ID NO: 1561462
gccucuaucggucacauaa

SEQ ID NO: 1673802 - RNA, 19 nt, Artificial Sequence
  Description of Artificial Sequence: Synthetic oligonucleotide
  Antisense strand to SEQ ID NO: 1673801
uuaugugaccgauagaggc

SEQ ID NO: 1673803 - RNA, 19 nt, Artificial Sequence
  Description of Artificial Sequence: Synthetic oligonucleotide
  Sense strand starting at position 1746 of SEQ ID NO: 1561462
ggugugagcguuggaaaca

SEQ ID NO: 1673804 - RNA, 19 nt, Artificial Sequence
  Description of Artificial Sequence: Synthetic oligonucleotide
  Antisense strand to SEQ ID NO: 1673803
uguuuccaacgcucacacc

SEQ ID NO: 1673805 - RNA, 19 nt, Artificial Sequence
  Description of Artificial Sequence: Synthetic oligonucleotide
  Sense strand starting at position 1997 of SEQ ID NO: 1561462
gcgugaguuggaagcugaa

SEQ ID NO: 1673806 - RNA, 19 nt, Artificial Sequence
  Description of Artificial Sequence: Synthetic oligonucleotide
  Antisense strand to SEQ ID NO: 1673805
uucagcuuccaacucacgc

SEQ ID NO: 1673807 - RNA, 19 nt, Artificial Sequence
  Description of Artificial Sequence: Synthetic oligonucleotide
  Sense strand starting at position 2000 of SEQ ID NO: 1561462
ugaguuggaagcugaauua

SEQ ID NO: 1673808 - RNA, 19 nt, Artificial Sequence
  Description of Artificial Sequence: Synthetic oligonucleotide
  Antisense strand to SEQ ID NO: 1673807
uaauucagcuuccaacuca

SEQ ID NO: 1673809 - RNA, 19 nt, Artificial Sequence
  Description of Artificial Sequence: Synthetic oligonucleotide
  Sense strand starting at position 2010 of SEQ ID NO: 1561462
gcugaauuaccgcgagaag

SEQ ID NO: 1673810 - RNA, 19 nt, Artificial Sequence
  Description of Artificial Sequence: Synthetic oligonucleotide
  Antisense strand to SEQ ID NO: 1673809
cuucucgcgguaauucagc

SEQ ID NO: 1673811 - RNA, 19 nt, Artificial Sequence
  Description of Artificial Sequence: Synthetic oligonucleotide
  Sense strand starting at position 2011 of SEQ ID NO: 1561462
cugaauuaccgcgagaagu

SEQ ID NO: 1673812 - RNA, 19 nt, Artificial Sequence
  Description of Artificial Sequence: Synthetic oligonucleotide
  Antisense strand to SEQ ID NO: 1673811
acuucucgcgguaauucag

SEQ ID NO: 1673813 - RNA, 19 nt, Artificial Sequence
  Description of Artificial Sequence: Synthetic oligonucleotide
  Sense strand starting at position 2013 of SEQ ID NO: 1561462
gaauuaccgcgagaaguac

SEQ ID NO: 1673814 - RNA, 19 nt, Artificial Sequence
  Description of Artificial Sequence: Synthetic oligonucleotide
  Antisense strand to SEQ ID NO: 1673813
guacuucucgcgguaauuc

SEQ ID NO: 1673815 - RNA, 19 nt, Artificial Sequence
  Description of Artificial Sequence: Synthetic oligonucleotide
  Sense strand starting at position 2029 of SEQ ID NO: 1561462
uacagucuugccgaggaga

SEQ ID NO: 1673816 - RNA, 19 nt, Artificial Sequence
  Description of Artificial Sequence: Synthetic oligonucleotide
  Antisense strand to SEQ ID NO: 1673815
ucuccucggcaagacugua

SEQ ID NO: 1673817 - RNA, 19 nt, Artificial Sequence
  Description of Artificial Sequence: Synthetic oligonucleotide
  Sense strand starting at position 2052 of SEQ ID NO: 1561462
ugggaagcguagucagaga

SEQ ID NO: 1673818 - RNA, 19 nt, Artificial Sequence
  Description of Artificial Sequence: Synthetic oligonucleotide
  Antisense strand to SEQ ID NO: 1673817
ucucugacuacgcuuccca

SEQ ID NO: 1673819 - RNA, 19 nt, Artificial Sequence
  Description of Artificial Sequence: Synthetic oligonucleotide
  Sense strand starting at position 2057 of SEQ ID NO: 1561462
agcguagucagagacguau

SEQ ID NO: 1673820 - RNA, 19 nt, Artificial Sequence
  Description of Artificial Sequence: Synthetic oligonucleotide
  Antisense strand to SEQ ID NO: 1673819
auacgucucugacuacgcu

SEQ ID NO: 1673821 - RNA, 19 nt, Artificial Sequence
  Description of Artificial Sequence: Synthetic oligonucleotide
  Sense strand starting at position 2059 of SEQ ID NO: 1561462
cguagucagagacguauca

SEQ ID NO: 1673822 - RNA, 19 nt, Artificial Sequence
  Description of Artificial Sequence: Synthetic oligonucleotide
  Antisense strand to SEQ ID NO: 1673821
ugauacgucucugacuacg

SEQ ID NO: 1673823 - RNA, 19 nt, Artificial Sequence
  Description of Artificial Sequence: Synthetic oligonucleotide
  Sense strand starting at position 2061 of SEQ ID NO: 1561462
uagucagagacguaucaag

SEQ ID NO: 1673824 - RNA, 19 nt, Artificial Sequence
  Description of Artificial Sequence: Synthetic oligonucleotide
  Antisense strand to SEQ ID NO: 1673823
cuugauacgucucugacua

SEQ ID NO: 1673825 - RNA, 19 nt, Artificial Sequence
  Description of Artificial Sequence: Synthetic oligonucleotide
  Sense strand starting at position 69 of SEQ ID NO: 1561463
gggagaaauuacugagaag

SEQ ID NO: 1673826 - RNA, 19 nt, Artificial Sequence
  Description of Artificial Sequence: Synthetic oligonucleotide
  Antisense strand to SEQ ID NO: 1673825
cuucucaguaauuucuccc

SEQ ID NO: 1673827 - RNA, 19 nt, Artificial Sequence
  Description of Artificial Sequence: Synthetic oligonucleotide
  Sense strand starting at position 86 of SEQ ID NO: 1561463
agugguaugagggaagcau

SEQ ID NO: 1673828 - RNA, 19 nt, Artificial Sequence
  Description of Artificial Sequence: Synthetic oligonucleotide
  Antisense strand to SEQ ID NO: 1673827
augcuucccucauaccacu

SEQ ID NO: 1673829 - RNA, 19 nt, Artificial Sequence
  Description of Artificial Sequence: Synthetic oligonucleotide
  Sense strand starting at position 113 of SEQ ID NO: 1561463
cuggcaaaguucuuuguau

SEQ ID NO: 1673830 - RNA, 19 nt, Artificial Sequence
  Description of Artificial Sequence: Synthetic oligonucleotide
  Antisense strand to SEQ ID NO: 1673829
auacaaagaacuuugccag

SEQ ID NO: 1673831 - RNA, 19 nt, Artificial Sequence
  Description of Artificial Sequence: Synthetic oligonucleotide
  Sense strand starting at position 114 of SEQ ID NO: 1561463
uggcaaaguucuuuguaua

SEQ ID NO: 1673832 - RNA, 19 nt, Artificial Sequence
  Description of Artificial Sequence: Synthetic oligonucleotide
  Antisense strand to SEQ ID NO: 1673831
uauacaaagaacuuugcca

SEQ ID NO: 1673833 - RNA, 19 nt, Artificial Sequence
  Description of Artificial Sequence: Synthetic oligonucleotide
  Sense strand starting at position 115 of SEQ ID NO: 1561463
ggcaaaguucuuuguauag

SEQ ID NO: 1673834 - RNA, 19 nt, Artificial Sequence
  Description of Artificial Sequence: Synthetic oligonucleotide
  Antisense strand to SEQ ID NO: 1673833
cuauacaaagaacuuugcc

SEQ ID NO: 1673835 - RNA, 19 nt, Artificial Sequence
  Description of Artificial Sequence: Synthetic oligonucleotide
  Sense strand starting at position 131 of SEQ ID NO: 1561463
uagaucuaagaguguuaca

SEQ ID NO: 1673836 - RNA, 19 nt, Artificial Sequence
  Description of Artificial Sequence: Synthetic oligonucleotide
  Antisense strand to SEQ ID NO: 1673835
uguaacacucuuagaucua

SEQ ID NO: 1673837 - RNA, 19 nt, Artificial Sequence
  Description of Artificial Sequence: Synthetic oligonucleotide
  Sense strand starting at position 177 of SEQ ID NO: 1561463
uuauauaggcucuauguau

SEQ ID NO: 1673838 - RNA, 19 nt, Artificial Sequence
  Description of Artificial Sequence: Synthetic oligonucleotide
  Antisense strand to SEQ ID NO: 1673837
auacauagagccuauauaa

SEQ ID NO: 1673839 - RNA, 19 nt, Artificial Sequence
  Description of Artificial Sequence: Synthetic oligonucleotide
  Sense strand starting at position 184 of SEQ ID NO: 1561463
ggcucuauguaucuauuga

SEQ ID NO: 1673840 - RNA, 19 nt, Artificial Sequence
  Description of Artificial Sequence: Synthetic oligonucleotide
  Antisense strand to SEQ ID NO: 1673839
ucaauagauacauagagcc

SEQ ID NO: 1673841 - RNA, 19 nt, Artificial Sequence
  Description of Artificial Sequence: Synthetic oligonucleotide
  Sense strand starting at position 308 of SEQ ID NO: 1561463
guagcuaggacuuauaggu

SEQ ID NO: 1673842 - RNA, 19 nt, Artificial Sequence
  Description of Artificial Sequence: Synthetic oligonucleotide
  Antisense strand to SEQ ID NO: 1673841
accuauaaguccuagcuac

SEQ ID NO: 1673843 - RNA, 19 nt, Artificial Sequence
  Description of Artificial Sequence: Synthetic oligonucleotide
  Sense strand starting at position 363 of SEQ ID NO: 1561463
auguauuuaugguagaguu

SEQ ID NO: 1673844 - RNA, 19 nt, Artificial Sequence
  Description of Artificial Sequence: Synthetic oligonucleotide
  Antisense strand to SEQ ID NO: 1673843
aacucuaccauaaauacau

SEQ ID NO: 1673845 - RNA, 19 nt, Artificial Sequence
  Description of Artificial Sequence: Synthetic oligonucleotide
  Sense strand starting at position 513 of SEQ ID NO: 1561463
uuggaacuaugcuuuggua

SEQ ID NO: 1673846 - RNA, 19 nt, Artificial Sequence
  Description of Artificial Sequence: Synthetic oligonucleotide
  Antisense strand to SEQ ID NO: 1673845
uaccaaagcauaguuccaa

SEQ ID NO: 1673847 - RNA, 19 nt, Artificial Sequence
  Description of Artificial Sequence: Synthetic oligonucleotide
  Sense strand starting at position 520 of SEQ ID NO: 1561463
uaugcuuugguagggauau

SEQ ID NO: 1673848 - RNA, 19 nt, Artificial Sequence
  Description of Artificial Sequence: Synthetic oligonucleotide
  Antisense strand to SEQ ID NO: 1673847
auaucccuaccaaagcaua

SEQ ID NO: 1673849 - RNA, 19 nt, Artificial Sequence
  Description of Artificial Sequence: Synthetic oligonucleotide
  Sense strand starting at position 586 of SEQ ID NO: 1561463
cagccacucggguauauau

SEQ ID NO: 1673850 - RNA, 19 nt, Artificial Sequence
  Description of Artificial Sequence: Synthetic oligonucleotide
  Antisense strand to SEQ ID NO: 1673849
auauauacccgaguggcug

SEQ ID NO: 1673851 - RNA, 19 nt, Artificial Sequence
  Description of Artificial Sequence: Synthetic oligonucleotide
  Sense strand starting at position 605 of SEQ ID NO: 1561463
uuugacacuguuuaguaaa

SEQ ID NO: 1673852 - RNA, 19 nt, Artificial Sequence
  Description of Artificial Sequence: Synthetic oligonucleotide
  Antisense strand to SEQ ID NO: 1673851
uuuacuaaacagugucaaa

SEQ ID NO: 1673853 - RNA, 19 nt, Artificial Sequence
  Description of Artificial Sequence: Synthetic oligonucleotide
  Sense strand starting at position 607 of SEQ ID NO: 1561463
ugacacuguuuaguaaagu

SEQ ID NO: 1673854 - RNA, 19 nt, Artificial Sequence
  Description of Artificial Sequence: Synthetic oligonucleotide
  Antisense strand to SEQ ID NO: 1673853
acuuuacuaaacaguguca

SEQ ID NO: 1673855 - RNA, 19 nt, Artificial Sequence
  Description of Artificial Sequence: Synthetic oligonucleotide
  Sense strand starting at position 613 of SEQ ID NO: 1561463
uguuuaguaaaguggaaga

SEQ ID NO: 1673856 - RNA, 19 nt, Artificial Sequence
  Description of Artificial Sequence: Synthetic oligonucleotide
  Antisense strand to SEQ ID NO: 1673855
ucuuccacuuuacuaaaca

SEQ ID NO: 1673857 - RNA, 19 nt, Artificial Sequence
  Description of Artificial Sequence: Synthetic oligonucleotide
  Sense strand starting at position 642 of SEQ ID NO: 1561463
ggcaauucugcugguaaau

SEQ ID NO: 1673858 - RNA, 19 nt, Artificial Sequence
  Description of Artificial Sequence: Synthetic oligonucleotide
  Antisense strand to SEQ ID NO: 1673857
auuuaccagcagaauugcc

SEQ ID NO: 1673859 - RNA, 19 nt, Artificial Sequence
  Description of Artificial Sequence: Synthetic oligonucleotide
  Sense strand starting at position 686 of SEQ ID NO: 1561463
gaaagaauguggcuguguu

SEQ ID NO: 1673860 - RNA, 19 nt, Artificial Sequence
  Description of Artificial Sequence: Synthetic oligonucleotide
  Antisense strand to SEQ ID NO: 1673859
aacacagccacauucuuuc

SEQ ID NO: 1673861 - RNA, 19 nt, Artificial Sequence
  Description of Artificial Sequence: Synthetic oligonucleotide
  Sense strand starting at position 732 of SEQ ID NO: 1561463
cuaauagggcaucauuacu

SEQ ID NO: 1673862 - RNA, 19 nt, Artificial Sequence
  Description of Artificial Sequence: Synthetic oligonucleotide
  Antisense strand to SEQ ID NO: 1673861
aguaaugaugcccuauuag

SEQ ID NO: 1673863 - RNA, 19 nt, Artificial Sequence
  Description of Artificial Sequence: Synthetic oligonucleotide
  Sense strand starting at position 784 of SEQ ID NO: 1561463
gggagaauauagcaaagaa

SEQ ID NO: 1673864 - RNA, 19 nt, Artificial Sequence
  Description of Artificial Sequence: Synthetic oligonucleotide
  Antisense strand to SEQ ID NO: 1673863
uucuuugcuauauucuccc

SEQ ID NO: 1673865 - RNA, 19 nt, Artificial Sequence
  Description of Artificial Sequence: Synthetic oligonucleotide
  Sense strand starting at position 911 of SEQ ID NO: 1561463
ggaguauaaugccuagaga

SEQ ID NO: 1673866 - RNA, 19 nt, Artificial Sequence
  Description of Artificial Sequence: Synthetic oligonucleotide
  Antisense strand to SEQ ID NO: 1673865
ucucuaggcauuauacucc

SEQ ID NO: 1673867 - RNA, 19 nt, Artificial Sequence
  Description of Artificial Sequence: Synthetic oligonucleotide
  Sense strand starting at position 914 of SEQ ID NO: 1561463
guauaaugccuagagaagu

SEQ ID NO: 1673868 - RNA, 19 nt, Artificial Sequence
  Description of Artificial Sequence: Synthetic oligonucleotide
  Antisense strand to SEQ ID NO: 1673867
acuucucuaggcauuauac

SEQ ID NO: 1673869 - RNA, 19 nt, Artificial Sequence
  Description of Artificial Sequence: Synthetic oligonucleotide
  Sense strand starting at position 922 of SEQ ID NO: 1561463
ccuagagaaguauacguaa

SEQ ID NO: 1673870 - RNA, 19 nt, Artificial Sequence
  Description of Artificial Sequence: Synthetic oligonucleotide
  Antisense strand to SEQ ID NO: 1673869
uuacguauacuucucuagg

SEQ ID NO: 1673871 - RNA, 19 nt, Artificial Sequence
  Description of Artificial Sequence: Synthetic oligonucleotide
  Sense strand starting at position 929 of SEQ ID NO: 1561463
aaguauacguaagugauaa

SEQ ID NO: 1673872 - RNA, 19 nt, Artificial Sequence
  Description of Artificial Sequence: Synthetic oligonucleotide
  Antisense strand to SEQ ID NO: 1673871
uuaucacuuacguauacuu

SEQ ID NO: 1673873 - RNA, 19 nt, Artificial Sequence
  Description of Artificial Sequence: Synthetic oligonucleotide
  Sense strand starting at position 930 of SEQ ID NO: 1561463
aguauacguaagugauaaa

SEQ ID NO: 1673874 - RNA, 19 nt, Artificial Sequence
  Description of Artificial Sequence: Synthetic oligonucleotide
  Antisense strand to SEQ ID NO: 1673873
uuuaucacuuacguauacu

SEQ ID NO: 1673875 - RNA, 19 nt, Artificial Sequence
  Description of Artificial Sequence: Synthetic oligonucleotide
  Sense strand starting at position 960 of SEQ ID NO: 1561463
ugugacuuacccugccaca

SEQ ID NO: 1673876 - RNA, 19 nt, Artificial Sequence
  Description of Artificial Sequence: Synthetic oligonucleotide
  Antisense strand to SEQ ID NO: 1673875
uguggcaggguaagucaca

SEQ ID NO: 1673877 - RNA, 19 nt, Artificial Sequence
  Description of Artificial Sequence: Synthetic oligonucleotide
  Sense strand starting at position 1057 of SEQ ID NO: 1561463
gggccucuaucggucacau

SEQ ID NO: 1673878 - RNA, 19 nt, Artificial Sequence
  Description of Artificial Sequence: Synthetic oligonucleotide
  Antisense strand to SEQ ID NO: 1673877
augugaccgauagaggccc

SEQ ID NO: 1673879 - RNA, 19 nt, Artificial Sequence
  Description of Artificial Sequence: Synthetic oligonucleotide
  Sense strand starting at position 1059 of SEQ ID NO: 1561463
gccucuaucggucacauaa

SEQ ID NO: 1673880 - RNA, 19 nt, Artificial Sequence
  Description of Artificial Sequence: Synthetic oligonucleotide
  Antisense strand to SEQ ID NO: 1673879
uuaugugaccgauagaggc

SEQ ID NO: 1673881 - RNA, 19 nt, Artificial Sequence
  Description of Artificial Sequence: Synthetic oligonucleotide
  Sense strand starting at position 1405 of SEQ ID NO: 1561463
ggugugagcguuggaaaca

SEQ ID NO: 1673882 - RNA, 19 nt, Artificial Sequence
  Description of Artificial Sequence: Synthetic oligonucleotide
  Antisense strand to SEQ ID NO: 1673881
uguuuccaacgcucacacc

SEQ ID NO: 1673883 - RNA, 19 nt, Artificial Sequence
  Description of Artificial Sequence: Synthetic oligonucleotide
  Sense strand starting at position 1656 of SEQ ID NO: 1561463
gcgugaguuggaagcugaa

SEQ ID NO: 1673884 - RNA, 19 nt, Artificial Sequence
  Description of Artificial Sequence: Synthetic oligonucleotide
  Antisense strand to SEQ ID NO: 1673883
uucagcuuccaacucacgc

SEQ ID NO: 1673885 - RNA, 19 nt, Artificial Sequence
  Description of Artificial Sequence: Synthetic oligonucleotide
  Sense strand starting at position 1659 of SEQ ID NO: 1561463
ugaguuggaagcugaauua

SEQ ID NO: 1673886 - RNA, 19 nt, Artificial Sequence
  Description of Artificial Sequence: Synthetic oligonucleotide
  Antisense strand to SEQ ID NO: 1673885
uaauucagcuuccaacuca

SEQ ID NO: 1673887 - RNA, 19 nt, Artificial Sequence
  Description of Artificial Sequence: Synthetic oligonucleotide
  Sense strand starting at position 1669 of SEQ ID NO: 1561463
gcugaauuaccgcgagaag

SEQ ID NO: 1673888 - RNA, 19 nt, Artificial Sequence
  Description of Artificial Sequence: Synthetic oligonucleotide
  Antisense strand to SEQ ID NO: 1673887
cuucucgcgguaauucagc

SEQ ID NO: 1673889 - RNA, 19 nt, Artificial Sequence
  Description of Artificial Sequence: Synthetic oligonucleotide
  Sense strand starting at position 1670 of SEQ ID NO: 1561463
cugaauuaccgcgagaagu

SEQ ID NO: 1673890 - RNA, 19 nt, Artificial Sequence
  Description of Artificial Sequence: Synthetic oligonucleotide
  Antisense strand to SEQ ID NO: 1673889
acuucucgcgguaauucag

SEQ ID NO: 1673891 - RNA, 19 nt, Artificial Sequence
  Description of Artificial Sequence: Synthetic oligonucleotide
  Sense strand starting at position 1672 of SEQ ID NO: 1561463
gaauuaccgcgagaaguac

SEQ ID NO: 1673892 - RNA, 19 nt, Artificial Sequence
  Description of Artificial Sequence: Synthetic oligonucleotide
  Antisense strand to SEQ ID NO: 1673891
guacuucucgcgguaauuc

SEQ ID NO: 1673893 - RNA, 19 nt, Artificial Sequence
  Description of Artificial Sequence: Synthetic oligonucleotide
  Sense strand starting at position 1688 of SEQ ID NO: 1561463
uacagucuugccgaggaga

SEQ ID NO: 1673894 - RNA, 19 nt, Artificial Sequence
  Description of Artificial Sequence: Synthetic oligonucleotide
  Antisense strand to SEQ ID NO: 1673893
ucuccucggcaagacugua

SEQ ID NO: 1673895 - RNA, 19 nt, Artificial Sequence
  Description of Artificial Sequence: Synthetic oligonucleotide
  Sense strand starting at position 1711 of SEQ ID NO: 1561463
ugggaagcguagucagaga

SEQ ID NO: 1673896 - RNA, 19 nt, Artificial Sequence
  Description of Artificial Sequence: Synthetic oligonucleotide
  Antisense strand to SEQ ID NO: 1673895
ucucugacuacgcuuccca

SEQ ID NO: 1673897 - RNA, 19 nt, Artificial Sequence
  Description of Artificial Sequence: Synthetic oligonucleotide
  Sense strand starting at position 1716 of SEQ ID NO: 1561463
agcguagucagagacguau

SEQ ID NO: 1673898 - RNA, 19 nt, Artificial Sequence
  Description of Artificial Sequence: Synthetic oligonucleotide
  Antisense strand to SEQ ID NO: 1673897
auacgucucugacuacgcu

SEQ ID NO: 1673899 - RNA, 19 nt, Artificial Sequence
  Description of Artificial Sequence: Synthetic oligonucleotide
  Sense strand starting at position 1718 of SEQ ID NO: 1561463
cguagucagagacguauca

SEQ ID NO: 1673900 - RNA, 19 nt, Artificial Sequence
  Description of Artificial Sequence: Synthetic oligonucleotide
  Antisense strand to SEQ ID NO: 1673899
ugauacgucucugacuacg

SEQ ID NO: 1673901 - RNA, 19 nt, Artificial Sequence
  Description of Artificial Sequence: Synthetic oligonucleotide
  Sense strand starting at position 1720 of SEQ ID NO: 1561463
uagucagagacguaucaag

SEQ ID NO: 1673902 - RNA, 19 nt, Artificial Sequence
  Description of Artificial Sequence: Synthetic oligonucleotide
  Antisense strand to SEQ ID NO: 1673901
cuugauacgucucugacua

SEQ ID NO: 1673903 - RNA, 19 nt, Artificial Sequence
  Description of Artificial Sequence: Synthetic oligonucleotide
  Sense strand starting at position 3848 of SEQ ID NO: 1561463
uguguagaaagacguagau

SEQ ID NO: 1673904 - RNA, 19 nt, Artificial Sequence
  Description of Artificial Sequence: Synthetic oligonucleotide
  Antisense strand to SEQ ID NO: 1673903
aucuacgucuuucuacaca

SEQ ID NO: 1673905 - RNA, 19 nt, Artificial Sequence
  Description of Artificial Sequence: Synthetic oligonucleotide
  Sense strand starting at position 11 of SEQ ID NO: 1561464
ucaacaauguaaucgacua

SEQ ID NO: 1673906 - RNA, 19 nt, Artificial Sequence
  Description of Artificial Sequence: Synthetic oligonucleotide
  Antisense strand to SEQ ID NO: 1673905
uagucgauuacauuguuga

SEQ ID NO: 1673907 - RNA, 19 nt, Artificial Sequence
  Description of Artificial Sequence: Synthetic oligonucleotide
  Sense strand starting at position 56 of SEQ ID NO: 1561464
gugagagcuaaguacaauu

SEQ ID NO: 1673908 - RNA, 19 nt, Artificial Sequence
  Description of Artificial Sequence: Synthetic oligonucleotide
  Antisense strand to SEQ ID NO: 1673907
aauuguacuuagcucucac

SEQ ID NO: 1673909 - RNA, 19 nt, Artificial Sequence
  Description of Artificial Sequence: Synthetic oligonucleotide
  Sense strand starting at position 264 of SEQ ID NO: 1561464
ggacuagcuuugccaacau

SEQ ID NO: 1673910 - RNA, 19 nt, Artificial Sequence
  Description of Artificial Sequence: Synthetic oligonucleotide
  Antisense strand to SEQ ID NO: 1673909
auguuggcaaagcuagucc

SEQ ID NO: 1673911 - RNA, 19 nt, Artificial Sequence
  Description of Artificial Sequence: Synthetic oligonucleotide
  Sense strand starting at position 536 of SEQ ID NO: 1561464
gggagaaauuacugagaag

SEQ ID NO: 1673912 - RNA, 19 nt, Artificial Sequence
  Description of Artificial Sequence: Synthetic oligonucleotide
  Antisense strand to SEQ ID NO: 1673911
cuucucaguaauuucuccc

SEQ ID NO: 1673913 - RNA, 19 nt, Artificial Sequence
  Description of Artificial Sequence: Synthetic oligonucleotide
  Sense strand starting at position 553 of SEQ ID NO: 1561464
agugguaugagggaagcau

SEQ ID NO: 1673914 - RNA, 19 nt, Artificial Sequence
  Description of Artificial Sequence: Synthetic oligonucleotide
  Antisense strand to SEQ ID NO: 1673913
augcuucccucauaccacu

SEQ ID NO: 1673915 - RNA, 19 nt, Artificial Sequence
  Description of Artificial Sequence: Synthetic oligonucleotide
  Sense strand starting at position 580 of SEQ ID NO: 1561464
cuggcaaaguucuuuguau

SEQ ID NO: 1673916 - RNA, 19 nt, Artificial Sequence
  Description of Artificial Sequence: Synthetic oligonucleotide
  Antisense strand to SEQ ID NO: 1673915
auacaaagaacuuugccag

SEQ ID NO: 1673917 - RNA, 19 nt, Artificial Sequence
  Description of Artificial Sequence: Synthetic oligonucleotide
  Sense strand starting at position 581 of SEQ ID NO: 1561464
uggcaaaguucuuuguaua

SEQ ID NO: 1673918 - RNA, 19 nt, Artificial Sequence
  Description of Artificial Sequence: Synthetic oligonucleotide
  Antisense strand to SEQ ID NO: 1673917
uauacaaagaacuuugcca

SEQ ID NO: 1673919 - RNA, 19 nt, Artificial Sequence
  Description of Artificial Sequence: Synthetic oligonucleotide
  Sense strand starting at position 582 of SEQ ID NO: 1561464
ggcaaaguucuuuguauag

SEQ ID NO: 1673920 - RNA, 19 nt, Artificial Sequence
  Description of Artificial Sequence: Synthetic oligonucleotide
  Antisense strand to SEQ ID NO: 1673919
cuauacaaagaacuuugcc

SEQ ID NO: 1673921 - RNA, 19 nt, Artificial Sequence
  Description of Artificial Sequence: Synthetic oligonucleotide
  Sense strand starting at position 598 of SEQ ID NO: 1561464
uagaucuaagaguguuaca

SEQ ID NO: 1673922 - RNA, 19 nt, Artificial Sequence
  Description of Artificial Sequence: Synthetic oligonucleotide
  Antisense strand to SEQ ID NO: 1673921
uguaacacucuuagaucua

SEQ ID NO: 1673923 - RNA, 19 nt, Artificial Sequence
  Description of Artificial Sequence: Synthetic oligonucleotide
  Sense strand starting at position 644 of SEQ ID NO: 1561464
uuauauaggcucuauguau

SEQ ID NO: 1673924 - RNA, 19 nt, Artificial Sequence
  Description of Artificial Sequence: Synthetic oligonucleotide
  Antisense strand to SEQ ID NO: 1673923
auacauagagccuauauaa

SEQ ID NO: 1673925 - RNA, 19 nt, Artificial Sequence
  Description of Artificial Sequence: Synthetic oligonucleotide
  Sense strand starting at position 651 of SEQ ID NO: 1561464
ggcucuauguaucuauuga

SEQ ID NO: 1673926 - RNA, 19 nt, Artificial Sequence
  Description of Artificial Sequence: Synthetic oligonucleotide
  Antisense strand to SEQ ID NO: 1673925
ucaauagauacauagagcc

SEQ ID NO: 1673927 - RNA, 19 nt, Artificial Sequence
  Description of Artificial Sequence: Synthetic oligonucleotide
  Sense strand starting at position 775 of SEQ ID NO: 1561464
guagcuaggacuuauaggu

SEQ ID NO: 1673928 - RNA, 19 nt, Artificial Sequence
  Description of Artificial Sequence: Synthetic oligonucleotide
  Antisense strand to SEQ ID NO: 1673927
accuauaaguccuagcuac

SEQ ID NO: 1673929 - RNA, 19 nt, Artificial Sequence
  Description of Artificial Sequence: Synthetic oligonucleotide
  Sense strand starting at position 830 of SEQ ID NO: 1561464
auguauuuaugguagaguu

SEQ ID NO: 1673930 - RNA, 19 nt, Artificial Sequence
  Description of Artificial Sequence: Synthetic oligonucleotide
  Antisense strand to SEQ ID NO: 1673929
aacucuaccauaaauacau

SEQ ID NO: 1673931 - RNA, 19 nt, Artificial Sequence
  Description of Artificial Sequence: Synthetic oligonucleotide
  Sense strand starting at position 980 of SEQ ID NO: 1561464
uuggaacuaugcuuuggua

SEQ ID NO: 1673932 - RNA, 19 nt, Artificial Sequence
  Description of Artificial Sequence: Synthetic oligonucleotide
  Antisense strand to SEQ ID NO: 1673931
uaccaaagcauaguuccaa

SEQ ID NO: 1673933 - RNA, 19 nt, Artificial Sequence
  Description of Artificial Sequence: Synthetic oligonucleotide
  Sense strand starting at position 987 of SEQ ID NO: 1561464
uaugcuuugguagggauau

SEQ ID NO: 1673934 - RNA, 19 nt, Artificial Sequence
  Description of Artificial Sequence: Synthetic oligonucleotide
  Antisense strand to SEQ ID NO: 1673933
auaucccuaccaaagcaua

SEQ ID NO: 1673935 - RNA, 19 nt, Artificial Sequence
  Description of Artificial Sequence: Synthetic oligonucleotide
  Sense strand starting at position 1053 of SEQ ID NO: 1561464
cagccacucggguauauau

SEQ ID NO: 1673936 - RNA, 19 nt, Artificial Sequence
  Description of Artificial Sequence: Synthetic oligonucleotide
  Antisense strand to SEQ ID NO: 1673935
auauauacccgaguggcug

SEQ ID NO: 1673937 - RNA, 19 nt, Artificial Sequence
  Description of Artificial Sequence: Synthetic oligonucleotide
  Sense strand starting at position 1072 of SEQ ID NO: 1561464
uuugacacuguuuaguaaa

SEQ ID NO: 1673938 - RNA, 19 nt, Artificial Sequence
  Description of Artificial Sequence: Synthetic oligonucleotide
  Antisense strand to SEQ ID NO: 1673937
uuuacuaaacagugucaaa

SEQ ID NO: 1673939 - RNA, 19 nt, Artificial Sequence
  Description of Artificial Sequence: Synthetic oligonucleotide
  Sense strand starting at position 1074 of SEQ ID NO: 1561464
ugacacuguuuaguaaagu

SEQ ID NO: 1673940 - RNA, 19 nt, Artificial Sequence
  Description of Artificial Sequence: Synthetic oligonucleotide
  Antisense strand to SEQ ID NO: 1673939
acuuuacuaaacaguguca

SEQ ID NO: 1673941 - RNA, 19 nt, Artificial Sequence
  Description of Artificial Sequence: Synthetic oligonucleotide
  Sense strand starting at position 1080 of SEQ ID NO: 1561464
uguuuaguaaaguggaaga

SEQ ID NO: 1673942 - RNA, 19 nt, Artificial Sequence
  Description of Artificial Sequence: Synthetic oligonucleotide
  Antisense strand to SEQ ID NO: 1673941
ucuuccacuuuacuaaaca

SEQ ID NO: 1673943 - RNA, 19 nt, Artificial Sequence
  Description of Artificial Sequence: Synthetic oligonucleotide
  Sense strand starting at position 1109 of SEQ ID NO: 1561464
ggcaauucugcugguaaau

SEQ ID NO: 1673944 - RNA, 19 nt, Artificial Sequence
  Description of Artificial Sequence: Synthetic oligonucleotide
  Antisense strand to SEQ ID NO: 1673943
auuuaccagcagaauugcc

SEQ ID NO: 1673945 - RNA, 19 nt, Artificial Sequence
  Description of Artificial Sequence: Synthetic oligonucleotide
  Sense strand starting at position 1153 of SEQ ID NO: 1561464
gaaagaauguggcuguguu

SEQ ID NO: 1673946 - RNA, 19 nt, Artificial Sequence
  Description of Artificial Sequence: Synthetic oligonucleotide
  Antisense strand to SEQ ID NO: 1673945
aacacagccacauucuuuc

SEQ ID NO: 1673947 - RNA, 19 nt, Artificial Sequence
  Description of Artificial Sequence: Synthetic oligonucleotide
  Sense strand starting at position 1199 of SEQ ID NO: 1561464
cuaauagggcaucauuacu

SEQ ID NO: 1673948 - RNA, 19 nt, Artificial Sequence
  Description of Artificial Sequence: Synthetic oligonucleotide
  Antisense strand to SEQ ID NO: 1673947
aguaaugaugcccuauuag

SEQ ID NO: 1673949 - RNA, 19 nt, Artificial Sequence
  Description of Artificial Sequence: Synthetic oligonucleotide
  Sense strand starting at position 1251 of SEQ ID NO: 1561464
gggagaauauagcaaagaa

SEQ ID NO: 1673950 - RNA, 19 nt, Artificial Sequence
  Description of Artificial Sequence: Synthetic oligonucleotide
  Antisense strand to SEQ ID NO: 1673949
uucuuugcuauauucuccc

SEQ ID NO: 1673951 - RNA, 19 nt, Artificial Sequence
  Description of Artificial Sequence: Synthetic oligonucleotide
  Sense strand starting at position 1378 of SEQ ID NO: 1561464
ggaguauaaugccuagaga

SEQ ID NO: 1673952 - RNA, 19 nt, Artificial Sequence
  Description of Artificial Sequence: Synthetic oligonucleotide
  Antisense strand to SEQ ID NO: 1673951
ucucuaggcauuauacucc

SEQ ID NO: 1673953 - RNA, 19 nt, Artificial Sequence
  Description of Artificial Sequence: Synthetic oligonucleotide
  Sense strand starting at position 1381 of SEQ ID NO: 1561464
guauaaugccuagagaagu

SEQ ID NO: 1673954 - RNA, 19 nt, Artificial Sequence
  Description of Artificial Sequence: Synthetic oligonucleotide
  Antisense strand to SEQ ID NO: 1673953
acuucucuaggcauuauac

SEQ ID NO: 1673955 - RNA, 19 nt, Artificial Sequence
  Description of Artificial Sequence: Synthetic oligonucleotide
  Sense strand starting at position 1389 of SEQ ID NO: 1561464
ccuagagaaguauacguaa

SEQ ID NO: 1673956 - RNA, 19 nt, Artificial Sequence
  Description of Artificial Sequence: Synthetic oligonucleotide
  Antisense strand to SEQ ID NO: 1673955
uuacguauacuucucuagg

SEQ ID NO: 1673957 - RNA, 19 nt, Artificial Sequence
  Description of Artificial Sequence: Synthetic oligonucleotide
  Sense strand starting at position 1396 of SEQ ID NO: 1561464
aaguauacguaagugauaa

SEQ ID NO: 1673958 - RNA, 19 nt, Artificial Sequence
  Description of Artificial Sequence: Synthetic oligonucleotide
  Antisense strand to SEQ ID NO: 1673957
uuaucacuuacguauacuu

SEQ ID NO: 1673959 - RNA, 19 nt, Artificial Sequence
  Description of Artificial Sequence: Synthetic oligonucleotide
  Sense strand starting at position 1397 of SEQ ID NO: 1561464
aguauacguaagugauaaa

SEQ ID NO: 1673960 - RNA, 19 nt, Artificial Sequence
  Description of Artificial Sequence: Synthetic oligonucleotide
  Antisense strand to SEQ ID NO: 1673959
uuuaucacuuacguauacu

SEQ ID NO: 1673961 - RNA, 19 nt, Artificial Sequence
  Description of Artificial Sequence: Synthetic oligonucleotide
  Sense strand starting at position 1427 of SEQ ID NO: 1561464
ugugacuuacccugccaca

SEQ ID NO: 1673962 - RNA, 19 nt, Artificial Sequence
  Description of Artificial Sequence: Synthetic oligonucleotide
  Antisense strand to SEQ ID NO: 1673961
uguggcaggguaagucaca

SEQ ID NO: 1673963 - RNA, 19 nt, Artificial Sequence
  Description of Artificial Sequence: Synthetic oligonucleotide
  Sense strand starting at position 1524 of SEQ ID NO: 1561464
gggccucuaucggucacau

SEQ ID NO: 1673964 - RNA, 19 nt, Artificial Sequence
  Description of Artificial Sequence: Synthetic oligonucleotide
  Antisense strand to SEQ ID NO: 1673963
augugaccgauagaggccc

SEQ ID NO: 1673965 - RNA, 19 nt, Artificial Sequence
  Description of Artificial Sequence: Synthetic oligonucleotide
  Sense strand starting at position 1526 of SEQ ID NO: 1561464
gccucuaucggucacauaa

SEQ ID NO: 1673966 - RNA, 19 nt, Artificial Sequence
  Description of Artificial Sequence: Synthetic oligonucleotide
  Antisense strand to SEQ ID NO: 1673965
uuaugugaccgauagaggc

SEQ ID NO: 1673967 - RNA, 19 nt, Artificial Sequence
  Description of Artificial Sequence: Synthetic oligonucleotide
  Sense strand starting at position 2123 of SEQ ID NO: 1561464
gcgugaguuggaagcugaa

SEQ ID NO: 1673968 - RNA, 19 nt, Artificial Sequence
  Description of Artificial Sequence: Synthetic oligonucleotide
  Antisense strand to SEQ ID NO: 1673967
uucagcuuccaacucacgc

SEQ ID NO: 1673969 - RNA, 19 nt, Artificial Sequence
  Description of Artificial Sequence: Synthetic oligonucleotide
  Sense strand starting at position 2126 of SEQ ID NO: 1561464
ugaguuggaagcugaauua

SEQ ID NO: 1673970 - RNA, 19 nt, Artificial Sequence
  Description of Artificial Sequence: Synthetic oligonucleotide
  Antisense strand to SEQ ID NO: 1673969
uaauucagcuuccaacuca

SEQ ID NO: 1673971 - RNA, 19 nt, Artificial Sequence
  Description of Artificial Sequence: Synthetic oligonucleotide
  Sense strand starting at position 2136 of SEQ ID NO: 1561464
gcugaauuaccgcgagaag

SEQ ID NO: 1673972 - RNA, 19 nt, Artificial Sequence
  Description of Artificial Sequence: Synthetic oligonucleotide
  Antisense strand to SEQ ID NO: 1673971
cuucucgcgguaauucagc

SEQ ID NO: 1673973 - RNA, 19 nt, Artificial Sequence
  Description of Artificial Sequence: Synthetic oligonucleotide
  Sense strand starting at position 2137 of SEQ ID NO: 1561464
cugaauuaccgcgagaagu

SEQ ID NO: 1673974 - RNA, 19 nt, Artificial Sequence
  Description of Artificial Sequence: Synthetic oligonucleotide
  Antisense strand to SEQ ID NO: 1673973
acuucucgcgguaauucag

SEQ ID NO: 1673975 - RNA, 19 nt, Artificial Sequence
  Description of Artificial Sequence: Synthetic oligonucleotide
  Sense strand starting at position 2139 of SEQ ID NO: 1561464
gaauuaccgcgagaaguac

SEQ ID NO: 1673976 - RNA, 19 nt, Artificial Sequence
  Description of Artificial Sequence: Synthetic oligonucleotide
  Antisense strand to SEQ ID NO: 1673975
guacuucucgcgguaauuc

SEQ ID NO: 1673977 - RNA, 19 nt, Artificial Sequence
  Description of Artificial Sequence: Synthetic oligonucleotide
  Sense strand starting at position 2155 of SEQ ID NO: 1561464
uacagucuugccgaggaga

SEQ ID NO: 1673978 - RNA, 19 nt, Artificial Sequence
  Description of Artificial Sequence: Synthetic oligonucleotide
  Antisense strand to SEQ ID NO: 1673977
ucuccucggcaagacugua

SEQ ID NO: 1673979 - RNA, 19 nt, Artificial Sequence
  Description of Artificial Sequence: Synthetic oligonucleotide
  Sense strand starting at position 2178 of SEQ ID NO: 1561464
ugggaagcguagucagaga

SEQ ID NO: 1673980 - RNA, 19 nt, Artificial Sequence
  Description of Artificial Sequence: Synthetic oligonucleotide
  Antisense strand to SEQ ID NO: 1673979
ucucugacuacgcuuccca

SEQ ID NO: 1673981 - RNA, 19 nt, Artificial Sequence
  Description of Artificial Sequence: Synthetic oligonucleotide
  Sense strand starting at position 2183 of SEQ ID NO: 1561464
agcguagucagagacguau

SEQ ID NO: 1673982 - RNA, 19 nt, Artificial Sequence
  Description of Artificial Sequence: Synthetic oligonucleotide
  Antisense strand to SEQ ID NO: 1673981
auacgucucugacuacgcu

SEQ ID NO: 1673983 - RNA, 19 nt, Artificial Sequence
  Description of Artificial Sequence: Synthetic oligonucleotide
  Sense strand starting at position 2187 of SEQ ID NO: 1561464
uagucagagacguaucaag

SEQ ID NO: 1673984 - RNA, 19 nt, Artificial Sequence
  Description of Artificial Sequence: Synthetic oligonucleotide
  Antisense strand to SEQ ID NO: 1673983
cuugauacgucucugacua

SEQ ID NO: 1673985 - RNA, 19 nt, Artificial Sequence
  Description of Artificial Sequence: Synthetic oligonucleotide
  Sense strand starting at position 36 of SEQ ID NO: 1561465
agaggcuaugcccaugaga

SEQ ID NO: 1673986 - RNA, 19 nt, Artificial Sequence
  Description of Artificial Sequence: Synthetic oligonucleotide
  Antisense strand to SEQ ID NO: 1673985
ucucaugggcauagccucu

SEQ ID NO: 1673987 - RNA, 19 nt, Artificial Sequence
  Description of Artificial Sequence: Synthetic oligonucleotide
  Sense strand starting at position 38 of SEQ ID NO: 1561465
aggcuaugcccaugagaag

SEQ ID NO: 1673988 - RNA, 19 nt, Artificial Sequence
  Description of Artificial Sequence: Synthetic oligonucleotide
  Antisense strand to SEQ ID NO: 1673987
cuucucaugggcauagccu

SEQ ID NO: 1673989 - RNA, 19 nt, Artificial Sequence
  Description of Artificial Sequence: Synthetic oligonucleotide
  Sense strand starting at position 87 of SEQ ID NO: 1561465
guucucuuggaagguaaga

SEQ ID NO: 1673990 - RNA, 19 nt, Artificial Sequence
  Description of Artificial Sequence: Synthetic oligonucleotide
  Antisense strand to SEQ ID NO: 1673989
ucuuaccuuccaagagaac

SEQ ID NO: 1673991 - RNA, 19 nt, Artificial Sequence
  Description of Artificial Sequence: Synthetic oligonucleotide
  Sense strand starting at position 292 of SEQ ID NO: 1561465
ucaggcuuccagcagaaga

SEQ ID NO: 1673992 - RNA, 19 nt, Artificial Sequence
  Description of Artificial Sequence: Synthetic oligonucleotide
  Antisense strand to SEQ ID NO: 1673991
ucuucugcuggaagccuga

SEQ ID NO: 1673993 - RNA, 19 nt, Artificial Sequence
  Description of Artificial Sequence: Synthetic oligonucleotide
  Sense strand starting at position 394 of SEQ ID NO: 1561465
gagaguggcaguuaugaga

SEQ ID NO: 1673994 - RNA, 19 nt, Artificial Sequence
  Description of Artificial Sequence: Synthetic oligonucleotide
  Antisense strand to SEQ ID NO: 1673993
ucucauaacugccacucuc

SEQ ID NO: 1673995 - RNA, 19 nt, Artificial Sequence
  Description of Artificial Sequence: Synthetic oligonucleotide
  Sense strand starting at position 401 of SEQ ID NO: 1561465
gcaguuaugagauaaaguu

SEQ ID NO: 1673996 - RNA, 19 nt, Artificial Sequence
  Description of Artificial Sequence: Synthetic oligonucleotide
  Antisense strand to SEQ ID NO: 1673995
aacuuuaucucauaacugc

SEQ ID NO: 1673997 - RNA, 19 nt, Artificial Sequence
  Description of Artificial Sequence: Synthetic oligonucleotide
  Sense strand starting at position 1171 of SEQ ID NO: 1561465
gucuaauuaccagagucaa

SEQ ID NO: 1673998 - RNA, 19 nt, Artificial Sequence
  Description of Artificial Sequence: Synthetic oligonucleotide
  Antisense strand to SEQ ID NO: 1673997
uugacucugguaauuagac

SEQ ID NO: 1673999 - RNA, 19 nt, Artificial Sequence
  Description of Artificial Sequence: Synthetic oligonucleotide
  Sense strand starting at position 1184 of SEQ ID NO: 1561465
agucaaauucuacaggcau

SEQ ID NO: 1674000 - RNA, 19 nt, Artificial Sequence
  Description of Artificial Sequence: Synthetic oligonucleotide
  Antisense strand to SEQ ID NO: 1673999
augccuguagaauuugacu

SEQ ID NO: 1674001 - RNA, 19 nt, Artificial Sequence
  Description of Artificial Sequence: Synthetic oligonucleotide
  Sense strand starting at position 2525 of SEQ ID NO: 1561465
uucugcagugcuguguuua

SEQ ID NO: 1674002 - RNA, 19 nt, Artificial Sequence
  Description of Artificial Sequence: Synthetic oligonucleotide
  Antisense strand to SEQ ID NO: 1674001
uaaacacagcacugcagaa

SEQ ID NO: 1674003 - RNA, 19 nt, Artificial Sequence
  Description of Artificial Sequence: Synthetic oligonucleotide
  Sense strand starting at position 2528 of SEQ ID NO: 1561465
ugcagugcuguguuuaaug

SEQ ID NO: 1674004 - RNA, 19 nt, Artificial Sequence
  Description of Artificial Sequence: Synthetic oligonucleotide
  Antisense strand to SEQ ID NO: 1674003
cauuaaacacagcacugca

SEQ ID NO: 1674005 - RNA, 19 nt, Artificial Sequence
  Description of Artificial Sequence: Synthetic oligonucleotide
  Sense strand starting at position 2584 of SEQ ID NO: 1561465
gccugugaggacuaugauc

SEQ ID NO: 1674006 - RNA, 19 nt, Artificial Sequence
  Description of Artificial Sequence: Synthetic oligonucleotide
  Antisense strand to SEQ ID NO: 1674005
gaucauaguccucacaggc

SEQ ID NO: 1674007 - RNA, 19 nt, Artificial Sequence
  Description of Artificial Sequence: Synthetic oligonucleotide
  Sense strand starting at position 2586 of SEQ ID NO: 1561465
cugugaggacuaugaucca

SEQ ID NO: 1674008 - RNA, 19 nt, Artificial Sequence
  Description of Artificial Sequence: Synthetic oligonucleotide
  Antisense strand to SEQ ID NO: 1674007
uggaucauaguccucacag

SEQ ID NO: 1674009 - RNA, 19 nt, Artificial Sequence
  Description of Artificial Sequence: Synthetic oligonucleotide
  Sense strand starting at position 2597 of SEQ ID NO: 1561465
augauccaugccuauguua

SEQ ID NO: 1674010 - RNA, 19 nt, Artificial Sequence
  Description of Artificial Sequence: Synthetic oligonucleotide
  Antisense strand to SEQ ID NO: 1674009
uaacauaggcauggaucau

SEQ ID NO: 1674011 - RNA, 19 nt, Artificial Sequence
  Description of Artificial Sequence: Synthetic oligonucleotide
  Sense strand starting at position 2599 of SEQ ID NO: 1561465
gauccaugccuauguuaag

SEQ ID NO: 1674012 - RNA, 19 nt, Artificial Sequence
  Description of Artificial Sequence: Synthetic oligonucleotide
  Antisense strand to SEQ ID NO: 1674011
cuuaacauaggcauggauc

SEQ ID NO: 1674013 - RNA, 19 nt, Artificial Sequence
  Description of Artificial Sequence: Synthetic oligonucleotide
  Sense strand starting at position 2608 of SEQ ID NO: 1561465
cuauguuaagcagagucau

SEQ ID NO: 1674014 - RNA, 19 nt, Artificial Sequence
  Description of Artificial Sequence: Synthetic oligonucleotide
  Antisense strand to SEQ ID NO: 1674013
augacucugcuuaacauag

SEQ ID NO: 1674015 - RNA, 19 nt, Artificial Sequence
  Description of Artificial Sequence: Synthetic oligonucleotide
  Sense strand starting at position 2798 of SEQ ID NO: 1561465
gcuuuauagcuguauagac

SEQ ID NO: 1674016 - RNA, 19 nt, Artificial Sequence
  Description of Artificial Sequence: Synthetic oligonucleotide
  Antisense strand to SEQ ID NO: 1674015
gucuauacagcuauaaagc

SEQ ID NO: 1674017 - RNA, 19 nt, Artificial Sequence
  Description of Artificial Sequence: Synthetic oligonucleotide
  Sense strand starting at position 2851 of SEQ ID NO: 1561465
gggauaaucgaguggugga

SEQ ID NO: 1674018 - RNA, 19 nt, Artificial Sequence
  Description of Artificial Sequence: Synthetic oligonucleotide
  Antisense strand to SEQ ID NO: 1674017
uccaccacucgauuauccc

SEQ ID NO: 1674019 - RNA, 19 nt, Artificial Sequence
  Description of Artificial Sequence: Synthetic oligonucleotide
  Sense strand starting at position 2852 of SEQ ID NO: 1561465
ggauaaucgagugguggaa

SEQ ID NO: 1674020 - RNA, 19 nt, Artificial Sequence
  Description of Artificial Sequence: Synthetic oligonucleotide
  Antisense strand to SEQ ID NO: 1674019
uuccaccacucgauuaucc

SEQ ID NO: 1674021 - RNA, 19 nt, Artificial Sequence
  Description of Artificial Sequence: Synthetic oligonucleotide
  Sense strand starting at position 3029 of SEQ ID NO: 1561465
gguuccaugugauccacau

SEQ ID NO: 1674022 - RNA, 19 nt, Artificial Sequence
  Description of Artificial Sequence: Synthetic oligonucleotide
  Antisense strand to SEQ ID NO: 1674021
auguggaucacauggaacc

SEQ ID NO: 1674023 - RNA, 19 nt, Artificial Sequence
  Description of Artificial Sequence: Synthetic oligonucleotide
  Sense strand starting at position 3033 of SEQ ID NO: 1561465
ccaugugauccacaucauu

SEQ ID NO: 1674024 - RNA, 19 nt, Artificial Sequence
  Description of Artificial Sequence: Synthetic oligonucleotide
  Antisense strand to SEQ ID NO: 1674023
aaugauguggaucacaugg

SEQ ID NO: 1674025 - RNA, 19 nt, Artificial Sequence
  Description of Artificial Sequence: Synthetic oligonucleotide
  Sense strand starting at position 3044 of SEQ ID NO: 1561465
acaucauucccagagcugu

SEQ ID NO: 1674026 - RNA, 19 nt, Artificial Sequence
  Description of Artificial Sequence: Synthetic oligonucleotide
  Antisense strand to SEQ ID NO: 1674025
acagcucugggaaugaugu

SEQ ID NO: 1674027 - RNA, 19 nt, Artificial Sequence
  Description of Artificial Sequence: Synthetic oligonucleotide
  Sense strand starting at position 3099 of SEQ ID NO: 1561465
cccaguccuggauaucagu

SEQ ID NO: 1674028 - RNA, 19 nt, Artificial Sequence
  Description of Artificial Sequence: Synthetic oligonucleotide
  Antisense strand to SEQ ID NO: 1674027
acugauauccaggacuggg

SEQ ID NO: 1674029 - RNA, 19 nt, Artificial Sequence
  Description of Artificial Sequence: Synthetic oligonucleotide
  Sense strand starting at position 3105 of SEQ ID NO: 1561465
ccuggauaucagugacccu

SEQ ID NO: 1674030 - RNA, 19 nt, Artificial Sequence
  Description of Artificial Sequence: Synthetic oligonucleotide
  Antisense strand to SEQ ID NO: 1674029
agggucacugauauccagg

SEQ ID NO: 1674031 - RNA, 19 nt, Artificial Sequence
  Description of Artificial Sequence: Synthetic oligonucleotide
  Sense strand starting at position 3124 of SEQ ID NO: 1561465
ggccuuucccuugaauacu

SEQ ID NO: 1674032 - RNA, 19 nt, Artificial Sequence
  Description of Artificial Sequence: Synthetic oligonucleotide
  Antisense strand to SEQ ID NO: 1674031
aguauucaagggaaaggcc

SEQ ID NO: 1674033 - RNA, 19 nt, Artificial Sequence
  Description of Artificial Sequence: Synthetic oligonucleotide
  Sense strand starting at position 3177 of SEQ ID NO: 1561465
cuuccaucugaguauguuu

SEQ ID NO: 1674034 - RNA, 19 nt, Artificial Sequence
  Description of Artificial Sequence: Synthetic oligonucleotide
  Antisense strand to SEQ ID NO: 1674033
aaacauacucagauggaag

SEQ ID NO: 1674035 - RNA, 19 nt, Artificial Sequence
  Description of Artificial Sequence: Synthetic oligonucleotide
  Sense strand starting at position 3190 of SEQ ID NO: 1561465
auguuuaugguagaugaug

SEQ ID NO: 1674036 - RNA, 19 nt, Artificial Sequence
  Description of Artificial Sequence: Synthetic oligonucleotide
  Antisense strand to SEQ ID NO: 1674035
caucaucuaccauaaacau

SEQ ID NO: 1674037 - RNA, 19 nt, Artificial Sequence
  Description of Artificial Sequence: Synthetic oligonucleotide
  Sense strand starting at position 3212 of SEQ ID NO: 1561465
gcucgugugguggcaauaa

SEQ ID NO: 1674038 - RNA, 19 nt, Artificial Sequence
  Description of Artificial Sequence: Synthetic oligonucleotide
  Antisense strand to SEQ ID NO: 1674037
uuauugccaccacacgagc

SEQ ID NO: 1674039 - RNA, 19 nt, Artificial Sequence
  Description of Artificial Sequence: Synthetic oligonucleotide
  Sense strand starting at position 3243 of SEQ ID NO: 1561465
uagccaaucuggguuccaa

SEQ ID NO: 1674040 - RNA, 19 nt, Artificial Sequence
  Description of Artificial Sequence: Synthetic oligonucleotide
  Antisense strand to SEQ ID NO: 1674039
uuggaacccagauuggcua

SEQ ID NO: 1674041 - RNA, 19 nt, Artificial Sequence
  Description of Artificial Sequence: Synthetic oligonucleotide
  Sense strand starting at position 3258 of SEQ ID NO: 1561465
ccaagaaaggucugauguc

SEQ ID NO: 1674042 - RNA, 19 nt, Artificial Sequence
  Description of Artificial Sequence: Synthetic oligonucleotide
  Antisense strand to SEQ ID NO: 1674041
gacaucagaccuuucuugg

SEQ ID NO: 1674043 - RNA, 19 nt, Artificial Sequence
  Description of Artificial Sequence: Synthetic oligonucleotide
  Sense strand starting at position 3304 of SEQ ID NO: 1561465
ccuugagguucucuaagag

SEQ ID NO: 1674044 - RNA, 19 nt, Artificial Sequence
  Description of Artificial Sequence: Synthetic oligonucleotide
  Antisense strand to SEQ ID NO: 1674043
cucuuagagaaccucaagg

SEQ ID NO: 1674045 - RNA, 19 nt, Artificial Sequence
  Description of Artificial Sequence: Synthetic oligonucleotide
  Sense strand starting at position 3314 of SEQ ID NO: 1561465
cucuaagagcccugaggaa

SEQ ID NO: 1674046 - RNA, 19 nt, Artificial Sequence
  Description of Artificial Sequence: Synthetic oligonucleotide
  Antisense strand to SEQ ID NO: 1674045
uuccucagggcucuuagag

SEQ ID NO: 1674047 - RNA, 19 nt, Artificial Sequence
  Description of Artificial Sequence: Synthetic oligonucleotide
  Sense strand starting at position 3335 of SEQ ID NO: 1561465
ggaaccauugcugagcaua

SEQ ID NO: 1674048 - RNA, 19 nt, Artificial Sequence
  Description of Artificial Sequence: Synthetic oligonucleotide
  Antisense strand to SEQ ID NO: 1674047
uaugcucagcaaugguucc

SEQ ID NO: 1674049 - RNA, 19 nt, Artificial Sequence
  Description of Artificial Sequence: Synthetic oligonucleotide
  Sense strand starting at position 3453 of SEQ ID NO: 1561465
cuagucagugguuagguua

SEQ ID NO: 1674050 - RNA, 19 nt, Artificial Sequence
  Description of Artificial Sequence: Synthetic oligonucleotide
  Antisense strand to SEQ ID NO: 1674049
uaaccuaaccacugacuag

SEQ ID NO: 1674051 - RNA, 19 nt, Artificial Sequence
  Description of Artificial Sequence: Synthetic oligonucleotide
  Sense strand starting at position 3492 of SEQ ID NO: 1561465
aggugcuuugaccaauaga

SEQ ID NO: 1674052 - RNA, 19 nt, Artificial Sequence
  Description of Artificial Sequence: Synthetic oligonucleotide
  Antisense strand to SEQ ID NO: 1674051
ucuauuggucaaagcaccu

SEQ ID NO: 1674053 - RNA, 19 nt, Artificial Sequence
  Description of Artificial Sequence: Synthetic oligonucleotide
  Sense strand starting at position 3876 of SEQ ID NO: 1561465
ugaaacagguguuuaacuu

SEQ ID NO: 1674054 - RNA, 19 nt, Artificial Sequence
  Description of Artificial Sequence: Synthetic oligonucleotide
  Antisense strand to SEQ ID NO: 1674053
aaguuaaacaccuguuuca

SEQ ID NO: 1674055 - RNA, 19 nt, Artificial Sequence
  Description of Artificial Sequence: Synthetic oligonucleotide
  Sense strand starting at position 3877 of SEQ ID NO: 1561465
gaaacagguguuuaacuuu

SEQ ID NO: 1674056 - RNA, 19 nt, Artificial Sequence
  Description of Artificial Sequence: Synthetic oligonucleotide
  Antisense strand to SEQ ID NO: 1674055
aaaguuaaacaccuguuuc

SEQ ID NO: 1674057 - RNA, 19 nt, Artificial Sequence
  Description of Artificial Sequence: Synthetic oligonucleotide
  Sense strand starting at position 3880 of SEQ ID NO: 1561465
acagguguuuaacuuucua

SEQ ID NO: 1674058 - RNA, 19 nt, Artificial Sequence
  Description of Artificial Sequence: Synthetic oligonucleotide
  Antisense strand to SEQ ID NO: 1674057
uagaaaguuaaacaccugu

SEQ ID NO: 1674059 - RNA, 19 nt, Artificial Sequence
  Description of Artificial Sequence: Synthetic oligonucleotide
  Sense strand starting at position 3952 of SEQ ID NO: 1561465
agugauuucucugauacag

SEQ ID NO: 1674060 - RNA, 19 nt, Artificial Sequence
  Description of Artificial Sequence: Synthetic oligonucleotide
  Antisense strand to SEQ ID NO: 1674059
cuguaucagagaaaucacu

SEQ ID NO: 1674061 - RNA, 19 nt, Artificial Sequence
  Description of Artificial Sequence: Synthetic oligonucleotide
  Sense strand starting at position 3954 of SEQ ID NO: 1561465
ugauuucucugauacagua

SEQ ID NO: 1674062 - RNA, 19 nt, Artificial Sequence
  Description of Artificial Sequence: Synthetic oligonucleotide
  Antisense strand to SEQ ID NO: 1674061
uacuguaucagagaaauca

SEQ ID NO: 1674063 - RNA, 19 nt, Artificial Sequence
  Description of Artificial Sequence: Synthetic oligonucleotide
  Sense strand starting at position 3962 of SEQ ID NO: 1561465
cugauacaguaucuugaaa

SEQ ID NO: 1674064 - RNA, 19 nt, Artificial Sequence
  Description of Artificial Sequence: Synthetic oligonucleotide
  Antisense strand to SEQ ID NO: 1674063
uuucaagauacuguaucag

SEQ ID NO: 1674065 - RNA, 19 nt, Artificial Sequence
  Description of Artificial Sequence: Synthetic oligonucleotide
  Sense strand starting at position 273 of SEQ ID NO: 1561466
ggaggcccuucuccauaaa

SEQ ID NO: 1674066 - RNA, 19 nt, Artificial Sequence
  Description of Artificial Sequence: Synthetic oligonucleotide
  Antisense strand to SEQ ID NO: 1674065
uuuauggagaagggccucc

SEQ ID NO: 1674067 - RNA, 19 nt, Artificial Sequence
  Description of Artificial Sequence: Synthetic oligonucleotide
  Sense strand starting at position 336 of SEQ ID NO: 1561466
uggcacuguacuugguuaa

SEQ ID NO: 1674068 - RNA, 19 nt, Artificial Sequence
  Description of Artificial Sequence: Synthetic oligonucleotide
  Antisense strand to SEQ ID NO: 1674067
uuaaccaaguacagugcca

SEQ ID NO: 1674069 - RNA, 19 nt, Artificial Sequence
  Description of Artificial Sequence: Synthetic oligonucleotide
  Sense strand starting at position 337 of SEQ ID NO: 1561466
ggcacuguacuugguuaau

SEQ ID NO: 1674070 - RNA, 19 nt, Artificial Sequence
  Description of Artificial Sequence: Synthetic oligonucleotide
  Antisense strand to SEQ ID NO: 1674069
auuaaccaaguacagugcc

SEQ ID NO: 1674071 - RNA, 19 nt, Artificial Sequence
  Description of Artificial Sequence: Synthetic oligonucleotide
  Sense strand starting at position 360 of SEQ ID NO: 1561466
ccaguuuccuucucuugga

SEQ ID NO: 1674072 - RNA, 19 nt, Artificial Sequence
  Description of Artificial Sequence: Synthetic oligonucleotide
  Antisense strand to SEQ ID NO: 1674071
uccaagagaaggaaacugg

SEQ ID NO: 1674073 - RNA, 19 nt, Artificial Sequence
  Description of Artificial Sequence: Synthetic oligonucleotide
  Sense strand starting at position 415 of SEQ ID NO: 1561466
auaauucccugugauguag

SEQ ID NO: 1674074 - RNA, 19 nt, Artificial Sequence
  Description of Artificial Sequence: Synthetic oligonucleotide
  Antisense strand to SEQ ID NO: 1674073
cuacaucacagggaauuau

SEQ ID NO: 1674075 - RNA, 19 nt, Artificial Sequence
  Description of Artificial Sequence: Synthetic oligonucleotide
  Sense strand starting at position 417 of SEQ ID NO: 1561466
aauucccugugauguagau

SEQ ID NO: 1674076 - RNA, 19 nt, Artificial Sequence
  Description of Artificial Sequence: Synthetic oligonucleotide
  Antisense strand to SEQ ID NO: 1674075
aucuacaucacagggaauu

SEQ ID NO: 1674077 - RNA, 19 nt, Artificial Sequence
  Description of Artificial Sequence: Synthetic oligonucleotide
  Sense strand starting at position 462 of SEQ ID NO: 1561466
ugagguagguccuauuaua

SEQ ID NO: 1674078 - RNA, 19 nt, Artificial Sequence
  Description of Artificial Sequence: Synthetic oligonucleotide
  Antisense strand to SEQ ID NO: 1674077
uauaauaggaccuaccuca

SEQ ID NO: 1674079 - RNA, 19 nt, Artificial Sequence
  Description of Artificial Sequence: Synthetic oligonucleotide
  Sense strand starting at position 523 of SEQ ID NO: 1561466
cuugcucaguguuacacau

SEQ ID NO: 1674080 - RNA, 19 nt, Artificial Sequence
  Description of Artificial Sequence: Synthetic oligonucleotide
  Antisense strand to SEQ ID NO: 1674079
auguguaacacugagcaag

SEQ ID NO: 1674081 - RNA, 19 nt, Artificial Sequence
  Description of Artificial Sequence: Synthetic oligonucleotide
  Sense strand starting at position 613 of SEQ ID NO: 1561466
ccaucuaaaguauacgauu

SEQ ID NO: 1674082 - RNA, 19 nt, Artificial Sequence
  Description of Artificial Sequence: Synthetic oligonucleotide
  Antisense strand to SEQ ID NO: 1674081
aaucguauacuuuagaugg

SEQ ID NO: 1674083 - RNA, 19 nt, Artificial Sequence
  Description of Artificial Sequence: Synthetic oligonucleotide
  Sense strand starting at position 755 of SEQ ID NO: 1561466
gauguaugccuauguguuu

SEQ ID NO: 1674084 - RNA, 19 nt, Artificial Sequence
  Description of Artificial Sequence: Synthetic oligonucleotide
  Antisense strand to SEQ ID NO: 1674083
aaacacauaggcauacauc

SEQ ID NO: 1674085 - RNA, 19 nt, Artificial Sequence
  Description of Artificial Sequence: Synthetic oligonucleotide
  Sense strand starting at position 1128 of SEQ ID NO: 1561466
ucauguaauuaguaaaguc

SEQ ID NO: 1674086 - RNA, 19 nt, Artificial Sequence
  Description of Artificial Sequence: Synthetic oligonucleotide
  Antisense strand to SEQ ID NO: 1674085
gacuuuacuaauuacauga

SEQ ID NO: 1674087 - RNA, 19 nt, Artificial Sequence
  Description of Artificial Sequence: Synthetic oligonucleotide
  Sense strand starting at position 1136 of SEQ ID NO: 1561466
uuaguaaagucacuuccuu

SEQ ID NO: 1674088 - RNA, 19 nt, Artificial Sequence
  Description of Artificial Sequence: Synthetic oligonucleotide
  Antisense strand to SEQ ID NO: 1674087
aaggaagugacuuuacuaa

SEQ ID NO: 1674089 - RNA, 19 nt, Artificial Sequence
  Description of Artificial Sequence: Synthetic oligonucleotide
  Sense strand starting at position 1168 of SEQ ID NO: 1561466
uuugaugaccacuguaaau

SEQ ID NO: 1674090 - RNA, 19 nt, Artificial Sequence
  Description of Artificial Sequence: Synthetic oligonucleotide
  Antisense strand to SEQ ID NO: 1674089
auuuacaguggucaucaaa

SEQ ID NO: 1674091 - RNA, 19 nt, Artificial Sequence
  Description of Artificial Sequence: Synthetic oligonucleotide
  Sense strand starting at position 1266 of SEQ ID NO: 1561466
uucuaauuguuaucacugu

SEQ ID NO: 1674092 - RNA, 19 nt, Artificial Sequence
  Description of Artificial Sequence: Synthetic oligonucleotide
  Antisense strand to SEQ ID NO: 1674091
acagugauaacaauuagaa

SEQ ID NO: 1674093 - RNA, 19 nt, Artificial Sequence
  Description of Artificial Sequence: Synthetic oligonucleotide
  Sense strand starting at position 1387 of SEQ ID NO: 1561466
agaacaggaucuuauagag

SEQ ID NO: 1674094 - RNA, 19 nt, Artificial Sequence
  Description of Artificial Sequence: Synthetic oligonucleotide
  Antisense strand to SEQ ID NO: 1674093
cucuauaagauccuguucu

SEQ ID NO: 1674095 - RNA, 19 nt, Artificial Sequence
  Description of Artificial Sequence: Synthetic oligonucleotide
  Sense strand starting at position 1395 of SEQ ID NO: 1561466
aucuuauagagcuguugag

SEQ ID NO: 1674096 - RNA, 19 nt, Artificial Sequence
  Description of Artificial Sequence: Synthetic oligonucleotide
  Antisense strand to SEQ ID NO: 1674095
cucaacagcucuauaagau

SEQ ID NO: 1674097 - RNA, 19 nt, Artificial Sequence
  Description of Artificial Sequence: Synthetic oligonucleotide
  Sense strand starting at position 1399 of SEQ ID NO: 1561466
uauagagcuguugagugua

SEQ ID NO: 1674098 - RNA, 19 nt, Artificial Sequence
  Description of Artificial Sequence: Synthetic oligonucleotide
  Antisense strand to SEQ ID NO: 1674097
uacacucaacagcucuaua

SEQ ID NO: 1674099 - RNA, 19 nt, Artificial Sequence
  Description of Artificial Sequence: Synthetic oligonucleotide
  Sense strand starting at position 1401 of SEQ ID NO: 1561466
uagagcuguugaguguaaa

SEQ ID NO: 1674100 - RNA, 19 nt, Artificial Sequence
  Description of Artificial Sequence: Synthetic oligonucleotide
  Antisense strand to SEQ ID NO: 1674099
uuuacacucaacagcucua

SEQ ID NO: 1674101 - RNA, 19 nt, Artificial Sequence
  Description of Artificial Sequence: Synthetic oligonucleotide
  Sense strand starting at position 1591 of SEQ ID NO: 1561466
gaaccaaaguggugagaga

SEQ ID NO: 1674102 - RNA, 19 nt, Artificial Sequence
  Description of Artificial Sequence: Synthetic oligonucleotide
  Antisense strand to SEQ ID NO: 1674101
ucucucaccacuuugguuc

SEQ ID NO: 1674103 - RNA, 19 nt, Artificial Sequence
  Description of Artificial Sequence: Synthetic oligonucleotide
  Sense strand starting at position 1602 of SEQ ID NO: 1561466
gugagagaauucuuggcaa

SEQ ID NO: 1674104 - RNA, 19 nt, Artificial Sequence
  Description of Artificial Sequence: Synthetic oligonucleotide
  Antisense strand to SEQ ID NO: 1674103
uugccaagaauucucucac

SEQ ID NO: 1674105 - RNA, 19 nt, Artificial Sequence
  Description of Artificial Sequence: Synthetic oligonucleotide
  Sense strand starting at position 1658 of SEQ ID NO: 1561466
gacugagguggcuaauucu

SEQ ID NO: 1674106 - RNA, 19 nt, Artificial Sequence
  Description of Artificial Sequence: Synthetic oligonucleotide
  Antisense strand to SEQ ID NO: 1674105
agaauuagccaccucaguc

SEQ ID NO: 1674107 - RNA, 19 nt, Artificial Sequence
  Description of Artificial Sequence: Synthetic oligonucleotide
  Sense strand starting at position 1665 of SEQ ID NO: 1561466
guggcuaauucucaccuua

SEQ ID NO: 1674108 - RNA, 19 nt, Artificial Sequence
  Description of Artificial Sequence: Synthetic oligonucleotide
  Antisense strand to SEQ ID NO: 1674107
uaaggugagaauuagccac

SEQ ID NO: 1674109 - RNA, 19 nt, Artificial Sequence
  Description of Artificial Sequence: Synthetic oligonucleotide
  Sense strand starting at position 1723 of SEQ ID NO: 1561466
ugucuuggguccuaucaaa

SEQ ID NO: 1674110 - RNA, 19 nt, Artificial Sequence
  Description of Artificial Sequence: Synthetic oligonucleotide
  Antisense strand to SEQ ID NO: 1674109
uuugauaggacccaagaca

SEQ ID NO: 1674111 - RNA, 19 nt, Artificial Sequence
  Description of Artificial Sequence: Synthetic oligonucleotide
  Sense strand starting at position 1824 of SEQ ID NO: 1561466
agaggcuaugcccaugaga

SEQ ID NO: 1674112 - RNA, 19 nt, Artificial Sequence
  Description of Artificial Sequence: Synthetic oligonucleotide
  Antisense strand to SEQ ID NO: 1674111
ucucaugggcauagccucu

SEQ ID NO: 1674113 - RNA, 19 nt, Artificial Sequence
  Description of Artificial Sequence: Synthetic oligonucleotide
  Sense strand starting at position 1826 of SEQ ID NO: 1561466
aggcuaugcccaugagaag

SEQ ID NO: 1674114 - RNA, 19 nt, Artificial Sequence
  Description of Artificial Sequence: Synthetic oligonucleotide
  Antisense strand to SEQ ID NO: 1674113
cuucucaugggcauagccu

SEQ ID NO: 1674115 - RNA, 19 nt, Artificial Sequence
  Description of Artificial Sequence: Synthetic oligonucleotide
  Sense strand starting at position 1845 of SEQ ID NO: 1561466
ggaaguguaucuggagguu

SEQ ID NO: 1674116 - RNA, 19 nt, Artificial Sequence
  Description of Artificial Sequence: Synthetic oligonucleotide
  Antisense strand to SEQ ID NO: 1674115
aaccuccagauacacuucc

SEQ ID NO: 1674117 - RNA, 19 nt, Artificial Sequence
  Description of Artificial Sequence: Synthetic oligonucleotide
  Sense strand starting at position 1868 of SEQ ID NO: 1561466
gcagcagguucucuuggaa

SEQ ID NO: 1674118 - RNA, 19 nt, Artificial Sequence
  Description of Artificial Sequence: Synthetic oligonucleotide
  Antisense strand to SEQ ID NO: 1674117
uuccaagagaaccugcugc

SEQ ID NO: 1674119 - RNA, 19 nt, Artificial Sequence
  Description of Artificial Sequence: Synthetic oligonucleotide
  Sense strand starting at position 1871 of SEQ ID NO: 1561466
gcagguucucuuggaaggu

SEQ ID NO: 1674120 - RNA, 19 nt, Artificial Sequence
  Description of Artificial Sequence: Synthetic oligonucleotide
  Antisense strand to SEQ ID NO: 1674119
accuuccaagagaaccugc

SEQ ID NO: 1674121 - RNA, 19 nt, Artificial Sequence
  Description of Artificial Sequence: Synthetic oligonucleotide
  Sense strand starting at position 1872 of SEQ ID NO: 1561466
cagguucucuuggaaggua

SEQ ID NO: 1674122 - RNA, 19 nt, Artificial Sequence
  Description of Artificial Sequence: Synthetic oligonucleotide
  Antisense strand to SEQ ID NO: 1674121
uaccuuccaagagaaccug

SEQ ID NO: 1674123 - RNA, 19 nt, Artificial Sequence
  Description of Artificial Sequence: Synthetic oligonucleotide
  Sense strand starting at position 1875 of SEQ ID NO: 1561466
guucucuuggaagguaaga

SEQ ID NO: 1674124 - RNA, 19 nt, Artificial Sequence
  Description of Artificial Sequence: Synthetic oligonucleotide
  Antisense strand to SEQ ID NO: 1674123
ucuuaccuuccaagagaac

SEQ ID NO: 1674125 - RNA, 19 nt, Artificial Sequence
  Description of Artificial Sequence: Synthetic oligonucleotide
  Sense strand starting at position 1891 of SEQ ID NO: 1561466
agagaugacuuacacuaaa

SEQ ID NO: 1674126 - RNA, 19 nt, Artificial Sequence
  Description of Artificial Sequence: Synthetic oligonucleotide
  Antisense strand to SEQ ID NO: 1674125
uuuaguguaagucaucucu

SEQ ID NO: 1674127 - RNA, 19 nt, Artificial Sequence
  Description of Artificial Sequence: Synthetic oligonucleotide
  Sense strand starting at position 2080 of SEQ ID NO: 1561466
ucaggcuuccagcagaaga

SEQ ID NO: 1674128 - RNA, 19 nt, Artificial Sequence
  Description of Artificial Sequence: Synthetic oligonucleotide
  Antisense strand to SEQ ID NO: 1674127
ucuucugcuggaagccuga

SEQ ID NO: 1674129 - RNA, 19 nt, Artificial Sequence
  Description of Artificial Sequence: Synthetic oligonucleotide
  Sense strand starting at position 2182 of SEQ ID NO: 1561466
gagaguggcaguuaugaga

SEQ ID NO: 1674130 - RNA, 19 nt, Artificial Sequence
  Description of Artificial Sequence: Synthetic oligonucleotide
  Antisense strand to SEQ ID NO: 1674129
ucucauaacugccacucuc

SEQ ID NO: 1674131 - RNA, 19 nt, Artificial Sequence
  Description of Artificial Sequence: Synthetic oligonucleotide
  Sense strand starting at position 2185 of SEQ ID NO: 1561466
aguggcaguuaugagauaa

SEQ ID NO: 1674132 - RNA, 19 nt, Artificial Sequence
  Description of Artificial Sequence: Synthetic oligonucleotide
  Antisense strand to SEQ ID NO: 1674131
uuaucucauaacugccacu

SEQ ID NO: 1674133 - RNA, 19 nt, Artificial Sequence
  Description of Artificial Sequence: Synthetic oligonucleotide
  Sense strand starting at position 2189 of SEQ ID NO: 1561466
gcaguuaugagauaaaguu

SEQ ID NO: 1674134 - RNA, 19 nt, Artificial Sequence
  Description of Artificial Sequence: Synthetic oligonucleotide
  Antisense strand to SEQ ID NO: 1674133
aacuuuaucucauaacugc

SEQ ID NO: 1674135 - RNA, 19 nt, Artificial Sequence
  Description of Artificial Sequence: Synthetic oligonucleotide
  Sense strand starting at position 2246 of SEQ ID NO: 1561466
gcauaucagucaucaguca

SEQ ID NO: 1674136 - RNA, 19 nt, Artificial Sequence
  Description of Artificial Sequence: Synthetic oligonucleotide
  Antisense strand to SEQ ID NO: 1674135
ugacugaugacugauaugc

SEQ ID NO: 1674137 - RNA, 19 nt, Artificial Sequence
  Description of Artificial Sequence: Synthetic oligonucleotide
  Sense strand starting at position 2481 of SEQ ID NO: 1561466
ucaccaugcuggucaaacu

SEQ ID NO: 1674138 - RNA, 19 nt, Artificial Sequence
  Description of Artificial Sequence: Synthetic oligonucleotide
  Antisense strand to SEQ ID NO: 1674137
aguuugaccagcaugguga

SEQ ID NO: 1674139 - RNA, 19 nt, Artificial Sequence
  Description of Artificial Sequence: Synthetic oligonucleotide
  Sense strand starting at position 2959 of SEQ ID NO: 1561466
gucuaauuaccagagucaa

SEQ ID NO: 1674140 - RNA, 19 nt, Artificial Sequence
  Description of Artificial Sequence: Synthetic oligonucleotide
  Antisense strand to SEQ ID NO: 1674139
uugacucugguaauuagac

SEQ ID NO: 1674141 - RNA, 19 nt, Artificial Sequence
  Description of Artificial Sequence: Synthetic oligonucleotide
  Sense strand starting at position 2972 of SEQ ID NO: 1561466
agucaaauucuacaggcau

SEQ ID NO: 1674142 - RNA, 19 nt, Artificial Sequence
  Description of Artificial Sequence: Synthetic oligonucleotide
  Antisense strand to SEQ ID NO: 1674141
augccuguagaauuugacu

SEQ ID NO: 1674143 - RNA, 19 nt, Artificial Sequence
  Description of Artificial Sequence: Synthetic oligonucleotide
  Sense strand starting at position 3493 of SEQ ID NO: 1561466
agacgaaauuccugccacu

SEQ ID NO: 1674144 - RNA, 19 nt, Artificial Sequence
  Description of Artificial Sequence: Synthetic oligonucleotide
  Antisense strand to SEQ ID NO: 1674143
aguggcaggaauuucgucu

SEQ ID NO: 1674145 - RNA, 19 nt, Artificial Sequence
  Description of Artificial Sequence: Synthetic oligonucleotide
  Sense strand starting at position 15 of SEQ ID NO: 1561467
cuggauacgaacuguauau

SEQ ID NO: 1674146 - RNA, 19 nt, Artificial Sequence
  Description of Artificial Sequence: Synthetic oligonucleotide
  Antisense strand to SEQ ID NO: 1674145
auauacaguucguauccag

SEQ ID NO: 1674147 - RNA, 19 nt, Artificial Sequence
  Description of Artificial Sequence: Synthetic oligonucleotide
  Sense strand starting at position 470 of SEQ ID NO: 1561467
aagucuuaagguugaguuu

SEQ ID NO: 1674148 - RNA, 19 nt, Artificial Sequence
  Description of Artificial Sequence: Synthetic oligonucleotide
  Antisense strand to SEQ ID NO: 1674147
aaacucaaccuuaagacuu

SEQ ID NO: 1674149 - RNA, 19 nt, Artificial Sequence
  Description of Artificial Sequence: Synthetic oligonucleotide
  Sense strand starting at position 609 of SEQ ID NO: 1561467
auguuuaaggcguaauaga

SEQ ID NO: 1674150 - RNA, 19 nt, Artificial Sequence
  Description of Artificial Sequence: Synthetic oligonucleotide
  Antisense strand to SEQ ID NO: 1674149
ucuauuacgccuuaaacau

SEQ ID NO: 1674151 - RNA, 19 nt, Artificial Sequence
  Description of Artificial Sequence: Synthetic oligonucleotide
  Sense strand starting at position 866 of SEQ ID NO: 1561467
gauaaagagguauguuucu

SEQ ID NO: 1674152 - RNA, 19 nt, Artificial Sequence
  Description of Artificial Sequence: Synthetic oligonucleotide
  Antisense strand to SEQ ID NO: 1674151
agaaacauaccucuuuauc

SEQ ID NO: 1674153 - RNA, 19 nt, Artificial Sequence
  Description of Artificial Sequence: Synthetic oligonucleotide
  Sense strand starting at position 872 of SEQ ID NO: 1561467
gagguauguuucuuaaggu

SEQ ID NO: 1674154 - RNA, 19 nt, Artificial Sequence
  Description of Artificial Sequence: Synthetic oligonucleotide
  Antisense strand to SEQ ID NO: 1674153
accuuaagaaacauaccuc

SEQ ID NO: 1674155 - RNA, 19 nt, Artificial Sequence
  Description of Artificial Sequence: Synthetic oligonucleotide
  Sense strand starting at position 878 of SEQ ID NO: 1561467
uguuucuuaaggugguaga

SEQ ID NO: 1674156 - RNA, 19 nt, Artificial Sequence
  Description of Artificial Sequence: Synthetic oligonucleotide
  Antisense strand to SEQ ID NO: 1674155
ucuaccaccuuaagaaaca

SEQ ID NO: 1674157 - RNA, 19 nt, Artificial Sequence
  Description of Artificial Sequence: Synthetic oligonucleotide
  Sense strand starting at position 955 of SEQ ID NO: 1561467
gagguaacuuugcucucca

SEQ ID NO: 1674158 - RNA, 19 nt, Artificial Sequence
  Description of Artificial Sequence: Synthetic oligonucleotide
  Antisense strand to SEQ ID NO: 1674157
uggagagcaaaguuaccuc

SEQ ID NO: 1674159 - RNA, 19 nt, Artificial Sequence
  Description of Artificial Sequence: Synthetic oligonucleotide
  Sense strand starting at position 956 of SEQ ID NO: 1561467
agguaacuuugcucuccaa

SEQ ID NO: 1674160 - RNA, 19 nt, Artificial Sequence
  Description of Artificial Sequence: Synthetic oligonucleotide
  Antisense strand to SEQ ID NO: 1674159
uuggagagcaaaguuaccu

SEQ ID NO: 1674161 - RNA, 19 nt, Artificial Sequence
  Description of Artificial Sequence: Synthetic oligonucleotide
  Sense strand starting at position 969 of SEQ ID NO: 1561467
cuccaacugugggcauaau

SEQ ID NO: 1674162 - RNA, 19 nt, Artificial Sequence
  Description of Artificial Sequence: Synthetic oligonucleotide
  Antisense strand to SEQ ID NO: 1674161
auuaugcccacaguuggag

SEQ ID NO: 1674163 - RNA, 19 nt, Artificial Sequence
  Description of Artificial Sequence: Synthetic oligonucleotide
  Sense strand starting at position 970 of SEQ ID NO: 1561467
uccaacugugggcauaauu

SEQ ID NO: 1674164 - RNA, 19 nt, Artificial Sequence
  Description of Artificial Sequence: Synthetic oligonucleotide
  Antisense strand to SEQ ID NO: 1674163
aauuaugcccacaguugga

SEQ ID NO: 1674165 - RNA, 19 nt, Artificial Sequence
  Description of Artificial Sequence: Synthetic oligonucleotide
  Sense strand starting at position 1212 of SEQ ID NO: 1561467
agaguaaggacuugcuguu

SEQ ID NO: 1674166 - RNA, 19 nt, Artificial Sequence
  Description of Artificial Sequence: Synthetic oligonucleotide
  Antisense strand to SEQ ID NO: 1674165
aacagcaaguccuuacucu

SEQ ID NO: 1674167 - RNA, 19 nt, Artificial Sequence
  Description of Artificial Sequence: Synthetic oligonucleotide
  Sense strand starting at position 1271 of SEQ ID NO: 1561467
uuaucauggcaauagcuaa

SEQ ID NO: 1674168 - RNA, 19 nt, Artificial Sequence
  Description of Artificial Sequence: Synthetic oligonucleotide
  Antisense strand to SEQ ID NO: 1674167
uuagcuauugccaugauaa

SEQ ID NO: 1674169 - RNA, 19 nt, Artificial Sequence
  Description of Artificial Sequence: Synthetic oligonucleotide
  Sense strand starting at position 1278 of SEQ ID NO: 1561467
ggcaauagcuaacuaacau

SEQ ID NO: 1674170 - RNA, 19 nt, Artificial Sequence
  Description of Artificial Sequence: Synthetic oligonucleotide
  Antisense strand to SEQ ID NO: 1674169
auguuaguuagcuauugcc

SEQ ID NO: 1674171 - RNA, 19 nt, Artificial Sequence
  Description of Artificial Sequence: Synthetic oligonucleotide
  Sense strand starting at position 1646 of SEQ ID NO: 1561467
cagauuauucgugccguca

SEQ ID NO: 1674172 - RNA, 19 nt, Artificial Sequence
  Description of Artificial Sequence: Synthetic oligonucleotide
  Antisense strand to SEQ ID NO: 1674171
ugacggcacgaauaaucug

SEQ ID NO: 1674173 - RNA, 19 nt, Artificial Sequence
  Description of Artificial Sequence: Synthetic oligonucleotide
  Sense strand starting at position 1647 of SEQ ID NO: 1561467
agauuauucgugccgucac

SEQ ID NO: 1674174 - RNA, 19 nt, Artificial Sequence
  Description of Artificial Sequence: Synthetic oligonucleotide
  Antisense strand to SEQ ID NO: 1674173
gugacggcacgaauaaucu

SEQ ID NO: 1674175 - RNA, 19 nt, Artificial Sequence
  Description of Artificial Sequence: Synthetic oligonucleotide
  Sense strand starting at position 1650 of SEQ ID NO: 1561467
uuauucgugccgucacacu

SEQ ID NO: 1674176 - RNA, 19 nt, Artificial Sequence
  Description of Artificial Sequence: Synthetic oligonucleotide
  Antisense strand to SEQ ID NO: 1674175
agugugacggcacgaauaa

SEQ ID NO: 1674177 - RNA, 19 nt, Artificial Sequence
  Description of Artificial Sequence: Synthetic oligonucleotide
  Sense strand starting at position 2147 of SEQ ID NO: 1561467
gauguugagaguugaggga

SEQ ID NO: 1674178 - RNA, 19 nt, Artificial Sequence
  Description of Artificial Sequence: Synthetic oligonucleotide
  Antisense strand to SEQ ID NO: 1674177
ucccucaacucucaacauc

SEQ ID NO: 1674179 - RNA, 19 nt, Artificial Sequence
  Description of Artificial Sequence: Synthetic oligonucleotide
  Sense strand starting at position 2749 of SEQ ID NO: 1561467
uugugaaauugucugggag

SEQ ID NO: 1674180 - RNA, 19 nt, Artificial Sequence
  Description of Artificial Sequence: Synthetic oligonucleotide
  Antisense strand to SEQ ID NO: 1674179
cucccagacaauuucacaa

SEQ ID NO: 1674181 - RNA, 19 nt, Artificial Sequence
  Description of Artificial Sequence: Synthetic oligonucleotide
  Sense strand starting at position 2750 of SEQ ID NO: 1561467
ugugaaauugucugggaga

SEQ ID NO: 1674182 - RNA, 19 nt, Artificial Sequence
  Description of Artificial Sequence: Synthetic oligonucleotide
  Antisense strand to SEQ ID NO: 1674181
ucucccagacaauuucaca

SEQ ID NO: 1674183 - RNA, 19 nt, Artificial Sequence
  Description of Artificial Sequence: Synthetic oligonucleotide
  Sense strand starting at position 2826 of SEQ ID NO: 1561467
cuguguguucccgugguga

SEQ ID NO: 1674184 - RNA, 19 nt, Artificial Sequence
  Description of Artificial Sequence: Synthetic oligonucleotide
  Antisense strand to SEQ ID NO: 1674183
ucaccacgggaacacacag

SEQ ID NO: 1674185 - RNA, 19 nt, Artificial Sequence
  Description of Artificial Sequence: Synthetic oligonucleotide
  Sense strand starting at position 2903 of SEQ ID NO: 1561467
guguuuccuauggugugua

SEQ ID NO: 1674186 - RNA, 19 nt, Artificial Sequence
  Description of Artificial Sequence: Synthetic oligonucleotide
  Antisense strand to SEQ ID NO: 1674185
uacacaccauaggaaacac

SEQ ID NO: 1674187 - RNA, 19 nt, Artificial Sequence
  Description of Artificial Sequence: Synthetic oligonucleotide
  Sense strand starting at position 2971 of SEQ ID NO: 1561467
cgugcaugucgccuuaagu

SEQ ID NO: 1674188 - RNA, 19 nt, Artificial Sequence
  Description of Artificial Sequence: Synthetic oligonucleotide
  Antisense strand to SEQ ID NO: 1674187
acuuaaggcgacaugcacg

SEQ ID NO: 1674189 - RNA, 19 nt, Artificial Sequence
  Description of Artificial Sequence: Synthetic oligonucleotide
  Sense strand starting at position 2986 of SEQ ID NO: 1561467
aagugugacugucccuaaa

SEQ ID NO: 1674190 - RNA, 19 nt, Artificial Sequence
  Description of Artificial Sequence: Synthetic oligonucleotide
  Antisense strand to SEQ ID NO: 1674189
uuuagggacagucacacuu

SEQ ID NO: 1674191 - RNA, 19 nt, Artificial Sequence
  Description of Artificial Sequence: Synthetic oligonucleotide
  Sense strand starting at position 2988 of SEQ ID NO: 1561467
gugugacugucccuaaaug

SEQ ID NO: 1674192 - RNA, 19 nt, Artificial Sequence
  Description of Artificial Sequence: Synthetic oligonucleotide
  Antisense strand to SEQ ID NO: 1674191
cauuuagggacagucacac

SEQ ID NO: 1674193 - RNA, 19 nt, Artificial Sequence
  Description of Artificial Sequence: Synthetic oligonucleotide
  Sense strand starting at position 2989 of SEQ ID NO: 1561467
ugugacugucccuaaaugu

SEQ ID NO: 1674194 - RNA, 19 nt, Artificial Sequence
  Description of Artificial Sequence: Synthetic oligonucleotide
  Antisense strand to SEQ ID NO: 1674193
acauuuagggacagucaca

SEQ ID NO: 1674195 - RNA, 19 nt, Artificial Sequence
  Description of Artificial Sequence: Synthetic oligonucleotide
  Sense strand starting at position 3047 of SEQ ID NO: 1561467
augcgauugugacuccaga

SEQ ID NO: 1674196 - RNA, 19 nt, Artificial Sequence
  Description of Artificial Sequence: Synthetic oligonucleotide
  Antisense strand to SEQ ID NO: 1674195
ucuggagucacaaucgcau

SEQ ID NO: 1674197 - RNA, 19 nt, Artificial Sequence
  Description of Artificial Sequence: Synthetic oligonucleotide
  Sense strand starting at position 3076 of SEQ ID NO: 1561467
uaggaaaccucucugaggu

SEQ ID NO: 1674198 - RNA, 19 nt, Artificial Sequence
  Description of Artificial Sequence: Synthetic oligonucleotide
  Antisense strand to SEQ ID NO: 1674197
accucagagagguuuccua

SEQ ID NO: 1674199 - RNA, 19 nt, Artificial Sequence
  Description of Artificial Sequence: Synthetic oligonucleotide
  Sense strand starting at position 3232 of SEQ ID NO: 1561467
uugacuaaucuggguacca

SEQ ID NO: 1674200 - RNA, 19 nt, Artificial Sequence
  Description of Artificial Sequence: Synthetic oligonucleotide
  Antisense strand to SEQ ID NO: 1674199
ugguacccagauuagucaa

SEQ ID NO: 1674201 - RNA, 19 nt, Artificial Sequence
  Description of Artificial Sequence: Synthetic oligonucleotide
  Sense strand starting at position 3233 of SEQ ID NO: 1561467
ugacuaaucuggguaccaa

SEQ ID NO: 1674202 - RNA, 19 nt, Artificial Sequence
  Description of Artificial Sequence: Synthetic oligonucleotide
  Antisense strand to SEQ ID NO: 1674201
uugguacccagauuaguca

SEQ ID NO: 1674203 - RNA, 19 nt, Artificial Sequence
  Description of Artificial Sequence: Synthetic oligonucleotide
  Sense strand starting at position 3403 of SEQ ID NO: 1561467
ugcuuaaaggaaugucauu

SEQ ID NO: 1674204 - RNA, 19 nt, Artificial Sequence
  Description of Artificial Sequence: Synthetic oligonucleotide
  Antisense strand to SEQ ID NO: 1674203
aaugacauuccuuuaagca

SEQ ID NO: 1674205 - RNA, 19 nt, Artificial Sequence
  Description of Artificial Sequence: Synthetic oligonucleotide
  Sense strand starting at position 3587 of SEQ ID NO: 1561467
cucagauaacuaggguuaa

SEQ ID NO: 1674206 - RNA, 19 nt, Artificial Sequence
  Description of Artificial Sequence: Synthetic oligonucleotide
  Antisense strand to SEQ ID NO: 1674205
uuaacccuaguuaucugag

SEQ ID NO: 1674207 - RNA, 19 nt, Artificial Sequence
  Description of Artificial Sequence: Synthetic oligonucleotide
  Sense strand starting at position 3714 of SEQ ID NO: 1561467
ucaaauggucuugggaaau

SEQ ID NO: 1674208 - RNA, 19 nt, Artificial Sequence
  Description of Artificial Sequence: Synthetic oligonucleotide
  Antisense strand to SEQ ID NO: 1674207
auuucccaagaccauuuga

SEQ ID NO: 1674209 - RNA, 19 nt, Artificial Sequence
  Description of Artificial Sequence: Synthetic oligonucleotide
  Sense strand starting at position 3842 of SEQ ID NO: 1561467
gaauuuggguuuccgugau

SEQ ID NO: 1674210 - RNA, 19 nt, Artificial Sequence
  Description of Artificial Sequence: Synthetic oligonucleotide
  Antisense strand to SEQ ID NO: 1674209
aucacggaaacccaaauuc

SEQ ID NO: 1674211 - RNA, 19 nt, Artificial Sequence
  Description of Artificial Sequence: Synthetic oligonucleotide
  Sense strand starting at position 3846 of SEQ ID NO: 1561467
uuggguuuccgugauuaau

SEQ ID NO: 1674212 - RNA, 19 nt, Artificial Sequence
  Description of Artificial Sequence: Synthetic oligonucleotide
  Antisense strand to SEQ ID NO: 1674211
auuaaucacggaaacccaa

SEQ ID NO: 1674213 - RNA, 19 nt, Artificial Sequence
  Description of Artificial Sequence: Synthetic oligonucleotide
  Sense strand starting at position 3848 of SEQ ID NO: 1561467
ggguuuccgugauuaauaa

SEQ ID NO: 1674214 - RNA, 19 nt, Artificial Sequence
  Description of Artificial Sequence: Synthetic oligonucleotide
  Antisense strand to SEQ ID NO: 1674213
uuauuaaucacggaaaccc

SEQ ID NO: 1674215 - RNA, 19 nt, Artificial Sequence
  Description of Artificial Sequence: Synthetic oligonucleotide
  Sense strand starting at position 3849 of SEQ ID NO: 1561467
gguuuccgugauuaauaau

SEQ ID NO: 1674216 - RNA, 19 nt, Artificial Sequence
  Description of Artificial Sequence: Synthetic oligonucleotide
  Antisense strand to SEQ ID NO: 1674215
auuauuaaucacggaaacc

SEQ ID NO: 1674217 - RNA, 19 nt, Artificial Sequence
  Description of Artificial Sequence: Synthetic oligonucleotide
  Sense strand starting at position 3963 of SEQ ID NO: 1561467
uauugauucguaugaguua

SEQ ID NO: 1674218 - RNA, 19 nt, Artificial Sequence
  Description of Artificial Sequence: Synthetic oligonucleotide
  Antisense strand to SEQ ID NO: 1674217
uaacucauacgaaucaaua

SEQ ID NO: 1674219 - RNA, 19 nt, Artificial Sequence
  Description of Artificial Sequence: Synthetic oligonucleotide
  Sense strand starting at position 3966 of SEQ ID NO: 1561467
ugauucguaugaguuauuu

SEQ ID NO: 1674220 - RNA, 19 nt, Artificial Sequence
  Description of Artificial Sequence: Synthetic oligonucleotide
  Antisense strand to SEQ ID NO: 1674219
aaauaacucauacgaauca

SEQ ID NO: 1674221 - RNA, 19 nt, Artificial Sequence
  Description of Artificial Sequence: Synthetic oligonucleotide
  Sense strand starting at position 3970 of SEQ ID NO: 1561467
ucguaugaguuauuuaugu

SEQ ID NO: 1674222 - RNA, 19 nt, Artificial Sequence
  Description of Artificial Sequence: Synthetic oligonucleotide
  Antisense strand to SEQ ID NO: 1674221
acauaaauaacucauacga

SEQ ID NO: 1674223 - RNA, 19 nt, Artificial Sequence
  Description of Artificial Sequence: Synthetic oligonucleotide
  Sense strand starting at position 3983 of SEQ ID NO: 1561467
uuauguaaucuggaucuca

SEQ ID NO: 1674224 - RNA, 19 nt, Artificial Sequence
  Description of Artificial Sequence: Synthetic oligonucleotide
  Antisense strand to SEQ ID NO: 1674223
ugagauccagauuacauaa

SEQ ID NO: 1674225 - RNA, 19 nt, Artificial Sequence
  Description of Artificial Sequence: Synthetic oligonucleotide
  Sense strand starting at position 159 of SEQ ID NO: 1561468
ccaugagguuaacaaagau

SEQ ID NO: 1674226 - RNA, 19 nt, Artificial Sequence
  Description of Artificial Sequence: Synthetic oligonucleotide
  Antisense strand to SEQ ID NO: 1674225
aucuuuguuaaccucaugg

SEQ ID NO: 1674227 - RNA, 19 nt, Artificial Sequence
  Description of Artificial Sequence: Synthetic oligonucleotide
  Sense strand starting at position 200 of SEQ ID NO: 1561468
uguuaucaacaguguauga

SEQ ID NO: 1674228 - RNA, 19 nt, Artificial Sequence
  Description of Artificial Sequence: Synthetic oligonucleotide
  Antisense strand to SEQ ID NO: 1674227
ucauacacuguugauaaca

SEQ ID NO: 1674229 - RNA, 19 nt, Artificial Sequence
  Description of Artificial Sequence: Synthetic oligonucleotide
  Sense strand starting at position 216 of SEQ ID NO: 1561468
ugaggauauaagcagucuu

SEQ ID NO: 1674230 - RNA, 19 nt, Artificial Sequence
  Description of Artificial Sequence: Synthetic oligonucleotide
  Antisense strand to SEQ ID NO: 1674229
aagacugcuuauauccuca

SEQ ID NO: 1674231 - RNA, 19 nt, Artificial Sequence
  Description of Artificial Sequence: Synthetic oligonucleotide
  Sense strand starting at position 261 of SEQ ID NO: 1561468
auuggaacuuuacagaaua

SEQ ID NO: 1674232 - RNA, 19 nt, Artificial Sequence
  Description of Artificial Sequence: Synthetic oligonucleotide
  Antisense strand to SEQ ID NO: 1674231
uauucuguaaaguuccaau

SEQ ID NO: 1674233 - RNA, 19 nt, Artificial Sequence
  Description of Artificial Sequence: Synthetic oligonucleotide
  Sense strand starting at position 272 of SEQ ID NO: 1561468
acagaauaauuggauaggu

SEQ ID NO: 1674234 - RNA, 19 nt, Artificial Sequence
  Description of Artificial Sequence: Synthetic oligonucleotide
  Antisense strand to SEQ ID NO: 1674233
accuauccaauuauucugu

SEQ ID NO: 1674235 - RNA, 19 nt, Artificial Sequence
  Description of Artificial Sequence: Synthetic oligonucleotide
  Sense strand starting at position 391 of SEQ ID NO: 1561468
gugccaaauaguugcugau

SEQ ID NO: 1674236 - RNA, 19 nt, Artificial Sequence
  Description of Artificial Sequence: Synthetic oligonucleotide
  Antisense strand to SEQ ID NO: 1674235
aucagcaacuauuuggcac

SEQ ID NO: 1674237 - RNA, 19 nt, Artificial Sequence
  Description of Artificial Sequence: Synthetic oligonucleotide
  Sense strand starting at position 393 of SEQ ID NO: 1561468
gccaaauaguugcugauaa

SEQ ID NO: 1674238 - RNA, 19 nt, Artificial Sequence
  Description of Artificial Sequence: Synthetic oligonucleotide
  Antisense strand to SEQ ID NO: 1674237
uuaucagcaacuauuuggc

SEQ ID NO: 1674239 - RNA, 19 nt, Artificial Sequence
  Description of Artificial Sequence: Synthetic oligonucleotide
  Sense strand starting at position 521 of SEQ ID NO: 1561468
auggaaagauacuaaucau

SEQ ID NO: 1674240 - RNA, 19 nt, Artificial Sequence
  Description of Artificial Sequence: Synthetic oligonucleotide
  Antisense strand to SEQ ID NO: 1674239
augauuaguaucuuuccau

SEQ ID NO: 1674241 - RNA, 19 nt, Artificial Sequence
  Description of Artificial Sequence: Synthetic oligonucleotide
  Sense strand starting at position 550 of SEQ ID NO: 1561468
acaagaaagguugguuaca

SEQ ID NO: 1674242 - RNA, 19 nt, Artificial Sequence
  Description of Artificial Sequence: Synthetic oligonucleotide
  Antisense strand to SEQ ID NO: 1674241
uguaaccaaccuuucuugu

SEQ ID NO: 1674243 - RNA, 19 nt, Artificial Sequence
  Description of Artificial Sequence: Synthetic oligonucleotide
  Sense strand starting at position 561 of SEQ ID NO: 1561468
ugguuacagagcuguaugu

SEQ ID NO: 1674244 - RNA, 19 nt, Artificial Sequence
  Description of Artificial Sequence: Synthetic oligonucleotide
  Antisense strand to SEQ ID NO: 1674243
acauacagcucuguaacca

SEQ ID NO: 1674245 - RNA, 19 nt, Artificial Sequence
  Description of Artificial Sequence: Synthetic oligonucleotide
  Sense strand starting at position 563 of SEQ ID NO: 1561468
guuacagagcuguauguau

SEQ ID NO: 1674246 - RNA, 19 nt, Artificial Sequence
  Description of Artificial Sequence: Synthetic oligonucleotide
  Antisense strand to SEQ ID NO: 1674245
auacauacagcucuguaac

SEQ ID NO: 1674247 - RNA, 19 nt, Artificial Sequence
  Description of Artificial Sequence: Synthetic oligonucleotide
  Sense strand starting at position 577 of SEQ ID NO: 1561468
uguauaguguuacugcaau

SEQ ID NO: 1674248 - RNA, 19 nt, Artificial Sequence
  Description of Artificial Sequence: Synthetic oligonucleotide
  Antisense strand to SEQ ID NO: 1674247
auugcaguaacacuauaca

SEQ ID NO: 1674249 - RNA, 19 nt, Artificial Sequence
  Description of Artificial Sequence: Synthetic oligonucleotide
  Sense strand starting at position 627 of SEQ ID NO: 1561468
augaauguauacguaugua

SEQ ID NO: 1674250 - RNA, 19 nt, Artificial Sequence
  Description of Artificial Sequence: Synthetic oligonucleotide
  Antisense strand to SEQ ID NO: 1674249
uacauacguauacauucau

SEQ ID NO: 1674251 - RNA, 19 nt, Artificial Sequence
  Description of Artificial Sequence: Synthetic oligonucleotide
  Sense strand starting at position 630 of SEQ ID NO: 1561468
aauguauacguauguauac

SEQ ID NO: 1674252 - RNA, 19 nt, Artificial Sequence
  Description of Artificial Sequence: Synthetic oligonucleotide
  Antisense strand to SEQ ID NO: 1674251
guauacauacguauacauu

SEQ ID NO: 1674253 - RNA, 19 nt, Artificial Sequence
  Description of Artificial Sequence: Synthetic oligonucleotide
  Sense strand starting at position 691 of SEQ ID NO: 1561468
aguugcauggccuguagaa

SEQ ID NO: 1674254 - RNA, 19 nt, Artificial Sequence
  Description of Artificial Sequence: Synthetic oligonucleotide
  Antisense strand to SEQ ID NO: 1674253
uucuacaggccaugcaacu

SEQ ID NO: 1674255 - RNA, 19 nt, Artificial Sequence
  Description of Artificial Sequence: Synthetic oligonucleotide
  Sense strand starting at position 693 of SEQ ID NO: 1561468
uugcauggccuguagaacu

SEQ ID NO: 1674256 - RNA, 19 nt, Artificial Sequence
  Description of Artificial Sequence: Synthetic oligonucleotide
  Antisense strand to SEQ ID NO: 1674255
aguucuacaggccaugcaa

SEQ ID NO: 1674257 - RNA, 19 nt, Artificial Sequence
  Description of Artificial Sequence: Synthetic oligonucleotide
  Sense strand starting at position 701 of SEQ ID NO: 1561468
ccuguagaacuaugaauga

SEQ ID NO: 1674258 - RNA, 19 nt, Artificial Sequence
  Description of Artificial Sequence: Synthetic oligonucleotide
  Antisense strand to SEQ ID NO: 1674257
ucauucauaguucuacagg

SEQ ID NO: 1674259 - RNA, 19 nt, Artificial Sequence
  Description of Artificial Sequence: Synthetic oligonucleotide
  Sense strand starting at position 791 of SEQ ID NO: 1561468
ggaggagaaugaguuuagu

SEQ ID NO: 1674260 - RNA, 19 nt, Artificial Sequence
  Description of Artificial Sequence: Synthetic oligonucleotide
  Antisense strand to SEQ ID NO: 1674259
acuaaacucauucuccucc

SEQ ID NO: 1674261 - RNA, 19 nt, Artificial Sequence
  Description of Artificial Sequence: Synthetic oligonucleotide
  Sense strand starting at position 800 of SEQ ID NO: 1561468
ugaguuuaguaaguacaca

SEQ ID NO: 1674262 - RNA, 19 nt, Artificial Sequence
  Description of Artificial Sequence: Synthetic oligonucleotide
  Antisense strand to SEQ ID NO: 1674261
uguguacuuacuaaacuca

SEQ ID NO: 1674263 - RNA, 19 nt, Artificial Sequence
  Description of Artificial Sequence: Synthetic oligonucleotide
  Sense strand starting at position 1327 of SEQ ID NO: 1561468
ucaagaucccacugucaug

SEQ ID NO: 1674264 - RNA, 19 nt, Artificial Sequence
  Description of Artificial Sequence: Synthetic oligonucleotide
  Antisense strand to SEQ ID NO: 1674263
caugacagugggaucuuga

SEQ ID NO: 1674265 - RNA, 19 nt, Artificial Sequence
  Description of Artificial Sequence: Synthetic oligonucleotide
  Sense strand starting at position 1545 of SEQ ID NO: 1561468
ggcguccuccuccaaagau

SEQ ID NO: 1674266 - RNA, 19 nt, Artificial Sequence
  Description of Artificial Sequence: Synthetic oligonucleotide
  Antisense strand to SEQ ID NO: 1674265
aucuuuggaggaggacgcc

SEQ ID NO: 1674267 - RNA, 19 nt, Artificial Sequence
  Description of Artificial Sequence: Synthetic oligonucleotide
  Sense strand starting at position 1626 of SEQ ID NO: 1561468
agcgguuucccgaggacuc

SEQ ID NO: 1674268 - RNA, 19 nt, Artificial Sequence
  Description of Artificial Sequence: Synthetic oligonucleotide
  Antisense strand to SEQ ID NO: 1674267
gaguccucgggaaaccgcu

SEQ ID NO: 1674269 - RNA, 19 nt, Artificial Sequence
  Description of Artificial Sequence: Synthetic oligonucleotide
  Sense strand starting at position 1839 of SEQ ID NO: 1561468
cacuguuugcgcguccuga

SEQ ID NO: 1674270 - RNA, 19 nt, Artificial Sequence
  Description of Artificial Sequence: Synthetic oligonucleotide
  Antisense strand to SEQ ID NO: 1674269
ucaggacgcgcaaacagug

SEQ ID NO: 1674271 - RNA, 19 nt, Artificial Sequence
  Description of Artificial Sequence: Synthetic oligonucleotide
  Sense strand starting at position 1841 of SEQ ID NO: 1561468
cuguuugcgcguccugaga

SEQ ID NO: 1674272 - RNA, 19 nt, Artificial Sequence
  Description of Artificial Sequence: Synthetic oligonucleotide
  Antisense strand to SEQ ID NO: 1674271
ucucaggacgcgcaaacag

SEQ ID NO: 1674273 - RNA, 19 nt, Artificial Sequence
  Description of Artificial Sequence: Synthetic oligonucleotide
  Sense strand starting at position 1899 of SEQ ID NO: 1561468
gggagcucagccuagguuu

SEQ ID NO: 1674274 - RNA, 19 nt, Artificial Sequence
  Description of Artificial Sequence: Synthetic oligonucleotide
  Antisense strand to SEQ ID NO: 1674273
aaaccuaggcugagcuccc

SEQ ID NO: 1674275 - RNA, 19 nt, Artificial Sequence
  Description of Artificial Sequence: Synthetic oligonucleotide
  Sense strand starting at position 2068 of SEQ ID NO: 1561468
ggcacuuccuucuuacagu

SEQ ID NO: 1674276 - RNA, 19 nt, Artificial Sequence
  Description of Artificial Sequence: Synthetic oligonucleotide
  Antisense strand to SEQ ID NO: 1674275
acuguaagaaggaagugcc

SEQ ID NO: 1674277 - RNA, 19 nt, Artificial Sequence
  Description of Artificial Sequence: Synthetic oligonucleotide
  Sense strand starting at position 2127 of SEQ ID NO: 1561468
cggcucaguguguuuaguu

SEQ ID NO: 1674278 - RNA, 19 nt, Artificial Sequence
  Description of Artificial Sequence: Synthetic oligonucleotide
  Antisense strand to SEQ ID NO: 1674277
aacuaaacacacugagccg

SEQ ID NO: 1674279 - RNA, 19 nt, Artificial Sequence
  Description of Artificial Sequence: Synthetic oligonucleotide
  Sense strand starting at position 2279 of SEQ ID NO: 1561468
gugugacuguaugugugaa

SEQ ID NO: 1674280 - RNA, 19 nt, Artificial Sequence
  Description of Artificial Sequence: Synthetic oligonucleotide
  Antisense strand to SEQ ID NO: 1674279
uucacacauacagucacac

SEQ ID NO: 1674281 - RNA, 19 nt, Artificial Sequence
  Description of Artificial Sequence: Synthetic oligonucleotide
  Sense strand starting at position 2280 of SEQ ID NO: 1561468
ugugacuguaugugugaaa

SEQ ID NO: 1674282 - RNA, 19 nt, Artificial Sequence
  Description of Artificial Sequence: Synthetic oligonucleotide
  Antisense strand to SEQ ID NO: 1674281
uuucacacauacagucaca

SEQ ID NO: 1674283 - RNA, 19 nt, Artificial Sequence
  Description of Artificial Sequence: Synthetic oligonucleotide
  Sense strand starting at position 2294 of SEQ ID NO: 1561468
ugaaacuucggccauggaa

SEQ ID NO: 1674284 - RNA, 19 nt, Artificial Sequence
  Description of Artificial Sequence: Synthetic oligonucleotide
  Antisense strand to SEQ ID NO: 1674283
uuccauggccgaaguuuca

SEQ ID NO: 1674285 - RNA, 19 nt, Artificial Sequence
  Description of Artificial Sequence: Synthetic oligonucleotide
  Sense strand starting at position 2296 of SEQ ID NO: 1561468
aaacuucggccauggaauu

SEQ ID NO: 1674286 - RNA, 19 nt, Artificial Sequence
  Description of Artificial Sequence: Synthetic oligonucleotide
  Antisense strand to SEQ ID NO: 1674285
aauuccauggccgaaguuu

SEQ ID NO: 1674287 - RNA, 19 nt, Artificial Sequence
  Description of Artificial Sequence: Synthetic oligonucleotide
  Sense strand starting at position 2477 of SEQ ID NO: 1561468
ggacuucucgauugugagu

SEQ ID NO: 1674288 - RNA, 19 nt, Artificial Sequence
  Description of Artificial Sequence: Synthetic oligonucleotide
  Antisense strand to SEQ ID NO: 1674287
acucacaaucgagaagucc

SEQ ID NO: 1674289 - RNA, 19 nt, Artificial Sequence
  Description of Artificial Sequence: Synthetic oligonucleotide
  Sense strand starting at position 2483 of SEQ ID NO: 1561468
cucgauugugagugugaca

SEQ ID NO: 1674290 - RNA, 19 nt, Artificial Sequence
  Description of Artificial Sequence: Synthetic oligonucleotide
  Antisense strand to SEQ ID NO: 1674289
ugucacacucacaaucgag

SEQ ID NO: 1674291 - RNA, 19 nt, Artificial Sequence
  Description of Artificial Sequence: Synthetic oligonucleotide
  Sense strand starting at position 2496 of SEQ ID NO: 1561468
gugacaguguuauuggauu

SEQ ID NO: 1674292 - RNA, 19 nt, Artificial Sequence
  Description of Artificial Sequence: Synthetic oligonucleotide
  Antisense strand to SEQ ID NO: 1674291
aauccaauaacacugucac

SEQ ID NO: 1674293 - RNA, 19 nt, Artificial Sequence
  Description of Artificial Sequence: Synthetic oligonucleotide
  Sense strand starting at position 2579 of SEQ ID NO: 1561468
gccuuacuagcugugucau

SEQ ID NO: 1674294 - RNA, 19 nt, Artificial Sequence
  Description of Artificial Sequence: Synthetic oligonucleotide
  Antisense strand to SEQ ID NO: 1674293
augacacagcuaguaaggc

SEQ ID NO: 1674295 - RNA, 19 nt, Artificial Sequence
  Description of Artificial Sequence: Synthetic oligonucleotide
  Sense strand starting at position 2585 of SEQ ID NO: 1561468
cuagcugugucaucucaga

SEQ ID NO: 1674296 - RNA, 19 nt, Artificial Sequence
  Description of Artificial Sequence: Synthetic oligonucleotide
  Antisense strand to SEQ ID NO: 1674295
ucugagaugacacagcuag

SEQ ID NO: 1674297 - RNA, 19 nt, Artificial Sequence
  Description of Artificial Sequence: Synthetic oligonucleotide
  Sense strand starting at position 2948 of SEQ ID NO: 1561468
cggucuuaauaccuuuaau

SEQ ID NO: 1674298 - RNA, 19 nt, Artificial Sequence
  Description of Artificial Sequence: Synthetic oligonucleotide
  Antisense strand to SEQ ID NO: 1674297
auuaaagguauuaagaccg

SEQ ID NO: 1674299 - RNA, 19 nt, Artificial Sequence
  Description of Artificial Sequence: Synthetic oligonucleotide
  Sense strand starting at position 3462 of SEQ ID NO: 1561468
ucggguauccagcacaauu

SEQ ID NO: 1674300 - RNA, 19 nt, Artificial Sequence
  Description of Artificial Sequence: Synthetic oligonucleotide
  Antisense strand to SEQ ID NO: 1674299
aauugugcuggauacccga

SEQ ID NO: 1674301 - RNA, 19 nt, Artificial Sequence
  Description of Artificial Sequence: Synthetic oligonucleotide
  Sense strand starting at position 3472 of SEQ ID NO: 1561468
agcacaauucuaggaauuc

SEQ ID NO: 1674302 - RNA, 19 nt, Artificial Sequence
  Description of Artificial Sequence: Synthetic oligonucleotide
  Antisense strand to SEQ ID NO: 1674301
gaauuccuagaauugugcu

SEQ ID NO: 1674303 - RNA, 19 nt, Artificial Sequence
  Description of Artificial Sequence: Synthetic oligonucleotide
  Sense strand starting at position 3524 of SEQ ID NO: 1561468
gcgcguucccacgcacaaa

SEQ ID NO: 1674304 - RNA, 19 nt, Artificial Sequence
  Description of Artificial Sequence: Synthetic oligonucleotide
  Antisense strand to SEQ ID NO: 1674303
uuugugcgugggaacgcgc

SEQ ID NO: 1674305 - RNA, 19 nt, Artificial Sequence
  Description of Artificial Sequence: Synthetic oligonucleotide
  Sense strand starting at position 2 of SEQ ID NO: 1561469
caucccguagagugagaau

SEQ ID NO: 1674306 - RNA, 19 nt, Artificial Sequence
  Description of Artificial Sequence: Synthetic oligonucleotide
  Antisense strand to SEQ ID NO: 1674305
auucucacucuacgggaug

SEQ ID NO: 1674307 - RNA, 19 nt, Artificial Sequence
  Description of Artificial Sequence: Synthetic oligonucleotide
  Sense strand starting at position 13 of SEQ ID NO: 1561469
gugagaaugcagcagaauc

SEQ ID NO: 1674308 - RNA, 19 nt, Artificial Sequence
  Description of Artificial Sequence: Synthetic oligonucleotide
  Antisense strand to SEQ ID NO: 1674307
gauucugcugcauucucac

SEQ ID NO: 1674309 - RNA, 19 nt, Artificial Sequence
  Description of Artificial Sequence: Synthetic oligonucleotide
  Sense strand starting at position 21 of SEQ ID NO: 1561469
gcagcagaaucagugcuuu

SEQ ID NO: 1674310 - RNA, 19 nt, Artificial Sequence
  Description of Artificial Sequence: Synthetic oligonucleotide
  Antisense strand to SEQ ID NO: 1674309
aaagcacugauucugcugc

SEQ ID NO: 1674311 - RNA, 19 nt, Artificial Sequence
  Description of Artificial Sequence: Synthetic oligonucleotide
  Sense strand starting at position 72 of SEQ ID NO: 1561469
caaggcagucuuuaugacu

SEQ ID NO: 1674312 - RNA, 19 nt, Artificial Sequence
  Description of Artificial Sequence: Synthetic oligonucleotide
  Antisense strand to SEQ ID NO: 1674311
agucauaaagacugccuug

SEQ ID NO: 1674313 - RNA, 19 nt, Artificial Sequence
  Description of Artificial Sequence: Synthetic oligonucleotide
  Sense strand starting at position 75 of SEQ ID NO: 1561469
ggcagucuuuaugacuuua

SEQ ID NO: 1674314 - RNA, 19 nt, Artificial Sequence
  Description of Artificial Sequence: Synthetic oligonucleotide
  Antisense strand to SEQ ID NO: 1674313
uaaagucauaaagacugcc

SEQ ID NO: 1674315 - RNA, 19 nt, Artificial Sequence
  Description of Artificial Sequence: Synthetic oligonucleotide
  Sense strand starting at position 85 of SEQ ID NO: 1561469
augacuuuacauggccaga

SEQ ID NO: 1674316 - RNA, 19 nt, Artificial Sequence
  Description of Artificial Sequence: Synthetic oligonucleotide
  Antisense strand to SEQ ID NO: 1674315
ucuggccauguaaagucau

SEQ ID NO: 1674317 - RNA, 19 nt, Artificial Sequence
  Description of Artificial Sequence: Synthetic oligonucleotide
  Sense strand starting at position 144 of SEQ ID NO: 1561469
aagcaauacuccuggugac

SEQ ID NO: 1674318 - RNA, 19 nt, Artificial Sequence
  Description of Artificial Sequence: Synthetic oligonucleotide
  Antisense strand to SEQ ID NO: 1674317
gucaccaggaguauugcuu

SEQ ID NO: 1674319 - RNA, 19 nt, Artificial Sequence
  Description of Artificial Sequence: Synthetic oligonucleotide
  Sense strand starting at position 145 of SEQ ID NO: 1561469
agcaauacuccuggugaca

SEQ ID NO: 1674320 - RNA, 19 nt, Artificial Sequence
  Description of Artificial Sequence: Synthetic oligonucleotide
  Antisense strand to SEQ ID NO: 1674319
ugucaccaggaguauugcu

SEQ ID NO: 1674321 - RNA, 19 nt, Artificial Sequence
  Description of Artificial Sequence: Synthetic oligonucleotide
  Sense strand starting at position 221 of SEQ ID NO: 1561469
gcauuaaucucaugucuag

SEQ ID NO: 1674322 - RNA, 19 nt, Artificial Sequence
  Description of Artificial Sequence: Synthetic oligonucleotide
  Antisense strand to SEQ ID NO: 1674321
cuagacaugagauuaaugc

SEQ ID NO: 1674323 - RNA, 19 nt, Artificial Sequence
  Description of Artificial Sequence: Synthetic oligonucleotide
  Sense strand starting at position 228 of SEQ ID NO: 1561469
ucucaugucuagcugaacu

SEQ ID NO: 1674324 - RNA, 19 nt, Artificial Sequence
  Description of Artificial Sequence: Synthetic oligonucleotide
  Antisense strand to SEQ ID NO: 1674323
aguucagcuagacaugaga

SEQ ID NO: 1674325 - RNA, 19 nt, Artificial Sequence
  Description of Artificial Sequence: Synthetic oligonucleotide
  Sense strand starting at position 281 of SEQ ID NO: 1561469
ugcaccuuguauggaagaa

SEQ ID NO: 1674326 - RNA, 19 nt, Artificial Sequence
  Description of Artificial Sequence: Synthetic oligonucleotide
  Antisense strand to SEQ ID NO: 1674325
uucuuccauacaaggugca

SEQ ID NO: 1674327 - RNA, 19 nt, Artificial Sequence
  Description of Artificial Sequence: Synthetic oligonucleotide
  Sense strand starting at position 282 of SEQ ID NO: 1561469
gcaccuuguauggaagaau

SEQ ID NO: 1674328 - RNA, 19 nt, Artificial Sequence
  Description of Artificial Sequence: Synthetic oligonucleotide
  Antisense strand to SEQ ID NO: 1674327
auucuuccauacaaggugc

SEQ ID NO: 1674329 - RNA, 19 nt, Artificial Sequence
  Description of Artificial Sequence: Synthetic oligonucleotide
  Sense strand starting at position 313 of SEQ ID NO: 1561469
uugucugauugcuuuggca

SEQ ID NO: 1674330 - RNA, 19 nt, Artificial Sequence
  Description of Artificial Sequence: Synthetic oligonucleotide
  Antisense strand to SEQ ID NO: 1674329
ugccaaagcaaucagacaa

SEQ ID NO: 1674331 - RNA, 19 nt, Artificial Sequence
  Description of Artificial Sequence: Synthetic oligonucleotide
  Sense strand starting at position 315 of SEQ ID NO: 1561469
gucugauugcuuuggcauu

SEQ ID NO: 1674332 - RNA, 19 nt, Artificial Sequence
  Description of Artificial Sequence: Synthetic oligonucleotide
  Antisense strand to SEQ ID NO: 1674331
aaugccaaagcaaucagac

SEQ ID NO: 1674333 - RNA, 19 nt, Artificial Sequence
  Description of Artificial Sequence: Synthetic oligonucleotide
  Sense strand starting at position 368 of SEQ ID NO: 1561469
aucucuagcugcuauaaga

SEQ ID NO: 1674334 - RNA, 19 nt, Artificial Sequence
  Description of Artificial Sequence: Synthetic oligonucleotide
  Antisense strand to SEQ ID NO: 1674333
ucuuauagcagcuagagau

SEQ ID NO: 1674335 - RNA, 19 nt, Artificial Sequence
  Description of Artificial Sequence: Synthetic oligonucleotide
  Sense strand starting at position 375 of SEQ ID NO: 1561469
gcugcuauaagauguggaa

SEQ ID NO: 1674336 - RNA, 19 nt, Artificial Sequence
  Description of Artificial Sequence: Synthetic oligonucleotide
  Antisense strand to SEQ ID NO: 1674335
uuccacaucuuauagcagc

SEQ ID NO: 1674337 - RNA, 19 nt, Artificial Sequence
  Description of Artificial Sequence: Synthetic oligonucleotide
  Sense strand starting at position 377 of SEQ ID NO: 1561469
ugcuauaagauguggaacu

SEQ ID NO: 1674338 - RNA, 19 nt, Artificial Sequence
  Description of Artificial Sequence: Synthetic oligonucleotide
  Antisense strand to SEQ ID NO: 1674337
aguuccacaucuuauagca

SEQ ID NO: 1674339 - RNA, 19 nt, Artificial Sequence
  Description of Artificial Sequence: Synthetic oligonucleotide
  Sense strand starting at position 396 of SEQ ID NO: 1561469
gcgcacacuuucucuacaa

SEQ ID NO: 1674340 - RNA, 19 nt, Artificial Sequence
  Description of Artificial Sequence: Synthetic oligonucleotide
  Antisense strand to SEQ ID NO: 1674339
uuguagagaaagugugcgc

SEQ ID NO: 1674341 - RNA, 19 nt, Artificial Sequence
  Description of Artificial Sequence: Synthetic oligonucleotide
  Sense strand starting at position 409 of SEQ ID NO: 1561469
cuacaauucuggugggaga

SEQ ID NO: 1674342 - RNA, 19 nt, Artificial Sequence
  Description of Artificial Sequence: Synthetic oligonucleotide
  Antisense strand to SEQ ID NO: 1674341
ucucccaccagaauuguag

SEQ ID NO: 1674343 - RNA, 19 nt, Artificial Sequence
  Description of Artificial Sequence: Synthetic oligonucleotide
  Sense strand starting at position 427 of SEQ ID NO: 1561469
acagaauauuccugagaga

SEQ ID NO: 1674344 - RNA, 19 nt, Artificial Sequence
  Description of Artificial Sequence: Synthetic oligonucleotide
  Antisense strand to SEQ ID NO: 1674343
ucucucaggaauauucugu

SEQ ID NO: 1674345 - RNA, 19 nt, Artificial Sequence
  Description of Artificial Sequence: Synthetic oligonucleotide
  Sense strand starting at position 474 of SEQ ID NO: 1561469
ccacgauaaacagguguua

SEQ ID NO: 1674346 - RNA, 19 nt, Artificial Sequence
  Description of Artificial Sequence: Synthetic oligonucleotide
  Antisense strand to SEQ ID NO: 1674345
uaacaccuguuuaucgugg

SEQ ID NO: 1674347 - RNA, 19 nt, Artificial Sequence
  Description of Artificial Sequence: Synthetic oligonucleotide
  Sense strand starting at position 476 of SEQ ID NO: 1561469
acgauaaacagguguuauc

SEQ ID NO: 1674348 - RNA, 19 nt, Artificial Sequence
  Description of Artificial Sequence: Synthetic oligonucleotide
  Antisense strand to SEQ ID NO: 1674347
gauaacaccuguuuaucgu

SEQ ID NO: 1674349 - RNA, 19 nt, Artificial Sequence
  Description of Artificial Sequence: Synthetic oligonucleotide
  Sense strand starting at position 485 of SEQ ID NO: 1561469
agguguuauccugacggac

SEQ ID NO: 1674350 - RNA, 19 nt, Artificial Sequence
  Description of Artificial Sequence: Synthetic oligonucleotide
  Antisense strand to SEQ ID NO: 1674349
guccgucaggauaacaccu

SEQ ID NO: 1674351 - RNA, 19 nt, Artificial Sequence
  Description of Artificial Sequence: Synthetic oligonucleotide
  Sense strand starting at position 487 of SEQ ID NO: 1561469
guguuauccugacggacca

SEQ ID NO: 1674352 - RNA, 19 nt, Artificial Sequence
  Description of Artificial Sequence: Synthetic oligonucleotide
  Antisense strand to SEQ ID NO: 1674351
ugguccgucaggauaacac

SEQ ID NO: 1674353 - RNA, 19 nt, Artificial Sequence
  Description of Artificial Sequence: Synthetic oligonucleotide
  Sense strand starting at position 532 of SEQ ID NO: 1561469
uuccuauugucacuaagga

SEQ ID NO: 1674354 - RNA, 19 nt, Artificial Sequence
  Description of Artificial Sequence: Synthetic oligonucleotide
  Antisense strand to SEQ ID NO: 1674353
uccuuagugacaauaggaa

SEQ ID NO: 1674355 - RNA, 19 nt, Artificial Sequence
  Description of Artificial Sequence: Synthetic oligonucleotide
  Sense strand starting at position 628 of SEQ ID NO: 1561469
agugauacccugcaacaaa

SEQ ID NO: 1674356 - RNA, 19 nt, Artificial Sequence
  Description of Artificial Sequence: Synthetic oligonucleotide
  Antisense strand to SEQ ID NO: 1674355
uuuguugcaggguaucacu

SEQ ID NO: 1674357 - RNA, 19 nt, Artificial Sequence
  Description of Artificial Sequence: Synthetic oligonucleotide
  Sense strand starting at position 827 of SEQ ID NO: 1561469
uguacuuuguacgauacgu

SEQ ID NO: 1674358 - RNA, 19 nt, Artificial Sequence
  Description of Artificial Sequence: Synthetic oligonucleotide
  Antisense strand to SEQ ID NO: 1674357
acguaucguacaaaguaca

SEQ ID NO: 1674359 - RNA, 19 nt, Artificial Sequence
  Description of Artificial Sequence: Synthetic oligonucleotide
  Sense strand starting at position 846 of SEQ ID NO: 1561469
ccuccucgcccuugugaau

SEQ ID NO: 1674360 - RNA, 19 nt, Artificial Sequence
  Description of Artificial Sequence: Synthetic oligonucleotide
  Antisense strand to SEQ ID NO: 1674359
auucacaagggcgaggagg

SEQ ID NO: 1674361 - RNA, 19 nt, Artificial Sequence
  Description of Artificial Sequence: Synthetic oligonucleotide
  Sense strand starting at position 900 of SEQ ID NO: 1561469
uugugaagguacuuuguaa

SEQ ID NO: 1674362 - RNA, 19 nt, Artificial Sequence
  Description of Artificial Sequence: Synthetic oligonucleotide
  Antisense strand to SEQ ID NO: 1674361
uuacaaaguaccuucacaa

SEQ ID NO: 1674363 - RNA, 19 nt, Artificial Sequence
  Description of Artificial Sequence: Synthetic oligonucleotide
  Sense strand starting at position 907 of SEQ ID NO: 1561469
gguacuuuguaauauuccu

SEQ ID NO: 1674364 - RNA, 19 nt, Artificial Sequence
  Description of Artificial Sequence: Synthetic oligonucleotide
  Antisense strand to SEQ ID NO: 1674363
aggaauauuacaaaguacc

SEQ ID NO: 1674365 - RNA, 19 nt, Artificial Sequence
  Description of Artificial Sequence: Synthetic oligonucleotide
  Sense strand starting at position 959 of SEQ ID NO: 1561469
uugugaauguacuuugaaa

SEQ ID NO: 1674366 - RNA, 19 nt, Artificial Sequence
  Description of Artificial Sequence: Synthetic oligonucleotide
  Antisense strand to SEQ ID NO: 1674365
uuucaaaguacauucacaa

SEQ ID NO: 1674367 - RNA, 19 nt, Artificial Sequence
  Description of Artificial Sequence: Synthetic oligonucleotide
  Sense strand starting at position 1408 of SEQ ID NO: 1561469
uuugcugaguccuuucuca

SEQ ID NO: 1674368 - RNA, 19 nt, Artificial Sequence
  Description of Artificial Sequence: Synthetic oligonucleotide
  Antisense strand to SEQ ID NO: 1674367
ugagaaaggacucagcaaa

SEQ ID NO: 1674369 - RNA, 19 nt, Artificial Sequence
  Description of Artificial Sequence: Synthetic oligonucleotide
  Sense strand starting at position 1412 of SEQ ID NO: 1561469
cugaguccuuucucagacu

SEQ ID NO: 1674370 - RNA, 19 nt, Artificial Sequence
  Description of Artificial Sequence: Synthetic oligonucleotide
  Antisense strand to SEQ ID NO: 1674369
agucugagaaaggacucag

SEQ ID NO: 1674371 - RNA, 19 nt, Artificial Sequence
  Description of Artificial Sequence: Synthetic oligonucleotide
  Sense strand starting at position 1459 of SEQ ID NO: 1561469
agccuuguggcucacacua

SEQ ID NO: 1674372 - RNA, 19 nt, Artificial Sequence
  Description of Artificial Sequence: Synthetic oligonucleotide
  Antisense strand to SEQ ID NO: 1674371
uagugugagccacaaggcu

SEQ ID NO: 1674373 - RNA, 19 nt, Artificial Sequence
  Description of Artificial Sequence: Synthetic oligonucleotide
  Sense strand starting at position 2191 of SEQ ID NO: 1561469
agcaccugauuggaagaua

SEQ ID NO: 1674374 - RNA, 19 nt, Artificial Sequence
  Description of Artificial Sequence: Synthetic oligonucleotide
  Antisense strand to SEQ ID NO: 1674373
uaucuuccaaucaggugcu

SEQ ID NO: 1674375 - RNA, 19 nt, Artificial Sequence
  Description of Artificial Sequence: Synthetic oligonucleotide
  Sense strand starting at position 2568 of SEQ ID NO: 1561469
ugcugucaguguccugauu

SEQ ID NO: 1674376 - RNA, 19 nt, Artificial Sequence
  Description of Artificial Sequence: Synthetic oligonucleotide
  Antisense strand to SEQ ID NO: 1674375
aaucaggacacugacagca

SEQ ID NO: 1674377 - RNA, 19 nt, Artificial Sequence
  Description of Artificial Sequence: Synthetic oligonucleotide
  Sense strand starting at position 2971 of SEQ ID NO: 1561469
gacaucugagccugcacua

SEQ ID NO: 1674378 - RNA, 19 nt, Artificial Sequence
  Description of Artificial Sequence: Synthetic oligonucleotide
  Antisense strand to SEQ ID NO: 1674377
uagugcaggcucagauguc

SEQ ID NO: 1674379 - RNA, 19 nt, Artificial Sequence
  Description of Artificial Sequence: Synthetic oligonucleotide
  Sense strand starting at position 3399 of SEQ ID NO: 1561469
ggcggacauucuuuagauc

SEQ ID NO: 1674380 - RNA, 19 nt, Artificial Sequence
  Description of Artificial Sequence: Synthetic oligonucleotide
  Antisense strand to SEQ ID NO: 1674379
gaucuaaagaauguccgcc

SEQ ID NO: 1674381 - RNA, 19 nt, Artificial Sequence
  Description of Artificial Sequence: Synthetic oligonucleotide
  Sense strand starting at position 3402 of SEQ ID NO: 1561469
ggacauucuuuagaucaag

SEQ ID NO: 1674382 - RNA, 19 nt, Artificial Sequence
  Description of Artificial Sequence: Synthetic oligonucleotide
  Antisense strand to SEQ ID NO: 1674381
cuugaucuaaagaaugucc

SEQ ID NO: 1674383 - RNA, 19 nt, Artificial Sequence
  Description of Artificial Sequence: Synthetic oligonucleotide
  Sense strand starting at position 789 of SEQ ID NO: 1561470
aaagguuugugcgugggaa

SEQ ID NO: 1674384 - RNA, 19 nt, Artificial Sequence
  Description of Artificial Sequence: Synthetic oligonucleotide
  Antisense strand to SEQ ID NO: 1674383
uucccacgcacaaaccuuu

SEQ ID NO: 1674385 - RNA, 19 nt, Artificial Sequence
  Description of Artificial Sequence: Synthetic oligonucleotide
  Sense strand starting at position 840 of SEQ ID NO: 1561470
ggaggcgaauuccuagaau

SEQ ID NO: 1674386 - RNA, 19 nt, Artificial Sequence
  Description of Artificial Sequence: Synthetic oligonucleotide
  Antisense strand to SEQ ID NO: 1674385
auucuaggaauucgccucc

SEQ ID NO: 1674387 - RNA, 19 nt, Artificial Sequence
  Description of Artificial Sequence: Synthetic oligonucleotide
  Sense strand starting at position 843 of SEQ ID NO: 1561470
ggcgaauuccuagaauugu

SEQ ID NO: 1674388 - RNA, 19 nt, Artificial Sequence
  Description of Artificial Sequence: Synthetic oligonucleotide
  Antisense strand to SEQ ID NO: 1674387
acaauucuaggaauucgcc

SEQ ID NO: 1674389 - RNA, 19 nt, Artificial Sequence
  Description of Artificial Sequence: Synthetic oligonucleotide
  Sense strand starting at position 1539 of SEQ ID NO: 1561470
ccuugauuguggucccagu

SEQ ID NO: 1674390 - RNA, 19 nt, Artificial Sequence
  Description of Artificial Sequence: Synthetic oligonucleotide
  Antisense strand to SEQ ID NO: 1674389
acugggaccacaaucaagg

SEQ ID NO: 1674391 - RNA, 19 nt, Artificial Sequence
  Description of Artificial Sequence: Synthetic oligonucleotide
  Sense strand starting at position 1713 of SEQ ID NO: 1561470
uagagaaguuaaguaccua

SEQ ID NO: 1674392 - RNA, 19 nt, Artificial Sequence
  Description of Artificial Sequence: Synthetic oligonucleotide
  Antisense strand to SEQ ID NO: 1674391
uagguacuuaacuucucua

SEQ ID NO: 1674393 - RNA, 19 nt, Artificial Sequence
  Description of Artificial Sequence: Synthetic oligonucleotide
  Sense strand starting at position 1721 of SEQ ID NO: 1561470
uuaaguaccuagucugaga

SEQ ID NO: 1674394 - RNA, 19 nt, Artificial Sequence
  Description of Artificial Sequence: Synthetic oligonucleotide
  Antisense strand to SEQ ID NO: 1674393
ucucagacuagguacuuaa

SEQ ID NO: 1674395 - RNA, 19 nt, Artificial Sequence
  Description of Artificial Sequence: Synthetic oligonucleotide
  Sense strand starting at position 1753 of SEQ ID NO: 1561470
aaggccaagucuguuuaga

SEQ ID NO: 1674396 - RNA, 19 nt, Artificial Sequence
  Description of Artificial Sequence: Synthetic oligonucleotide
  Antisense strand to SEQ ID NO: 1674395
ucuaaacagacuuggccuu

SEQ ID NO: 1674397 - RNA, 19 nt, Artificial Sequence
  Description of Artificial Sequence: Synthetic oligonucleotide
  Sense strand starting at position 1755 of SEQ ID NO: 1561470
ggccaagucuguuuagaag

SEQ ID NO: 1674398 - RNA, 19 nt, Artificial Sequence
  Description of Artificial Sequence: Synthetic oligonucleotide
  Antisense strand to SEQ ID NO: 1674397
cuucuaaacagacuuggcc

SEQ ID NO: 1674399 - RNA, 19 nt, Artificial Sequence
  Description of Artificial Sequence: Synthetic oligonucleotide
  Sense strand starting at position 2306 of SEQ ID NO: 1561470
gccucugggaaauguaguu

SEQ ID NO: 1674400 - RNA, 19 nt, Artificial Sequence
  Description of Artificial Sequence: Synthetic oligonucleotide
  Antisense strand to SEQ ID NO: 1674399
aacuacauuucccagaggc

SEQ ID NO: 1674401 - RNA, 19 nt, Artificial Sequence
  Description of Artificial Sequence: Synthetic oligonucleotide
  Sense strand starting at position 2350 of SEQ ID NO: 1561470
cgauucuucucagcaccaa

SEQ ID NO: 1674402 - RNA, 19 nt, Artificial Sequence
  Description of Artificial Sequence: Synthetic oligonucleotide
  Antisense strand to SEQ ID NO: 1674401
uuggugcugagaagaaucg

SEQ ID NO: 1674403 - RNA, 19 nt, Artificial Sequence
  Description of Artificial Sequence: Synthetic oligonucleotide
  Sense strand starting at position 2446 of SEQ ID NO: 1561470
agcugugagcccuggaaca

SEQ ID NO: 1674404 - RNA, 19 nt, Artificial Sequence
  Description of Artificial Sequence: Synthetic oligonucleotide
  Antisense strand to SEQ ID NO: 1674403
uguuccagggcucacagcu

SEQ ID NO: 1674405 - RNA, 19 nt, Artificial Sequence
  Description of Artificial Sequence: Synthetic oligonucleotide
  Sense strand starting at position 2636 of SEQ ID NO: 1561470
gccacuuuggcagcguuaa

SEQ ID NO: 1674406 - RNA, 19 nt, Artificial Sequence
  Description of Artificial Sequence: Synthetic oligonucleotide
  Antisense strand to SEQ ID NO: 1674405
uuaacgcugccaaaguggc

SEQ ID NO: 1674407 - RNA, 19 nt, Artificial Sequence
  Description of Artificial Sequence: Synthetic oligonucleotide
  Sense strand starting at position 2638 of SEQ ID NO: 1561470
cacuuuggcagcguuaagu

SEQ ID NO: 1674408 - RNA, 19 nt, Artificial Sequence
  Description of Artificial Sequence: Synthetic oligonucleotide
  Antisense strand to SEQ ID NO: 1674407
acuuaacgcugccaaagug

SEQ ID NO: 1674409 - RNA, 19 nt, Artificial Sequence
  Description of Artificial Sequence: Synthetic oligonucleotide
  Sense strand starting at position 2686 of SEQ ID NO: 1561470
gguggugaguccucgggaa

SEQ ID NO: 1674410 - RNA, 19 nt, Artificial Sequence
  Description of Artificial Sequence: Synthetic oligonucleotide
  Antisense strand to SEQ ID NO: 1674409
uucccgaggacucaccacc

SEQ ID NO: 1674411 - RNA, 19 nt, Artificial Sequence
  Description of Artificial Sequence: Synthetic oligonucleotide
  Sense strand starting at position 2687 of SEQ ID NO: 1561470
guggugaguccucgggaaa

SEQ ID NO: 1674412 - RNA, 19 nt, Artificial Sequence
  Description of Artificial Sequence: Synthetic oligonucleotide
  Antisense strand to SEQ ID NO: 1674411
uuucccgaggacucaccac

SEQ ID NO: 1674413 - RNA, 19 nt, Artificial Sequence
  Description of Artificial Sequence: Synthetic oligonucleotide
  Sense strand starting at position 2840 of SEQ ID NO: 1561470
cgugugaaggacugugaga

SEQ ID NO: 1674414 - RNA, 19 nt, Artificial Sequence
  Description of Artificial Sequence: Synthetic oligonucleotide
  Antisense strand to SEQ ID NO: 1674413
ucucacaguccuucacacg

SEQ ID NO: 1674415 - RNA, 19 nt, Artificial Sequence
  Description of Artificial Sequence: Synthetic oligonucleotide
  Sense strand starting at position 2842 of SEQ ID NO: 1561470
ugugaaggacugugagagu

SEQ ID NO: 1674416 - RNA, 19 nt, Artificial Sequence
  Description of Artificial Sequence: Synthetic oligonucleotide
  Antisense strand to SEQ ID NO: 1674415
acucucacaguccuucaca

SEQ ID NO: 1674417 - RNA, 19 nt, Artificial Sequence
  Description of Artificial Sequence: Synthetic oligonucleotide
  Sense strand starting at position 2855 of SEQ ID NO: 1561470
gagagucuggcgugaagug

SEQ ID NO: 1674418 - RNA, 19 nt, Artificial Sequence
  Description of Artificial Sequence: Synthetic oligonucleotide
  Antisense strand to SEQ ID NO: 1674417
cacuucacgccagacucuc

SEQ ID NO: 1674419 - RNA, 19 nt, Artificial Sequence
  Description of Artificial Sequence: Synthetic oligonucleotide
  Sense strand starting at position 2869 of SEQ ID NO: 1561470
aagugacugucauuugcca

SEQ ID NO: 1674420 - RNA, 19 nt, Artificial Sequence
  Description of Artificial Sequence: Synthetic oligonucleotide
  Antisense strand to SEQ ID NO: 1674419
uggcaaaugacagucacuu

SEQ ID NO: 1674421 - RNA, 19 nt, Artificial Sequence
  Description of Artificial Sequence: Synthetic oligonucleotide
  Sense strand starting at position 2871 of SEQ ID NO: 1561470
gugacugucauuugccaga

SEQ ID NO: 1674422 - RNA, 19 nt, Artificial Sequence
  Description of Artificial Sequence: Synthetic oligonucleotide
  Antisense strand to SEQ ID NO: 1674421
ucuggcaaaugacagucac

SEQ ID NO: 1674423 - RNA, 19 nt, Artificial Sequence
  Description of Artificial Sequence: Synthetic oligonucleotide
  Sense strand starting at position 2874 of SEQ ID NO: 1561470
acugucauuugccagacau

SEQ ID NO: 1674424 - RNA, 19 nt, Artificial Sequence
  Description of Artificial Sequence: Synthetic oligonucleotide
  Antisense strand to SEQ ID NO: 1674423
augucuggcaaaugacagu

SEQ ID NO: 1674425 - RNA, 19 nt, Artificial Sequence
  Description of Artificial Sequence: Synthetic oligonucleotide
  Sense strand starting at position 2886 of SEQ ID NO: 1561470
cagacauucgucuggcuga

SEQ ID NO: 1674426 - RNA, 19 nt, Artificial Sequence
  Description of Artificial Sequence: Synthetic oligonucleotide
  Antisense strand to SEQ ID NO: 1674425
ucagccagacgaaugucug

SEQ ID NO: 1674427 - RNA, 19 nt, Artificial Sequence
  Description of Artificial Sequence: Synthetic oligonucleotide
  Sense strand starting at position 2912 of SEQ ID NO: 1561470
cccgggaucguguccguaa

SEQ ID NO: 1674428 - RNA, 19 nt, Artificial Sequence
  Description of Artificial Sequence: Synthetic oligonucleotide
  Antisense strand to SEQ ID NO: 1674427
uuacggacacgaucccggg

SEQ ID NO: 1674429 - RNA, 19 nt, Artificial Sequence
  Description of Artificial Sequence: Synthetic oligonucleotide
  Sense strand starting at position 3051 of SEQ ID NO: 1561470
gguguagaugugugagacu

SEQ ID NO: 1674430 - RNA, 19 nt, Artificial Sequence
  Description of Artificial Sequence: Synthetic oligonucleotide
  Antisense strand to SEQ ID NO: 1674429
agucucacacaucuacacc

SEQ ID NO: 1674431 - RNA, 19 nt, Artificial Sequence
  Description of Artificial Sequence: Synthetic oligonucleotide
  Sense strand starting at position 3096 of SEQ ID NO: 1561470
uuuagcuuuggucauugga

SEQ ID NO: 1674432 - RNA, 19 nt, Artificial Sequence
  Description of Artificial Sequence: Synthetic oligonucleotide
  Antisense strand to SEQ ID NO: 1674431
uccaaugaccaaagcuaaa

SEQ ID NO: 1674433 - RNA, 19 nt, Artificial Sequence
  Description of Artificial Sequence: Synthetic oligonucleotide
  Sense strand starting at position 3098 of SEQ ID NO: 1561470
uagcuuuggucauuggaaa

SEQ ID NO: 1674434 - RNA, 19 nt, Artificial Sequence
  Description of Artificial Sequence: Synthetic oligonucleotide
  Antisense strand to SEQ ID NO: 1674433
uuuccaaugaccaaagcua

SEQ ID NO: 1674435 - RNA, 19 nt, Artificial Sequence
  Description of Artificial Sequence: Synthetic oligonucleotide
  Sense strand starting at position 3099 of SEQ ID NO: 1561470
agcuuuggucauuggaaau

SEQ ID NO: 1674436 - RNA, 19 nt, Artificial Sequence
  Description of Artificial Sequence: Synthetic oligonucleotide
  Antisense strand to SEQ ID NO: 1674435
auuuccaaugaccaaagcu

SEQ ID NO: 1674437 - RNA, 19 nt, Artificial Sequence
  Description of Artificial Sequence: Synthetic oligonucleotide
  Sense strand starting at position 3706 of SEQ ID NO: 1561470
ucauauguucuauaugugu

SEQ ID NO: 1674438 - RNA, 19 nt, Artificial Sequence
  Description of Artificial Sequence: Synthetic oligonucleotide
  Antisense strand to SEQ ID NO: 1674437
acacauauagaacauauga

SEQ ID NO: 1674439 - RNA, 19 nt, Artificial Sequence
  Description of Artificial Sequence: Synthetic oligonucleotide
  Sense strand starting at position 3713 of SEQ ID NO: 1561470
uucuauaugugugcauaau

SEQ ID NO: 1674440 - RNA, 19 nt, Artificial Sequence
  Description of Artificial Sequence: Synthetic oligonucleotide
  Antisense strand to SEQ ID NO: 1674439
auuaugcacacauauagaa

SEQ ID NO: 1674441 - RNA, 19 nt, Artificial Sequence
  Description of Artificial Sequence: Synthetic oligonucleotide
  Sense strand starting at position 3714 of SEQ ID NO: 1561470
ucuauaugugugcauaaug

SEQ ID NO: 1674442 - RNA, 19 nt, Artificial Sequence
  Description of Artificial Sequence: Synthetic oligonucleotide
  Antisense strand to SEQ ID NO: 1674441
cauuaugcacacauauaga

SEQ ID NO: 1674443 - RNA, 19 nt, Artificial Sequence
  Description of Artificial Sequence: Synthetic oligonucleotide
  Sense strand starting at position 3782 of SEQ ID NO: 1561470
cuuguuuaacaauguauga

SEQ ID NO: 1674444 - RNA, 19 nt, Artificial Sequence
  Description of Artificial Sequence: Synthetic oligonucleotide
  Antisense strand to SEQ ID NO: 1674443
ucauacauuguuaaacaag

SEQ ID NO: 1674445 - RNA, 19 nt, Artificial Sequence
  Description of Artificial Sequence: Synthetic oligonucleotide
  Sense strand starting at position 3798 of SEQ ID NO: 1561470
ugauuaguaucuuuccauu

SEQ ID NO: 1674446 - RNA, 19 nt, Artificial Sequence
  Description of Artificial Sequence: Synthetic oligonucleotide
  Antisense strand to SEQ ID NO: 1674445
aauggaaagauacuaauca

SEQ ID NO: 1674447 - RNA, 19 nt, Artificial Sequence
  Description of Artificial Sequence: Synthetic oligonucleotide
  Sense strand starting at position 3883 of SEQ ID NO: 1561470
gugauuuaguucucuguag

SEQ ID NO: 1674448 - RNA, 19 nt, Artificial Sequence
  Description of Artificial Sequence: Synthetic oligonucleotide
  Antisense strand to SEQ ID NO: 1674447
cuacagagaacuaaaucac

SEQ ID NO: 1674449 - RNA, 19 nt, Artificial Sequence
  Description of Artificial Sequence: Synthetic oligonucleotide
  Sense strand starting at position 3885 of SEQ ID NO: 1561470
gauuuaguucucuguagcu

SEQ ID NO: 1674450 - RNA, 19 nt, Artificial Sequence
  Description of Artificial Sequence: Synthetic oligonucleotide
  Antisense strand to SEQ ID NO: 1674449
agcuacagagaacuaaauc

SEQ ID NO: 1674451 - RNA, 19 nt, Artificial Sequence
  Description of Artificial Sequence: Synthetic oligonucleotide
  Sense strand starting at position 3894 of SEQ ID NO: 1561470
cucuguagcuucuugaaau

SEQ ID NO: 1674452 - RNA, 19 nt, Artificial Sequence
  Description of Artificial Sequence: Synthetic oligonucleotide
  Antisense strand to SEQ ID NO: 1674451
auuucaagaagcuacagag

SEQ ID NO: 1674453 - RNA, 19 nt, Artificial Sequence
  Description of Artificial Sequence: Synthetic oligonucleotide
  Sense strand starting at position 3919 of SEQ ID NO: 1561470
cuguguuuaucagcaacua

SEQ ID NO: 1674454 - RNA, 19 nt, Artificial Sequence
  Description of Artificial Sequence: Synthetic oligonucleotide
  Antisense strand to SEQ ID NO: 1674453
uaguugcugauaaacacag

SEQ ID NO: 1674455 - RNA, 19 nt, Artificial Sequence
  Description of Artificial Sequence: Synthetic oligonucleotide
  Sense strand starting at position 3920 of SEQ ID NO: 1561470
uguguuuaucagcaacuau

SEQ ID NO: 1674456 - RNA, 19 nt, Artificial Sequence
  Description of Artificial Sequence: Synthetic oligonucleotide
  Antisense strand to SEQ ID NO: 1674455
auaguugcugauaaacaca

SEQ ID NO: 1674457 - RNA, 19 nt, Artificial Sequence
  Description of Artificial Sequence: Synthetic oligonucleotide
  Sense strand starting at position 3933 of SEQ ID NO: 1561470
aacuauuuggcacguguuu

SEQ ID NO: 1674458 - RNA, 19 nt, Artificial Sequence
  Description of Artificial Sequence: Synthetic oligonucleotide
  Antisense strand to SEQ ID NO: 1674457
aaacacgugccaaauaguu

SEQ ID NO: 1674459 - RNA, 19 nt, Artificial Sequence
  Description of Artificial Sequence: Synthetic oligonucleotide
  Sense strand starting at position 3935 of SEQ ID NO: 1561470
cuauuuggcacguguuuaa

SEQ ID NO: 1674460 - RNA, 19 nt, Artificial Sequence
  Description of Artificial Sequence: Synthetic oligonucleotide
  Antisense strand to SEQ ID NO: 1674459
uuaaacacgugccaaauag

SEQ ID NO: 1674461 - RNA, 19 nt, Artificial Sequence
  Description of Artificial Sequence: Synthetic oligonucleotide
  Sense strand starting at position 3939 of SEQ ID NO: 1561470
uuggcacguguuuaaauau

SEQ ID NO: 1674462 - RNA, 19 nt, Artificial Sequence
  Description of Artificial Sequence: Synthetic oligonucleotide
  Antisense strand to SEQ ID NO: 1674461
auauuuaaacacgugccaa

SEQ ID NO: 1674463 - RNA, 19 nt, Artificial Sequence
  Description of Artificial Sequence: Synthetic oligonucleotide
  Sense strand starting at position 274 of SEQ ID NO: 1561471
ggauguugccgugagccau

SEQ ID NO: 1674464 - RNA, 19 nt, Artificial Sequence
  Description of Artificial Sequence: Synthetic oligonucleotide
  Antisense strand to SEQ ID NO: 1674463
auggcucacggcaacaucc

SEQ ID NO: 1674465 - RNA, 19 nt, Artificial Sequence
  Description of Artificial Sequence: Synthetic oligonucleotide
  Sense strand starting at position 416 of SEQ ID NO: 1561471
cugagugacugaguuaaag

SEQ ID NO: 1674466 - RNA, 19 nt, Artificial Sequence
  Description of Artificial Sequence: Synthetic oligonucleotide
  Antisense strand to SEQ ID NO: 1674465
cuuuaacucagucacucag

SEQ ID NO: 1674467 - RNA, 19 nt, Artificial Sequence
  Description of Artificial Sequence: Synthetic oligonucleotide
  Sense strand starting at position 516 of SEQ ID NO: 1561471
uuacgcguuuaucuugaau

SEQ ID NO: 1674468 - RNA, 19 nt, Artificial Sequence
  Description of Artificial Sequence: Synthetic oligonucleotide
  Antisense strand to SEQ ID NO: 1674467
auucaagauaaacgcguaa

SEQ ID NO: 1674469 - RNA, 19 nt, Artificial Sequence
  Description of Artificial Sequence: Synthetic oligonucleotide
  Sense strand starting at position 519 of SEQ ID NO: 1561471
cgcguuuaucuugaauaag

SEQ ID NO: 1674470 - RNA, 19 nt, Artificial Sequence
  Description of Artificial Sequence: Synthetic oligonucleotide
  Antisense strand to SEQ ID NO: 1674469
cuuauucaagauaaacgcg

SEQ ID NO: 1674471 - RNA, 19 nt, Artificial Sequence
  Description of Artificial Sequence: Synthetic oligonucleotide
  Sense strand starting at position 545 of SEQ ID NO: 1561471
uccaauggagaguguugau

SEQ ID NO: 1674472 - RNA, 19 nt, Artificial Sequence
  Description of Artificial Sequence: Synthetic oligonucleotide
  Antisense strand to SEQ ID NO: 1674471
aucaacacucuccauugga

SEQ ID NO: 1674473 - RNA, 19 nt, Artificial Sequence
  Description of Artificial Sequence: Synthetic oligonucleotide
  Sense strand starting at position 548 of SEQ ID NO: 1561471
aauggagaguguugauaag

SEQ ID NO: 1674474 - RNA, 19 nt, Artificial Sequence
  Description of Artificial Sequence: Synthetic oligonucleotide
  Antisense strand to SEQ ID NO: 1674473
cuuaucaacacucuccauu

SEQ ID NO: 1674475 - RNA, 19 nt, Artificial Sequence
  Description of Artificial Sequence: Synthetic oligonucleotide
  Sense strand starting at position 551 of SEQ ID NO: 1561471
ggagaguguugauaaggga

SEQ ID NO: 1674476 - RNA, 19 nt, Artificial Sequence
  Description of Artificial Sequence: Synthetic oligonucleotide
  Antisense strand to SEQ ID NO: 1674475
ucccuuaucaacacucucc

SEQ ID NO: 1674477 - RNA, 19 nt, Artificial Sequence
  Description of Artificial Sequence: Synthetic oligonucleotide
  Sense strand starting at position 554 of SEQ ID NO: 1561471
gaguguugauaagggacau

SEQ ID NO: 1674478 - RNA, 19 nt, Artificial Sequence
  Description of Artificial Sequence: Synthetic oligonucleotide
  Antisense strand to SEQ ID NO: 1674477
augucccuuaucaacacuc

SEQ ID NO: 1674479 - RNA, 19 nt, Artificial Sequence
  Description of Artificial Sequence: Synthetic oligonucleotide
  Sense strand starting at position 567 of SEQ ID NO: 1561471
ggacaugacugguuaccca

SEQ ID NO: 1674480 - RNA, 19 nt, Artificial Sequence
  Description of Artificial Sequence: Synthetic oligonucleotide
  Antisense strand to SEQ ID NO: 1674479
uggguaaccagucaugucc

SEQ ID NO: 1674481 - RNA, 19 nt, Artificial Sequence
  Description of Artificial Sequence: Synthetic oligonucleotide
  Sense strand starting at position 571 of SEQ ID NO: 1561471
augacugguuacccagaaa

SEQ ID NO: 1674482 - RNA, 19 nt, Artificial Sequence
  Description of Artificial Sequence: Synthetic oligonucleotide
  Antisense strand to SEQ ID NO: 1674481
uuucuggguaaccagucau

SEQ ID NO: 1674483 - RNA, 19 nt, Artificial Sequence
  Description of Artificial Sequence: Synthetic oligonucleotide
  Sense strand starting at position 574 of SEQ ID NO: 1561471
acugguuacccagaaacgu

SEQ ID NO: 1674484 - RNA, 19 nt, Artificial Sequence
  Description of Artificial Sequence: Synthetic oligonucleotide
  Antisense strand to SEQ ID NO: 1674483
acguuucuggguaaccagu

SEQ ID NO: 1674485 - RNA, 19 nt, Artificial Sequence
  Description of Artificial Sequence: Synthetic oligonucleotide
  Sense strand starting at position 632 of SEQ ID NO: 1561471
gcagacagguauucaggaa

SEQ ID NO: 1674486 - RNA, 19 nt, Artificial Sequence
  Description of Artificial Sequence: Synthetic oligonucleotide
  Antisense strand to SEQ ID NO: 1674485
uuccugaauaccugucugc

SEQ ID NO: 1674487 - RNA, 19 nt, Artificial Sequence
  Description of Artificial Sequence: Synthetic oligonucleotide
  Sense strand starting at position 744 of SEQ ID NO: 1561471
ggccucagaugacugagau

SEQ ID NO: 1674488 - RNA, 19 nt, Artificial Sequence
  Description of Artificial Sequence: Synthetic oligonucleotide
  Antisense strand to SEQ ID NO: 1674487
aucucagucaucugaggcc

SEQ ID NO: 1674489 - RNA, 19 nt, Artificial Sequence
  Description of Artificial Sequence: Synthetic oligonucleotide
  Sense strand starting at position 745 of SEQ ID NO: 1561471
gccucagaugacugagaug

SEQ ID NO: 1674490 - RNA, 19 nt, Artificial Sequence
  Description of Artificial Sequence: Synthetic oligonucleotide
  Antisense strand to SEQ ID NO: 1674489
caucucagucaucugaggc

SEQ ID NO: 1674491 - RNA, 19 nt, Artificial Sequence
  Description of Artificial Sequence: Synthetic oligonucleotide
  Sense strand starting at position 889 of SEQ ID NO: 1561471
ggaauuuguuugcauacaa

SEQ ID NO: 1674492 - RNA, 19 nt, Artificial Sequence
  Description of Artificial Sequence: Synthetic oligonucleotide
  Antisense strand to SEQ ID NO: 1674491
uuguaugcaaacaaauucc

SEQ ID NO: 1674493 - RNA, 19 nt, Artificial Sequence
  Description of Artificial Sequence: Synthetic oligonucleotide
  Sense strand starting at position 956 of SEQ ID NO: 1561471
uguucuaggcuuuacaaau

SEQ ID NO: 1674494 - RNA, 19 nt, Artificial Sequence
  Description of Artificial Sequence: Synthetic oligonucleotide
  Antisense strand to SEQ ID NO: 1674493
auuuguaaagccuagaaca

SEQ ID NO: 1674495 - RNA, 19 nt, Artificial Sequence
  Description of Artificial Sequence: Synthetic oligonucleotide
  Sense strand starting at position 978 of SEQ ID NO: 1561471
gacucagaggaauguaagu

SEQ ID NO: 1674496 - RNA, 19 nt, Artificial Sequence
  Description of Artificial Sequence: Synthetic oligonucleotide
  Antisense strand to SEQ ID NO: 1674495
acuuacauuccucugaguc

SEQ ID NO: 1674497 - RNA, 19 nt, Artificial Sequence
  Description of Artificial Sequence: Synthetic oligonucleotide
  Sense strand starting at position 1103 of SEQ ID NO: 1561471
guggcacauugauaugacu

SEQ ID NO: 1674498 - RNA, 19 nt, Artificial Sequence
  Description of Artificial Sequence: Synthetic oligonucleotide
  Antisense strand to SEQ ID NO: 1674497
agucauaucaaugugccac

SEQ ID NO: 1674499 - RNA, 19 nt, Artificial Sequence
  Description of Artificial Sequence: Synthetic oligonucleotide
  Sense strand starting at position 1105 of SEQ ID NO: 1561471
ggcacauugauaugacuug

SEQ ID NO: 1674500 - RNA, 19 nt, Artificial Sequence
  Description of Artificial Sequence: Synthetic oligonucleotide
  Antisense strand to SEQ ID NO: 1674499
caagucauaucaaugugcc

SEQ ID NO: 1674501 - RNA, 19 nt, Artificial Sequence
  Description of Artificial Sequence: Synthetic oligonucleotide
  Sense strand starting at position 2075 of SEQ ID NO: 1561471
aaagguuugugcgugggaa

SEQ ID NO: 1674502 - RNA, 19 nt, Artificial Sequence
  Description of Artificial Sequence: Synthetic oligonucleotide
  Antisense strand to SEQ ID NO: 1674501
uucccacgcacaaaccuuu

SEQ ID NO: 1674503 - RNA, 19 nt, Artificial Sequence
  Description of Artificial Sequence: Synthetic oligonucleotide
  Sense strand starting at position 2076 of SEQ ID NO: 1561471
aagguuugugcgugggaac

SEQ ID NO: 1674504 - RNA, 19 nt, Artificial Sequence
  Description of Artificial Sequence: Synthetic oligonucleotide
  Antisense strand to SEQ ID NO: 1674503
guucccacgcacaaaccuu

SEQ ID NO: 1674505 - RNA, 19 nt, Artificial Sequence
  Description of Artificial Sequence: Synthetic oligonucleotide
  Sense strand starting at position 2126 of SEQ ID NO: 1561471
ggaggcgaauuccuagaau

SEQ ID NO: 1674506 - RNA, 19 nt, Artificial Sequence
  Description of Artificial Sequence: Synthetic oligonucleotide
  Antisense strand to SEQ ID NO: 1674505
auucuaggaauucgccucc

SEQ ID NO: 1674507 - RNA, 19 nt, Artificial Sequence
  Description of Artificial Sequence: Synthetic oligonucleotide
  Sense strand starting at position 2129 of SEQ ID NO: 1561471
ggcgaauuccuagaauugu

SEQ ID NO: 1674508 - RNA, 19 nt, Artificial Sequence
  Description of Artificial Sequence: Synthetic oligonucleotide
  Antisense strand to SEQ ID NO: 1674507
acaauucuaggaauucgcc

SEQ ID NO: 1674509 - RNA, 19 nt, Artificial Sequence
  Description of Artificial Sequence: Synthetic oligonucleotide
  Sense strand starting at position 2576 of SEQ ID NO: 1561471
ucaaaugauccgugcgcuu

SEQ ID NO: 1674510 - RNA, 19 nt, Artificial Sequence
  Description of Artificial Sequence: Synthetic oligonucleotide
  Antisense strand to SEQ ID NO: 1674509
aagcgcacggaucauuuga

SEQ ID NO: 1674511 - RNA, 19 nt, Artificial Sequence
  Description of Artificial Sequence: Synthetic oligonucleotide
  Sense strand starting at position 2814 of SEQ ID NO: 1561471
ggcggagugucccuugauu

SEQ ID NO: 1674512 - RNA, 19 nt, Artificial Sequence
  Description of Artificial Sequence: Synthetic oligonucleotide
  Antisense strand to SEQ ID NO: 1674511
aaucaagggacacuccgcc

SEQ ID NO: 1674513 - RNA, 19 nt, Artificial Sequence
  Description of Artificial Sequence: Synthetic oligonucleotide
  Sense strand starting at position 2816 of SEQ ID NO: 1561471
cggagugucccuugauugu

SEQ ID NO: 1674514 - RNA, 19 nt, Artificial Sequence
  Description of Artificial Sequence: Synthetic oligonucleotide
  Antisense strand to SEQ ID NO: 1674513
acaaucaagggacacuccg

SEQ ID NO: 1674515 - RNA, 19 nt, Artificial Sequence
  Description of Artificial Sequence: Synthetic oligonucleotide
  Sense strand starting at position 2825 of SEQ ID NO: 1561471
ccuugauuguggucccagu

SEQ ID NO: 1674516 - RNA, 19 nt, Artificial Sequence
  Description of Artificial Sequence: Synthetic oligonucleotide
  Antisense strand to SEQ ID NO: 1674515
acugggaccacaaucaagg

SEQ ID NO: 1674517 - RNA, 19 nt, Artificial Sequence
  Description of Artificial Sequence: Synthetic oligonucleotide
  Sense strand starting at position 2999 of SEQ ID NO: 1561471
uagagaaguuaaguaccua

SEQ ID NO: 1674518 - RNA, 19 nt, Artificial Sequence
  Description of Artificial Sequence: Synthetic oligonucleotide
  Antisense strand to SEQ ID NO: 1674517
uagguacuuaacuucucua

SEQ ID NO: 1674519 - RNA, 19 nt, Artificial Sequence
  Description of Artificial Sequence: Synthetic oligonucleotide
  Sense strand starting at position 3007 of SEQ ID NO: 1561471
uuaaguaccuagucugaga

SEQ ID NO: 1674520 - RNA, 19 nt, Artificial Sequence
  Description of Artificial Sequence: Synthetic oligonucleotide
  Antisense strand to SEQ ID NO: 1674519
ucucagacuagguacuuaa

SEQ ID NO: 1674521 - RNA, 19 nt, Artificial Sequence
  Description of Artificial Sequence: Synthetic oligonucleotide
  Sense strand starting at position 3010 of SEQ ID NO: 1561471
aguaccuagucugagauga

SEQ ID NO: 1674522 - RNA, 19 nt, Artificial Sequence
  Description of Artificial Sequence: Synthetic oligonucleotide
  Antisense strand to SEQ ID NO: 1674521
ucaucucagacuagguacu

SEQ ID NO: 1674523 - RNA, 19 nt, Artificial Sequence
  Description of Artificial Sequence: Synthetic oligonucleotide
  Sense strand starting at position 3039 of SEQ ID NO: 1561471
aaggccaagucuguuuaga

SEQ ID NO: 1674524 - RNA, 19 nt, Artificial Sequence
  Description of Artificial Sequence: Synthetic oligonucleotide
  Antisense strand to SEQ ID NO: 1674523
ucuaaacagacuuggccuu

SEQ ID NO: 1674525 - RNA, 19 nt, Artificial Sequence
  Description of Artificial Sequence: Synthetic oligonucleotide
  Sense strand starting at position 3041 of SEQ ID NO: 1561471
ggccaagucuguuuagaag

SEQ ID NO: 1674526 - RNA, 19 nt, Artificial Sequence
  Description of Artificial Sequence: Synthetic oligonucleotide
  Antisense strand to SEQ ID NO: 1674525
cuucuaaacagacuuggcc

SEQ ID NO: 1674527 - RNA, 19 nt, Artificial Sequence
  Description of Artificial Sequence: Synthetic oligonucleotide
  Sense strand starting at position 3592 of SEQ ID NO: 1561471
gccucugggaaauguaguu

SEQ ID NO: 1674528 - RNA, 19 nt, Artificial Sequence
  Description of Artificial Sequence: Synthetic oligonucleotide
  Antisense strand to SEQ ID NO: 1674527
aacuacauuucccagaggc

SEQ ID NO: 1674529 - RNA, 19 nt, Artificial Sequence
  Description of Artificial Sequence: Synthetic oligonucleotide
  Sense strand starting at position 3636 of SEQ ID NO: 1561471
cgauucuucucagcaccaa

SEQ ID NO: 1674530 - RNA, 19 nt, Artificial Sequence
  Description of Artificial Sequence: Synthetic oligonucleotide
  Antisense strand to SEQ ID NO: 1674529
uuggugcugagaagaaucg

SEQ ID NO: 1674531 - RNA, 19 nt, Artificial Sequence
  Description of Artificial Sequence: Synthetic oligonucleotide
  Sense strand starting at position 3732 of SEQ ID NO: 1561471
agcugugagcccuggaaca

SEQ ID NO: 1674532 - RNA, 19 nt, Artificial Sequence
  Description of Artificial Sequence: Synthetic oligonucleotide
  Antisense strand to SEQ ID NO: 1674531
uguuccagggcucacagcu

SEQ ID NO: 1674533 - RNA, 19 nt, Artificial Sequence
  Description of Artificial Sequence: Synthetic oligonucleotide
  Sense strand starting at position 3922 of SEQ ID NO: 1561471
gccacuuuggcagcguuaa

SEQ ID NO: 1674534 - RNA, 19 nt, Artificial Sequence
  Description of Artificial Sequence: Synthetic oligonucleotide
  Antisense strand to SEQ ID NO: 1674533
uuaacgcugccaaaguggc

SEQ ID NO: 1674535 - RNA, 19 nt, Artificial Sequence
  Description of Artificial Sequence: Synthetic oligonucleotide
  Sense strand starting at position 3924 of SEQ ID NO: 1561471
cacuuuggcagcguuaagu

SEQ ID NO: 1674536 - RNA, 19 nt, Artificial Sequence
  Description of Artificial Sequence: Synthetic oligonucleotide
  Antisense strand to SEQ ID NO: 1674535
acuuaacgcugccaaagug

SEQ ID NO: 1674537 - RNA, 19 nt, Artificial Sequence
  Description of Artificial Sequence: Synthetic oligonucleotide
  Sense strand starting at position 3932 of SEQ ID NO: 1561471
cagcguuaaguguggaauc

SEQ ID NO: 1674538 - RNA, 19 nt, Artificial Sequence
  Description of Artificial Sequence: Synthetic oligonucleotide
  Antisense strand to SEQ ID NO: 1674537
gauuccacacuuaacgcug

SEQ ID NO: 1674539 - RNA, 19 nt, Artificial Sequence
  Description of Artificial Sequence: Synthetic oligonucleotide
  Sense strand starting at position 3972 of SEQ ID NO: 1561471
gguggugaguccucgggaa

SEQ ID NO: 1674540 - RNA, 19 nt, Artificial Sequence
  Description of Artificial Sequence: Synthetic oligonucleotide
  Antisense strand to SEQ ID NO: 1674539
uucccgaggacucaccacc

SEQ ID NO: 1674541 - RNA, 19 nt, Artificial Sequence
  Description of Artificial Sequence: Synthetic oligonucleotide
  Sense strand starting at position 3973 of SEQ ID NO: 1561471
guggugaguccucgggaaa

SEQ ID NO: 1674542 - RNA, 19 nt, Artificial Sequence
  Description of Artificial Sequence: Synthetic oligonucleotide
  Antisense strand to SEQ ID NO: 1674541
uuucccgaggacucaccac

SEQ ID NO: 1674543 - RNA, 19 nt, Artificial Sequence
  Description of Artificial Sequence: Synthetic oligonucleotide
  Sense strand starting at position 40 of SEQ ID NO: 1561472
cagaauauucuacgggaca

SEQ ID NO: 1674544 - RNA, 19 nt, Artificial Sequence
  Description of Artificial Sequence: Synthetic oligonucleotide
  Antisense strand to SEQ ID NO: 1674543
ugucccguagaauauucug

SEQ ID NO: 1674545 - RNA, 19 nt, Artificial Sequence
  Description of Artificial Sequence: Synthetic oligonucleotide
  Sense strand starting at position 52 of SEQ ID NO: 1561472
cgggacagaugaucuaguu

SEQ ID NO: 1674546 - RNA, 19 nt, Artificial Sequence
  Description of Artificial Sequence: Synthetic oligonucleotide
  Antisense strand to SEQ ID NO: 1674545
aacuagaucaucugucccg

SEQ ID NO: 1674547 - RNA, 19 nt, Artificial Sequence
  Description of Artificial Sequence: Synthetic oligonucleotide
  Sense strand starting at position 394 of SEQ ID NO: 1561472
gguaauauaugcuuauaag

SEQ ID NO: 1674548 - RNA, 19 nt, Artificial Sequence
  Description of Artificial Sequence: Synthetic oligonucleotide
  Antisense strand to SEQ ID NO: 1674547
cuuauaagcauauauuacc

SEQ ID NO: 1674549 - RNA, 19 nt, Artificial Sequence
  Description of Artificial Sequence: Synthetic oligonucleotide
  Sense strand starting at position 948 of SEQ ID NO: 1561472
aaaggacugcuguaucauu

SEQ ID NO: 1674550 - RNA, 19 nt, Artificial Sequence
  Description of Artificial Sequence: Synthetic oligonucleotide
  Antisense strand to SEQ ID NO: 1674549
aaugauacagcaguccuuu

SEQ ID NO: 1674551 - RNA, 19 nt, Artificial Sequence
  Description of Artificial Sequence: Synthetic oligonucleotide
  Sense strand starting at position 957 of SEQ ID NO: 1561472
cuguaucauuggguggaaa

SEQ ID NO: 1674552 - RNA, 19 nt, Artificial Sequence
  Description of Artificial Sequence: Synthetic oligonucleotide
  Antisense strand to SEQ ID NO: 1674551
uuuccacccaaugauacag

SEQ ID NO: 1674553 - RNA, 19 nt, Artificial Sequence
  Description of Artificial Sequence: Synthetic oligonucleotide
  Sense strand starting at position 958 of SEQ ID NO: 1561472
uguaucauuggguggaaag

SEQ ID NO: 1674554 - RNA, 19 nt, Artificial Sequence
  Description of Artificial Sequence: Synthetic oligonucleotide
  Antisense strand to SEQ ID NO: 1674553
cuuuccacccaaugauaca

SEQ ID NO: 1674555 - RNA, 19 nt, Artificial Sequence
  Description of Artificial Sequence: Synthetic oligonucleotide
  Sense strand starting at position 1087 of SEQ ID NO: 1561472
gaagauguugcuggaggua

SEQ ID NO: 1674556 - RNA, 19 nt, Artificial Sequence
  Description of Artificial Sequence: Synthetic oligonucleotide
  Antisense strand to SEQ ID NO: 1674555
uaccuccagcaacaucuuc

SEQ ID NO: 1674557 - RNA, 19 nt, Artificial Sequence
  Description of Artificial Sequence: Synthetic oligonucleotide
  Sense strand starting at position 1090 of SEQ ID NO: 1561472
gauguugcuggagguagaa

SEQ ID NO: 1674558 - RNA, 19 nt, Artificial Sequence
  Description of Artificial Sequence: Synthetic oligonucleotide
  Antisense strand to SEQ ID NO: 1674557
uucuaccuccagcaacauc

SEQ ID NO: 1674559 - RNA, 19 nt, Artificial Sequence
  Description of Artificial Sequence: Synthetic oligonucleotide
  Sense strand starting at position 1123 of SEQ ID NO: 1561472
gaagaaauuugagguuaga

SEQ ID NO: 1674560 - RNA, 19 nt, Artificial Sequence
  Description of Artificial Sequence: Synthetic oligonucleotide
  Antisense strand to SEQ ID NO: 1674559
ucuaaccucaaauuucuuc

SEQ ID NO: 1674561 - RNA, 19 nt, Artificial Sequence
  Description of Artificial Sequence: Synthetic oligonucleotide
  Sense strand starting at position 1170 of SEQ ID NO: 1561472
ucagaagugcgauauucuu

SEQ ID NO: 1674562 - RNA, 19 nt, Artificial Sequence
  Description of Artificial Sequence: Synthetic oligonucleotide
  Antisense strand to SEQ ID NO: 1674561
aagaauaucgcacuucuga

SEQ ID NO: 1674563 - RNA, 19 nt, Artificial Sequence
  Description of Artificial Sequence: Synthetic oligonucleotide
  Sense strand starting at position 1791 of SEQ ID NO: 1561472
ggccgacuuccauaaguaa

SEQ ID NO: 1674564 - RNA, 19 nt, Artificial Sequence
  Description of Artificial Sequence: Synthetic oligonucleotide
  Antisense strand to SEQ ID NO: 1674563
uuacuuauggaagucggcc

SEQ ID NO: 1674565 - RNA, 19 nt, Artificial Sequence
  Description of Artificial Sequence: Synthetic oligonucleotide
  Sense strand starting at position 1794 of SEQ ID NO: 1561472
cgacuuccauaaguaauua

SEQ ID NO: 1674566 - RNA, 19 nt, Artificial Sequence
  Description of Artificial Sequence: Synthetic oligonucleotide
  Antisense strand to SEQ ID NO: 1674565
uaauuacuuauggaagucg

SEQ ID NO: 1674567 - RNA, 19 nt, Artificial Sequence
  Description of Artificial Sequence: Synthetic oligonucleotide
  Sense strand starting at position 1862 of SEQ ID NO: 1561472
cgguauucccagcaccaua

SEQ ID NO: 1674568 - RNA, 19 nt, Artificial Sequence
  Description of Artificial Sequence: Synthetic oligonucleotide
  Antisense strand to SEQ ID NO: 1674567
uauggugcugggaauaccg

SEQ ID NO: 1674569 - RNA, 19 nt, Artificial Sequence
  Description of Artificial Sequence: Synthetic oligonucleotide
  Sense strand starting at position 1978 of SEQ ID NO: 1561472
aagacauaacagcguaagu

SEQ ID NO: 1674570 - RNA, 19 nt, Artificial Sequence
  Description of Artificial Sequence: Synthetic oligonucleotide
  Antisense strand to SEQ ID NO: 1674569
acuuacgcuguuaugucuu

SEQ ID NO: 1674571 - RNA, 19 nt, Artificial Sequence
  Description of Artificial Sequence: Synthetic oligonucleotide
  Sense strand starting at position 2028 of SEQ ID NO: 1561472
cgggaaauguagucuacaa

SEQ ID NO: 1674572 - RNA, 19 nt, Artificial Sequence
  Description of Artificial Sequence: Synthetic oligonucleotide
  Antisense strand to SEQ ID NO: 1674571
uuguagacuacauuucccg

SEQ ID NO: 1674573 - RNA, 19 nt, Artificial Sequence
  Description of Artificial Sequence: Synthetic oligonucleotide
  Sense strand starting at position 2497 of SEQ ID NO: 1561472
gugugaugugcgucagauu

SEQ ID NO: 1674574 - RNA, 19 nt, Artificial Sequence
  Description of Artificial Sequence: Synthetic oligonucleotide
  Antisense strand to SEQ ID NO: 1674573
aaucugacgcacaucacac

SEQ ID NO: 1674575 - RNA, 19 nt, Artificial Sequence
  Description of Artificial Sequence: Synthetic oligonucleotide
  Sense strand starting at position 2510 of SEQ ID NO: 1561472
cagauuaugcuugaggcua

SEQ ID NO: 1674576 - RNA, 19 nt, Artificial Sequence
  Description of Artificial Sequence: Synthetic oligonucleotide
  Antisense strand to SEQ ID NO: 1674575
uagccucaagcauaaucug

SEQ ID NO: 1674577 - RNA, 19 nt, Artificial Sequence
  Description of Artificial Sequence: Synthetic oligonucleotide
  Sense strand starting at position 2564 of SEQ ID NO: 1561472
uugggaaugguuugauuau

SEQ ID NO: 1674578 - RNA, 19 nt, Artificial Sequence
  Description of Artificial Sequence: Synthetic oligonucleotide
  Antisense strand to SEQ ID NO: 1674577
auaaucaaaccauucccaa

SEQ ID NO: 1674579 - RNA, 19 nt, Artificial Sequence
  Description of Artificial Sequence: Synthetic oligonucleotide
  Sense strand starting at position 2573 of SEQ ID NO: 1561472
guuugauuauagcuuugag

SEQ ID NO: 1674580 - RNA, 19 nt, Artificial Sequence
  Description of Artificial Sequence: Synthetic oligonucleotide
  Antisense strand to SEQ ID NO: 1674579
cucaaagcuauaaucaaac

SEQ ID NO: 1674581 - RNA, 19 nt, Artificial Sequence
  Description of Artificial Sequence: Synthetic oligonucleotide
  Sense strand starting at position 2576 of SEQ ID NO: 1561472
ugauuauagcuuugagggu

SEQ ID NO: 1674582 - RNA, 19 nt, Artificial Sequence
  Description of Artificial Sequence: Synthetic oligonucleotide
  Antisense strand to SEQ ID NO: 1674581
acccucaaagcuauaauca

SEQ ID NO: 1674583 - RNA, 19 nt, Artificial Sequence
  Description of Artificial Sequence: Synthetic oligonucleotide
  Sense strand starting at position 2582 of SEQ ID NO: 1561472
uagcuuugagggugacuga

SEQ ID NO: 1674584 - RNA, 19 nt, Artificial Sequence
  Description of Artificial Sequence: Synthetic oligonucleotide
  Antisense strand to SEQ ID NO: 1674583
ucagucacccucaaagcua

SEQ ID NO: 1674585 - RNA, 19 nt, Artificial Sequence
  Description of Artificial Sequence: Synthetic oligonucleotide
  Sense strand starting at position 2583 of SEQ ID NO: 1561472
agcuuugagggugacugau

SEQ ID NO: 1674586 - RNA, 19 nt, Artificial Sequence
  Description of Artificial Sequence: Synthetic oligonucleotide
  Antisense strand to SEQ ID NO: 1674585
aucagucacccucaaagcu

SEQ ID NO: 1674587 - RNA, 19 nt, Artificial Sequence
  Description of Artificial Sequence: Synthetic oligonucleotide
  Sense strand starting at position 2596 of SEQ ID NO: 1561472
acugaugucuguuuaauca

SEQ ID NO: 1674588 - RNA, 19 nt, Artificial Sequence
  Description of Artificial Sequence: Synthetic oligonucleotide
  Antisense strand to SEQ ID NO: 1674587
ugauuaaacagacaucagu

SEQ ID NO: 1674589 - RNA, 19 nt, Artificial Sequence
  Description of Artificial Sequence: Synthetic oligonucleotide
  Sense strand starting at position 2600 of SEQ ID NO: 1561472
augucuguuuaaucagauu

SEQ ID NO: 1674590 - RNA, 19 nt, Artificial Sequence
  Description of Artificial Sequence: Synthetic oligonucleotide
  Antisense strand to SEQ ID NO: 1674589
aaucugauuaaacagacau

SEQ ID NO: 1674591 - RNA, 19 nt, Artificial Sequence
  Description of Artificial Sequence: Synthetic oligonucleotide
  Sense strand starting at position 2632 of SEQ ID NO: 1561472
aguaucuuauaaccuguaa

SEQ ID NO: 1674592 - RNA, 19 nt, Artificial Sequence
  Description of Artificial Sequence: Synthetic oligonucleotide
  Antisense strand to SEQ ID NO: 1674591
uuacagguuauaagauacu

SEQ ID NO: 1674593 - RNA, 19 nt, Artificial Sequence
  Description of Artificial Sequence: Synthetic oligonucleotide
  Sense strand starting at position 2759 of SEQ ID NO: 1561472
gaaagaagugugugagcau

SEQ ID NO: 1674594 - RNA, 19 nt, Artificial Sequence
  Description of Artificial Sequence: Synthetic oligonucleotide
  Antisense strand to SEQ ID NO: 1674593
augcucacacacuucuuuc

SEQ ID NO: 1674595 - RNA, 19 nt, Artificial Sequence
  Description of Artificial Sequence: Synthetic oligonucleotide
  Sense strand starting at position 2785 of SEQ ID NO: 1561472
ugagaaugagcacgauugu

SEQ ID NO: 1674596 - RNA, 19 nt, Artificial Sequence
  Description of Artificial Sequence: Synthetic oligonucleotide
  Antisense strand to SEQ ID NO: 1674595
acaaucgugcucauucuca

SEQ ID NO: 1674597 - RNA, 19 nt, Artificial Sequence
  Description of Artificial Sequence: Synthetic oligonucleotide
  Sense strand starting at position 2869 of SEQ ID NO: 1561472
agucguguaacgcuuugga

SEQ ID NO: 1674598 - RNA, 19 nt, Artificial Sequence
  Description of Artificial Sequence: Synthetic oligonucleotide
  Antisense strand to SEQ ID NO: 1674597
uccaaagcguuacacgacu

SEQ ID NO: 1674599 - RNA, 19 nt, Artificial Sequence
  Description of Artificial Sequence: Synthetic oligonucleotide
  Sense strand starting at position 2940 of SEQ ID NO: 1561472
ugugcucuccaauauagua

SEQ ID NO: 1674600 - RNA, 19 nt, Artificial Sequence
  Description of Artificial Sequence: Synthetic oligonucleotide
  Antisense strand to SEQ ID NO: 1674599
uacuauauuggagagcaca

SEQ ID NO: 1674601 - RNA, 19 nt, Artificial Sequence
  Description of Artificial Sequence: Synthetic oligonucleotide
  Sense strand starting at position 2998 of SEQ ID NO: 1561472
gcugguuugacugaggaac

SEQ ID NO: 1674602 - RNA, 19 nt, Artificial Sequence
  Description of Artificial Sequence: Synthetic oligonucleotide
  Antisense strand to SEQ ID NO: 1674601
guuccucagucaaaccagc

SEQ ID NO: 1674603 - RNA, 19 nt, Artificial Sequence
  Description of Artificial Sequence: Synthetic oligonucleotide
  Sense strand starting at position 3063 of SEQ ID NO: 1561472
gcuauauauggcuaauagu

SEQ ID NO: 1674604 - RNA, 19 nt, Artificial Sequence
  Description of Artificial Sequence: Synthetic oligonucleotide
  Antisense strand to SEQ ID NO: 1674603
acuauuagccauauauagc

SEQ ID NO: 1674605 - RNA, 19 nt, Artificial Sequence
  Description of Artificial Sequence: Synthetic oligonucleotide
  Sense strand starting at position 3299 of SEQ ID NO: 1561472
cuugcaggacuguaguaua

SEQ ID NO: 1674606 - RNA, 19 nt, Artificial Sequence
  Description of Artificial Sequence: Synthetic oligonucleotide
  Antisense strand to SEQ ID NO: 1674605
uauacuacaguccugcaag

SEQ ID NO: 1674607 - RNA, 19 nt, Artificial Sequence
  Description of Artificial Sequence: Synthetic oligonucleotide
  Sense strand starting at position 3330 of SEQ ID NO: 1561472
ggauguugacauugauagu

SEQ ID NO: 1674608 - RNA, 19 nt, Artificial Sequence
  Description of Artificial Sequence: Synthetic oligonucleotide
  Antisense strand to SEQ ID NO: 1674607
acuaucaaugucaacaucc

SEQ ID NO: 1674609 - RNA, 19 nt, Artificial Sequence
  Description of Artificial Sequence: Synthetic oligonucleotide
  Sense strand starting at position 3336 of SEQ ID NO: 1561472
ugacauugauagucaagau

SEQ ID NO: 1674610 - RNA, 19 nt, Artificial Sequence
  Description of Artificial Sequence: Synthetic oligonucleotide
  Antisense strand to SEQ ID NO: 1674609
aucuugacuaucaauguca

SEQ ID NO: 1674611 - RNA, 19 nt, Artificial Sequence
  Description of Artificial Sequence: Synthetic oligonucleotide
  Sense strand starting at position 3415 of SEQ ID NO: 1561472
cuucccucuuguuugaaga

SEQ ID NO: 1674612 - RNA, 19 nt, Artificial Sequence
  Description of Artificial Sequence: Synthetic oligonucleotide
  Antisense strand to SEQ ID NO: 1674611
ucuucaaacaagagggaag

SEQ ID NO: 1674613 - RNA, 19 nt, Artificial Sequence
  Description of Artificial Sequence: Synthetic oligonucleotide
  Sense strand starting at position 3416 of SEQ ID NO: 1561472
uucccucuuguuugaagau

SEQ ID NO: 1674614 - RNA, 19 nt, Artificial Sequence
  Description of Artificial Sequence: Synthetic oligonucleotide
  Antisense strand to SEQ ID NO: 1674613
aucuucaaacaagagggaa

SEQ ID NO: 1674615 - RNA, 19 nt, Artificial Sequence
  Description of Artificial Sequence: Synthetic oligonucleotide
  Sense strand starting at position 3859 of SEQ ID NO: 1561472
uuccuuagacagggucaua

SEQ ID NO: 1674616 - RNA, 19 nt, Artificial Sequence
  Description of Artificial Sequence: Synthetic oligonucleotide
  Antisense strand to SEQ ID NO: 1674615
uaugacccugucuaaggaa

SEQ ID NO: 1674617 - RNA, 19 nt, Artificial Sequence
  Description of Artificial Sequence: Synthetic oligonucleotide
  Sense strand starting at position 3870 of SEQ ID NO: 1561472
gggucauaggagugggauu

SEQ ID NO: 1674618 - RNA, 19 nt, Artificial Sequence
  Description of Artificial Sequence: Synthetic oligonucleotide
  Antisense strand to SEQ ID NO: 1674617
aaucccacuccuaugaccc

SEQ ID NO: 1674619 - RNA, 19 nt, Artificial Sequence
  Description of Artificial Sequence: Synthetic oligonucleotide
  Sense strand starting at position 3871 of SEQ ID NO: 1561472
ggucauaggagugggauua

SEQ ID NO: 1674620 - RNA, 19 nt, Artificial Sequence
  Description of Artificial Sequence: Synthetic oligonucleotide
  Antisense strand to SEQ ID NO: 1674619
uaaucccacuccuaugacc

SEQ ID NO: 1674621 - RNA, 19 nt, Artificial Sequence
  Description of Artificial Sequence: Synthetic oligonucleotide
  Sense strand starting at position 3891 of SEQ ID NO: 1561472
ugaaacaucuggcucauau

SEQ ID NO: 1674622 - RNA, 19 nt, Artificial Sequence
  Description of Artificial Sequence: Synthetic oligonucleotide
  Antisense strand to SEQ ID NO: 1674621
auaugagccagauguuuca

SEQ ID NO: 1674623 - RNA, 19 nt, Artificial Sequence
  Description of Artificial Sequence: Synthetic oligonucleotide
  Sense strand starting at position 131 of SEQ ID NO: 1561473
agagcaagccuuugucaua

SEQ ID NO: 1674624 - RNA, 19 nt, Artificial Sequence
  Description of Artificial Sequence: Synthetic oligonucleotide
  Antisense strand to SEQ ID NO: 1674623
uaugacaaaggcuugcucu

SEQ ID NO: 1674625 - RNA, 19 nt, Artificial Sequence
  Description of Artificial Sequence: Synthetic oligonucleotide
  Sense strand starting at position 132 of SEQ ID NO: 1561473
gagcaagccuuugucauaa

SEQ ID NO: 1674626 - RNA, 19 nt, Artificial Sequence
  Description of Artificial Sequence: Synthetic oligonucleotide
  Antisense strand to SEQ ID NO: 1674625
uuaugacaaaggcuugcuc

SEQ ID NO: 1674627 - RNA, 19 nt, Artificial Sequence
  Description of Artificial Sequence: Synthetic oligonucleotide
  Sense strand starting at position 561 of SEQ ID NO: 1561473
cuuaaagucucauugguaa

SEQ ID NO: 1674628 - RNA, 19 nt, Artificial Sequence
  Description of Artificial Sequence: Synthetic oligonucleotide
  Antisense strand to SEQ ID NO: 1674627
uuaccaaugagacuuuaag

SEQ ID NO: 1674629 - RNA, 19 nt, Artificial Sequence
  Description of Artificial Sequence: Synthetic oligonucleotide
  Sense strand starting at position 610 of SEQ ID NO: 1561473
auagucugaagaugaagua

SEQ ID NO: 1674630 - RNA, 19 nt, Artificial Sequence
  Description of Artificial Sequence: Synthetic oligonucleotide
  Antisense strand to SEQ ID NO: 1674629
uacuucaucuucagacuau

SEQ ID NO: 1674631 - RNA, 19 nt, Artificial Sequence
  Description of Artificial Sequence: Synthetic oligonucleotide
  Sense strand starting at position 733 of SEQ ID NO: 1561473
ggccaagauggugggauua

SEQ ID NO: 1674632 - RNA, 19 nt, Artificial Sequence
  Description of Artificial Sequence: Synthetic oligonucleotide
  Antisense strand to SEQ ID NO: 1674631
uaaucccaccaucuuggcc

SEQ ID NO: 1674633 - RNA, 19 nt, Artificial Sequence
  Description of Artificial Sequence: Synthetic oligonucleotide
  Sense strand starting at position 965 of SEQ ID NO: 1561473
aagaaagcagauugguauu

SEQ ID NO: 1674634 - RNA, 19 nt, Artificial Sequence
  Description of Artificial Sequence: Synthetic oligonucleotide
  Antisense strand to SEQ ID NO: 1674633
aauaccaaucugcuuucuu

SEQ ID NO: 1674635 - RNA, 19 nt, Artificial Sequence
  Description of Artificial Sequence: Synthetic oligonucleotide
  Sense strand starting at position 1183 of SEQ ID NO: 1561473
cggaaugccuccuuacaca

SEQ ID NO: 1674636 - RNA, 19 nt, Artificial Sequence
  Description of Artificial Sequence: Synthetic oligonucleotide
  Antisense strand to SEQ ID NO: 1674635
uguguaaggaggcauuccg

SEQ ID NO: 1674637 - RNA, 19 nt, Artificial Sequence
  Description of Artificial Sequence: Synthetic oligonucleotide
  Sense strand starting at position 1230 of SEQ ID NO: 1561473
acuuuaacacauggaggua

SEQ ID NO: 1674638 - RNA, 19 nt, Artificial Sequence
  Description of Artificial Sequence: Synthetic oligonucleotide
  Antisense strand to SEQ ID NO: 1674637
uaccuccauguguuaaagu

SEQ ID NO: 1674639 - RNA, 19 nt, Artificial Sequence
  Description of Artificial Sequence: Synthetic oligonucleotide
  Sense strand starting at position 1257 of SEQ ID NO: 1561473
gcuggaaucuggguaugag

SEQ ID NO: 1674640 - RNA, 19 nt, Artificial Sequence
  Description of Artificial Sequence: Synthetic oligonucleotide
  Antisense strand to SEQ ID NO: 1674639
cucauacccagauuccagc

SEQ ID NO: 1674641 - RNA, 19 nt, Artificial Sequence
  Description of Artificial Sequence: Synthetic oligonucleotide
  Sense strand starting at position 1258 of SEQ ID NO: 1561473
cuggaaucuggguaugagu

SEQ ID NO: 1674642 - RNA, 19 nt, Artificial Sequence
  Description of Artificial Sequence: Synthetic oligonucleotide
  Antisense strand to SEQ ID NO: 1674641
acucauacccagauuccag

SEQ ID NO: 1674643 - RNA, 19 nt, Artificial Sequence
  Description of Artificial Sequence: Synthetic oligonucleotide
  Sense strand starting at position 1555 of SEQ ID NO: 1561473
gcaaucaacguacaugaaa

SEQ ID NO: 1674644 - RNA, 19 nt, Artificial Sequence
  Description of Artificial Sequence: Synthetic oligonucleotide
  Antisense strand to SEQ ID NO: 1674643
uuucauguacguugauugc

SEQ ID NO: 1674645 - RNA, 19 nt, Artificial Sequence
  Description of Artificial Sequence: Synthetic oligonucleotide
  Sense strand starting at position 1820 of SEQ ID NO: 1561473
agaggcuuccacgguuaaa

SEQ ID NO: 1674646 - RNA, 19 nt, Artificial Sequence
  Description of Artificial Sequence: Synthetic oligonucleotide
  Antisense strand to SEQ ID NO: 1674645
uuuaaccguggaagccucu

SEQ ID NO: 1674647 - RNA, 19 nt, Artificial Sequence
  Description of Artificial Sequence: Synthetic oligonucleotide
  Sense strand starting at position 1874 of SEQ ID NO: 1561473
gcuccaacguaacuugauu

SEQ ID NO: 1674648 - RNA, 19 nt, Artificial Sequence
  Description of Artificial Sequence: Synthetic oligonucleotide
  Antisense strand to SEQ ID NO: 1674647
aaucaaguuacguuggagc

SEQ ID NO: 1674649 - RNA, 19 nt, Artificial Sequence
  Description of Artificial Sequence: Synthetic oligonucleotide
  Sense strand starting at position 2018 of SEQ ID NO: 1561473
ggaaauguaguuuaagccu

SEQ ID NO: 1674650 - RNA, 19 nt, Artificial Sequence
  Description of Artificial Sequence: Synthetic oligonucleotide
  Antisense strand to SEQ ID NO: 1674649
aggcuuaaacuacauuucc

SEQ ID NO: 1674651 - RNA, 19 nt, Artificial Sequence
  Description of Artificial Sequence: Synthetic oligonucleotide
  Sense strand starting at position 2024 of SEQ ID NO: 1561473
guaguuuaagccuaaagcu

SEQ ID NO: 1674652 - RNA, 19 nt, Artificial Sequence
  Description of Artificial Sequence: Synthetic oligonucleotide
  Antisense strand to SEQ ID NO: 1674651
agcuuuaggcuuaaacuac

SEQ ID NO: 1674653 - RNA, 19 nt, Artificial Sequence
  Description of Artificial Sequence: Synthetic oligonucleotide
  Sense strand starting at position 2169 of SEQ ID NO: 1561473
agacuuauugcgcuggcga

SEQ ID NO: 1674654 - RNA, 19 nt, Artificial Sequence
  Description of Artificial Sequence: Synthetic oligonucleotide
  Antisense strand to SEQ ID NO: 1674653
ucgccagcgcaauaagucu

SEQ ID NO: 1674655 - RNA, 19 nt, Artificial Sequence
  Description of Artificial Sequence: Synthetic oligonucleotide
  Sense strand starting at position 2172 of SEQ ID NO: 1561473
cuuauugcgcuggcgaaga

SEQ ID NO: 1674656 - RNA, 19 nt, Artificial Sequence
  Description of Artificial Sequence: Synthetic oligonucleotide
  Antisense strand to SEQ ID NO: 1674655
ucuucgccagcgcaauaag

SEQ ID NO: 1674657 - RNA, 19 nt, Artificial Sequence
  Description of Artificial Sequence: Synthetic oligonucleotide
  Sense strand starting at position 2223 of SEQ ID NO: 1561473
cggaguucugaggguuuca

SEQ ID NO: 1674658 - RNA, 19 nt, Artificial Sequence
  Description of Artificial Sequence: Synthetic oligonucleotide
  Antisense strand to SEQ ID NO: 1674657
ugaaacccucagaacuccg

SEQ ID NO: 1674659 - RNA, 19 nt, Artificial Sequence
  Description of Artificial Sequence: Synthetic oligonucleotide
  Sense strand starting at position 2296 of SEQ ID NO: 1561473
gggcuguuugaguguagag

SEQ ID NO: 1674660 - RNA, 19 nt, Artificial Sequence
  Description of Artificial Sequence: Synthetic oligonucleotide
  Antisense strand to SEQ ID NO: 1674659
cucuacacucaaacagccc

SEQ ID NO: 1674661 - RNA, 19 nt, Artificial Sequence
  Description of Artificial Sequence: Synthetic oligonucleotide
  Sense strand starting at position 2415 of SEQ ID NO: 1561473
aguccagucuuguuauaag

SEQ ID NO: 1674662 - RNA, 19 nt, Artificial Sequence
  Description of Artificial Sequence: Synthetic oligonucleotide
  Antisense strand to SEQ ID NO: 1674661
cuuauaacaagacuggacu

SEQ ID NO: 1674663 - RNA, 19 nt, Artificial Sequence
  Description of Artificial Sequence: Synthetic oligonucleotide
  Sense strand starting at position 2425 of SEQ ID NO: 1561473
uguuauaagguaugagaaa

SEQ ID NO: 1674664 - RNA, 19 nt, Artificial Sequence
  Description of Artificial Sequence: Synthetic oligonucleotide
  Antisense strand to SEQ ID NO: 1674663
uuucucauaccuuauaaca

SEQ ID NO: 1674665 - RNA, 19 nt, Artificial Sequence
  Description of Artificial Sequence: Synthetic oligonucleotide
  Sense strand starting at position 2518 of SEQ ID NO: 1561473
cuauguuuacaaugcgaaa

SEQ ID NO: 1674666 - RNA, 19 nt, Artificial Sequence
  Description of Artificial Sequence: Synthetic oligonucleotide
  Antisense strand to SEQ ID NO: 1674665
uuucgcauuguaaacauag

SEQ ID NO: 1674667 - RNA, 19 nt, Artificial Sequence
  Description of Artificial Sequence: Synthetic oligonucleotide
  Sense strand starting at position 2520 of SEQ ID NO: 1561473
auguuuacaaugcgaaaug

SEQ ID NO: 1674668 - RNA, 19 nt, Artificial Sequence
  Description of Artificial Sequence: Synthetic oligonucleotide
  Antisense strand to SEQ ID NO: 1674667
cauuucgcauuguaaacau

SEQ ID NO: 1674669 - RNA, 19 nt, Artificial Sequence
  Description of Artificial Sequence: Synthetic oligonucleotide
  Sense strand starting at position 2804 of SEQ ID NO: 1561473
uuaugugguauuugguauu

SEQ ID NO: 1674670 - RNA, 19 nt, Artificial Sequence
  Description of Artificial Sequence: Synthetic oligonucleotide
  Antisense strand to SEQ ID NO: 1674669
aauaccaaauaccacauaa

SEQ ID NO: 1674671 - RNA, 19 nt, Artificial Sequence
  Description of Artificial Sequence: Synthetic oligonucleotide
  Sense strand starting at position 2807 of SEQ ID NO: 1561473
ugugguauuugguauuuau

SEQ ID NO: 1674672 - RNA, 19 nt, Artificial Sequence
  Description of Artificial Sequence: Synthetic oligonucleotide
  Antisense strand to SEQ ID NO: 1674671
auaaauaccaaauaccaca

SEQ ID NO: 1674673 - RNA, 19 nt, Artificial Sequence
  Description of Artificial Sequence: Synthetic oligonucleotide
  Sense strand starting at position 2816 of SEQ ID NO: 1561473
ugguauuuaucuuucuguu

SEQ ID NO: 1674674 - RNA, 19 nt, Artificial Sequence
  Description of Artificial Sequence: Synthetic oligonucleotide
  Antisense strand to SEQ ID NO: 1674673
aacagaaagauaaauacca

SEQ ID NO: 1674675 - RNA, 19 nt, Artificial Sequence
  Description of Artificial Sequence: Synthetic oligonucleotide
  Sense strand starting at position 2818 of SEQ ID NO: 1561473
guauuuaucuuucuguuac

SEQ ID NO: 1674676 - RNA, 19 nt, Artificial Sequence
  Description of Artificial Sequence: Synthetic oligonucleotide
  Antisense strand to SEQ ID NO: 1674675
guaacagaaagauaaauac

SEQ ID NO: 1674677 - RNA, 19 nt, Artificial Sequence
  Description of Artificial Sequence: Synthetic oligonucleotide
  Sense strand starting at position 3300 of SEQ ID NO: 1561473
uguguauaagguuauauac

SEQ ID NO: 1674678 - RNA, 19 nt, Artificial Sequence
  Description of Artificial Sequence: Synthetic oligonucleotide
  Antisense strand to SEQ ID NO: 1674677
guauauaaccuuauacaca

SEQ ID NO: 1674679 - RNA, 19 nt, Artificial Sequence
  Description of Artificial Sequence: Synthetic oligonucleotide
  Sense strand starting at position 3382 of SEQ ID NO: 1561473
uuccguauccaaugcagaa

SEQ ID NO: 1674680 - RNA, 19 nt, Artificial Sequence
  Description of Artificial Sequence: Synthetic oligonucleotide
  Antisense strand to SEQ ID NO: 1674679
uucugcauuggauacggaa

SEQ ID NO: 1674681 - RNA, 19 nt, Artificial Sequence
  Description of Artificial Sequence: Synthetic oligonucleotide
  Sense strand starting at position 3386 of SEQ ID NO: 1561473
guauccaaugcagaauaau

SEQ ID NO: 1674682 - RNA, 19 nt, Artificial Sequence
  Description of Artificial Sequence: Synthetic oligonucleotide
  Antisense strand to SEQ ID NO: 1674681
auuauucugcauuggauac

SEQ ID NO: 1674683 - RNA, 19 nt, Artificial Sequence
  Description of Artificial Sequence: Synthetic oligonucleotide
  Sense strand starting at position 3555 of SEQ ID NO: 1561473
aauuuacauugggaaaugu

SEQ ID NO: 1674684 - RNA, 19 nt, Artificial Sequence
  Description of Artificial Sequence: Synthetic oligonucleotide
  Antisense strand to SEQ ID NO: 1674683
acauuucccaauguaaauu

SEQ ID NO: 1674685 - RNA, 19 nt, Artificial Sequence
  Description of Artificial Sequence: Synthetic oligonucleotide
  Sense strand starting at position 3563 of SEQ ID NO: 1561473
uugggaaauguacguacuu

SEQ ID NO: 1674686 - RNA, 19 nt, Artificial Sequence
  Description of Artificial Sequence: Synthetic oligonucleotide
  Antisense strand to SEQ ID NO: 1674685
aaguacguacauuucccaa

SEQ ID NO: 1674687 - RNA, 19 nt, Artificial Sequence
  Description of Artificial Sequence: Synthetic oligonucleotide
  Sense strand starting at position 3564 of SEQ ID NO: 1561473
ugggaaauguacguacuuu

SEQ ID NO: 1674688 - RNA, 19 nt, Artificial Sequence
  Description of Artificial Sequence: Synthetic oligonucleotide
  Antisense strand to SEQ ID NO: 1674687
aaaguacguacauuuccca

SEQ ID NO: 1674689 - RNA, 19 nt, Artificial Sequence
  Description of Artificial Sequence: Synthetic oligonucleotide
  Sense strand starting at position 3591 of SEQ ID NO: 1561473
uugugaauggacugguuua

SEQ ID NO: 1674690 - RNA, 19 nt, Artificial Sequence
  Description of Artificial Sequence: Synthetic oligonucleotide
  Antisense strand to SEQ ID NO: 1674689
uaaaccaguccauucacaa

SEQ ID NO: 1674691 - RNA, 19 nt, Artificial Sequence
  Description of Artificial Sequence: Synthetic oligonucleotide
  Sense strand starting at position 3592 of SEQ ID NO: 1561473
ugugaauggacugguuuau

SEQ ID NO: 1674692 - RNA, 19 nt, Artificial Sequence
  Description of Artificial Sequence: Synthetic oligonucleotide
  Antisense strand to SEQ ID NO: 1674691
auaaaccaguccauucaca

SEQ ID NO: 1674693 - RNA, 19 nt, Artificial Sequence
  Description of Artificial Sequence: Synthetic oligonucleotide
  Sense strand starting at position 3634 of SEQ ID NO: 1561473
ugacuaauaguguguagaa

SEQ ID NO: 1674694 - RNA, 19 nt, Artificial Sequence
  Description of Artificial Sequence: Synthetic oligonucleotide
  Antisense strand to SEQ ID NO: 1674693
uucuacacacuauuaguca

SEQ ID NO: 1674695 - RNA, 19 nt, Artificial Sequence
  Description of Artificial Sequence: Synthetic oligonucleotide
  Sense strand starting at position 3635 of SEQ ID NO: 1561473
gacuaauaguguguagaag

SEQ ID NO: 1674696 - RNA, 19 nt, Artificial Sequence
  Description of Artificial Sequence: Synthetic oligonucleotide
  Antisense strand to SEQ ID NO: 1674695
cuucuacacacuauuaguc

SEQ ID NO: 1674697 - RNA, 19 nt, Artificial Sequence
  Description of Artificial Sequence: Synthetic oligonucleotide
  Sense strand starting at position 3636 of SEQ ID NO: 1561473
acuaauaguguguagaagu

SEQ ID NO: 1674698 - RNA, 19 nt, Artificial Sequence
  Description of Artificial Sequence: Synthetic oligonucleotide
  Antisense strand to SEQ ID NO: 1674697
acuucuacacacuauuagu

SEQ ID NO: 1674699 - RNA, 19 nt, Artificial Sequence
  Description of Artificial Sequence: Synthetic oligonucleotide
  Sense strand starting at position 3673 of SEQ ID NO: 1561473
uucuuaaagguauagucaa

SEQ ID NO: 1674700 - RNA, 19 nt, Artificial Sequence
  Description of Artificial Sequence: Synthetic oligonucleotide
  Antisense strand to SEQ ID NO: 1674699
uugacuauaccuuuaagaa

SEQ ID NO: 1674701 - RNA, 19 nt, Artificial Sequence
  Description of Artificial Sequence: Synthetic oligonucleotide
  Sense strand starting at position 3918 of SEQ ID NO: 1561473
uggcuaauuguauauguuu

SEQ ID NO: 1674702 - RNA, 19 nt, Artificial Sequence
  Description of Artificial Sequence: Synthetic oligonucleotide
  Antisense strand to SEQ ID NO: 1674701
aaacauauacaauuagcca

SEQ ID NO: 1674703 - RNA, 19 nt, Artificial Sequence
  Description of Artificial Sequence: Synthetic oligonucleotide
  Sense strand starting at position 178 of SEQ ID NO: 1561474
ccagauuccucacgucaaa

SEQ ID NO: 1674704 - RNA, 19 nt, Artificial Sequence
  Description of Artificial Sequence: Synthetic oligonucleotide
  Antisense strand to SEQ ID NO: 1674703
uuugacgugaggaaucugg

SEQ ID NO: 1674705 - RNA, 19 nt, Artificial Sequence
  Description of Artificial Sequence: Synthetic oligonucleotide
  Sense strand starting at position 752 of SEQ ID NO: 1561474
uccucuucguagcaacaua

SEQ ID NO: 1674706 - RNA, 19 nt, Artificial Sequence
  Description of Artificial Sequence: Synthetic oligonucleotide
  Antisense strand to SEQ ID NO: 1674705
uauguugcuacgaagagga

SEQ ID NO: 1674707 - RNA, 19 nt, Artificial Sequence
  Description of Artificial Sequence: Synthetic oligonucleotide
  Sense strand starting at position 771 of SEQ ID NO: 1561474
acuccucuucuuuguguaa

SEQ ID NO: 1674708 - RNA, 19 nt, Artificial Sequence
  Description of Artificial Sequence: Synthetic oligonucleotide
  Antisense strand to SEQ ID NO: 1674707
uuacacaaagaagaggagu

SEQ ID NO: 1674709 - RNA, 19 nt, Artificial Sequence
  Description of Artificial Sequence: Synthetic oligonucleotide
  Sense strand starting at position 772 of SEQ ID NO: 1561474
cuccucuucuuuguguaaa

SEQ ID NO: 1674710 - RNA, 19 nt, Artificial Sequence
  Description of Artificial Sequence: Synthetic oligonucleotide
  Antisense strand to SEQ ID NO: 1674709
uuuacacaaagaagaggag

SEQ ID NO: 1674711 - RNA, 19 nt, Artificial Sequence
  Description of Artificial Sequence: Synthetic oligonucleotide
  Sense strand starting at position 773 of SEQ ID NO: 1561474
uccucuucuuuguguaaag

SEQ ID NO: 1674712 - RNA, 19 nt, Artificial Sequence
  Description of Artificial Sequence: Synthetic oligonucleotide
  Antisense strand to SEQ ID NO: 1674711
cuuuacacaaagaagagga

SEQ ID NO: 1674713 - RNA, 19 nt, Artificial Sequence
  Description of Artificial Sequence: Synthetic oligonucleotide
  Sense strand starting at position 774 of SEQ ID NO: 1561474
ccucuucuuuguguaaaga

SEQ ID NO: 1674714 - RNA, 19 nt, Artificial Sequence
  Description of Artificial Sequence: Synthetic oligonucleotide
  Antisense strand to SEQ ID NO: 1674713
ucuuuacacaaagaagagg

SEQ ID NO: 1674715 - RNA, 19 nt, Artificial Sequence
  Description of Artificial Sequence: Synthetic oligonucleotide
  Sense strand starting at position 775 of SEQ ID NO: 1561474
cucuucuuuguguaaagau

SEQ ID NO: 1674716 - RNA, 19 nt, Artificial Sequence
  Description of Artificial Sequence: Synthetic oligonucleotide
  Antisense strand to SEQ ID NO: 1674715
aucuuuacacaaagaagag

SEQ ID NO: 1674717 - RNA, 19 nt, Artificial Sequence
  Description of Artificial Sequence: Synthetic oligonucleotide
  Sense strand starting at position 874 of SEQ ID NO: 1561474
cggaccuccuauucucaua

SEQ ID NO: 1674718 - RNA, 19 nt, Artificial Sequence
  Description of Artificial Sequence: Synthetic oligonucleotide
  Antisense strand to SEQ ID NO: 1674717
uaugagaauaggagguccg

SEQ ID NO: 1674719 - RNA, 19 nt, Artificial Sequence
  Description of Artificial Sequence: Synthetic oligonucleotide
  Sense strand starting at position 1010 of SEQ ID NO: 1561474
agucucauuccaggaauuc

SEQ ID NO: 1674720 - RNA, 19 nt, Artificial Sequence
  Description of Artificial Sequence: Synthetic oligonucleotide
  Antisense strand to SEQ ID NO: 1674719
gaauuccuggaaugagacu

SEQ ID NO: 1674721 - RNA, 19 nt, Artificial Sequence
  Description of Artificial Sequence: Synthetic oligonucleotide
  Sense strand starting at position 2085 of SEQ ID NO: 1561474
cguucaugucucugaggcu

SEQ ID NO: 1674722 - RNA, 19 nt, Artificial Sequence
  Description of Artificial Sequence: Synthetic oligonucleotide
  Antisense strand to SEQ ID NO: 1674721
agccucagagacaugaacg

SEQ ID NO: 1674723 - RNA, 19 nt, Artificial Sequence
  Description of Artificial Sequence: Synthetic oligonucleotide
  Sense strand starting at position 2113 of SEQ ID NO: 1561474
agugaggagcgucgagauu

SEQ ID NO: 1674724 - RNA, 19 nt, Artificial Sequence
  Description of Artificial Sequence: Synthetic oligonucleotide
  Antisense strand to SEQ ID NO: 1674723
aaucucgacgcuccucacu

SEQ ID NO: 1674725 - RNA, 19 nt, Artificial Sequence
  Description of Artificial Sequence: Synthetic oligonucleotide
  Sense strand starting at position 2204 of SEQ ID NO: 1561474
cuuuaauccuccuuagagg

SEQ ID NO: 1674726 - RNA, 19 nt, Artificial Sequence
  Description of Artificial Sequence: Synthetic oligonucleotide
  Antisense strand to SEQ ID NO: 1674725
ccucuaaggaggauuaaag

SEQ ID NO: 1674727 - RNA, 19 nt, Artificial Sequence
  Description of Artificial Sequence: Synthetic oligonucleotide
  Sense strand starting at position 2438 of SEQ ID NO: 1561474
acgggaaccuuugugguuu

SEQ ID NO: 1674728 - RNA, 19 nt, Artificial Sequence
  Description of Artificial Sequence: Synthetic oligonucleotide
  Antisense strand to SEQ ID NO: 1674727
aaaccacaaagguucccgu

SEQ ID NO: 1674729 - RNA, 19 nt, Artificial Sequence
  Description of Artificial Sequence: Synthetic oligonucleotide
  Sense strand starting at position 2558 of SEQ ID NO: 1561474
guuccagacucacuuuauu

SEQ ID NO: 1674730 - RNA, 19 nt, Artificial Sequence
  Description of Artificial Sequence: Synthetic oligonucleotide
  Antisense strand to SEQ ID NO: 1674729
aauaaagugagucuggaac

SEQ ID NO: 1674731 - RNA, 19 nt, Artificial Sequence
  Description of Artificial Sequence: Synthetic oligonucleotide
  Sense strand starting at position 2832 of SEQ ID NO: 1561474
acccuuacaccucgagauu

SEQ ID NO: 1674732 - RNA, 19 nt, Artificial Sequence
  Description of Artificial Sequence: Synthetic oligonucleotide
  Antisense strand to SEQ ID NO: 1674731
aaucucgagguguaagggu

SEQ ID NO: 1674733 - RNA, 19 nt, Artificial Sequence
  Description of Artificial Sequence: Synthetic oligonucleotide
  Sense strand starting at position 2933 of SEQ ID NO: 1561474
ccaguacuguuagaaacgu

SEQ ID NO: 1674734 - RNA, 19 nt, Artificial Sequence
  Description of Artificial Sequence: Synthetic oligonucleotide
  Antisense strand to SEQ ID NO: 1674733
acguuucuaacaguacugg

SEQ ID NO: 1674735 - RNA, 19 nt, Artificial Sequence
  Description of Artificial Sequence: Synthetic oligonucleotide
  Sense strand starting at position 3008 of SEQ ID NO: 1561474
gcggguucacuugaaguca

SEQ ID NO: 1674736 - RNA, 19 nt, Artificial Sequence
  Description of Artificial Sequence: Synthetic oligonucleotide
  Antisense strand to SEQ ID NO: 1674735
ugacuucaagugaacccgc

SEQ ID NO: 1674737 - RNA, 19 nt, Artificial Sequence
  Description of Artificial Sequence: Synthetic oligonucleotide
  Sense strand starting at position 3053 of SEQ ID NO: 1561474
uggugaaacuaccaucuuu

SEQ ID NO: 1674738 - RNA, 19 nt, Artificial Sequence
  Description of Artificial Sequence: Synthetic oligonucleotide
  Antisense strand to SEQ ID NO: 1674737
aaagaugguaguuucacca

SEQ ID NO: 1674739 - RNA, 19 nt, Artificial Sequence
  Description of Artificial Sequence: Synthetic oligonucleotide
  Sense strand starting at position 3135 of SEQ ID NO: 1561474
ggcugaggcucgagauuug

SEQ ID NO: 1674740 - RNA, 19 nt, Artificial Sequence
  Description of Artificial Sequence: Synthetic oligonucleotide
  Antisense strand to SEQ ID NO: 1674739
caaaucucgagccucagcc

SEQ ID NO: 1674741 - RNA, 19 nt, Artificial Sequence
  Description of Artificial Sequence: Synthetic oligonucleotide
  Sense strand starting at position 3319 of SEQ ID NO: 1561474
cucucagaauuguguuauu

SEQ ID NO: 1674742 - RNA, 19 nt, Artificial Sequence
  Description of Artificial Sequence: Synthetic oligonucleotide
  Antisense strand to SEQ ID NO: 1674741
aauaacacaauucugagag

SEQ ID NO: 1674743 - RNA, 19 nt, Artificial Sequence
  Description of Artificial Sequence: Synthetic oligonucleotide
  Sense strand starting at position 3387 of SEQ ID NO: 1561474
gggccaauucuauggccau

SEQ ID NO: 1674744 - RNA, 19 nt, Artificial Sequence
  Description of Artificial Sequence: Synthetic oligonucleotide
  Antisense strand to SEQ ID NO: 1674743
auggccauagaauuggccc

SEQ ID NO: 1674745 - RNA, 19 nt, Artificial Sequence
  Description of Artificial Sequence: Synthetic oligonucleotide
  Sense strand starting at position 3388 of SEQ ID NO: 1561474
ggccaauucuauggccauu

SEQ ID NO: 1674746 - RNA, 19 nt, Artificial Sequence
  Description of Artificial Sequence: Synthetic oligonucleotide
  Antisense strand to SEQ ID NO: 1674745
aauggccauagaauuggcc

SEQ ID NO: 1674747 - RNA, 19 nt, Artificial Sequence
  Description of Artificial Sequence: Synthetic oligonucleotide
  Sense strand starting at position 3419 of SEQ ID NO: 1561474
guccuaaccuucucaugga

SEQ ID NO: 1674748 - RNA, 19 nt, Artificial Sequence
  Description of Artificial Sequence: Synthetic oligonucleotide
  Antisense strand to SEQ ID NO: 1674747
uccaugagaagguuaggac

SEQ ID NO: 1674749 - RNA, 19 nt, Artificial Sequence
  Description of Artificial Sequence: Synthetic oligonucleotide
  Sense strand starting at position 3508 of SEQ ID NO: 1561474
gucaacuguccugagccua

SEQ ID NO: 1674750 - RNA, 19 nt, Artificial Sequence
  Description of Artificial Sequence: Synthetic oligonucleotide
  Antisense strand to SEQ ID NO: 1674749
uaggcucaggacaguugac

SEQ ID NO: 1674751 - RNA, 19 nt, Artificial Sequence
  Description of Artificial Sequence: Synthetic oligonucleotide
  Sense strand starting at position 3513 of SEQ ID NO: 1561474
cuguccugagccuaaguuu

SEQ ID NO: 1674752 - RNA, 19 nt, Artificial Sequence
  Description of Artificial Sequence: Synthetic oligonucleotide
  Antisense strand to SEQ ID NO: 1674751
aaacuuaggcucaggacag

SEQ ID NO: 1674753 - RNA, 19 nt, Artificial Sequence
  Description of Artificial Sequence: Synthetic oligonucleotide
  Sense strand starting at position 3524 of SEQ ID NO: 1561474
cuaaguuucuaaucuguga

SEQ ID NO: 1674754 - RNA, 19 nt, Artificial Sequence
  Description of Artificial Sequence: Synthetic oligonucleotide
  Antisense strand to SEQ ID NO: 1674753
ucacagauuagaaacuuag

SEQ ID NO: 1674755 - RNA, 19 nt, Artificial Sequence
  Description of Artificial Sequence: Synthetic oligonucleotide
  Sense strand starting at position 3527 of SEQ ID NO: 1561474
aguuucuaaucugugaaau

SEQ ID NO: 1674756 - RNA, 19 nt, Artificial Sequence
  Description of Artificial Sequence: Synthetic oligonucleotide
  Antisense strand to SEQ ID NO: 1674755
auuucacagauuagaaacu

SEQ ID NO: 1674757 - RNA, 19 nt, Artificial Sequence
  Description of Artificial Sequence: Synthetic oligonucleotide
  Sense strand starting at position 3588 of SEQ ID NO: 1561474
ucaugugaggcagagagua

SEQ ID NO: 1674758 - RNA, 19 nt, Artificial Sequence
  Description of Artificial Sequence: Synthetic oligonucleotide
  Antisense strand to SEQ ID NO: 1674757
uacucucugccucacauga

SEQ ID NO: 1674759 - RNA, 19 nt, Artificial Sequence
  Description of Artificial Sequence: Synthetic oligonucleotide
  Sense strand starting at position 224 of SEQ ID NO: 1561475
ccgccacgacuuugauauu

SEQ ID NO: 1674760 - RNA, 19 nt, Artificial Sequence
  Description of Artificial Sequence: Synthetic oligonucleotide
  Antisense strand to SEQ ID NO: 1674759
aauaucaaagucguggcgg

SEQ ID NO: 1674761 - RNA, 19 nt, Artificial Sequence
  Description of Artificial Sequence: Synthetic oligonucleotide
  Sense strand starting at position 352 of SEQ ID NO: 1561475
aaggguuacuuuccuggau

SEQ ID NO: 1674762 - RNA, 19 nt, Artificial Sequence
  Description of Artificial Sequence: Synthetic oligonucleotide
  Antisense strand to SEQ ID NO: 1674761
auccaggaaaguaacccuu

SEQ ID NO: 1674763 - RNA, 19 nt, Artificial Sequence
  Description of Artificial Sequence: Synthetic oligonucleotide
  Sense strand starting at position 405 of SEQ ID NO: 1561475
agguauccguuucuaguau

SEQ ID NO: 1674764 - RNA, 19 nt, Artificial Sequence
  Description of Artificial Sequence: Synthetic oligonucleotide
  Antisense strand to SEQ ID NO: 1674763
auacuagaaacggauaccu

SEQ ID NO: 1674765 - RNA, 19 nt, Artificial Sequence
  Description of Artificial Sequence: Synthetic oligonucleotide
  Sense strand starting at position 416 of SEQ ID NO: 1561475
ucuaguaucuucccaguga

SEQ ID NO: 1674766 - RNA, 19 nt, Artificial Sequence
  Description of Artificial Sequence: Synthetic oligonucleotide
  Antisense strand to SEQ ID NO: 1674765
ucacugggaagauacuaga

SEQ ID NO: 1674767 - RNA, 19 nt, Artificial Sequence
  Description of Artificial Sequence: Synthetic oligonucleotide
  Sense strand starting at position 420 of SEQ ID NO: 1561475
guaucuucccagugaucac

SEQ ID NO: 1674768 - RNA, 19 nt, Artificial Sequence
  Description of Artificial Sequence: Synthetic oligonucleotide
  Antisense strand to SEQ ID NO: 1674767
gugaucacugggaagauac

SEQ ID NO: 1674769 - RNA, 19 nt, Artificial Sequence
  Description of Artificial Sequence: Synthetic oligonucleotide
  Sense strand starting at position 487 of SEQ ID NO: 1561475
uuuccugagccuuagcaaa

SEQ ID NO: 1674770 - RNA, 19 nt, Artificial Sequence
  Description of Artificial Sequence: Synthetic oligonucleotide
  Antisense strand to SEQ ID NO: 1674769
uuugcuaaggcucaggaaa

SEQ ID NO: 1674771 - RNA, 19 nt, Artificial Sequence
  Description of Artificial Sequence: Synthetic oligonucleotide
  Sense strand starting at position 651 of SEQ ID NO: 1561475
ggagaaugcucccuacuca

SEQ ID NO: 1674772 - RNA, 19 nt, Artificial Sequence
  Description of Artificial Sequence: Synthetic oligonucleotide
  Antisense strand to SEQ ID NO: 1674771
ugaguagggagcauucucc

SEQ ID NO: 1674773 - RNA, 19 nt, Artificial Sequence
  Description of Artificial Sequence: Synthetic oligonucleotide
  Sense strand starting at position 860 of SEQ ID NO: 1561475
gagggaucacacuguuuag

SEQ ID NO: 1674774 - RNA, 19 nt, Artificial Sequence
  Description of Artificial Sequence: Synthetic oligonucleotide
  Antisense strand to SEQ ID NO: 1674773
cuaaacagugugaucccuc

SEQ ID NO: 1674775 - RNA, 19 nt, Artificial Sequence
  Description of Artificial Sequence: Synthetic oligonucleotide
  Sense strand starting at position 878 of SEQ ID NO: 1561475
ggagcaaggucugcaagua

SEQ ID NO: 1674776 - RNA, 19 nt, Artificial Sequence
  Description of Artificial Sequence: Synthetic oligonucleotide
  Antisense strand to SEQ ID NO: 1674775
uacuugcagaccuugcucc

SEQ ID NO: 1674777 - RNA, 19 nt, Artificial Sequence
  Description of Artificial Sequence: Synthetic oligonucleotide
  Sense strand starting at position 879 of SEQ ID NO: 1561475
gagcaaggucugcaaguau

SEQ ID NO: 1674778 - RNA, 19 nt, Artificial Sequence
  Description of Artificial Sequence: Synthetic oligonucleotide
  Antisense strand to SEQ ID NO: 1674777
auacuugcagaccuugcuc

SEQ ID NO: 1674779 - RNA, 19 nt, Artificial Sequence
  Description of Artificial Sequence: Synthetic oligonucleotide
  Sense strand starting at position 890 of SEQ ID NO: 1561475
gcaaguaugggaugcuaag

SEQ ID NO: 1674780 - RNA, 19 nt, Artificial Sequence
  Description of Artificial Sequence: Synthetic oligonucleotide
  Antisense strand to SEQ ID NO: 1674779
cuuagcaucccauacuugc

SEQ ID NO: 1674781 - RNA, 19 nt, Artificial Sequence
  Description of Artificial Sequence: Synthetic oligonucleotide
  Sense strand starting at position 1010 of SEQ ID NO: 1561475
uggagucuuucagcagagu

SEQ ID NO: 1674782 - RNA, 19 nt, Artificial Sequence
  Description of Artificial Sequence: Synthetic oligonucleotide
  Antisense strand to SEQ ID NO: 1674781
acucugcugaaagacucca

SEQ ID NO: 1674783 - RNA, 19 nt, Artificial Sequence
  Description of Artificial Sequence: Synthetic oligonucleotide
  Sense strand starting at position 1011 of SEQ ID NO: 1561475
ggagucuuucagcagagug

SEQ ID NO: 1674784 - RNA, 19 nt, Artificial Sequence
  Description of Artificial Sequence: Synthetic oligonucleotide
  Antisense strand to SEQ ID NO: 1674783
cacucugcugaaagacucc

SEQ ID NO: 1674785 - RNA, 19 nt, Artificial Sequence
  Description of Artificial Sequence: Synthetic oligonucleotide
  Sense strand starting at position 1204 of SEQ ID NO: 1561475
gugggcaggucuuucauca

SEQ ID NO: 1674786 - RNA, 19 nt, Artificial Sequence
  Description of Artificial Sequence: Synthetic oligonucleotide
  Antisense strand to SEQ ID NO: 1674785
ugaugaaagaccugcccac

SEQ ID NO: 1674787 - RNA, 19 nt, Artificial Sequence
  Description of Artificial Sequence: Synthetic oligonucleotide
  Sense strand starting at position 2083 of SEQ ID NO: 1561475
acaaacugcgcuuggaaau

SEQ ID NO: 1674788 - RNA, 19 nt, Artificial Sequence
  Description of Artificial Sequence: Synthetic oligonucleotide
  Antisense strand to SEQ ID NO: 1674787
auuuccaagcgcaguuugu

SEQ ID NO: 1674789 - RNA, 19 nt, Artificial Sequence
  Description of Artificial Sequence: Synthetic oligonucleotide
  Sense strand starting at position 2225 of SEQ ID NO: 1561475
uggccaguucuucgagaga

SEQ ID NO: 1674790 - RNA, 19 nt, Artificial Sequence
  Description of Artificial Sequence: Synthetic oligonucleotide
  Antisense strand to SEQ ID NO: 1674789
ucucucgaagaacuggcca

SEQ ID NO: 1674791 - RNA, 19 nt, Artificial Sequence
  Description of Artificial Sequence: Synthetic oligonucleotide
  Sense strand starting at position 2272 of SEQ ID NO: 1561475
agagccagugcccaauaaa

SEQ ID NO: 1674792 - RNA, 19 nt, Artificial Sequence
  Description of Artificial Sequence: Synthetic oligonucleotide
  Antisense strand to SEQ ID NO: 1674791
uuuauugggcacuggcucu

SEQ ID NO: 1674793 - RNA, 19 nt, Artificial Sequence
  Description of Artificial Sequence: Synthetic oligonucleotide
  Sense strand starting at position 2323 of SEQ ID NO: 1561475
cucgcuauugggugauuca

SEQ ID NO: 1674794 - RNA, 19 nt, Artificial Sequence
  Description of Artificial Sequence: Synthetic oligonucleotide
  Antisense strand to SEQ ID NO: 1674793
ugaaucacccaauagcgag

SEQ ID NO: 1674795 - RNA, 19 nt, Artificial Sequence
  Description of Artificial Sequence: Synthetic oligonucleotide
  Sense strand starting at position 2324 of SEQ ID NO: 1561475
ucgcuauugggugauucaa

SEQ ID NO: 1674796 - RNA, 19 nt, Artificial Sequence
  Description of Artificial Sequence: Synthetic oligonucleotide
  Antisense strand to SEQ ID NO: 1674795
uugaaucacccaauagcga

SEQ ID NO: 1674797 - RNA, 19 nt, Artificial Sequence
  Description of Artificial Sequence: Synthetic oligonucleotide
  Sense strand starting at position 2326 of SEQ ID NO: 1561475
gcuauugggugauucaaga

SEQ ID NO: 1674798 - RNA, 19 nt, Artificial Sequence
  Description of Artificial Sequence: Synthetic oligonucleotide
  Antisense strand to SEQ ID NO: 1674797
ucuugaaucacccaauagc

SEQ ID NO: 1674799 - RNA, 19 nt, Artificial Sequence
  Description of Artificial Sequence: Synthetic oligonucleotide
  Sense strand starting at position 2448 of SEQ ID NO: 1561475
agcauucuucccgagcagu

SEQ ID NO: 1674800 - RNA, 19 nt, Artificial Sequence
  Description of Artificial Sequence: Synthetic oligonucleotide
  Antisense strand to SEQ ID NO: 1674799
acugcucgggaagaaugcu

SEQ ID NO: 1674801 - RNA, 19 nt, Artificial Sequence
  Description of Artificial Sequence: Synthetic oligonucleotide
  Sense strand starting at position 2562 of SEQ ID NO: 1561475
uggcgaucccugggaguuu

SEQ ID NO: 1674802 - RNA, 19 nt, Artificial Sequence
  Description of Artificial Sequence: Synthetic oligonucleotide
  Antisense strand to SEQ ID NO: 1674801
aaacucccagggaucgcca

SEQ ID NO: 1674803 - RNA, 19 nt, Artificial Sequence
  Description of Artificial Sequence: Synthetic oligonucleotide
  Sense strand starting at position 2602 of SEQ ID NO: 1561475
gagccagauugccugggua

SEQ ID NO: 1674804 - RNA, 19 nt, Artificial Sequence
  Description of Artificial Sequence: Synthetic oligonucleotide
  Antisense strand to SEQ ID NO: 1674803
uacccaggcaaucuggcuc

SEQ ID NO: 1674805 - RNA, 19 nt, Artificial Sequence
  Description of Artificial Sequence: Synthetic oligonucleotide
  Sense strand starting at position 2604 of SEQ ID NO: 1561475
gccagauugccuggguaac

SEQ ID NO: 1674806 - RNA, 19 nt, Artificial Sequence
  Description of Artificial Sequence: Synthetic oligonucleotide
  Antisense strand to SEQ ID NO: 1674805
guuacccaggcaaucuggc

SEQ ID NO: 1674807 - RNA, 19 nt, Artificial Sequence
  Description of Artificial Sequence: Synthetic oligonucleotide
  Sense strand starting at position 2605 of SEQ ID NO: 1561475
ccagauugccuggguaacu

SEQ ID NO: 1674808 - RNA, 19 nt, Artificial Sequence
  Description of Artificial Sequence: Synthetic oligonucleotide
  Antisense strand to SEQ ID NO: 1674807
aguuacccaggcaaucugg

SEQ ID NO: 1674809 - RNA, 19 nt, Artificial Sequence
  Description of Artificial Sequence: Synthetic oligonucleotide
  Sense strand starting at position 2614 of SEQ ID NO: 1561475
cuggguaacugguuuggaa

SEQ ID NO: 1674810 - RNA, 19 nt, Artificial Sequence
  Description of Artificial Sequence: Synthetic oligonucleotide
  Antisense strand to SEQ ID NO: 1674809
uuccaaaccaguuacccag

SEQ ID NO: 1674811 - RNA, 19 nt, Artificial Sequence
  Description of Artificial Sequence: Synthetic oligonucleotide
  Sense strand starting at position 2616 of SEQ ID NO: 1561475
ggguaacugguuuggaaua

SEQ ID NO: 1674812 - RNA, 19 nt, Artificial Sequence
  Description of Artificial Sequence: Synthetic oligonucleotide
  Antisense strand to SEQ ID NO: 1674811
uauuccaaaccaguuaccc

SEQ ID NO: 1674813 - RNA, 19 nt, Artificial Sequence
  Description of Artificial Sequence: Synthetic oligonucleotide
  Sense strand starting at position 2737 of SEQ ID NO: 1561475
aauggaaaguguuuagacu

SEQ ID NO: 1674814 - RNA, 19 nt, Artificial Sequence
  Description of Artificial Sequence: Synthetic oligonucleotide
  Antisense strand to SEQ ID NO: 1674813
agucuaaacacuuuccauu

SEQ ID NO: 1674815 - RNA, 19 nt, Artificial Sequence
  Description of Artificial Sequence: Synthetic oligonucleotide
  Sense strand starting at position 2745 of SEQ ID NO: 1561475
guguuuagacuagaaagug

SEQ ID NO: 1674816 - RNA, 19 nt, Artificial Sequence
  Description of Artificial Sequence: Synthetic oligonucleotide
  Antisense strand to SEQ ID NO: 1674815
cacuuucuagucuaaacac

SEQ ID NO: 1674817 - RNA, 19 nt, Artificial Sequence
  Description of Artificial Sequence: Synthetic oligonucleotide
  Sense strand starting at position 3312 of SEQ ID NO: 1561475
ggaguucaugucugcaaug

SEQ ID NO: 1674818 - RNA, 19 nt, Artificial Sequence
  Description of Artificial Sequence: Synthetic oligonucleotide
  Antisense strand to SEQ ID NO: 1674817
cauugcagacaugaacucc

SEQ ID NO: 1674819 - RNA, 19 nt, Artificial Sequence
  Description of Artificial Sequence: Synthetic oligonucleotide
  Sense strand starting at position 3317 of SEQ ID NO: 1561475
ucaugucugcaaugagcua

SEQ ID NO: 1674820 - RNA, 19 nt, Artificial Sequence
  Description of Artificial Sequence: Synthetic oligonucleotide
  Antisense strand to SEQ ID NO: 1674819
uagcucauugcagacauga

SEQ ID NO: 1674821 - RNA, 19 nt, Artificial Sequence
  Description of Artificial Sequence: Synthetic oligonucleotide
  Sense strand starting at position 3335 of SEQ ID NO: 1561475
augauuguguuacugcauu

SEQ ID NO: 1674822 - RNA, 19 nt, Artificial Sequence
  Description of Artificial Sequence: Synthetic oligonucleotide
  Antisense strand to SEQ ID NO: 1674821
aaugcaguaacacaaucau

SEQ ID NO: 1674823 - RNA, 19 nt, Artificial Sequence
  Description of Artificial Sequence: Synthetic oligonucleotide
  Sense strand starting at position 3417 of SEQ ID NO: 1561475
acucaugaccaguauuguu

SEQ ID NO: 1674824 - RNA, 19 nt, Artificial Sequence
  Description of Artificial Sequence: Synthetic oligonucleotide
  Antisense strand to SEQ ID NO: 1674823
aacaauacuggucaugagu

SEQ ID NO: 1674825 - RNA, 19 nt, Artificial Sequence
  Description of Artificial Sequence: Synthetic oligonucleotide
  Sense strand starting at position 3422 of SEQ ID NO: 1561475
ugaccaguauuguuugauu

SEQ ID NO: 1674826 - RNA, 19 nt, Artificial Sequence
  Description of Artificial Sequence: Synthetic oligonucleotide
  Antisense strand to SEQ ID NO: 1674825
aaucaaacaauacugguca

SEQ ID NO: 1674827 - RNA, 19 nt, Artificial Sequence
  Description of Artificial Sequence: Synthetic oligonucleotide
  Sense strand starting at position 3425 of SEQ ID NO: 1561475
ccaguauuguuugauuuac

SEQ ID NO: 1674828 - RNA, 19 nt, Artificial Sequence
  Description of Artificial Sequence: Synthetic oligonucleotide
  Antisense strand to SEQ ID NO: 1674827
guaaaucaaacaauacugg

SEQ ID NO: 1674829 - RNA, 19 nt, Artificial Sequence
  Description of Artificial Sequence: Synthetic oligonucleotide
  Sense strand starting at position 3548 of SEQ ID NO: 1561475
agcuccacacauuguauua

SEQ ID NO: 1674830 - RNA, 19 nt, Artificial Sequence
  Description of Artificial Sequence: Synthetic oligonucleotide
  Antisense strand to SEQ ID NO: 1674829
uaauacaauguguggagcu

SEQ ID NO: 1674831 - RNA, 19 nt, Artificial Sequence
  Description of Artificial Sequence: Synthetic oligonucleotide
  Sense strand starting at position 3558 of SEQ ID NO: 1561475
auuguauuaguuugaagug

SEQ ID NO: 1674832 - RNA, 19 nt, Artificial Sequence
  Description of Artificial Sequence: Synthetic oligonucleotide
  Antisense strand to SEQ ID NO: 1674831
cacuucaaacuaauacaau

SEQ ID NO: 1674833 - RNA, 19 nt, Artificial Sequence
  Description of Artificial Sequence: Synthetic oligonucleotide
  Sense strand starting at position 3930 of SEQ ID NO: 1561475
gugugcaguggcgagauau

SEQ ID NO: 1674834 - RNA, 19 nt, Artificial Sequence
  Description of Artificial Sequence: Synthetic oligonucleotide
  Antisense strand to SEQ ID NO: 1674833
auaucucgccacugcacac

SEQ ID NO: 1674835 - RNA, 19 nt, Artificial Sequence
  Description of Artificial Sequence: Synthetic oligonucleotide
  Sense strand starting at position 3931 of SEQ ID NO: 1561475
ugugcaguggcgagauauc

SEQ ID NO: 1674836 - RNA, 19 nt, Artificial Sequence
  Description of Artificial Sequence: Synthetic oligonucleotide
  Antisense strand to SEQ ID NO: 1674835
gauaucucgccacugcaca

SEQ ID NO: 1674837 - RNA, 19 nt, Artificial Sequence
  Description of Artificial Sequence: Synthetic oligonucleotide
  Sense strand starting at position 3942 of SEQ ID NO: 1561475
gagauaucagcccacugua

SEQ ID NO: 1674838 - RNA, 19 nt, Artificial Sequence
  Description of Artificial Sequence: Synthetic oligonucleotide
  Antisense strand to SEQ ID NO: 1674837
uacagugggcugauaucuc

SEQ ID NO: 1674839 - RNA, 19 nt, Artificial Sequence
  Description of Artificial Sequence: Synthetic oligonucleotide
  Sense strand starting at position 140 of SEQ ID NO: 1561476
ggcuaauaacaguaucuac

SEQ ID NO: 1674840 - RNA, 19 nt, Artificial Sequence
  Description of Artificial Sequence: Synthetic oligonucleotide
  Antisense strand to SEQ ID NO: 1674839
guagauacuguuauuagcc

SEQ ID NO: 1674841 - RNA, 19 nt, Artificial Sequence
  Description of Artificial Sequence: Synthetic oligonucleotide
  Sense strand starting at position 183 of SEQ ID NO: 1561476
aaugaauugcuguacaguc

SEQ ID NO: 1674842 - RNA, 19 nt, Artificial Sequence
  Description of Artificial Sequence: Synthetic oligonucleotide
  Antisense strand to SEQ ID NO: 1674841
gacuguacagcaauucauu

SEQ ID NO: 1674843 - RNA, 19 nt, Artificial Sequence
  Description of Artificial Sequence: Synthetic oligonucleotide
  Sense strand starting at position 185 of SEQ ID NO: 1561476
ugaauugcuguacagucau

SEQ ID NO: 1674844 - RNA, 19 nt, Artificial Sequence
  Description of Artificial Sequence: Synthetic oligonucleotide
  Antisense strand to SEQ ID NO: 1674843
augacuguacagcaauuca

SEQ ID NO: 1674845 - RNA, 19 nt, Artificial Sequence
  Description of Artificial Sequence: Synthetic oligonucleotide
  Sense strand starting at position 191 of SEQ ID NO: 1561476
gcuguacagucauuugcaa

SEQ ID NO: 1674846 - RNA, 19 nt, Artificial Sequence
  Description of Artificial Sequence: Synthetic oligonucleotide
  Antisense strand to SEQ ID NO: 1674845
uugcaaaugacuguacagc

SEQ ID NO: 1674847 - RNA, 19 nt, Artificial Sequence
  Description of Artificial Sequence: Synthetic oligonucleotide
  Sense strand starting at position 366 of SEQ ID NO: 1561476
ucaucauaaugucugagca

SEQ ID NO: 1674848 - RNA, 19 nt, Artificial Sequence
  Description of Artificial Sequence: Synthetic oligonucleotide
  Antisense strand to SEQ ID NO: 1674847
ugcucagacauuaugauga

SEQ ID NO: 1674849 - RNA, 19 nt, Artificial Sequence
  Description of Artificial Sequence: Synthetic oligonucleotide
  Sense strand starting at position 370 of SEQ ID NO: 1561476
cauaaugucugagcacaga

SEQ ID NO: 1674850 - RNA, 19 nt, Artificial Sequence
  Description of Artificial Sequence: Synthetic oligonucleotide
  Antisense strand to SEQ ID NO: 1674849
ucugugcucagacauuaug

SEQ ID NO: 1674851 - RNA, 19 nt, Artificial Sequence
  Description of Artificial Sequence: Synthetic oligonucleotide
  Sense strand starting at position 431 of SEQ ID NO: 1561476
cuccuauccuggcuaaugu

SEQ ID NO: 1674852 - RNA, 19 nt, Artificial Sequence
  Description of Artificial Sequence: Synthetic oligonucleotide
  Antisense strand to SEQ ID NO: 1674851
acauuagccaggauaggag

SEQ ID NO: 1674853 - RNA, 19 nt, Artificial Sequence
  Description of Artificial Sequence: Synthetic oligonucleotide
  Sense strand starting at position 458 of SEQ ID NO: 1561476
gcugcugcuuuaucaguca

SEQ ID NO: 1674854 - RNA, 19 nt, Artificial Sequence
  Description of Artificial Sequence: Synthetic oligonucleotide
  Antisense strand to SEQ ID NO: 1674853
ugacugauaaagcagcagc

SEQ ID NO: 1674855 - RNA, 19 nt, Artificial Sequence
  Description of Artificial Sequence: Synthetic oligonucleotide
  Sense strand starting at position 461 of SEQ ID NO: 1561476
gcugcuuuaucagucagag

SEQ ID NO: 1674856 - RNA, 19 nt, Artificial Sequence
  Description of Artificial Sequence: Synthetic oligonucleotide
  Antisense strand to SEQ ID NO: 1674855
cucugacugauaaagcagc

SEQ ID NO: 1674857 - RNA, 19 nt, Artificial Sequence
  Description of Artificial Sequence: Synthetic oligonucleotide
  Sense strand starting at position 505 of SEQ ID NO: 1561476
ccuucuggguaagauuuau

SEQ ID NO: 1674858 - RNA, 19 nt, Artificial Sequence
  Description of Artificial Sequence: Synthetic oligonucleotide
  Antisense strand to SEQ ID NO: 1674857
auaaaucuuacccagaagg

SEQ ID NO: 1674859 - RNA, 19 nt, Artificial Sequence
  Description of Artificial Sequence: Synthetic oligonucleotide
  Sense strand starting at position 623 of SEQ ID NO: 1561476
cccaaauccugugucguuu

SEQ ID NO: 1674860 - RNA, 19 nt, Artificial Sequence
  Description of Artificial Sequence: Synthetic oligonucleotide
  Antisense strand to SEQ ID NO: 1674859
aaacgacacaggauuuggg

SEQ ID NO: 1674861 - RNA, 19 nt, Artificial Sequence
  Description of Artificial Sequence: Synthetic oligonucleotide
  Sense strand starting at position 642 of SEQ ID NO: 1561476
uuaccauucuuagugagac

SEQ ID NO: 1674862 - RNA, 19 nt, Artificial Sequence
  Description of Artificial Sequence: Synthetic oligonucleotide
  Antisense strand to SEQ ID NO: 1674861
gucucacuaagaaugguaa

SEQ ID NO: 1674863 - RNA, 19 nt, Artificial Sequence
  Description of Artificial Sequence: Synthetic oligonucleotide
  Sense strand starting at position 745 of SEQ ID NO: 1561476
gcucaagggcauugagacu

SEQ ID NO: 1674864 - RNA, 19 nt, Artificial Sequence
  Description of Artificial Sequence: Synthetic oligonucleotide
  Antisense strand to SEQ ID NO: 1674863
agucucaaugcccuugagc

SEQ ID NO: 1674865 - RNA, 19 nt, Artificial Sequence
  Description of Artificial Sequence: Synthetic oligonucleotide
  Sense strand starting at position 805 of SEQ ID NO: 1561476
guuuaaagggccuauuauu

SEQ ID NO: 1674866 - RNA, 19 nt, Artificial Sequence
  Description of Artificial Sequence: Synthetic oligonucleotide
  Antisense strand to SEQ ID NO: 1674865
aauaauaggcccuuuaaac

SEQ ID NO: 1674867 - RNA, 19 nt, Artificial Sequence
  Description of Artificial Sequence: Synthetic oligonucleotide
  Sense strand starting at position 813 of SEQ ID NO: 1561476
ggccuauuauuagaaggac

SEQ ID NO: 1674868 - RNA, 19 nt, Artificial Sequence
  Description of Artificial Sequence: Synthetic oligonucleotide
  Antisense strand to SEQ ID NO: 1674867
guccuucuaauaauaggcc

SEQ ID NO: 1674869 - RNA, 19 nt, Artificial Sequence
  Description of Artificial Sequence: Synthetic oligonucleotide
  Sense strand starting at position 1054 of SEQ ID NO: 1561476
gaaagucuagggcagaguu

SEQ ID NO: 1674870 - RNA, 19 nt, Artificial Sequence
  Description of Artificial Sequence: Synthetic oligonucleotide
  Antisense strand to SEQ ID NO: 1674869
aacucugcccuagacuuuc

SEQ ID NO: 1674871 - RNA, 19 nt, Artificial Sequence
  Description of Artificial Sequence: Synthetic oligonucleotide
  Sense strand starting at position 1088 of SEQ ID NO: 1561476
ggguuucucucccaauaga

SEQ ID NO: 1674872 - RNA, 19 nt, Artificial Sequence
  Description of Artificial Sequence: Synthetic oligonucleotide
  Antisense strand to SEQ ID NO: 1674871
ucuauugggagagaaaccc

SEQ ID NO: 1674873 - RNA, 19 nt, Artificial Sequence
  Description of Artificial Sequence: Synthetic oligonucleotide
  Sense strand starting at position 1186 of SEQ ID NO: 1561476
ugcuuauguggccagagga

SEQ ID NO: 1674874 - RNA, 19 nt, Artificial Sequence
  Description of Artificial Sequence: Synthetic oligonucleotide
  Antisense strand to SEQ ID NO: 1674873
uccucuggccacauaagca

SEQ ID NO: 1674875 - RNA, 19 nt, Artificial Sequence
  Description of Artificial Sequence: Synthetic oligonucleotide
  Sense strand starting at position 1208 of SEQ ID NO: 1561476
ugaguacucuggccacaua

SEQ ID NO: 1674876 - RNA, 19 nt, Artificial Sequence
  Description of Artificial Sequence: Synthetic oligonucleotide
  Antisense strand to SEQ ID NO: 1674875
uauguggccagaguacuca

SEQ ID NO: 1674877 - RNA, 19 nt, Artificial Sequence
  Description of Artificial Sequence: Synthetic oligonucleotide
  Sense strand starting at position 1209 of SEQ ID NO: 1561476
gaguacucuggccacauaa

SEQ ID NO: 1674878 - RNA, 19 nt, Artificial Sequence
  Description of Artificial Sequence: Synthetic oligonucleotide
  Antisense strand to SEQ ID NO: 1674877
uuauguggccagaguacuc

SEQ ID NO: 1674879 - RNA, 19 nt, Artificial Sequence
  Description of Artificial Sequence: Synthetic oligonucleotide
  Sense strand starting at position 1318 of SEQ ID NO: 1561476
accgaagugccacagagau

SEQ ID NO: 1674880 - RNA, 19 nt, Artificial Sequence
  Description of Artificial Sequence: Synthetic oligonucleotide
  Antisense strand to SEQ ID NO: 1674879
aucucuguggcacuucggu

SEQ ID NO: 1674881 - RNA, 19 nt, Artificial Sequence
  Description of Artificial Sequence: Synthetic oligonucleotide
  Sense strand starting at position 1378 of SEQ ID NO: 1561476
agccauguguacucacaga

SEQ ID NO: 1674882 - RNA, 19 nt, Artificial Sequence
  Description of Artificial Sequence: Synthetic oligonucleotide
  Antisense strand to SEQ ID NO: 1674881
ucugugaguacacauggcu

SEQ ID NO: 1674883 - RNA, 19 nt, Artificial Sequence
  Description of Artificial Sequence: Synthetic oligonucleotide
  Sense strand starting at position 1383 of SEQ ID NO: 1561476
uguguacucacagauguug

SEQ ID NO: 1674884 - RNA, 19 nt, Artificial Sequence
  Description of Artificial Sequence: Synthetic oligonucleotide
  Antisense strand to SEQ ID NO: 1674883
caacaucugugaguacaca

SEQ ID NO: 1674885 - RNA, 19 nt, Artificial Sequence
  Description of Artificial Sequence: Synthetic oligonucleotide
  Sense strand starting at position 1561 of SEQ ID NO: 1561476
gucuaugaccuuugacauc

SEQ ID NO: 1674886 - RNA, 19 nt, Artificial Sequence
  Description of Artificial Sequence: Synthetic oligonucleotide
  Antisense strand to SEQ ID NO: 1674885
gaugucaaaggucauagac

SEQ ID NO: 1674887 - RNA, 19 nt, Artificial Sequence
  Description of Artificial Sequence: Synthetic oligonucleotide
  Sense strand starting at position 1567 of SEQ ID NO: 1561476
gaccuuugacaucgccaga

SEQ ID NO: 1674888 - RNA, 19 nt, Artificial Sequence
  Description of Artificial Sequence: Synthetic oligonucleotide
  Antisense strand to SEQ ID NO: 1674887
ucuggcgaugucaaagguc

SEQ ID NO: 1674889 - RNA, 19 nt, Artificial Sequence
  Description of Artificial Sequence: Synthetic oligonucleotide
  Sense strand starting at position 1712 of SEQ ID NO: 1561476
agagucuucucacuggugu

SEQ ID NO: 1674890 - RNA, 19 nt, Artificial Sequence
  Description of Artificial Sequence: Synthetic oligonucleotide
  Antisense strand to SEQ ID NO: 1674889
acaccagugagaagacucu

SEQ ID NO: 1674891 - RNA, 19 nt, Artificial Sequence
  Description of Artificial Sequence: Synthetic oligonucleotide
  Sense strand starting at position 1718 of SEQ ID NO: 1561476
uucucacuggugugaccua

SEQ ID NO: 1674892 - RNA, 19 nt, Artificial Sequence
  Description of Artificial Sequence: Synthetic oligonucleotide
  Antisense strand to SEQ ID NO: 1674891
uaggucacaccagugagaa

SEQ ID NO: 1674893 - RNA, 19 nt, Artificial Sequence
  Description of Artificial Sequence: Synthetic oligonucleotide
  Sense strand starting at position 1760 of SEQ ID NO: 1561476
cccugaacucagcguggaa

SEQ ID NO: 1674894 - RNA, 19 nt, Artificial Sequence
  Description of Artificial Sequence: Synthetic oligonucleotide
  Antisense strand to SEQ ID NO: 1674893
uuccacgcugaguucaggg

SEQ ID NO: 1674895 - RNA, 19 nt, Artificial Sequence
  Description of Artificial Sequence: Synthetic oligonucleotide
  Sense strand starting at position 1772 of SEQ ID NO: 1561476
cguggaagccuugaucuuu

SEQ ID NO: 1674896 - RNA, 19 nt, Artificial Sequence
  Description of Artificial Sequence: Synthetic oligonucleotide
  Antisense strand to SEQ ID NO: 1674895
aaagaucaaggcuuccacg

SEQ ID NO: 1674897 - RNA, 19 nt, Artificial Sequence
  Description of Artificial Sequence: Synthetic oligonucleotide
  Sense strand starting at position 2216 of SEQ ID NO: 1561476
gcccuauggcgcguuugau

SEQ ID NO: 1674898 - RNA, 19 nt, Artificial Sequence
  Description of Artificial Sequence: Synthetic oligonucleotide
  Antisense strand to SEQ ID NO: 1674897
aucaaacgcgccauagggc

SEQ ID NO: 1674899 - RNA, 19 nt, Artificial Sequence
  Description of Artificial Sequence: Synthetic oligonucleotide
  Sense strand starting at position 2308 of SEQ ID NO: 1561476
cgcguugacucauucauug

SEQ ID NO: 1674900 - RNA, 19 nt, Artificial Sequence
  Description of Artificial Sequence: Synthetic oligonucleotide
  Antisense strand to SEQ ID NO: 1674899
caaugaaugagucaacgcg

SEQ ID NO: 1674901 - RNA, 19 nt, Artificial Sequence
  Description of Artificial Sequence: Synthetic oligonucleotide
  Sense strand starting at position 2440 of SEQ ID NO: 1561476
agggagugacgucagguua

SEQ ID NO: 1674902 - RNA, 19 nt, Artificial Sequence
  Description of Artificial Sequence: Synthetic oligonucleotide
  Antisense strand to SEQ ID NO: 1674901
uaaccugacgucacucccu

SEQ ID NO: 1674903 - RNA, 19 nt, Artificial Sequence
  Description of Artificial Sequence: Synthetic oligonucleotide
  Sense strand starting at position 2643 of SEQ ID NO: 1561476
uaacaauguguccgaggga

SEQ ID NO: 1674904 - RNA, 19 nt, Artificial Sequence
  Description of Artificial Sequence: Synthetic oligonucleotide
  Antisense strand to SEQ ID NO: 1674903
ucccucggacacauuguua

SEQ ID NO: 1674905 - RNA, 19 nt, Artificial Sequence
  Description of Artificial Sequence: Synthetic oligonucleotide
  Sense strand starting at position 2646 of SEQ ID NO: 1561476
caauguguccgagggagga

SEQ ID NO: 1674906 - RNA, 19 nt, Artificial Sequence
  Description of Artificial Sequence: Synthetic oligonucleotide
  Antisense strand to SEQ ID NO: 1674905
uccucccucggacacauug

SEQ ID NO: 1674907 - RNA, 19 nt, Artificial Sequence
  Description of Artificial Sequence: Synthetic oligonucleotide
  Sense strand starting at position 2673 of SEQ ID NO: 1561476
aagccagauuucugagguu

SEQ ID NO: 1674908 - RNA, 19 nt, Artificial Sequence
  Description of Artificial Sequence: Synthetic oligonucleotide
  Antisense strand to SEQ ID NO: 1674907
aaccucagaaaucuggcuu

SEQ ID NO: 1674909 - RNA, 19 nt, Artificial Sequence
  Description of Artificial Sequence: Synthetic oligonucleotide
  Sense strand starting at position 3026 of SEQ ID NO: 1561476
agggaaacguuuccaucua

SEQ ID NO: 1674910 - RNA, 19 nt, Artificial Sequence
  Description of Artificial Sequence: Synthetic oligonucleotide
  Antisense strand to SEQ ID NO: 1674909
uagauggaaacguuucccu

SEQ ID NO: 1674911 - RNA, 19 nt, Artificial Sequence
  Description of Artificial Sequence: Synthetic oligonucleotide
  Sense strand starting at position 3027 of SEQ ID NO: 1561476
gggaaacguuuccaucuag

SEQ ID NO: 1674912 - RNA, 19 nt, Artificial Sequence
  Description of Artificial Sequence: Synthetic oligonucleotide
  Antisense strand to SEQ ID NO: 1674911
cuagauggaaacguuuccc

SEQ ID NO: 1674913 - RNA, 19 nt, Artificial Sequence
  Description of Artificial Sequence: Synthetic oligonucleotide
  Sense strand starting at position 3838 of SEQ ID NO: 1561476
cauggagguccaugagauc

SEQ ID NO: 1674914 - RNA, 19 nt, Artificial Sequence
  Description of Artificial Sequence: Synthetic oligonucleotide
  Antisense strand to SEQ ID NO: 1674913
gaucucauggaccuccaug

SEQ ID NO: 1674915 - RNA, 19 nt, Artificial Sequence
  Description of Artificial Sequence: Synthetic oligonucleotide
  Sense strand starting at position 3934 of SEQ ID NO: 1561476
cuauguuggcuagguugaa

SEQ ID NO: 1674916 - RNA, 19 nt, Artificial Sequence
  Description of Artificial Sequence: Synthetic oligonucleotide
  Antisense strand to SEQ ID NO: 1674915
uucaaccuagccaacauag

SEQ ID NO: 1674917 - RNA, 19 nt, Artificial Sequence
  Description of Artificial Sequence: Synthetic oligonucleotide
  Sense strand starting at position 3935 of SEQ ID NO: 1561476
uauguuggcuagguugaau

SEQ ID NO: 1674918 - RNA, 19 nt, Artificial Sequence
  Description of Artificial Sequence: Synthetic oligonucleotide
  Antisense strand to SEQ ID NO: 1674917
auucaaccuagccaacaua

SEQ ID NO: 1674919 - RNA, 19 nt, Artificial Sequence
  Description of Artificial Sequence: Synthetic oligonucleotide
  Sense strand starting at position 172 of SEQ ID NO: 1561477
ucaucauaaugucugagca

SEQ ID NO: 1674920 - RNA, 19 nt, Artificial Sequence
  Description of Artificial Sequence: Synthetic oligonucleotide
  Antisense strand to SEQ ID NO: 1674919
ugcucagacauuaugauga

SEQ ID NO: 1674921 - RNA, 19 nt, Artificial Sequence
  Description of Artificial Sequence: Synthetic oligonucleotide
  Sense strand starting at position 174 of SEQ ID NO: 1561477
aucauaaugucugagcaca

SEQ ID NO: 1674922 - RNA, 19 nt, Artificial Sequence
  Description of Artificial Sequence: Synthetic oligonucleotide
  Antisense strand to SEQ ID NO: 1674921
ugugcucagacauuaugau

SEQ ID NO: 1674923 - RNA, 19 nt, Artificial Sequence
  Description of Artificial Sequence: Synthetic oligonucleotide
  Sense strand starting at position 176 of SEQ ID NO: 1561477
cauaaugucugagcacaga

SEQ ID NO: 1674924 - RNA, 19 nt, Artificial Sequence
  Description of Artificial Sequence: Synthetic oligonucleotide
  Antisense strand to SEQ ID NO: 1674923
ucugugcucagacauuaug

SEQ ID NO: 1674925 - RNA, 19 nt, Artificial Sequence
  Description of Artificial Sequence: Synthetic oligonucleotide
  Sense strand starting at position 237 of SEQ ID NO: 1561477
cuccuauccuggcuaaugu

SEQ ID NO: 1674926 - RNA, 19 nt, Artificial Sequence
  Description of Artificial Sequence: Synthetic oligonucleotide
  Antisense strand to SEQ ID NO: 1674925
acauuagccaggauaggag

SEQ ID NO: 1674927 - RNA, 19 nt, Artificial Sequence
  Description of Artificial Sequence: Synthetic oligonucleotide
  Sense strand starting at position 260 of SEQ ID NO: 1561477
gucugcugcugcuuuauca

SEQ ID NO: 1674928 - RNA, 19 nt, Artificial Sequence
  Description of Artificial Sequence: Synthetic oligonucleotide
  Antisense strand to SEQ ID NO: 1674927
ugauaaagcagcagcagac

SEQ ID NO: 1674929 - RNA, 19 nt, Artificial Sequence
  Description of Artificial Sequence: Synthetic oligonucleotide
  Sense strand starting at position 264 of SEQ ID NO: 1561477
gcugcugcuuuaucaguca

SEQ ID NO: 1674930 - RNA, 19 nt, Artificial Sequence
  Description of Artificial Sequence: Synthetic oligonucleotide
  Antisense strand to SEQ ID NO: 1674929
ugacugauaaagcagcagc

SEQ ID NO: 1674931 - RNA, 19 nt, Artificial Sequence
  Description of Artificial Sequence: Synthetic oligonucleotide
  Sense strand starting at position 267 of SEQ ID NO: 1561477
gcugcuuuaucagucagag

SEQ ID NO: 1674932 - RNA, 19 nt, Artificial Sequence
  Description of Artificial Sequence: Synthetic oligonucleotide
  Antisense strand to SEQ ID NO: 1674931
cucugacugauaaagcagc

SEQ ID NO: 1674933 - RNA, 19 nt, Artificial Sequence
  Description of Artificial Sequence: Synthetic oligonucleotide
  Sense strand starting at position 311 of SEQ ID NO: 1561477
ccuucuggguaagauuuau

SEQ ID NO: 1674934 - RNA, 19 nt, Artificial Sequence
  Description of Artificial Sequence: Synthetic oligonucleotide
  Antisense strand to SEQ ID NO: 1674933
auaaaucuuacccagaagg

SEQ ID NO: 1674935 - RNA, 19 nt, Artificial Sequence
  Description of Artificial Sequence: Synthetic oligonucleotide
  Sense strand starting at position 428 of SEQ ID NO: 1561477
gcccaaauccugugucguu

SEQ ID NO: 1674936 - RNA, 19 nt, Artificial Sequence
  Description of Artificial Sequence: Synthetic oligonucleotide
  Antisense strand to SEQ ID NO: 1674935
aacgacacaggauuugggc

SEQ ID NO: 1674937 - RNA, 19 nt, Artificial Sequence
  Description of Artificial Sequence: Synthetic oligonucleotide
  Sense strand starting at position 429 of SEQ ID NO: 1561477
cccaaauccugugucguuu

SEQ ID NO: 1674938 - RNA, 19 nt, Artificial Sequence
  Description of Artificial Sequence: Synthetic oligonucleotide
  Antisense strand to SEQ ID NO: 1674937
aaacgacacaggauuuggg

SEQ ID NO: 1674939 - RNA, 19 nt, Artificial Sequence
  Description of Artificial Sequence: Synthetic oligonucleotide
  Sense strand starting at position 448 of SEQ ID NO: 1561477
uuaccauucuuagugagac

SEQ ID NO: 1674940 - RNA, 19 nt, Artificial Sequence
  Description of Artificial Sequence: Synthetic oligonucleotide
  Antisense strand to SEQ ID NO: 1674939
gucucacuaagaaugguaa

SEQ ID NO: 1674941 - RNA, 19 nt, Artificial Sequence
  Description of Artificial Sequence: Synthetic oligonucleotide
  Sense strand starting at position 551 of SEQ ID NO: 1561477
gcucaagggcauugagacu

SEQ ID NO: 1674942 - RNA, 19 nt, Artificial Sequence
  Description of Artificial Sequence: Synthetic oligonucleotide
  Antisense strand to SEQ ID NO: 1674941
agucucaaugcccuugagc

SEQ ID NO: 1674943 - RNA, 19 nt, Artificial Sequence
  Description of Artificial Sequence: Synthetic oligonucleotide
  Sense strand starting at position 611 of SEQ ID NO: 1561477
guuuaaagggccuauuauu

SEQ ID NO: 1674944 - RNA, 19 nt, Artificial Sequence
  Description of Artificial Sequence: Synthetic oligonucleotide
  Antisense strand to SEQ ID NO: 1674943
aauaauaggcccuuuaaac

SEQ ID NO: 1674945 - RNA, 19 nt, Artificial Sequence
  Description of Artificial Sequence: Synthetic oligonucleotide
  Sense strand starting at position 619 of SEQ ID NO: 1561477
ggccuauuauuagaaggac

SEQ ID NO: 1674946 - RNA, 19 nt, Artificial Sequence
  Description of Artificial Sequence: Synthetic oligonucleotide
  Antisense strand to SEQ ID NO: 1674945
guccuucuaauaauaggcc

SEQ ID NO: 1674947 - RNA, 19 nt, Artificial Sequence
  Description of Artificial Sequence: Synthetic oligonucleotide
  Sense strand starting at position 860 of SEQ ID NO: 1561477
gaaagucuagggcagaguu

SEQ ID NO: 1674948 - RNA, 19 nt, Artificial Sequence
  Description of Artificial Sequence: Synthetic oligonucleotide
  Antisense strand to SEQ ID NO: 1674947
aacucugcccuagacuuuc

SEQ ID NO: 1674949 - RNA, 19 nt, Artificial Sequence
  Description of Artificial Sequence: Synthetic oligonucleotide
  Sense strand starting at position 894 of SEQ ID NO: 1561477
ggguuucucucccaauaga

SEQ ID NO: 1674950 - RNA, 19 nt, Artificial Sequence
  Description of Artificial Sequence: Synthetic oligonucleotide
  Antisense strand to SEQ ID NO: 1674949
ucuauugggagagaaaccc

SEQ ID NO: 1674951 - RNA, 19 nt, Artificial Sequence
  Description of Artificial Sequence: Synthetic oligonucleotide
  Sense strand starting at position 992 of SEQ ID NO: 1561477
ugcuuauguggccagagga

SEQ ID NO: 1674952 - RNA, 19 nt, Artificial Sequence
  Description of Artificial Sequence: Synthetic oligonucleotide
  Antisense strand to SEQ ID NO: 1674951
uccucuggccacauaagca

SEQ ID NO: 1674953 - RNA, 19 nt, Artificial Sequence
  Description of Artificial Sequence: Synthetic oligonucleotide
  Sense strand starting at position 1014 of SEQ ID NO: 1561477
ugaguacucuggccacaua

SEQ ID NO: 1674954 - RNA, 19 nt, Artificial Sequence
  Description of Artificial Sequence: Synthetic oligonucleotide
  Antisense strand to SEQ ID NO: 1674953
uauguggccagaguacuca

SEQ ID NO: 1674955 - RNA, 19 nt, Artificial Sequence
  Description of Artificial Sequence: Synthetic oligonucleotide
  Sense strand starting at position 1015 of SEQ ID NO: 1561477
gaguacucuggccacauaa

SEQ ID NO: 1674956 - RNA, 19 nt, Artificial Sequence
  Description of Artificial Sequence: Synthetic oligonucleotide
  Antisense strand to SEQ ID NO: 1674955
uuauguggccagaguacuc

SEQ ID NO: 1674957 - RNA, 19 nt, Artificial Sequence
  Description of Artificial Sequence: Synthetic oligonucleotide
  Sense strand starting at position 1124 of SEQ ID NO: 1561477
accgaagugccacagagau

SEQ ID NO: 1674958 - RNA, 19 nt, Artificial Sequence
  Description of Artificial Sequence: Synthetic oligonucleotide
  Antisense strand to SEQ ID NO: 1674957
aucucuguggcacuucggu

SEQ ID NO: 1674959 - RNA, 19 nt, Artificial Sequence
  Description of Artificial Sequence: Synthetic oligonucleotide
  Sense strand starting at position 1184 of SEQ ID NO: 1561477
agccauguguacucacaga

SEQ ID NO: 1674960 - RNA, 19 nt, Artificial Sequence
  Description of Artificial Sequence: Synthetic oligonucleotide
  Antisense strand to SEQ ID NO: 1674959
ucugugaguacacauggcu

SEQ ID NO: 1674961 - RNA, 19 nt, Artificial Sequence
  Description of Artificial Sequence: Synthetic oligonucleotide
  Sense strand starting at position 1189 of SEQ ID NO: 1561477
uguguacucacagauguug

SEQ ID NO: 1674962 - RNA, 19 nt, Artificial Sequence
  Description of Artificial Sequence: Synthetic oligonucleotide
  Antisense strand to SEQ ID NO: 1674961
caacaucugugaguacaca

SEQ ID NO: 1674963 - RNA, 19 nt, Artificial Sequence
  Description of Artificial Sequence: Synthetic oligonucleotide
  Sense strand starting at position 1367 of SEQ ID NO: 1561477
gucuaugaccuuugacauc

SEQ ID NO: 1674964 - RNA, 19 nt, Artificial Sequence
  Description of Artificial Sequence: Synthetic oligonucleotide
  Antisense strand to SEQ ID NO: 1674963
gaugucaaaggucauagac

SEQ ID NO: 1674965 - RNA, 19 nt, Artificial Sequence
  Description of Artificial Sequence: Synthetic oligonucleotide
  Sense strand starting at position 1373 of SEQ ID NO: 1561477
gaccuuugacaucgccaga

SEQ ID NO: 1674966 - RNA, 19 nt, Artificial Sequence
  Description of Artificial Sequence: Synthetic oligonucleotide
  Antisense strand to SEQ ID NO: 1674965
ucuggcgaugucaaagguc

SEQ ID NO: 1674967 - RNA, 19 nt, Artificial Sequence
  Description of Artificial Sequence: Synthetic oligonucleotide
  Sense strand starting at position 1438 of SEQ ID NO: 1561477
aacucuaauugauggaguu

SEQ ID NO: 1674968 - RNA, 19 nt, Artificial Sequence
  Description of Artificial Sequence: Synthetic oligonucleotide
  Antisense strand to SEQ ID NO: 1674967
aacuccaucaauuagaguu

SEQ ID NO: 1674969 - RNA, 19 nt, Artificial Sequence
  Description of Artificial Sequence: Synthetic oligonucleotide
  Sense strand starting at position 1518 of SEQ ID NO: 1561477
agagucuucucacuggugu

SEQ ID NO: 1674970 - RNA, 19 nt, Artificial Sequence
  Description of Artificial Sequence: Synthetic oligonucleotide
  Antisense strand to SEQ ID NO: 1674969
acaccagugagaagacucu

SEQ ID NO: 1674971 - RNA, 19 nt, Artificial Sequence
  Description of Artificial Sequence: Synthetic oligonucleotide
  Sense strand starting at position 1524 of SEQ ID NO: 1561477
uucucacuggugugaccua

SEQ ID NO: 1674972 - RNA, 19 nt, Artificial Sequence
  Description of Artificial Sequence: Synthetic oligonucleotide
  Antisense strand to SEQ ID NO: 1674971
uaggucacaccagugagaa

SEQ ID NO: 1674973 - RNA, 19 nt, Artificial Sequence
  Description of Artificial Sequence: Synthetic oligonucleotide
  Sense strand starting at position 1566 of SEQ ID NO: 1561477
cccugaacucagcguggaa

SEQ ID NO: 1674974 - RNA, 19 nt, Artificial Sequence
  Description of Artificial Sequence: Synthetic oligonucleotide
  Antisense strand to SEQ ID NO: 1674973
uuccacgcugaguucaggg

SEQ ID NO: 1674975 - RNA, 19 nt, Artificial Sequence
  Description of Artificial Sequence: Synthetic oligonucleotide
  Sense strand starting at position 1578 of SEQ ID NO: 1561477
cguggaagccuugaucuuu

SEQ ID NO: 1674976 - RNA, 19 nt, Artificial Sequence
  Description of Artificial Sequence: Synthetic oligonucleotide
  Antisense strand to SEQ ID NO: 1674975
aaagaucaaggcuuccacg

SEQ ID NO: 1674977 - RNA, 19 nt, Artificial Sequence
  Description of Artificial Sequence: Synthetic oligonucleotide
  Sense strand starting at position 2022 of SEQ ID NO: 1561477
gcccuauggcgcguuugau

SEQ ID NO: 1674978 - RNA, 19 nt, Artificial Sequence
  Description of Artificial Sequence: Synthetic oligonucleotide
  Antisense strand to SEQ ID NO: 1674977
aucaaacgcgccauagggc

SEQ ID NO: 1674979 - RNA, 19 nt, Artificial Sequence
  Description of Artificial Sequence: Synthetic oligonucleotide
  Sense strand starting at position 2114 of SEQ ID NO: 1561477
cgcguugacucauucauug

SEQ ID NO: 1674980 - RNA, 19 nt, Artificial Sequence
  Description of Artificial Sequence: Synthetic oligonucleotide
  Antisense strand to SEQ ID NO: 1674979
caaugaaugagucaacgcg

SEQ ID NO: 1674981 - RNA, 19 nt, Artificial Sequence
  Description of Artificial Sequence: Synthetic oligonucleotide
  Sense strand starting at position 2246 of SEQ ID NO: 1561477
agggagugacgucagguua

SEQ ID NO: 1674982 - RNA, 19 nt, Artificial Sequence
  Description of Artificial Sequence: Synthetic oligonucleotide
  Antisense strand to SEQ ID NO: 1674981
uaaccugacgucacucccu

SEQ ID NO: 1674983 - RNA, 19 nt, Artificial Sequence
  Description of Artificial Sequence: Synthetic oligonucleotide
  Sense strand starting at position 2449 of SEQ ID NO: 1561477
uaacaauguguccgaggga

SEQ ID NO: 1674984 - RNA, 19 nt, Artificial Sequence
  Description of Artificial Sequence: Synthetic oligonucleotide
  Antisense strand to SEQ ID NO: 1674983
ucccucggacacauuguua

SEQ ID NO: 1674985 - RNA, 19 nt, Artificial Sequence
  Description of Artificial Sequence: Synthetic oligonucleotide
  Sense strand starting at position 2452 of SEQ ID NO: 1561477
caauguguccgagggagga

SEQ ID NO: 1674986 - RNA, 19 nt, Artificial Sequence
  Description of Artificial Sequence: Synthetic oligonucleotide
  Antisense strand to SEQ ID NO: 1674985
uccucccucggacacauug

SEQ ID NO: 1674987 - RNA, 19 nt, Artificial Sequence
  Description of Artificial Sequence: Synthetic oligonucleotide
  Sense strand starting at position 2479 of SEQ ID NO: 1561477
aagccagauuucugagguu

SEQ ID NO: 1674988 - RNA, 19 nt, Artificial Sequence
  Description of Artificial Sequence: Synthetic oligonucleotide
  Antisense strand to SEQ ID NO: 1674987
aaccucagaaaucuggcuu

SEQ ID NO: 1674989 - RNA, 19 nt, Artificial Sequence
  Description of Artificial Sequence: Synthetic oligonucleotide
  Sense strand starting at position 2832 of SEQ ID NO: 1561477
agggaaacguuuccaucua

SEQ ID NO: 1674990 - RNA, 19 nt, Artificial Sequence
  Description of Artificial Sequence: Synthetic oligonucleotide
  Antisense strand to SEQ ID NO: 1674989
uagauggaaacguuucccu

SEQ ID NO: 1674991 - RNA, 19 nt, Artificial Sequence
  Description of Artificial Sequence: Synthetic oligonucleotide
  Sense strand starting at position 2833 of SEQ ID NO: 1561477
gggaaacguuuccaucuag

SEQ ID NO: 1674992 - RNA, 19 nt, Artificial Sequence
  Description of Artificial Sequence: Synthetic oligonucleotide
  Antisense strand to SEQ ID NO: 1674991
cuagauggaaacguuuccc

SEQ ID NO: 1674993 - RNA, 19 nt, Artificial Sequence
  Description of Artificial Sequence: Synthetic oligonucleotide
  Sense strand starting at position 3644 of SEQ ID NO: 1561477
cauggagguccaugagauc

SEQ ID NO: 1674994 - RNA, 19 nt, Artificial Sequence
  Description of Artificial Sequence: Synthetic oligonucleotide
  Antisense strand to SEQ ID NO: 1674993
gaucucauggaccuccaug

SEQ ID NO: 1674995 - RNA, 19 nt, Artificial Sequence
  Description of Artificial Sequence: Synthetic oligonucleotide
  Sense strand starting at position 3740 of SEQ ID NO: 1561477
cuauguuggcuagguugaa

SEQ ID NO: 1674996 - RNA, 19 nt, Artificial Sequence
  Description of Artificial Sequence: Synthetic oligonucleotide
  Antisense strand to SEQ ID NO: 1674995
uucaaccuagccaacauag

SEQ ID NO: 1674997 - RNA, 19 nt, Artificial Sequence
  Description of Artificial Sequence: Synthetic oligonucleotide
  Sense strand starting at position 3741 of SEQ ID NO: 1561477
uauguuggcuagguugaau

SEQ ID NO: 1674998 - RNA, 19 nt, Artificial Sequence
  Description of Artificial Sequence: Synthetic oligonucleotide
  Antisense strand to SEQ ID NO: 1674997
auucaaccuagccaacaua

SEQ ID NO: 1674999 - RNA, 19 nt, Artificial Sequence
  Description of Artificial Sequence: Synthetic oligonucleotide
  Sense strand starting at position 101 of SEQ ID NO: 1561478
aagaauguguaccuuagga

SEQ ID NO: 1675000 - RNA, 19 nt, Artificial Sequence
  Description of Artificial Sequence: Synthetic oligonucleotide
  Antisense strand to SEQ ID NO: 1674999
uccuaagguacacauucuu

SEQ ID NO: 1675001 - RNA, 19 nt, Artificial Sequence
  Description of Artificial Sequence: Synthetic oligonucleotide
  Sense strand starting at position 103 of SEQ ID NO: 1561478
gaauguguaccuuaggauu

SEQ ID NO: 1675002 - RNA, 19 nt, Artificial Sequence
  Description of Artificial Sequence: Synthetic oligonucleotide
  Antisense strand to SEQ ID NO: 1675001
aauccuaagguacacauuc

SEQ ID NO: 1675003 - RNA, 19 nt, Artificial Sequence
  Description of Artificial Sequence: Synthetic oligonucleotide
  Sense strand starting at position 293 of SEQ ID NO: 1561478
cuuauaaauguauaggcaa

SEQ ID NO: 1675004 - RNA, 19 nt, Artificial Sequence
  Description of Artificial Sequence: Synthetic oligonucleotide
  Antisense strand to SEQ ID NO: 1675003
uugccuauacauuuauaag

SEQ ID NO: 1675005 - RNA, 19 nt, Artificial Sequence
  Description of Artificial Sequence: Synthetic oligonucleotide
  Sense strand starting at position 447 of SEQ ID NO: 1561478
ccucuccagcaauggauua

SEQ ID NO: 1675006 - RNA, 19 nt, Artificial Sequence
  Description of Artificial Sequence: Synthetic oligonucleotide
  Antisense strand to SEQ ID NO: 1675005
uaauccauugcuggagagg

SEQ ID NO: 1675007 - RNA, 19 nt, Artificial Sequence
  Description of Artificial Sequence: Synthetic oligonucleotide
  Sense strand starting at position 461 of SEQ ID NO: 1561478
gauuauggauuauuccgaa

SEQ ID NO: 1675008 - RNA, 19 nt, Artificial Sequence
  Description of Artificial Sequence: Synthetic oligonucleotide
  Antisense strand to SEQ ID NO: 1675007
uucggaauaauccauaauc

SEQ ID NO: 1675009 - RNA, 19 nt, Artificial Sequence
  Description of Artificial Sequence: Synthetic oligonucleotide
  Sense strand starting at position 574 of SEQ ID NO: 1561478
uauugacaaguaugguuua

SEQ ID NO: 1675010 - RNA, 19 nt, Artificial Sequence
  Description of Artificial Sequence: Synthetic oligonucleotide
  Antisense strand to SEQ ID NO: 1675009
uaaaccauacuugucaaua

SEQ ID NO: 1675011 - RNA, 19 nt, Artificial Sequence
  Description of Artificial Sequence: Synthetic oligonucleotide
  Sense strand starting at position 585 of SEQ ID NO: 1561478
augguuuauucccucagga

SEQ ID NO: 1675012 - RNA, 19 nt, Artificial Sequence
  Description of Artificial Sequence: Synthetic oligonucleotide
  Antisense strand to SEQ ID NO: 1675011
uccugagggaauaaaccau

SEQ ID NO: 1675013 - RNA, 19 nt, Artificial Sequence
  Description of Artificial Sequence: Synthetic oligonucleotide
  Sense strand starting at position 587 of SEQ ID NO: 1561478
gguuuauucccucaggaau

SEQ ID NO: 1675014 - RNA, 19 nt, Artificial Sequence
  Description of Artificial Sequence: Synthetic oligonucleotide
  Antisense strand to SEQ ID NO: 1675013
auuccugagggaauaaacc

SEQ ID NO: 1675015 - RNA, 19 nt, Artificial Sequence
  Description of Artificial Sequence: Synthetic oligonucleotide
  Sense strand starting at position 1130 of SEQ ID NO: 1561478
agucacgauuuacaacaaa

SEQ ID NO: 1675016 - RNA, 19 nt, Artificial Sequence
  Description of Artificial Sequence: Synthetic oligonucleotide
  Antisense strand to SEQ ID NO: 1675015
uuuguuguaaaucgugacu

SEQ ID NO: 1675017 - RNA, 19 nt, Artificial Sequence
  Description of Artificial Sequence: Synthetic oligonucleotide
  Sense strand starting at position 1180 of SEQ ID NO: 1561478
agaaauguccaagauacgu

SEQ ID NO: 1675018 - RNA, 19 nt, Artificial Sequence
  Description of Artificial Sequence: Synthetic oligonucleotide
  Antisense strand to SEQ ID NO: 1675017
acguaucuuggacauuucu

SEQ ID NO: 1675019 - RNA, 19 nt, Artificial Sequence
  Description of Artificial Sequence: Synthetic oligonucleotide
  Sense strand starting at position 1186 of SEQ ID NO: 1561478
guccaagauacguauggaa

SEQ ID NO: 1675020 - RNA, 19 nt, Artificial Sequence
  Description of Artificial Sequence: Synthetic oligonucleotide
  Antisense strand to SEQ ID NO: 1675019
uuccauacguaucuuggac

SEQ ID NO: 1675021 - RNA, 19 nt, Artificial Sequence
  Description of Artificial Sequence: Synthetic oligonucleotide
  Sense strand starting at position 1348 of SEQ ID NO: 1561478
ucucaaagagcauguaaua

SEQ ID NO: 1675022 - RNA, 19 nt, Artificial Sequence
  Description of Artificial Sequence: Synthetic oligonucleotide
  Antisense strand to SEQ ID NO: 1675021
uauuacaugcucuuugaga

SEQ ID NO: 1675023 - RNA, 19 nt, Artificial Sequence
  Description of Artificial Sequence: Synthetic oligonucleotide
  Sense strand starting at position 1357 of SEQ ID NO: 1561478
gcauguaauaugggaauac

SEQ ID NO: 1675024 - RNA, 19 nt, Artificial Sequence
  Description of Artificial Sequence: Synthetic oligonucleotide
  Antisense strand to SEQ ID NO: 1675023
guauucccauauuacaugc

SEQ ID NO: 1675025 - RNA, 19 nt, Artificial Sequence
  Description of Artificial Sequence: Synthetic oligonucleotide
  Sense strand starting at position 1375 of SEQ ID NO: 1561478
cgaaguugacaagauguua

SEQ ID NO: 1675026 - RNA, 19 nt, Artificial Sequence
  Description of Artificial Sequence: Synthetic oligonucleotide
  Antisense strand to SEQ ID NO: 1675025
uaacaucuugucaacuucg

SEQ ID NO: 1675027 - RNA, 19 nt, Artificial Sequence
  Description of Artificial Sequence: Synthetic oligonucleotide
  Sense strand starting at position 1600 of SEQ ID NO: 1561478
gcaugugauaagcaaugaa

SEQ ID NO: 1675028 - RNA, 19 nt, Artificial Sequence
  Description of Artificial Sequence: Synthetic oligonucleotide
  Antisense strand to SEQ ID NO: 1675027
uucauugcuuaucacaugc

SEQ ID NO: 1675029 - RNA, 19 nt, Artificial Sequence
  Description of Artificial Sequence: Synthetic oligonucleotide
  Sense strand starting at position 2044 of SEQ ID NO: 1561478
gcgucuuuccggagacacg

SEQ ID NO: 1675030 - RNA, 19 nt, Artificial Sequence
  Description of Artificial Sequence: Synthetic oligonucleotide
  Antisense strand to SEQ ID NO: 1675029
cgugucuccggaaagacgc

SEQ ID NO: 1675031 - RNA, 19 nt, Artificial Sequence
  Description of Artificial Sequence: Synthetic oligonucleotide
  Sense strand starting at position 2191 of SEQ ID NO: 1561478
guagguucugacgaugaaa

SEQ ID NO: 1675032 - RNA, 19 nt, Artificial Sequence
  Description of Artificial Sequence: Synthetic oligonucleotide
  Antisense strand to SEQ ID NO: 1675031
uuucaucgucagaaccuac

SEQ ID NO: 1675033 - RNA, 19 nt, Artificial Sequence
  Description of Artificial Sequence: Synthetic oligonucleotide
  Sense strand starting at position 2331 of SEQ ID NO: 1561478
cccugaucugucuacagga

SEQ ID NO: 1675034 - RNA, 19 nt, Artificial Sequence
  Description of Artificial Sequence: Synthetic oligonucleotide
  Antisense strand to SEQ ID NO: 1675033
uccuguagacagaucaggg

SEQ ID NO: 1675035 - RNA, 19 nt, Artificial Sequence
  Description of Artificial Sequence: Synthetic oligonucleotide
  Sense strand starting at position 2485 of SEQ ID NO: 1561478
ggaugcaucuggcuggaga

SEQ ID NO: 1675036 - RNA, 19 nt, Artificial Sequence
  Description of Artificial Sequence: Synthetic oligonucleotide
  Antisense strand to SEQ ID NO: 1675035
ucuccagccagaugcaucc

SEQ ID NO: 1675037 - RNA, 19 nt, Artificial Sequence
  Description of Artificial Sequence: Synthetic oligonucleotide
  Sense strand starting at position 2486 of SEQ ID NO: 1561478
gaugcaucuggcuggagaa

SEQ ID NO: 1675038 - RNA, 19 nt, Artificial Sequence
  Description of Artificial Sequence: Synthetic oligonucleotide
  Antisense strand to SEQ ID NO: 1675037
uucuccagccagaugcauc

SEQ ID NO: 1675039 - RNA, 19 nt, Artificial Sequence
  Description of Artificial Sequence: Synthetic oligonucleotide
  Sense strand starting at position 2487 of SEQ ID NO: 1561478
augcaucuggcuggagaaa

SEQ ID NO: 1675040 - RNA, 19 nt, Artificial Sequence
  Description of Artificial Sequence: Synthetic oligonucleotide
  Antisense strand to SEQ ID NO: 1675039
uuucuccagccagaugcau

SEQ ID NO: 1675041 - RNA, 19 nt, Artificial Sequence
  Description of Artificial Sequence: Synthetic oligonucleotide
  Sense strand starting at position 2502 of SEQ ID NO: 1561478
gaaagcagccuuugagaac

SEQ ID NO: 1675042 - RNA, 19 nt, Artificial Sequence
  Description of Artificial Sequence: Synthetic oligonucleotide
  Antisense strand to SEQ ID NO: 1675041
guucucaaaggcugcuuuc

SEQ ID NO: 1675043 - RNA, 19 nt, Artificial Sequence
  Description of Artificial Sequence: Synthetic oligonucleotide
  Sense strand starting at position 2599 of SEQ ID NO: 1561478
gcguguuaaagcuuugguu

SEQ ID NO: 1675044 - RNA, 19 nt, Artificial Sequence
  Description of Artificial Sequence: Synthetic oligonucleotide
  Antisense strand to SEQ ID NO: 1675043
aaccaaagcuuuaacacgc

SEQ ID NO: 1675045 - RNA, 19 nt, Artificial Sequence
  Description of Artificial Sequence: Synthetic oligonucleotide
  Sense strand starting at position 2613 of SEQ ID NO: 1561478
ugguuauaauuggugugga

SEQ ID NO: 1675046 - RNA, 19 nt, Artificial Sequence
  Description of Artificial Sequence: Synthetic oligonucleotide
  Antisense strand to SEQ ID NO: 1675045
uccacaccaauuauaacca

SEQ ID NO: 1675047 - RNA, 19 nt, Artificial Sequence
  Description of Artificial Sequence: Synthetic oligonucleotide
  Sense strand starting at position 2616 of SEQ ID NO: 1561478
uuauaauugguguggagaa

SEQ ID NO: 1675048 - RNA, 19 nt, Artificial Sequence
  Description of Artificial Sequence: Synthetic oligonucleotide
  Antisense strand to SEQ ID NO: 1675047
uucuccacaccaauuauaa

SEQ ID NO: 1675049 - RNA, 19 nt, Artificial Sequence
  Description of Artificial Sequence: Synthetic oligonucleotide
  Sense strand starting at position 2743 of SEQ ID NO: 1561478
gugggagcaacuugaaauc

SEQ ID NO: 1675050 - RNA, 19 nt, Artificial Sequence
  Description of Artificial Sequence: Synthetic oligonucleotide
  Antisense strand to SEQ ID NO: 1675049
gauuucaaguugcucccac

SEQ ID NO: 1675051 - RNA, 19 nt, Artificial Sequence
  Description of Artificial Sequence: Synthetic oligonucleotide
  Sense strand starting at position 2899 of SEQ ID NO: 1561478
ucauuuauccagcgaaugu

SEQ ID NO: 1675052 - RNA, 19 nt, Artificial Sequence
  Description of Artificial Sequence: Synthetic oligonucleotide
  Antisense strand to SEQ ID NO: 1675051
acauucgcuggauaaauga

SEQ ID NO: 1675053 - RNA, 19 nt, Artificial Sequence
  Description of Artificial Sequence: Synthetic oligonucleotide
  Sense strand starting at position 2906 of SEQ ID NO: 1561478
uccagcgaauguuuauaaa

SEQ ID NO: 1675054 - RNA, 19 nt, Artificial Sequence
  Description of Artificial Sequence: Synthetic oligonucleotide
  Antisense strand to SEQ ID NO: 1675053
uuuauaaacauucgcugga

SEQ ID NO: 1675055 - RNA, 19 nt, Artificial Sequence
  Description of Artificial Sequence: Synthetic oligonucleotide
  Sense strand starting at position 3019 of SEQ ID NO: 1561478
uggcaauuucaguguguga

SEQ ID NO: 1675056 - RNA, 19 nt, Artificial Sequence
  Description of Artificial Sequence: Synthetic oligonucleotide
  Antisense strand to SEQ ID NO: 1675055
ucacacacugaaauugcca

SEQ ID NO: 1675057 - RNA, 19 nt, Artificial Sequence
  Description of Artificial Sequence: Synthetic oligonucleotide
  Sense strand starting at position 3028 of SEQ ID NO: 1561478
cagugugugagcuaaauug

SEQ ID NO: 1675058 - RNA, 19 nt, Artificial Sequence
  Description of Artificial Sequence: Synthetic oligonucleotide
  Antisense strand to SEQ ID NO: 1675057
caauuuagcucacacacug

SEQ ID NO: 1675059 - RNA, 19 nt, Artificial Sequence
  Description of Artificial Sequence: Synthetic oligonucleotide
  Sense strand starting at position 3166 of SEQ ID NO: 1561478
uggaguuuggaaugcuaga

SEQ ID NO: 1675060 - RNA, 19 nt, Artificial Sequence
  Description of Artificial Sequence: Synthetic oligonucleotide
  Antisense strand to SEQ ID NO: 1675059
ucuagcauuccaaacucca

SEQ ID NO: 1675061 - RNA, 19 nt, Artificial Sequence
  Description of Artificial Sequence: Synthetic oligonucleotide
  Sense strand starting at position 3221 of SEQ ID NO: 1561478
ucaaauauguauuccagua

SEQ ID NO: 1675062 - RNA, 19 nt, Artificial Sequence
  Description of Artificial Sequence: Synthetic oligonucleotide
  Antisense strand to SEQ ID NO: 1675061
uacuggaauacauauuuga

SEQ ID NO: 1675063 - RNA, 19 nt, Artificial Sequence
  Description of Artificial Sequence: Synthetic oligonucleotide
  Sense strand starting at position 3328 of SEQ ID NO: 1561478
gugauauaauguccuugaa

SEQ ID NO: 1675064 - RNA, 19 nt, Artificial Sequence
  Description of Artificial Sequence: Synthetic oligonucleotide
  Antisense strand to SEQ ID NO: 1675063
uucaaggacauuauaucac

SEQ ID NO: 1675065 - RNA, 19 nt, Artificial Sequence
  Description of Artificial Sequence: Synthetic oligonucleotide
  Sense strand starting at position 3330 of SEQ ID NO: 1561478
gauauaauguccuugaagu

SEQ ID NO: 1675066 - RNA, 19 nt, Artificial Sequence
  Description of Artificial Sequence: Synthetic oligonucleotide
  Antisense strand to SEQ ID NO: 1675065
acuucaaggacauuauauc

SEQ ID NO: 1675067 - RNA, 19 nt, Artificial Sequence
  Description of Artificial Sequence: Synthetic oligonucleotide
  Sense strand starting at position 3331 of SEQ ID NO: 1561478
auauaauguccuugaaguu

SEQ ID NO: 1675068 - RNA, 19 nt, Artificial Sequence
  Description of Artificial Sequence: Synthetic oligonucleotide
  Antisense strand to SEQ ID NO: 1675067
aacuucaaggacauuauau

SEQ ID NO: 1675069 - RNA, 19 nt, Artificial Sequence
  Description of Artificial Sequence: Synthetic oligonucleotide
  Sense strand starting at position 3337 of SEQ ID NO: 1561478
uguccuugaaguuagaaug

SEQ ID NO: 1675070 - RNA, 19 nt, Artificial Sequence
  Description of Artificial Sequence: Synthetic oligonucleotide
  Antisense strand to SEQ ID NO: 1675069
cauucuaacuucaaggaca

SEQ ID NO: 1675071 - RNA, 19 nt, Artificial Sequence
  Description of Artificial Sequence: Synthetic oligonucleotide
  Sense strand starting at position 3413 of SEQ ID NO: 1561478
cugacugacugccuuaaca

SEQ ID NO: 1675072 - RNA, 19 nt, Artificial Sequence
  Description of Artificial Sequence: Synthetic oligonucleotide
  Antisense strand to SEQ ID NO: 1675071
uguuaaggcagucagucag

SEQ ID NO: 1675073 - RNA, 19 nt, Artificial Sequence
  Description of Artificial Sequence: Synthetic oligonucleotide
  Sense strand starting at position 3525 of SEQ ID NO: 1561478
aguccauuuccugguuuau

SEQ ID NO: 1675074 - RNA, 19 nt, Artificial Sequence
  Description of Artificial Sequence: Synthetic oligonucleotide
  Antisense strand to SEQ ID NO: 1675073
auaaaccaggaaauggacu

SEQ ID NO: 1675075 - RNA, 19 nt, Artificial Sequence
  Description of Artificial Sequence: Synthetic oligonucleotide
  Sense strand starting at position 3720 of SEQ ID NO: 1561478
cauguaaauuuggagagga

SEQ ID NO: 1675076 - RNA, 19 nt, Artificial Sequence
  Description of Artificial Sequence: Synthetic oligonucleotide
  Antisense strand to SEQ ID NO: 1675075
uccucuccaaauuuacaug

SEQ ID NO: 1675077 - RNA, 19 nt, Artificial Sequence
  Description of Artificial Sequence: Synthetic oligonucleotide
  Sense strand starting at position 3785 of SEQ ID NO: 1561478
ggaaucaaaugacaaggau

SEQ ID NO: 1675078 - RNA, 19 nt, Artificial Sequence
  Description of Artificial Sequence: Synthetic oligonucleotide
  Antisense strand to SEQ ID NO: 1675077
auccuugucauuugauucc

SEQ ID NO: 1675079 - RNA, 19 nt, Artificial Sequence
  Description of Artificial Sequence: Synthetic oligonucleotide
  Sense strand starting at position 61 of SEQ ID NO: 1561479
aagaauguguaccuuagga

SEQ ID NO: 1675080 - RNA, 19 nt, Artificial Sequence
  Description of Artificial Sequence: Synthetic oligonucleotide
  Antisense strand to SEQ ID NO: 1675079
uccuaagguacacauucuu

SEQ ID NO: 1675081 - RNA, 19 nt, Artificial Sequence
  Description of Artificial Sequence: Synthetic oligonucleotide
  Sense strand starting at position 63 of SEQ ID NO: 1561479
gaauguguaccuuaggauu

SEQ ID NO: 1675082 - RNA, 19 nt, Artificial Sequence
  Description of Artificial Sequence: Synthetic oligonucleotide
  Antisense strand to SEQ ID NO: 1675081
aauccuaagguacacauuc

SEQ ID NO: 1675083 - RNA, 19 nt, Artificial Sequence
  Description of Artificial Sequence: Synthetic oligonucleotide
  Sense strand starting at position 253 of SEQ ID NO: 1561479
cuuauaaauguauaggcaa

SEQ ID NO: 1675084 - RNA, 19 nt, Artificial Sequence
  Description of Artificial Sequence: Synthetic oligonucleotide
  Antisense strand to SEQ ID NO: 1675083
uugccuauacauuuauaag

SEQ ID NO: 1675085 - RNA, 19 nt, Artificial Sequence
  Description of Artificial Sequence: Synthetic oligonucleotide
  Sense strand starting at position 407 of SEQ ID NO: 1561479
ccucuccagcaauggauua

SEQ ID NO: 1675086 - RNA, 19 nt, Artificial Sequence
  Description of Artificial Sequence: Synthetic oligonucleotide
  Antisense strand to SEQ ID NO: 1675085
uaauccauugcuggagagg

SEQ ID NO: 1675087 - RNA, 19 nt, Artificial Sequence
  Description of Artificial Sequence: Synthetic oligonucleotide
  Sense strand starting at position 421 of SEQ ID NO: 1561479
gauuauggauuauuccgaa

SEQ ID NO: 1675088 - RNA, 19 nt, Artificial Sequence
  Description of Artificial Sequence: Synthetic oligonucleotide
  Antisense strand to SEQ ID NO: 1675087
uucggaauaauccauaauc

SEQ ID NO: 1675089 - RNA, 19 nt, Artificial Sequence
  Description of Artificial Sequence: Synthetic oligonucleotide
  Sense strand starting at position 534 of SEQ ID NO: 1561479
uauugacaaguaugguuua

SEQ ID NO: 1675090 - RNA, 19 nt, Artificial Sequence
  Description of Artificial Sequence: Synthetic oligonucleotide
  Antisense strand to SEQ ID NO: 1675089
uaaaccauacuugucaaua

SEQ ID NO: 1675091 - RNA, 19 nt, Artificial Sequence
  Description of Artificial Sequence: Synthetic oligonucleotide
  Sense strand starting at position 545 of SEQ ID NO: 1561479
augguuuauucccucagga

SEQ ID NO: 1675092 - RNA, 19 nt, Artificial Sequence
  Description of Artificial Sequence: Synthetic oligonucleotide
  Antisense strand to SEQ ID NO: 1675091
uccugagggaauaaaccau

SEQ ID NO: 1675093 - RNA, 19 nt, Artificial Sequence
  Description of Artificial Sequence: Synthetic oligonucleotide
  Sense strand starting at position 547 of SEQ ID NO: 1561479
gguuuauucccucaggaau

SEQ ID NO: 1675094 - RNA, 19 nt, Artificial Sequence
  Description of Artificial Sequence: Synthetic oligonucleotide
  Antisense strand to SEQ ID NO: 1675093
auuccugagggaauaaacc

SEQ ID NO: 1675095 - RNA, 19 nt, Artificial Sequence
  Description of Artificial Sequence: Synthetic oligonucleotide
  Sense strand starting at position 1090 of SEQ ID NO: 1561479
agucacgauuuacaacaaa

SEQ ID NO: 1675096 - RNA, 19 nt, Artificial Sequence
  Description of Artificial Sequence: Synthetic oligonucleotide
  Antisense strand to SEQ ID NO: 1675095
uuuguuguaaaucgugacu

SEQ ID NO: 1675097 - RNA, 19 nt, Artificial Sequence
  Description of Artificial Sequence: Synthetic oligonucleotide
  Sense strand starting at position 1140 of SEQ ID NO: 1561479
agaaauguccaagauacgu

SEQ ID NO: 1675098 - RNA, 19 nt, Artificial Sequence
  Description of Artificial Sequence: Synthetic oligonucleotide
  Antisense strand to SEQ ID NO: 1675097
acguaucuuggacauuucu

SEQ ID NO: 1675099 - RNA, 19 nt, Artificial Sequence
  Description of Artificial Sequence: Synthetic oligonucleotide
  Sense strand starting at position 1146 of SEQ ID NO: 1561479
guccaagauacguauggaa

SEQ ID NO: 1675100 - RNA, 19 nt, Artificial Sequence
  Description of Artificial Sequence: Synthetic oligonucleotide
  Antisense strand to SEQ ID NO: 1675099
uuccauacguaucuuggac

SEQ ID NO: 1675101 - RNA, 19 nt, Artificial Sequence
  Description of Artificial Sequence: Synthetic oligonucleotide
  Sense strand starting at position 1308 of SEQ ID NO: 1561479
ucucaaagagcauguaaua

SEQ ID NO: 1675102 - RNA, 19 nt, Artificial Sequence
  Description of Artificial Sequence: Synthetic oligonucleotide
  Antisense strand to SEQ ID NO: 1675101
uauuacaugcucuuugaga

SEQ ID NO: 1675103 - RNA, 19 nt, Artificial Sequence
  Description of Artificial Sequence: Synthetic oligonucleotide
  Sense strand starting at position 1317 of SEQ ID NO: 1561479
gcauguaauaugggaauac

SEQ ID NO: 1675104 - RNA, 19 nt, Artificial Sequence
  Description of Artificial Sequence: Synthetic oligonucleotide
  Antisense strand to SEQ ID NO: 1675103
guauucccauauuacaugc

SEQ ID NO: 1675105 - RNA, 19 nt, Artificial Sequence
  Description of Artificial Sequence: Synthetic oligonucleotide
  Sense strand starting at position 1335 of SEQ ID NO: 1561479
cgaaguugacaagauguua

SEQ ID NO: 1675106 - RNA, 19 nt, Artificial Sequence
  Description of Artificial Sequence: Synthetic oligonucleotide
  Antisense strand to SEQ ID NO: 1675105
uaacaucuugucaacuucg

SEQ ID NO: 1675107 - RNA, 19 nt, Artificial Sequence
  Description of Artificial Sequence: Synthetic oligonucleotide
  Sense strand starting at position 1560 of SEQ ID NO: 1561479
gcaugugauaagcaaugaa

SEQ ID NO: 1675108 - RNA, 19 nt, Artificial Sequence
  Description of Artificial Sequence: Synthetic oligonucleotide
  Antisense strand to SEQ ID NO: 1675107
uucauugcuuaucacaugc

SEQ ID NO: 1675109 - RNA, 19 nt, Artificial Sequence
  Description of Artificial Sequence: Synthetic oligonucleotide
  Sense strand starting at position 2004 of SEQ ID NO: 1561479
gcgucuuuccggagacacg

SEQ ID NO: 1675110 - RNA, 19 nt, Artificial Sequence
  Description of Artificial Sequence: Synthetic oligonucleotide
  Antisense strand to SEQ ID NO: 1675109
cgugucuccggaaagacgc

SEQ ID NO: 1675111 - RNA, 19 nt, Artificial Sequence
  Description of Artificial Sequence: Synthetic oligonucleotide
  Sense strand starting at position 2151 of SEQ ID NO: 1561479
guagguucugacgaugaaa

SEQ ID NO: 1675112 - RNA, 19 nt, Artificial Sequence
  Description of Artificial Sequence: Synthetic oligonucleotide
  Antisense strand to SEQ ID NO: 1675111
uuucaucgucagaaccuac

SEQ ID NO: 1675113 - RNA, 19 nt, Artificial Sequence
  Description of Artificial Sequence: Synthetic oligonucleotide
  Sense strand starting at position 2291 of SEQ ID NO: 1561479
cccugaucugucuacagga

SEQ ID NO: 1675114 - RNA, 19 nt, Artificial Sequence
  Description of Artificial Sequence: Synthetic oligonucleotide
  Antisense strand to SEQ ID NO: 1675113
uccuguagacagaucaggg

SEQ ID NO: 1675115 - RNA, 19 nt, Artificial Sequence
  Description of Artificial Sequence: Synthetic oligonucleotide
  Sense strand starting at position 2445 of SEQ ID NO: 1561479
ggaugcaucuggcuggaga

SEQ ID NO: 1675116 - RNA, 19 nt, Artificial Sequence
  Description of Artificial Sequence: Synthetic oligonucleotide
  Antisense strand to SEQ ID NO: 1675115
ucuccagccagaugcaucc

SEQ ID NO: 1675117 - RNA, 19 nt, Artificial Sequence
  Description of Artificial Sequence: Synthetic oligonucleotide
  Sense strand starting at position 2446 of SEQ ID NO: 1561479
gaugcaucuggcuggagaa

SEQ ID NO: 1675118 - RNA, 19 nt, Artificial Sequence
  Description of Artificial Sequence: Synthetic oligonucleotide
  Antisense strand to SEQ ID NO: 1675117
uucuccagccagaugcauc

SEQ ID NO: 1675119 - RNA, 19 nt, Artificial Sequence
  Description of Artificial Sequence: Synthetic oligonucleotide
  Sense strand starting at position 2447 of SEQ ID NO: 1561479
augcaucuggcuggagaaa

SEQ ID NO: 1675120 - RNA, 19 nt, Artificial Sequence
  Description of Artificial Sequence: Synthetic oligonucleotide
  Antisense strand to SEQ ID NO: 1675119
uuucuccagccagaugcau

SEQ ID NO: 1675121 - RNA, 19 nt, Artificial Sequence
  Description of Artificial Sequence: Synthetic oligonucleotide
  Sense strand starting at position 2462 of SEQ ID NO: 1561479
gaaagcagccuuugagaac

SEQ ID NO: 1675122 - RNA, 19 nt, Artificial Sequence
  Description of Artificial Sequence: Synthetic oligonucleotide
  Antisense strand to SEQ ID NO: 1675121
guucucaaaggcugcuuuc

SEQ ID NO: 1675123 - RNA, 19 nt, Artificial Sequence
  Description of Artificial Sequence: Synthetic oligonucleotide
  Sense strand starting at position 2559 of SEQ ID NO: 1561479
gcguguuaaagcuuugguu

SEQ ID NO: 1675124 - RNA, 19 nt, Artificial Sequence
  Description of Artificial Sequence: Synthetic oligonucleotide
  Antisense strand to SEQ ID NO: 1675123
aaccaaagcuuuaacacgc

SEQ ID NO: 1675125 - RNA, 19 nt, Artificial Sequence
  Description of Artificial Sequence: Synthetic oligonucleotide
  Sense strand starting at position 2573 of SEQ ID NO: 1561479
ugguuauaauuggugugga

SEQ ID NO: 1675126 - RNA, 19 nt, Artificial Sequence
  Description of Artificial Sequence: Synthetic oligonucleotide
  Antisense strand to SEQ ID NO: 1675125
uccacaccaauuauaacca

SEQ ID NO: 1675127 - RNA, 19 nt, Artificial Sequence
  Description of Artificial Sequence: Synthetic oligonucleotide
  Sense strand starting at position 2576 of SEQ ID NO: 1561479
uuauaauugguguggagaa

SEQ ID NO: 1675128 - RNA, 19 nt, Artificial Sequence
  Description of Artificial Sequence: Synthetic oligonucleotide
  Antisense strand to SEQ ID NO: 1675127
uucuccacaccaauuauaa

SEQ ID NO: 1675129 - RNA, 19 nt, Artificial Sequence
  Description of Artificial Sequence: Synthetic oligonucleotide
  Sense strand starting at position 2703 of SEQ ID NO: 1561479
gugggagcaacuugaaauc

SEQ ID NO: 1675130 - RNA, 19 nt, Artificial Sequence
  Description of Artificial Sequence: Synthetic oligonucleotide
  Antisense strand to SEQ ID NO: 1675129
gauuucaaguugcucccac

SEQ ID NO: 1675131 - RNA, 19 nt, Artificial Sequence
  Description of Artificial Sequence: Synthetic oligonucleotide
  Sense strand starting at position 2859 of SEQ ID NO: 1561479
ucauuuauccagcgaaugu

SEQ ID NO: 1675132 - RNA, 19 nt, Artificial Sequence
  Description of Artificial Sequence: Synthetic oligonucleotide
  Antisense strand to SEQ ID NO: 1675131
acauucgcuggauaaauga

SEQ ID NO: 1675133 - RNA, 19 nt, Artificial Sequence
  Description of Artificial Sequence: Synthetic oligonucleotide
  Sense strand starting at position 2866 of SEQ ID NO: 1561479
uccagcgaauguuuauaaa

SEQ ID NO: 1675134 - RNA, 19 nt, Artificial Sequence
  Description of Artificial Sequence: Synthetic oligonucleotide
  Antisense strand to SEQ ID NO: 1675133
uuuauaaacauucgcugga

SEQ ID NO: 1675135 - RNA, 19 nt, Artificial Sequence
  Description of Artificial Sequence: Synthetic oligonucleotide
  Sense strand starting at position 2979 of SEQ ID NO: 1561479
uggcaauuucaguguguga

SEQ ID NO: 1675136 - RNA, 19 nt, Artificial Sequence
  Description of Artificial Sequence: Synthetic oligonucleotide
  Antisense strand to SEQ ID NO: 1675135
ucacacacugaaauugcca

SEQ ID NO: 1675137 - RNA, 19 nt, Artificial Sequence
  Description of Artificial Sequence: Synthetic oligonucleotide
  Sense strand starting at position 2988 of SEQ ID NO: 1561479
cagugugugagcuaaauug

SEQ ID NO: 1675138 - RNA, 19 nt, Artificial Sequence
  Description of Artificial Sequence: Synthetic oligonucleotide
  Antisense strand to SEQ ID NO: 1675137
caauuuagcucacacacug

SEQ ID NO: 1675139 - RNA, 19 nt, Artificial Sequence
  Description of Artificial Sequence: Synthetic oligonucleotide
  Sense strand starting at position 3126 of SEQ ID NO: 1561479
uggaguuuggaaugcuaga

SEQ ID NO: 1675140 - RNA, 19 nt, Artificial Sequence
  Description of Artificial Sequence: Synthetic oligonucleotide
  Antisense strand to SEQ ID NO: 1675139
ucuagcauuccaaacucca

SEQ ID NO: 1675141 - RNA, 19 nt, Artificial Sequence
  Description of Artificial Sequence: Synthetic oligonucleotide
  Sense strand starting at position 3181 of SEQ ID NO: 1561479
ucaaauauguauuccagua

SEQ ID NO: 1675142 - RNA, 19 nt, Artificial Sequence
  Description of Artificial Sequence: Synthetic oligonucleotide
  Antisense strand to SEQ ID NO: 1675141
uacuggaauacauauuuga

SEQ ID NO: 1675143 - RNA, 19 nt, Artificial Sequence
  Description of Artificial Sequence: Synthetic oligonucleotide
  Sense strand starting at position 3288 of SEQ ID NO: 1561479
gugauauaauguccuugaa

SEQ ID NO: 1675144 - RNA, 19 nt, Artificial Sequence
  Description of Artificial Sequence: Synthetic oligonucleotide
  Antisense strand to SEQ ID NO: 1675143
uucaaggacauuauaucac

SEQ ID NO: 1675145 - RNA, 19 nt, Artificial Sequence
  Description of Artificial Sequence: Synthetic oligonucleotide
  Sense strand starting at position 3290 of SEQ ID NO: 1561479
gauauaauguccuugaagu

SEQ ID NO: 1675146 - RNA, 19 nt, Artificial Sequence
  Description of Artificial Sequence: Synthetic oligonucleotide
  Antisense strand to SEQ ID NO: 1675145
acuucaaggacauuauauc

SEQ ID NO: 1675147 - RNA, 19 nt, Artificial Sequence
  Description of Artificial Sequence: Synthetic oligonucleotide
  Sense strand starting at position 3291 of SEQ ID NO: 1561479
auauaauguccuugaaguu

SEQ ID NO: 1675148 - RNA, 19 nt, Artificial Sequence
  Description of Artificial Sequence: Synthetic oligonucleotide
  Antisense strand to SEQ ID NO: 1675147
aacuucaaggacauuauau

SEQ ID NO: 1675149 - RNA, 19 nt, Artificial Sequence
  Description of Artificial Sequence: Synthetic oligonucleotide
  Sense strand starting at position 3297 of SEQ ID NO: 1561479
uguccuugaaguuagaaug

SEQ ID NO: 1675150 - RNA, 19 nt, Artificial Sequence
  Description of Artificial Sequence: Synthetic oligonucleotide
  Antisense strand to SEQ ID NO: 1675149
cauucuaacuucaaggaca

SEQ ID NO: 1675151 - RNA, 19 nt, Artificial Sequence
  Description of Artificial Sequence: Synthetic oligonucleotide
  Sense strand starting at position 3373 of SEQ ID NO: 1561479
cugacugacugccuuaaca

SEQ ID NO: 1675152 - RNA, 19 nt, Artificial Sequence
  Description of Artificial Sequence: Synthetic oligonucleotide
  Antisense strand to SEQ ID NO: 1675151
uguuaaggcagucagucag

SEQ ID NO: 1675153 - RNA, 19 nt, Artificial Sequence
  Description of Artificial Sequence: Synthetic oligonucleotide
  Sense strand starting at position 3485 of SEQ ID NO: 1561479
aguccauuuccugguuuau

SEQ ID NO: 1675154 - RNA, 19 nt, Artificial Sequence
  Description of Artificial Sequence: Synthetic oligonucleotide
  Antisense strand to SEQ ID NO: 1675153
auaaaccaggaaauggacu

SEQ ID NO: 1675155 - RNA, 19 nt, Artificial Sequence
  Description of Artificial Sequence: Synthetic oligonucleotide
  Sense strand starting at position 3680 of SEQ ID NO: 1561479
cauguaaauuuggagagga

SEQ ID NO: 1675156 - RNA, 19 nt, Artificial Sequence
  Description of Artificial Sequence: Synthetic oligonucleotide
  Antisense strand to SEQ ID NO: 1675155
uccucuccaaauuuacaug

SEQ ID NO: 1675157 - RNA, 19 nt, Artificial Sequence
  Description of Artificial Sequence: Synthetic oligonucleotide
  Sense strand starting at position 3745 of SEQ ID NO: 1561479
ggaaucaaaugacaaggau

SEQ ID NO: 1675158 - RNA, 19 nt, Artificial Sequence
  Description of Artificial Sequence: Synthetic oligonucleotide
  Antisense strand to SEQ ID NO: 1675157
auccuugucauuugauucc

SEQ ID NO: 1675159 - RNA, 19 nt, Artificial Sequence
  Description of Artificial Sequence: Synthetic oligonucleotide
  Sense strand starting at position 31 of SEQ ID NO: 1561480
gacauaaagguaggguuua

SEQ ID NO: 1675160 - RNA, 19 nt, Artificial Sequence
  Description of Artificial Sequence: Synthetic oligonucleotide
  Antisense strand to SEQ ID NO: 1675159
uaaacccuaccuuuauguc

SEQ ID NO: 1675161 - RNA, 19 nt, Artificial Sequence
  Description of Artificial Sequence: Synthetic oligonucleotide
  Sense strand starting at position 581 of SEQ ID NO: 1561480
gcuugagacagguaaguga

SEQ ID NO: 1675162 - RNA, 19 nt, Artificial Sequence
  Description of Artificial Sequence: Synthetic oligonucleotide
  Antisense strand to SEQ ID NO: 1675161
ucacuuaccugucucaagc

SEQ ID NO: 1675163 - RNA, 19 nt, Artificial Sequence
  Description of Artificial Sequence: Synthetic oligonucleotide
  Sense strand starting at position 680 of SEQ ID NO: 1561480
cuuuacuucuggucaagaa

SEQ ID NO: 1675164 - RNA, 19 nt, Artificial Sequence
  Description of Artificial Sequence: Synthetic oligonucleotide
  Antisense strand to SEQ ID NO: 1675163
uucuugaccagaaguaaag

SEQ ID NO: 1675165 - RNA, 19 nt, Artificial Sequence
  Description of Artificial Sequence: Synthetic oligonucleotide
  Sense strand starting at position 718 of SEQ ID NO: 1561480
cugaccaguuccuugcaga

SEQ ID NO: 1675166 - RNA, 19 nt, Artificial Sequence
  Description of Artificial Sequence: Synthetic oligonucleotide
  Antisense strand to SEQ ID NO: 1675165
ucugcaaggaacuggucag

SEQ ID NO: 1675167 - RNA, 19 nt, Artificial Sequence
  Description of Artificial Sequence: Synthetic oligonucleotide
  Sense strand starting at position 796 of SEQ ID NO: 1561480
gucagaucccaugggugaa

SEQ ID NO: 1675168 - RNA, 19 nt, Artificial Sequence
  Description of Artificial Sequence: Synthetic oligonucleotide
  Antisense strand to SEQ ID NO: 1675167
uucacccaugggaucugac

SEQ ID NO: 1675169 - RNA, 19 nt, Artificial Sequence
  Description of Artificial Sequence: Synthetic oligonucleotide
  Sense strand starting at position 797 of SEQ ID NO: 1561480
ucagaucccaugggugaaa

SEQ ID NO: 1675170 - RNA, 19 nt, Artificial Sequence
  Description of Artificial Sequence: Synthetic oligonucleotide
  Antisense strand to SEQ ID NO: 1675169
uuucacccaugggaucuga

SEQ ID NO: 1675171 - RNA, 19 nt, Artificial Sequence
  Description of Artificial Sequence: Synthetic oligonucleotide
  Sense strand starting at position 1092 of SEQ ID NO: 1561480
uauccaguagcuuagaagu

SEQ ID NO: 1675172 - RNA, 19 nt, Artificial Sequence
  Description of Artificial Sequence: Synthetic oligonucleotide
  Antisense strand to SEQ ID NO: 1675171
acuucuaagcuacuggaua

SEQ ID NO: 1675173 - RNA, 19 nt, Artificial Sequence
  Description of Artificial Sequence: Synthetic oligonucleotide
  Sense strand starting at position 1124 of SEQ ID NO: 1561480
ugggacuuguaaccgacau

SEQ ID NO: 1675174 - RNA, 19 nt, Artificial Sequence
  Description of Artificial Sequence: Synthetic oligonucleotide
  Antisense strand to SEQ ID NO: 1675173
augucgguuacaaguccca

SEQ ID NO: 1675175 - RNA, 19 nt, Artificial Sequence
  Description of Artificial Sequence: Synthetic oligonucleotide
  Sense strand starting at position 1125 of SEQ ID NO: 1561480
gggacuuguaaccgacauc

SEQ ID NO: 1675176 - RNA, 19 nt, Artificial Sequence
  Description of Artificial Sequence: Synthetic oligonucleotide
  Antisense strand to SEQ ID NO: 1675175
gaugucgguuacaaguccc

SEQ ID NO: 1675177 - RNA, 19 nt, Artificial Sequence
  Description of Artificial Sequence: Synthetic oligonucleotide
  Sense strand starting at position 1126 of SEQ ID NO: 1561480
ggacuuguaaccgacaucu

SEQ ID NO: 1675178 - RNA, 19 nt, Artificial Sequence
  Description of Artificial Sequence: Synthetic oligonucleotide
  Antisense strand to SEQ ID NO: 1675177
agaugucgguuacaagucc

SEQ ID NO: 1675179 - RNA, 19 nt, Artificial Sequence
  Description of Artificial Sequence: Synthetic oligonucleotide
  Sense strand starting at position 1137 of SEQ ID NO: 1561480
cgacaucugaaguggagaa

SEQ ID NO: 1675180 - RNA, 19 nt, Artificial Sequence
  Description of Artificial Sequence: Synthetic oligonucleotide
  Antisense strand to SEQ ID NO: 1675179
uucuccacuucagaugucg

SEQ ID NO: 1675181 - RNA, 19 nt, Artificial Sequence
  Description of Artificial Sequence: Synthetic oligonucleotide
  Sense strand starting at position 1208 of SEQ ID NO: 1561480
agcugucagaagugaggua

SEQ ID NO: 1675182 - RNA, 19 nt, Artificial Sequence
  Description of Artificial Sequence: Synthetic oligonucleotide
  Antisense strand to SEQ ID NO: 1675181
uaccucacuucugacagcu

SEQ ID NO: 1675183 - RNA, 19 nt, Artificial Sequence
  Description of Artificial Sequence: Synthetic oligonucleotide
  Sense strand starting at position 1209 of SEQ ID NO: 1561480
gcugucagaagugagguaa

SEQ ID NO: 1675184 - RNA, 19 nt, Artificial Sequence
  Description of Artificial Sequence: Synthetic oligonucleotide
  Antisense strand to SEQ ID NO: 1675183
uuaccucacuucugacagc

SEQ ID NO: 1675185 - RNA, 19 nt, Artificial Sequence
  Description of Artificial Sequence: Synthetic oligonucleotide
  Sense strand starting at position 1239 of SEQ ID NO: 1561480
ccgaguugaugucugauag

SEQ ID NO: 1675186 - RNA, 19 nt, Artificial Sequence
  Description of Artificial Sequence: Synthetic oligonucleotide
  Antisense strand to SEQ ID NO: 1675185
cuaucagacaucaacucgg

SEQ ID NO: 1675187 - RNA, 19 nt, Artificial Sequence
  Description of Artificial Sequence: Synthetic oligonucleotide
  Sense strand starting at position 1240 of SEQ ID NO: 1561480
cgaguugaugucugauaga

SEQ ID NO: 1675188 - RNA, 19 nt, Artificial Sequence
  Description of Artificial Sequence: Synthetic oligonucleotide
  Antisense strand to SEQ ID NO: 1675187
ucuaucagacaucaacucg

SEQ ID NO: 1675189 - RNA, 19 nt, Artificial Sequence
  Description of Artificial Sequence: Synthetic oligonucleotide
  Sense strand starting at position 1308 of SEQ ID NO: 1561480
ugaaguauucuggguucag

SEQ ID NO: 1675190 - RNA, 19 nt, Artificial Sequence
  Description of Artificial Sequence: Synthetic oligonucleotide
  Antisense strand to SEQ ID NO: 1675189
cugaacccagaauacuuca

SEQ ID NO: 1675191 - RNA, 19 nt, Artificial Sequence
  Description of Artificial Sequence: Synthetic oligonucleotide
  Sense strand starting at position 1474 of SEQ ID NO: 1561480
uaaggaauguggguuguga

SEQ ID NO: 1675192 - RNA, 19 nt, Artificial Sequence
  Description of Artificial Sequence: Synthetic oligonucleotide
  Antisense strand to SEQ ID NO: 1675191
ucacaacccacauuccuua

SEQ ID NO: 1675193 - RNA, 19 nt, Artificial Sequence
  Description of Artificial Sequence: Synthetic oligonucleotide
  Sense strand starting at position 1476 of SEQ ID NO: 1561480
aggaauguggguugugaag

SEQ ID NO: 1675194 - RNA, 19 nt, Artificial Sequence
  Description of Artificial Sequence: Synthetic oligonucleotide
  Antisense strand to SEQ ID NO: 1675193
cuucacaacccacauuccu

SEQ ID NO: 1675195 - RNA, 19 nt, Artificial Sequence
  Description of Artificial Sequence: Synthetic oligonucleotide
  Sense strand starting at position 1833 of SEQ ID NO: 1561480
gaauuucuuggcgacguau

SEQ ID NO: 1675196 - RNA, 19 nt, Artificial Sequence
  Description of Artificial Sequence: Synthetic oligonucleotide
  Antisense strand to SEQ ID NO: 1675195
auacgucgccaagaaauuc

SEQ ID NO: 1675197 - RNA, 19 nt, Artificial Sequence
  Description of Artificial Sequence: Synthetic oligonucleotide
  Sense strand starting at position 1835 of SEQ ID NO: 1561480
auuucuuggcgacguauua

SEQ ID NO: 1675198 - RNA, 19 nt, Artificial Sequence
  Description of Artificial Sequence: Synthetic oligonucleotide
  Antisense strand to SEQ ID NO: 1675197
uaauacgucgccaagaaau

SEQ ID NO: 1675199 - RNA, 19 nt, Artificial Sequence
  Description of Artificial Sequence: Synthetic oligonucleotide
  Sense strand starting at position 1848 of SEQ ID NO: 1561480
guauuaauauaccuaggau

SEQ ID NO: 1675200 - RNA, 19 nt, Artificial Sequence
  Description of Artificial Sequence: Synthetic oligonucleotide
  Antisense strand to SEQ ID NO: 1675199
auccuagguauauuaauac

SEQ ID NO: 1675201 - RNA, 19 nt, Artificial Sequence
  Description of Artificial Sequence: Synthetic oligonucleotide
  Sense strand starting at position 2241 of SEQ ID NO: 1561480
aucucuaugagagggucaa

SEQ ID NO: 1675202 - RNA, 19 nt, Artificial Sequence
  Description of Artificial Sequence: Synthetic oligonucleotide
  Antisense strand to SEQ ID NO: 1675201
uugacccucucauagagau

SEQ ID NO: 1675203 - RNA, 19 nt, Artificial Sequence
  Description of Artificial Sequence: Synthetic oligonucleotide
  Sense strand starting at position 2242 of SEQ ID NO: 1561480
ucucuaugagagggucaaa

SEQ ID NO: 1675204 - RNA, 19 nt, Artificial Sequence
  Description of Artificial Sequence: Synthetic oligonucleotide
  Antisense strand to SEQ ID NO: 1675203
uuugacccucucauagaga

SEQ ID NO: 1675205 - RNA, 19 nt, Artificial Sequence
  Description of Artificial Sequence: Synthetic oligonucleotide
  Sense strand starting at position 2265 of SEQ ID NO: 1561480
gggacagugauuggaccua

SEQ ID NO: 1675206 - RNA, 19 nt, Artificial Sequence
  Description of Artificial Sequence: Synthetic oligonucleotide
  Antisense strand to SEQ ID NO: 1675205
uagguccaaucacuguccc

SEQ ID NO: 1675207 - RNA, 19 nt, Artificial Sequence
  Description of Artificial Sequence: Synthetic oligonucleotide
  Sense strand starting at position 2281 of SEQ ID NO: 1561480
cuaagauaguuccugcaau

SEQ ID NO: 1675208 - RNA, 19 nt, Artificial Sequence
  Description of Artificial Sequence: Synthetic oligonucleotide
  Antisense strand to SEQ ID NO: 1675207
auugcaggaacuaucuuag

SEQ ID NO: 1675209 - RNA, 19 nt, Artificial Sequence
  Description of Artificial Sequence: Synthetic oligonucleotide
  Sense strand starting at position 2332 of SEQ ID NO: 1561480
ccuggaauugucugggaga

SEQ ID NO: 1675210 - RNA, 19 nt, Artificial Sequence
  Description of Artificial Sequence: Synthetic oligonucleotide
  Antisense strand to SEQ ID NO: 1675209
ucucccagacaauuccagg

SEQ ID NO: 1675211 - RNA, 19 nt, Artificial Sequence
  Description of Artificial Sequence: Synthetic oligonucleotide
  Sense strand starting at position 2488 of SEQ ID NO: 1561480
ugcucagcuccugacaauu

SEQ ID NO: 1675212 - RNA, 19 nt, Artificial Sequence
  Description of Artificial Sequence: Synthetic oligonucleotide
  Antisense strand to SEQ ID NO: 1675211
aauugucaggagcugagca

SEQ ID NO: 1675213 - RNA, 19 nt, Artificial Sequence
  Description of Artificial Sequence: Synthetic oligonucleotide
  Sense strand starting at position 2532 of SEQ ID NO: 1561480
gaggguuaacgccagggau

SEQ ID NO: 1675214 - RNA, 19 nt, Artificial Sequence
  Description of Artificial Sequence: Synthetic oligonucleotide
  Antisense strand to SEQ ID NO: 1675213
aucccuggcguuaacccuc

SEQ ID NO: 1675215 - RNA, 19 nt, Artificial Sequence
  Description of Artificial Sequence: Synthetic oligonucleotide
  Sense strand starting at position 2534 of SEQ ID NO: 1561480
ggguuaacgccagggauaa

SEQ ID NO: 1675216 - RNA, 19 nt, Artificial Sequence
  Description of Artificial Sequence: Synthetic oligonucleotide
  Antisense strand to SEQ ID NO: 1675215
uuaucccuggcguuaaccc

SEQ ID NO: 1675217 - RNA, 19 nt, Artificial Sequence
  Description of Artificial Sequence: Synthetic oligonucleotide
  Sense strand starting at position 2546 of SEQ ID NO: 1561480
gggauaaguuaggucacca

SEQ ID NO: 1675218 - RNA, 19 nt, Artificial Sequence
  Description of Artificial Sequence: Synthetic oligonucleotide
  Antisense strand to SEQ ID NO: 1675217
uggugaccuaacuuauccc

SEQ ID NO: 1675219 - RNA, 19 nt, Artificial Sequence
  Description of Artificial Sequence: Synthetic oligonucleotide
  Sense strand starting at position 2550 of SEQ ID NO: 1561480
uaaguuaggucaccaaaug

SEQ ID NO: 1675220 - RNA, 19 nt, Artificial Sequence
  Description of Artificial Sequence: Synthetic oligonucleotide
  Antisense strand to SEQ ID NO: 1675219
cauuuggugaccuaacuua

SEQ ID NO: 1675221 - RNA, 19 nt, Artificial Sequence
  Description of Artificial Sequence: Synthetic oligonucleotide
  Sense strand starting at position 2551 of SEQ ID NO: 1561480
aaguuaggucaccaaaugu

SEQ ID NO: 1675222 - RNA, 19 nt, Artificial Sequence
  Description of Artificial Sequence: Synthetic oligonucleotide
  Antisense strand to SEQ ID NO: 1675221
acauuuggugaccuaacuu

SEQ ID NO: 1675223 - RNA, 19 nt, Artificial Sequence
  Description of Artificial Sequence: Synthetic oligonucleotide
  Sense strand starting at position 2709 of SEQ ID NO: 1561480
ugcgauaaacuuuauugac

SEQ ID NO: 1675224 - RNA, 19 nt, Artificial Sequence
  Description of Artificial Sequence: Synthetic oligonucleotide
  Antisense strand to SEQ ID NO: 1675223
gucaauaaaguuuaucgca

SEQ ID NO: 1675225 - RNA, 19 nt, Artificial Sequence
  Description of Artificial Sequence: Synthetic oligonucleotide
  Sense strand starting at position 2711 of SEQ ID NO: 1561480
cgauaaacuuuauugacau

SEQ ID NO: 1675226 - RNA, 19 nt, Artificial Sequence
  Description of Artificial Sequence: Synthetic oligonucleotide
  Antisense strand to SEQ ID NO: 1675225
augucaauaaaguuuaucg

SEQ ID NO: 1675227 - RNA, 19 nt, Artificial Sequence
  Description of Artificial Sequence: Synthetic oligonucleotide
  Sense strand starting at position 2741 of SEQ ID NO: 1561480
uaauuucgauacguagagu

SEQ ID NO: 1675228 - RNA, 19 nt, Artificial Sequence
  Description of Artificial Sequence: Synthetic oligonucleotide
  Antisense strand to SEQ ID NO: 1675227
acucuacguaucgaaauua

SEQ ID NO: 1675229 - RNA, 19 nt, Artificial Sequence
  Description of Artificial Sequence: Synthetic oligonucleotide
  Sense strand starting at position 2744 of SEQ ID NO: 1561480
uuucgauacguagagugaa

SEQ ID NO: 1675230 - RNA, 19 nt, Artificial Sequence
  Description of Artificial Sequence: Synthetic oligonucleotide
  Antisense strand to SEQ ID NO: 1675229
uucacucuacguaucgaaa

SEQ ID NO: 1675231 - RNA, 19 nt, Artificial Sequence
  Description of Artificial Sequence: Synthetic oligonucleotide
  Sense strand starting at position 2775 of SEQ ID NO: 1561480
acgcacucugaauguaaau

SEQ ID NO: 1675232 - RNA, 19 nt, Artificial Sequence
  Description of Artificial Sequence: Synthetic oligonucleotide
  Antisense strand to SEQ ID NO: 1675231
auuuacauucagagugcgu

SEQ ID NO: 1675233 - RNA, 19 nt, Artificial Sequence
  Description of Artificial Sequence: Synthetic oligonucleotide
  Sense strand starting at position 2814 of SEQ ID NO: 1561480
ggguguguuggcucauguu

SEQ ID NO: 1675234 - RNA, 19 nt, Artificial Sequence
  Description of Artificial Sequence: Synthetic oligonucleotide
  Antisense strand to SEQ ID NO: 1675233
aacaugagccaacacaccc

SEQ ID NO: 1675235 - RNA, 19 nt, Artificial Sequence
  Description of Artificial Sequence: Synthetic oligonucleotide
  Sense strand starting at position 3043 of SEQ ID NO: 1561480
ggagaaauccugugucuuc

SEQ ID NO: 1675236 - RNA, 19 nt, Artificial Sequence
  Description of Artificial Sequence: Synthetic oligonucleotide
  Antisense strand to SEQ ID NO: 1675235
gaagacacaggauuucucc

SEQ ID NO: 1675237 - RNA, 19 nt, Artificial Sequence
  Description of Artificial Sequence: Synthetic oligonucleotide
  Sense strand starting at position 3044 of SEQ ID NO: 1561480
gagaaauccugugucuucu

SEQ ID NO: 1675238 - RNA, 19 nt, Artificial Sequence
  Description of Artificial Sequence: Synthetic oligonucleotide
  Antisense strand to SEQ ID NO: 1675237
agaagacacaggauuucuc

SEQ ID NO: 1675239 - RNA, 19 nt, Artificial Sequence
  Description of Artificial Sequence: Synthetic oligonucleotide
  Sense strand starting at position 895 of SEQ ID NO: 1561481
ggcagagagggucagguau

SEQ ID NO: 1675240 - RNA, 19 nt, Artificial Sequence
  Description of Artificial Sequence: Synthetic oligonucleotide
  Antisense strand to SEQ ID NO: 1675239
auaccugacccucucugcc

SEQ ID NO: 1675241 - RNA, 19 nt, Artificial Sequence
  Description of Artificial Sequence: Synthetic oligonucleotide
  Sense strand starting at position 1442 of SEQ ID NO: 1561481
gaaauagaguguguucuca

SEQ ID NO: 1675242 - RNA, 19 nt, Artificial Sequence
  Description of Artificial Sequence: Synthetic oligonucleotide
  Antisense strand to SEQ ID NO: 1675241
ugagaacacacucuauuuc

SEQ ID NO: 1675243 - RNA, 19 nt, Artificial Sequence
  Description of Artificial Sequence: Synthetic oligonucleotide
  Sense strand starting at position 1444 of SEQ ID NO: 1561481
aauagaguguguucucaga

SEQ ID NO: 1675244 - RNA, 19 nt, Artificial Sequence
  Description of Artificial Sequence: Synthetic oligonucleotide
  Antisense strand to SEQ ID NO: 1675243
ucugagaacacacucuauu

SEQ ID NO: 1675245 - RNA, 19 nt, Artificial Sequence
  Description of Artificial Sequence: Synthetic oligonucleotide
  Sense strand starting at position 1446 of SEQ ID NO: 1561481
uagaguguguucucagaug

SEQ ID NO: 1675246 - RNA, 19 nt, Artificial Sequence
  Description of Artificial Sequence: Synthetic oligonucleotide
  Antisense strand to SEQ ID NO: 1675245
caucugagaacacacucua

SEQ ID NO: 1675247 - RNA, 19 nt, Artificial Sequence
  Description of Artificial Sequence: Synthetic oligonucleotide
  Sense strand starting at position 1499 of SEQ ID NO: 1561481
ucagacuucuggucugagu

SEQ ID NO: 1675248 - RNA, 19 nt, Artificial Sequence
  Description of Artificial Sequence: Synthetic oligonucleotide
  Antisense strand to SEQ ID NO: 1675247
acucagaccagaagucuga

SEQ ID NO: 1675249 - RNA, 19 nt, Artificial Sequence
  Description of Artificial Sequence: Synthetic oligonucleotide
  Sense strand starting at position 1501 of SEQ ID NO: 1561481
agacuucuggucugaguug

SEQ ID NO: 1675250 - RNA, 19 nt, Artificial Sequence
  Description of Artificial Sequence: Synthetic oligonucleotide
  Antisense strand to SEQ ID NO: 1675249
caacucagaccagaagucu

SEQ ID NO: 1675251 - RNA, 19 nt, Artificial Sequence
  Description of Artificial Sequence: Synthetic oligonucleotide
  Sense strand starting at position 1536 of SEQ ID NO: 1561481
ccagacucuugggacugau

SEQ ID NO: 1675252 - RNA, 19 nt, Artificial Sequence
  Description of Artificial Sequence: Synthetic oligonucleotide
  Antisense strand to SEQ ID NO: 1675251
aucagucccaagagucugg

SEQ ID NO: 1675253 - RNA, 19 nt, Artificial Sequence
  Description of Artificial Sequence: Synthetic oligonucleotide
  Sense strand starting at position 1852 of SEQ ID NO: 1561481
aaggcaugaucagcagaau

SEQ ID NO: 1675254 - RNA, 19 nt, Artificial Sequence
  Description of Artificial Sequence: Synthetic oligonucleotide
  Antisense strand to SEQ ID NO: 1675253
auucugcugaucaugccuu

SEQ ID NO: 1675255 - RNA, 19 nt, Artificial Sequence
  Description of Artificial Sequence: Synthetic oligonucleotide
  Sense strand starting at position 1853 of SEQ ID NO: 1561481
aggcaugaucagcagaauu

SEQ ID NO: 1675256 - RNA, 19 nt, Artificial Sequence
  Description of Artificial Sequence: Synthetic oligonucleotide
  Antisense strand to SEQ ID NO: 1675255
aauucugcugaucaugccu

SEQ ID NO: 1675257 - RNA, 19 nt, Artificial Sequence
  Description of Artificial Sequence: Synthetic oligonucleotide
  Sense strand starting at position 1878 of SEQ ID NO: 1561481
gggucgaggccuugaggau

SEQ ID NO: 1675258 - RNA, 19 nt, Artificial Sequence
  Description of Artificial Sequence: Synthetic oligonucleotide
  Antisense strand to SEQ ID NO: 1675257
auccucaaggccucgaccc

SEQ ID NO: 1675259 - RNA, 19 nt, Artificial Sequence
  Description of Artificial Sequence: Synthetic oligonucleotide
  Sense strand starting at position 1879 of SEQ ID NO: 1561481
ggucgaggccuugaggauu

SEQ ID NO: 1675260 - RNA, 19 nt, Artificial Sequence
  Description of Artificial Sequence: Synthetic oligonucleotide
  Antisense strand to SEQ ID NO: 1675259
aauccucaaggccucgacc

SEQ ID NO: 1675261 - RNA, 19 nt, Artificial Sequence
  Description of Artificial Sequence: Synthetic oligonucleotide
  Sense strand starting at position 2478 of SEQ ID NO: 1561481
uggcugucugggugaagga

SEQ ID NO: 1675262 - RNA, 19 nt, Artificial Sequence
  Description of Artificial Sequence: Synthetic oligonucleotide
  Antisense strand to SEQ ID NO: 1675261
uccuucacccagacagcca

SEQ ID NO: 1675263 - RNA, 19 nt, Artificial Sequence
  Description of Artificial Sequence: Synthetic oligonucleotide
  Sense strand starting at position 2479 of SEQ ID NO: 1561481
ggcugucugggugaaggau

SEQ ID NO: 1675264 - RNA, 19 nt, Artificial Sequence
  Description of Artificial Sequence: Synthetic oligonucleotide
  Antisense strand to SEQ ID NO: 1675263
auccuucacccagacagcc

SEQ ID NO: 1675265 - RNA, 19 nt, Artificial Sequence
  Description of Artificial Sequence: Synthetic oligonucleotide
  Sense strand starting at position 2488 of SEQ ID NO: 1561481
ggugaaggauucucccacu

SEQ ID NO: 1675266 - RNA, 19 nt, Artificial Sequence
  Description of Artificial Sequence: Synthetic oligonucleotide
  Antisense strand to SEQ ID NO: 1675265
agugggagaauccuucacc

SEQ ID NO: 1675267 - RNA, 19 nt, Artificial Sequence
  Description of Artificial Sequence: Synthetic oligonucleotide
  Sense strand starting at position 2556 of SEQ ID NO: 1561481
acccuaagcgaccaauauu

SEQ ID NO: 1675268 - RNA, 19 nt, Artificial Sequence
  Description of Artificial Sequence: Synthetic oligonucleotide
  Antisense strand to SEQ ID NO: 1675267
aauauuggucgcuuagggu

SEQ ID NO: 1675269 - RNA, 19 nt, Artificial Sequence
  Description of Artificial Sequence: Synthetic oligonucleotide
  Sense strand starting at position 2598 of SEQ ID NO: 1561481
gccugcauauauuugucua

SEQ ID NO: 1675270 - RNA, 19 nt, Artificial Sequence
  Description of Artificial Sequence: Synthetic oligonucleotide
  Antisense strand to SEQ ID NO: 1675269
uagacaaauauaugcaggc

SEQ ID NO: 1675271 - RNA, 19 nt, Artificial Sequence
  Description of Artificial Sequence: Synthetic oligonucleotide
  Sense strand starting at position 2740 of SEQ ID NO: 1561481
ggcagauagauacggauca

SEQ ID NO: 1675272 - RNA, 19 nt, Artificial Sequence
  Description of Artificial Sequence: Synthetic oligonucleotide
  Antisense strand to SEQ ID NO: 1675271
ugauccguaucuaucugcc

SEQ ID NO: 1675273 - RNA, 19 nt, Artificial Sequence
  Description of Artificial Sequence: Synthetic oligonucleotide
  Sense strand starting at position 2741 of SEQ ID NO: 1561481
gcagauagauacggaucaa

SEQ ID NO: 1675274 - RNA, 19 nt, Artificial Sequence
  Description of Artificial Sequence: Synthetic oligonucleotide
  Antisense strand to SEQ ID NO: 1675273
uugauccguaucuaucugc

SEQ ID NO: 1675275 - RNA, 19 nt, Artificial Sequence
  Description of Artificial Sequence: Synthetic oligonucleotide
  Sense strand starting at position 2800 of SEQ ID NO: 1561481
agggaacugcuaugggaau

SEQ ID NO: 1675276 - RNA, 19 nt, Artificial Sequence
  Description of Artificial Sequence: Synthetic oligonucleotide
  Antisense strand to SEQ ID NO: 1675275
auucccauagcaguucccu

SEQ ID NO: 1675277 - RNA, 19 nt, Artificial Sequence
  Description of Artificial Sequence: Synthetic oligonucleotide
  Sense strand starting at position 2858 of SEQ ID NO: 1561481
ggaggugauuccugagguc

SEQ ID NO: 1675278 - RNA, 19 nt, Artificial Sequence
  Description of Artificial Sequence: Synthetic oligonucleotide
  Antisense strand to SEQ ID NO: 1675277
gaccucaggaaucaccucc

SEQ ID NO: 1675279 - RNA, 19 nt, Artificial Sequence
  Description of Artificial Sequence: Synthetic oligonucleotide
  Sense strand starting at position 2928 of SEQ ID NO: 1561481
ggcgacaucucagaaaccu

SEQ ID NO: 1675280 - RNA, 19 nt, Artificial Sequence
  Description of Artificial Sequence: Synthetic oligonucleotide
  Antisense strand to SEQ ID NO: 1675279
agguuucugagaugucgcc

SEQ ID NO: 1675281 - RNA, 19 nt, Artificial Sequence
  Description of Artificial Sequence: Synthetic oligonucleotide
  Sense strand starting at position 2988 of SEQ ID NO: 1561481
gcuugacgcuguuuguuua

SEQ ID NO: 1675282 - RNA, 19 nt, Artificial Sequence
  Description of Artificial Sequence: Synthetic oligonucleotide
  Antisense strand to SEQ ID NO: 1675281
uaaacaaacagcgucaagc

SEQ ID NO: 1675283 - RNA, 19 nt, Artificial Sequence
  Description of Artificial Sequence: Synthetic oligonucleotide
  Sense strand starting at position 3032 of SEQ ID NO: 1561481
uaaugagagugcgagcaaa

SEQ ID NO: 1675284 - RNA, 19 nt, Artificial Sequence
  Description of Artificial Sequence: Synthetic oligonucleotide
  Antisense strand to SEQ ID NO: 1675283
uuugcucgcacucucauua

SEQ ID NO: 1675285 - RNA, 19 nt, Artificial Sequence
  Description of Artificial Sequence: Synthetic oligonucleotide
  Sense strand starting at position 3075 of SEQ ID NO: 1561481
gcaaguagaaccuggaaca

SEQ ID NO: 1675286 - RNA, 19 nt, Artificial Sequence
  Description of Artificial Sequence: Synthetic oligonucleotide
  Antisense strand to SEQ ID NO: 1675285
uguuccagguucuacuugc

SEQ ID NO: 1675287 - RNA, 19 nt, Artificial Sequence
  Description of Artificial Sequence: Synthetic oligonucleotide
  Sense strand starting at position 3085 of SEQ ID NO: 1561481
ccuggaacauucuuaccga

SEQ ID NO: 1675288 - RNA, 19 nt, Artificial Sequence
  Description of Artificial Sequence: Synthetic oligonucleotide
  Antisense strand to SEQ ID NO: 1675287
ucgguaagaauguuccagg

SEQ ID NO: 1675289 - RNA, 19 nt, Artificial Sequence
  Description of Artificial Sequence: Synthetic oligonucleotide
  Sense strand starting at position 3159 of SEQ ID NO: 1561481
uaaugucugcaccagguua

SEQ ID NO: 1675290 - RNA, 19 nt, Artificial Sequence
  Description of Artificial Sequence: Synthetic oligonucleotide
  Antisense strand to SEQ ID NO: 1675289
uaaccuggugcagacauua

SEQ ID NO: 1675291 - RNA, 19 nt, Artificial Sequence
  Description of Artificial Sequence: Synthetic oligonucleotide
  Sense strand starting at position 3161 of SEQ ID NO: 1561481
augucugcaccagguuaau

SEQ ID NO: 1675292 - RNA, 19 nt, Artificial Sequence
  Description of Artificial Sequence: Synthetic oligonucleotide
  Antisense strand to SEQ ID NO: 1675291
auuaaccuggugcagacau

SEQ ID NO: 1675293 - RNA, 19 nt, Artificial Sequence
  Description of Artificial Sequence: Synthetic oligonucleotide
  Sense strand starting at position 3170 of SEQ ID NO: 1561481
ccagguuaaucauugcagu

SEQ ID NO: 1675294 - RNA, 19 nt, Artificial Sequence
  Description of Artificial Sequence: Synthetic oligonucleotide
  Antisense strand to SEQ ID NO: 1675293
acugcaaugauuaaccugg

SEQ ID NO: 1675295 - RNA, 19 nt, Artificial Sequence
  Description of Artificial Sequence: Synthetic oligonucleotide
  Sense strand starting at position 3171 of SEQ ID NO: 1561481
cagguuaaucauugcagua

SEQ ID NO: 1675296 - RNA, 19 nt, Artificial Sequence
  Description of Artificial Sequence: Synthetic oligonucleotide
  Antisense strand to SEQ ID NO: 1675295
uacugcaaugauuaaccug

SEQ ID NO: 1675297 - RNA, 19 nt, Artificial Sequence
  Description of Artificial Sequence: Synthetic oligonucleotide
  Sense strand starting at position 3240 of SEQ ID NO: 1561481
agagcugaguaauaaauca

SEQ ID NO: 1675298 - RNA, 19 nt, Artificial Sequence
  Description of Artificial Sequence: Synthetic oligonucleotide
  Antisense strand to SEQ ID NO: 1675297
ugauuuauuacucagcucu

SEQ ID NO: 1675299 - RNA, 19 nt, Artificial Sequence
  Description of Artificial Sequence: Synthetic oligonucleotide
  Sense strand starting at position 3247 of SEQ ID NO: 1561481
aguaauaaaucaugacuga

SEQ ID NO: 1675300 - RNA, 19 nt, Artificial Sequence
  Description of Artificial Sequence: Synthetic oligonucleotide
  Antisense strand to SEQ ID NO: 1675299
ucagucaugauuuauuacu

SEQ ID NO: 1675301 - RNA, 19 nt, Artificial Sequence
  Description of Artificial Sequence: Synthetic oligonucleotide
  Sense strand starting at position 3263 of SEQ ID NO: 1561481
ugauccacccaguggaaua

SEQ ID NO: 1675302 - RNA, 19 nt, Artificial Sequence
  Description of Artificial Sequence: Synthetic oligonucleotide
  Antisense strand to SEQ ID NO: 1675301
uauuccacuggguggauca

SEQ ID NO: 1675303 - RNA, 19 nt, Artificial Sequence
  Description of Artificial Sequence: Synthetic oligonucleotide
  Sense strand starting at position 3274 of SEQ ID NO: 1561481
guggaauacuaggugucca

SEQ ID NO: 1675304 - RNA, 19 nt, Artificial Sequence
  Description of Artificial Sequence: Synthetic oligonucleotide
  Antisense strand to SEQ ID NO: 1675303
uggacaccuaguauuccac

SEQ ID NO: 1675305 - RNA, 19 nt, Artificial Sequence
  Description of Artificial Sequence: Synthetic oligonucleotide
  Sense strand starting at position 3275 of SEQ ID NO: 1561481
uggaauacuagguguccau

SEQ ID NO: 1675306 - RNA, 19 nt, Artificial Sequence
  Description of Artificial Sequence: Synthetic oligonucleotide
  Antisense strand to SEQ ID NO: 1675305
auggacaccuaguauucca

SEQ ID NO: 1675307 - RNA, 19 nt, Artificial Sequence
  Description of Artificial Sequence: Synthetic oligonucleotide
  Sense strand starting at position 3278 of SEQ ID NO: 1561481
aauacuagguguccauaga

SEQ ID NO: 1675308 - RNA, 19 nt, Artificial Sequence
  Description of Artificial Sequence: Synthetic oligonucleotide
  Antisense strand to SEQ ID NO: 1675307
ucuauggacaccuaguauu

SEQ ID NO: 1675309 - RNA, 19 nt, Artificial Sequence
  Description of Artificial Sequence: Synthetic oligonucleotide
  Sense strand starting at position 3413 of SEQ ID NO: 1561481
cugggauuguguccagaug

SEQ ID NO: 1675310 - RNA, 19 nt, Artificial Sequence
  Description of Artificial Sequence: Synthetic oligonucleotide
  Antisense strand to SEQ ID NO: 1675309
caucuggacacaaucccag

SEQ ID NO: 1675311 - RNA, 19 nt, Artificial Sequence
  Description of Artificial Sequence: Synthetic oligonucleotide
  Sense strand starting at position 3414 of SEQ ID NO: 1561481
ugggauuguguccagauga

SEQ ID NO: 1675312 - RNA, 19 nt, Artificial Sequence
  Description of Artificial Sequence: Synthetic oligonucleotide
  Antisense strand to SEQ ID NO: 1675311
ucaucuggacacaauccca

SEQ ID NO: 1675313 - RNA, 19 nt, Artificial Sequence
  Description of Artificial Sequence: Synthetic oligonucleotide
  Sense strand starting at position 3471 of SEQ ID NO: 1561481
gucuaacuuccaggacaga

SEQ ID NO: 1675314 - RNA, 19 nt, Artificial Sequence
  Description of Artificial Sequence: Synthetic oligonucleotide
  Antisense strand to SEQ ID NO: 1675313
ucuguccuggaaguuagac

SEQ ID NO: 1675315 - RNA, 19 nt, Artificial Sequence
  Description of Artificial Sequence: Synthetic oligonucleotide
  Sense strand starting at position 3870 of SEQ ID NO: 1561481
ccgugugaaugugcuauau

SEQ ID NO: 1675316 - RNA, 19 nt, Artificial Sequence
  Description of Artificial Sequence: Synthetic oligonucleotide
  Antisense strand to SEQ ID NO: 1675315
auauagcacauucacacgg

SEQ ID NO: 1675317 - RNA, 19 nt, Artificial Sequence
  Description of Artificial Sequence: Synthetic oligonucleotide
  Sense strand starting at position 3874 of SEQ ID NO: 1561481
gugaaugugcuauauacuc

SEQ ID NO: 1675318 - RNA, 19 nt, Artificial Sequence
  Description of Artificial Sequence: Synthetic oligonucleotide
  Antisense strand to SEQ ID NO: 1675317
gaguauauagcacauucac

SEQ ID NO: 1675319 - RNA, 19 nt, Artificial Sequence
  Description of Artificial Sequence: Synthetic oligonucleotide
  Sense strand starting at position 27 of SEQ ID NO: 1561482
cagccacgugucugaacaa

SEQ ID NO: 1675320 - RNA, 19 nt, Artificial Sequence
  Description of Artificial Sequence: Synthetic oligonucleotide
  Antisense strand to SEQ ID NO: 1675319
uuguucagacacguggcug

SEQ ID NO: 1675321 - RNA, 19 nt, Artificial Sequence
  Description of Artificial Sequence: Synthetic oligonucleotide
  Sense strand starting at position 171 of SEQ ID NO: 1561482
gggccuuucuguguaaguu

SEQ ID NO: 1675322 - RNA, 19 nt, Artificial Sequence
  Description of Artificial Sequence: Synthetic oligonucleotide
  Antisense strand to SEQ ID NO: 1675321
aacuuacacagaaaggccc

SEQ ID NO: 1675323 - RNA, 19 nt, Artificial Sequence
  Description of Artificial Sequence: Synthetic oligonucleotide
  Sense strand starting at position 2279 of SEQ ID NO: 1561482
uacggaacccaucgucuua

SEQ ID NO: 1675324 - RNA, 19 nt, Artificial Sequence
  Description of Artificial Sequence: Synthetic oligonucleotide
  Antisense strand to SEQ ID NO: 1675323
uaagacgauggguuccgua

SEQ ID NO: 1675325 - RNA, 19 nt, Artificial Sequence
  Description of Artificial Sequence: Synthetic oligonucleotide
  Sense strand starting at position 2407 of SEQ ID NO: 1561482
cccauauauggcggugaca

SEQ ID NO: 1675326 - RNA, 19 nt, Artificial Sequence
  Description of Artificial Sequence: Synthetic oligonucleotide
  Antisense strand to SEQ ID NO: 1675325
ugucaccgccauauauggg

SEQ ID NO: 1675327 - RNA, 19 nt, Artificial Sequence
  Description of Artificial Sequence: Synthetic oligonucleotide
  Sense strand starting at position 2409 of SEQ ID NO: 1561482
cauauauggcggugacauc

SEQ ID NO: 1675328 - RNA, 19 nt, Artificial Sequence
  Description of Artificial Sequence: Synthetic oligonucleotide
  Antisense strand to SEQ ID NO: 1675327
gaugucaccgccauauaug

SEQ ID NO: 1675329 - RNA, 19 nt, Artificial Sequence
  Description of Artificial Sequence: Synthetic oligonucleotide
  Sense strand starting at position 2418 of SEQ ID NO: 1561482
cggugacaucguuacuucu

SEQ ID NO: 1675330 - RNA, 19 nt, Artificial Sequence
  Description of Artificial Sequence: Synthetic oligonucleotide
  Antisense strand to SEQ ID NO: 1675329
agaaguaacgaugucaccg

SEQ ID NO: 1675331 - RNA, 19 nt, Artificial Sequence
  Description of Artificial Sequence: Synthetic oligonucleotide
  Sense strand starting at position 2420 of SEQ ID NO: 1561482
gugacaucguuacuucuuu

SEQ ID NO: 1675332 - RNA, 19 nt, Artificial Sequence
  Description of Artificial Sequence: Synthetic oligonucleotide
  Antisense strand to SEQ ID NO: 1675331
aaagaaguaacgaugucac

SEQ ID NO: 1675333 - RNA, 19 nt, Artificial Sequence
  Description of Artificial Sequence: Synthetic oligonucleotide
  Sense strand starting at position 2425 of SEQ ID NO: 1561482
aucguuacuucuuucugua

SEQ ID NO: 1675334 - RNA, 19 nt, Artificial Sequence
  Description of Artificial Sequence: Synthetic oligonucleotide
  Antisense strand to SEQ ID NO: 1675333
uacagaaagaaguaacgau

SEQ ID NO: 1675335 - RNA, 19 nt, Artificial Sequence
  Description of Artificial Sequence: Synthetic oligonucleotide
  Sense strand starting at position 3261 of SEQ ID NO: 1561482
gaacgauuccgccgcuuga

SEQ ID NO: 1675336 - RNA, 19 nt, Artificial Sequence
  Description of Artificial Sequence: Synthetic oligonucleotide
  Antisense strand to SEQ ID NO: 1675335
ucaagcggcggaaucguuc

SEQ ID NO: 1675337 - RNA, 19 nt, Artificial Sequence
  Description of Artificial Sequence: Synthetic oligonucleotide
  Sense strand starting at position 3277 of SEQ ID NO: 1561482
ugacaagagaucggccaau

SEQ ID NO: 1675338 - RNA, 19 nt, Artificial Sequence
  Description of Artificial Sequence: Synthetic oligonucleotide
  Antisense strand to SEQ ID NO: 1675337
auuggccgaucucuuguca

SEQ ID NO: 1675339 - RNA, 19 nt, Artificial Sequence
  Description of Artificial Sequence: Synthetic oligonucleotide
  Sense strand starting at position 3560 of SEQ ID NO: 1561482
gaagguauguucuuuccac

SEQ ID NO: 1675340 - RNA, 19 nt, Artificial Sequence
  Description of Artificial Sequence: Synthetic oligonucleotide
  Antisense strand to SEQ ID NO: 1675339
guggaaagaacauaccuuc

SEQ ID NO: 1675341 - RNA, 19 nt, Artificial Sequence
  Description of Artificial Sequence: Synthetic oligonucleotide
  Sense strand starting at position 3640 of SEQ ID NO: 1561482
gugugauauuuccagaagg

SEQ ID NO: 1675342 - RNA, 19 nt, Artificial Sequence
  Description of Artificial Sequence: Synthetic oligonucleotide
  Antisense strand to SEQ ID NO: 1675341
ccuucuggaaauaucacac

SEQ ID NO: 1675343 - RNA, 19 nt, Artificial Sequence
  Description of Artificial Sequence: Synthetic oligonucleotide
  Sense strand starting at position 126 of SEQ ID NO: 1561483
gggccuuucuguguaaguu

SEQ ID NO: 1675344 - RNA, 19 nt, Artificial Sequence
  Description of Artificial Sequence: Synthetic oligonucleotide
  Antisense strand to SEQ ID NO: 1675343
aacuuacacagaaaggccc

SEQ ID NO: 1675345 - RNA, 19 nt, Artificial Sequence
  Description of Artificial Sequence: Synthetic oligonucleotide
  Sense strand starting at position 2234 of SEQ ID NO: 1561483
uacggaacccaucgucuua

SEQ ID NO: 1675346 - RNA, 19 nt, Artificial Sequence
  Description of Artificial Sequence: Synthetic oligonucleotide
  Antisense strand to SEQ ID NO: 1675345
uaagacgauggguuccgua

SEQ ID NO: 1675347 - RNA, 19 nt, Artificial Sequence
  Description of Artificial Sequence: Synthetic oligonucleotide
  Sense strand starting at position 2362 of SEQ ID NO: 1561483
cccauauauggcggugaca

SEQ ID NO: 1675348 - RNA, 19 nt, Artificial Sequence
  Description of Artificial Sequence: Synthetic oligonucleotide
  Antisense strand to SEQ ID NO: 1675347
ugucaccgccauauauggg

SEQ ID NO: 1675349 - RNA, 19 nt, Artificial Sequence
  Description of Artificial Sequence: Synthetic oligonucleotide
  Sense strand starting at position 2364 of SEQ ID NO: 1561483
cauauauggcggugacauc

SEQ ID NO: 1675350 - RNA, 19 nt, Artificial Sequence
  Description of Artificial Sequence: Synthetic oligonucleotide
  Antisense strand to SEQ ID NO: 1675349
gaugucaccgccauauaug

SEQ ID NO: 1675351 - RNA, 19 nt, Artificial Sequence
  Description of Artificial Sequence: Synthetic oligonucleotide
  Sense strand starting at position 2373 of SEQ ID NO: 1561483
cggugacaucguuacuucu

SEQ ID NO: 1675352 - RNA, 19 nt, Artificial Sequence
  Description of Artificial Sequence: Synthetic oligonucleotide
  Antisense strand to SEQ ID NO: 1675351
agaaguaacgaugucaccg

SEQ ID NO: 1675353 - RNA, 19 nt, Artificial Sequence
  Description of Artificial Sequence: Synthetic oligonucleotide
  Sense strand starting at position 2375 of SEQ ID NO: 1561483
gugacaucguuacuucuuu

SEQ ID NO: 1675354 - RNA, 19 nt, Artificial Sequence
  Description of Artificial Sequence: Synthetic oligonucleotide
  Antisense strand to SEQ ID NO: 1675353
aaagaaguaacgaugucac

SEQ ID NO: 1675355 - RNA, 19 nt, Artificial Sequence
  Description of Artificial Sequence: Synthetic oligonucleotide
  Sense strand starting at position 2380 of SEQ ID NO: 1561483
aucguuacuucuuucugua

SEQ ID NO: 1675356 - RNA, 19 nt, Artificial Sequence
  Description of Artificial Sequence: Synthetic oligonucleotide
  Antisense strand to SEQ ID NO: 1675355
uacagaaagaaguaacgau

SEQ ID NO: 1675357 - RNA, 19 nt, Artificial Sequence
  Description of Artificial Sequence: Synthetic oligonucleotide
  Sense strand starting at position 3216 of SEQ ID NO: 1561483
gaacgauuccgccgcuuga

SEQ ID NO: 1675358 - RNA, 19 nt, Artificial Sequence
  Description of Artificial Sequence: Synthetic oligonucleotide
  Antisense strand to SEQ ID NO: 1675357
ucaagcggcggaaucguuc

SEQ ID NO: 1675359 - RNA, 19 nt, Artificial Sequence
  Description of Artificial Sequence: Synthetic oligonucleotide
  Sense strand starting at position 3232 of SEQ ID NO: 1561483
ugacaagagaucggccaau

SEQ ID NO: 1675360 - RNA, 19 nt, Artificial Sequence
  Description of Artificial Sequence: Synthetic oligonucleotide
  Antisense strand to SEQ ID NO: 1675359
auuggccgaucucuuguca

SEQ ID NO: 1675361 - RNA, 19 nt, Artificial Sequence
  Description of Artificial Sequence: Synthetic oligonucleotide
  Sense strand starting at position 3515 of SEQ ID NO: 1561483
gaagguauguucuuuccac

SEQ ID NO: 1675362 - RNA, 19 nt, Artificial Sequence
  Description of Artificial Sequence: Synthetic oligonucleotide
  Antisense strand to SEQ ID NO: 1675361
guggaaagaacauaccuuc

SEQ ID NO: 1675363 - RNA, 19 nt, Artificial Sequence
  Description of Artificial Sequence: Synthetic oligonucleotide
  Sense strand starting at position 3595 of SEQ ID NO: 1561483
gugugauauuuccagaagg

SEQ ID NO: 1675364 - RNA, 19 nt, Artificial Sequence
  Description of Artificial Sequence: Synthetic oligonucleotide
  Antisense strand to SEQ ID NO: 1675363
ccuucuggaaauaucacac

SEQ ID NO: 1675365 - RNA, 19 nt, Artificial Sequence
  Description of Artificial Sequence: Synthetic oligonucleotide
  Sense strand starting at position 1208 of SEQ ID NO: 1561484
uacggaacccaucgucuua

SEQ ID NO: 1675366 - RNA, 19 nt, Artificial Sequence
  Description of Artificial Sequence: Synthetic oligonucleotide
  Antisense strand to SEQ ID NO: 1675365
uaagacgauggguuccgua

SEQ ID NO: 1675367 - RNA, 19 nt, Artificial Sequence
  Description of Artificial Sequence: Synthetic oligonucleotide
  Sense strand starting at position 1336 of SEQ ID NO: 1561484
cccauauauggcggugaca

SEQ ID NO: 1675368 - RNA, 19 nt, Artificial Sequence
  Description of Artificial Sequence: Synthetic oligonucleotide
  Antisense strand to SEQ ID NO: 1675367
ugucaccgccauauauggg

SEQ ID NO: 1675369 - RNA, 19 nt, Artificial Sequence
  Description of Artificial Sequence: Synthetic oligonucleotide
  Sense strand starting at position 1338 of SEQ ID NO: 1561484
cauauauggcggugacauc

SEQ ID NO: 1675370 - RNA, 19 nt, Artificial Sequence
  Description of Artificial Sequence: Synthetic oligonucleotide
  Antisense strand to SEQ ID NO: 1675369
gaugucaccgccauauaug

SEQ ID NO: 1675371 - RNA, 19 nt, Artificial Sequence
  Description of Artificial Sequence: Synthetic oligonucleotide
  Sense strand starting at position 1347 of SEQ ID NO: 1561484
cggugacaucguuacuucu

SEQ ID NO: 1675372 - RNA, 19 nt, Artificial Sequence
  Description of Artificial Sequence: Synthetic oligonucleotide
  Antisense strand to SEQ ID NO: 1675371
agaaguaacgaugucaccg

SEQ ID NO: 1675373 - RNA, 19 nt, Artificial Sequence
  Description of Artificial Sequence: Synthetic oligonucleotide
  Sense strand starting at position 1349 of SEQ ID NO: 1561484
gugacaucguuacuucuuu

SEQ ID NO: 1675374 - RNA, 19 nt, Artificial Sequence
  Description of Artificial Sequence: Synthetic oligonucleotide
  Antisense strand to SEQ ID NO: 1675373
aaagaaguaacgaugucac

SEQ ID NO: 1675375 - RNA, 19 nt, Artificial Sequence
  Description of Artificial Sequence: Synthetic oligonucleotide
  Sense strand starting at position 1354 of SEQ ID NO: 1561484
aucguuacuucuuucugua

SEQ ID NO: 1675376 - RNA, 19 nt, Artificial Sequence
  Description of Artificial Sequence: Synthetic oligonucleotide
  Antisense strand to SEQ ID NO: 1675375
uacagaaagaaguaacgau

SEQ ID NO: 1675377 - RNA, 19 nt, Artificial Sequence
  Description of Artificial Sequence: Synthetic oligonucleotide
  Sense strand starting at position 2190 of SEQ ID NO: 1561484
gaacgauuccgccgcuuga

SEQ ID NO: 1675378 - RNA, 19 nt, Artificial Sequence
  Description of Artificial Sequence: Synthetic oligonucleotide
  Antisense strand to SEQ ID NO: 1675377
ucaagcggcggaaucguuc

SEQ ID NO: 1675379 - RNA, 19 nt, Artificial Sequence
  Description of Artificial Sequence: Synthetic oligonucleotide
  Sense strand starting at position 2206 of SEQ ID NO: 1561484
ugacaagagaucggccaau

SEQ ID NO: 1675380 - RNA, 19 nt, Artificial Sequence
  Description of Artificial Sequence: Synthetic oligonucleotide
  Antisense strand to SEQ ID NO: 1675379
auuggccgaucucuuguca

SEQ ID NO: 1675381 - RNA, 19 nt, Artificial Sequence
  Description of Artificial Sequence: Synthetic oligonucleotide
  Sense strand starting at position 2489 of SEQ ID NO: 1561484
gaagguauguucuuuccac

SEQ ID NO: 1675382 - RNA, 19 nt, Artificial Sequence
  Description of Artificial Sequence: Synthetic oligonucleotide
  Antisense strand to SEQ ID NO: 1675381
guggaaagaacauaccuuc

SEQ ID NO: 1675383 - RNA, 19 nt, Artificial Sequence
  Description of Artificial Sequence: Synthetic oligonucleotide
  Sense strand starting at position 2569 of SEQ ID NO: 1561484
gugugauauuuccagaagg

SEQ ID NO: 1675384 - RNA, 19 nt, Artificial Sequence
  Description of Artificial Sequence: Synthetic oligonucleotide
  Antisense strand to SEQ ID NO: 1675383
ccuucuggaaauaucacac

SEQ ID NO: 1675385 - RNA, 19 nt, Artificial Sequence
  Description of Artificial Sequence: Synthetic oligonucleotide
  Sense strand starting at position 2975 of SEQ ID NO: 1561484
uagagcacuguccaucaga

SEQ ID NO: 1675386 - RNA, 19 nt, Artificial Sequence
  Description of Artificial Sequence: Synthetic oligonucleotide
  Antisense strand to SEQ ID NO: 1675385
ucugauggacagugcucua

SEQ ID NO: 1675387 - RNA, 19 nt, Artificial Sequence
  Description of Artificial Sequence: Synthetic oligonucleotide
  Sense strand starting at position 2978 of SEQ ID NO: 1561484
agcacuguccaucagaacu

SEQ ID NO: 1675388 - RNA, 19 nt, Artificial Sequence
  Description of Artificial Sequence: Synthetic oligonucleotide
  Antisense strand to SEQ ID NO: 1675387
aguucugauggacagugcu

SEQ ID NO: 1675389 - RNA, 19 nt, Artificial Sequence
  Description of Artificial Sequence: Synthetic oligonucleotide
  Sense strand starting at position 2988 of SEQ ID NO: 1561484
aucagaacuuucugcaaug

SEQ ID NO: 1675390 - RNA, 19 nt, Artificial Sequence
  Description of Artificial Sequence: Synthetic oligonucleotide
  Antisense strand to SEQ ID NO: 1675389
cauugcagaaaguucugau

SEQ ID NO: 1675391 - RNA, 19 nt, Artificial Sequence
  Description of Artificial Sequence: Synthetic oligonucleotide
  Sense strand starting at position 2998 of SEQ ID NO: 1561484
ucugcaaugguggaaaguu

SEQ ID NO: 1675392 - RNA, 19 nt, Artificial Sequence
  Description of Artificial Sequence: Synthetic oligonucleotide
  Antisense strand to SEQ ID NO: 1675391
aacuuuccaccauugcaga

SEQ ID NO: 1675393 - RNA, 19 nt, Artificial Sequence
  Description of Artificial Sequence: Synthetic oligonucleotide
  Sense strand starting at position 3006 of SEQ ID NO: 1561484
gguggaaaguucuaugaca

SEQ ID NO: 1675394 - RNA, 19 nt, Artificial Sequence
  Description of Artificial Sequence: Synthetic oligonucleotide
  Antisense strand to SEQ ID NO: 1675393
ugucauagaacuuuccacc

SEQ ID NO: 1675395 - RNA, 19 nt, Artificial Sequence
  Description of Artificial Sequence: Synthetic oligonucleotide
  Sense strand starting at position 3008 of SEQ ID NO: 1561484
uggaaaguucuaugacagu

SEQ ID NO: 1675396 - RNA, 19 nt, Artificial Sequence
  Description of Artificial Sequence: Synthetic oligonucleotide
  Antisense strand to SEQ ID NO: 1675395
acugucauagaacuuucca

SEQ ID NO: 1675397 - RNA, 19 nt, Artificial Sequence
  Description of Artificial Sequence: Synthetic oligonucleotide
  Sense strand starting at position 3037 of SEQ ID NO: 1561484
gugggacucuuacacucuu

SEQ ID NO: 1675398 - RNA, 19 nt, Artificial Sequence
  Description of Artificial Sequence: Synthetic oligonucleotide
  Antisense strand to SEQ ID NO: 1675397
aagaguguaagagucccac

SEQ ID NO: 1675399 - RNA, 19 nt, Artificial Sequence
  Description of Artificial Sequence: Synthetic oligonucleotide
  Sense strand starting at position 3055 of SEQ ID NO: 1561484
ugaaauguggcugguguau

SEQ ID NO: 1675400 - RNA, 19 nt, Artificial Sequence
  Description of Artificial Sequence: Synthetic oligonucleotide
  Antisense strand to SEQ ID NO: 1675399
auacaccagccacauuuca

SEQ ID NO: 1675401 - RNA, 19 nt, Artificial Sequence
  Description of Artificial Sequence: Synthetic oligonucleotide
  Sense strand starting at position 3057 of SEQ ID NO: 1561484
aaauguggcugguguauca

SEQ ID NO: 1675402 - RNA, 19 nt, Artificial Sequence
  Description of Artificial Sequence: Synthetic oligonucleotide
  Antisense strand to SEQ ID NO: 1675401
ugauacaccagccacauuu

SEQ ID NO: 1675403 - RNA, 19 nt, Artificial Sequence
  Description of Artificial Sequence: Synthetic oligonucleotide
  Sense strand starting at position 3434 of SEQ ID NO: 1561484
gcuccuaccuuauggaaca

SEQ ID NO: 1675404 - RNA, 19 nt, Artificial Sequence
  Description of Artificial Sequence: Synthetic oligonucleotide
  Antisense strand to SEQ ID NO: 1675403
uguuccauaagguaggagc

SEQ ID NO: 1675405 - RNA, 19 nt, Artificial Sequence
  Description of Artificial Sequence: Synthetic oligonucleotide
  Sense strand starting at position 3518 of SEQ ID NO: 1561484
auauuugguuugggacaca

SEQ ID NO: 1675406 - RNA, 19 nt, Artificial Sequence
  Description of Artificial Sequence: Synthetic oligonucleotide
  Antisense strand to SEQ ID NO: 1675405
ugugucccaaaccaaauau

SEQ ID NO: 1675407 - RNA, 19 nt, Artificial Sequence
  Description of Artificial Sequence: Synthetic oligonucleotide
  Sense strand starting at position 3911 of SEQ ID NO: 1561484
cuggucuacuuagacaauu

SEQ ID NO: 1675408 - RNA, 19 nt, Artificial Sequence
  Description of Artificial Sequence: Synthetic oligonucleotide
  Antisense strand to SEQ ID NO: 1675407
aauugucuaaguagaccag

SEQ ID NO: 1675409 - RNA, 19 nt, Artificial Sequence
  Description of Artificial Sequence: Synthetic oligonucleotide
  Sense strand starting at position 3935 of SEQ ID NO: 1561484
accugagugucuugccaag

SEQ ID NO: 1675410 - RNA, 19 nt, Artificial Sequence
  Description of Artificial Sequence: Synthetic oligonucleotide
  Antisense strand to SEQ ID NO: 1675409
cuuggcaagacacucaggu

SEQ ID NO: 1675411 - RNA, 19 nt, Artificial Sequence
  Description of Artificial Sequence: Synthetic oligonucleotide
  Sense strand starting at position 3937 of SEQ ID NO: 1561484
cugagugucuugccaagau

SEQ ID NO: 1675412 - RNA, 19 nt, Artificial Sequence
  Description of Artificial Sequence: Synthetic oligonucleotide
  Antisense strand to SEQ ID NO: 1675411
aucuuggcaagacacucag

SEQ ID NO: 1675413 - RNA, 19 nt, Artificial Sequence
  Description of Artificial Sequence: Synthetic oligonucleotide
  Sense strand starting at position 3946 of SEQ ID NO: 1561484
uugccaagaucccugauau

SEQ ID NO: 1675414 - RNA, 19 nt, Artificial Sequence
  Description of Artificial Sequence: Synthetic oligonucleotide
  Antisense strand to SEQ ID NO: 1675413
auaucagggaucuuggcaa

SEQ ID NO: 1675415 - RNA, 19 nt, Artificial Sequence
  Description of Artificial Sequence: Synthetic oligonucleotide
  Sense strand starting at position 3947 of SEQ ID NO: 1561484
ugccaagaucccugauaua

SEQ ID NO: 1675416 - RNA, 19 nt, Artificial Sequence
  Description of Artificial Sequence: Synthetic oligonucleotide
  Antisense strand to SEQ ID NO: 1675415
uauaucagggaucuuggca

SEQ ID NO: 1675417 - RNA, 19 nt, Artificial Sequence
  Description of Artificial Sequence: Synthetic oligonucleotide
  Sense strand starting at position 3959 of SEQ ID NO: 1561484
ugauauaguuaagaugucu

SEQ ID NO: 1675418 - RNA, 19 nt, Artificial Sequence
  Description of Artificial Sequence: Synthetic oligonucleotide
  Antisense strand to SEQ ID NO: 1675417
agacaucuuaacuauauca

SEQ ID NO: 1675419 - RNA, 19 nt, Artificial Sequence
  Description of Artificial Sequence: Synthetic oligonucleotide
  Sense strand starting at position 1245 of SEQ ID NO: 1561485
gggucuuccuccuuggaaa

SEQ ID NO: 1675420 - RNA, 19 nt, Artificial Sequence
  Description of Artificial Sequence: Synthetic oligonucleotide
  Antisense strand to SEQ ID NO: 1675419
uuuccaaggaggaagaccc

SEQ ID NO: 1675421 - RNA, 19 nt, Artificial Sequence
  Description of Artificial Sequence: Synthetic oligonucleotide
  Sense strand starting at position 1442 of SEQ ID NO: 1561485
cguguuggccuaugcuaca

SEQ ID NO: 1675422 - RNA, 19 nt, Artificial Sequence
  Description of Artificial Sequence: Synthetic oligonucleotide
  Antisense strand to SEQ ID NO: 1675421
uguagcauaggccaacacg

SEQ ID NO: 1675423 - RNA, 19 nt, Artificial Sequence
  Description of Artificial Sequence: Synthetic oligonucleotide
  Sense strand starting at position 1550 of SEQ ID NO: 1561485
cagccacgugucugaacaa

SEQ ID NO: 1675424 - RNA, 19 nt, Artificial Sequence
  Description of Artificial Sequence: Synthetic oligonucleotide
  Antisense strand to SEQ ID NO: 1675423
uuguucagacacguggcug

SEQ ID NO: 1675425 - RNA, 19 nt, Artificial Sequence
  Description of Artificial Sequence: Synthetic oligonucleotide
  Sense strand starting at position 1694 of SEQ ID NO: 1561485
gggccuuucuguguaaguu

SEQ ID NO: 1675426 - RNA, 19 nt, Artificial Sequence
  Description of Artificial Sequence: Synthetic oligonucleotide
  Antisense strand to SEQ ID NO: 1675425
aacuuacacagaaaggccc

SEQ ID NO: 1675427 - RNA, 19 nt, Artificial Sequence
  Description of Artificial Sequence: Synthetic oligonucleotide
  Sense strand starting at position 3802 of SEQ ID NO: 1561485
uacggaacccaucgucuua

SEQ ID NO: 1675428 - RNA, 19 nt, Artificial Sequence
  Description of Artificial Sequence: Synthetic oligonucleotide
  Antisense strand to SEQ ID NO: 1675427
uaagacgauggguuccgua

SEQ ID NO: 1675429 - RNA, 19 nt, Artificial Sequence
  Description of Artificial Sequence: Synthetic oligonucleotide
  Sense strand starting at position 3930 of SEQ ID NO: 1561485
cccauauauggcggugaca

SEQ ID NO: 1675430 - RNA, 19 nt, Artificial Sequence
  Description of Artificial Sequence: Synthetic oligonucleotide
  Antisense strand to SEQ ID NO: 1675429
ugucaccgccauauauggg

SEQ ID NO: 1675431 - RNA, 19 nt, Artificial Sequence
  Description of Artificial Sequence: Synthetic oligonucleotide
  Sense strand starting at position 3932 of SEQ ID NO: 1561485
cauauauggcggugacauc

SEQ ID NO: 1675432 - RNA, 19 nt, Artificial Sequence
  Description of Artificial Sequence: Synthetic oligonucleotide
  Antisense strand to SEQ ID NO: 1675431
gaugucaccgccauauaug

SEQ ID NO: 1675433 - RNA, 19 nt, Artificial Sequence
  Description of Artificial Sequence: Synthetic oligonucleotide
  Sense strand starting at position 3941 of SEQ ID NO: 1561485
cggugacaucguuacuucu

SEQ ID NO: 1675434 - RNA, 19 nt, Artificial Sequence
  Description of Artificial Sequence: Synthetic oligonucleotide
  Antisense strand to SEQ ID NO: 1675433
agaaguaacgaugucaccg

SEQ ID NO: 1675435 - RNA, 19 nt, Artificial Sequence
  Description of Artificial Sequence: Synthetic oligonucleotide
  Sense strand starting at position 3943 of SEQ ID NO: 1561485
gugacaucguuacuucuuu

SEQ ID NO: 1675436 - RNA, 19 nt, Artificial Sequence
  Description of Artificial Sequence: Synthetic oligonucleotide
  Antisense strand to SEQ ID NO: 1675435
aaagaaguaacgaugucac

SEQ ID NO: 1675437 - RNA, 19 nt, Artificial Sequence
  Description of Artificial Sequence: Synthetic oligonucleotide
  Sense strand starting at position 3948 of SEQ ID NO: 1561485
aucguuacuucuuucugua

SEQ ID NO: 1675438 - RNA, 19 nt, Artificial Sequence
  Description of Artificial Sequence: Synthetic oligonucleotide
  Antisense strand to SEQ ID NO: 1675437
uacagaaagaaguaacgau

SEQ ID NO: 1675439 - RNA, 19 nt, Artificial Sequence
  Description of Artificial Sequence: Synthetic oligonucleotide
  Sense strand starting at position 31 of SEQ ID NO: 1561486
ggagaugcagaaugcuaua

SEQ ID NO: 1675440 - RNA, 19 nt, Artificial Sequence
  Description of Artificial Sequence: Synthetic oligonucleotide
  Antisense strand to SEQ ID NO: 1675439
uauagcauucugcaucucc

SEQ ID NO: 1675441 - RNA, 19 nt, Artificial Sequence
  Description of Artificial Sequence: Synthetic oligonucleotide
  Sense strand starting at position 50 of SEQ ID NO: 1561486
gagaauaaaucugugggca

SEQ ID NO: 1675442 - RNA, 19 nt, Artificial Sequence
  Description of Artificial Sequence: Synthetic oligonucleotide
  Antisense strand to SEQ ID NO: 1675441
ugcccacagauuuauucuc

SEQ ID NO: 1675443 - RNA, 19 nt, Artificial Sequence
  Description of Artificial Sequence: Synthetic oligonucleotide
  Sense strand starting at position 51 of SEQ ID NO: 1561486
agaauaaaucugugggcau

SEQ ID NO: 1675444 - RNA, 19 nt, Artificial Sequence
  Description of Artificial Sequence: Synthetic oligonucleotide
  Antisense strand to SEQ ID NO: 1675443
augcccacagauuuauucu

SEQ ID NO: 1675445 - RNA, 19 nt, Artificial Sequence
  Description of Artificial Sequence: Synthetic oligonucleotide
  Sense strand starting at position 195 of SEQ ID NO: 1561486
gcaaauauuuaugggauuu

SEQ ID NO: 1675446 - RNA, 19 nt, Artificial Sequence
  Description of Artificial Sequence: Synthetic oligonucleotide
  Antisense strand to SEQ ID NO: 1675445
aaaucccauaaauauuugc

SEQ ID NO: 1675447 - RNA, 19 nt, Artificial Sequence
  Description of Artificial Sequence: Synthetic oligonucleotide
  Sense strand starting at position 647 of SEQ ID NO: 1561486
auagaaggccugcaucauu

SEQ ID NO: 1675448 - RNA, 19 nt, Artificial Sequence
  Description of Artificial Sequence: Synthetic oligonucleotide
  Antisense strand to SEQ ID NO: 1675447
aaugaugcaggccuucuau

SEQ ID NO: 1675449 - RNA, 19 nt, Artificial Sequence
  Description of Artificial Sequence: Synthetic oligonucleotide
  Sense strand starting at position 920 of SEQ ID NO: 1561486
acauaaauguguccuucca

SEQ ID NO: 1675450 - RNA, 19 nt, Artificial Sequence
  Description of Artificial Sequence: Synthetic oligonucleotide
  Antisense strand to SEQ ID NO: 1675449
uggaaggacacauuuaugu

SEQ ID NO: 1675451 - RNA, 19 nt, Artificial Sequence
  Description of Artificial Sequence: Synthetic oligonucleotide
  Sense strand starting at position 922 of SEQ ID NO: 1561486
auaaauguguccuuccaua

SEQ ID NO: 1675452 - RNA, 19 nt, Artificial Sequence
  Description of Artificial Sequence: Synthetic oligonucleotide
  Antisense strand to SEQ ID NO: 1675451
uauggaaggacacauuuau

SEQ ID NO: 1675453 - RNA, 19 nt, Artificial Sequence
  Description of Artificial Sequence: Synthetic oligonucleotide
  Sense strand starting at position 1031 of SEQ ID NO: 1561486
uagccaagagguugaauca

SEQ ID NO: 1675454 - RNA, 19 nt, Artificial Sequence
  Description of Artificial Sequence: Synthetic oligonucleotide
  Antisense strand to SEQ ID NO: 1675453
ugauucaaccucuuggcua

SEQ ID NO: 1675455 - RNA, 19 nt, Artificial Sequence
  Description of Artificial Sequence: Synthetic oligonucleotide
  Sense strand starting at position 1070 of SEQ ID NO: 1561486
ugggaugccaagugacuau

SEQ ID NO: 1675456 - RNA, 19 nt, Artificial Sequence
  Description of Artificial Sequence: Synthetic oligonucleotide
  Antisense strand to SEQ ID NO: 1675455
auagucacuuggcauccca

SEQ ID NO: 1675457 - RNA, 19 nt, Artificial Sequence
  Description of Artificial Sequence: Synthetic oligonucleotide
  Sense strand starting at position 1074 of SEQ ID NO: 1561486
augccaagugacuaucaaa

SEQ ID NO: 1675458 - RNA, 19 nt, Artificial Sequence
  Description of Artificial Sequence: Synthetic oligonucleotide
  Antisense strand to SEQ ID NO: 1675457
uuugauagucacuuggcau

SEQ ID NO: 1675459 - RNA, 19 nt, Artificial Sequence
  Description of Artificial Sequence: Synthetic oligonucleotide
  Sense strand starting at position 1227 of SEQ ID NO: 1561486
caaguauucgcaguguugu

SEQ ID NO: 1675460 - RNA, 19 nt, Artificial Sequence
  Description of Artificial Sequence: Synthetic oligonucleotide
  Antisense strand to SEQ ID NO: 1675459
acaacacugcgaauacuug

SEQ ID NO: 1675461 - RNA, 19 nt, Artificial Sequence
  Description of Artificial Sequence: Synthetic oligonucleotide
  Sense strand starting at position 1283 of SEQ ID NO: 1561486
guacucuguaaaggaguau

SEQ ID NO: 1675462 - RNA, 19 nt, Artificial Sequence
  Description of Artificial Sequence: Synthetic oligonucleotide
  Antisense strand to SEQ ID NO: 1675461
auacuccuuuacagaguac

SEQ ID NO: 1675463 - RNA, 19 nt, Artificial Sequence
  Description of Artificial Sequence: Synthetic oligonucleotide
  Sense strand starting at position 1335 of SEQ ID NO: 1561486
cuaaguaacguguaaguga

SEQ ID NO: 1675464 - RNA, 19 nt, Artificial Sequence
  Description of Artificial Sequence: Synthetic oligonucleotide
  Antisense strand to SEQ ID NO: 1675463
ucacuuacacguuacuuag

SEQ ID NO: 1675465 - RNA, 19 nt, Artificial Sequence
  Description of Artificial Sequence: Synthetic oligonucleotide
  Sense strand starting at position 1361 of SEQ ID NO: 1561486
augaauguugcuuaauaug

SEQ ID NO: 1675466 - RNA, 19 nt, Artificial Sequence
  Description of Artificial Sequence: Synthetic oligonucleotide
  Antisense strand to SEQ ID NO: 1675465
cauauuaagcaacauucau

SEQ ID NO: 1675467 - RNA, 19 nt, Artificial Sequence
  Description of Artificial Sequence: Synthetic oligonucleotide
  Sense strand starting at position 1378 of SEQ ID NO: 1561486
ugauguaauaggcagcuuu

SEQ ID NO: 1675468 - RNA, 19 nt, Artificial Sequence
  Description of Artificial Sequence: Synthetic oligonucleotide
  Antisense strand to SEQ ID NO: 1675467
aaagcugccuauuacauca

SEQ ID NO: 1675469 - RNA, 19 nt, Artificial Sequence
  Description of Artificial Sequence: Synthetic oligonucleotide
  Sense strand starting at position 1428 of SEQ ID NO: 1561486
uuguauuaacugcacgaua

SEQ ID NO: 1675470 - RNA, 19 nt, Artificial Sequence
  Description of Artificial Sequence: Synthetic oligonucleotide
  Antisense strand to SEQ ID NO: 1675469
uaucgugcaguuaauacaa

SEQ ID NO: 1675471 - RNA, 19 nt, Artificial Sequence
  Description of Artificial Sequence: Synthetic oligonucleotide
  Sense strand starting at position 1573 of SEQ ID NO: 1561486
ucuuguaacucucugagaa

SEQ ID NO: 1675472 - RNA, 19 nt, Artificial Sequence
  Description of Artificial Sequence: Synthetic oligonucleotide
  Antisense strand to SEQ ID NO: 1675471
uucucagagaguuacaaga

SEQ ID NO: 1675473 - RNA, 19 nt, Artificial Sequence
  Description of Artificial Sequence: Synthetic oligonucleotide
  Sense strand starting at position 1574 of SEQ ID NO: 1561486
cuuguaacucucugagaac

SEQ ID NO: 1675474 - RNA, 19 nt, Artificial Sequence
  Description of Artificial Sequence: Synthetic oligonucleotide
  Antisense strand to SEQ ID NO: 1675473
guucucagagaguuacaag

SEQ ID NO: 1675475 - RNA, 19 nt, Artificial Sequence
  Description of Artificial Sequence: Synthetic oligonucleotide
  Sense strand starting at position 1784 of SEQ ID NO: 1561486
uguagucucacgccgguaa

SEQ ID NO: 1675476 - RNA, 19 nt, Artificial Sequence
  Description of Artificial Sequence: Synthetic oligonucleotide
  Antisense strand to SEQ ID NO: 1675475
uuaccggcgugagacuaca

SEQ ID NO: 1675477 - RNA, 19 nt, Artificial Sequence
  Description of Artificial Sequence: Synthetic oligonucleotide
  Sense strand starting at position 2079 of SEQ ID NO: 1561486
agugucuuccgggaaacau

SEQ ID NO: 1675478 - RNA, 19 nt, Artificial Sequence
  Description of Artificial Sequence: Synthetic oligonucleotide
  Antisense strand to SEQ ID NO: 1675477
auguuucccggaagacacu

SEQ ID NO: 1675479 - RNA, 19 nt, Artificial Sequence
  Description of Artificial Sequence: Synthetic oligonucleotide
  Sense strand starting at position 2088 of SEQ ID NO: 1561486
cgggaaacauagucuuuag

SEQ ID NO: 1675480 - RNA, 19 nt, Artificial Sequence
  Description of Artificial Sequence: Synthetic oligonucleotide
  Antisense strand to SEQ ID NO: 1675479
cuaaagacuauguuucccg

SEQ ID NO: 1675481 - RNA, 19 nt, Artificial Sequence
  Description of Artificial Sequence: Synthetic oligonucleotide
  Sense strand starting at position 2925 of SEQ ID NO: 1561486
agcucuaugguguaauaaa

SEQ ID NO: 1675482 - RNA, 19 nt, Artificial Sequence
  Description of Artificial Sequence: Synthetic oligonucleotide
  Antisense strand to SEQ ID NO: 1675481
uuuauuacaccauagagcu

SEQ ID NO: 1675483 - RNA, 19 nt, Artificial Sequence
  Description of Artificial Sequence: Synthetic oligonucleotide
  Sense strand starting at position 2932 of SEQ ID NO: 1561486
ugguguaauaaaugguuaa

SEQ ID NO: 1675484 - RNA, 19 nt, Artificial Sequence
  Description of Artificial Sequence: Synthetic oligonucleotide
  Antisense strand to SEQ ID NO: 1675483
uuaaccauuuauuacacca

SEQ ID NO: 1675485 - RNA, 19 nt, Artificial Sequence
  Description of Artificial Sequence: Synthetic oligonucleotide
  Sense strand starting at position 2933 of SEQ ID NO: 1561486
gguguaauaaaugguuaag

SEQ ID NO: 1675486 - RNA, 19 nt, Artificial Sequence
  Description of Artificial Sequence: Synthetic oligonucleotide
  Antisense strand to SEQ ID NO: 1675485
cuuaaccauuuauuacacc

SEQ ID NO: 1675487 - RNA, 19 nt, Artificial Sequence
  Description of Artificial Sequence: Synthetic oligonucleotide
  Sense strand starting at position 2935 of SEQ ID NO: 1561486
uguaauaaaugguuaagag

SEQ ID NO: 1675488 - RNA, 19 nt, Artificial Sequence
  Description of Artificial Sequence: Synthetic oligonucleotide
  Antisense strand to SEQ ID NO: 1675487
cucuuaaccauuuauuaca

SEQ ID NO: 1675489 - RNA, 19 nt, Artificial Sequence
  Description of Artificial Sequence: Synthetic oligonucleotide
  Sense strand starting at position 2942 of SEQ ID NO: 1561486
aaugguuaagagugugaac

SEQ ID NO: 1675490 - RNA, 19 nt, Artificial Sequence
  Description of Artificial Sequence: Synthetic oligonucleotide
  Antisense strand to SEQ ID NO: 1675489
guucacacucuuaaccauu

SEQ ID NO: 1675491 - RNA, 19 nt, Artificial Sequence
  Description of Artificial Sequence: Synthetic oligonucleotide
  Sense strand starting at position 3031 of SEQ ID NO: 1561486
auuugaaagugaggaugau

SEQ ID NO: 1675492 - RNA, 19 nt, Artificial Sequence
  Description of Artificial Sequence: Synthetic oligonucleotide
  Antisense strand to SEQ ID NO: 1675491
aucauccucacuuucaaau

SEQ ID NO: 1675493 - RNA, 19 nt, Artificial Sequence
  Description of Artificial Sequence: Synthetic oligonucleotide
  Sense strand starting at position 3114 of SEQ ID NO: 1561486
gcuggauaaggaugcuaau

SEQ ID NO: 1675494 - RNA, 19 nt, Artificial Sequence
  Description of Artificial Sequence: Synthetic oligonucleotide
  Antisense strand to SEQ ID NO: 1675493
auuagcauccuuauccagc

SEQ ID NO: 1675495 - RNA, 19 nt, Artificial Sequence
  Description of Artificial Sequence: Synthetic oligonucleotide
  Sense strand starting at position 3126 of SEQ ID NO: 1561486
ugcuaauaugacugaagcu

SEQ ID NO: 1675496 - RNA, 19 nt, Artificial Sequence
  Description of Artificial Sequence: Synthetic oligonucleotide
  Antisense strand to SEQ ID NO: 1675495
agcuucagucauauuagca

SEQ ID NO: 1675497 - RNA, 19 nt, Artificial Sequence
  Description of Artificial Sequence: Synthetic oligonucleotide
  Sense strand starting at position 3398 of SEQ ID NO: 1561486
cuuuguccugagggucaaa

SEQ ID NO: 1675498 - RNA, 19 nt, Artificial Sequence
  Description of Artificial Sequence: Synthetic oligonucleotide
  Antisense strand to SEQ ID NO: 1675497
uuugacccucaggacaaag

SEQ ID NO: 1675499 - RNA, 19 nt, Artificial Sequence
  Description of Artificial Sequence: Synthetic oligonucleotide
  Sense strand starting at position 3452 of SEQ ID NO: 1561486
uugguuauugcugauuacu

SEQ ID NO: 1675500 - RNA, 19 nt, Artificial Sequence
  Description of Artificial Sequence: Synthetic oligonucleotide
  Antisense strand to SEQ ID NO: 1675499
aguaaucagcaauaaccaa

SEQ ID NO: 1675501 - RNA, 19 nt, Artificial Sequence
  Description of Artificial Sequence: Synthetic oligonucleotide
  Sense strand starting at position 3455 of SEQ ID NO: 1561486
guuauugcugauuacugau

SEQ ID NO: 1675502 - RNA, 19 nt, Artificial Sequence
  Description of Artificial Sequence: Synthetic oligonucleotide
  Antisense strand to SEQ ID NO: 1675501
aucaguaaucagcaauaac

SEQ ID NO: 1675503 - RNA, 19 nt, Artificial Sequence
  Description of Artificial Sequence: Synthetic oligonucleotide
  Sense strand starting at position 3489 of SEQ ID NO: 1561486
cagcaaggaugguugaauu

SEQ ID NO: 1675504 - RNA, 19 nt, Artificial Sequence
  Description of Artificial Sequence: Synthetic oligonucleotide
  Antisense strand to SEQ ID NO: 1675503
aauucaaccauccuugcug

SEQ ID NO: 1675505 - RNA, 19 nt, Artificial Sequence
  Description of Artificial Sequence: Synthetic oligonucleotide
  Sense strand starting at position 3529 of SEQ ID NO: 1561486
ugaggagacaguuguagau

SEQ ID NO: 1675506 - RNA, 19 nt, Artificial Sequence
  Description of Artificial Sequence: Synthetic oligonucleotide
  Antisense strand to SEQ ID NO: 1675505
aucuacaacugucuccuca

SEQ ID NO: 1675507 - RNA, 19 nt, Artificial Sequence
  Description of Artificial Sequence: Synthetic oligonucleotide
  Sense strand starting at position 3531 of SEQ ID NO: 1561486
aggagacaguuguagauuu

SEQ ID NO: 1675508 - RNA, 19 nt, Artificial Sequence
  Description of Artificial Sequence: Synthetic oligonucleotide
  Antisense strand to SEQ ID NO: 1675507
aaaucuacaacugucuccu

SEQ ID NO: 1675509 - RNA, 19 nt, Artificial Sequence
  Description of Artificial Sequence: Synthetic oligonucleotide
  Sense strand starting at position 3585 of SEQ ID NO: 1561486
uugcgaguucaagaggaga

SEQ ID NO: 1675510 - RNA, 19 nt, Artificial Sequence
  Description of Artificial Sequence: Synthetic oligonucleotide
  Antisense strand to SEQ ID NO: 1675509
ucuccucuugaacucgcaa

SEQ ID NO: 1675511 - RNA, 19 nt, Artificial Sequence
  Description of Artificial Sequence: Synthetic oligonucleotide
  Sense strand starting at position 3655 of SEQ ID NO: 1561486
gggcgaguggcucuaguuu

SEQ ID NO: 1675512 - RNA, 19 nt, Artificial Sequence
  Description of Artificial Sequence: Synthetic oligonucleotide
  Antisense strand to SEQ ID NO: 1675511
aaacuagagccacucgccc

SEQ ID NO: 1675513 - RNA, 19 nt, Artificial Sequence
  Description of Artificial Sequence: Synthetic oligonucleotide
  Sense strand starting at position 3718 of SEQ ID NO: 1561486
gucaguauuugcuuaugga

SEQ ID NO: 1675514 - RNA, 19 nt, Artificial Sequence
  Description of Artificial Sequence: Synthetic oligonucleotide
  Antisense strand to SEQ ID NO: 1675513
uccauaagcaaauacugac

SEQ ID NO: 1675515 - RNA, 19 nt, Artificial Sequence
  Description of Artificial Sequence: Synthetic oligonucleotide
  Sense strand starting at position 3863 of SEQ ID NO: 1561486
ggccacuucugacucugaa

SEQ ID NO: 1675516 - RNA, 19 nt, Artificial Sequence
  Description of Artificial Sequence: Synthetic oligonucleotide
  Antisense strand to SEQ ID NO: 1675515
uucagagucagaaguggcc

SEQ ID NO: 1675517 - RNA, 19 nt, Artificial Sequence
  Description of Artificial Sequence: Synthetic oligonucleotide
  Sense strand starting at position 3952 of SEQ ID NO: 1561486
gcuacacaagaguauaagu

SEQ ID NO: 1675518 - RNA, 19 nt, Artificial Sequence
  Description of Artificial Sequence: Synthetic oligonucleotide
  Antisense strand to SEQ ID NO: 1675517
acuuauacucuuguguagc

SEQ ID NO: 1675519 - RNA, 19 nt, Artificial Sequence
  Description of Artificial Sequence: Synthetic oligonucleotide
  Sense strand starting at position 6 of SEQ ID NO: 1561487
accucacugccuugaagaa

SEQ ID NO: 1675520 - RNA, 19 nt, Artificial Sequence
  Description of Artificial Sequence: Synthetic oligonucleotide
  Antisense strand to SEQ ID NO: 1675519
uucuucaaggcagugaggu

SEQ ID NO: 1675521 - RNA, 19 nt, Artificial Sequence
  Description of Artificial Sequence: Synthetic oligonucleotide
  Sense strand starting at position 7 of SEQ ID NO: 1561487
ccucacugccuugaagaau

SEQ ID NO: 1675522 - RNA, 19 nt, Artificial Sequence
  Description of Artificial Sequence: Synthetic oligonucleotide
  Antisense strand to SEQ ID NO: 1675521
auucuucaaggcagugagg

SEQ ID NO: 1675523 - RNA, 19 nt, Artificial Sequence
  Description of Artificial Sequence: Synthetic oligonucleotide
  Sense strand starting at position 28 of SEQ ID NO: 1561487
agccauuaccuaugaagug

SEQ ID NO: 1675524 - RNA, 19 nt, Artificial Sequence
  Description of Artificial Sequence: Synthetic oligonucleotide
  Antisense strand to SEQ ID NO: 1675523
cacuucauagguaauggcu

SEQ ID NO: 1675525 - RNA, 19 nt, Artificial Sequence
  Description of Artificial Sequence: Synthetic oligonucleotide
  Sense strand starting at position 45 of SEQ ID NO: 1561487
uggcauaacucagugguaa

SEQ ID NO: 1675526 - RNA, 19 nt, Artificial Sequence
  Description of Artificial Sequence: Synthetic oligonucleotide
  Antisense strand to SEQ ID NO: 1675525
uuaccacugaguuaugcca

SEQ ID NO: 1675527 - RNA, 19 nt, Artificial Sequence
  Description of Artificial Sequence: Synthetic oligonucleotide
  Sense strand starting at position 46 of SEQ ID NO: 1561487
ggcauaacucagugguaag

SEQ ID NO: 1675528 - RNA, 19 nt, Artificial Sequence
  Description of Artificial Sequence: Synthetic oligonucleotide
  Antisense strand to SEQ ID NO: 1675527
cuuaccacugaguuaugcc

SEQ ID NO: 1675529 - RNA, 19 nt, Artificial Sequence
  Description of Artificial Sequence: Synthetic oligonucleotide
  Sense strand starting at position 47 of SEQ ID NO: 1561487
gcauaacucagugguaaga

SEQ ID NO: 1675530 - RNA, 19 nt, Artificial Sequence
  Description of Artificial Sequence: Synthetic oligonucleotide
  Antisense strand to SEQ ID NO: 1675529
ucuuaccacugaguuaugc

SEQ ID NO: 1675531 - RNA, 19 nt, Artificial Sequence
  Description of Artificial Sequence: Synthetic oligonucleotide
  Sense strand starting at position 165 of SEQ ID NO: 1561487
guuucucuaucagugaaau

SEQ ID NO: 1675532 - RNA, 19 nt, Artificial Sequence
  Description of Artificial Sequence: Synthetic oligonucleotide
  Antisense strand to SEQ ID NO: 1675531
auuucacugauagagaaac

SEQ ID NO: 1675533 - RNA, 19 nt, Artificial Sequence
  Description of Artificial Sequence: Synthetic oligonucleotide
  Sense strand starting at position 196 of SEQ ID NO: 1561487
cuaucaauuguugggagga

SEQ ID NO: 1675534 - RNA, 19 nt, Artificial Sequence
  Description of Artificial Sequence: Synthetic oligonucleotide
  Antisense strand to SEQ ID NO: 1675533
uccucccaacaauugauag

SEQ ID NO: 1675535 - RNA, 19 nt, Artificial Sequence
  Description of Artificial Sequence: Synthetic oligonucleotide
  Sense strand starting at position 237 of SEQ ID NO: 1561487
cauugagcacagugcuuaa

SEQ ID NO: 1675536 - RNA, 19 nt, Artificial Sequence
  Description of Artificial Sequence: Synthetic oligonucleotide
  Antisense strand to SEQ ID NO: 1675535
uuaagcacugugcucaaug

SEQ ID NO: 1675537 - RNA, 19 nt, Artificial Sequence
  Description of Artificial Sequence: Synthetic oligonucleotide
  Sense strand starting at position 240 of SEQ ID NO: 1561487
ugagcacagugcuuaauuu

SEQ ID NO: 1675538 - RNA, 19 nt, Artificial Sequence
  Description of Artificial Sequence: Synthetic oligonucleotide
  Antisense strand to SEQ ID NO: 1675537
aaauuaagcacugugcuca

SEQ ID NO: 1675539 - RNA, 19 nt, Artificial Sequence
  Description of Artificial Sequence: Synthetic oligonucleotide
  Sense strand starting at position 711 of SEQ ID NO: 1561487
acucacugucgggaugaca

SEQ ID NO: 1675540 - RNA, 19 nt, Artificial Sequence
  Description of Artificial Sequence: Synthetic oligonucleotide
  Antisense strand to SEQ ID NO: 1675539
ugucaucccgacagugagu

SEQ ID NO: 1675541 - RNA, 19 nt, Artificial Sequence
  Description of Artificial Sequence: Synthetic oligonucleotide
  Sense strand starting at position 984 of SEQ ID NO: 1561487
gucacagucucaucuaauc

SEQ ID NO: 1675542 - RNA, 19 nt, Artificial Sequence
  Description of Artificial Sequence: Synthetic oligonucleotide
  Antisense strand to SEQ ID NO: 1675541
gauuagaugagacugugac

SEQ ID NO: 1675543 - RNA, 19 nt, Artificial Sequence
  Description of Artificial Sequence: Synthetic oligonucleotide
  Sense strand starting at position 1114 of SEQ ID NO: 1561487
acacguggucuacacauaa

SEQ ID NO: 1675544 - RNA, 19 nt, Artificial Sequence
  Description of Artificial Sequence: Synthetic oligonucleotide
  Antisense strand to SEQ ID NO: 1675543
uuauguguagaccacgugu

SEQ ID NO: 1675545 - RNA, 19 nt, Artificial Sequence
  Description of Artificial Sequence: Synthetic oligonucleotide
  Sense strand starting at position 1135 of SEQ ID NO: 1561487
acaguuuaacacugucaca

SEQ ID NO: 1675546 - RNA, 19 nt, Artificial Sequence
  Description of Artificial Sequence: Synthetic oligonucleotide
  Antisense strand to SEQ ID NO: 1675545
ugugacaguguuaaacugu

SEQ ID NO: 1675547 - RNA, 19 nt, Artificial Sequence
  Description of Artificial Sequence: Synthetic oligonucleotide
  Sense strand starting at position 1429 of SEQ ID NO: 1561487
acgauuccacacugucaaa

SEQ ID NO: 1675548 - RNA, 19 nt, Artificial Sequence
  Description of Artificial Sequence: Synthetic oligonucleotide
  Antisense strand to SEQ ID NO: 1675547
uuugacaguguggaaucgu

SEQ ID NO: 1675549 - RNA, 19 nt, Artificial Sequence
  Description of Artificial Sequence: Synthetic oligonucleotide
  Sense strand starting at position 1441 of SEQ ID NO: 1561487
ugucaaacacauugucaca

SEQ ID NO: 1675550 - RNA, 19 nt, Artificial Sequence
  Description of Artificial Sequence: Synthetic oligonucleotide
  Antisense strand to SEQ ID NO: 1675549
ugugacaauguguuugaca

SEQ ID NO: 1675551 - RNA, 19 nt, Artificial Sequence
  Description of Artificial Sequence: Synthetic oligonucleotide
  Sense strand starting at position 2037 of SEQ ID NO: 1561487
gugaguccaucgcugagaa

SEQ ID NO: 1675552 - RNA, 19 nt, Artificial Sequence
  Description of Artificial Sequence: Synthetic oligonucleotide
  Antisense strand to SEQ ID NO: 1675551
uucucagcgauggacucac

SEQ ID NO: 1675553 - RNA, 19 nt, Artificial Sequence
  Description of Artificial Sequence: Synthetic oligonucleotide
  Sense strand starting at position 2038 of SEQ ID NO: 1561487
ugaguccaucgcugagaaa

SEQ ID NO: 1675554 - RNA, 19 nt, Artificial Sequence
  Description of Artificial Sequence: Synthetic oligonucleotide
  Antisense strand to SEQ ID NO: 1675553
uuucucagcgauggacuca

SEQ ID NO: 1675555 - RNA, 19 nt, Artificial Sequence
  Description of Artificial Sequence: Synthetic oligonucleotide
  Sense strand starting at position 2106 of SEQ ID NO: 1561487
gguaggauguacgugugau

SEQ ID NO: 1675556 - RNA, 19 nt, Artificial Sequence
  Description of Artificial Sequence: Synthetic oligonucleotide
  Antisense strand to SEQ ID NO: 1675555
aucacacguacauccuacc

SEQ ID NO: 1675557 - RNA, 19 nt, Artificial Sequence
  Description of Artificial Sequence: Synthetic oligonucleotide
  Sense strand starting at position 2294 of SEQ ID NO: 1561487
cauucuaaugcgggaggaa

SEQ ID NO: 1675558 - RNA, 19 nt, Artificial Sequence
  Description of Artificial Sequence: Synthetic oligonucleotide
  Antisense strand to SEQ ID NO: 1675557
uuccucccgcauuagaaug

SEQ ID NO: 1675559 - RNA, 19 nt, Artificial Sequence
  Description of Artificial Sequence: Synthetic oligonucleotide
  Sense strand starting at position 2355 of SEQ ID NO: 1561487
ugggaaguaaugcguauua

SEQ ID NO: 1675560 - RNA, 19 nt, Artificial Sequence
  Description of Artificial Sequence: Synthetic oligonucleotide
  Antisense strand to SEQ ID NO: 1675559
uaauacgcauuacuuccca

SEQ ID NO: 1675561 - RNA, 19 nt, Artificial Sequence
  Description of Artificial Sequence: Synthetic oligonucleotide
  Sense strand starting at position 2357 of SEQ ID NO: 1561487
ggaaguaaugcguauuauc

SEQ ID NO: 1675562 - RNA, 19 nt, Artificial Sequence
  Description of Artificial Sequence: Synthetic oligonucleotide
  Antisense strand to SEQ ID NO: 1675561
gauaauacgcauuacuucc

SEQ ID NO: 1675563 - RNA, 19 nt, Artificial Sequence
  Description of Artificial Sequence: Synthetic oligonucleotide
  Sense strand starting at position 2428 of SEQ ID NO: 1561487
aguuaugcccucugaauca

SEQ ID NO: 1675564 - RNA, 19 nt, Artificial Sequence
  Description of Artificial Sequence: Synthetic oligonucleotide
  Antisense strand to SEQ ID NO: 1675563
ugauucagagggcauaacu

SEQ ID NO: 1675565 - RNA, 19 nt, Artificial Sequence
  Description of Artificial Sequence: Synthetic oligonucleotide
  Sense strand starting at position 2435 of SEQ ID NO: 1561487
cccucugaaucaguggaaa

SEQ ID NO: 1675566 - RNA, 19 nt, Artificial Sequence
  Description of Artificial Sequence: Synthetic oligonucleotide
  Antisense strand to SEQ ID NO: 1675565
uuuccacugauucagaggg

SEQ ID NO: 1675567 - RNA, 19 nt, Artificial Sequence
  Description of Artificial Sequence: Synthetic oligonucleotide
  Sense strand starting at position 2529 of SEQ ID NO: 1561487
gggaguuucccacacaucu

SEQ ID NO: 1675568 - RNA, 19 nt, Artificial Sequence
  Description of Artificial Sequence: Synthetic oligonucleotide
  Antisense strand to SEQ ID NO: 1675567
agaugugugggaaacuccc

SEQ ID NO: 1675569 - RNA, 19 nt, Artificial Sequence
  Description of Artificial Sequence: Synthetic oligonucleotide
  Sense strand starting at position 2699 of SEQ ID NO: 1561487
aagucuagccucuggaaca

SEQ ID NO: 1675570 - RNA, 19 nt, Artificial Sequence
  Description of Artificial Sequence: Synthetic oligonucleotide
  Antisense strand to SEQ ID NO: 1675569
uguuccagaggcuagacuu

SEQ ID NO: 1675571 - RNA, 19 nt, Artificial Sequence
  Description of Artificial Sequence: Synthetic oligonucleotide
  Sense strand starting at position 2756 of SEQ ID NO: 1561487
cccucuuugcgguucgaua

SEQ ID NO: 1675572 - RNA, 19 nt, Artificial Sequence
  Description of Artificial Sequence: Synthetic oligonucleotide
  Antisense strand to SEQ ID NO: 1675571
uaucgaaccgcaaagaggg

SEQ ID NO: 1675573 - RNA, 19 nt, Artificial Sequence
  Description of Artificial Sequence: Synthetic oligonucleotide
  Sense strand starting at position 2757 of SEQ ID NO: 1561487
ccucuuugcgguucgauau

SEQ ID NO: 1675574 - RNA, 19 nt, Artificial Sequence
  Description of Artificial Sequence: Synthetic oligonucleotide
  Antisense strand to SEQ ID NO: 1675573
auaucgaaccgcaaagagg

SEQ ID NO: 1675575 - RNA, 19 nt, Artificial Sequence
  Description of Artificial Sequence: Synthetic oligonucleotide
  Sense strand starting at position 2857 of SEQ ID NO: 1561487
aagagaugcguagggcaaa

SEQ ID NO: 1675576 - RNA, 19 nt, Artificial Sequence
  Description of Artificial Sequence: Synthetic oligonucleotide
  Antisense strand to SEQ ID NO: 1675575
uuugcccuacgcaucucuu

SEQ ID NO: 1675577 - RNA, 19 nt, Artificial Sequence
  Description of Artificial Sequence: Synthetic oligonucleotide
  Sense strand starting at position 3054 of SEQ ID NO: 1561487
augucuuggucuuuccaua

SEQ ID NO: 1675578 - RNA, 19 nt, Artificial Sequence
  Description of Artificial Sequence: Synthetic oligonucleotide
  Antisense strand to SEQ ID NO: 1675577
uauggaaagaccaagacau

SEQ ID NO: 1675579 - RNA, 19 nt, Artificial Sequence
  Description of Artificial Sequence: Synthetic oligonucleotide
  Sense strand starting at position 3109 of SEQ ID NO: 1561487
gcugucaacucauuagcau

SEQ ID NO: 1675580 - RNA, 19 nt, Artificial Sequence
  Description of Artificial Sequence: Synthetic oligonucleotide
  Antisense strand to SEQ ID NO: 1675579
augcuaaugaguugacagc

SEQ ID NO: 1675581 - RNA, 19 nt, Artificial Sequence
  Description of Artificial Sequence: Synthetic oligonucleotide
  Sense strand starting at position 3146 of SEQ ID NO: 1561487
guuacuuuguaguuucuaa

SEQ ID NO: 1675582 - RNA, 19 nt, Artificial Sequence
  Description of Artificial Sequence: Synthetic oligonucleotide
  Antisense strand to SEQ ID NO: 1675581
uuagaaacuacaaaguaac

SEQ ID NO: 1675583 - RNA, 19 nt, Artificial Sequence
  Description of Artificial Sequence: Synthetic oligonucleotide
  Sense strand starting at position 3175 of SEQ ID NO: 1561487
aguucuaugcuaggaagau

SEQ ID NO: 1675584 - RNA, 19 nt, Artificial Sequence
  Description of Artificial Sequence: Synthetic oligonucleotide
  Antisense strand to SEQ ID NO: 1675583
aucuuccuagcauagaacu

SEQ ID NO: 1675585 - RNA, 19 nt, Artificial Sequence
  Description of Artificial Sequence: Synthetic oligonucleotide
  Sense strand starting at position 3338 of SEQ ID NO: 1561487
uuaauugucugaccaaagu

SEQ ID NO: 1675586 - RNA, 19 nt, Artificial Sequence
  Description of Artificial Sequence: Synthetic oligonucleotide
  Antisense strand to SEQ ID NO: 1675585
acuuuggucagacaauuaa

SEQ ID NO: 1675587 - RNA, 19 nt, Artificial Sequence
  Description of Artificial Sequence: Synthetic oligonucleotide
  Sense strand starting at position 3351 of SEQ ID NO: 1561487
caaaguugccagugacaaa

SEQ ID NO: 1675588 - RNA, 19 nt, Artificial Sequence
  Description of Artificial Sequence: Synthetic oligonucleotide
  Antisense strand to SEQ ID NO: 1675587
uuugucacuggcaacuuug

SEQ ID NO: 1675589 - RNA, 19 nt, Artificial Sequence
  Description of Artificial Sequence: Synthetic oligonucleotide
  Sense strand starting at position 3374 of SEQ ID NO: 1561487
aucauauaagcugggaauu

SEQ ID NO: 1675590 - RNA, 19 nt, Artificial Sequence
  Description of Artificial Sequence: Synthetic oligonucleotide
  Antisense strand to SEQ ID NO: 1675589
aauucccagcuuauaugau

SEQ ID NO: 1675591 - RNA, 19 nt, Artificial Sequence
  Description of Artificial Sequence: Synthetic oligonucleotide
  Sense strand starting at position 3738 of SEQ ID NO: 1561487
gcugaaacauuguuuauaa

SEQ ID NO: 1675592 - RNA, 19 nt, Artificial Sequence
  Description of Artificial Sequence: Synthetic oligonucleotide
  Antisense strand to SEQ ID NO: 1675591
uuauaaacaauguuucagc

SEQ ID NO: 1675593 - RNA, 19 nt, Artificial Sequence
  Description of Artificial Sequence: Synthetic oligonucleotide
  Sense strand starting at position 3802 of SEQ ID NO: 1561487
cuagauagggcuuguauca

SEQ ID NO: 1675594 - RNA, 19 nt, Artificial Sequence
  Description of Artificial Sequence: Synthetic oligonucleotide
  Antisense strand to SEQ ID NO: 1675593
ugauacaagcccuaucuag

SEQ ID NO: 1675595 - RNA, 19 nt, Artificial Sequence
  Description of Artificial Sequence: Synthetic oligonucleotide
  Sense strand starting at position 3851 of SEQ ID NO: 1561487
ccaggacaguccuaaagaa

SEQ ID NO: 1675596 - RNA, 19 nt, Artificial Sequence
  Description of Artificial Sequence: Synthetic oligonucleotide
  Antisense strand to SEQ ID NO: 1675595
uucuuuaggacuguccugg

SEQ ID NO: 1675597 - RNA, 19 nt, Artificial Sequence
  Description of Artificial Sequence: Synthetic oligonucleotide
  Sense strand starting at position 3977 of SEQ ID NO: 1561487
uagggucauccuggagaga

SEQ ID NO: 1675598 - RNA, 19 nt, Artificial Sequence
  Description of Artificial Sequence: Synthetic oligonucleotide
  Antisense strand to SEQ ID NO: 1675597
ucucuccaggaugacccua

SEQ ID NO: 1675599 - RNA, 19 nt, Artificial Sequence
  Description of Artificial Sequence: Synthetic oligonucleotide
  Sense strand starting at position 40 of SEQ ID NO: 1561488
ggaaauauguucccacccu

SEQ ID NO: 1675600 - RNA, 19 nt, Artificial Sequence
  Description of Artificial Sequence: Synthetic oligonucleotide
  Antisense strand to SEQ ID NO: 1675599
agggugggaacauauuucc

SEQ ID NO: 1675601 - RNA, 19 nt, Artificial Sequence
  Description of Artificial Sequence: Synthetic oligonucleotide
  Sense strand starting at position 52 of SEQ ID NO: 1561488
ccacccuuucugcaaggau

SEQ ID NO: 1675602 - RNA, 19 nt, Artificial Sequence
  Description of Artificial Sequence: Synthetic oligonucleotide
  Antisense strand to SEQ ID NO: 1675601
auccuugcagaaagggugg

SEQ ID NO: 1675603 - RNA, 19 nt, Artificial Sequence
  Description of Artificial Sequence: Synthetic oligonucleotide
  Sense strand starting at position 88 of SEQ ID NO: 1561488
agugaaauuucucagagaa

SEQ ID NO: 1675604 - RNA, 19 nt, Artificial Sequence
  Description of Artificial Sequence: Synthetic oligonucleotide
  Antisense strand to SEQ ID NO: 1675603
uucucugagaaauuucacu

SEQ ID NO: 1675605 - RNA, 19 nt, Artificial Sequence
  Description of Artificial Sequence: Synthetic oligonucleotide
  Sense strand starting at position 126 of SEQ ID NO: 1561488
ugaguaucagaggguccau

SEQ ID NO: 1675606 - RNA, 19 nt, Artificial Sequence
  Description of Artificial Sequence: Synthetic oligonucleotide
  Antisense strand to SEQ ID NO: 1675605
auggacccucugauacuca

SEQ ID NO: 1675607 - RNA, 19 nt, Artificial Sequence
  Description of Artificial Sequence: Synthetic oligonucleotide
  Sense strand starting at position 241 of SEQ ID NO: 1561488
ugggcaaucuccucagaca

SEQ ID NO: 1675608 - RNA, 19 nt, Artificial Sequence
  Description of Artificial Sequence: Synthetic oligonucleotide
  Antisense strand to SEQ ID NO: 1675607
ugucugaggagauugccca

SEQ ID NO: 1675609 - RNA, 19 nt, Artificial Sequence
  Description of Artificial Sequence: Synthetic oligonucleotide
  Sense strand starting at position 286 of SEQ ID NO: 1561488
caggcuaugcuugaacagu

SEQ ID NO: 1675610 - RNA, 19 nt, Artificial Sequence
  Description of Artificial Sequence: Synthetic oligonucleotide
  Antisense strand to SEQ ID NO: 1675609
acuguucaagcauagccug

SEQ ID NO: 1675611 - RNA, 19 nt, Artificial Sequence
  Description of Artificial Sequence: Synthetic oligonucleotide
  Sense strand starting at position 321 of SEQ ID NO: 1561488
ggugaauucuuguccagca

SEQ ID NO: 1675612 - RNA, 19 nt, Artificial Sequence
  Description of Artificial Sequence: Synthetic oligonucleotide
  Antisense strand to SEQ ID NO: 1675611
ugcuggacaagaauucacc

SEQ ID NO: 1675613 - RNA, 19 nt, Artificial Sequence
  Description of Artificial Sequence: Synthetic oligonucleotide
  Sense strand starting at position 323 of SEQ ID NO: 1561488
ugaauucuuguccagcaga

SEQ ID NO: 1675614 - RNA, 19 nt, Artificial Sequence
  Description of Artificial Sequence: Synthetic oligonucleotide
  Antisense strand to SEQ ID NO: 1675613
ucugcuggacaagaauuca

SEQ ID NO: 1675615 - RNA, 19 nt, Artificial Sequence
  Description of Artificial Sequence: Synthetic oligonucleotide
  Sense strand starting at position 341 of SEQ ID NO: 1561488
accucacugccuugaagaa

SEQ ID NO: 1675616 - RNA, 19 nt, Artificial Sequence
  Description of Artificial Sequence: Synthetic oligonucleotide
  Antisense strand to SEQ ID NO: 1675615
uucuucaaggcagugaggu

SEQ ID NO: 1675617 - RNA, 19 nt, Artificial Sequence
  Description of Artificial Sequence: Synthetic oligonucleotide
  Sense strand starting at position 342 of SEQ ID NO: 1561488
ccucacugccuugaagaau

SEQ ID NO: 1675618 - RNA, 19 nt, Artificial Sequence
  Description of Artificial Sequence: Synthetic oligonucleotide
  Antisense strand to SEQ ID NO: 1675617
auucuucaaggcagugagg

SEQ ID NO: 1675619 - RNA, 19 nt, Artificial Sequence
  Description of Artificial Sequence: Synthetic oligonucleotide
  Sense strand starting at position 363 of SEQ ID NO: 1561488
agccauuaccuaugaagug

SEQ ID NO: 1675620 - RNA, 19 nt, Artificial Sequence
  Description of Artificial Sequence: Synthetic oligonucleotide
  Antisense strand to SEQ ID NO: 1675619
cacuucauagguaauggcu

SEQ ID NO: 1675621 - RNA, 19 nt, Artificial Sequence
  Description of Artificial Sequence: Synthetic oligonucleotide
  Sense strand starting at position 380 of SEQ ID NO: 1561488
uggcauaacucagugguaa

SEQ ID NO: 1675622 - RNA, 19 nt, Artificial Sequence
  Description of Artificial Sequence: Synthetic oligonucleotide
  Antisense strand to SEQ ID NO: 1675621
uuaccacugaguuaugcca

SEQ ID NO: 1675623 - RNA, 19 nt, Artificial Sequence
  Description of Artificial Sequence: Synthetic oligonucleotide
  Sense strand starting at position 381 of SEQ ID NO: 1561488
ggcauaacucagugguaag

SEQ ID NO: 1675624 - RNA, 19 nt, Artificial Sequence
  Description of Artificial Sequence: Synthetic oligonucleotide
  Antisense strand to SEQ ID NO: 1675623
cuuaccacugaguuaugcc

SEQ ID NO: 1675625 - RNA, 19 nt, Artificial Sequence
  Description of Artificial Sequence: Synthetic oligonucleotide
  Sense strand starting at position 382 of SEQ ID NO: 1561488
gcauaacucagugguaaga

SEQ ID NO: 1675626 - RNA, 19 nt, Artificial Sequence
  Description of Artificial Sequence: Synthetic oligonucleotide
  Antisense strand to SEQ ID NO: 1675625
ucuuaccacugaguuaugc

SEQ ID NO: 1675627 - RNA, 19 nt, Artificial Sequence
  Description of Artificial Sequence: Synthetic oligonucleotide
  Sense strand starting at position 500 of SEQ ID NO: 1561488
guuucucuaucagugaaau

SEQ ID NO: 1675628 - RNA, 19 nt, Artificial Sequence
  Description of Artificial Sequence: Synthetic oligonucleotide
  Antisense strand to SEQ ID NO: 1675627
auuucacugauagagaaac

SEQ ID NO: 1675629 - RNA, 19 nt, Artificial Sequence
  Description of Artificial Sequence: Synthetic oligonucleotide
  Sense strand starting at position 531 of SEQ ID NO: 1561488
cuaucaauuguugggagga

SEQ ID NO: 1675630 - RNA, 19 nt, Artificial Sequence
  Description of Artificial Sequence: Synthetic oligonucleotide
  Antisense strand to SEQ ID NO: 1675629
uccucccaacaauugauag

SEQ ID NO: 1675631 - RNA, 19 nt, Artificial Sequence
  Description of Artificial Sequence: Synthetic oligonucleotide
  Sense strand starting at position 572 of SEQ ID NO: 1561488
cauugagcacagugcuuaa

SEQ ID NO: 1675632 - RNA, 19 nt, Artificial Sequence
  Description of Artificial Sequence: Synthetic oligonucleotide
  Antisense strand to SEQ ID NO: 1675631
uuaagcacugugcucaaug

SEQ ID NO: 1675633 - RNA, 19 nt, Artificial Sequence
  Description of Artificial Sequence: Synthetic oligonucleotide
  Sense strand starting at position 575 of SEQ ID NO: 1561488
ugagcacagugcuuaauuu

SEQ ID NO: 1675634 - RNA, 19 nt, Artificial Sequence
  Description of Artificial Sequence: Synthetic oligonucleotide
  Antisense strand to SEQ ID NO: 1675633
aaauuaagcacugugcuca

SEQ ID NO: 1675635 - RNA, 19 nt, Artificial Sequence
  Description of Artificial Sequence: Synthetic oligonucleotide
  Sense strand starting at position 1046 of SEQ ID NO: 1561488
acucacugucgggaugaca

SEQ ID NO: 1675636 - RNA, 19 nt, Artificial Sequence
  Description of Artificial Sequence: Synthetic oligonucleotide
  Antisense strand to SEQ ID NO: 1675635
ugucaucccgacagugagu

SEQ ID NO: 1675637 - RNA, 19 nt, Artificial Sequence
  Description of Artificial Sequence: Synthetic oligonucleotide
  Sense strand starting at position 1319 of SEQ ID NO: 1561488
gucacagucucaucuaauc

SEQ ID NO: 1675638 - RNA, 19 nt, Artificial Sequence
  Description of Artificial Sequence: Synthetic oligonucleotide
  Antisense strand to SEQ ID NO: 1675637
gauuagaugagacugugac

SEQ ID NO: 1675639 - RNA, 19 nt, Artificial Sequence
  Description of Artificial Sequence: Synthetic oligonucleotide
  Sense strand starting at position 1449 of SEQ ID NO: 1561488
acacguggucuacacauaa

SEQ ID NO: 1675640 - RNA, 19 nt, Artificial Sequence
  Description of Artificial Sequence: Synthetic oligonucleotide
  Antisense strand to SEQ ID NO: 1675639
uuauguguagaccacgugu

SEQ ID NO: 1675641 - RNA, 19 nt, Artificial Sequence
  Description of Artificial Sequence: Synthetic oligonucleotide
  Sense strand starting at position 1470 of SEQ ID NO: 1561488
acaguuuaacacugucaca

SEQ ID NO: 1675642 - RNA, 19 nt, Artificial Sequence
  Description of Artificial Sequence: Synthetic oligonucleotide
  Antisense strand to SEQ ID NO: 1675641
ugugacaguguuaaacugu

SEQ ID NO: 1675643 - RNA, 19 nt, Artificial Sequence
  Description of Artificial Sequence: Synthetic oligonucleotide
  Sense strand starting at position 1764 of SEQ ID NO: 1561488
acgauuccacacugucaaa

SEQ ID NO: 1675644 - RNA, 19 nt, Artificial Sequence
  Description of Artificial Sequence: Synthetic oligonucleotide
  Antisense strand to SEQ ID NO: 1675643
uuugacaguguggaaucgu

SEQ ID NO: 1675645 - RNA, 19 nt, Artificial Sequence
  Description of Artificial Sequence: Synthetic oligonucleotide
  Sense strand starting at position 1776 of SEQ ID NO: 1561488
ugucaaacacauugucaca

SEQ ID NO: 1675646 - RNA, 19 nt, Artificial Sequence
  Description of Artificial Sequence: Synthetic oligonucleotide
  Antisense strand to SEQ ID NO: 1675645
ugugacaauguguuugaca

SEQ ID NO: 1675647 - RNA, 19 nt, Artificial Sequence
  Description of Artificial Sequence: Synthetic oligonucleotide
  Sense strand starting at position 2373 of SEQ ID NO: 1561488
ugaguccaucgcugagaaa

SEQ ID NO: 1675648 - RNA, 19 nt, Artificial Sequence
  Description of Artificial Sequence: Synthetic oligonucleotide
  Antisense strand to SEQ ID NO: 1675647
uuucucagcgauggacuca

SEQ ID NO: 1675649 - RNA, 19 nt, Artificial Sequence
  Description of Artificial Sequence: Synthetic oligonucleotide
  Sense strand starting at position 2629 of SEQ ID NO: 1561488
cauucuaaugcgggaggaa

SEQ ID NO: 1675650 - RNA, 19 nt, Artificial Sequence
  Description of Artificial Sequence: Synthetic oligonucleotide
  Antisense strand to SEQ ID NO: 1675649
uuccucccgcauuagaaug

SEQ ID NO: 1675651 - RNA, 19 nt, Artificial Sequence
  Description of Artificial Sequence: Synthetic oligonucleotide
  Sense strand starting at position 2690 of SEQ ID NO: 1561488
ugggaaguaaugcguauua

SEQ ID NO: 1675652 - RNA, 19 nt, Artificial Sequence
  Description of Artificial Sequence: Synthetic oligonucleotide
  Antisense strand to SEQ ID NO: 1675651
uaauacgcauuacuuccca

SEQ ID NO: 1675653 - RNA, 19 nt, Artificial Sequence
  Description of Artificial Sequence: Synthetic oligonucleotide
  Sense strand starting at position 2692 of SEQ ID NO: 1561488
ggaaguaaugcguauuauc

SEQ ID NO: 1675654 - RNA, 19 nt, Artificial Sequence
  Description of Artificial Sequence: Synthetic oligonucleotide
  Antisense strand to SEQ ID NO: 1675653
gauaauacgcauuacuucc

SEQ ID NO: 1675655 - RNA, 19 nt, Artificial Sequence
  Description of Artificial Sequence: Synthetic oligonucleotide
  Sense strand starting at position 2763 of SEQ ID NO: 1561488
aguuaugcccucugaauca

SEQ ID NO: 1675656 - RNA, 19 nt, Artificial Sequence
  Description of Artificial Sequence: Synthetic oligonucleotide
  Antisense strand to SEQ ID NO: 1675655
ugauucagagggcauaacu

SEQ ID NO: 1675657 - RNA, 19 nt, Artificial Sequence
  Description of Artificial Sequence: Synthetic oligonucleotide
  Sense strand starting at position 2770 of SEQ ID NO: 1561488
cccucugaaucaguggaaa

SEQ ID NO: 1675658 - RNA, 19 nt, Artificial Sequence
  Description of Artificial Sequence: Synthetic oligonucleotide
  Antisense strand to SEQ ID NO: 1675657
uuuccacugauucagaggg

SEQ ID NO: 1675659 - RNA, 19 nt, Artificial Sequence
  Description of Artificial Sequence: Synthetic oligonucleotide
  Sense strand starting at position 2864 of SEQ ID NO: 1561488
gggaguuucccacacaucu

SEQ ID NO: 1675660 - RNA, 19 nt, Artificial Sequence
  Description of Artificial Sequence: Synthetic oligonucleotide
  Antisense strand to SEQ ID NO: 1675659
agaugugugggaaacuccc

SEQ ID NO: 1675661 - RNA, 19 nt, Artificial Sequence
  Description of Artificial Sequence: Synthetic oligonucleotide
  Sense strand starting at position 3034 of SEQ ID NO: 1561488
aagucuagccucuggaaca

SEQ ID NO: 1675662 - RNA, 19 nt, Artificial Sequence
  Description of Artificial Sequence: Synthetic oligonucleotide
  Antisense strand to SEQ ID NO: 1675661
uguuccagaggcuagacuu

SEQ ID NO: 1675663 - RNA, 19 nt, Artificial Sequence
  Description of Artificial Sequence: Synthetic oligonucleotide
  Sense strand starting at position 3091 of SEQ ID NO: 1561488
cccucuuugcgguucgaua

SEQ ID NO: 1675664 - RNA, 19 nt, Artificial Sequence
  Description of Artificial Sequence: Synthetic oligonucleotide
  Antisense strand to SEQ ID NO: 1675663
uaucgaaccgcaaagaggg

SEQ ID NO: 1675665 - RNA, 19 nt, Artificial Sequence
  Description of Artificial Sequence: Synthetic oligonucleotide
  Sense strand starting at position 3092 of SEQ ID NO: 1561488
ccucuuugcgguucgauau

SEQ ID NO: 1675666 - RNA, 19 nt, Artificial Sequence
  Description of Artificial Sequence: Synthetic oligonucleotide
  Antisense strand to SEQ ID NO: 1675665
auaucgaaccgcaaagagg

SEQ ID NO: 1675667 - RNA, 19 nt, Artificial Sequence
  Description of Artificial Sequence: Synthetic oligonucleotide
  Sense strand starting at position 3192 of SEQ ID NO: 1561488
aagagaugcguagggcaaa

SEQ ID NO: 1675668 - RNA, 19 nt, Artificial Sequence
  Description of Artificial Sequence: Synthetic oligonucleotide
  Antisense strand to SEQ ID NO: 1675667
uuugcccuacgcaucucuu

SEQ ID NO: 1675669 - RNA, 19 nt, Artificial Sequence
  Description of Artificial Sequence: Synthetic oligonucleotide
  Sense strand starting at position 3389 of SEQ ID NO: 1561488
augucuuggucuuuccaua

SEQ ID NO: 1675670 - RNA, 19 nt, Artificial Sequence
  Description of Artificial Sequence: Synthetic oligonucleotide
  Antisense strand to SEQ ID NO: 1675669
uauggaaagaccaagacau

SEQ ID NO: 1675671 - RNA, 19 nt, Artificial Sequence
  Description of Artificial Sequence: Synthetic oligonucleotide
  Sense strand starting at position 3510 of SEQ ID NO: 1561488
aguucuaugcuaggaagau

SEQ ID NO: 1675672 - RNA, 19 nt, Artificial Sequence
  Description of Artificial Sequence: Synthetic oligonucleotide
  Antisense strand to SEQ ID NO: 1675671
aucuuccuagcauagaacu

SEQ ID NO: 1675673 - RNA, 19 nt, Artificial Sequence
  Description of Artificial Sequence: Synthetic oligonucleotide
  Sense strand starting at position 3673 of SEQ ID NO: 1561488
uuaauugucugaccaaagu

SEQ ID NO: 1675674 - RNA, 19 nt, Artificial Sequence
  Description of Artificial Sequence: Synthetic oligonucleotide
  Antisense strand to SEQ ID NO: 1675673
acuuuggucagacaauuaa

SEQ ID NO: 1675675 - RNA, 19 nt, Artificial Sequence
  Description of Artificial Sequence: Synthetic oligonucleotide
  Sense strand starting at position 3686 of SEQ ID NO: 1561488
caaaguugccagugacaaa

SEQ ID NO: 1675676 - RNA, 19 nt, Artificial Sequence
  Description of Artificial Sequence: Synthetic oligonucleotide
  Antisense strand to SEQ ID NO: 1675675
uuugucacuggcaacuuug

SEQ ID NO: 1675677 - RNA, 19 nt, Artificial Sequence
  Description of Artificial Sequence: Synthetic oligonucleotide
  Sense strand starting at position 3709 of SEQ ID NO: 1561488
aucauauaagcugggaauu

SEQ ID NO: 1675678 - RNA, 19 nt, Artificial Sequence
  Description of Artificial Sequence: Synthetic oligonucleotide
  Antisense strand to SEQ ID NO: 1675677
aauucccagcuuauaugau

SEQ ID NO: 1675679 - RNA, 19 nt, Artificial Sequence
  Description of Artificial Sequence: Synthetic oligonucleotide
  Sense strand starting at position 16 of SEQ ID NO: 1561489
ggaaauauguucccacccu

SEQ ID NO: 1675680 - RNA, 19 nt, Artificial Sequence
  Description of Artificial Sequence: Synthetic oligonucleotide
  Antisense strand to SEQ ID NO: 1675679
agggugggaacauauuucc

SEQ ID NO: 1675681 - RNA, 19 nt, Artificial Sequence
  Description of Artificial Sequence: Synthetic oligonucleotide
  Sense strand starting at position 28 of SEQ ID NO: 1561489
ccacccuuucugcaaggau

SEQ ID NO: 1675682 - RNA, 19 nt, Artificial Sequence
  Description of Artificial Sequence: Synthetic oligonucleotide
  Antisense strand to SEQ ID NO: 1675681
auccuugcagaaagggugg

SEQ ID NO: 1675683 - RNA, 19 nt, Artificial Sequence
  Description of Artificial Sequence: Synthetic oligonucleotide
  Sense strand starting at position 64 of SEQ ID NO: 1561489
agugaaauuucucagagaa

SEQ ID NO: 1675684 - RNA, 19 nt, Artificial Sequence
  Description of Artificial Sequence: Synthetic oligonucleotide
  Antisense strand to SEQ ID NO: 1675683
uucucugagaaauuucacu

SEQ ID NO: 1675685 - RNA, 19 nt, Artificial Sequence
  Description of Artificial Sequence: Synthetic oligonucleotide
  Sense strand starting at position 102 of SEQ ID NO: 1561489
ugaguaucagaggguccau

SEQ ID NO: 1675686 - RNA, 19 nt, Artificial Sequence
  Description of Artificial Sequence: Synthetic oligonucleotide
  Antisense strand to SEQ ID NO: 1675685
auggacccucugauacuca

SEQ ID NO: 1675687 - RNA, 19 nt, Artificial Sequence
  Description of Artificial Sequence: Synthetic oligonucleotide
  Sense strand starting at position 217 of SEQ ID NO: 1561489
ugggcaaucuccucagaca

SEQ ID NO: 1675688 - RNA, 19 nt, Artificial Sequence
  Description of Artificial Sequence: Synthetic oligonucleotide
  Antisense strand to SEQ ID NO: 1675687
ugucugaggagauugccca

SEQ ID NO: 1675689 - RNA, 19 nt, Artificial Sequence
  Description of Artificial Sequence: Synthetic oligonucleotide
  Sense strand starting at position 262 of SEQ ID NO: 1561489
caggcuaugcuugaacagu

SEQ ID NO: 1675690 - RNA, 19 nt, Artificial Sequence
  Description of Artificial Sequence: Synthetic oligonucleotide
  Antisense strand to SEQ ID NO: 1675689
acuguucaagcauagccug

SEQ ID NO: 1675691 - RNA, 19 nt, Artificial Sequence
  Description of Artificial Sequence: Synthetic oligonucleotide
  Sense strand starting at position 297 of SEQ ID NO: 1561489
ggugaauucuuguccagca

SEQ ID NO: 1675692 - RNA, 19 nt, Artificial Sequence
  Description of Artificial Sequence: Synthetic oligonucleotide
  Antisense strand to SEQ ID NO: 1675691
ugcuggacaagaauucacc

SEQ ID NO: 1675693 - RNA, 19 nt, Artificial Sequence
  Description of Artificial Sequence: Synthetic oligonucleotide
  Sense strand starting at position 299 of SEQ ID NO: 1561489
ugaauucuuguccagcaga

SEQ ID NO: 1675694 - RNA, 19 nt, Artificial Sequence
  Description of Artificial Sequence: Synthetic oligonucleotide
  Antisense strand to SEQ ID NO: 1675693
ucugcuggacaagaauuca

SEQ ID NO: 1675695 - RNA, 19 nt, Artificial Sequence
  Description of Artificial Sequence: Synthetic oligonucleotide
  Sense strand starting at position 317 of SEQ ID NO: 1561489
accucacugccuugaagaa

SEQ ID NO: 1675696 - RNA, 19 nt, Artificial Sequence
  Description of Artificial Sequence: Synthetic oligonucleotide
  Antisense strand to SEQ ID NO: 1675695
uucuucaaggcagugaggu

SEQ ID NO: 1675697 - RNA, 19 nt, Artificial Sequence
  Description of Artificial Sequence: Synthetic oligonucleotide
  Sense strand starting at position 318 of SEQ ID NO: 1561489
ccucacugccuugaagaau

SEQ ID NO: 1675698 - RNA, 19 nt, Artificial Sequence
  Description of Artificial Sequence: Synthetic oligonucleotide
  Antisense strand to SEQ ID NO: 1675697
auucuucaaggcagugagg

SEQ ID NO: 1675699 - RNA, 19 nt, Artificial Sequence
  Description of Artificial Sequence: Synthetic oligonucleotide
  Sense strand starting at position 339 of SEQ ID NO: 1561489
agccauuaccuaugaagug

SEQ ID NO: 1675700 - RNA, 19 nt, Artificial Sequence
  Description of Artificial Sequence: Synthetic oligonucleotide
  Antisense strand to SEQ ID NO: 1675699
cacuucauagguaauggcu

SEQ ID NO: 1675701 - RNA, 19 nt, Artificial Sequence
  Description of Artificial Sequence: Synthetic oligonucleotide
  Sense strand starting at position 356 of SEQ ID NO: 1561489
uggcauaacucagugguaa

SEQ ID NO: 1675702 - RNA, 19 nt, Artificial Sequence
  Description of Artificial Sequence: Synthetic oligonucleotide
  Antisense strand to SEQ ID NO: 1675701
uuaccacugaguuaugcca

SEQ ID NO: 1675703 - RNA, 19 nt, Artificial Sequence
  Description of Artificial Sequence: Synthetic oligonucleotide
  Sense strand starting at position 357 of SEQ ID NO: 1561489
ggcauaacucagugguaag

SEQ ID NO: 1675704 - RNA, 19 nt, Artificial Sequence
  Description of Artificial Sequence: Synthetic oligonucleotide
  Antisense strand to SEQ ID NO: 1675703
cuuaccacugaguuaugcc

SEQ ID NO: 1675705 - RNA, 19 nt, Artificial Sequence
  Description of Artificial Sequence: Synthetic oligonucleotide
  Sense strand starting at position 358 of SEQ ID NO: 1561489
gcauaacucagugguaaga

SEQ ID NO: 1675706 - RNA, 19 nt, Artificial Sequence
  Description of Artificial Sequence: Synthetic oligonucleotide
  Antisense strand to SEQ ID NO: 1675705
ucuuaccacugaguuaugc

SEQ ID NO: 1675707 - RNA, 19 nt, Artificial Sequence
  Description of Artificial Sequence: Synthetic oligonucleotide
  Sense strand starting at position 476 of SEQ ID NO: 1561489
guuucucuaucagugaaau

SEQ ID NO: 1675708 - RNA, 19 nt, Artificial Sequence
  Description of Artificial Sequence: Synthetic oligonucleotide
  Antisense strand to SEQ ID NO: 1675707
auuucacugauagagaaac

SEQ ID NO: 1675709 - RNA, 19 nt, Artificial Sequence
  Description of Artificial Sequence: Synthetic oligonucleotide
  Sense strand starting at position 507 of SEQ ID NO: 1561489
cuaucaauuguugggagga

SEQ ID NO: 1675710 - RNA, 19 nt, Artificial Sequence
  Description of Artificial Sequence: Synthetic oligonucleotide
  Antisense strand to SEQ ID NO: 1675709
uccucccaacaauugauag

SEQ ID NO: 1675711 - RNA, 19 nt, Artificial Sequence
  Description of Artificial Sequence: Synthetic oligonucleotide
  Sense strand starting at position 548 of SEQ ID NO: 1561489
cauugagcacagugcuuaa

SEQ ID NO: 1675712 - RNA, 19 nt, Artificial Sequence
  Description of Artificial Sequence: Synthetic oligonucleotide
  Antisense strand to SEQ ID NO: 1675711
uuaagcacugugcucaaug

SEQ ID NO: 1675713 - RNA, 19 nt, Artificial Sequence
  Description of Artificial Sequence: Synthetic oligonucleotide
  Sense strand starting at position 551 of SEQ ID NO: 1561489
ugagcacagugcuuaauuu

SEQ ID NO: 1675714 - RNA, 19 nt, Artificial Sequence
  Description of Artificial Sequence: Synthetic oligonucleotide
  Antisense strand to SEQ ID NO: 1675713
aaauuaagcacugugcuca

SEQ ID NO: 1675715 - RNA, 19 nt, Artificial Sequence
  Description of Artificial Sequence: Synthetic oligonucleotide
  Sense strand starting at position 1022 of SEQ ID NO: 1561489
acucacugucgggaugaca

SEQ ID NO: 1675716 - RNA, 19 nt, Artificial Sequence
  Description of Artificial Sequence: Synthetic oligonucleotide
  Antisense strand to SEQ ID NO: 1675715
ugucaucccgacagugagu

SEQ ID NO: 1675717 - RNA, 19 nt, Artificial Sequence
  Description of Artificial Sequence: Synthetic oligonucleotide
  Sense strand starting at position 1295 of SEQ ID NO: 1561489
gucacagucucaucuaauc

SEQ ID NO: 1675718 - RNA, 19 nt, Artificial Sequence
  Description of Artificial Sequence: Synthetic oligonucleotide
  Antisense strand to SEQ ID NO: 1675717
gauuagaugagacugugac

SEQ ID NO: 1675719 - RNA, 19 nt, Artificial Sequence
  Description of Artificial Sequence: Synthetic oligonucleotide
  Sense strand starting at position 1425 of SEQ ID NO: 1561489
acacguggucuacacauaa

SEQ ID NO: 1675720 - RNA, 19 nt, Artificial Sequence
  Description of Artificial Sequence: Synthetic oligonucleotide
  Antisense strand to SEQ ID NO: 1675719
uuauguguagaccacgugu

SEQ ID NO: 1675721 - RNA, 19 nt, Artificial Sequence
  Description of Artificial Sequence: Synthetic oligonucleotide
  Sense strand starting at position 1446 of SEQ ID NO: 1561489
acaguuuaacacugucaca

SEQ ID NO: 1675722 - RNA, 19 nt, Artificial Sequence
  Description of Artificial Sequence: Synthetic oligonucleotide
  Antisense strand to SEQ ID NO: 1675721
ugugacaguguuaaacugu

SEQ ID NO: 1675723 - RNA, 19 nt, Artificial Sequence
  Description of Artificial Sequence: Synthetic oligonucleotide
  Sense strand starting at position 1740 of SEQ ID NO: 1561489
acgauuccacacugucaaa

SEQ ID NO: 1675724 - RNA, 19 nt, Artificial Sequence
  Description of Artificial Sequence: Synthetic oligonucleotide
  Antisense strand to SEQ ID NO: 1675723
uuugacaguguggaaucgu

SEQ ID NO: 1675725 - RNA, 19 nt, Artificial Sequence
  Description of Artificial Sequence: Synthetic oligonucleotide
  Sense strand starting at position 1752 of SEQ ID NO: 1561489
ugucaaacacauugucaca

SEQ ID NO: 1675726 - RNA, 19 nt, Artificial Sequence
  Description of Artificial Sequence: Synthetic oligonucleotide
  Antisense strand to SEQ ID NO: 1675725
ugugacaauguguuugaca

SEQ ID NO: 1675727 - RNA, 19 nt, Artificial Sequence
  Description of Artificial Sequence: Synthetic oligonucleotide
  Sense strand starting at position 2349 of SEQ ID NO: 1561489
ugaguccaucgcugagaaa

SEQ ID NO: 1675728 - RNA, 19 nt, Artificial Sequence
  Description of Artificial Sequence: Synthetic oligonucleotide
  Antisense strand to SEQ ID NO: 1675727
uuucucagcgauggacuca

SEQ ID NO: 1675729 - RNA, 19 nt, Artificial Sequence
  Description of Artificial Sequence: Synthetic oligonucleotide
  Sense strand starting at position 2605 of SEQ ID NO: 1561489
cauucuaaugcgggaggaa

SEQ ID NO: 1675730 - RNA, 19 nt, Artificial Sequence
  Description of Artificial Sequence: Synthetic oligonucleotide
  Antisense strand to SEQ ID NO: 1675729
uuccucccgcauuagaaug

SEQ ID NO: 1675731 - RNA, 19 nt, Artificial Sequence
  Description of Artificial Sequence: Synthetic oligonucleotide
  Sense strand starting at position 2666 of SEQ ID NO: 1561489
ugggaaguaaugcguauua

SEQ ID NO: 1675732 - RNA, 19 nt, Artificial Sequence
  Description of Artificial Sequence: Synthetic oligonucleotide
  Antisense strand to SEQ ID NO: 1675731
uaauacgcauuacuuccca

SEQ ID NO: 1675733 - RNA, 19 nt, Artificial Sequence
  Description of Artificial Sequence: Synthetic oligonucleotide
  Sense strand starting at position 2668 of SEQ ID NO: 1561489
ggaaguaaugcguauuauc

SEQ ID NO: 1675734 - RNA, 19 nt, Artificial Sequence
  Description of Artificial Sequence: Synthetic oligonucleotide
  Antisense strand to SEQ ID NO: 1675733
gauaauacgcauuacuucc

SEQ ID NO: 1675735 - RNA, 19 nt, Artificial Sequence
  Description of Artificial Sequence: Synthetic oligonucleotide
  Sense strand starting at position 2739 of SEQ ID NO: 1561489
aguuaugcccucugaauca

SEQ ID NO: 1675736 - RNA, 19 nt, Artificial Sequence
  Description of Artificial Sequence: Synthetic oligonucleotide
  Antisense strand to SEQ ID NO: 1675735
ugauucagagggcauaacu

SEQ ID NO: 1675737 - RNA, 19 nt, Artificial Sequence
  Description of Artificial Sequence: Synthetic oligonucleotide
  Sense strand starting at position 2746 of SEQ ID NO: 1561489
cccucugaaucaguggaaa

SEQ ID NO: 1675738 - RNA, 19 nt, Artificial Sequence
  Description of Artificial Sequence: Synthetic oligonucleotide
  Antisense strand to SEQ ID NO: 1675737
uuuccacugauucagaggg

SEQ ID NO: 1675739 - RNA, 19 nt, Artificial Sequence
  Description of Artificial Sequence: Synthetic oligonucleotide
  Sense strand starting at position 2840 of SEQ ID NO: 1561489
gggaguuucccacacaucu

SEQ ID NO: 1675740 - RNA, 19 nt, Artificial Sequence
  Description of Artificial Sequence: Synthetic oligonucleotide
  Antisense strand to SEQ ID NO: 1675739
agaugugugggaaacuccc

SEQ ID NO: 1675741 - RNA, 19 nt, Artificial Sequence
  Description of Artificial Sequence: Synthetic oligonucleotide
  Sense strand starting at position 3010 of SEQ ID NO: 1561489
aagucuagccucuggaaca

SEQ ID NO: 1675742 - RNA, 19 nt, Artificial Sequence
  Description of Artificial Sequence: Synthetic oligonucleotide
  Antisense strand to SEQ ID NO: 1675741
uguuccagaggcuagacuu

SEQ ID NO: 1675743 - RNA, 19 nt, Artificial Sequence
  Description of Artificial Sequence: Synthetic oligonucleotide
  Sense strand starting at position 3067 of SEQ ID NO: 1561489
cccucuuugcgguucgaua

SEQ ID NO: 1675744 - RNA, 19 nt, Artificial Sequence
  Description of Artificial Sequence: Synthetic oligonucleotide
  Antisense strand to SEQ ID NO: 1675743
uaucgaaccgcaaagaggg

SEQ ID NO: 1675745 - RNA, 19 nt, Artificial Sequence
  Description of Artificial Sequence: Synthetic oligonucleotide
  Sense strand starting at position 3068 of SEQ ID NO: 1561489
ccucuuugcgguucgauau

SEQ ID NO: 1675746 - RNA, 19 nt, Artificial Sequence
  Description of Artificial Sequence: Synthetic oligonucleotide
  Antisense strand to SEQ ID NO: 1675745
auaucgaaccgcaaagagg

SEQ ID NO: 1675747 - RNA, 19 nt, Artificial Sequence
  Description of Artificial Sequence: Synthetic oligonucleotide
  Sense strand starting at position 3168 of SEQ ID NO: 1561489
aagagaugcguagggcaaa

SEQ ID NO: 1675748 - RNA, 19 nt, Artificial Sequence
  Description of Artificial Sequence: Synthetic oligonucleotide
  Antisense strand to SEQ ID NO: 1675747
uuugcccuacgcaucucuu

SEQ ID NO: 1675749 - RNA, 19 nt, Artificial Sequence
  Description of Artificial Sequence: Synthetic oligonucleotide
  Sense strand starting at position 3365 of SEQ ID NO: 1561489
augucuuggucuuuccaua

SEQ ID NO: 1675750 - RNA, 19 nt, Artificial Sequence
  Description of Artificial Sequence: Synthetic oligonucleotide
  Antisense strand to SEQ ID NO: 1675749
uauggaaagaccaagacau

SEQ ID NO: 1675751 - RNA, 19 nt, Artificial Sequence
  Description of Artificial Sequence: Synthetic oligonucleotide
  Sense strand starting at position 3486 of SEQ ID NO: 1561489
aguucuaugcuaggaagau

SEQ ID NO: 1675752 - RNA, 19 nt, Artificial Sequence
  Description of Artificial Sequence: Synthetic oligonucleotide
  Antisense strand to SEQ ID NO: 1675751
aucuuccuagcauagaacu

SEQ ID NO: 1675753 - RNA, 19 nt, Artificial Sequence
  Description of Artificial Sequence: Synthetic oligonucleotide
  Sense strand starting at position 3649 of SEQ ID NO: 1561489
uuaauugucugaccaaagu

SEQ ID NO: 1675754 - RNA, 19 nt, Artificial Sequence
  Description of Artificial Sequence: Synthetic oligonucleotide
  Antisense strand to SEQ ID NO: 1675753
acuuuggucagacaauuaa

SEQ ID NO: 1675755 - RNA, 19 nt, Artificial Sequence
  Description of Artificial Sequence: Synthetic oligonucleotide
  Sense strand starting at position 3662 of SEQ ID NO: 1561489
caaaguugccagugacaaa

SEQ ID NO: 1675756 - RNA, 19 nt, Artificial Sequence
  Description of Artificial Sequence: Synthetic oligonucleotide
  Antisense strand to SEQ ID NO: 1675755
uuugucacuggcaacuuug

SEQ ID NO: 1675757 - RNA, 19 nt, Artificial Sequence
  Description of Artificial Sequence: Synthetic oligonucleotide
  Sense strand starting at position 3685 of SEQ ID NO: 1561489
aucauauaagcugggaauu

SEQ ID NO: 1675758 - RNA, 19 nt, Artificial Sequence
  Description of Artificial Sequence: Synthetic oligonucleotide
  Antisense strand to SEQ ID NO: 1675757
aauucccagcuuauaugau

SEQ ID NO: 1675759 - RNA, 19 nt, Artificial Sequence
  Description of Artificial Sequence: Synthetic oligonucleotide
  Sense strand starting at position 182 of SEQ ID NO: 1561490
ccaaaccguucugauuaaa

SEQ ID NO: 1675760 - RNA, 19 nt, Artificial Sequence
  Description of Artificial Sequence: Synthetic oligonucleotide
  Antisense strand to SEQ ID NO: 1675759
uuuaaucagaacgguuugg

SEQ ID NO: 1675761 - RNA, 19 nt, Artificial Sequence
  Description of Artificial Sequence: Synthetic oligonucleotide
  Sense strand starting at position 324 of SEQ ID NO: 1561490
ggugggauuuggugggcaa

SEQ ID NO: 1675762 - RNA, 19 nt, Artificial Sequence
  Description of Artificial Sequence: Synthetic oligonucleotide
  Antisense strand to SEQ ID NO: 1675761
uugcccaccaaaucccacc

SEQ ID NO: 1675763 - RNA, 19 nt, Artificial Sequence
  Description of Artificial Sequence: Synthetic oligonucleotide
  Sense strand starting at position 335 of SEQ ID NO: 1561490
gugggcaaacuaugaaaca

SEQ ID NO: 1675764 - RNA, 19 nt, Artificial Sequence
  Description of Artificial Sequence: Synthetic oligonucleotide
  Antisense strand to SEQ ID NO: 1675763
uguuucauaguuugcccac

SEQ ID NO: 1675765 - RNA, 19 nt, Artificial Sequence
  Description of Artificial Sequence: Synthetic oligonucleotide
  Sense strand starting at position 336 of SEQ ID NO: 1561490
ugggcaaacuaugaaacau

SEQ ID NO: 1675766 - RNA, 19 nt, Artificial Sequence
  Description of Artificial Sequence: Synthetic oligonucleotide
  Antisense strand to SEQ ID NO: 1675765
auguuucauaguuugccca

SEQ ID NO: 1675767 - RNA, 19 nt, Artificial Sequence
  Description of Artificial Sequence: Synthetic oligonucleotide
  Sense strand starting at position 412 of SEQ ID NO: 1561490
cagcauugcucagagaaag

SEQ ID NO: 1675768 - RNA, 19 nt, Artificial Sequence
  Description of Artificial Sequence: Synthetic oligonucleotide
  Antisense strand to SEQ ID NO: 1675767
cuuucucugagcaaugcug

SEQ ID NO: 1675769 - RNA, 19 nt, Artificial Sequence
  Description of Artificial Sequence: Synthetic oligonucleotide
  Sense strand starting at position 492 of SEQ ID NO: 1561490
cagggaaucugggaaggaa

SEQ ID NO: 1675770 - RNA, 19 nt, Artificial Sequence
  Description of Artificial Sequence: Synthetic oligonucleotide
  Antisense strand to SEQ ID NO: 1675769
uuccuucccagauucccug

SEQ ID NO: 1675771 - RNA, 19 nt, Artificial Sequence
  Description of Artificial Sequence: Synthetic oligonucleotide
  Sense strand starting at position 527 of SEQ ID NO: 1561490
ggcuucguuauggacagaa

SEQ ID NO: 1675772 - RNA, 19 nt, Artificial Sequence
  Description of Artificial Sequence: Synthetic oligonucleotide
  Antisense strand to SEQ ID NO: 1675771
uucuguccauaacgaagcc

SEQ ID NO: 1675773 - RNA, 19 nt, Artificial Sequence
  Description of Artificial Sequence: Synthetic oligonucleotide
  Sense strand starting at position 529 of SEQ ID NO: 1561490
cuucguuauggacagaacu

SEQ ID NO: 1675774 - RNA, 19 nt, Artificial Sequence
  Description of Artificial Sequence: Synthetic oligonucleotide
  Antisense strand to SEQ ID NO: 1675773
aguucuguccauaacgaag

SEQ ID NO: 1675775 - RNA, 19 nt, Artificial Sequence
  Description of Artificial Sequence: Synthetic oligonucleotide
  Sense strand starting at position 598 of SEQ ID NO: 1561490
agacuuacccagugagcua

SEQ ID NO: 1675776 - RNA, 19 nt, Artificial Sequence
  Description of Artificial Sequence: Synthetic oligonucleotide
  Antisense strand to SEQ ID NO: 1675775
uagcucacuggguaagucu

SEQ ID NO: 1675777 - RNA, 19 nt, Artificial Sequence
  Description of Artificial Sequence: Synthetic oligonucleotide
  Sense strand starting at position 761 of SEQ ID NO: 1561490
gggucaaugaugggcagaa

SEQ ID NO: 1675778 - RNA, 19 nt, Artificial Sequence
  Description of Artificial Sequence: Synthetic oligonucleotide
  Antisense strand to SEQ ID NO: 1675777
uucugcccaucauugaccc

SEQ ID NO: 1675779 - RNA, 19 nt, Artificial Sequence
  Description of Artificial Sequence: Synthetic oligonucleotide
  Sense strand starting at position 762 of SEQ ID NO: 1561490
ggucaaugaugggcagaaa

SEQ ID NO: 1675780 - RNA, 19 nt, Artificial Sequence
  Description of Artificial Sequence: Synthetic oligonucleotide
  Antisense strand to SEQ ID NO: 1675779
uuucugcccaucauugacc

SEQ ID NO: 1675781 - RNA, 19 nt, Artificial Sequence
  Description of Artificial Sequence: Synthetic oligonucleotide
  Sense strand starting at position 817 of SEQ ID NO: 1561490
gcccuugaccuguaucuca

SEQ ID NO: 1675782 - RNA, 19 nt, Artificial Sequence
  Description of Artificial Sequence: Synthetic oligonucleotide
  Antisense strand to SEQ ID NO: 1675781
ugagauacaggucaagggc

SEQ ID NO: 1675783 - RNA, 19 nt, Artificial Sequence
  Description of Artificial Sequence: Synthetic oligonucleotide
  Sense strand starting at position 948 of SEQ ID NO: 1561490
aucagagcugcugguguua

SEQ ID NO: 1675784 - RNA, 19 nt, Artificial Sequence
  Description of Artificial Sequence: Synthetic oligonucleotide
  Antisense strand to SEQ ID NO: 1675783
uaacaccagcagcucugau

SEQ ID NO: 1675785 - RNA, 19 nt, Artificial Sequence
  Description of Artificial Sequence: Synthetic oligonucleotide
  Sense strand starting at position 957 of SEQ ID NO: 1561490
gcugguguuauugaugcuu

SEQ ID NO: 1675786 - RNA, 19 nt, Artificial Sequence
  Description of Artificial Sequence: Synthetic oligonucleotide
  Antisense strand to SEQ ID NO: 1675785
aagcaucaauaacaccagc

SEQ ID NO: 1675787 - RNA, 19 nt, Artificial Sequence
  Description of Artificial Sequence: Synthetic oligonucleotide
  Sense strand starting at position 978 of SEQ ID NO: 1561490
gguguuacuacuggaaacu

SEQ ID NO: 1675788 - RNA, 19 nt, Artificial Sequence
  Description of Artificial Sequence: Synthetic oligonucleotide
  Antisense strand to SEQ ID NO: 1675787
aguuuccaguaguaacacc

SEQ ID NO: 1675789 - RNA, 19 nt, Artificial Sequence
  Description of Artificial Sequence: Synthetic oligonucleotide
  Sense strand starting at position 1029 of SEQ ID NO: 1561490
ccagacugaugccaucuau

SEQ ID NO: 1675790 - RNA, 19 nt, Artificial Sequence
  Description of Artificial Sequence: Synthetic oligonucleotide
  Antisense strand to SEQ ID NO: 1675789
auagauggcaucagucugg

SEQ ID NO: 1675791 - RNA, 19 nt, Artificial Sequence
  Description of Artificial Sequence: Synthetic oligonucleotide
  Sense strand starting at position 1427 of SEQ ID NO: 1561490
ccuggaaucauacgcagau

SEQ ID NO: 1675792 - RNA, 19 nt, Artificial Sequence
  Description of Artificial Sequence: Synthetic oligonucleotide
  Antisense strand to SEQ ID NO: 1675791
aucugcguaugauuccagg

SEQ ID NO: 1675793 - RNA, 19 nt, Artificial Sequence
  Description of Artificial Sequence: Synthetic oligonucleotide
  Sense strand starting at position 1501 of SEQ ID NO: 1561490
cccucauuccucggaggca

SEQ ID NO: 1675794 - RNA, 19 nt, Artificial Sequence
  Description of Artificial Sequence: Synthetic oligonucleotide
  Antisense strand to SEQ ID NO: 1675793
ugccuccgaggaaugaggg

SEQ ID NO: 1675795 - RNA, 19 nt, Artificial Sequence
  Description of Artificial Sequence: Synthetic oligonucleotide
  Sense strand starting at position 2034 of SEQ ID NO: 1561490
ggucguugccaaggcgaua

SEQ ID NO: 1675796 - RNA, 19 nt, Artificial Sequence
  Description of Artificial Sequence: Synthetic oligonucleotide
  Antisense strand to SEQ ID NO: 1675795
uaucgccuuggcaacgacc

SEQ ID NO: 1675797 - RNA, 19 nt, Artificial Sequence
  Description of Artificial Sequence: Synthetic oligonucleotide
  Sense strand starting at position 2035 of SEQ ID NO: 1561490
gucguugccaaggcgauaa

SEQ ID NO: 1675798 - RNA, 19 nt, Artificial Sequence
  Description of Artificial Sequence: Synthetic oligonucleotide
  Antisense strand to SEQ ID NO: 1675797
uuaucgccuuggcaacgac

SEQ ID NO: 1675799 - RNA, 19 nt, Artificial Sequence
  Description of Artificial Sequence: Synthetic oligonucleotide
  Sense strand starting at position 2311 of SEQ ID NO: 1561490
gaaguucugccucagugac

SEQ ID NO: 1675800 - RNA, 19 nt, Artificial Sequence
  Description of Artificial Sequence: Synthetic oligonucleotide
  Antisense strand to SEQ ID NO: 1675799
gucacugaggcagaacuuc

SEQ ID NO: 1675801 - RNA, 19 nt, Artificial Sequence
  Description of Artificial Sequence: Synthetic oligonucleotide
  Sense strand starting at position 2640 of SEQ ID NO: 1561490
ucagcaguuguguuucagu

SEQ ID NO: 1675802 - RNA, 19 nt, Artificial Sequence
  Description of Artificial Sequence: Synthetic oligonucleotide
  Antisense strand to SEQ ID NO: 1675801
acugaaacacaacugcuga

SEQ ID NO: 1675803 - RNA, 19 nt, Artificial Sequence
  Description of Artificial Sequence: Synthetic oligonucleotide
  Sense strand starting at position 2645 of SEQ ID NO: 1561490
aguuguguuucaguugugu

SEQ ID NO: 1675804 - RNA, 19 nt, Artificial Sequence
  Description of Artificial Sequence: Synthetic oligonucleotide
  Antisense strand to SEQ ID NO: 1675803
acacaacugaaacacaacu

SEQ ID NO: 1675805 - RNA, 19 nt, Artificial Sequence
  Description of Artificial Sequence: Synthetic oligonucleotide
  Sense strand starting at position 2651 of SEQ ID NO: 1561490
guuucaguuguguuggguu

SEQ ID NO: 1675806 - RNA, 19 nt, Artificial Sequence
  Description of Artificial Sequence: Synthetic oligonucleotide
  Antisense strand to SEQ ID NO: 1675805
aacccaacacaacugaaac

SEQ ID NO: 1675807 - RNA, 19 nt, Artificial Sequence
  Description of Artificial Sequence: Synthetic oligonucleotide
  Sense strand starting at position 2819 of SEQ ID NO: 1561490
gugaguacauggcugagua

SEQ ID NO: 1675808 - RNA, 19 nt, Artificial Sequence
  Description of Artificial Sequence: Synthetic oligonucleotide
  Antisense strand to SEQ ID NO: 1675807
uacucagccauguacucac

SEQ ID NO: 1675809 - RNA, 19 nt, Artificial Sequence
  Description of Artificial Sequence: Synthetic oligonucleotide
  Sense strand starting at position 2900 of SEQ ID NO: 1561490
cuggguguccuccgcugaa

SEQ ID NO: 1675810 - RNA, 19 nt, Artificial Sequence
  Description of Artificial Sequence: Synthetic oligonucleotide
  Antisense strand to SEQ ID NO: 1675809
uucagcggaggacacccag

SEQ ID NO: 1675811 - RNA, 19 nt, Artificial Sequence
  Description of Artificial Sequence: Synthetic oligonucleotide
  Sense strand starting at position 2969 of SEQ ID NO: 1561490
cggaguucuuaggcaaggu

SEQ ID NO: 1675812 - RNA, 19 nt, Artificial Sequence
  Description of Artificial Sequence: Synthetic oligonucleotide
  Antisense strand to SEQ ID NO: 1675811
accuugccuaagaacuccg

SEQ ID NO: 1675813 - RNA, 19 nt, Artificial Sequence
  Description of Artificial Sequence: Synthetic oligonucleotide
  Sense strand starting at position 2992 of SEQ ID NO: 1561490
aggagcuucuaccugaagu

SEQ ID NO: 1675814 - RNA, 19 nt, Artificial Sequence
  Description of Artificial Sequence: Synthetic oligonucleotide
  Antisense strand to SEQ ID NO: 1675813
acuucagguagaagcuccu

SEQ ID NO: 1675815 - RNA, 19 nt, Artificial Sequence
  Description of Artificial Sequence: Synthetic oligonucleotide
  Sense strand starting at position 2993 of SEQ ID NO: 1561490
ggagcuucuaccugaagug

SEQ ID NO: 1675816 - RNA, 19 nt, Artificial Sequence
  Description of Artificial Sequence: Synthetic oligonucleotide
  Antisense strand to SEQ ID NO: 1675815
cacuucagguagaagcucc

SEQ ID NO: 1675817 - RNA, 19 nt, Artificial Sequence
  Description of Artificial Sequence: Synthetic oligonucleotide
  Sense strand starting at position 3273 of SEQ ID NO: 1561490
ggucacuuccuguaagauu

SEQ ID NO: 1675818 - RNA, 19 nt, Artificial Sequence
  Description of Artificial Sequence: Synthetic oligonucleotide
  Antisense strand to SEQ ID NO: 1675817
aaucuuacaggaagugacc

SEQ ID NO: 1675819 - RNA, 19 nt, Artificial Sequence
  Description of Artificial Sequence: Synthetic oligonucleotide
  Sense strand starting at position 3343 of SEQ ID NO: 1561490
cugggagccuucccugaau

SEQ ID NO: 1675820 - RNA, 19 nt, Artificial Sequence
  Description of Artificial Sequence: Synthetic oligonucleotide
  Antisense strand to SEQ ID NO: 1675819
auucagggaaggcucccag

SEQ ID NO: 1675821 - RNA, 19 nt, Artificial Sequence
  Description of Artificial Sequence: Synthetic oligonucleotide
  Sense strand starting at position 3345 of SEQ ID NO: 1561490
gggagccuucccugaaugu

SEQ ID NO: 1675822 - RNA, 19 nt, Artificial Sequence
  Description of Artificial Sequence: Synthetic oligonucleotide
  Antisense strand to SEQ ID NO: 1675821
acauucagggaaggcuccc

SEQ ID NO: 1675823 - RNA, 19 nt, Artificial Sequence
  Description of Artificial Sequence: Synthetic oligonucleotide
  Sense strand starting at position 3346 of SEQ ID NO: 1561490
ggagccuucccugaauguu

SEQ ID NO: 1675824 - RNA, 19 nt, Artificial Sequence
  Description of Artificial Sequence: Synthetic oligonucleotide
  Antisense strand to SEQ ID NO: 1675823
aacauucagggaaggcucc

SEQ ID NO: 1675825 - RNA, 19 nt, Artificial Sequence
  Description of Artificial Sequence: Synthetic oligonucleotide
  Sense strand starting at position 3380 of SEQ ID NO: 1561490
uguguuugucuuggaguaa

SEQ ID NO: 1675826 - RNA, 19 nt, Artificial Sequence
  Description of Artificial Sequence: Synthetic oligonucleotide
  Antisense strand to SEQ ID NO: 1675825
uuacuccaagacaaacaca

SEQ ID NO: 1675827 - RNA, 19 nt, Artificial Sequence
  Description of Artificial Sequence: Synthetic oligonucleotide
  Sense strand starting at position 3384 of SEQ ID NO: 1561490
uuugucuuggaguaaggau

SEQ ID NO: 1675828 - RNA, 19 nt, Artificial Sequence
  Description of Artificial Sequence: Synthetic oligonucleotide
  Antisense strand to SEQ ID NO: 1675827
auccuuacuccaagacaaa

SEQ ID NO: 1675829 - RNA, 19 nt, Artificial Sequence
  Description of Artificial Sequence: Synthetic oligonucleotide
  Sense strand starting at position 3399 of SEQ ID NO: 1561490
ggauuauucucgcuugcug

SEQ ID NO: 1675830 - RNA, 19 nt, Artificial Sequence
  Description of Artificial Sequence: Synthetic oligonucleotide
  Antisense strand to SEQ ID NO: 1675829
cagcaagcgagaauaaucc

SEQ ID NO: 1675831 - RNA, 19 nt, Artificial Sequence
  Description of Artificial Sequence: Synthetic oligonucleotide
  Sense strand starting at position 3728 of SEQ ID NO: 1561490
uuaacauguccucagcuga

SEQ ID NO: 1675832 - RNA, 19 nt, Artificial Sequence
  Description of Artificial Sequence: Synthetic oligonucleotide
  Antisense strand to SEQ ID NO: 1675831
ucagcugaggacauguuaa

SEQ ID NO: 1675833 - RNA, 19 nt, Artificial Sequence
  Description of Artificial Sequence: Synthetic oligonucleotide
  Sense strand starting at position 3778 of SEQ ID NO: 1561490
cucagugacaccuguguau

SEQ ID NO: 1675834 - RNA, 19 nt, Artificial Sequence
  Description of Artificial Sequence: Synthetic oligonucleotide
  Antisense strand to SEQ ID NO: 1675833
auacacaggugucacugag

SEQ ID NO: 1675835 - RNA, 19 nt, Artificial Sequence
  Description of Artificial Sequence: Synthetic oligonucleotide
  Sense strand starting at position 3780 of SEQ ID NO: 1561490
cagugacaccuguguauuc

SEQ ID NO: 1675836 - RNA, 19 nt, Artificial Sequence
  Description of Artificial Sequence: Synthetic oligonucleotide
  Antisense strand to SEQ ID NO: 1675835
gaauacacaggugucacug

SEQ ID NO: 1675837 - RNA, 19 nt, Artificial Sequence
  Description of Artificial Sequence: Synthetic oligonucleotide
  Sense strand starting at position 3925 of SEQ ID NO: 1561490
aggauugcccuuuacaguu

SEQ ID NO: 1675838 - RNA, 19 nt, Artificial Sequence
  Description of Artificial Sequence: Synthetic oligonucleotide
  Antisense strand to SEQ ID NO: 1675837
aacuguaaagggcaauccu

SEQ ID NO: 1675839 - RNA, 19 nt, Artificial Sequence
  Description of Artificial Sequence: Synthetic oligonucleotide
  Sense strand starting at position 305 of SEQ ID NO: 1561491
cauaaauggcagugauaua

SEQ ID NO: 1675840 - RNA, 19 nt, Artificial Sequence
  Description of Artificial Sequence: Synthetic oligonucleotide
  Antisense strand to SEQ ID NO: 1675839
uauaucacugccauuuaug

SEQ ID NO: 1675841 - RNA, 19 nt, Artificial Sequence
  Description of Artificial Sequence: Synthetic oligonucleotide
  Sense strand starting at position 315 of SEQ ID NO: 1561491
agugauauaaugcagugau

SEQ ID NO: 1675842 - RNA, 19 nt, Artificial Sequence
  Description of Artificial Sequence: Synthetic oligonucleotide
  Antisense strand to SEQ ID NO: 1675841
aucacugcauuauaucacu

SEQ ID NO: 1675843 - RNA, 19 nt, Artificial Sequence
  Description of Artificial Sequence: Synthetic oligonucleotide
  Sense strand starting at position 469 of SEQ ID NO: 1561491
aguauacauguguauaaca

SEQ ID NO: 1675844 - RNA, 19 nt, Artificial Sequence
  Description of Artificial Sequence: Synthetic oligonucleotide
  Antisense strand to SEQ ID NO: 1675843
uguuauacacauguauacu

SEQ ID NO: 1675845 - RNA, 19 nt, Artificial Sequence
  Description of Artificial Sequence: Synthetic oligonucleotide
  Sense strand starting at position 508 of SEQ ID NO: 1561491
ucuuauuacacgugagagg

SEQ ID NO: 1675846 - RNA, 19 nt, Artificial Sequence
  Description of Artificial Sequence: Synthetic oligonucleotide
  Antisense strand to SEQ ID NO: 1675845
ccucucacguguaauaaga

SEQ ID NO: 1675847 - RNA, 19 nt, Artificial Sequence
  Description of Artificial Sequence: Synthetic oligonucleotide
  Sense strand starting at position 808 of SEQ ID NO: 1561491
uugguauaagcuugaauug

SEQ ID NO: 1675848 - RNA, 19 nt, Artificial Sequence
  Description of Artificial Sequence: Synthetic oligonucleotide
  Antisense strand to SEQ ID NO: 1675847
caauucaagcuuauaccaa

SEQ ID NO: 1675849 - RNA, 19 nt, Artificial Sequence
  Description of Artificial Sequence: Synthetic oligonucleotide
  Sense strand starting at position 809 of SEQ ID NO: 1561491
ugguauaagcuugaauugu

SEQ ID NO: 1675850 - RNA, 19 nt, Artificial Sequence
  Description of Artificial Sequence: Synthetic oligonucleotide
  Antisense strand to SEQ ID NO: 1675849
acaauucaagcuuauacca

SEQ ID NO: 1675851 - RNA, 19 nt, Artificial Sequence
  Description of Artificial Sequence: Synthetic oligonucleotide
  Sense strand starting at position 1247 of SEQ ID NO: 1561491
uccagaguugaguacuuua

SEQ ID NO: 1675852 - RNA, 19 nt, Artificial Sequence
  Description of Artificial Sequence: Synthetic oligonucleotide
  Antisense strand to SEQ ID NO: 1675851
uaaaguacucaacucugga

SEQ ID NO: 1675853 - RNA, 19 nt, Artificial Sequence
  Description of Artificial Sequence: Synthetic oligonucleotide
  Sense strand starting at position 1250 of SEQ ID NO: 1561491
agaguugaguacuuuaccu

SEQ ID NO: 1675854 - RNA, 19 nt, Artificial Sequence
  Description of Artificial Sequence: Synthetic oligonucleotide
  Antisense strand to SEQ ID NO: 1675853
agguaaaguacucaacucu

SEQ ID NO: 1675855 - RNA, 19 nt, Artificial Sequence
  Description of Artificial Sequence: Synthetic oligonucleotide
  Sense strand starting at position 1271 of SEQ ID NO: 1561491
cucuguaauuaagcagaca

SEQ ID NO: 1675856 - RNA, 19 nt, Artificial Sequence
  Description of Artificial Sequence: Synthetic oligonucleotide
  Antisense strand to SEQ ID NO: 1675855
ugucugcuuaauuacagag

SEQ ID NO: 1675857 - RNA, 19 nt, Artificial Sequence
  Description of Artificial Sequence: Synthetic oligonucleotide
  Sense strand starting at position 1625 of SEQ ID NO: 1561491
ugauuacaguccucaccga

SEQ ID NO: 1675858 - RNA, 19 nt, Artificial Sequence
  Description of Artificial Sequence: Synthetic oligonucleotide
  Antisense strand to SEQ ID NO: 1675857
ucggugaggacuguaauca

SEQ ID NO: 1675859 - RNA, 19 nt, Artificial Sequence
  Description of Artificial Sequence: Synthetic oligonucleotide
  Sense strand starting at position 1626 of SEQ ID NO: 1561491
gauuacaguccucaccgau

SEQ ID NO: 1675860 - RNA, 19 nt, Artificial Sequence
  Description of Artificial Sequence: Synthetic oligonucleotide
  Antisense strand to SEQ ID NO: 1675859
aucggugaggacuguaauc

SEQ ID NO: 1675861 - RNA, 19 nt, Artificial Sequence
  Description of Artificial Sequence: Synthetic oligonucleotide
  Sense strand starting at position 1743 of SEQ ID NO: 1561491
ugagaaauccgucacaauc

SEQ ID NO: 1675862 - RNA, 19 nt, Artificial Sequence
  Description of Artificial Sequence: Synthetic oligonucleotide
  Antisense strand to SEQ ID NO: 1675861
gauugugacggauuucuca

SEQ ID NO: 1675863 - RNA, 19 nt, Artificial Sequence
  Description of Artificial Sequence: Synthetic oligonucleotide
  Sense strand starting at position 1861 of SEQ ID NO: 1561491
cccaaucgugaucaaccaa

SEQ ID NO: 1675864 - RNA, 19 nt, Artificial Sequence
  Description of Artificial Sequence: Synthetic oligonucleotide
  Antisense strand to SEQ ID NO: 1675863
uugguugaucacgauuggg

SEQ ID NO: 1675865 - RNA, 19 nt, Artificial Sequence
  Description of Artificial Sequence: Synthetic oligonucleotide
  Sense strand starting at position 1894 of SEQ ID NO: 1561491
uuuaucgguauuggaauau

SEQ ID NO: 1675866 - RNA, 19 nt, Artificial Sequence
  Description of Artificial Sequence: Synthetic oligonucleotide
  Antisense strand to SEQ ID NO: 1675865
auauuccaauaccgauaaa

SEQ ID NO: 1675867 - RNA, 19 nt, Artificial Sequence
  Description of Artificial Sequence: Synthetic oligonucleotide
  Sense strand starting at position 2012 of SEQ ID NO: 1561491
gcaugcucugaauaaacuu

SEQ ID NO: 1675868 - RNA, 19 nt, Artificial Sequence
  Description of Artificial Sequence: Synthetic oligonucleotide
  Antisense strand to SEQ ID NO: 1675867
aaguuuauucagagcaugc

SEQ ID NO: 1675869 - RNA, 19 nt, Artificial Sequence
  Description of Artificial Sequence: Synthetic oligonucleotide
  Sense strand starting at position 2038 of SEQ ID NO: 1561491
aguuuccucgaacagucaa

SEQ ID NO: 1675870 - RNA, 19 nt, Artificial Sequence
  Description of Artificial Sequence: Synthetic oligonucleotide
  Antisense strand to SEQ ID NO: 1675869
uugacuguucgaggaaacu

SEQ ID NO: 1675871 - RNA, 19 nt, Artificial Sequence
  Description of Artificial Sequence: Synthetic oligonucleotide
  Sense strand starting at position 2162 of SEQ ID NO: 1561491
auauccauuccguagagca

SEQ ID NO: 1675872 - RNA, 19 nt, Artificial Sequence
  Description of Artificial Sequence: Synthetic oligonucleotide
  Antisense strand to SEQ ID NO: 1675871
ugcucuacggaauggauau

SEQ ID NO: 1675873 - RNA, 19 nt, Artificial Sequence
  Description of Artificial Sequence: Synthetic oligonucleotide
  Sense strand starting at position 2518 of SEQ ID NO: 1561491
gagucaucucuugagugaa

SEQ ID NO: 1675874 - RNA, 19 nt, Artificial Sequence
  Description of Artificial Sequence: Synthetic oligonucleotide
  Antisense strand to SEQ ID NO: 1675873
uucacucaagagaugacuc

SEQ ID NO: 1675875 - RNA, 19 nt, Artificial Sequence
  Description of Artificial Sequence: Synthetic oligonucleotide
  Sense strand starting at position 2520 of SEQ ID NO: 1561491
gucaucucuugagugaaac

SEQ ID NO: 1675876 - RNA, 19 nt, Artificial Sequence
  Description of Artificial Sequence: Synthetic oligonucleotide
  Antisense strand to SEQ ID NO: 1675875
guuucacucaagagaugac

SEQ ID NO: 1675877 - RNA, 19 nt, Artificial Sequence
  Description of Artificial Sequence: Synthetic oligonucleotide
  Sense strand starting at position 2608 of SEQ ID NO: 1561491
gagaaaccgccuugggaaa

SEQ ID NO: 1675878 - RNA, 19 nt, Artificial Sequence
  Description of Artificial Sequence: Synthetic oligonucleotide
  Antisense strand to SEQ ID NO: 1675877
uuucccaaggcgguuucuc

SEQ ID NO: 1675879 - RNA, 19 nt, Artificial Sequence
  Description of Artificial Sequence: Synthetic oligonucleotide
  Sense strand starting at position 2628 of SEQ ID NO: 1561491
aggguagaaguccaauagu

SEQ ID NO: 1675880 - RNA, 19 nt, Artificial Sequence
  Description of Artificial Sequence: Synthetic oligonucleotide
  Antisense strand to SEQ ID NO: 1675879
acuauuggacuucuacccu

SEQ ID NO: 1675881 - RNA, 19 nt, Artificial Sequence
  Description of Artificial Sequence: Synthetic oligonucleotide
  Sense strand starting at position 2631 of SEQ ID NO: 1561491
guagaaguccaauaguauu

SEQ ID NO: 1675882 - RNA, 19 nt, Artificial Sequence
  Description of Artificial Sequence: Synthetic oligonucleotide
  Antisense strand to SEQ ID NO: 1675881
aauacuauuggacuucuac

SEQ ID NO: 1675883 - RNA, 19 nt, Artificial Sequence
  Description of Artificial Sequence: Synthetic oligonucleotide
  Sense strand starting at position 2792 of SEQ ID NO: 1561491
uauaguaggcagcaauaau

SEQ ID NO: 1675884 - RNA, 19 nt, Artificial Sequence
  Description of Artificial Sequence: Synthetic oligonucleotide
  Antisense strand to SEQ ID NO: 1675883
auuauugcugccuacuaua

SEQ ID NO: 1675885 - RNA, 19 nt, Artificial Sequence
  Description of Artificial Sequence: Synthetic oligonucleotide
  Sense strand starting at position 2817 of SEQ ID NO: 1561491
acuaauagucuuuaguaug

SEQ ID NO: 1675886 - RNA, 19 nt, Artificial Sequence
  Description of Artificial Sequence: Synthetic oligonucleotide
  Antisense strand to SEQ ID NO: 1675885
cauacuaaagacuauuagu

SEQ ID NO: 1675887 - RNA, 19 nt, Artificial Sequence
  Description of Artificial Sequence: Synthetic oligonucleotide
  Sense strand starting at position 2915 of SEQ ID NO: 1561491
uuaccaugucaaugaagcu

SEQ ID NO: 1675888 - RNA, 19 nt, Artificial Sequence
  Description of Artificial Sequence: Synthetic oligonucleotide
  Antisense strand to SEQ ID NO: 1675887
agcuucauugacaugguaa

SEQ ID NO: 1675889 - RNA, 19 nt, Artificial Sequence
  Description of Artificial Sequence: Synthetic oligonucleotide
  Sense strand starting at position 3087 of SEQ ID NO: 1561491
ggaaguucuaccugaacag

SEQ ID NO: 1675890 - RNA, 19 nt, Artificial Sequence
  Description of Artificial Sequence: Synthetic oligonucleotide
  Antisense strand to SEQ ID NO: 1675889
cuguucagguagaacuucc

SEQ ID NO: 1675891 - RNA, 19 nt, Artificial Sequence
  Description of Artificial Sequence: Synthetic oligonucleotide
  Sense strand starting at position 3088 of SEQ ID NO: 1561491
gaaguucuaccugaacagu

SEQ ID NO: 1675892 - RNA, 19 nt, Artificial Sequence
  Description of Artificial Sequence: Synthetic oligonucleotide
  Antisense strand to SEQ ID NO: 1675891
acuguucagguagaacuuc

SEQ ID NO: 1675893 - RNA, 19 nt, Artificial Sequence
  Description of Artificial Sequence: Synthetic oligonucleotide
  Sense strand starting at position 3111 of SEQ ID NO: 1561491
ggaaauuacuacccaaugu

SEQ ID NO: 1675894 - RNA, 19 nt, Artificial Sequence
  Description of Artificial Sequence: Synthetic oligonucleotide
  Antisense strand to SEQ ID NO: 1675893
acauuggguaguaauuucc

SEQ ID NO: 1675895 - RNA, 19 nt, Artificial Sequence
  Description of Artificial Sequence: Synthetic oligonucleotide
  Sense strand starting at position 3254 of SEQ ID NO: 1561491
agaauuagacucugcugau

SEQ ID NO: 1675896 - RNA, 19 nt, Artificial Sequence
  Description of Artificial Sequence: Synthetic oligonucleotide
  Antisense strand to SEQ ID NO: 1675895
aucagcagagucuaauucu

SEQ ID NO: 1675897 - RNA, 19 nt, Artificial Sequence
  Description of Artificial Sequence: Synthetic oligonucleotide
  Sense strand starting at position 3357 of SEQ ID NO: 1561491
ggcuaagaauuacuguuga

SEQ ID NO: 1675898 - RNA, 19 nt, Artificial Sequence
  Description of Artificial Sequence: Synthetic oligonucleotide
  Antisense strand to SEQ ID NO: 1675897
ucaacaguaauucuuagcc

SEQ ID NO: 1675899 - RNA, 19 nt, Artificial Sequence
  Description of Artificial Sequence: Synthetic oligonucleotide
  Sense strand starting at position 3422 of SEQ ID NO: 1561491
uagggauucguguggaaau

SEQ ID NO: 1675900 - RNA, 19 nt, Artificial Sequence
  Description of Artificial Sequence: Synthetic oligonucleotide
  Antisense strand to SEQ ID NO: 1675899
auuuccacacgaaucccua

SEQ ID NO: 1675901 - RNA, 19 nt, Artificial Sequence
  Description of Artificial Sequence: Synthetic oligonucleotide
  Sense strand starting at position 3424 of SEQ ID NO: 1561491
gggauucguguggaaauau

SEQ ID NO: 1675902 - RNA, 19 nt, Artificial Sequence
  Description of Artificial Sequence: Synthetic oligonucleotide
  Antisense strand to SEQ ID NO: 1675901
auauuuccacacgaauccc

SEQ ID NO: 1675903 - RNA, 19 nt, Artificial Sequence
  Description of Artificial Sequence: Synthetic oligonucleotide
  Sense strand starting at position 3435 of SEQ ID NO: 1561491
ggaaauauuuaugggugga

SEQ ID NO: 1675904 - RNA, 19 nt, Artificial Sequence
  Description of Artificial Sequence: Synthetic oligonucleotide
  Antisense strand to SEQ ID NO: 1675903
uccacccauaaauauuucc

SEQ ID NO: 1675905 - RNA, 19 nt, Artificial Sequence
  Description of Artificial Sequence: Synthetic oligonucleotide
  Sense strand starting at position 3539 of SEQ ID NO: 1561491
aauguuaaagcagagugau

SEQ ID NO: 1675906 - RNA, 19 nt, Artificial Sequence
  Description of Artificial Sequence: Synthetic oligonucleotide
  Antisense strand to SEQ ID NO: 1675905
aucacucugcuuuaacauu

SEQ ID NO: 1675907 - RNA, 19 nt, Artificial Sequence
  Description of Artificial Sequence: Synthetic oligonucleotide
  Sense strand starting at position 3542 of SEQ ID NO: 1561491
guuaaagcagagugauaag

SEQ ID NO: 1675908 - RNA, 19 nt, Artificial Sequence
  Description of Artificial Sequence: Synthetic oligonucleotide
  Antisense strand to SEQ ID NO: 1675907
cuuaucacucugcuuuaac

SEQ ID NO: 1675909 - RNA, 19 nt, Artificial Sequence
  Description of Artificial Sequence: Synthetic oligonucleotide
  Sense strand starting at position 3580 of SEQ ID NO: 1561491
uguucucuuccauaguauu

SEQ ID NO: 1675910 - RNA, 19 nt, Artificial Sequence
  Description of Artificial Sequence: Synthetic oligonucleotide
  Antisense strand to SEQ ID NO: 1675909
aauacuauggaagagaaca

SEQ ID NO: 1675911 - RNA, 19 nt, Artificial Sequence
  Description of Artificial Sequence: Synthetic oligonucleotide
  Sense strand starting at position 3587 of SEQ ID NO: 1561491
uuccauaguauuuguguga

SEQ ID NO: 1675912 - RNA, 19 nt, Artificial Sequence
  Description of Artificial Sequence: Synthetic oligonucleotide
  Antisense strand to SEQ ID NO: 1675911
ucacacaaauacuauggaa

SEQ ID NO: 1675913 - RNA, 19 nt, Artificial Sequence
  Description of Artificial Sequence: Synthetic oligonucleotide
  Sense strand starting at position 3680 of SEQ ID NO: 1561491
agguguggucauaguguua

SEQ ID NO: 1675914 - RNA, 19 nt, Artificial Sequence
  Description of Artificial Sequence: Synthetic oligonucleotide
  Antisense strand to SEQ ID NO: 1675913
uaacacuaugaccacaccu

SEQ ID NO: 1675915 - RNA, 19 nt, Artificial Sequence
  Description of Artificial Sequence: Synthetic oligonucleotide
  Sense strand starting at position 3803 of SEQ ID NO: 1561491
uguguuuacagcgaaggaa

SEQ ID NO: 1675916 - RNA, 19 nt, Artificial Sequence
  Description of Artificial Sequence: Synthetic oligonucleotide
  Antisense strand to SEQ ID NO: 1675915
uuccuucgcuguaaacaca

SEQ ID NO: 1675917 - RNA, 19 nt, Artificial Sequence
  Description of Artificial Sequence: Synthetic oligonucleotide
  Sense strand starting at position 3828 of SEQ ID NO: 1561491
cuguaaugccugcaaagac

SEQ ID NO: 1675918 - RNA, 19 nt, Artificial Sequence
  Description of Artificial Sequence: Synthetic oligonucleotide
  Antisense strand to SEQ ID NO: 1675917
gucuuugcaggcauuacag

SEQ ID NO: 1675919 - RNA, 19 nt, Artificial Sequence
  Description of Artificial Sequence: Synthetic oligonucleotide
  Sense strand starting at position 610 of SEQ ID NO: 1561492
cauaaauggcagugauaua

SEQ ID NO: 1675920 - RNA, 19 nt, Artificial Sequence
  Description of Artificial Sequence: Synthetic oligonucleotide
  Antisense strand to SEQ ID NO: 1675919
uauaucacugccauuuaug

SEQ ID NO: 1675921 - RNA, 19 nt, Artificial Sequence
  Description of Artificial Sequence: Synthetic oligonucleotide
  Sense strand starting at position 620 of SEQ ID NO: 1561492
agugauauaaugcagugau

SEQ ID NO: 1675922 - RNA, 19 nt, Artificial Sequence
  Description of Artificial Sequence: Synthetic oligonucleotide
  Antisense strand to SEQ ID NO: 1675921
aucacugcauuauaucacu

SEQ ID NO: 1675923 - RNA, 19 nt, Artificial Sequence
  Description of Artificial Sequence: Synthetic oligonucleotide
  Sense strand starting at position 774 of SEQ ID NO: 1561492
aguauacauguguauaaca

SEQ ID NO: 1675924 - RNA, 19 nt, Artificial Sequence
  Description of Artificial Sequence: Synthetic oligonucleotide
  Antisense strand to SEQ ID NO: 1675923
uguuauacacauguauacu

SEQ ID NO: 1675925 - RNA, 19 nt, Artificial Sequence
  Description of Artificial Sequence: Synthetic oligonucleotide
  Sense strand starting at position 813 of SEQ ID NO: 1561492
ucuuauuacacgugagagg

SEQ ID NO: 1675926 - RNA, 19 nt, Artificial Sequence
  Description of Artificial Sequence: Synthetic oligonucleotide
  Antisense strand to SEQ ID NO: 1675925
ccucucacguguaauaaga

SEQ ID NO: 1675927 - RNA, 19 nt, Artificial Sequence
  Description of Artificial Sequence: Synthetic oligonucleotide
  Sense strand starting at position 1113 of SEQ ID NO: 1561492
uugguauaagcuugaauug

SEQ ID NO: 1675928 - RNA, 19 nt, Artificial Sequence
  Description of Artificial Sequence: Synthetic oligonucleotide
  Antisense strand to SEQ ID NO: 1675927
caauucaagcuuauaccaa

SEQ ID NO: 1675929 - RNA, 19 nt, Artificial Sequence
  Description of Artificial Sequence: Synthetic oligonucleotide
  Sense strand starting at position 1114 of SEQ ID NO: 1561492
ugguauaagcuugaauugu

SEQ ID NO: 1675930 - RNA, 19 nt, Artificial Sequence
  Description of Artificial Sequence: Synthetic oligonucleotide
  Antisense strand to SEQ ID NO: 1675929
acaauucaagcuuauacca

SEQ ID NO: 1675931 - RNA, 19 nt, Artificial Sequence
  Description of Artificial Sequence: Synthetic oligonucleotide
  Sense strand starting at position 1552 of SEQ ID NO: 1561492
uccagaguugaguacuuua

SEQ ID NO: 1675932 - RNA, 19 nt, Artificial Sequence
  Description of Artificial Sequence: Synthetic oligonucleotide
  Antisense strand to SEQ ID NO: 1675931
uaaaguacucaacucugga

SEQ ID NO: 1675933 - RNA, 19 nt, Artificial Sequence
  Description of Artificial Sequence: Synthetic oligonucleotide
  Sense strand starting at position 1555 of SEQ ID NO: 1561492
agaguugaguacuuuaccu

SEQ ID NO: 1675934 - RNA, 19 nt, Artificial Sequence
  Description of Artificial Sequence: Synthetic oligonucleotide
  Antisense strand to SEQ ID NO: 1675933
agguaaaguacucaacucu

SEQ ID NO: 1675935 - RNA, 19 nt, Artificial Sequence
  Description of Artificial Sequence: Synthetic oligonucleotide
  Sense strand starting at position 1576 of SEQ ID NO: 1561492
cucuguaauuaagcagaca

SEQ ID NO: 1675936 - RNA, 19 nt, Artificial Sequence
  Description of Artificial Sequence: Synthetic oligonucleotide
  Antisense strand to SEQ ID NO: 1675935
ugucugcuuaauuacagag

SEQ ID NO: 1675937 - RNA, 19 nt, Artificial Sequence
  Description of Artificial Sequence: Synthetic oligonucleotide
  Sense strand starting at position 1930 of SEQ ID NO: 1561492
ugauuacaguccucaccga

SEQ ID NO: 1675938 - RNA, 19 nt, Artificial Sequence
  Description of Artificial Sequence: Synthetic oligonucleotide
  Antisense strand to SEQ ID NO: 1675937
ucggugaggacuguaauca

SEQ ID NO: 1675939 - RNA, 19 nt, Artificial Sequence
  Description of Artificial Sequence: Synthetic oligonucleotide
  Sense strand starting at position 1931 of SEQ ID NO: 1561492
gauuacaguccucaccgau

SEQ ID NO: 1675940 - RNA, 19 nt, Artificial Sequence
  Description of Artificial Sequence: Synthetic oligonucleotide
  Antisense strand to SEQ ID NO: 1675939
aucggugaggacuguaauc

SEQ ID NO: 1675941 - RNA, 19 nt, Artificial Sequence
  Description of Artificial Sequence: Synthetic oligonucleotide
  Sense strand starting at position 2048 of SEQ ID NO: 1561492
ugagaaauccgucacaauc

SEQ ID NO: 1675942 - RNA, 19 nt, Artificial Sequence
  Description of Artificial Sequence: Synthetic oligonucleotide
  Antisense strand to SEQ ID NO: 1675941
gauugugacggauuucuca

SEQ ID NO: 1675943 - RNA, 19 nt, Artificial Sequence
  Description of Artificial Sequence: Synthetic oligonucleotide
  Sense strand starting at position 2166 of SEQ ID NO: 1561492
cccaaucgugaucaaccaa

SEQ ID NO: 1675944 - RNA, 19 nt, Artificial Sequence
  Description of Artificial Sequence: Synthetic oligonucleotide
  Antisense strand to SEQ ID NO: 1675943
uugguugaucacgauuggg

SEQ ID NO: 1675945 - RNA, 19 nt, Artificial Sequence
  Description of Artificial Sequence: Synthetic oligonucleotide
  Sense strand starting at position 2199 of SEQ ID NO: 1561492
uuuaucgguauuggaauau

SEQ ID NO: 1675946 - RNA, 19 nt, Artificial Sequence
  Description of Artificial Sequence: Synthetic oligonucleotide
  Antisense strand to SEQ ID NO: 1675945
auauuccaauaccgauaaa

SEQ ID NO: 1675947 - RNA, 19 nt, Artificial Sequence
  Description of Artificial Sequence: Synthetic oligonucleotide
  Sense strand starting at position 2317 of SEQ ID NO: 1561492
gcaugcucugaauaaacuu

SEQ ID NO: 1675948 - RNA, 19 nt, Artificial Sequence
  Description of Artificial Sequence: Synthetic oligonucleotide
  Antisense strand to SEQ ID NO: 1675947
aaguuuauucagagcaugc

SEQ ID NO: 1675949 - RNA, 19 nt, Artificial Sequence
  Description of Artificial Sequence: Synthetic oligonucleotide
  Sense strand starting at position 2343 of SEQ ID NO: 1561492
aguuuccucgaacagucaa

SEQ ID NO: 1675950 - RNA, 19 nt, Artificial Sequence
  Description of Artificial Sequence: Synthetic oligonucleotide
  Antisense strand to SEQ ID NO: 1675949
uugacuguucgaggaaacu

SEQ ID NO: 1675951 - RNA, 19 nt, Artificial Sequence
  Description of Artificial Sequence: Synthetic oligonucleotide
  Sense strand starting at position 2467 of SEQ ID NO: 1561492
auauccauuccguagagca

SEQ ID NO: 1675952 - RNA, 19 nt, Artificial Sequence
  Description of Artificial Sequence: Synthetic oligonucleotide
  Antisense strand to SEQ ID NO: 1675951
ugcucuacggaauggauau

SEQ ID NO: 1675953 - RNA, 19 nt, Artificial Sequence
  Description of Artificial Sequence: Synthetic oligonucleotide
  Sense strand starting at position 2823 of SEQ ID NO: 1561492
gagucaucucuugagugaa

SEQ ID NO: 1675954 - RNA, 19 nt, Artificial Sequence
  Description of Artificial Sequence: Synthetic oligonucleotide
  Antisense strand to SEQ ID NO: 1675953
uucacucaagagaugacuc

SEQ ID NO: 1675955 - RNA, 19 nt, Artificial Sequence
  Description of Artificial Sequence: Synthetic oligonucleotide
  Sense strand starting at position 2825 of SEQ ID NO: 1561492
gucaucucuugagugaaac

SEQ ID NO: 1675956 - RNA, 19 nt, Artificial Sequence
  Description of Artificial Sequence: Synthetic oligonucleotide
  Antisense strand to SEQ ID NO: 1675955
guuucacucaagagaugac

SEQ ID NO: 1675957 - RNA, 19 nt, Artificial Sequence
  Description of Artificial Sequence: Synthetic oligonucleotide
  Sense strand starting at position 2913 of SEQ ID NO: 1561492
gagaaaccgccuugggaaa

SEQ ID NO: 1675958 - RNA, 19 nt, Artificial Sequence
  Description of Artificial Sequence: Synthetic oligonucleotide
  Antisense strand to SEQ ID NO: 1675957
uuucccaaggcgguuucuc

SEQ ID NO: 1675959 - RNA, 19 nt, Artificial Sequence
  Description of Artificial Sequence: Synthetic oligonucleotide
  Sense strand starting at position 2933 of SEQ ID NO: 1561492
aggguagaaguccaauagu

SEQ ID NO: 1675960 - RNA, 19 nt, Artificial Sequence
  Description of Artificial Sequence: Synthetic oligonucleotide
  Antisense strand to SEQ ID NO: 1675959
acuauuggacuucuacccu

SEQ ID NO: 1675961 - RNA, 19 nt, Artificial Sequence
  Description of Artificial Sequence: Synthetic oligonucleotide
  Sense strand starting at position 2936 of SEQ ID NO: 1561492
guagaaguccaauaguauu

SEQ ID NO: 1675962 - RNA, 19 nt, Artificial Sequence
  Description of Artificial Sequence: Synthetic oligonucleotide
  Antisense strand to SEQ ID NO: 1675961
aauacuauuggacuucuac

SEQ ID NO: 1675963 - RNA, 19 nt, Artificial Sequence
  Description of Artificial Sequence: Synthetic oligonucleotide
  Sense strand starting at position 3097 of SEQ ID NO: 1561492
uauaguaggcagcaauaau

SEQ ID NO: 1675964 - RNA, 19 nt, Artificial Sequence
  Description of Artificial Sequence: Synthetic oligonucleotide
  Antisense strand to SEQ ID NO: 1675963
auuauugcugccuacuaua

SEQ ID NO: 1675965 - RNA, 19 nt, Artificial Sequence
  Description of Artificial Sequence: Synthetic oligonucleotide
  Sense strand starting at position 3122 of SEQ ID NO: 1561492
acuaauagucuuuaguaug

SEQ ID NO: 1675966 - RNA, 19 nt, Artificial Sequence
  Description of Artificial Sequence: Synthetic oligonucleotide
  Antisense strand to SEQ ID NO: 1675965
cauacuaaagacuauuagu

SEQ ID NO: 1675967 - RNA, 19 nt, Artificial Sequence
  Description of Artificial Sequence: Synthetic oligonucleotide
  Sense strand starting at position 3220 of SEQ ID NO: 1561492
uuaccaugucaaugaagcu

SEQ ID NO: 1675968 - RNA, 19 nt, Artificial Sequence
  Description of Artificial Sequence: Synthetic oligonucleotide
  Antisense strand to SEQ ID NO: 1675967
agcuucauugacaugguaa

SEQ ID NO: 1675969 - RNA, 19 nt, Artificial Sequence
  Description of Artificial Sequence: Synthetic oligonucleotide
  Sense strand starting at position 3392 of SEQ ID NO: 1561492
ggaaguucuaccugaacag

SEQ ID NO: 1675970 - RNA, 19 nt, Artificial Sequence
  Description of Artificial Sequence: Synthetic oligonucleotide
  Antisense strand to SEQ ID NO: 1675969
cuguucagguagaacuucc

SEQ ID NO: 1675971 - RNA, 19 nt, Artificial Sequence
  Description of Artificial Sequence: Synthetic oligonucleotide
  Sense strand starting at position 3393 of SEQ ID NO: 1561492
gaaguucuaccugaacagu

SEQ ID NO: 1675972 - RNA, 19 nt, Artificial Sequence
  Description of Artificial Sequence: Synthetic oligonucleotide
  Antisense strand to SEQ ID NO: 1675971
acuguucagguagaacuuc

SEQ ID NO: 1675973 - RNA, 19 nt, Artificial Sequence
  Description of Artificial Sequence: Synthetic oligonucleotide
  Sense strand starting at position 3416 of SEQ ID NO: 1561492
ggaaauuacuacccaaugu

SEQ ID NO: 1675974 - RNA, 19 nt, Artificial Sequence
  Description of Artificial Sequence: Synthetic oligonucleotide
  Antisense strand to SEQ ID NO: 1675973
acauuggguaguaauuucc

SEQ ID NO: 1675975 - RNA, 19 nt, Artificial Sequence
  Description of Artificial Sequence: Synthetic oligonucleotide
  Sense strand starting at position 3559 of SEQ ID NO: 1561492
agaauuagacucugcugau

SEQ ID NO: 1675976 - RNA, 19 nt, Artificial Sequence
  Description of Artificial Sequence: Synthetic oligonucleotide
  Antisense strand to SEQ ID NO: 1675975
aucagcagagucuaauucu

SEQ ID NO: 1675977 - RNA, 19 nt, Artificial Sequence
  Description of Artificial Sequence: Synthetic oligonucleotide
  Sense strand starting at position 3585 of SEQ ID NO: 1561492
uuucuuucuucuccgaaag

SEQ ID NO: 1675978 - RNA, 19 nt, Artificial Sequence
  Description of Artificial Sequence: Synthetic oligonucleotide
  Antisense strand to SEQ ID NO: 1675977
cuuucggagaagaaagaaa

SEQ ID NO: 1675979 - RNA, 19 nt, Artificial Sequence
  Description of Artificial Sequence: Synthetic oligonucleotide
  Sense strand starting at position 3624 of SEQ ID NO: 1561492
guggaaguccguuaguaaa

SEQ ID NO: 1675980 - RNA, 19 nt, Artificial Sequence
  Description of Artificial Sequence: Synthetic oligonucleotide
  Antisense strand to SEQ ID NO: 1675979
uuuacuaacggacuuccac

SEQ ID NO: 1675981 - RNA, 19 nt, Artificial Sequence
  Description of Artificial Sequence: Synthetic oligonucleotide
  Sense strand starting at position 3626 of SEQ ID NO: 1561492
ggaaguccguuaguaaaca

SEQ ID NO: 1675982 - RNA, 19 nt, Artificial Sequence
  Description of Artificial Sequence: Synthetic oligonucleotide
  Antisense strand to SEQ ID NO: 1675981
uguuuacuaacggacuucc

SEQ ID NO: 1675983 - RNA, 19 nt, Artificial Sequence
  Description of Artificial Sequence: Synthetic oligonucleotide
  Sense strand starting at position 3662 of SEQ ID NO: 1561492
ggcuaagaauuacuguuga

SEQ ID NO: 1675984 - RNA, 19 nt, Artificial Sequence
  Description of Artificial Sequence: Synthetic oligonucleotide
  Antisense strand to SEQ ID NO: 1675983
ucaacaguaauucuuagcc

SEQ ID NO: 1675985 - RNA, 19 nt, Artificial Sequence
  Description of Artificial Sequence: Synthetic oligonucleotide
  Sense strand starting at position 3727 of SEQ ID NO: 1561492
uagggauucguguggaaau

SEQ ID NO: 1675986 - RNA, 19 nt, Artificial Sequence
  Description of Artificial Sequence: Synthetic oligonucleotide
  Antisense strand to SEQ ID NO: 1675985
auuuccacacgaaucccua

SEQ ID NO: 1675987 - RNA, 19 nt, Artificial Sequence
  Description of Artificial Sequence: Synthetic oligonucleotide
  Sense strand starting at position 3729 of SEQ ID NO: 1561492
gggauucguguggaaauau

SEQ ID NO: 1675988 - RNA, 19 nt, Artificial Sequence
  Description of Artificial Sequence: Synthetic oligonucleotide
  Antisense strand to SEQ ID NO: 1675987
auauuuccacacgaauccc

SEQ ID NO: 1675989 - RNA, 19 nt, Artificial Sequence
  Description of Artificial Sequence: Synthetic oligonucleotide
  Sense strand starting at position 3740 of SEQ ID NO: 1561492
ggaaauauuuaugggugga

SEQ ID NO: 1675990 - RNA, 19 nt, Artificial Sequence
  Description of Artificial Sequence: Synthetic oligonucleotide
  Antisense strand to SEQ ID NO: 1675989
uccacccauaaauauuucc

SEQ ID NO: 1675991 - RNA, 19 nt, Artificial Sequence
  Description of Artificial Sequence: Synthetic oligonucleotide
  Sense strand starting at position 3844 of SEQ ID NO: 1561492
aauguuaaagcagagugau

SEQ ID NO: 1675992 - RNA, 19 nt, Artificial Sequence
  Description of Artificial Sequence: Synthetic oligonucleotide
  Antisense strand to SEQ ID NO: 1675991
aucacucugcuuuaacauu

SEQ ID NO: 1675993 - RNA, 19 nt, Artificial Sequence
  Description of Artificial Sequence: Synthetic oligonucleotide
  Sense strand starting at position 3847 of SEQ ID NO: 1561492
guuaaagcagagugauaag

SEQ ID NO: 1675994 - RNA, 19 nt, Artificial Sequence
  Description of Artificial Sequence: Synthetic oligonucleotide
  Antisense strand to SEQ ID NO: 1675993
cuuaucacucugcuuuaac

SEQ ID NO: 1675995 - RNA, 19 nt, Artificial Sequence
  Description of Artificial Sequence: Synthetic oligonucleotide
  Sense strand starting at position 3885 of SEQ ID NO: 1561492
uguucucuuccauaguauu

SEQ ID NO: 1675996 - RNA, 19 nt, Artificial Sequence
  Description of Artificial Sequence: Synthetic oligonucleotide
  Antisense strand to SEQ ID NO: 1675995
aauacuauggaagagaaca

SEQ ID NO: 1675997 - RNA, 19 nt, Artificial Sequence
  Description of Artificial Sequence: Synthetic oligonucleotide
  Sense strand starting at position 3892 of SEQ ID NO: 1561492
uuccauaguauuuguguga

SEQ ID NO: 1675998 - RNA, 19 nt, Artificial Sequence
  Description of Artificial Sequence: Synthetic oligonucleotide
  Antisense strand to SEQ ID NO: 1675997
ucacacaaauacuauggaa

SEQ ID NO: 1675999 - RNA, 19 nt, Artificial Sequence
  Description of Artificial Sequence: Synthetic oligonucleotide
  Sense strand starting at position 4 of SEQ ID NO: 1561493
uuguaauguuaacucuaag

SEQ ID NO: 1676000 - RNA, 19 nt, Artificial Sequence
  Description of Artificial Sequence: Synthetic oligonucleotide
  Antisense strand to SEQ ID NO: 1675999
cuuagaguuaacauuacaa

SEQ ID NO: 1676001 - RNA, 19 nt, Artificial Sequence
  Description of Artificial Sequence: Synthetic oligonucleotide
  Sense strand starting at position 455 of SEQ ID NO: 1561493
gacaacauccacuguugga

SEQ ID NO: 1676002 - RNA, 19 nt, Artificial Sequence
  Description of Artificial Sequence: Synthetic oligonucleotide
  Antisense strand to SEQ ID NO: 1676001
uccaacaguggauguuguc

SEQ ID NO: 1676003 - RNA, 19 nt, Artificial Sequence
  Description of Artificial Sequence: Synthetic oligonucleotide
  Sense strand starting at position 498 of SEQ ID NO: 1561493
uaaauuauugguugaagcu

SEQ ID NO: 1676004 - RNA, 19 nt, Artificial Sequence
  Description of Artificial Sequence: Synthetic oligonucleotide
  Antisense strand to SEQ ID NO: 1676003
agcuucaaccaauaauuua

SEQ ID NO: 1676005 - RNA, 19 nt, Artificial Sequence
  Description of Artificial Sequence: Synthetic oligonucleotide
  Sense strand starting at position 499 of SEQ ID NO: 1561493
aaauuauugguugaagcuu

SEQ ID NO: 1676006 - RNA, 19 nt, Artificial Sequence
  Description of Artificial Sequence: Synthetic oligonucleotide
  Antisense strand to SEQ ID NO: 1676005
aagcuucaaccaauaauuu

SEQ ID NO: 1676007 - RNA, 19 nt, Artificial Sequence
  Description of Artificial Sequence: Synthetic oligonucleotide
  Sense strand starting at position 515 of SEQ ID NO: 1561493
cuugaauugcuauaauguc

SEQ ID NO: 1676008 - RNA, 19 nt, Artificial Sequence
  Description of Artificial Sequence: Synthetic oligonucleotide
  Antisense strand to SEQ ID NO: 1676007
gacauuauagcaauucaag

SEQ ID NO: 1676009 - RNA, 19 nt, Artificial Sequence
  Description of Artificial Sequence: Synthetic oligonucleotide
  Sense strand starting at position 540 of SEQ ID NO: 1561493
gcuauuuagucauaucuau

SEQ ID NO: 1676010 - RNA, 19 nt, Artificial Sequence
  Description of Artificial Sequence: Synthetic oligonucleotide
  Antisense strand to SEQ ID NO: 1676009
auagauaugacuaaauagc

SEQ ID NO: 1676011 - RNA, 19 nt, Artificial Sequence
  Description of Artificial Sequence: Synthetic oligonucleotide
  Sense strand starting at position 947 of SEQ ID NO: 1561493
uuuccaaugugaguaguuu

SEQ ID NO: 1676012 - RNA, 19 nt, Artificial Sequence
  Description of Artificial Sequence: Synthetic oligonucleotide
  Antisense strand to SEQ ID NO: 1676011
aaacuacucacauuggaaa

SEQ ID NO: 1676013 - RNA, 19 nt, Artificial Sequence
  Description of Artificial Sequence: Synthetic oligonucleotide
  Sense strand starting at position 948 of SEQ ID NO: 1561493
uuccaaugugaguaguuua

SEQ ID NO: 1676014 - RNA, 19 nt, Artificial Sequence
  Description of Artificial Sequence: Synthetic oligonucleotide
  Antisense strand to SEQ ID NO: 1676013
uaaacuacucacauuggaa

SEQ ID NO: 1676015 - RNA, 19 nt, Artificial Sequence
  Description of Artificial Sequence: Synthetic oligonucleotide
  Sense strand starting at position 951 of SEQ ID NO: 1561493
caaugugaguaguuuaccu

SEQ ID NO: 1676016 - RNA, 19 nt, Artificial Sequence
  Description of Artificial Sequence: Synthetic oligonucleotide
  Antisense strand to SEQ ID NO: 1676015
agguaaacuacucacauug

SEQ ID NO: 1676017 - RNA, 19 nt, Artificial Sequence
  Description of Artificial Sequence: Synthetic oligonucleotide
  Sense strand starting at position 980 of SEQ ID NO: 1561493
aauaaucugugaggagaua

SEQ ID NO: 1676018 - RNA, 19 nt, Artificial Sequence
  Description of Artificial Sequence: Synthetic oligonucleotide
  Antisense strand to SEQ ID NO: 1676017
uaucuccucacagauuauu

SEQ ID NO: 1676019 - RNA, 19 nt, Artificial Sequence
  Description of Artificial Sequence: Synthetic oligonucleotide
  Sense strand starting at position 1068 of SEQ ID NO: 1561493
uguaauagaugugacauuu

SEQ ID NO: 1676020 - RNA, 19 nt, Artificial Sequence
  Description of Artificial Sequence: Synthetic oligonucleotide
  Antisense strand to SEQ ID NO: 1676019
aaaugucacaucuauuaca

SEQ ID NO: 1676021 - RNA, 19 nt, Artificial Sequence
  Description of Artificial Sequence: Synthetic oligonucleotide
  Sense strand starting at position 1546 of SEQ ID NO: 1561493
auacgaaacugcuacacau

SEQ ID NO: 1676022 - RNA, 19 nt, Artificial Sequence
  Description of Artificial Sequence: Synthetic oligonucleotide
  Antisense strand to SEQ ID NO: 1676021
auguguagcaguuucguau

SEQ ID NO: 1676023 - RNA, 19 nt, Artificial Sequence
  Description of Artificial Sequence: Synthetic oligonucleotide
  Sense strand starting at position 1758 of SEQ ID NO: 1561493
ccgagaaaucccugucaca

SEQ ID NO: 1676024 - RNA, 19 nt, Artificial Sequence
  Description of Artificial Sequence: Synthetic oligonucleotide
  Antisense strand to SEQ ID NO: 1676023
ugugacagggauuucucgg

SEQ ID NO: 1676025 - RNA, 19 nt, Artificial Sequence
  Description of Artificial Sequence: Synthetic oligonucleotide
  Sense strand starting at position 1903 of SEQ ID NO: 1561493
cagagaccucucggcauua

SEQ ID NO: 1676026 - RNA, 19 nt, Artificial Sequence
  Description of Artificial Sequence: Synthetic oligonucleotide
  Antisense strand to SEQ ID NO: 1676025
uaaugccgagaggucucug

SEQ ID NO: 1676027 - RNA, 19 nt, Artificial Sequence
  Description of Artificial Sequence: Synthetic oligonucleotide
  Sense strand starting at position 1904 of SEQ ID NO: 1561493
agagaccucucggcauuaa

SEQ ID NO: 1676028 - RNA, 19 nt, Artificial Sequence
  Description of Artificial Sequence: Synthetic oligonucleotide
  Antisense strand to SEQ ID NO: 1676027
uuaaugccgagaggucucu

SEQ ID NO: 1676029 - RNA, 19 nt, Artificial Sequence
  Description of Artificial Sequence: Synthetic oligonucleotide
  Sense strand starting at position 1905 of SEQ ID NO: 1561493
gagaccucucggcauuaaa

SEQ ID NO: 1676030 - RNA, 19 nt, Artificial Sequence
  Description of Artificial Sequence: Synthetic oligonucleotide
  Antisense strand to SEQ ID NO: 1676029
uuuaaugccgagaggucuc

SEQ ID NO: 1676031 - RNA, 19 nt, Artificial Sequence
  Description of Artificial Sequence: Synthetic oligonucleotide
  Sense strand starting at position 2017 of SEQ ID NO: 1561493
ugauauugcgcaugcucua

SEQ ID NO: 1676032 - RNA, 19 nt, Artificial Sequence
  Description of Artificial Sequence: Synthetic oligonucleotide
  Antisense strand to SEQ ID NO: 1676031
uagagcaugcgcaauauca

SEQ ID NO: 1676033 - RNA, 19 nt, Artificial Sequence
  Description of Artificial Sequence: Synthetic oligonucleotide
  Sense strand starting at position 2022 of SEQ ID NO: 1561493
uugcgcaugcucuaaauua

SEQ ID NO: 1676034 - RNA, 19 nt, Artificial Sequence
  Description of Artificial Sequence: Synthetic oligonucleotide
  Antisense strand to SEQ ID NO: 1676033
uaauuuagagcaugcgcaa

SEQ ID NO: 1676035 - RNA, 19 nt, Artificial Sequence
  Description of Artificial Sequence: Synthetic oligonucleotide
  Sense strand starting at position 2030 of SEQ ID NO: 1561493
gcucuaaauuaacuuggaa

SEQ ID NO: 1676036 - RNA, 19 nt, Artificial Sequence
  Description of Artificial Sequence: Synthetic oligonucleotide
  Antisense strand to SEQ ID NO: 1676035
uuccaaguuaauuuagagc

SEQ ID NO: 1676037 - RNA, 19 nt, Artificial Sequence
  Description of Artificial Sequence: Synthetic oligonucleotide
  Sense strand starting at position 2175 of SEQ ID NO: 1561493
caucuuugaugcguaucga

SEQ ID NO: 1676038 - RNA, 19 nt, Artificial Sequence
  Description of Artificial Sequence: Synthetic oligonucleotide
  Antisense strand to SEQ ID NO: 1676037
ucgauacgcaucaaagaug

SEQ ID NO: 1676039 - RNA, 19 nt, Artificial Sequence
  Description of Artificial Sequence: Synthetic oligonucleotide
  Sense strand starting at position 2176 of SEQ ID NO: 1561493
aucuuugaugcguaucgau

SEQ ID NO: 1676040 - RNA, 19 nt, Artificial Sequence
  Description of Artificial Sequence: Synthetic oligonucleotide
  Antisense strand to SEQ ID NO: 1676039
aucgauacgcaucaaagau

SEQ ID NO: 1676041 - RNA, 19 nt, Artificial Sequence
  Description of Artificial Sequence: Synthetic oligonucleotide
  Sense strand starting at position 2184 of SEQ ID NO: 1561493
ugcguaucgauuccguaca

SEQ ID NO: 1676042 - RNA, 19 nt, Artificial Sequence
  Description of Artificial Sequence: Synthetic oligonucleotide
  Antisense strand to SEQ ID NO: 1676041
uguacggaaucgauacgca

SEQ ID NO: 1676043 - RNA, 19 nt, Artificial Sequence
  Description of Artificial Sequence: Synthetic oligonucleotide
  Sense strand starting at position 2221 of SEQ ID NO: 1561493
uggaguguugacuagagua

SEQ ID NO: 1676044 - RNA, 19 nt, Artificial Sequence
  Description of Artificial Sequence: Synthetic oligonucleotide
  Antisense strand to SEQ ID NO: 1676043
uacucuagucaacacucca

SEQ ID NO: 1676045 - RNA, 19 nt, Artificial Sequence
  Description of Artificial Sequence: Synthetic oligonucleotide
  Sense strand starting at position 2223 of SEQ ID NO: 1561493
gaguguugacuagaguaag

SEQ ID NO: 1676046 - RNA, 19 nt, Artificial Sequence
  Description of Artificial Sequence: Synthetic oligonucleotide
  Antisense strand to SEQ ID NO: 1676045
cuuacucuagucaacacuc

SEQ ID NO: 1676047 - RNA, 19 nt, Artificial Sequence
  Description of Artificial Sequence: Synthetic oligonucleotide
  Sense strand starting at position 2284 of SEQ ID NO: 1561493
ccacgcuuguacccaagaa

SEQ ID NO: 1676048 - RNA, 19 nt, Artificial Sequence
  Description of Artificial Sequence: Synthetic oligonucleotide
  Antisense strand to SEQ ID NO: 1676047
uucuuggguacaagcgugg

SEQ ID NO: 1676049 - RNA, 19 nt, Artificial Sequence
  Description of Artificial Sequence: Synthetic oligonucleotide
  Sense strand starting at position 2299 of SEQ ID NO: 1561493
agaagaaguuccugaagau

SEQ ID NO: 1676050 - RNA, 19 nt, Artificial Sequence
  Description of Artificial Sequence: Synthetic oligonucleotide
  Antisense strand to SEQ ID NO: 1676049
aucuucaggaacuucuucu

SEQ ID NO: 1676051 - RNA, 19 nt, Artificial Sequence
  Description of Artificial Sequence: Synthetic oligonucleotide
  Sense strand starting at position 2638 of SEQ ID NO: 1561493
cgccuccggcuguuauauu

SEQ ID NO: 1676052 - RNA, 19 nt, Artificial Sequence
  Description of Artificial Sequence: Synthetic oligonucleotide
  Antisense strand to SEQ ID NO: 1676051
aauauaacagccggaggcg

SEQ ID NO: 1676053 - RNA, 19 nt, Artificial Sequence
  Description of Artificial Sequence: Synthetic oligonucleotide
  Sense strand starting at position 2703 of SEQ ID NO: 1561493
acgauuuacuaggagaaac

SEQ ID NO: 1676054 - RNA, 19 nt, Artificial Sequence
  Description of Artificial Sequence: Synthetic oligonucleotide
  Antisense strand to SEQ ID NO: 1676053
guuucuccuaguaaaucgu

SEQ ID NO: 1676055 - RNA, 19 nt, Artificial Sequence
  Description of Artificial Sequence: Synthetic oligonucleotide
  Sense strand starting at position 2741 of SEQ ID NO: 1561493
cagggauccugagagaaau

SEQ ID NO: 1676056 - RNA, 19 nt, Artificial Sequence
  Description of Artificial Sequence: Synthetic oligonucleotide
  Antisense strand to SEQ ID NO: 1676055
auuucucucaggaucccug

SEQ ID NO: 1676057 - RNA, 19 nt, Artificial Sequence
  Description of Artificial Sequence: Synthetic oligonucleotide
  Sense strand starting at position 2867 of SEQ ID NO: 1561493
gcaagacggaguuauguca

SEQ ID NO: 1676058 - RNA, 19 nt, Artificial Sequence
  Description of Artificial Sequence: Synthetic oligonucleotide
  Antisense strand to SEQ ID NO: 1676057
ugacauaacuccgucuugc

SEQ ID NO: 1676059 - RNA, 19 nt, Artificial Sequence
  Description of Artificial Sequence: Synthetic oligonucleotide
  Sense strand starting at position 2891 of SEQ ID NO: 1561493
gguaguauccugcaggaag

SEQ ID NO: 1676060 - RNA, 19 nt, Artificial Sequence
  Description of Artificial Sequence: Synthetic oligonucleotide
  Antisense strand to SEQ ID NO: 1676059
cuuccugcaggauacuacc

SEQ ID NO: 1676061 - RNA, 19 nt, Artificial Sequence
  Description of Artificial Sequence: Synthetic oligonucleotide
  Sense strand starting at position 2949 of SEQ ID NO: 1561493
uaggguagaaguuggguua

SEQ ID NO: 1676062 - RNA, 19 nt, Artificial Sequence
  Description of Artificial Sequence: Synthetic oligonucleotide
  Antisense strand to SEQ ID NO: 1676061
uaacccaacuucuacccua

SEQ ID NO: 1676063 - RNA, 19 nt, Artificial Sequence
  Description of Artificial Sequence: Synthetic oligonucleotide
  Sense strand starting at position 2956 of SEQ ID NO: 1561493
gaaguuggguuaguacaau

SEQ ID NO: 1676064 - RNA, 19 nt, Artificial Sequence
  Description of Artificial Sequence: Synthetic oligonucleotide
  Antisense strand to SEQ ID NO: 1676063
auuguacuaacccaacuuc

SEQ ID NO: 1676065 - RNA, 19 nt, Artificial Sequence
  Description of Artificial Sequence: Synthetic oligonucleotide
  Sense strand starting at position 2968 of SEQ ID NO: 1561493
guacaauccucuucuagga

SEQ ID NO: 1676066 - RNA, 19 nt, Artificial Sequence
  Description of Artificial Sequence: Synthetic oligonucleotide
  Antisense strand to SEQ ID NO: 1676065
uccuagaagaggauuguac

SEQ ID NO: 1676067 - RNA, 19 nt, Artificial Sequence
  Description of Artificial Sequence: Synthetic oligonucleotide
  Sense strand starting at position 2970 of SEQ ID NO: 1561493
acaauccucuucuaggaga

SEQ ID NO: 1676068 - RNA, 19 nt, Artificial Sequence
  Description of Artificial Sequence: Synthetic oligonucleotide
  Antisense strand to SEQ ID NO: 1676067
ucuccuagaagaggauugu

SEQ ID NO: 1676069 - RNA, 19 nt, Artificial Sequence
  Description of Artificial Sequence: Synthetic oligonucleotide
  Sense strand starting at position 3002 of SEQ ID NO: 1561493
ggguuagaagucuaagcau

SEQ ID NO: 1676070 - RNA, 19 nt, Artificial Sequence
  Description of Artificial Sequence: Synthetic oligonucleotide
  Antisense strand to SEQ ID NO: 1676069
augcuuagacuucuaaccc

SEQ ID NO: 1676071 - RNA, 19 nt, Artificial Sequence
  Description of Artificial Sequence: Synthetic oligonucleotide
  Sense strand starting at position 3024 of SEQ ID NO: 1561493
cuuugaaacggcugguaga

SEQ ID NO: 1676072 - RNA, 19 nt, Artificial Sequence
  Description of Artificial Sequence: Synthetic oligonucleotide
  Antisense strand to SEQ ID NO: 1676071
ucuaccagccguuucaaag

SEQ ID NO: 1676073 - RNA, 19 nt, Artificial Sequence
  Description of Artificial Sequence: Synthetic oligonucleotide
  Sense strand starting at position 3025 of SEQ ID NO: 1561493
uuugaaacggcugguagaa

SEQ ID NO: 1676074 - RNA, 19 nt, Artificial Sequence
  Description of Artificial Sequence: Synthetic oligonucleotide
  Antisense strand to SEQ ID NO: 1676073
uucuaccagccguuucaaa

SEQ ID NO: 1676075 - RNA, 19 nt, Artificial Sequence
  Description of Artificial Sequence: Synthetic oligonucleotide
  Sense strand starting at position 3044 of SEQ ID NO: 1561493
ggcuuugggagguauagau

SEQ ID NO: 1676076 - RNA, 19 nt, Artificial Sequence
  Description of Artificial Sequence: Synthetic oligonucleotide
  Antisense strand to SEQ ID NO: 1676075
aucuauaccucccaaagcc

SEQ ID NO: 1676077 - RNA, 19 nt, Artificial Sequence
  Description of Artificial Sequence: Synthetic oligonucleotide
  Sense strand starting at position 3981 of SEQ ID NO: 1561493
uuugauugcaaagagaugu

SEQ ID NO: 1676078 - RNA, 19 nt, Artificial Sequence
  Description of Artificial Sequence: Synthetic oligonucleotide
  Antisense strand to SEQ ID NO: 1676077
acaucucuuugcaaucaaa

SEQ ID NO: 1676079 - RNA, 19 nt, Artificial Sequence
  Description of Artificial Sequence: Synthetic oligonucleotide
  Sense strand starting at position 56 of SEQ ID NO: 1561494
guaucaguuccugggugaa

SEQ ID NO: 1676080 - RNA, 19 nt, Artificial Sequence
  Description of Artificial Sequence: Synthetic oligonucleotide
  Antisense strand to SEQ ID NO: 1676079
uucacccaggaacugauac

SEQ ID NO: 1676081 - RNA, 19 nt, Artificial Sequence
  Description of Artificial Sequence: Synthetic oligonucleotide
  Sense strand starting at position 68 of SEQ ID NO: 1561494
gggugaacccuccacaugu

SEQ ID NO: 1676082 - RNA, 19 nt, Artificial Sequence
  Description of Artificial Sequence: Synthetic oligonucleotide
  Antisense strand to SEQ ID NO: 1676081
acauguggaggguucaccc

SEQ ID NO: 1676083 - RNA, 19 nt, Artificial Sequence
  Description of Artificial Sequence: Synthetic oligonucleotide
  Sense strand starting at position 84 of SEQ ID NO: 1561494
uguguuacauuaguugaca

SEQ ID NO: 1676084 - RNA, 19 nt, Artificial Sequence
  Description of Artificial Sequence: Synthetic oligonucleotide
  Antisense strand to SEQ ID NO: 1676083
ugucaacuaauguaacaca

SEQ ID NO: 1676085 - RNA, 19 nt, Artificial Sequence
  Description of Artificial Sequence: Synthetic oligonucleotide
  Sense strand starting at position 85 of SEQ ID NO: 1561494
guguuacauuaguugacag

SEQ ID NO: 1676086 - RNA, 19 nt, Artificial Sequence
  Description of Artificial Sequence: Synthetic oligonucleotide
  Antisense strand to SEQ ID NO: 1676085
cugucaacuaauguaacac

SEQ ID NO: 1676087 - RNA, 19 nt, Artificial Sequence
  Description of Artificial Sequence: Synthetic oligonucleotide
  Sense strand starting at position 190 of SEQ ID NO: 1561494
agaaauggcacuuaagugu

SEQ ID NO: 1676088 - RNA, 19 nt, Artificial Sequence
  Description of Artificial Sequence: Synthetic oligonucleotide
  Antisense strand to SEQ ID NO: 1676087
acacuuaagugccauuucu

SEQ ID NO: 1676089 - RNA, 19 nt, Artificial Sequence
  Description of Artificial Sequence: Synthetic oligonucleotide
  Sense strand starting at position 197 of SEQ ID NO: 1561494
gcacuuaaguguccuagga

SEQ ID NO: 1676090 - RNA, 19 nt, Artificial Sequence
  Description of Artificial Sequence: Synthetic oligonucleotide
  Antisense strand to SEQ ID NO: 1676089
uccuaggacacuuaagugc

SEQ ID NO: 1676091 - RNA, 19 nt, Artificial Sequence
  Description of Artificial Sequence: Synthetic oligonucleotide
  Sense strand starting at position 758 of SEQ ID NO: 1561494
cuggguguugagugagaac

SEQ ID NO: 1676092 - RNA, 19 nt, Artificial Sequence
  Description of Artificial Sequence: Synthetic oligonucleotide
  Antisense strand to SEQ ID NO: 1676091
guucucacucaacacccag

SEQ ID NO: 1676093 - RNA, 19 nt, Artificial Sequence
  Description of Artificial Sequence: Synthetic oligonucleotide
  Sense strand starting at position 800 of SEQ ID NO: 1561494
ugccaagaucuagacaugu

SEQ ID NO: 1676094 - RNA, 19 nt, Artificial Sequence
  Description of Artificial Sequence: Synthetic oligonucleotide
  Antisense strand to SEQ ID NO: 1676093
acaugucuagaucuuggca

SEQ ID NO: 1676095 - RNA, 19 nt, Artificial Sequence
  Description of Artificial Sequence: Synthetic oligonucleotide
  Sense strand starting at position 892 of SEQ ID NO: 1561494
agccaugaggugugccaaa

SEQ ID NO: 1676096 - RNA, 19 nt, Artificial Sequence
  Description of Artificial Sequence: Synthetic oligonucleotide
  Antisense strand to SEQ ID NO: 1676095
uuuggcacaccucauggcu

SEQ ID NO: 1676097 - RNA, 19 nt, Artificial Sequence
  Description of Artificial Sequence: Synthetic oligonucleotide
  Sense strand starting at position 926 of SEQ ID NO: 1561494
aaaugugucugugcucgga

SEQ ID NO: 1676098 - RNA, 19 nt, Artificial Sequence
  Description of Artificial Sequence: Synthetic oligonucleotide
  Antisense strand to SEQ ID NO: 1676097
uccgagcacagacacauuu

SEQ ID NO: 1676099 - RNA, 19 nt, Artificial Sequence
  Description of Artificial Sequence: Synthetic oligonucleotide
  Sense strand starting at position 929 of SEQ ID NO: 1561494
ugugucugugcucggauuu

SEQ ID NO: 1676100 - RNA, 19 nt, Artificial Sequence
  Description of Artificial Sequence: Synthetic oligonucleotide
  Antisense strand to SEQ ID NO: 1676099
aaauccgagcacagacaca

SEQ ID NO: 1676101 - RNA, 19 nt, Artificial Sequence
  Description of Artificial Sequence: Synthetic oligonucleotide
  Sense strand starting at position 935 of SEQ ID NO: 1561494
ugugcucggauuugauaga

SEQ ID NO: 1676102 - RNA, 19 nt, Artificial Sequence
  Description of Artificial Sequence: Synthetic oligonucleotide
  Antisense strand to SEQ ID NO: 1676101
ucuaucaaauccgagcaca

SEQ ID NO: 1676103 - RNA, 19 nt, Artificial Sequence
  Description of Artificial Sequence: Synthetic oligonucleotide
  Sense strand starting at position 952 of SEQ ID NO: 1561494
gacucaggcuucucuguaa

SEQ ID NO: 1676104 - RNA, 19 nt, Artificial Sequence
  Description of Artificial Sequence: Synthetic oligonucleotide
  Antisense strand to SEQ ID NO: 1676103
uuacagagaagccugaguc

SEQ ID NO: 1676105 - RNA, 19 nt, Artificial Sequence
  Description of Artificial Sequence: Synthetic oligonucleotide
  Sense strand starting at position 956 of SEQ ID NO: 1561494
caggcuucucuguaagcuu

SEQ ID NO: 1676106 - RNA, 19 nt, Artificial Sequence
  Description of Artificial Sequence: Synthetic oligonucleotide
  Antisense strand to SEQ ID NO: 1676105
aagcuuacagagaagccug

SEQ ID NO: 1676107 - RNA, 19 nt, Artificial Sequence
  Description of Artificial Sequence: Synthetic oligonucleotide
  Sense strand starting at position 1089 of SEQ ID NO: 1561494
cuguucuuccuucgaacau

SEQ ID NO: 1676108 - RNA, 19 nt, Artificial Sequence
  Description of Artificial Sequence: Synthetic oligonucleotide
  Antisense strand to SEQ ID NO: 1676107
auguucgaaggaagaacag

SEQ ID NO: 1676109 - RNA, 19 nt, Artificial Sequence
  Description of Artificial Sequence: Synthetic oligonucleotide
  Sense strand starting at position 1172 of SEQ ID NO: 1561494
cguccucacagucaaaguu

SEQ ID NO: 1676110 - RNA, 19 nt, Artificial Sequence
  Description of Artificial Sequence: Synthetic oligonucleotide
  Antisense strand to SEQ ID NO: 1676109
aacuuugacugugaggacg

SEQ ID NO: 1676111 - RNA, 19 nt, Artificial Sequence
  Description of Artificial Sequence: Synthetic oligonucleotide
  Sense strand starting at position 1495 of SEQ ID NO: 1561494
agaaauaacuccguaucac

SEQ ID NO: 1676112 - RNA, 19 nt, Artificial Sequence
  Description of Artificial Sequence: Synthetic oligonucleotide
  Antisense strand to SEQ ID NO: 1676111
gugauacggaguuauuucu

SEQ ID NO: 1676113 - RNA, 19 nt, Artificial Sequence
  Description of Artificial Sequence: Synthetic oligonucleotide
  Sense strand starting at position 1515 of SEQ ID NO: 1561494
cuucuuucccaguagacac

SEQ ID NO: 1676114 - RNA, 19 nt, Artificial Sequence
  Description of Artificial Sequence: Synthetic oligonucleotide
  Antisense strand to SEQ ID NO: 1676113
gugucuacugggaaagaag

SEQ ID NO: 1676115 - RNA, 19 nt, Artificial Sequence
  Description of Artificial Sequence: Synthetic oligonucleotide
  Sense strand starting at position 2002 of SEQ ID NO: 1561494
gccggaaguccuggcuuga

SEQ ID NO: 1676116 - RNA, 19 nt, Artificial Sequence
  Description of Artificial Sequence: Synthetic oligonucleotide
  Antisense strand to SEQ ID NO: 1676115
ucaagccaggacuuccggc

SEQ ID NO: 1676117 - RNA, 19 nt, Artificial Sequence
  Description of Artificial Sequence: Synthetic oligonucleotide
  Sense strand starting at position 2090 of SEQ ID NO: 1561494
gggcggauucuggguaaug

SEQ ID NO: 1676118 - RNA, 19 nt, Artificial Sequence
  Description of Artificial Sequence: Synthetic oligonucleotide
  Antisense strand to SEQ ID NO: 1676117
cauuacccagaauccgccc

SEQ ID NO: 1676119 - RNA, 19 nt, Artificial Sequence
  Description of Artificial Sequence: Synthetic oligonucleotide
  Sense strand starting at position 2091 of SEQ ID NO: 1561494
ggcggauucuggguaaugu

SEQ ID NO: 1676120 - RNA, 19 nt, Artificial Sequence
  Description of Artificial Sequence: Synthetic oligonucleotide
  Antisense strand to SEQ ID NO: 1676119
acauuacccagaauccgcc

SEQ ID NO: 1676121 - RNA, 19 nt, Artificial Sequence
  Description of Artificial Sequence: Synthetic oligonucleotide
  Sense strand starting at position 2092 of SEQ ID NO: 1561494
gcggauucuggguaaugua

SEQ ID NO: 1676122 - RNA, 19 nt, Artificial Sequence
  Description of Artificial Sequence: Synthetic oligonucleotide
  Antisense strand to SEQ ID NO: 1676121
uacauuacccagaauccgc

SEQ ID NO: 1676123 - RNA, 19 nt, Artificial Sequence
  Description of Artificial Sequence: Synthetic oligonucleotide
  Sense strand starting at position 2279 of SEQ ID NO: 1561494
aacugauugcccgcguguu

SEQ ID NO: 1676124 - RNA, 19 nt, Artificial Sequence
  Description of Artificial Sequence: Synthetic oligonucleotide
  Antisense strand to SEQ ID NO: 1676123
aacacgcgggcaaucaguu

SEQ ID NO: 1676125 - RNA, 19 nt, Artificial Sequence
  Description of Artificial Sequence: Synthetic oligonucleotide
  Sense strand starting at position 2583 of SEQ ID NO: 1561494
aagugaucugccugcaaug

SEQ ID NO: 1676126 - RNA, 19 nt, Artificial Sequence
  Description of Artificial Sequence: Synthetic oligonucleotide
  Antisense strand to SEQ ID NO: 1676125
cauugcaggcagaucacuu

SEQ ID NO: 1676127 - RNA, 19 nt, Artificial Sequence
  Description of Artificial Sequence: Synthetic oligonucleotide
  Sense strand starting at position 2585 of SEQ ID NO: 1561494
gugaucugccugcaauggu

SEQ ID NO: 1676128 - RNA, 19 nt, Artificial Sequence
  Description of Artificial Sequence: Synthetic oligonucleotide
  Antisense strand to SEQ ID NO: 1676127
accauugcaggcagaucac

SEQ ID NO: 1676129 - RNA, 19 nt, Artificial Sequence
  Description of Artificial Sequence: Synthetic oligonucleotide
  Sense strand starting at position 2593 of SEQ ID NO: 1561494
ccugcaauggucuaccgaa

SEQ ID NO: 1676130 - RNA, 19 nt, Artificial Sequence
  Description of Artificial Sequence: Synthetic oligonucleotide
  Antisense strand to SEQ ID NO: 1676129
uucgguagaccauugcagg

SEQ ID NO: 1676131 - RNA, 19 nt, Artificial Sequence
  Description of Artificial Sequence: Synthetic oligonucleotide
  Sense strand starting at position 2627 of SEQ ID NO: 1561494
gcgugaaccaccguucuca

SEQ ID NO: 1676132 - RNA, 19 nt, Artificial Sequence
  Description of Artificial Sequence: Synthetic oligonucleotide
  Antisense strand to SEQ ID NO: 1676131
ugagaacggugguucacgc

SEQ ID NO: 1676133 - RNA, 19 nt, Artificial Sequence
  Description of Artificial Sequence: Synthetic oligonucleotide
  Sense strand starting at position 2755 of SEQ ID NO: 1561494
ggcugcgguguucaaacau

SEQ ID NO: 1676134 - RNA, 19 nt, Artificial Sequence
  Description of Artificial Sequence: Synthetic oligonucleotide
  Antisense strand to SEQ ID NO: 1676133
auguuugaacaccgcagcc

SEQ ID NO: 1676135 - RNA, 19 nt, Artificial Sequence
  Description of Artificial Sequence: Synthetic oligonucleotide
  Sense strand starting at position 2774 of SEQ ID NO: 1561494
ggaguauguaugcaugaga

SEQ ID NO: 1676136 - RNA, 19 nt, Artificial Sequence
  Description of Artificial Sequence: Synthetic oligonucleotide
  Antisense strand to SEQ ID NO: 1676135
ucucaugcauacauacucc

SEQ ID NO: 1676137 - RNA, 19 nt, Artificial Sequence
  Description of Artificial Sequence: Synthetic oligonucleotide
  Sense strand starting at position 2777 of SEQ ID NO: 1561494
guauguaugcaugagagaa

SEQ ID NO: 1676138 - RNA, 19 nt, Artificial Sequence
  Description of Artificial Sequence: Synthetic oligonucleotide
  Antisense strand to SEQ ID NO: 1676137
uucucucaugcauacauac

SEQ ID NO: 1676139 - RNA, 19 nt, Artificial Sequence
  Description of Artificial Sequence: Synthetic oligonucleotide
  Sense strand starting at position 2779 of SEQ ID NO: 1561494
auguaugcaugagagaaga

SEQ ID NO: 1676140 - RNA, 19 nt, Artificial Sequence
  Description of Artificial Sequence: Synthetic oligonucleotide
  Antisense strand to SEQ ID NO: 1676139
ucuucucucaugcauacau

SEQ ID NO: 1676141 - RNA, 19 nt, Artificial Sequence
  Description of Artificial Sequence: Synthetic oligonucleotide
  Sense strand starting at position 3310 of SEQ ID NO: 1561494
cuggcaagugcuuaucauu

SEQ ID NO: 1676142 - RNA, 19 nt, Artificial Sequence
  Description of Artificial Sequence: Synthetic oligonucleotide
  Antisense strand to SEQ ID NO: 1676141
aaugauaagcacuugccag

SEQ ID NO: 1676143 - RNA, 19 nt, Artificial Sequence
  Description of Artificial Sequence: Synthetic oligonucleotide
  Sense strand starting at position 3316 of SEQ ID NO: 1561494
agugcuuaucauugucagu

SEQ ID NO: 1676144 - RNA, 19 nt, Artificial Sequence
  Description of Artificial Sequence: Synthetic oligonucleotide
  Antisense strand to SEQ ID NO: 1676143
acugacaaugauaagcacu

SEQ ID NO: 1676145 - RNA, 19 nt, Artificial Sequence
  Description of Artificial Sequence: Synthetic oligonucleotide
  Sense strand starting at position 3321 of SEQ ID NO: 1561494
uuaucauugucaguggcau

SEQ ID NO: 1676146 - RNA, 19 nt, Artificial Sequence
  Description of Artificial Sequence: Synthetic oligonucleotide
  Antisense strand to SEQ ID NO: 1676145
augccacugacaaugauaa

SEQ ID NO: 1676147 - RNA, 19 nt, Artificial Sequence
  Description of Artificial Sequence: Synthetic oligonucleotide
  Sense strand starting at position 3379 of SEQ ID NO: 1561494
aaguaaggcugagaaauac

SEQ ID NO: 1676148 - RNA, 19 nt, Artificial Sequence
  Description of Artificial Sequence: Synthetic oligonucleotide
  Antisense strand to SEQ ID NO: 1676147
guauuucucagccuuacuu

SEQ ID NO: 1676149 - RNA, 19 nt, Artificial Sequence
  Description of Artificial Sequence: Synthetic oligonucleotide
  Sense strand starting at position 3388 of SEQ ID NO: 1561494
ugagaaauacucggcugca

SEQ ID NO: 1676150 - RNA, 19 nt, Artificial Sequence
  Description of Artificial Sequence: Synthetic oligonucleotide
  Antisense strand to SEQ ID NO: 1676149
ugcagccgaguauuucuca

SEQ ID NO: 1676151 - RNA, 19 nt, Artificial Sequence
  Description of Artificial Sequence: Synthetic oligonucleotide
  Sense strand starting at position 3389 of SEQ ID NO: 1561494
gagaaauacucggcugcau

SEQ ID NO: 1676152 - RNA, 19 nt, Artificial Sequence
  Description of Artificial Sequence: Synthetic oligonucleotide
  Antisense strand to SEQ ID NO: 1676151
augcagccgaguauuucuc

SEQ ID NO: 1676153 - RNA, 19 nt, Artificial Sequence
  Description of Artificial Sequence: Synthetic oligonucleotide
  Sense strand starting at position 3391 of SEQ ID NO: 1561494
gaaauacucggcugcauuc

SEQ ID NO: 1676154 - RNA, 19 nt, Artificial Sequence
  Description of Artificial Sequence: Synthetic oligonucleotide
  Antisense strand to SEQ ID NO: 1676153
gaaugcagccgaguauuuc

SEQ ID NO: 1676155 - RNA, 19 nt, Artificial Sequence
  Description of Artificial Sequence: Synthetic oligonucleotide
  Sense strand starting at position 3626 of SEQ ID NO: 1561494
auaccaaugcccuggcaau

SEQ ID NO: 1676156 - RNA, 19 nt, Artificial Sequence
  Description of Artificial Sequence: Synthetic oligonucleotide
  Antisense strand to SEQ ID NO: 1676155
auugccagggcauugguau

SEQ ID NO: 1676157 - RNA, 19 nt, Artificial Sequence
  Description of Artificial Sequence: Synthetic oligonucleotide
  Sense strand starting at position 3684 of SEQ ID NO: 1561494
accucaguucugggaaauc

SEQ ID NO: 1676158 - RNA, 19 nt, Artificial Sequence
  Description of Artificial Sequence: Synthetic oligonucleotide
  Antisense strand to SEQ ID NO: 1676157
gauuucccagaacugaggu

SEQ ID NO: 1676159 - RNA, 19 nt, Artificial Sequence
  Description of Artificial Sequence: Synthetic oligonucleotide
  Sense strand starting at position 7 of SEQ ID NO: 1561495
ugauguucuuccuuugauu

SEQ ID NO: 1676160 - RNA, 19 nt, Artificial Sequence
  Description of Artificial Sequence: Synthetic oligonucleotide
  Antisense strand to SEQ ID NO: 1676159
aaucaaaggaagaacauca

SEQ ID NO: 1676161 - RNA, 19 nt, Artificial Sequence
  Description of Artificial Sequence: Synthetic oligonucleotide
  Sense strand starting at position 98 of SEQ ID NO: 1561495
cuagaauccucaugaugaa

SEQ ID NO: 1676162 - RNA, 19 nt, Artificial Sequence
  Description of Artificial Sequence: Synthetic oligonucleotide
  Antisense strand to SEQ ID NO: 1676161
uucaucaugaggauucuag

SEQ ID NO: 1676163 - RNA, 19 nt, Artificial Sequence
  Description of Artificial Sequence: Synthetic oligonucleotide
  Sense strand starting at position 164 of SEQ ID NO: 1561495
cacguuguuccugacagau

SEQ ID NO: 1676164 - RNA, 19 nt, Artificial Sequence
  Description of Artificial Sequence: Synthetic oligonucleotide
  Antisense strand to SEQ ID NO: 1676163
aucugucaggaacaacgug

SEQ ID NO: 1676165 - RNA, 19 nt, Artificial Sequence
  Description of Artificial Sequence: Synthetic oligonucleotide
  Sense strand starting at position 174 of SEQ ID NO: 1561495
cugacagaugccugugaac

SEQ ID NO: 1676166 - RNA, 19 nt, Artificial Sequence
  Description of Artificial Sequence: Synthetic oligonucleotide
  Antisense strand to SEQ ID NO: 1676165
guucacaggcaucugucag

SEQ ID NO: 1676167 - RNA, 19 nt, Artificial Sequence
  Description of Artificial Sequence: Synthetic oligonucleotide
  Sense strand starting at position 283 of SEQ ID NO: 1561495
gugucagaaacaggugaaa

SEQ ID NO: 1676168 - RNA, 19 nt, Artificial Sequence
  Description of Artificial Sequence: Synthetic oligonucleotide
  Antisense strand to SEQ ID NO: 1676167
uuucaccuguuucugacac

SEQ ID NO: 1676169 - RNA, 19 nt, Artificial Sequence
  Description of Artificial Sequence: Synthetic oligonucleotide
  Sense strand starting at position 325 of SEQ ID NO: 1561495
acgaaauuaugacagugaa

SEQ ID NO: 1676170 - RNA, 19 nt, Artificial Sequence
  Description of Artificial Sequence: Synthetic oligonucleotide
  Antisense strand to SEQ ID NO: 1676169
uucacugucauaauuucgu

SEQ ID NO: 1676171 - RNA, 19 nt, Artificial Sequence
  Description of Artificial Sequence: Synthetic oligonucleotide
  Sense strand starting at position 516 of SEQ ID NO: 1561495
ccugucuuugcaggacuaa

SEQ ID NO: 1676172 - RNA, 19 nt, Artificial Sequence
  Description of Artificial Sequence: Synthetic oligonucleotide
  Antisense strand to SEQ ID NO: 1676171
uuaguccugcaaagacagg

SEQ ID NO: 1676173 - RNA, 19 nt, Artificial Sequence
  Description of Artificial Sequence: Synthetic oligonucleotide
  Sense strand starting at position 951 of SEQ ID NO: 1561495
ugcuuuacaucuuauggaa

SEQ ID NO: 1676174 - RNA, 19 nt, Artificial Sequence
  Description of Artificial Sequence: Synthetic oligonucleotide
  Antisense strand to SEQ ID NO: 1676173
uuccauaagauguaaagca

SEQ ID NO: 1676175 - RNA, 19 nt, Artificial Sequence
  Description of Artificial Sequence: Synthetic oligonucleotide
  Sense strand starting at position 953 of SEQ ID NO: 1561495
cuuuacaucuuauggaaug

SEQ ID NO: 1676176 - RNA, 19 nt, Artificial Sequence
  Description of Artificial Sequence: Synthetic oligonucleotide
  Antisense strand to SEQ ID NO: 1676175
cauuccauaagauguaaag

SEQ ID NO: 1676177 - RNA, 19 nt, Artificial Sequence
  Description of Artificial Sequence: Synthetic oligonucleotide
  Sense strand starting at position 954 of SEQ ID NO: 1561495
uuuacaucuuauggaauga

SEQ ID NO: 1676178 - RNA, 19 nt, Artificial Sequence
  Description of Artificial Sequence: Synthetic oligonucleotide
  Antisense strand to SEQ ID NO: 1676177
ucauuccauaagauguaaa

SEQ ID NO: 1676179 - RNA, 19 nt, Artificial Sequence
  Description of Artificial Sequence: Synthetic oligonucleotide
  Sense strand starting at position 972 of SEQ ID NO: 1561495
acucacgaguucuccuuua

SEQ ID NO: 1676180 - RNA, 19 nt, Artificial Sequence
  Description of Artificial Sequence: Synthetic oligonucleotide
  Antisense strand to SEQ ID NO: 1676179
uaaaggagaacucgugagu

SEQ ID NO: 1676181 - RNA, 19 nt, Artificial Sequence
  Description of Artificial Sequence: Synthetic oligonucleotide
  Sense strand starting at position 977 of SEQ ID NO: 1561495
cgaguucuccuuuacugau

SEQ ID NO: 1676182 - RNA, 19 nt, Artificial Sequence
  Description of Artificial Sequence: Synthetic oligonucleotide
  Antisense strand to SEQ ID NO: 1676181
aucaguaaaggagaacucg

SEQ ID NO: 1676183 - RNA, 19 nt, Artificial Sequence
  Description of Artificial Sequence: Synthetic oligonucleotide
  Sense strand starting at position 1138 of SEQ ID NO: 1561495
augcguauucugucucuuu

SEQ ID NO: 1676184 - RNA, 19 nt, Artificial Sequence
  Description of Artificial Sequence: Synthetic oligonucleotide
  Antisense strand to SEQ ID NO: 1676183
aaagagacagaauacgcau

SEQ ID NO: 1676185 - RNA, 19 nt, Artificial Sequence
  Description of Artificial Sequence: Synthetic oligonucleotide
  Sense strand starting at position 1615 of SEQ ID NO: 1561495
cugugagcgccucaguguu

SEQ ID NO: 1676186 - RNA, 19 nt, Artificial Sequence
  Description of Artificial Sequence: Synthetic oligonucleotide
  Antisense strand to SEQ ID NO: 1676185
aacacugaggcgcucacag

SEQ ID NO: 1676187 - RNA, 19 nt, Artificial Sequence
  Description of Artificial Sequence: Synthetic oligonucleotide
  Sense strand starting at position 1997 of SEQ ID NO: 1561495
ggaaaugccuucuuuccga

SEQ ID NO: 1676188 - RNA, 19 nt, Artificial Sequence
  Description of Artificial Sequence: Synthetic oligonucleotide
  Antisense strand to SEQ ID NO: 1676187
ucggaaagaaggcauuucc

SEQ ID NO: 1676189 - RNA, 19 nt, Artificial Sequence
  Description of Artificial Sequence: Synthetic oligonucleotide
  Sense strand starting at position 2033 of SEQ ID NO: 1561495
ccggcugucguuuaaagca

SEQ ID NO: 1676190 - RNA, 19 nt, Artificial Sequence
  Description of Artificial Sequence: Synthetic oligonucleotide
  Antisense strand to SEQ ID NO: 1676189
ugcuuuaaacgacagccgg

SEQ ID NO: 1676191 - RNA, 19 nt, Artificial Sequence
  Description of Artificial Sequence: Synthetic oligonucleotide
  Sense strand starting at position 2050 of SEQ ID NO: 1561495
cagagcuuucuggguaaug

SEQ ID NO: 1676192 - RNA, 19 nt, Artificial Sequence
  Description of Artificial Sequence: Synthetic oligonucleotide
  Antisense strand to SEQ ID NO: 1676191
cauuacccagaaagcucug

SEQ ID NO: 1676193 - RNA, 19 nt, Artificial Sequence
  Description of Artificial Sequence: Synthetic oligonucleotide
  Sense strand starting at position 2051 of SEQ ID NO: 1561495
agagcuuucuggguaaugu

SEQ ID NO: 1676194 - RNA, 19 nt, Artificial Sequence
  Description of Artificial Sequence: Synthetic oligonucleotide
  Antisense strand to SEQ ID NO: 1676193
acauuacccagaaagcucu

SEQ ID NO: 1676195 - RNA, 19 nt, Artificial Sequence
  Description of Artificial Sequence: Synthetic oligonucleotide
  Sense strand starting at position 2052 of SEQ ID NO: 1561495
gagcuuucuggguaaugua

SEQ ID NO: 1676196 - RNA, 19 nt, Artificial Sequence
  Description of Artificial Sequence: Synthetic oligonucleotide
  Antisense strand to SEQ ID NO: 1676195
uacauuacccagaaagcuc

SEQ ID NO: 1676197 - RNA, 19 nt, Artificial Sequence
  Description of Artificial Sequence: Synthetic oligonucleotide
  Sense strand starting at position 2205 of SEQ ID NO: 1561495
gcauuuaccugagcuaggu

SEQ ID NO: 1676198 - RNA, 19 nt, Artificial Sequence
  Description of Artificial Sequence: Synthetic oligonucleotide
  Antisense strand to SEQ ID NO: 1676197
accuagcucagguaaaugc

SEQ ID NO: 1676199 - RNA, 19 nt, Artificial Sequence
  Description of Artificial Sequence: Synthetic oligonucleotide
  Sense strand starting at position 2313 of SEQ ID NO: 1561495
agagaugacuacuccucuu

SEQ ID NO: 1676200 - RNA, 19 nt, Artificial Sequence
  Description of Artificial Sequence: Synthetic oligonucleotide
  Antisense strand to SEQ ID NO: 1676199
aagaggaguagucaucucu

SEQ ID NO: 1676201 - RNA, 19 nt, Artificial Sequence
  Description of Artificial Sequence: Synthetic oligonucleotide
  Sense strand starting at position 2410 of SEQ ID NO: 1561495
agcgccuucuggguaaagu

SEQ ID NO: 1676202 - RNA, 19 nt, Artificial Sequence
  Description of Artificial Sequence: Synthetic oligonucleotide
  Antisense strand to SEQ ID NO: 1676201
acuuuacccagaaggcgcu

SEQ ID NO: 1676203 - RNA, 19 nt, Artificial Sequence
  Description of Artificial Sequence: Synthetic oligonucleotide
  Sense strand starting at position 2411 of SEQ ID NO: 1561495
gcgccuucuggguaaagua

SEQ ID NO: 1676204 - RNA, 19 nt, Artificial Sequence
  Description of Artificial Sequence: Synthetic oligonucleotide
  Antisense strand to SEQ ID NO: 1676203
uacuuuacccagaaggcgc

SEQ ID NO: 1676205 - RNA, 19 nt, Artificial Sequence
  Description of Artificial Sequence: Synthetic oligonucleotide
  Sense strand starting at position 2458 of SEQ ID NO: 1561495
gguauccuccaagagcaaa

SEQ ID NO: 1676206 - RNA, 19 nt, Artificial Sequence
  Description of Artificial Sequence: Synthetic oligonucleotide
  Antisense strand to SEQ ID NO: 1676205
uuugcucuuggaggauacc

SEQ ID NO: 1676207 - RNA, 19 nt, Artificial Sequence
  Description of Artificial Sequence: Synthetic oligonucleotide
  Sense strand starting at position 2479 of SEQ ID NO: 1561495
gaaugcagaccauguuaca

SEQ ID NO: 1676208 - RNA, 19 nt, Artificial Sequence
  Description of Artificial Sequence: Synthetic oligonucleotide
  Antisense strand to SEQ ID NO: 1676207
uguaacauggucugcauuc

SEQ ID NO: 1676209 - RNA, 19 nt, Artificial Sequence
  Description of Artificial Sequence: Synthetic oligonucleotide
  Sense strand starting at position 2537 of SEQ ID NO: 1561495
gaggaagauuauugauucu

SEQ ID NO: 1676210 - RNA, 19 nt, Artificial Sequence
  Description of Artificial Sequence: Synthetic oligonucleotide
  Antisense strand to SEQ ID NO: 1676209
agaaucaauaaucuuccuc

SEQ ID NO: 1676211 - RNA, 19 nt, Artificial Sequence
  Description of Artificial Sequence: Synthetic oligonucleotide
  Sense strand starting at position 2574 of SEQ ID NO: 1561495
gguaucacaucagacucua

SEQ ID NO: 1676212 - RNA, 19 nt, Artificial Sequence
  Description of Artificial Sequence: Synthetic oligonucleotide
  Antisense strand to SEQ ID NO: 1676211
uagagucugaugugauacc

SEQ ID NO: 1676213 - RNA, 19 nt, Artificial Sequence
  Description of Artificial Sequence: Synthetic oligonucleotide
  Sense strand starting at position 2630 of SEQ ID NO: 1561495
uugagaugcucccaaacuu

SEQ ID NO: 1676214 - RNA, 19 nt, Artificial Sequence
  Description of Artificial Sequence: Synthetic oligonucleotide
  Antisense strand to SEQ ID NO: 1676213
aaguuugggagcaucucaa

SEQ ID NO: 1676215 - RNA, 19 nt, Artificial Sequence
  Description of Artificial Sequence: Synthetic oligonucleotide
  Sense strand starting at position 2660 of SEQ ID NO: 1561495
guggccauaucauuggcau

SEQ ID NO: 1676216 - RNA, 19 nt, Artificial Sequence
  Description of Artificial Sequence: Synthetic oligonucleotide
  Antisense strand to SEQ ID NO: 1676215
augccaaugauauggccac

SEQ ID NO: 1676217 - RNA, 19 nt, Artificial Sequence
  Description of Artificial Sequence: Synthetic oligonucleotide
  Sense strand starting at position 2661 of SEQ ID NO: 1561495
uggccauaucauuggcauc

SEQ ID NO: 1676218 - RNA, 19 nt, Artificial Sequence
  Description of Artificial Sequence: Synthetic oligonucleotide
  Antisense strand to SEQ ID NO: 1676217
gaugccaaugauauggcca

SEQ ID NO: 1676219 - RNA, 19 nt, Artificial Sequence
  Description of Artificial Sequence: Synthetic oligonucleotide
  Sense strand starting at position 2663 of SEQ ID NO: 1561495
gccauaucauuggcaucau

SEQ ID NO: 1676220 - RNA, 19 nt, Artificial Sequence
  Description of Artificial Sequence: Synthetic oligonucleotide
  Antisense strand to SEQ ID NO: 1676219
augaugccaaugauauggc

SEQ ID NO: 1676221 - RNA, 19 nt, Artificial Sequence
  Description of Artificial Sequence: Synthetic oligonucleotide
  Sense strand starting at position 2718 of SEQ ID NO: 1561495
uuaaguauugauugcucuu

SEQ ID NO: 1676222 - RNA, 19 nt, Artificial Sequence
  Description of Artificial Sequence: Synthetic oligonucleotide
  Antisense strand to SEQ ID NO: 1676221
aagagcaaucaauacuuaa

SEQ ID NO: 1676223 - RNA, 19 nt, Artificial Sequence
  Description of Artificial Sequence: Synthetic oligonucleotide
  Sense strand starting at position 2721 of SEQ ID NO: 1561495
aguauugauugcucuuuaa

SEQ ID NO: 1676224 - RNA, 19 nt, Artificial Sequence
  Description of Artificial Sequence: Synthetic oligonucleotide
  Antisense strand to SEQ ID NO: 1676223
uuaaagagcaaucaauacu

SEQ ID NO: 1676225 - RNA, 19 nt, Artificial Sequence
  Description of Artificial Sequence: Synthetic oligonucleotide
  Sense strand starting at position 2942 of SEQ ID NO: 1561495
guauaacuggacuguuuau

SEQ ID NO: 1676226 - RNA, 19 nt, Artificial Sequence
  Description of Artificial Sequence: Synthetic oligonucleotide
  Antisense strand to SEQ ID NO: 1676225
auaaacaguccaguuauac

SEQ ID NO: 1676227 - RNA, 19 nt, Artificial Sequence
  Description of Artificial Sequence: Synthetic oligonucleotide
  Sense strand starting at position 2948 of SEQ ID NO: 1561495
cuggacuguuuauaauaca

SEQ ID NO: 1676228 - RNA, 19 nt, Artificial Sequence
  Description of Artificial Sequence: Synthetic oligonucleotide
  Antisense strand to SEQ ID NO: 1676227
uguauuauaaacaguccag

SEQ ID NO: 1676229 - RNA, 19 nt, Artificial Sequence
  Description of Artificial Sequence: Synthetic oligonucleotide
  Sense strand starting at position 2951 of SEQ ID NO: 1561495
gacuguuuauaauacagag

SEQ ID NO: 1676230 - RNA, 19 nt, Artificial Sequence
  Description of Artificial Sequence: Synthetic oligonucleotide
  Antisense strand to SEQ ID NO: 1676229
cucuguauuauaaacaguc

SEQ ID NO: 1676231 - RNA, 19 nt, Artificial Sequence
  Description of Artificial Sequence: Synthetic oligonucleotide
  Sense strand starting at position 3004 of SEQ ID NO: 1561495
cuaugugauuaucacauau

SEQ ID NO: 1676232 - RNA, 19 nt, Artificial Sequence
  Description of Artificial Sequence: Synthetic oligonucleotide
  Antisense strand to SEQ ID NO: 1676231
auaugugauaaucacauag

SEQ ID NO: 1676233 - RNA, 19 nt, Artificial Sequence
  Description of Artificial Sequence: Synthetic oligonucleotide
  Sense strand starting at position 3021 of SEQ ID NO: 1561495
auggcauggcuacaucaaa

SEQ ID NO: 1676234 - RNA, 19 nt, Artificial Sequence
  Description of Artificial Sequence: Synthetic oligonucleotide
  Antisense strand to SEQ ID NO: 1676233
uuugauguagccaugccau

SEQ ID NO: 1676235 - RNA, 19 nt, Artificial Sequence
  Description of Artificial Sequence: Synthetic oligonucleotide
  Sense strand starting at position 3208 of SEQ ID NO: 1561495
cgugucucuacugaaagua

SEQ ID NO: 1676236 - RNA, 19 nt, Artificial Sequence
  Description of Artificial Sequence: Synthetic oligonucleotide
  Antisense strand to SEQ ID NO: 1676235
uacuuucaguagagacacg

SEQ ID NO: 1676237 - RNA, 19 nt, Artificial Sequence
  Description of Artificial Sequence: Synthetic oligonucleotide
  Sense strand starting at position 3956 of SEQ ID NO: 1561495
ggcucaauccaggaggguu

SEQ ID NO: 1676238 - RNA, 19 nt, Artificial Sequence
  Description of Artificial Sequence: Synthetic oligonucleotide
  Antisense strand to SEQ ID NO: 1676237
aacccuccuggauugagcc

SEQ ID NO: 1676239 - RNA, 19 nt, Artificial Sequence
  Description of Artificial Sequence: Synthetic oligonucleotide
  Sense strand starting at position 229 of SEQ ID NO: 1561496
agggcacucugcuauaaag

SEQ ID NO: 1676240 - RNA, 19 nt, Artificial Sequence
  Description of Artificial Sequence: Synthetic oligonucleotide
  Antisense strand to SEQ ID NO: 1676239
cuuuauagcagagugcccu

SEQ ID NO: 1676241 - RNA, 19 nt, Artificial Sequence
  Description of Artificial Sequence: Synthetic oligonucleotide
  Sense strand starting at position 236 of SEQ ID NO: 1561496
ucugcuauaaaggguaaga

SEQ ID NO: 1676242 - RNA, 19 nt, Artificial Sequence
  Description of Artificial Sequence: Synthetic oligonucleotide
  Antisense strand to SEQ ID NO: 1676241
ucuuacccuuuauagcaga

SEQ ID NO: 1676243 - RNA, 19 nt, Artificial Sequence
  Description of Artificial Sequence: Synthetic oligonucleotide
  Sense strand starting at position 903 of SEQ ID NO: 1561496
gacugcaucuaacgaggua

SEQ ID NO: 1676244 - RNA, 19 nt, Artificial Sequence
  Description of Artificial Sequence: Synthetic oligonucleotide
  Antisense strand to SEQ ID NO: 1676243
uaccucguuagaugcaguc

SEQ ID NO: 1676245 - RNA, 19 nt, Artificial Sequence
  Description of Artificial Sequence: Synthetic oligonucleotide
  Sense strand starting at position 904 of SEQ ID NO: 1561496
acugcaucuaacgagguaa

SEQ ID NO: 1676246 - RNA, 19 nt, Artificial Sequence
  Description of Artificial Sequence: Synthetic oligonucleotide
  Antisense strand to SEQ ID NO: 1676245
uuaccucguuagaugcagu

SEQ ID NO: 1676247 - RNA, 19 nt, Artificial Sequence
  Description of Artificial Sequence: Synthetic oligonucleotide
  Sense strand starting at position 947 of SEQ ID NO: 1561496
acuaucaguucucacuaga

SEQ ID NO: 1676248 - RNA, 19 nt, Artificial Sequence
  Description of Artificial Sequence: Synthetic oligonucleotide
  Antisense strand to SEQ ID NO: 1676247
ucuagugagaacugauagu

SEQ ID NO: 1676249 - RNA, 19 nt, Artificial Sequence
  Description of Artificial Sequence: Synthetic oligonucleotide
  Sense strand starting at position 960 of SEQ ID NO: 1561496
acuagaggauucugugaug

SEQ ID NO: 1676250 - RNA, 19 nt, Artificial Sequence
  Description of Artificial Sequence: Synthetic oligonucleotide
  Antisense strand to SEQ ID NO: 1676249
caucacagaauccucuagu

SEQ ID NO: 1676251 - RNA, 19 nt, Artificial Sequence
  Description of Artificial Sequence: Synthetic oligonucleotide
  Sense strand starting at position 963 of SEQ ID NO: 1561496
agaggauucugugauguaa

SEQ ID NO: 1676252 - RNA, 19 nt, Artificial Sequence
  Description of Artificial Sequence: Synthetic oligonucleotide
  Antisense strand to SEQ ID NO: 1676251
uuacaucacagaauccucu

SEQ ID NO: 1676253 - RNA, 19 nt, Artificial Sequence
  Description of Artificial Sequence: Synthetic oligonucleotide
  Sense strand starting at position 965 of SEQ ID NO: 1561496
aggauucugugauguaaug

SEQ ID NO: 1676254 - RNA, 19 nt, Artificial Sequence
  Description of Artificial Sequence: Synthetic oligonucleotide
  Antisense strand to SEQ ID NO: 1676253
cauuacaucacagaauccu

SEQ ID NO: 1676255 - RNA, 19 nt, Artificial Sequence
  Description of Artificial Sequence: Synthetic oligonucleotide
  Sense strand starting at position 1432 of SEQ ID NO: 1561496
gcgagaacuuugagcguua

SEQ ID NO: 1676256 - RNA, 19 nt, Artificial Sequence
  Description of Artificial Sequence: Synthetic oligonucleotide
  Antisense strand to SEQ ID NO: 1676255
uaacgcucaaaguucucgc

SEQ ID NO: 1676257 - RNA, 19 nt, Artificial Sequence
  Description of Artificial Sequence: Synthetic oligonucleotide
  Sense strand starting at position 1437 of SEQ ID NO: 1561496
aacuuugagcguuacccau

SEQ ID NO: 1676258 - RNA, 19 nt, Artificial Sequence
  Description of Artificial Sequence: Synthetic oligonucleotide
  Antisense strand to SEQ ID NO: 1676257
auggguaacgcucaaaguu

SEQ ID NO: 1676259 - RNA, 19 nt, Artificial Sequence
  Description of Artificial Sequence: Synthetic oligonucleotide
  Sense strand starting at position 1545 of SEQ ID NO: 1561496
cagguacagugacuauaaa

SEQ ID NO: 1676260 - RNA, 19 nt, Artificial Sequence
  Description of Artificial Sequence: Synthetic oligonucleotide
  Antisense strand to SEQ ID NO: 1676259
uuuauagucacuguaccug

SEQ ID NO: 1676261 - RNA, 19 nt, Artificial Sequence
  Description of Artificial Sequence: Synthetic oligonucleotide
  Sense strand starting at position 2052 of SEQ ID NO: 1561496
aggaaaugccuuuauucug

SEQ ID NO: 1676262 - RNA, 19 nt, Artificial Sequence
  Description of Artificial Sequence: Synthetic oligonucleotide
  Antisense strand to SEQ ID NO: 1676261
cagaauaaaggcauuuccu

SEQ ID NO: 1676263 - RNA, 19 nt, Artificial Sequence
  Description of Artificial Sequence: Synthetic oligonucleotide
  Sense strand starting at position 2081 of SEQ ID NO: 1561496
gcucuuccacucugucauu

SEQ ID NO: 1676264 - RNA, 19 nt, Artificial Sequence
  Description of Artificial Sequence: Synthetic oligonucleotide
  Antisense strand to SEQ ID NO: 1676263
aaugacagaguggaagagc

SEQ ID NO: 1676265 - RNA, 19 nt, Artificial Sequence
  Description of Artificial Sequence: Synthetic oligonucleotide
  Sense strand starting at position 2093 of SEQ ID NO: 1561496
ugucauuccaugcggaguu

SEQ ID NO: 1676266 - RNA, 19 nt, Artificial Sequence
  Description of Artificial Sequence: Synthetic oligonucleotide
  Antisense strand to SEQ ID NO: 1676265
aacuccgcauggaaugaca

SEQ ID NO: 1676267 - RNA, 19 nt, Artificial Sequence
  Description of Artificial Sequence: Synthetic oligonucleotide
  Sense strand starting at position 2094 of SEQ ID NO: 1561496
gucauuccaugcggaguuu

SEQ ID NO: 1676268 - RNA, 19 nt, Artificial Sequence
  Description of Artificial Sequence: Synthetic oligonucleotide
  Antisense strand to SEQ ID NO: 1676267
aaacuccgcauggaaugac

SEQ ID NO: 1676269 - RNA, 19 nt, Artificial Sequence
  Description of Artificial Sequence: Synthetic oligonucleotide
  Sense strand starting at position 2115 of SEQ ID NO: 1561496
uggguaauguaguucccua

SEQ ID NO: 1676270 - RNA, 19 nt, Artificial Sequence
  Description of Artificial Sequence: Synthetic oligonucleotide
  Antisense strand to SEQ ID NO: 1676269
uagggaacuacauuaccca

SEQ ID NO: 1676271 - RNA, 19 nt, Artificial Sequence
  Description of Artificial Sequence: Synthetic oligonucleotide
  Sense strand starting at position 2119 of SEQ ID NO: 1561496
uaauguaguucccuaggua

SEQ ID NO: 1676272 - RNA, 19 nt, Artificial Sequence
  Description of Artificial Sequence: Synthetic oligonucleotide
  Antisense strand to SEQ ID NO: 1676271
uaccuagggaacuacauua

SEQ ID NO: 1676273 - RNA, 19 nt, Artificial Sequence
  Description of Artificial Sequence: Synthetic oligonucleotide
  Sense strand starting at position 2120 of SEQ ID NO: 1561496
aauguaguucccuagguaa

SEQ ID NO: 1676274 - RNA, 19 nt, Artificial Sequence
  Description of Artificial Sequence: Synthetic oligonucleotide
  Antisense strand to SEQ ID NO: 1676273
uuaccuagggaacuacauu

SEQ ID NO: 1676275 - RNA, 19 nt, Artificial Sequence
  Description of Artificial Sequence: Synthetic oligonucleotide
  Sense strand starting at position 2122 of SEQ ID NO: 1561496
uguaguucccuagguaaca

SEQ ID NO: 1676276 - RNA, 19 nt, Artificial Sequence
  Description of Artificial Sequence: Synthetic oligonucleotide
  Antisense strand to SEQ ID NO: 1676275
uguuaccuagggaacuaca

SEQ ID NO: 1676277 - RNA, 19 nt, Artificial Sequence
  Description of Artificial Sequence: Synthetic oligonucleotide
  Sense strand starting at position 2123 of SEQ ID NO: 1561496
guaguucccuagguaacaa

SEQ ID NO: 1676278 - RNA, 19 nt, Artificial Sequence
  Description of Artificial Sequence: Synthetic oligonucleotide
  Antisense strand to SEQ ID NO: 1676277
uuguuaccuagggaacuac

SEQ ID NO: 1676279 - RNA, 19 nt, Artificial Sequence
  Description of Artificial Sequence: Synthetic oligonucleotide
  Sense strand starting at position 2199 of SEQ ID NO: 1561496
ucaggaguauccuuaagau

SEQ ID NO: 1676280 - RNA, 19 nt, Artificial Sequence
  Description of Artificial Sequence: Synthetic oligonucleotide
  Antisense strand to SEQ ID NO: 1676279
aucuuaaggauacuccuga

SEQ ID NO: 1676281 - RNA, 19 nt, Artificial Sequence
  Description of Artificial Sequence: Synthetic oligonucleotide
  Sense strand starting at position 2294 of SEQ ID NO: 1561496
ggccaagaguuagagauua

SEQ ID NO: 1676282 - RNA, 19 nt, Artificial Sequence
  Description of Artificial Sequence: Synthetic oligonucleotide
  Antisense strand to SEQ ID NO: 1676281
uaaucucuaacucuuggcc

SEQ ID NO: 1676283 - RNA, 19 nt, Artificial Sequence
  Description of Artificial Sequence: Synthetic oligonucleotide
  Sense strand starting at position 2355 of SEQ ID NO: 1561496
ccuccauaccuauggguau

SEQ ID NO: 1676284 - RNA, 19 nt, Artificial Sequence
  Description of Artificial Sequence: Synthetic oligonucleotide
  Antisense strand to SEQ ID NO: 1676283
auacccauagguauggagg

SEQ ID NO: 1676285 - RNA, 19 nt, Artificial Sequence
  Description of Artificial Sequence: Synthetic oligonucleotide
  Sense strand starting at position 2804 of SEQ ID NO: 1561496
uuggcuuuacaccaugaca

SEQ ID NO: 1676286 - RNA, 19 nt, Artificial Sequence
  Description of Artificial Sequence: Synthetic oligonucleotide
  Antisense strand to SEQ ID NO: 1676285
ugucaugguguaaagccaa

SEQ ID NO: 1676287 - RNA, 19 nt, Artificial Sequence
  Description of Artificial Sequence: Synthetic oligonucleotide
  Sense strand starting at position 2806 of SEQ ID NO: 1561496
ggcuuuacaccaugacauu

SEQ ID NO: 1676288 - RNA, 19 nt, Artificial Sequence
  Description of Artificial Sequence: Synthetic oligonucleotide
  Antisense strand to SEQ ID NO: 1676287
aaugucaugguguaaagcc

SEQ ID NO: 1676289 - RNA, 19 nt, Artificial Sequence
  Description of Artificial Sequence: Synthetic oligonucleotide
  Sense strand starting at position 2822 of SEQ ID NO: 1561496
auuccauucccaggaauga

SEQ ID NO: 1676290 - RNA, 19 nt, Artificial Sequence
  Description of Artificial Sequence: Synthetic oligonucleotide
  Antisense strand to SEQ ID NO: 1676289
ucauuccugggaauggaau

SEQ ID NO: 1676291 - RNA, 19 nt, Artificial Sequence
  Description of Artificial Sequence: Synthetic oligonucleotide
  Sense strand starting at position 3694 of SEQ ID NO: 1561496
auggcauaugcauauaauc

SEQ ID NO: 1676292 - RNA, 19 nt, Artificial Sequence
  Description of Artificial Sequence: Synthetic oligonucleotide
  Antisense strand to SEQ ID NO: 1676291
gauuauaugcauaugccau

SEQ ID NO: 1676293 - RNA, 19 nt, Artificial Sequence
  Description of Artificial Sequence: Synthetic oligonucleotide
  Sense strand starting at position 3889 of SEQ ID NO: 1561496
agaggaucauccugccuuu

SEQ ID NO: 1676294 - RNA, 19 nt, Artificial Sequence
  Description of Artificial Sequence: Synthetic oligonucleotide
  Antisense strand to SEQ ID NO: 1676293
aaaggcaggaugauccucu

SEQ ID NO: 1676295 - RNA, 19 nt, Artificial Sequence
  Description of Artificial Sequence: Synthetic oligonucleotide
  Sense strand starting at position 3936 of SEQ ID NO: 1561496
aauuauuagcuguagcuga

SEQ ID NO: 1676296 - RNA, 19 nt, Artificial Sequence
  Description of Artificial Sequence: Synthetic oligonucleotide
  Antisense strand to SEQ ID NO: 1676295
ucagcuacagcuaauaauu

SEQ ID NO: 1676297 - RNA, 19 nt, Artificial Sequence
  Description of Artificial Sequence: Synthetic oligonucleotide
  Sense strand starting at position 3949 of SEQ ID NO: 1561496
agcugauuacccuagugua

SEQ ID NO: 1676298 - RNA, 19 nt, Artificial Sequence
  Description of Artificial Sequence: Synthetic oligonucleotide
  Antisense strand to SEQ ID NO: 1676297
uacacuaggguaaucagcu

SEQ ID NO: 1676299 - RNA, 19 nt, Artificial Sequence
  Description of Artificial Sequence: Synthetic oligonucleotide
  Sense strand starting at position 127 of SEQ ID NO: 1561497
guuccucuucuguaaagaa

SEQ ID NO: 1676300 - RNA, 19 nt, Artificial Sequence
  Description of Artificial Sequence: Synthetic oligonucleotide
  Antisense strand to SEQ ID NO: 1676299
uucuuuacagaagaggaac

SEQ ID NO: 1676301 - RNA, 19 nt, Artificial Sequence
  Description of Artificial Sequence: Synthetic oligonucleotide
  Sense strand starting at position 169 of SEQ ID NO: 1561497
ugagaagaagggcguuaaa

SEQ ID NO: 1676302 - RNA, 19 nt, Artificial Sequence
  Description of Artificial Sequence: Synthetic oligonucleotide
  Antisense strand to SEQ ID NO: 1676301
uuuaacgcccuucuucuca

SEQ ID NO: 1676303 - RNA, 19 nt, Artificial Sequence
  Description of Artificial Sequence: Synthetic oligonucleotide
  Sense strand starting at position 837 of SEQ ID NO: 1561497
aggaguaaacagugugaca

SEQ ID NO: 1676304 - RNA, 19 nt, Artificial Sequence
  Description of Artificial Sequence: Synthetic oligonucleotide
  Antisense strand to SEQ ID NO: 1676303
ugucacacuguuuacuccu

SEQ ID NO: 1676305 - RNA, 19 nt, Artificial Sequence
  Description of Artificial Sequence: Synthetic oligonucleotide
  Sense strand starting at position 839 of SEQ ID NO: 1561497
gaguaaacagugugacaug

SEQ ID NO: 1676306 - RNA, 19 nt, Artificial Sequence
  Description of Artificial Sequence: Synthetic oligonucleotide
  Antisense strand to SEQ ID NO: 1676305
caugucacacuguuuacuc

SEQ ID NO: 1676307 - RNA, 19 nt, Artificial Sequence
  Description of Artificial Sequence: Synthetic oligonucleotide
  Sense strand starting at position 849 of SEQ ID NO: 1561497
ugugacaugcuggagagua

SEQ ID NO: 1676308 - RNA, 19 nt, Artificial Sequence
  Description of Artificial Sequence: Synthetic oligonucleotide
  Antisense strand to SEQ ID NO: 1676307
uacucuccagcaugucaca

SEQ ID NO: 1676309 - RNA, 19 nt, Artificial Sequence
  Description of Artificial Sequence: Synthetic oligonucleotide
  Sense strand starting at position 911 of SEQ ID NO: 1561497
uguacacugucauuaauga

SEQ ID NO: 1676310 - RNA, 19 nt, Artificial Sequence
  Description of Artificial Sequence: Synthetic oligonucleotide
  Antisense strand to SEQ ID NO: 1676309
ucauuaaugacaguguaca

SEQ ID NO: 1676311 - RNA, 19 nt, Artificial Sequence
  Description of Artificial Sequence: Synthetic oligonucleotide
  Sense strand starting at position 925 of SEQ ID NO: 1561497
aaugaauauugugcuggau

SEQ ID NO: 1676312 - RNA, 19 nt, Artificial Sequence
  Description of Artificial Sequence: Synthetic oligonucleotide
  Antisense strand to SEQ ID NO: 1676311
auccagcacaauauucauu

SEQ ID NO: 1676313 - RNA, 19 nt, Artificial Sequence
  Description of Artificial Sequence: Synthetic oligonucleotide
  Sense strand starting at position 1154 of SEQ ID NO: 1561497
cagacuuccgcuggaauga

SEQ ID NO: 1676314 - RNA, 19 nt, Artificial Sequence
  Description of Artificial Sequence: Synthetic oligonucleotide
  Antisense strand to SEQ ID NO: 1676313
ucauuccagcggaagucug

SEQ ID NO: 1676315 - RNA, 19 nt, Artificial Sequence
  Description of Artificial Sequence: Synthetic oligonucleotide
  Sense strand starting at position 1155 of SEQ ID NO: 1561497
agacuuccgcuggaaugau

SEQ ID NO: 1676316 - RNA, 19 nt, Artificial Sequence
  Description of Artificial Sequence: Synthetic oligonucleotide
  Antisense strand to SEQ ID NO: 1676315
aucauuccagcggaagucu

SEQ ID NO: 1676317 - RNA, 19 nt, Artificial Sequence
  Description of Artificial Sequence: Synthetic oligonucleotide
  Sense strand starting at position 1467 of SEQ ID NO: 1561497
ccgggaucuccauaaccua

SEQ ID NO: 1676318 - RNA, 19 nt, Artificial Sequence
  Description of Artificial Sequence: Synthetic oligonucleotide
  Antisense strand to SEQ ID NO: 1676317
uagguuauggagaucccgg

SEQ ID NO: 1676319 - RNA, 19 nt, Artificial Sequence
  Description of Artificial Sequence: Synthetic oligonucleotide
  Sense strand starting at position 1925 of SEQ ID NO: 1561497
cccaguguagcguuggcaa

SEQ ID NO: 1676320 - RNA, 19 nt, Artificial Sequence
  Description of Artificial Sequence: Synthetic oligonucleotide
  Antisense strand to SEQ ID NO: 1676319
uugccaacgcuacacuggg

SEQ ID NO: 1676321 - RNA, 19 nt, Artificial Sequence
  Description of Artificial Sequence: Synthetic oligonucleotide
  Sense strand starting at position 2198 of SEQ ID NO: 1561497
cacagaguuccguggaaau

SEQ ID NO: 1676322 - RNA, 19 nt, Artificial Sequence
  Description of Artificial Sequence: Synthetic oligonucleotide
  Antisense strand to SEQ ID NO: 1676321
auuuccacggaacucugug

SEQ ID NO: 1676323 - RNA, 19 nt, Artificial Sequence
  Description of Artificial Sequence: Synthetic oligonucleotide
  Sense strand starting at position 2200 of SEQ ID NO: 1561497
cagaguuccguggaaauua

SEQ ID NO: 1676324 - RNA, 19 nt, Artificial Sequence
  Description of Artificial Sequence: Synthetic oligonucleotide
  Antisense strand to SEQ ID NO: 1676323
uaauuuccacggaacucug

SEQ ID NO: 1676325 - RNA, 19 nt, Artificial Sequence
  Description of Artificial Sequence: Synthetic oligonucleotide
  Sense strand starting at position 2209 of SEQ ID NO: 1561497
guggaaauuaucugaggca

SEQ ID NO: 1676326 - RNA, 19 nt, Artificial Sequence
  Description of Artificial Sequence: Synthetic oligonucleotide
  Antisense strand to SEQ ID NO: 1676325
ugccucagauaauuuccac

SEQ ID NO: 1676327 - RNA, 19 nt, Artificial Sequence
  Description of Artificial Sequence: Synthetic oligonucleotide
  Sense strand starting at position 2308 of SEQ ID NO: 1561497
cucucugagccuugagaug

SEQ ID NO: 1676328 - RNA, 19 nt, Artificial Sequence
  Description of Artificial Sequence: Synthetic oligonucleotide
  Antisense strand to SEQ ID NO: 1676327
caucucaaggcucagagag

SEQ ID NO: 1676329 - RNA, 19 nt, Artificial Sequence
  Description of Artificial Sequence: Synthetic oligonucleotide
  Sense strand starting at position 2313 of SEQ ID NO: 1561497
ugagccuugagauggagau

SEQ ID NO: 1676330 - RNA, 19 nt, Artificial Sequence
  Description of Artificial Sequence: Synthetic oligonucleotide
  Antisense strand to SEQ ID NO: 1676329
aucuccaucucaaggcuca

SEQ ID NO: 1676331 - RNA, 19 nt, Artificial Sequence
  Description of Artificial Sequence: Synthetic oligonucleotide
  Sense strand starting at position 2314 of SEQ ID NO: 1561497
gagccuugagauggagauu

SEQ ID NO: 1676332 - RNA, 19 nt, Artificial Sequence
  Description of Artificial Sequence: Synthetic oligonucleotide
  Antisense strand to SEQ ID NO: 1676331
aaucuccaucucaaggcuc

SEQ ID NO: 1676333 - RNA, 19 nt, Artificial Sequence
  Description of Artificial Sequence: Synthetic oligonucleotide
  Sense strand starting at position 2422 of SEQ ID NO: 1561497
auuuguuaccaaugcaagu

SEQ ID NO: 1676334 - RNA, 19 nt, Artificial Sequence
  Description of Artificial Sequence: Synthetic oligonucleotide
  Antisense strand to SEQ ID NO: 1676333
acuugcauugguaacaaau

SEQ ID NO: 1676335 - RNA, 19 nt, Artificial Sequence
  Description of Artificial Sequence: Synthetic oligonucleotide
  Sense strand starting at position 2494 of SEQ ID NO: 1561497
ugcuuaacuuguccaggaa

SEQ ID NO: 1676336 - RNA, 19 nt, Artificial Sequence
  Description of Artificial Sequence: Synthetic oligonucleotide
  Antisense strand to SEQ ID NO: 1676335
uuccuggacaaguuaagca

SEQ ID NO: 1676337 - RNA, 19 nt, Artificial Sequence
  Description of Artificial Sequence: Synthetic oligonucleotide
  Sense strand starting at position 2495 of SEQ ID NO: 1561497
gcuuaacuuguccaggaaa

SEQ ID NO: 1676338 - RNA, 19 nt, Artificial Sequence
  Description of Artificial Sequence: Synthetic oligonucleotide
  Antisense strand to SEQ ID NO: 1676337
uuuccuggacaaguuaagc

SEQ ID NO: 1676339 - RNA, 19 nt, Artificial Sequence
  Description of Artificial Sequence: Synthetic oligonucleotide
  Sense strand starting at position 2600 of SEQ ID NO: 1561497
cuaagaauugcuuagcacu

SEQ ID NO: 1676340 - RNA, 19 nt, Artificial Sequence
  Description of Artificial Sequence: Synthetic oligonucleotide
  Antisense strand to SEQ ID NO: 1676339
agugcuaagcaauucuuag

SEQ ID NO: 1676341 - RNA, 19 nt, Artificial Sequence
  Description of Artificial Sequence: Synthetic oligonucleotide
  Sense strand starting at position 2719 of SEQ ID NO: 1561497
cugagauacuucuuugcag

SEQ ID NO: 1676342 - RNA, 19 nt, Artificial Sequence
  Description of Artificial Sequence: Synthetic oligonucleotide
  Antisense strand to SEQ ID NO: 1676341
cugcaaagaaguaucucag

SEQ ID NO: 1676343 - RNA, 19 nt, Artificial Sequence
  Description of Artificial Sequence: Synthetic oligonucleotide
  Sense strand starting at position 2720 of SEQ ID NO: 1561497
ugagauacuucuuugcaga

SEQ ID NO: 1676344 - RNA, 19 nt, Artificial Sequence
  Description of Artificial Sequence: Synthetic oligonucleotide
  Antisense strand to SEQ ID NO: 1676343
ucugcaaagaaguaucuca

SEQ ID NO: 1676345 - RNA, 19 nt, Artificial Sequence
  Description of Artificial Sequence: Synthetic oligonucleotide
  Sense strand starting at position 2721 of SEQ ID NO: 1561497
gagauacuucuuugcagac

SEQ ID NO: 1676346 - RNA, 19 nt, Artificial Sequence
  Description of Artificial Sequence: Synthetic oligonucleotide
  Antisense strand to SEQ ID NO: 1676345
gucugcaaagaaguaucuc

SEQ ID NO: 1676347 - RNA, 19 nt, Artificial Sequence
  Description of Artificial Sequence: Synthetic oligonucleotide
  Sense strand starting at position 2722 of SEQ ID NO: 1561497
agauacuucuuugcagacu

SEQ ID NO: 1676348 - RNA, 19 nt, Artificial Sequence
  Description of Artificial Sequence: Synthetic oligonucleotide
  Antisense strand to SEQ ID NO: 1676347
agucugcaaagaaguaucu

SEQ ID NO: 1676349 - RNA, 19 nt, Artificial Sequence
  Description of Artificial Sequence: Synthetic oligonucleotide
  Sense strand starting at position 2754 of SEQ ID NO: 1561497
aaacaaauacguugacuga

SEQ ID NO: 1676350 - RNA, 19 nt, Artificial Sequence
  Description of Artificial Sequence: Synthetic oligonucleotide
  Antisense strand to SEQ ID NO: 1676349
ucagucaacguauuuguuu

SEQ ID NO: 1676351 - RNA, 19 nt, Artificial Sequence
  Description of Artificial Sequence: Synthetic oligonucleotide
  Sense strand starting at position 2824 of SEQ ID NO: 1561497
cagcauuuggcguaugcau

SEQ ID NO: 1676352 - RNA, 19 nt, Artificial Sequence
  Description of Artificial Sequence: Synthetic oligonucleotide
  Antisense strand to SEQ ID NO: 1676351
augcauacgccaaaugcug

SEQ ID NO: 1676353 - RNA, 19 nt, Artificial Sequence
  Description of Artificial Sequence: Synthetic oligonucleotide
  Sense strand starting at position 2861 of SEQ ID NO: 1561497
gcaggaggguuuccuaaua

SEQ ID NO: 1676354 - RNA, 19 nt, Artificial Sequence
  Description of Artificial Sequence: Synthetic oligonucleotide
  Antisense strand to SEQ ID NO: 1676353
uauuaggaaacccuccugc

SEQ ID NO: 1676355 - RNA, 19 nt, Artificial Sequence
  Description of Artificial Sequence: Synthetic oligonucleotide
  Sense strand starting at position 2901 of SEQ ID NO: 1561497
agggauacuuucuuacaug

SEQ ID NO: 1676356 - RNA, 19 nt, Artificial Sequence
  Description of Artificial Sequence: Synthetic oligonucleotide
  Antisense strand to SEQ ID NO: 1676355
cauguaagaaaguaucccu

SEQ ID NO: 1676357 - RNA, 19 nt, Artificial Sequence
  Description of Artificial Sequence: Synthetic oligonucleotide
  Sense strand starting at position 2990 of SEQ ID NO: 1561497
uaguuugugauguaagaug

SEQ ID NO: 1676358 - RNA, 19 nt, Artificial Sequence
  Description of Artificial Sequence: Synthetic oligonucleotide
  Antisense strand to SEQ ID NO: 1676357
caucuuacaucacaaacua

SEQ ID NO: 1676359 - RNA, 19 nt, Artificial Sequence
  Description of Artificial Sequence: Synthetic oligonucleotide
  Sense strand starting at position 3140 of SEQ ID NO: 1561497
accagaucuugucucauca

SEQ ID NO: 1676360 - RNA, 19 nt, Artificial Sequence
  Description of Artificial Sequence: Synthetic oligonucleotide
  Antisense strand to SEQ ID NO: 1676359
ugaugagacaagaucuggu

SEQ ID NO: 1676361 - RNA, 19 nt, Artificial Sequence
  Description of Artificial Sequence: Synthetic oligonucleotide
  Sense strand starting at position 3204 of SEQ ID NO: 1561497
ggcaauaauccuggacacu

SEQ ID NO: 1676362 - RNA, 19 nt, Artificial Sequence
  Description of Artificial Sequence: Synthetic oligonucleotide
  Antisense strand to SEQ ID NO: 1676361
aguguccaggauuauugcc

SEQ ID NO: 1676363 - RNA, 19 nt, Artificial Sequence
  Description of Artificial Sequence: Synthetic oligonucleotide
  Sense strand starting at position 3210 of SEQ ID NO: 1561497
aauccuggacacugugaaa

SEQ ID NO: 1676364 - RNA, 19 nt, Artificial Sequence
  Description of Artificial Sequence: Synthetic oligonucleotide
  Antisense strand to SEQ ID NO: 1676363
uuucacaguguccaggauu

SEQ ID NO: 1676365 - RNA, 19 nt, Artificial Sequence
  Description of Artificial Sequence: Synthetic oligonucleotide
  Sense strand starting at position 3400 of SEQ ID NO: 1561497
aagagauaaugggacugau

SEQ ID NO: 1676366 - RNA, 19 nt, Artificial Sequence
  Description of Artificial Sequence: Synthetic oligonucleotide
  Antisense strand to SEQ ID NO: 1676365
aucagucccauuaucucuu

SEQ ID NO: 1676367 - RNA, 19 nt, Artificial Sequence
  Description of Artificial Sequence: Synthetic oligonucleotide
  Sense strand starting at position 3511 of SEQ ID NO: 1561497
uucuuaaugcgagaagcca

SEQ ID NO: 1676368 - RNA, 19 nt, Artificial Sequence
  Description of Artificial Sequence: Synthetic oligonucleotide
  Antisense strand to SEQ ID NO: 1676367
uggcuucucgcauuaagaa

SEQ ID NO: 1676369 - RNA, 19 nt, Artificial Sequence
  Description of Artificial Sequence: Synthetic oligonucleotide
  Sense strand starting at position 3550 of SEQ ID NO: 1561497
accucaucugaauguuaag

SEQ ID NO: 1676370 - RNA, 19 nt, Artificial Sequence
  Description of Artificial Sequence: Synthetic oligonucleotide
  Antisense strand to SEQ ID NO: 1676369
cuuaacauucagaugaggu

SEQ ID NO: 1676371 - RNA, 19 nt, Artificial Sequence
  Description of Artificial Sequence: Synthetic oligonucleotide
  Sense strand starting at position 3564 of SEQ ID NO: 1561497
uuaagaucucagggugaua

SEQ ID NO: 1676372 - RNA, 19 nt, Artificial Sequence
  Description of Artificial Sequence: Synthetic oligonucleotide
  Antisense strand to SEQ ID NO: 1676371
uaucacccugagaucuuaa

SEQ ID NO: 1676373 - RNA, 19 nt, Artificial Sequence
  Description of Artificial Sequence: Synthetic oligonucleotide
  Sense strand starting at position 3567 of SEQ ID NO: 1561497
agaucucagggugauaugu

SEQ ID NO: 1676374 - RNA, 19 nt, Artificial Sequence
  Description of Artificial Sequence: Synthetic oligonucleotide
  Antisense strand to SEQ ID NO: 1676373
acauaucacccugagaucu

SEQ ID NO: 1676375 - RNA, 19 nt, Artificial Sequence
  Description of Artificial Sequence: Synthetic oligonucleotide
  Sense strand starting at position 3708 of SEQ ID NO: 1561497
ggugcuauucuugagauaa

SEQ ID NO: 1676376 - RNA, 19 nt, Artificial Sequence
  Description of Artificial Sequence: Synthetic oligonucleotide
  Antisense strand to SEQ ID NO: 1676375
uuaucucaagaauagcacc

SEQ ID NO: 1676377 - RNA, 19 nt, Artificial Sequence
  Description of Artificial Sequence: Synthetic oligonucleotide
  Sense strand starting at position 3736 of SEQ ID NO: 1561497
ucaagaucugacuguuuaa

SEQ ID NO: 1676378 - RNA, 19 nt, Artificial Sequence
  Description of Artificial Sequence: Synthetic oligonucleotide
  Antisense strand to SEQ ID NO: 1676377
uuaaacagucagaucuuga

SEQ ID NO: 1676379 - RNA, 19 nt, Artificial Sequence
  Description of Artificial Sequence: Synthetic oligonucleotide
  Sense strand starting at position 57 of SEQ ID NO: 1561498
ccugcuucggccuagagaa

SEQ ID NO: 1676380 - RNA, 19 nt, Artificial Sequence
  Description of Artificial Sequence: Synthetic oligonucleotide
  Antisense strand to SEQ ID NO: 1676379
uucucuaggccgaagcagg

SEQ ID NO: 1676381 - RNA, 19 nt, Artificial Sequence
  Description of Artificial Sequence: Synthetic oligonucleotide
  Sense strand starting at position 95 of SEQ ID NO: 1561498
acuaucacacccgguuaaa

SEQ ID NO: 1676382 - RNA, 19 nt, Artificial Sequence
  Description of Artificial Sequence: Synthetic oligonucleotide
  Antisense strand to SEQ ID NO: 1676381
uuuaaccgggugugauagu

SEQ ID NO: 1676383 - RNA, 19 nt, Artificial Sequence
  Description of Artificial Sequence: Synthetic oligonucleotide
  Sense strand starting at position 350 of SEQ ID NO: 1561498
cugggauugugcuccucau

SEQ ID NO: 1676384 - RNA, 19 nt, Artificial Sequence
  Description of Artificial Sequence: Synthetic oligonucleotide
  Antisense strand to SEQ ID NO: 1676383
augaggagcacaaucccag

SEQ ID NO: 1676385 - RNA, 19 nt, Artificial Sequence
  Description of Artificial Sequence: Synthetic oligonucleotide
  Sense strand starting at position 758 of SEQ ID NO: 1561498
gcgcccgguccuuauuuaa

SEQ ID NO: 1676386 - RNA, 19 nt, Artificial Sequence
  Description of Artificial Sequence: Synthetic oligonucleotide
  Antisense strand to SEQ ID NO: 1676385
uuaaauaaggaccgggcgc

SEQ ID NO: 1676387 - RNA, 19 nt, Artificial Sequence
  Description of Artificial Sequence: Synthetic oligonucleotide
  Sense strand starting at position 1300 of SEQ ID NO: 1561498
gcggguuuggaguaaucac

SEQ ID NO: 1676388 - RNA, 19 nt, Artificial Sequence
  Description of Artificial Sequence: Synthetic oligonucleotide
  Antisense strand to SEQ ID NO: 1676387
gugauuacuccaaacccgc

SEQ ID NO: 1676389 - RNA, 19 nt, Artificial Sequence
  Description of Artificial Sequence: Synthetic oligonucleotide
  Sense strand starting at position 1308 of SEQ ID NO: 1561498
ggaguaaucacaggcgggu

SEQ ID NO: 1676390 - RNA, 19 nt, Artificial Sequence
  Description of Artificial Sequence: Synthetic oligonucleotide
  Antisense strand to SEQ ID NO: 1676389
acccgccugugauuacucc

SEQ ID NO: 1676391 - RNA, 19 nt, Artificial Sequence
  Description of Artificial Sequence: Synthetic oligonucleotide
  Sense strand starting at position 1395 of SEQ ID NO: 1561498
ccugguaucauaggacaag

SEQ ID NO: 1676392 - RNA, 19 nt, Artificial Sequence
  Description of Artificial Sequence: Synthetic oligonucleotide
  Antisense strand to SEQ ID NO: 1676391
cuuguccuaugauaccagg

SEQ ID NO: 1676393 - RNA, 19 nt, Artificial Sequence
  Description of Artificial Sequence: Synthetic oligonucleotide
  Sense strand starting at position 1853 of SEQ ID NO: 1561498
cgagaauuuccagguccgu

SEQ ID NO: 1676394 - RNA, 19 nt, Artificial Sequence
  Description of Artificial Sequence: Synthetic oligonucleotide
  Antisense strand to SEQ ID NO: 1676393
acggaccuggaaauucucg

SEQ ID NO: 1676395 - RNA, 19 nt, Artificial Sequence
  Description of Artificial Sequence: Synthetic oligonucleotide
  Sense strand starting at position 1921 of SEQ ID NO: 1561498
gacuuaauccaaggcagag

SEQ ID NO: 1676396 - RNA, 19 nt, Artificial Sequence
  Description of Artificial Sequence: Synthetic oligonucleotide
  Antisense strand to SEQ ID NO: 1676395
cucugccuuggauuaaguc

SEQ ID NO: 1676397 - RNA, 19 nt, Artificial Sequence
  Description of Artificial Sequence: Synthetic oligonucleotide
  Sense strand starting at position 2747 of SEQ ID NO: 1561498
uuucgaguaacuggaacua

SEQ ID NO: 1676398 - RNA, 19 nt, Artificial Sequence
  Description of Artificial Sequence: Synthetic oligonucleotide
  Antisense strand to SEQ ID NO: 1676397
uaguuccaguuacucgaaa

SEQ ID NO: 1676399 - RNA, 19 nt, Artificial Sequence
  Description of Artificial Sequence: Synthetic oligonucleotide
  Sense strand starting at position 3173 of SEQ ID NO: 1561498
ugcauacauuaauguauga

SEQ ID NO: 1676400 - RNA, 19 nt, Artificial Sequence
  Description of Artificial Sequence: Synthetic oligonucleotide
  Antisense strand to SEQ ID NO: 1676399
ucauacauuaauguaugca

SEQ ID NO: 1676401 - RNA, 19 nt, Artificial Sequence
  Description of Artificial Sequence: Synthetic oligonucleotide
  Sense strand starting at position 3310 of SEQ ID NO: 1561498
ccauccaucucugguguga

SEQ ID NO: 1676402 - RNA, 19 nt, Artificial Sequence
  Description of Artificial Sequence: Synthetic oligonucleotide
  Antisense strand to SEQ ID NO: 1676401
ucacaccagagauggaugg

SEQ ID NO: 1676403 - RNA, 19 nt, Artificial Sequence
  Description of Artificial Sequence: Synthetic oligonucleotide
  Sense strand starting at position 3374 of SEQ ID NO: 1561498
gucacuagguuauagaaga

SEQ ID NO: 1676404 - RNA, 19 nt, Artificial Sequence
  Description of Artificial Sequence: Synthetic oligonucleotide
  Antisense strand to SEQ ID NO: 1676403
ucuucuauaaccuagugac

SEQ ID NO: 1676405 - RNA, 19 nt, Artificial Sequence
  Description of Artificial Sequence: Synthetic oligonucleotide
  Sense strand starting at position 3431 of SEQ ID NO: 1561498
auggguuagugugagcaaa

SEQ ID NO: 1676406 - RNA, 19 nt, Artificial Sequence
  Description of Artificial Sequence: Synthetic oligonucleotide
  Antisense strand to SEQ ID NO: 1676405
uuugcucacacuaacccau

SEQ ID NO: 1676407 - RNA, 19 nt, Artificial Sequence
  Description of Artificial Sequence: Synthetic oligonucleotide
  Sense strand starting at position 3596 of SEQ ID NO: 1561498
uggugucuuccucacguaa

SEQ ID NO: 1676408 - RNA, 19 nt, Artificial Sequence
  Description of Artificial Sequence: Synthetic oligonucleotide
  Antisense strand to SEQ ID NO: 1676407
uuacgugaggaagacacca

SEQ ID NO: 1676409 - RNA, 19 nt, Artificial Sequence
  Description of Artificial Sequence: Synthetic oligonucleotide
  Sense strand starting at position 3598 of SEQ ID NO: 1561498
gugucuuccucacguaaca

SEQ ID NO: 1676410 - RNA, 19 nt, Artificial Sequence
  Description of Artificial Sequence: Synthetic oligonucleotide
  Antisense strand to SEQ ID NO: 1676409
uguuacgugaggaagacac

SEQ ID NO: 1676411 - RNA, 19 nt, Artificial Sequence
  Description of Artificial Sequence: Synthetic oligonucleotide
  Sense strand starting at position 3751 of SEQ ID NO: 1561498
cccacugcaccagagauua

SEQ ID NO: 1676412 - RNA, 19 nt, Artificial Sequence
  Description of Artificial Sequence: Synthetic oligonucleotide
  Antisense strand to SEQ ID NO: 1676411
uaaucucuggugcaguggg

SEQ ID NO: 1676413 - RNA, 19 nt, Artificial Sequence
  Description of Artificial Sequence: Synthetic oligonucleotide
  Sense strand starting at position 3761 of SEQ ID NO: 1561498
cagagauuauguggagaua

SEQ ID NO: 1676414 - RNA, 19 nt, Artificial Sequence
  Description of Artificial Sequence: Synthetic oligonucleotide
  Antisense strand to SEQ ID NO: 1676413
uaucuccacauaaucucug

SEQ ID NO: 1676415 - RNA, 19 nt, Artificial Sequence
  Description of Artificial Sequence: Synthetic oligonucleotide
  Sense strand starting at position 3975 of SEQ ID NO: 1561498
ggaggaaacugccuugaug

SEQ ID NO: 1676416 - RNA, 19 nt, Artificial Sequence
  Description of Artificial Sequence: Synthetic oligonucleotide
  Antisense strand to SEQ ID NO: 1676415
caucaaggcaguuuccucc

SEQ ID NO: 1676417 - RNA, 19 nt, Artificial Sequence
  Description of Artificial Sequence: Synthetic oligonucleotide
  Sense strand starting at position 3977 of SEQ ID NO: 1561498
aggaaacugccuugauguu

SEQ ID NO: 1676418 - RNA, 19 nt, Artificial Sequence
  Description of Artificial Sequence: Synthetic oligonucleotide
  Antisense strand to SEQ ID NO: 1676417
aacaucaaggcaguuuccu

SEQ ID NO: 1676419 - RNA, 19 nt, Artificial Sequence
  Description of Artificial Sequence: Synthetic oligonucleotide
  Sense strand starting at position 52 of SEQ ID NO: 1561499
acuaguccuuucucacaga

SEQ ID NO: 1676420 - RNA, 19 nt, Artificial Sequence
  Description of Artificial Sequence: Synthetic oligonucleotide
  Antisense strand to SEQ ID NO: 1676419
ucugugagaaaggacuagu

SEQ ID NO: 1676421 - RNA, 19 nt, Artificial Sequence
  Description of Artificial Sequence: Synthetic oligonucleotide
  Sense strand starting at position 126 of SEQ ID NO: 1561499
uaaggagcaucguaagaaa

SEQ ID NO: 1676422 - RNA, 19 nt, Artificial Sequence
  Description of Artificial Sequence: Synthetic oligonucleotide
  Antisense strand to SEQ ID NO: 1676421
uuucuuacgaugcuccuua

SEQ ID NO: 1676423 - RNA, 19 nt, Artificial Sequence
  Description of Artificial Sequence: Synthetic oligonucleotide
  Sense strand starting at position 219 of SEQ ID NO: 1561499
agagcaugauccugaauga

SEQ ID NO: 1676424 - RNA, 19 nt, Artificial Sequence
  Description of Artificial Sequence: Synthetic oligonucleotide
  Antisense strand to SEQ ID NO: 1676423
ucauucaggaucaugcucu

SEQ ID NO: 1676425 - RNA, 19 nt, Artificial Sequence
  Description of Artificial Sequence: Synthetic oligonucleotide
  Sense strand starting at position 242 of SEQ ID NO: 1561499
guacaaauuugucagcuau

SEQ ID NO: 1676426 - RNA, 19 nt, Artificial Sequence
  Description of Artificial Sequence: Synthetic oligonucleotide
  Antisense strand to SEQ ID NO: 1676425
auagcugacaaauuuguac

SEQ ID NO: 1676427 - RNA, 19 nt, Artificial Sequence
  Description of Artificial Sequence: Synthetic oligonucleotide
  Sense strand starting at position 298 of SEQ ID NO: 1561499
uuggauuaaucugacaauu

SEQ ID NO: 1676428 - RNA, 19 nt, Artificial Sequence
  Description of Artificial Sequence: Synthetic oligonucleotide
  Antisense strand to SEQ ID NO: 1676427
aauugucagauuaauccaa

SEQ ID NO: 1676429 - RNA, 19 nt, Artificial Sequence
  Description of Artificial Sequence: Synthetic oligonucleotide
  Sense strand starting at position 300 of SEQ ID NO: 1561499
ggauuaaucugacaauuau

SEQ ID NO: 1676430 - RNA, 19 nt, Artificial Sequence
  Description of Artificial Sequence: Synthetic oligonucleotide
  Antisense strand to SEQ ID NO: 1676429
auaauugucagauuaaucc

SEQ ID NO: 1676431 - RNA, 19 nt, Artificial Sequence
  Description of Artificial Sequence: Synthetic oligonucleotide
  Sense strand starting at position 342 of SEQ ID NO: 1561499
auauauuagugguugccua

SEQ ID NO: 1676432 - RNA, 19 nt, Artificial Sequence
  Description of Artificial Sequence: Synthetic oligonucleotide
  Antisense strand to SEQ ID NO: 1676431
uaggcaaccacuaauauau

SEQ ID NO: 1676433 - RNA, 19 nt, Artificial Sequence
  Description of Artificial Sequence: Synthetic oligonucleotide
  Sense strand starting at position 512 of SEQ ID NO: 1561499
gcuuaaagugaacauuaug

SEQ ID NO: 1676434 - RNA, 19 nt, Artificial Sequence
  Description of Artificial Sequence: Synthetic oligonucleotide
  Antisense strand to SEQ ID NO: 1676433
cauaauguucacuuuaagc

SEQ ID NO: 1676435 - RNA, 19 nt, Artificial Sequence
  Description of Artificial Sequence: Synthetic oligonucleotide
  Sense strand starting at position 520 of SEQ ID NO: 1561499
ugaacauuauguuaugcaa

SEQ ID NO: 1676436 - RNA, 19 nt, Artificial Sequence
  Description of Artificial Sequence: Synthetic oligonucleotide
  Antisense strand to SEQ ID NO: 1676435
uugcauaacauaauguuca

SEQ ID NO: 1676437 - RNA, 19 nt, Artificial Sequence
  Description of Artificial Sequence: Synthetic oligonucleotide
  Sense strand starting at position 649 of SEQ ID NO: 1561499
gguuccagaucuuuguaca

SEQ ID NO: 1676438 - RNA, 19 nt, Artificial Sequence
  Description of Artificial Sequence: Synthetic oligonucleotide
  Antisense strand to SEQ ID NO: 1676437
uguacaaagaucuggaacc

SEQ ID NO: 1676439 - RNA, 19 nt, Artificial Sequence
  Description of Artificial Sequence: Synthetic oligonucleotide
  Sense strand starting at position 650 of SEQ ID NO: 1561499
guuccagaucuuuguacaa

SEQ ID NO: 1676440 - RNA, 19 nt, Artificial Sequence
  Description of Artificial Sequence: Synthetic oligonucleotide
  Antisense strand to SEQ ID NO: 1676439
uuguacaaagaucuggaac

SEQ ID NO: 1676441 - RNA, 19 nt, Artificial Sequence
  Description of Artificial Sequence: Synthetic oligonucleotide
  Sense strand starting at position 681 of SEQ ID NO: 1561499
ucgaauggauuccugggua

SEQ ID NO: 1676442 - RNA, 19 nt, Artificial Sequence
  Description of Artificial Sequence: Synthetic oligonucleotide
  Antisense strand to SEQ ID NO: 1676441
uacccaggaauccauucga

SEQ ID NO: 1676443 - RNA, 19 nt, Artificial Sequence
  Description of Artificial Sequence: Synthetic oligonucleotide
  Sense strand starting at position 684 of SEQ ID NO: 1561499
aauggauuccuggguaugu

SEQ ID NO: 1676444 - RNA, 19 nt, Artificial Sequence
  Description of Artificial Sequence: Synthetic oligonucleotide
  Antisense strand to SEQ ID NO: 1676443
acauacccaggaauccauu

SEQ ID NO: 1676445 - RNA, 19 nt, Artificial Sequence
  Description of Artificial Sequence: Synthetic oligonucleotide
  Sense strand starting at position 688 of SEQ ID NO: 1561499
gauuccuggguauguguau

SEQ ID NO: 1676446 - RNA, 19 nt, Artificial Sequence
  Description of Artificial Sequence: Synthetic oligonucleotide
  Antisense strand to SEQ ID NO: 1676445
auacacauacccaggaauc

SEQ ID NO: 1676447 - RNA, 19 nt, Artificial Sequence
  Description of Artificial Sequence: Synthetic oligonucleotide
  Sense strand starting at position 694 of SEQ ID NO: 1561499
uggguauguguauaaagca

SEQ ID NO: 1676448 - RNA, 19 nt, Artificial Sequence
  Description of Artificial Sequence: Synthetic oligonucleotide
  Antisense strand to SEQ ID NO: 1676447
ugcuuuauacacauaccca

SEQ ID NO: 1676449 - RNA, 19 nt, Artificial Sequence
  Description of Artificial Sequence: Synthetic oligonucleotide
  Sense strand starting at position 773 of SEQ ID NO: 1561499
cguacuuugcaccauuauu

SEQ ID NO: 1676450 - RNA, 19 nt, Artificial Sequence
  Description of Artificial Sequence: Synthetic oligonucleotide
  Antisense strand to SEQ ID NO: 1676449
aauaauggugcaaaguacg

SEQ ID NO: 1676451 - RNA, 19 nt, Artificial Sequence
  Description of Artificial Sequence: Synthetic oligonucleotide
  Sense strand starting at position 813 of SEQ ID NO: 1561499
gccgucacugcauguuuaa

SEQ ID NO: 1676452 - RNA, 19 nt, Artificial Sequence
  Description of Artificial Sequence: Synthetic oligonucleotide
  Antisense strand to SEQ ID NO: 1676451
uuaaacaugcagugacggc

SEQ ID NO: 1676453 - RNA, 19 nt, Artificial Sequence
  Description of Artificial Sequence: Synthetic oligonucleotide
  Sense strand starting at position 1812 of SEQ ID NO: 1561499
ccauuuggcguucgcaaga

SEQ ID NO: 1676454 - RNA, 19 nt, Artificial Sequence
  Description of Artificial Sequence: Synthetic oligonucleotide
  Antisense strand to SEQ ID NO: 1676453
ucuugcgaacgccaaaugg

SEQ ID NO: 1676455 - RNA, 19 nt, Artificial Sequence
  Description of Artificial Sequence: Synthetic oligonucleotide
  Sense strand starting at position 1823 of SEQ ID NO: 1561499
ucgcaagauugugagaaag

SEQ ID NO: 1676456 - RNA, 19 nt, Artificial Sequence
  Description of Artificial Sequence: Synthetic oligonucleotide
  Antisense strand to SEQ ID NO: 1676455
cuuucucacaaucuugcga

SEQ ID NO: 1676457 - RNA, 19 nt, Artificial Sequence
  Description of Artificial Sequence: Synthetic oligonucleotide
  Sense strand starting at position 1825 of SEQ ID NO: 1561499
gcaagauugugagaaagug

SEQ ID NO: 1676458 - RNA, 19 nt, Artificial Sequence
  Description of Artificial Sequence: Synthetic oligonucleotide
  Antisense strand to SEQ ID NO: 1676457
cacuuucucacaaucuugc

SEQ ID NO: 1676459 - RNA, 19 nt, Artificial Sequence
  Description of Artificial Sequence: Synthetic oligonucleotide
  Sense strand starting at position 1834 of SEQ ID NO: 1561499
ugagaaagugacugcuguu

SEQ ID NO: 1676460 - RNA, 19 nt, Artificial Sequence
  Description of Artificial Sequence: Synthetic oligonucleotide
  Antisense strand to SEQ ID NO: 1676459
aacagcagucacuuucuca

SEQ ID NO: 1676461 - RNA, 19 nt, Artificial Sequence
  Description of Artificial Sequence: Synthetic oligonucleotide
  Sense strand starting at position 1846 of SEQ ID NO: 1561499
ugcuguuauucucuuuaag

SEQ ID NO: 1676462 - RNA, 19 nt, Artificial Sequence
  Description of Artificial Sequence: Synthetic oligonucleotide
  Antisense strand to SEQ ID NO: 1676461
cuuaaagagaauaacagca

SEQ ID NO: 1676463 - RNA, 19 nt, Artificial Sequence
  Description of Artificial Sequence: Synthetic oligonucleotide
  Sense strand starting at position 1980 of SEQ ID NO: 1561499
cgacgcacccugugaguuu

SEQ ID NO: 1676464 - RNA, 19 nt, Artificial Sequence
  Description of Artificial Sequence: Synthetic oligonucleotide
  Antisense strand to SEQ ID NO: 1676463
aaacucacagggugcgucg

SEQ ID NO: 1676465 - RNA, 19 nt, Artificial Sequence
  Description of Artificial Sequence: Synthetic oligonucleotide
  Sense strand starting at position 1998 of SEQ ID NO: 1561499
uuccucuaucgauaugcau

SEQ ID NO: 1676466 - RNA, 19 nt, Artificial Sequence
  Description of Artificial Sequence: Synthetic oligonucleotide
  Antisense strand to SEQ ID NO: 1676465
augcauaucgauagaggaa

SEQ ID NO: 1676467 - RNA, 19 nt, Artificial Sequence
  Description of Artificial Sequence: Synthetic oligonucleotide
  Sense strand starting at position 2544 of SEQ ID NO: 1561499
acaguaagccgagaucaag

SEQ ID NO: 1676468 - RNA, 19 nt, Artificial Sequence
  Description of Artificial Sequence: Synthetic oligonucleotide
  Antisense strand to SEQ ID NO: 1676467
cuugaucucggcuuacugu

SEQ ID NO: 1676469 - RNA, 19 nt, Artificial Sequence
  Description of Artificial Sequence: Synthetic oligonucleotide
  Sense strand starting at position 2620 of SEQ ID NO: 1561499
gggacuguagguggugaua

SEQ ID NO: 1676470 - RNA, 19 nt, Artificial Sequence
  Description of Artificial Sequence: Synthetic oligonucleotide
  Antisense strand to SEQ ID NO: 1676469
uaucaccaccuacaguccc

SEQ ID NO: 1676471 - RNA, 19 nt, Artificial Sequence
  Description of Artificial Sequence: Synthetic oligonucleotide
  Sense strand starting at position 2661 of SEQ ID NO: 1561499
ggaagcuagacuugaguga

SEQ ID NO: 1676472 - RNA, 19 nt, Artificial Sequence
  Description of Artificial Sequence: Synthetic oligonucleotide
  Antisense strand to SEQ ID NO: 1676471
ucacucaagucuagcuucc

SEQ ID NO: 1676473 - RNA, 19 nt, Artificial Sequence
  Description of Artificial Sequence: Synthetic oligonucleotide
  Sense strand starting at position 2700 of SEQ ID NO: 1561499
ugaagauauuuccacuagu

SEQ ID NO: 1676474 - RNA, 19 nt, Artificial Sequence
  Description of Artificial Sequence: Synthetic oligonucleotide
  Antisense strand to SEQ ID NO: 1676473
acuaguggaaauaucuuca

SEQ ID NO: 1676475 - RNA, 19 nt, Artificial Sequence
  Description of Artificial Sequence: Synthetic oligonucleotide
  Sense strand starting at position 2885 of SEQ ID NO: 1561499
ggcugaauucgagggagag

SEQ ID NO: 1676476 - RNA, 19 nt, Artificial Sequence
  Description of Artificial Sequence: Synthetic oligonucleotide
  Antisense strand to SEQ ID NO: 1676475
cucucccucgaauucagcc

SEQ ID NO: 1676477 - RNA, 19 nt, Artificial Sequence
  Description of Artificial Sequence: Synthetic oligonucleotide
  Sense strand starting at position 2999 of SEQ ID NO: 1561499
gcaaucuauggaugguaca

SEQ ID NO: 1676478 - RNA, 19 nt, Artificial Sequence
  Description of Artificial Sequence: Synthetic oligonucleotide
  Antisense strand to SEQ ID NO: 1676477
uguaccauccauagauugc

SEQ ID NO: 1676479 - RNA, 19 nt, Artificial Sequence
  Description of Artificial Sequence: Synthetic oligonucleotide
  Sense strand starting at position 3376 of SEQ ID NO: 1561499
ggccuuuguacguauuguu

SEQ ID NO: 1676480 - RNA, 19 nt, Artificial Sequence
  Description of Artificial Sequence: Synthetic oligonucleotide
  Antisense strand to SEQ ID NO: 1676479
aacaauacguacaaaggcc

SEQ ID NO: 1676481 - RNA, 19 nt, Artificial Sequence
  Description of Artificial Sequence: Synthetic oligonucleotide
  Sense strand starting at position 3403 of SEQ ID NO: 1561499
cuggaaucuucuuccuugu

SEQ ID NO: 1676482 - RNA, 19 nt, Artificial Sequence
  Description of Artificial Sequence: Synthetic oligonucleotide
  Antisense strand to SEQ ID NO: 1676481
acaaggaagaagauuccag

SEQ ID NO: 1676483 - RNA, 19 nt, Artificial Sequence
  Description of Artificial Sequence: Synthetic oligonucleotide
  Sense strand starting at position 3465 of SEQ ID NO: 1561499
augucacauccugguaaca

SEQ ID NO: 1676484 - RNA, 19 nt, Artificial Sequence
  Description of Artificial Sequence: Synthetic oligonucleotide
  Antisense strand to SEQ ID NO: 1676483
uguuaccaggaugugacau

SEQ ID NO: 1676485 - RNA, 19 nt, Artificial Sequence
  Description of Artificial Sequence: Synthetic oligonucleotide
  Sense strand starting at position 3540 of SEQ ID NO: 1561499
ucguaucguaacugauagu

SEQ ID NO: 1676486 - RNA, 19 nt, Artificial Sequence
  Description of Artificial Sequence: Synthetic oligonucleotide
  Antisense strand to SEQ ID NO: 1676485
acuaucaguuacgauacga

SEQ ID NO: 1676487 - RNA, 19 nt, Artificial Sequence
  Description of Artificial Sequence: Synthetic oligonucleotide
  Sense strand starting at position 3546 of SEQ ID NO: 1561499
cguaacugauagucucaua

SEQ ID NO: 1676488 - RNA, 19 nt, Artificial Sequence
  Description of Artificial Sequence: Synthetic oligonucleotide
  Antisense strand to SEQ ID NO: 1676487
uaugagacuaucaguuacg

SEQ ID NO: 1676489 - RNA, 19 nt, Artificial Sequence
  Description of Artificial Sequence: Synthetic oligonucleotide
  Sense strand starting at position 3551 of SEQ ID NO: 1561499
cugauagucucauacagua

SEQ ID NO: 1676490 - RNA, 19 nt, Artificial Sequence
  Description of Artificial Sequence: Synthetic oligonucleotide
  Antisense strand to SEQ ID NO: 1676489
uacuguaugagacuaucag

SEQ ID NO: 1676491 - RNA, 19 nt, Artificial Sequence
  Description of Artificial Sequence: Synthetic oligonucleotide
  Sense strand starting at position 3709 of SEQ ID NO: 1561499
agagauaccuuugaccuaa

SEQ ID NO: 1676492 - RNA, 19 nt, Artificial Sequence
  Description of Artificial Sequence: Synthetic oligonucleotide
  Antisense strand to SEQ ID NO: 1676491
uuaggucaaagguaucucu

SEQ ID NO: 1676493 - RNA, 19 nt, Artificial Sequence
  Description of Artificial Sequence: Synthetic oligonucleotide
  Sense strand starting at position 3722 of SEQ ID NO: 1561499
accuaaaggugucaggaaa

SEQ ID NO: 1676494 - RNA, 19 nt, Artificial Sequence
  Description of Artificial Sequence: Synthetic oligonucleotide
  Antisense strand to SEQ ID NO: 1676493
uuuccugacaccuuuaggu

SEQ ID NO: 1676495 - RNA, 19 nt, Artificial Sequence
  Description of Artificial Sequence: Synthetic oligonucleotide
  Sense strand starting at position 3839 of SEQ ID NO: 1561499
agggucuaaugggauuuau

SEQ ID NO: 1676496 - RNA, 19 nt, Artificial Sequence
  Description of Artificial Sequence: Synthetic oligonucleotide
  Antisense strand to SEQ ID NO: 1676495
auaaaucccauuagacccu

SEQ ID NO: 1676497 - RNA, 19 nt, Artificial Sequence
  Description of Artificial Sequence: Synthetic oligonucleotide
  Sense strand starting at position 3887 of SEQ ID NO: 1561499
ggauuaauguuguaaacca

SEQ ID NO: 1676498 - RNA, 19 nt, Artificial Sequence
  Description of Artificial Sequence: Synthetic oligonucleotide
  Antisense strand to SEQ ID NO: 1676497
ugguuuacaacauuaaucc

SEQ ID NO: 1676499 - RNA, 19 nt, Artificial Sequence
  Description of Artificial Sequence: Synthetic oligonucleotide
  Sense strand starting at position 656 of SEQ ID NO: 1561500
uugcauauauaguuugaga

SEQ ID NO: 1676500 - RNA, 19 nt, Artificial Sequence
  Description of Artificial Sequence: Synthetic oligonucleotide
  Antisense strand to SEQ ID NO: 1676499
ucucaaacuauauaugcaa

SEQ ID NO: 1676501 - RNA, 19 nt, Artificial Sequence
  Description of Artificial Sequence: Synthetic oligonucleotide
  Sense strand starting at position 658 of SEQ ID NO: 1561500
gcauauauaguuugagaac

SEQ ID NO: 1676502 - RNA, 19 nt, Artificial Sequence
  Description of Artificial Sequence: Synthetic oligonucleotide
  Antisense strand to SEQ ID NO: 1676501
guucucaaacuauauaugc

SEQ ID NO: 1676503 - RNA, 19 nt, Artificial Sequence
  Description of Artificial Sequence: Synthetic oligonucleotide
  Sense strand starting at position 667 of SEQ ID NO: 1561500
guuugagaacugugaucca

SEQ ID NO: 1676504 - RNA, 19 nt, Artificial Sequence
  Description of Artificial Sequence: Synthetic oligonucleotide
  Antisense strand to SEQ ID NO: 1676503
uggaucacaguucucaaac

SEQ ID NO: 1676505 - RNA, 19 nt, Artificial Sequence
  Description of Artificial Sequence: Synthetic oligonucleotide
  Sense strand starting at position 670 of SEQ ID NO: 1561500
ugagaacugugauccacca

SEQ ID NO: 1676506 - RNA, 19 nt, Artificial Sequence
  Description of Artificial Sequence: Synthetic oligonucleotide
  Antisense strand to SEQ ID NO: 1676505
ugguggaucacaguucuca

SEQ ID NO: 1676507 - RNA, 19 nt, Artificial Sequence
  Description of Artificial Sequence: Synthetic oligonucleotide
  Sense strand starting at position 723 of SEQ ID NO: 1561500
agcuauuuauccugugaca

SEQ ID NO: 1676508 - RNA, 19 nt, Artificial Sequence
  Description of Artificial Sequence: Synthetic oligonucleotide
  Antisense strand to SEQ ID NO: 1676507
ugucacaggauaaauagcu

SEQ ID NO: 1676509 - RNA, 19 nt, Artificial Sequence
  Description of Artificial Sequence: Synthetic oligonucleotide
  Sense strand starting at position 735 of SEQ ID NO: 1561500
ugugacagauucuuuacaa

SEQ ID NO: 1676510 - RNA, 19 nt, Artificial Sequence
  Description of Artificial Sequence: Synthetic oligonucleotide
  Antisense strand to SEQ ID NO: 1676509
uuguaaagaaucugucaca

SEQ ID NO: 1676511 - RNA, 19 nt, Artificial Sequence
  Description of Artificial Sequence: Synthetic oligonucleotide
  Sense strand starting at position 736 of SEQ ID NO: 1561500
gugacagauucuuuacaaa

SEQ ID NO: 1676512 - RNA, 19 nt, Artificial Sequence
  Description of Artificial Sequence: Synthetic oligonucleotide
  Antisense strand to SEQ ID NO: 1676511
uuuguaaagaaucugucac

SEQ ID NO: 1676513 - RNA, 19 nt, Artificial Sequence
  Description of Artificial Sequence: Synthetic oligonucleotide
  Sense strand starting at position 785 of SEQ ID NO: 1561500
ucccuuggacgcuguauaa

SEQ ID NO: 1676514 - RNA, 19 nt, Artificial Sequence
  Description of Artificial Sequence: Synthetic oligonucleotide
  Antisense strand to SEQ ID NO: 1676513
uuauacagcguccaaggga

SEQ ID NO: 1676515 - RNA, 19 nt, Artificial Sequence
  Description of Artificial Sequence: Synthetic oligonucleotide
  Sense strand starting at position 1003 of SEQ ID NO: 1561500
agggcauuggucuacagac

SEQ ID NO: 1676516 - RNA, 19 nt, Artificial Sequence
  Description of Artificial Sequence: Synthetic oligonucleotide
  Antisense strand to SEQ ID NO: 1676515
gucuguagaccaaugcccu

SEQ ID NO: 1676517 - RNA, 19 nt, Artificial Sequence
  Description of Artificial Sequence: Synthetic oligonucleotide
  Sense strand starting at position 1154 of SEQ ID NO: 1561500
ucauaauacuuagcgcuua

SEQ ID NO: 1676518 - RNA, 19 nt, Artificial Sequence
  Description of Artificial Sequence: Synthetic oligonucleotide
  Antisense strand to SEQ ID NO: 1676517
uaagcgcuaaguauuauga

SEQ ID NO: 1676519 - RNA, 19 nt, Artificial Sequence
  Description of Artificial Sequence: Synthetic oligonucleotide
  Sense strand starting at position 1159 of SEQ ID NO: 1561500
auacuuagcgcuuauguuu

SEQ ID NO: 1676520 - RNA, 19 nt, Artificial Sequence
  Description of Artificial Sequence: Synthetic oligonucleotide
  Antisense strand to SEQ ID NO: 1676519
aaacauaagcgcuaaguau

SEQ ID NO: 1676521 - RNA, 19 nt, Artificial Sequence
  Description of Artificial Sequence: Synthetic oligonucleotide
  Sense strand starting at position 1193 of SEQ ID NO: 1561500
gcaggcgcguaauuucaua

SEQ ID NO: 1676522 - RNA, 19 nt, Artificial Sequence
  Description of Artificial Sequence: Synthetic oligonucleotide
  Antisense strand to SEQ ID NO: 1676521
uaugaaauuacgcgccugc

SEQ ID NO: 1676523 - RNA, 19 nt, Artificial Sequence
  Description of Artificial Sequence: Synthetic oligonucleotide
  Sense strand starting at position 1285 of SEQ ID NO: 1561500
caaggccguguuuguuaaa

SEQ ID NO: 1676524 - RNA, 19 nt, Artificial Sequence
  Description of Artificial Sequence: Synthetic oligonucleotide
  Antisense strand to SEQ ID NO: 1676523
uuuaacaaacacggccuug

SEQ ID NO: 1676525 - RNA, 19 nt, Artificial Sequence
  Description of Artificial Sequence: Synthetic oligonucleotide
  Sense strand starting at position 1292 of SEQ ID NO: 1561500
guguuuguuaaacauguaa

SEQ ID NO: 1676526 - RNA, 19 nt, Artificial Sequence
  Description of Artificial Sequence: Synthetic oligonucleotide
  Antisense strand to SEQ ID NO: 1676525
uuacauguuuaacaaacac

SEQ ID NO: 1676527 - RNA, 19 nt, Artificial Sequence
  Description of Artificial Sequence: Synthetic oligonucleotide
  Sense strand starting at position 1570 of SEQ ID NO: 1561500
aggugcguuuagucagaau

SEQ ID NO: 1676528 - RNA, 19 nt, Artificial Sequence
  Description of Artificial Sequence: Synthetic oligonucleotide
  Antisense strand to SEQ ID NO: 1676527
auucugacuaaacgcaccu

SEQ ID NO: 1676529 - RNA, 19 nt, Artificial Sequence
  Description of Artificial Sequence: Synthetic oligonucleotide
  Sense strand starting at position 1757 of SEQ ID NO: 1561500
aauaaaggguucuuugcau

SEQ ID NO: 1676530 - RNA, 19 nt, Artificial Sequence
  Description of Artificial Sequence: Synthetic oligonucleotide
  Antisense strand to SEQ ID NO: 1676529
augcaaagaacccuuuauu

SEQ ID NO: 1676531 - RNA, 19 nt, Artificial Sequence
  Description of Artificial Sequence: Synthetic oligonucleotide
  Sense strand starting at position 1763 of SEQ ID NO: 1561500
ggguucuuugcaugcuuua

SEQ ID NO: 1676532 - RNA, 19 nt, Artificial Sequence
  Description of Artificial Sequence: Synthetic oligonucleotide
  Antisense strand to SEQ ID NO: 1676531
uaaagcaugcaaagaaccc

SEQ ID NO: 1676533 - RNA, 19 nt, Artificial Sequence
  Description of Artificial Sequence: Synthetic oligonucleotide
  Sense strand starting at position 1837 of SEQ ID NO: 1561500
ggcaauuacucuucuaagc

SEQ ID NO: 1676534 - RNA, 19 nt, Artificial Sequence
  Description of Artificial Sequence: Synthetic oligonucleotide
  Antisense strand to SEQ ID NO: 1676533
gcuuagaagaguaauugcc

SEQ ID NO: 1676535 - RNA, 19 nt, Artificial Sequence
  Description of Artificial Sequence: Synthetic oligonucleotide
  Sense strand starting at position 1869 of SEQ ID NO: 1561500
uguuucuucucacuggaaa

SEQ ID NO: 1676536 - RNA, 19 nt, Artificial Sequence
  Description of Artificial Sequence: Synthetic oligonucleotide
  Antisense strand to SEQ ID NO: 1676535
uuuccagugagaagaaaca

SEQ ID NO: 1676537 - RNA, 19 nt, Artificial Sequence
  Description of Artificial Sequence: Synthetic oligonucleotide
  Sense strand starting at position 1870 of SEQ ID NO: 1561500
guuucuucucacuggaaau

SEQ ID NO: 1676538 - RNA, 19 nt, Artificial Sequence
  Description of Artificial Sequence: Synthetic oligonucleotide
  Antisense strand to SEQ ID NO: 1676537
auuuccagugagaagaaac

SEQ ID NO: 1676539 - RNA, 19 nt, Artificial Sequence
  Description of Artificial Sequence: Synthetic oligonucleotide
  Sense strand starting at position 1942 of SEQ ID NO: 1561500
gucguacuaggcugaggaa

SEQ ID NO: 1676540 - RNA, 19 nt, Artificial Sequence
  Description of Artificial Sequence: Synthetic oligonucleotide
  Antisense strand to SEQ ID NO: 1676539
uuccucagccuaguacgac

SEQ ID NO: 1676541 - RNA, 19 nt, Artificial Sequence
  Description of Artificial Sequence: Synthetic oligonucleotide
  Sense strand starting at position 2454 of SEQ ID NO: 1561500
cgcagguaccggugagaaa

SEQ ID NO: 1676542 - RNA, 19 nt, Artificial Sequence
  Description of Artificial Sequence: Synthetic oligonucleotide
  Antisense strand to SEQ ID NO: 1676541
uuucucaccgguaccugcg

SEQ ID NO: 1676543 - RNA, 19 nt, Artificial Sequence
  Description of Artificial Sequence: Synthetic oligonucleotide
  Sense strand starting at position 2455 of SEQ ID NO: 1561500
gcagguaccggugagaaau

SEQ ID NO: 1676544 - RNA, 19 nt, Artificial Sequence
  Description of Artificial Sequence: Synthetic oligonucleotide
  Antisense strand to SEQ ID NO: 1676543
auuucucaccgguaccugc

SEQ ID NO: 1676545 - RNA, 19 nt, Artificial Sequence
  Description of Artificial Sequence: Synthetic oligonucleotide
  Sense strand starting at position 2626 of SEQ ID NO: 1561500
gaggcuuaggguggaguua

SEQ ID NO: 1676546 - RNA, 19 nt, Artificial Sequence
  Description of Artificial Sequence: Synthetic oligonucleotide
  Antisense strand to SEQ ID NO: 1676545
uaacuccacccuaagccuc

SEQ ID NO: 1676547 - RNA, 19 nt, Artificial Sequence
  Description of Artificial Sequence: Synthetic oligonucleotide
  Sense strand starting at position 2667 of SEQ ID NO: 1561500
aggcgagucugaguagaaa

SEQ ID NO: 1676548 - RNA, 19 nt, Artificial Sequence
  Description of Artificial Sequence: Synthetic oligonucleotide
  Antisense strand to SEQ ID NO: 1676547
uuucuacucagacucgccu

SEQ ID NO: 1676549 - RNA, 19 nt, Artificial Sequence
  Description of Artificial Sequence: Synthetic oligonucleotide
  Sense strand starting at position 2678 of SEQ ID NO: 1561500
aguagaaacugauccaggu

SEQ ID NO: 1676550 - RNA, 19 nt, Artificial Sequence
  Description of Artificial Sequence: Synthetic oligonucleotide
  Antisense strand to SEQ ID NO: 1676549
accuggaucaguuucuacu

SEQ ID NO: 1676551 - RNA, 19 nt, Artificial Sequence
  Description of Artificial Sequence: Synthetic oligonucleotide
  Sense strand starting at position 2840 of SEQ ID NO: 1561500
ucucgucaagcgcuaagua

SEQ ID NO: 1676552 - RNA, 19 nt, Artificial Sequence
  Description of Artificial Sequence: Synthetic oligonucleotide
  Antisense strand to SEQ ID NO: 1676551
uacuuagcgcuugacgaga

SEQ ID NO: 1676553 - RNA, 19 nt, Artificial Sequence
  Description of Artificial Sequence: Synthetic oligonucleotide
  Sense strand starting at position 2841 of SEQ ID NO: 1561500
cucgucaagcgcuaaguaa

SEQ ID NO: 1676554 - RNA, 19 nt, Artificial Sequence
  Description of Artificial Sequence: Synthetic oligonucleotide
  Antisense strand to SEQ ID NO: 1676553
uuacuuagcgcuugacgag

SEQ ID NO: 1676555 - RNA, 19 nt, Artificial Sequence
  Description of Artificial Sequence: Synthetic oligonucleotide
  Sense strand starting at position 2870 of SEQ ID NO: 1561500
guccuauaugaggguuuga

SEQ ID NO: 1676556 - RNA, 19 nt, Artificial Sequence
  Description of Artificial Sequence: Synthetic oligonucleotide
  Antisense strand to SEQ ID NO: 1676555
ucaaacccucauauaggac

SEQ ID NO: 1676557 - RNA, 19 nt, Artificial Sequence
  Description of Artificial Sequence: Synthetic oligonucleotide
  Sense strand starting at position 2981 of SEQ ID NO: 1561500
agaaauaacugcuaaauag

SEQ ID NO: 1676558 - RNA, 19 nt, Artificial Sequence
  Description of Artificial Sequence: Synthetic oligonucleotide
  Antisense strand to SEQ ID NO: 1676557
cuauuuagcaguuauuucu

SEQ ID NO: 1676559 - RNA, 19 nt, Artificial Sequence
  Description of Artificial Sequence: Synthetic oligonucleotide
  Sense strand starting at position 3018 of SEQ ID NO: 1561500
ggaauaggcuucuugaaga

SEQ ID NO: 1676560 - RNA, 19 nt, Artificial Sequence
  Description of Artificial Sequence: Synthetic oligonucleotide
  Antisense strand to SEQ ID NO: 1676559
ucuucaagaagccuauucc

SEQ ID NO: 1676561 - RNA, 19 nt, Artificial Sequence
  Description of Artificial Sequence: Synthetic oligonucleotide
  Sense strand starting at position 3204 of SEQ ID NO: 1561500
auuuaauaguccgaauuuc

SEQ ID NO: 1676562 - RNA, 19 nt, Artificial Sequence
  Description of Artificial Sequence: Synthetic oligonucleotide
  Antisense strand to SEQ ID NO: 1676561
gaaauucggacuauuaaau

SEQ ID NO: 1676563 - RNA, 19 nt, Artificial Sequence
  Description of Artificial Sequence: Synthetic oligonucleotide
  Sense strand starting at position 3222 of SEQ ID NO: 1561500
ccuguuucuuuggcuuaau

SEQ ID NO: 1676564 - RNA, 19 nt, Artificial Sequence
  Description of Artificial Sequence: Synthetic oligonucleotide
  Antisense strand to SEQ ID NO: 1676563
auuaagccaaagaaacagg

SEQ ID NO: 1676565 - RNA, 19 nt, Artificial Sequence
  Description of Artificial Sequence: Synthetic oligonucleotide
  Sense strand starting at position 3223 of SEQ ID NO: 1561500
cuguuucuuuggcuuaaua

SEQ ID NO: 1676566 - RNA, 19 nt, Artificial Sequence
  Description of Artificial Sequence: Synthetic oligonucleotide
  Antisense strand to SEQ ID NO: 1676565
uauuaagccaaagaaacag

SEQ ID NO: 1676567 - RNA, 19 nt, Artificial Sequence
  Description of Artificial Sequence: Synthetic oligonucleotide
  Sense strand starting at position 3225 of SEQ ID NO: 1561500
guuucuuuggcuuaauaaa

SEQ ID NO: 1676568 - RNA, 19 nt, Artificial Sequence
  Description of Artificial Sequence: Synthetic oligonucleotide
  Antisense strand to SEQ ID NO: 1676567
uuuauuaagccaaagaaac

SEQ ID NO: 1676569 - RNA, 19 nt, Artificial Sequence
  Description of Artificial Sequence: Synthetic oligonucleotide
  Sense strand starting at position 3349 of SEQ ID NO: 1561500
uaagaaacauagugagaca

SEQ ID NO: 1676570 - RNA, 19 nt, Artificial Sequence
  Description of Artificial Sequence: Synthetic oligonucleotide
  Antisense strand to SEQ ID NO: 1676569
ugucucacuauguuucuua

SEQ ID NO: 1676571 - RNA, 19 nt, Artificial Sequence
  Description of Artificial Sequence: Synthetic oligonucleotide
  Sense strand starting at position 3467 of SEQ ID NO: 1561500
ucaguugagcccggaaguu

SEQ ID NO: 1676572 - RNA, 19 nt, Artificial Sequence
  Description of Artificial Sequence: Synthetic oligonucleotide
  Antisense strand to SEQ ID NO: 1676571
aacuuccgggcucaacuga

SEQ ID NO: 1676573 - RNA, 19 nt, Artificial Sequence
  Description of Artificial Sequence: Synthetic oligonucleotide
  Sense strand starting at position 3716 of SEQ ID NO: 1561500
cuuaauuaguucuuggauu

SEQ ID NO: 1676574 - RNA, 19 nt, Artificial Sequence
  Description of Artificial Sequence: Synthetic oligonucleotide
  Antisense strand to SEQ ID NO: 1676573
aauccaagaacuaauuaag

SEQ ID NO: 1676575 - RNA, 19 nt, Artificial Sequence
  Description of Artificial Sequence: Synthetic oligonucleotide
  Sense strand starting at position 3728 of SEQ ID NO: 1561500
uuggauuuguugcuccuga

SEQ ID NO: 1676576 - RNA, 19 nt, Artificial Sequence
  Description of Artificial Sequence: Synthetic oligonucleotide
  Antisense strand to SEQ ID NO: 1676575
ucaggagcaacaaauccaa

SEQ ID NO: 1676577 - RNA, 19 nt, Artificial Sequence
  Description of Artificial Sequence: Synthetic oligonucleotide
  Sense strand starting at position 3739 of SEQ ID NO: 1561500
gcuccugaaucuccugaau

SEQ ID NO: 1676578 - RNA, 19 nt, Artificial Sequence
  Description of Artificial Sequence: Synthetic oligonucleotide
  Antisense strand to SEQ ID NO: 1676577
auucaggagauucaggagc

SEQ ID NO: 1676579 - RNA, 19 nt, Artificial Sequence
  Description of Artificial Sequence: Synthetic oligonucleotide
  Sense strand starting at position 54 of SEQ ID NO: 1561501
uugcauauauaguuugaga

SEQ ID NO: 1676580 - RNA, 19 nt, Artificial Sequence
  Description of Artificial Sequence: Synthetic oligonucleotide
  Antisense strand to SEQ ID NO: 1676579
ucucaaacuauauaugcaa

SEQ ID NO: 1676581 - RNA, 19 nt, Artificial Sequence
  Description of Artificial Sequence: Synthetic oligonucleotide
  Sense strand starting at position 56 of SEQ ID NO: 1561501
gcauauauaguuugagaac

SEQ ID NO: 1676582 - RNA, 19 nt, Artificial Sequence
  Description of Artificial Sequence: Synthetic oligonucleotide
  Antisense strand to SEQ ID NO: 1676581
guucucaaacuauauaugc

SEQ ID NO: 1676583 - RNA, 19 nt, Artificial Sequence
  Description of Artificial Sequence: Synthetic oligonucleotide
  Sense strand starting at position 65 of SEQ ID NO: 1561501
guuugagaacugugaucca

SEQ ID NO: 1676584 - RNA, 19 nt, Artificial Sequence
  Description of Artificial Sequence: Synthetic oligonucleotide
  Antisense strand to SEQ ID NO: 1676583
uggaucacaguucucaaac

SEQ ID NO: 1676585 - RNA, 19 nt, Artificial Sequence
  Description of Artificial Sequence: Synthetic oligonucleotide
  Sense strand starting at position 68 of SEQ ID NO: 1561501
ugagaacugugauccacca

SEQ ID NO: 1676586 - RNA, 19 nt, Artificial Sequence
  Description of Artificial Sequence: Synthetic oligonucleotide
  Antisense strand to SEQ ID NO: 1676585
ugguggaucacaguucuca

SEQ ID NO: 1676587 - RNA, 19 nt, Artificial Sequence
  Description of Artificial Sequence: Synthetic oligonucleotide
  Sense strand starting at position 133 of SEQ ID NO: 1561501
ugugacagauucuuuacaa

SEQ ID NO: 1676588 - RNA, 19 nt, Artificial Sequence
  Description of Artificial Sequence: Synthetic oligonucleotide
  Antisense strand to SEQ ID NO: 1676587
uuguaaagaaucugucaca

SEQ ID NO: 1676589 - RNA, 19 nt, Artificial Sequence
  Description of Artificial Sequence: Synthetic oligonucleotide
  Sense strand starting at position 134 of SEQ ID NO: 1561501
gugacagauucuuuacaaa

SEQ ID NO: 1676590 - RNA, 19 nt, Artificial Sequence
  Description of Artificial Sequence: Synthetic oligonucleotide
  Antisense strand to SEQ ID NO: 1676589
uuuguaaagaaucugucac

SEQ ID NO: 1676591 - RNA, 19 nt, Artificial Sequence
  Description of Artificial Sequence: Synthetic oligonucleotide
  Sense strand starting at position 401 of SEQ ID NO: 1561501
agggcauuggucuacagac

SEQ ID NO: 1676592 - RNA, 19 nt, Artificial Sequence
  Description of Artificial Sequence: Synthetic oligonucleotide
  Antisense strand to SEQ ID NO: 1676591
gucuguagaccaaugcccu

SEQ ID NO: 1676593 - RNA, 19 nt, Artificial Sequence
  Description of Artificial Sequence: Synthetic oligonucleotide
  Sense strand starting at position 591 of SEQ ID NO: 1561501
gcaggcgcguaauuucaua

SEQ ID NO: 1676594 - RNA, 19 nt, Artificial Sequence
  Description of Artificial Sequence: Synthetic oligonucleotide
  Antisense strand to SEQ ID NO: 1676593
uaugaaauuacgcgccugc

SEQ ID NO: 1676595 - RNA, 19 nt, Artificial Sequence
  Description of Artificial Sequence: Synthetic oligonucleotide
  Sense strand starting at position 690 of SEQ ID NO: 1561501
guguuuguuaaacauguaa

SEQ ID NO: 1676596 - RNA, 19 nt, Artificial Sequence
  Description of Artificial Sequence: Synthetic oligonucleotide
  Antisense strand to SEQ ID NO: 1676595
uuacauguuuaacaaacac

SEQ ID NO: 1676597 - RNA, 19 nt, Artificial Sequence
  Description of Artificial Sequence: Synthetic oligonucleotide
  Sense strand starting at position 1155 of SEQ ID NO: 1561501
aauaaaggguucuuugcau

SEQ ID NO: 1676598 - RNA, 19 nt, Artificial Sequence
  Description of Artificial Sequence: Synthetic oligonucleotide
  Antisense strand to SEQ ID NO: 1676597
augcaaagaacccuuuauu

SEQ ID NO: 1676599 - RNA, 19 nt, Artificial Sequence
  Description of Artificial Sequence: Synthetic oligonucleotide
  Sense strand starting at position 1235 of SEQ ID NO: 1561501
ggcaauuacucuucuaagc

SEQ ID NO: 1676600 - RNA, 19 nt, Artificial Sequence
  Description of Artificial Sequence: Synthetic oligonucleotide
  Antisense strand to SEQ ID NO: 1676599
gcuuagaagaguaauugcc

SEQ ID NO: 1676601 - RNA, 19 nt, Artificial Sequence
  Description of Artificial Sequence: Synthetic oligonucleotide
  Sense strand starting at position 1267 of SEQ ID NO: 1561501
uguuucuucucacuggaaa

SEQ ID NO: 1676602 - RNA, 19 nt, Artificial Sequence
  Description of Artificial Sequence: Synthetic oligonucleotide
  Antisense strand to SEQ ID NO: 1676601
uuuccagugagaagaaaca

SEQ ID NO: 1676603 - RNA, 19 nt, Artificial Sequence
  Description of Artificial Sequence: Synthetic oligonucleotide
  Sense strand starting at position 1268 of SEQ ID NO: 1561501
guuucuucucacuggaaau

SEQ ID NO: 1676604 - RNA, 19 nt, Artificial Sequence
  Description of Artificial Sequence: Synthetic oligonucleotide
  Antisense strand to SEQ ID NO: 1676603
auuuccagugagaagaaac

SEQ ID NO: 1676605 - RNA, 19 nt, Artificial Sequence
  Description of Artificial Sequence: Synthetic oligonucleotide
  Sense strand starting at position 1340 of SEQ ID NO: 1561501
gucguacuaggcugaggaa

SEQ ID NO: 1676606 - RNA, 19 nt, Artificial Sequence
  Description of Artificial Sequence: Synthetic oligonucleotide
  Antisense strand to SEQ ID NO: 1676605
uuccucagccuaguacgac

SEQ ID NO: 1676607 - RNA, 19 nt, Artificial Sequence
  Description of Artificial Sequence: Synthetic oligonucleotide
  Sense strand starting at position 1852 of SEQ ID NO: 1561501
cgcagguaccggugagaaa

SEQ ID NO: 1676608 - RNA, 19 nt, Artificial Sequence
  Description of Artificial Sequence: Synthetic oligonucleotide
  Antisense strand to SEQ ID NO: 1676607
uuucucaccgguaccugcg

SEQ ID NO: 1676609 - RNA, 19 nt, Artificial Sequence
  Description of Artificial Sequence: Synthetic oligonucleotide
  Sense strand starting at position 1853 of SEQ ID NO: 1561501
gcagguaccggugagaaau

SEQ ID NO: 1676610 - RNA, 19 nt, Artificial Sequence
  Description of Artificial Sequence: Synthetic oligonucleotide
  Antisense strand to SEQ ID NO: 1676609
auuucucaccgguaccugc

SEQ ID NO: 1676611 - RNA, 19 nt, Artificial Sequence
  Description of Artificial Sequence: Synthetic oligonucleotide
  Sense strand starting at position 2024 of SEQ ID NO: 1561501
gaggcuuaggguggaguua

SEQ ID NO: 1676612 - RNA, 19 nt, Artificial Sequence
  Description of Artificial Sequence: Synthetic oligonucleotide
  Antisense strand to SEQ ID NO: 1676611
uaacuccacccuaagccuc

SEQ ID NO: 1676613 - RNA, 19 nt, Artificial Sequence
  Description of Artificial Sequence: Synthetic oligonucleotide
  Sense strand starting at position 2065 of SEQ ID NO: 1561501
aggcgagucugaguagaaa

SEQ ID NO: 1676614 - RNA, 19 nt, Artificial Sequence
  Description of Artificial Sequence: Synthetic oligonucleotide
  Antisense strand to SEQ ID NO: 1676613
uuucuacucagacucgccu

SEQ ID NO: 1676615 - RNA, 19 nt, Artificial Sequence
  Description of Artificial Sequence: Synthetic oligonucleotide
  Sense strand starting at position 2076 of SEQ ID NO: 1561501
aguagaaacugauccaggu

SEQ ID NO: 1676616 - RNA, 19 nt, Artificial Sequence
  Description of Artificial Sequence: Synthetic oligonucleotide
  Antisense strand to SEQ ID NO: 1676615
accuggaucaguuucuacu

SEQ ID NO: 1676617 - RNA, 19 nt, Artificial Sequence
  Description of Artificial Sequence: Synthetic oligonucleotide
  Sense strand starting at position 2238 of SEQ ID NO: 1561501
ucucgucaagcgcuaagua

SEQ ID NO: 1676618 - RNA, 19 nt, Artificial Sequence
  Description of Artificial Sequence: Synthetic oligonucleotide
  Antisense strand to SEQ ID NO: 1676617
uacuuagcgcuugacgaga

SEQ ID NO: 1676619 - RNA, 19 nt, Artificial Sequence
  Description of Artificial Sequence: Synthetic oligonucleotide
  Sense strand starting at position 2268 of SEQ ID NO: 1561501
guccuauaugaggguuuga

SEQ ID NO: 1676620 - RNA, 19 nt, Artificial Sequence
  Description of Artificial Sequence: Synthetic oligonucleotide
  Antisense strand to SEQ ID NO: 1676619
ucaaacccucauauaggac

SEQ ID NO: 1676621 - RNA, 19 nt, Artificial Sequence
  Description of Artificial Sequence: Synthetic oligonucleotide
  Sense strand starting at position 2379 of SEQ ID NO: 1561501
agaaauaacugcuaaauag

SEQ ID NO: 1676622 - RNA, 19 nt, Artificial Sequence
  Description of Artificial Sequence: Synthetic oligonucleotide
  Antisense strand to SEQ ID NO: 1676621
cuauuuagcaguuauuucu

SEQ ID NO: 1676623 - RNA, 19 nt, Artificial Sequence
  Description of Artificial Sequence: Synthetic oligonucleotide
  Sense strand starting at position 2416 of SEQ ID NO: 1561501
ggaauaggcuucuugaaga

SEQ ID NO: 1676624 - RNA, 19 nt, Artificial Sequence
  Description of Artificial Sequence: Synthetic oligonucleotide
  Antisense strand to SEQ ID NO: 1676623
ucuucaagaagccuauucc

SEQ ID NO: 1676625 - RNA, 19 nt, Artificial Sequence
  Description of Artificial Sequence: Synthetic oligonucleotide
  Sense strand starting at position 2602 of SEQ ID NO: 1561501
auuuaauaguccgaauuuc

SEQ ID NO: 1676626 - RNA, 19 nt, Artificial Sequence
  Description of Artificial Sequence: Synthetic oligonucleotide
  Antisense strand to SEQ ID NO: 1676625
gaaauucggacuauuaaau

SEQ ID NO: 1676627 - RNA, 19 nt, Artificial Sequence
  Description of Artificial Sequence: Synthetic oligonucleotide
  Sense strand starting at position 2621 of SEQ ID NO: 1561501
cuguuucuuuggcuuaaua

SEQ ID NO: 1676628 - RNA, 19 nt, Artificial Sequence
  Description of Artificial Sequence: Synthetic oligonucleotide
  Antisense strand to SEQ ID NO: 1676627
uauuaagccaaagaaacag

SEQ ID NO: 1676629 - RNA, 19 nt, Artificial Sequence
  Description of Artificial Sequence: Synthetic oligonucleotide
  Sense strand starting at position 2623 of SEQ ID NO: 1561501
guuucuuuggcuuaauaaa

SEQ ID NO: 1676630 - RNA, 19 nt, Artificial Sequence
  Description of Artificial Sequence: Synthetic oligonucleotide
  Antisense strand to SEQ ID NO: 1676629
uuuauuaagccaaagaaac

SEQ ID NO: 1676631 - RNA, 19 nt, Artificial Sequence
  Description of Artificial Sequence: Synthetic oligonucleotide
  Sense strand starting at position 3114 of SEQ ID NO: 1561501
cuuaauuaguucuuggauu

SEQ ID NO: 1676632 - RNA, 19 nt, Artificial Sequence
  Description of Artificial Sequence: Synthetic oligonucleotide
  Antisense strand to SEQ ID NO: 1676631
aauccaagaacuaauuaag

SEQ ID NO: 1676633 - RNA, 19 nt, Artificial Sequence
  Description of Artificial Sequence: Synthetic oligonucleotide
  Sense strand starting at position 3126 of SEQ ID NO: 1561501
uuggauuuguugcuccuga

SEQ ID NO: 1676634 - RNA, 19 nt, Artificial Sequence
  Description of Artificial Sequence: Synthetic oligonucleotide
  Antisense strand to SEQ ID NO: 1676633
ucaggagcaacaaauccaa

SEQ ID NO: 1676635 - RNA, 19 nt, Artificial Sequence
  Description of Artificial Sequence: Synthetic oligonucleotide
  Sense strand starting at position 3137 of SEQ ID NO: 1561501
gcuccugaaucuccugaau

SEQ ID NO: 1676636 - RNA, 19 nt, Artificial Sequence
  Description of Artificial Sequence: Synthetic oligonucleotide
  Antisense strand to SEQ ID NO: 1676635
auucaggagauucaggagc

SEQ ID NO: 1676637 - RNA, 19 nt, Artificial Sequence
  Description of Artificial Sequence: Synthetic oligonucleotide
  Sense strand starting at position 3560 of SEQ ID NO: 1561501
agggaagaguagucuuugu

SEQ ID NO: 1676638 - RNA, 19 nt, Artificial Sequence
  Description of Artificial Sequence: Synthetic oligonucleotide
  Antisense strand to SEQ ID NO: 1676637
acaaagacuacucuucccu

SEQ ID NO: 1676639 - RNA, 19 nt, Artificial Sequence
  Description of Artificial Sequence: Synthetic oligonucleotide
  Sense strand starting at position 3564 of SEQ ID NO: 1561501
aagaguagucuuuguugaa

SEQ ID NO: 1676640 - RNA, 19 nt, Artificial Sequence
  Description of Artificial Sequence: Synthetic oligonucleotide
  Antisense strand to SEQ ID NO: 1676639
uucaacaaagacuacucuu

SEQ ID NO: 1676641 - RNA, 19 nt, Artificial Sequence
  Description of Artificial Sequence: Synthetic oligonucleotide
  Sense strand starting at position 3565 of SEQ ID NO: 1561501
agaguagucuuuguugaaa

SEQ ID NO: 1676642 - RNA, 19 nt, Artificial Sequence
  Description of Artificial Sequence: Synthetic oligonucleotide
  Antisense strand to SEQ ID NO: 1676641
uuucaacaaagacuacucu

SEQ ID NO: 1676643 - RNA, 19 nt, Artificial Sequence
  Description of Artificial Sequence: Synthetic oligonucleotide
  Sense strand starting at position 3588 of SEQ ID NO: 1561501
uggaauuagagaugcacau

SEQ ID NO: 1676644 - RNA, 19 nt, Artificial Sequence
  Description of Artificial Sequence: Synthetic oligonucleotide
  Antisense strand to SEQ ID NO: 1676643
augugcaucucuaauucca

SEQ ID NO: 1676645 - RNA, 19 nt, Artificial Sequence
  Description of Artificial Sequence: Synthetic oligonucleotide
  Sense strand starting at position 3732 of SEQ ID NO: 1561501
uggacuuuauagucagcaa

SEQ ID NO: 1676646 - RNA, 19 nt, Artificial Sequence
  Description of Artificial Sequence: Synthetic oligonucleotide
  Antisense strand to SEQ ID NO: 1676645
uugcugacuauaaagucca

SEQ ID NO: 1676647 - RNA, 19 nt, Artificial Sequence
  Description of Artificial Sequence: Synthetic oligonucleotide
  Sense strand starting at position 3735 of SEQ ID NO: 1561501
acuuuauagucagcaauug

SEQ ID NO: 1676648 - RNA, 19 nt, Artificial Sequence
  Description of Artificial Sequence: Synthetic oligonucleotide
  Antisense strand to SEQ ID NO: 1676647
caauugcugacuauaaagu

SEQ ID NO: 1676649 - RNA, 19 nt, Artificial Sequence
  Description of Artificial Sequence: Synthetic oligonucleotide
  Sense strand starting at position 3736 of SEQ ID NO: 1561501
cuuuauagucagcaauugu

SEQ ID NO: 1676650 - RNA, 19 nt, Artificial Sequence
  Description of Artificial Sequence: Synthetic oligonucleotide
  Antisense strand to SEQ ID NO: 1676649
acaauugcugacuauaaag

SEQ ID NO: 1676651 - RNA, 19 nt, Artificial Sequence
  Description of Artificial Sequence: Synthetic oligonucleotide
  Sense strand starting at position 3743 of SEQ ID NO: 1561501
gucagcaauuguuucuuaa

SEQ ID NO: 1676652 - RNA, 19 nt, Artificial Sequence
  Description of Artificial Sequence: Synthetic oligonucleotide
  Antisense strand to SEQ ID NO: 1676651
uuaagaaacaauugcugac

SEQ ID NO: 1676653 - RNA, 19 nt, Artificial Sequence
  Description of Artificial Sequence: Synthetic oligonucleotide
  Sense strand starting at position 3753 of SEQ ID NO: 1561501
guuucuuaaccgugacauc

SEQ ID NO: 1676654 - RNA, 19 nt, Artificial Sequence
  Description of Artificial Sequence: Synthetic oligonucleotide
  Antisense strand to SEQ ID NO: 1676653
gaugucacgguuaagaaac

SEQ ID NO: 1676655 - RNA, 19 nt, Artificial Sequence
  Description of Artificial Sequence: Synthetic oligonucleotide
  Sense strand starting at position 3754 of SEQ ID NO: 1561501
uuucuuaaccgugacauca

SEQ ID NO: 1676656 - RNA, 19 nt, Artificial Sequence
  Description of Artificial Sequence: Synthetic oligonucleotide
  Antisense strand to SEQ ID NO: 1676655
ugaugucacgguuaagaaa

SEQ ID NO: 1676657 - RNA, 19 nt, Artificial Sequence
  Description of Artificial Sequence: Synthetic oligonucleotide
  Sense strand starting at position 3850 of SEQ ID NO: 1561501
gugagaagcuacccaaaga

SEQ ID NO: 1676658 - RNA, 19 nt, Artificial Sequence
  Description of Artificial Sequence: Synthetic oligonucleotide
  Antisense strand to SEQ ID NO: 1676657
ucuuuggguagcuucucac

SEQ ID NO: 1676659 - RNA, 19 nt, Artificial Sequence
  Description of Artificial Sequence: Synthetic oligonucleotide
  Sense strand starting at position 23 of SEQ ID NO: 1561502
guucauaguugguugguca

SEQ ID NO: 1676660 - RNA, 19 nt, Artificial Sequence
  Description of Artificial Sequence: Synthetic oligonucleotide
  Antisense strand to SEQ ID NO: 1676659
ugaccaaccaacuaugaac

SEQ ID NO: 1676661 - RNA, 19 nt, Artificial Sequence
  Description of Artificial Sequence: Synthetic oligonucleotide
  Sense strand starting at position 26 of SEQ ID NO: 1561502
cauaguugguuggucacaa

SEQ ID NO: 1676662 - RNA, 19 nt, Artificial Sequence
  Description of Artificial Sequence: Synthetic oligonucleotide
  Antisense strand to SEQ ID NO: 1676661
uugugaccaaccaacuaug

SEQ ID NO: 1676663 - RNA, 19 nt, Artificial Sequence
  Description of Artificial Sequence: Synthetic oligonucleotide
  Sense strand starting at position 88 of SEQ ID NO: 1561502
ggagcaugccuguggaacu

SEQ ID NO: 1676664 - RNA, 19 nt, Artificial Sequence
  Description of Artificial Sequence: Synthetic oligonucleotide
  Antisense strand to SEQ ID NO: 1676663
aguuccacaggcaugcucc

SEQ ID NO: 1676665 - RNA, 19 nt, Artificial Sequence
  Description of Artificial Sequence: Synthetic oligonucleotide
  Sense strand starting at position 109 of SEQ ID NO: 1561502
gcucucaaccuguagaauc

SEQ ID NO: 1676666 - RNA, 19 nt, Artificial Sequence
  Description of Artificial Sequence: Synthetic oligonucleotide
  Antisense strand to SEQ ID NO: 1676665
gauucuacagguugagagc

SEQ ID NO: 1676667 - RNA, 19 nt, Artificial Sequence
  Description of Artificial Sequence: Synthetic oligonucleotide
  Sense strand starting at position 144 of SEQ ID NO: 1561502
uagauaguguuagugugaa

SEQ ID NO: 1676668 - RNA, 19 nt, Artificial Sequence
  Description of Artificial Sequence: Synthetic oligonucleotide
  Antisense strand to SEQ ID NO: 1676667
uucacacuaacacuaucua

SEQ ID NO: 1676669 - RNA, 19 nt, Artificial Sequence
  Description of Artificial Sequence: Synthetic oligonucleotide
  Sense strand starting at position 150 of SEQ ID NO: 1561502
guguuagugugaaauugag

SEQ ID NO: 1676670 - RNA, 19 nt, Artificial Sequence
  Description of Artificial Sequence: Synthetic oligonucleotide
  Antisense strand to SEQ ID NO: 1676669
cucaauuucacacuaacac

SEQ ID NO: 1676671 - RNA, 19 nt, Artificial Sequence
  Description of Artificial Sequence: Synthetic oligonucleotide
  Sense strand starting at position 156 of SEQ ID NO: 1561502
gugugaaauugaguuaaau

SEQ ID NO: 1676672 - RNA, 19 nt, Artificial Sequence
  Description of Artificial Sequence: Synthetic oligonucleotide
  Antisense strand to SEQ ID NO: 1676671
auuuaacucaauuucacac

SEQ ID NO: 1676673 - RNA, 19 nt, Artificial Sequence
  Description of Artificial Sequence: Synthetic oligonucleotide
  Sense strand starting at position 185 of SEQ ID NO: 1561502
ccagguggugucugaugaa

SEQ ID NO: 1676674 - RNA, 19 nt, Artificial Sequence
  Description of Artificial Sequence: Synthetic oligonucleotide
  Antisense strand to SEQ ID NO: 1676673
uucaucagacaccaccugg

SEQ ID NO: 1676675 - RNA, 19 nt, Artificial Sequence
  Description of Artificial Sequence: Synthetic oligonucleotide
  Sense strand starting at position 242 of SEQ ID NO: 1561502
ugaccagagauguggcauu

SEQ ID NO: 1676676 - RNA, 19 nt, Artificial Sequence
  Description of Artificial Sequence: Synthetic oligonucleotide
  Antisense strand to SEQ ID NO: 1676675
aaugccacaucucugguca

SEQ ID NO: 1676677 - RNA, 19 nt, Artificial Sequence
  Description of Artificial Sequence: Synthetic oligonucleotide
  Sense strand starting at position 284 of SEQ ID NO: 1561502
guugauuguaagcguagga

SEQ ID NO: 1676678 - RNA, 19 nt, Artificial Sequence
  Description of Artificial Sequence: Synthetic oligonucleotide
  Antisense strand to SEQ ID NO: 1676677
uccuacgcuuacaaucaac

SEQ ID NO: 1676679 - RNA, 19 nt, Artificial Sequence
  Description of Artificial Sequence: Synthetic oligonucleotide
  Sense strand starting at position 404 of SEQ ID NO: 1561502
uugugaugucaagaauuau

SEQ ID NO: 1676680 - RNA, 19 nt, Artificial Sequence
  Description of Artificial Sequence: Synthetic oligonucleotide
  Antisense strand to SEQ ID NO: 1676679
auaauucuugacaucacaa

SEQ ID NO: 1676681 - RNA, 19 nt, Artificial Sequence
  Description of Artificial Sequence: Synthetic oligonucleotide
  Sense strand starting at position 676 of SEQ ID NO: 1561502
ccauaagaauuggcuuauu

SEQ ID NO: 1676682 - RNA, 19 nt, Artificial Sequence
  Description of Artificial Sequence: Synthetic oligonucleotide
  Antisense strand to SEQ ID NO: 1676681
aauaagccaauucuuaugg

SEQ ID NO: 1676683 - RNA, 19 nt, Artificial Sequence
  Description of Artificial Sequence: Synthetic oligonucleotide
  Sense strand starting at position 1683 of SEQ ID NO: 1561502
gacguugggucaguaaaga

SEQ ID NO: 1676684 - RNA, 19 nt, Artificial Sequence
  Description of Artificial Sequence: Synthetic oligonucleotide
  Antisense strand to SEQ ID NO: 1676683
ucuuuacugacccaacguc

SEQ ID NO: 1676685 - RNA, 19 nt, Artificial Sequence
  Description of Artificial Sequence: Synthetic oligonucleotide
  Sense strand starting at position 2163 of SEQ ID NO: 1561502
acgucaguugaggauuaga

SEQ ID NO: 1676686 - RNA, 19 nt, Artificial Sequence
  Description of Artificial Sequence: Synthetic oligonucleotide
  Antisense strand to SEQ ID NO: 1676685
ucuaauccucaacugacgu

SEQ ID NO: 1676687 - RNA, 19 nt, Artificial Sequence
  Description of Artificial Sequence: Synthetic oligonucleotide
  Sense strand starting at position 2294 of SEQ ID NO: 1561502
ucgagucuacacugagcua

SEQ ID NO: 1676688 - RNA, 19 nt, Artificial Sequence
  Description of Artificial Sequence: Synthetic oligonucleotide
  Antisense strand to SEQ ID NO: 1676687
uagcucaguguagacucga

SEQ ID NO: 1676689 - RNA, 19 nt, Artificial Sequence
  Description of Artificial Sequence: Synthetic oligonucleotide
  Sense strand starting at position 2295 of SEQ ID NO: 1561502
cgagucuacacugagcuau

SEQ ID NO: 1676690 - RNA, 19 nt, Artificial Sequence
  Description of Artificial Sequence: Synthetic oligonucleotide
  Antisense strand to SEQ ID NO: 1676689
auagcucaguguagacucg

SEQ ID NO: 1676691 - RNA, 19 nt, Artificial Sequence
  Description of Artificial Sequence: Synthetic oligonucleotide
  Sense strand starting at position 2354 of SEQ ID NO: 1561502
gugcuauacucaguguaga

SEQ ID NO: 1676692 - RNA, 19 nt, Artificial Sequence
  Description of Artificial Sequence: Synthetic oligonucleotide
  Antisense strand to SEQ ID NO: 1676691
ucuacacugaguauagcac

SEQ ID NO: 1676693 - RNA, 19 nt, Artificial Sequence
  Description of Artificial Sequence: Synthetic oligonucleotide
  Sense strand starting at position 2355 of SEQ ID NO: 1561502
ugcuauacucaguguagac

SEQ ID NO: 1676694 - RNA, 19 nt, Artificial Sequence
  Description of Artificial Sequence: Synthetic oligonucleotide
  Antisense strand to SEQ ID NO: 1676693
gucuacacugaguauagca

SEQ ID NO: 1676695 - RNA, 19 nt, Artificial Sequence
  Description of Artificial Sequence: Synthetic oligonucleotide
  Sense strand starting at position 2364 of SEQ ID NO: 1561502
caguguagacucuguccua

SEQ ID NO: 1676696 - RNA, 19 nt, Artificial Sequence
  Description of Artificial Sequence: Synthetic oligonucleotide
  Antisense strand to SEQ ID NO: 1676695
uaggacagagucuacacug

SEQ ID NO: 1676697 - RNA, 19 nt, Artificial Sequence
  Description of Artificial Sequence: Synthetic oligonucleotide
  Sense strand starting at position 2365 of SEQ ID NO: 1561502
aguguagacucuguccuaa

SEQ ID NO: 1676698 - RNA, 19 nt, Artificial Sequence
  Description of Artificial Sequence: Synthetic oligonucleotide
  Antisense strand to SEQ ID NO: 1676697
uuaggacagagucuacacu

SEQ ID NO: 1676699 - RNA, 19 nt, Artificial Sequence
  Description of Artificial Sequence: Synthetic oligonucleotide
  Sense strand starting at position 2431 of SEQ ID NO: 1561502
ccuggaauucugugugaag

SEQ ID NO: 1676700 - RNA, 19 nt, Artificial Sequence
  Description of Artificial Sequence: Synthetic oligonucleotide
  Antisense strand to SEQ ID NO: 1676699
cuucacacagaauuccagg

SEQ ID NO: 1676701 - RNA, 19 nt, Artificial Sequence
  Description of Artificial Sequence: Synthetic oligonucleotide
  Sense strand starting at position 2432 of SEQ ID NO: 1561502
cuggaauucugugugaagg

SEQ ID NO: 1676702 - RNA, 19 nt, Artificial Sequence
  Description of Artificial Sequence: Synthetic oligonucleotide
  Antisense strand to SEQ ID NO: 1676701
ccuucacacagaauuccag

SEQ ID NO: 1676703 - RNA, 19 nt, Artificial Sequence
  Description of Artificial Sequence: Synthetic oligonucleotide
  Sense strand starting at position 2711 of SEQ ID NO: 1561502
cugagucaucucuagagug

SEQ ID NO: 1676704 - RNA, 19 nt, Artificial Sequence
  Description of Artificial Sequence: Synthetic oligonucleotide
  Antisense strand to SEQ ID NO: 1676703
cacucuagagaugacucag

SEQ ID NO: 1676705 - RNA, 19 nt, Artificial Sequence
  Description of Artificial Sequence: Synthetic oligonucleotide
  Sense strand starting at position 2713 of SEQ ID NO: 1561502
gagucaucucuagagugcu

SEQ ID NO: 1676706 - RNA, 19 nt, Artificial Sequence
  Description of Artificial Sequence: Synthetic oligonucleotide
  Antisense strand to SEQ ID NO: 1676705
agcacucuagagaugacuc

SEQ ID NO: 1676707 - RNA, 19 nt, Artificial Sequence
  Description of Artificial Sequence: Synthetic oligonucleotide
  Sense strand starting at position 2725 of SEQ ID NO: 1561502
gagugcucaucucuagaga

SEQ ID NO: 1676708 - RNA, 19 nt, Artificial Sequence
  Description of Artificial Sequence: Synthetic oligonucleotide
  Antisense strand to SEQ ID NO: 1676707
ucucuagagaugagcacuc

SEQ ID NO: 1676709 - RNA, 19 nt, Artificial Sequence
  Description of Artificial Sequence: Synthetic oligonucleotide
  Sense strand starting at position 2728 of SEQ ID NO: 1561502
ugcucaucucuagagaguu

SEQ ID NO: 1676710 - RNA, 19 nt, Artificial Sequence
  Description of Artificial Sequence: Synthetic oligonucleotide
  Antisense strand to SEQ ID NO: 1676709
aacucucuagagaugagca

SEQ ID NO: 1676711 - RNA, 19 nt, Artificial Sequence
  Description of Artificial Sequence: Synthetic oligonucleotide
  Sense strand starting at position 2740 of SEQ ID NO: 1561502
gagaguuuccgagggacaa

SEQ ID NO: 1676712 - RNA, 19 nt, Artificial Sequence
  Description of Artificial Sequence: Synthetic oligonucleotide
  Antisense strand to SEQ ID NO: 1676711
uugucccucggaaacucuc

SEQ ID NO: 1676713 - RNA, 19 nt, Artificial Sequence
  Description of Artificial Sequence: Synthetic oligonucleotide
  Sense strand starting at position 2741 of SEQ ID NO: 1561502
agaguuuccgagggacaac

SEQ ID NO: 1676714 - RNA, 19 nt, Artificial Sequence
  Description of Artificial Sequence: Synthetic oligonucleotide
  Antisense strand to SEQ ID NO: 1676713
guugucccucggaaacucu

SEQ ID NO: 1676715 - RNA, 19 nt, Artificial Sequence
  Description of Artificial Sequence: Synthetic oligonucleotide
  Sense strand starting at position 2797 of SEQ ID NO: 1561502
ccguauuuaccuggcccaa

SEQ ID NO: 1676716 - RNA, 19 nt, Artificial Sequence
  Description of Artificial Sequence: Synthetic oligonucleotide
  Antisense strand to SEQ ID NO: 1676715
uugggccagguaaauacgg

SEQ ID NO: 1676717 - RNA, 19 nt, Artificial Sequence
  Description of Artificial Sequence: Synthetic oligonucleotide
  Sense strand starting at position 3275 of SEQ ID NO: 1561502
uguaaauuacauugugugu

SEQ ID NO: 1676718 - RNA, 19 nt, Artificial Sequence
  Description of Artificial Sequence: Synthetic oligonucleotide
  Antisense strand to SEQ ID NO: 1676717
acacacaauguaauuuaca

SEQ ID NO: 1676719 - RNA, 19 nt, Artificial Sequence
  Description of Artificial Sequence: Synthetic oligonucleotide
  Sense strand starting at position 3537 of SEQ ID NO: 1561502
ugauucuccugccugaaag

SEQ ID NO: 1676720 - RNA, 19 nt, Artificial Sequence
  Description of Artificial Sequence: Synthetic oligonucleotide
  Antisense strand to SEQ ID NO: 1676719
cuuucaggcaggagaauca

SEQ ID NO: 1676721 - RNA, 19 nt, Artificial Sequence
  Description of Artificial Sequence: Synthetic oligonucleotide
  Sense strand starting at position 3539 of SEQ ID NO: 1561502
auucuccugccugaaagau

SEQ ID NO: 1676722 - RNA, 19 nt, Artificial Sequence
  Description of Artificial Sequence: Synthetic oligonucleotide
  Antisense strand to SEQ ID NO: 1676721
aucuuucaggcaggagaau

SEQ ID NO: 1676723 - RNA, 19 nt, Artificial Sequence
  Description of Artificial Sequence: Synthetic oligonucleotide
  Sense strand starting at position 3547 of SEQ ID NO: 1561502
gccugaaagauuggugcaa

SEQ ID NO: 1676724 - RNA, 19 nt, Artificial Sequence
  Description of Artificial Sequence: Synthetic oligonucleotide
  Antisense strand to SEQ ID NO: 1676723
uugcaccaaucuuucaggc

SEQ ID NO: 1676725 - RNA, 19 nt, Artificial Sequence
  Description of Artificial Sequence: Synthetic oligonucleotide
  Sense strand starting at position 3548 of SEQ ID NO: 1561502
ccugaaagauuggugcaau

SEQ ID NO: 1676726 - RNA, 19 nt, Artificial Sequence
  Description of Artificial Sequence: Synthetic oligonucleotide
  Antisense strand to SEQ ID NO: 1676725
auugcaccaaucuuucagg

SEQ ID NO: 1676727 - RNA, 19 nt, Artificial Sequence
  Description of Artificial Sequence: Synthetic oligonucleotide
  Sense strand starting at position 3558 of SEQ ID NO: 1561502
uggugcaauuucucuguua

SEQ ID NO: 1676728 - RNA, 19 nt, Artificial Sequence
  Description of Artificial Sequence: Synthetic oligonucleotide
  Antisense strand to SEQ ID NO: 1676727
uaacagagaaauugcacca

SEQ ID NO: 1676729 - RNA, 19 nt, Artificial Sequence
  Description of Artificial Sequence: Synthetic oligonucleotide
  Sense strand starting at position 3559 of SEQ ID NO: 1561502
ggugcaauuucucuguuaa

SEQ ID NO: 1676730 - RNA, 19 nt, Artificial Sequence
  Description of Artificial Sequence: Synthetic oligonucleotide
  Antisense strand to SEQ ID NO: 1676729
uuaacagagaaauugcacc

SEQ ID NO: 1676731 - RNA, 19 nt, Artificial Sequence
  Description of Artificial Sequence: Synthetic oligonucleotide
  Sense strand starting at position 3560 of SEQ ID NO: 1561502
gugcaauuucucuguuaaa

SEQ ID NO: 1676732 - RNA, 19 nt, Artificial Sequence
  Description of Artificial Sequence: Synthetic oligonucleotide
  Antisense strand to SEQ ID NO: 1676731
uuuaacagagaaauugcac

SEQ ID NO: 1676733 - RNA, 19 nt, Artificial Sequence
  Description of Artificial Sequence: Synthetic oligonucleotide
  Sense strand starting at position 3595 of SEQ ID NO: 1561502
aucuuacauucuguuuaga

SEQ ID NO: 1676734 - RNA, 19 nt, Artificial Sequence
  Description of Artificial Sequence: Synthetic oligonucleotide
  Antisense strand to SEQ ID NO: 1676733
ucuaaacagaauguaagau

SEQ ID NO: 1676735 - RNA, 19 nt, Artificial Sequence
  Description of Artificial Sequence: Synthetic oligonucleotide
  Sense strand starting at position 3597 of SEQ ID NO: 1561502
cuuacauucuguuuagauu

SEQ ID NO: 1676736 - RNA, 19 nt, Artificial Sequence
  Description of Artificial Sequence: Synthetic oligonucleotide
  Antisense strand to SEQ ID NO: 1676735
aaucuaaacagaauguaag

SEQ ID NO: 1676737 - RNA, 19 nt, Artificial Sequence
  Description of Artificial Sequence: Synthetic oligonucleotide
  Sense strand starting at position 3671 of SEQ ID NO: 1561502
ucaucuguguuuccaguca

SEQ ID NO: 1676738 - RNA, 19 nt, Artificial Sequence
  Description of Artificial Sequence: Synthetic oligonucleotide
  Antisense strand to SEQ ID NO: 1676737
ugacuggaaacacagauga

SEQ ID NO: 1676739 - RNA, 19 nt, Artificial Sequence
  Description of Artificial Sequence: Synthetic oligonucleotide
  Sense strand starting at position 274 of SEQ ID NO: 1561503
ggagcugucaucugggaua

SEQ ID NO: 1676740 - RNA, 19 nt, Artificial Sequence
  Description of Artificial Sequence: Synthetic oligonucleotide
  Antisense strand to SEQ ID NO: 1676739
uaucccagaugacagcucc

SEQ ID NO: 1676741 - RNA, 19 nt, Artificial Sequence
  Description of Artificial Sequence: Synthetic oligonucleotide
  Sense strand starting at position 276 of SEQ ID NO: 1561503
agcugucaucugggauaac

SEQ ID NO: 1676742 - RNA, 19 nt, Artificial Sequence
  Description of Artificial Sequence: Synthetic oligonucleotide
  Antisense strand to SEQ ID NO: 1676741
guuaucccagaugacagcu

SEQ ID NO: 1676743 - RNA, 19 nt, Artificial Sequence
  Description of Artificial Sequence: Synthetic oligonucleotide
  Sense strand starting at position 297 of SEQ ID NO: 1561503
ugacuucuucuggauaccu

SEQ ID NO: 1676744 - RNA, 19 nt, Artificial Sequence
  Description of Artificial Sequence: Synthetic oligonucleotide
  Antisense strand to SEQ ID NO: 1676743
agguauccagaagaaguca

SEQ ID NO: 1676745 - RNA, 19 nt, Artificial Sequence
  Description of Artificial Sequence: Synthetic oligonucleotide
  Sense strand starting at position 332 of SEQ ID NO: 1561503
gaggcucuucuaggagaga

SEQ ID NO: 1676746 - RNA, 19 nt, Artificial Sequence
  Description of Artificial Sequence: Synthetic oligonucleotide
  Antisense strand to SEQ ID NO: 1676745
ucucuccuagaagagccuc

SEQ ID NO: 1676747 - RNA, 19 nt, Artificial Sequence
  Description of Artificial Sequence: Synthetic oligonucleotide
  Sense strand starting at position 742 of SEQ ID NO: 1561503
gugguuuacuugcuuauuu

SEQ ID NO: 1676748 - RNA, 19 nt, Artificial Sequence
  Description of Artificial Sequence: Synthetic oligonucleotide
  Antisense strand to SEQ ID NO: 1676747
aaauaagcaaguaaaccac

SEQ ID NO: 1676749 - RNA, 19 nt, Artificial Sequence
  Description of Artificial Sequence: Synthetic oligonucleotide
  Sense strand starting at position 766 of SEQ ID NO: 1561503
uccuaaauguucuugugag

SEQ ID NO: 1676750 - RNA, 19 nt, Artificial Sequence
  Description of Artificial Sequence: Synthetic oligonucleotide
  Antisense strand to SEQ ID NO: 1676749
cucacaagaacauuuagga

SEQ ID NO: 1676751 - RNA, 19 nt, Artificial Sequence
  Description of Artificial Sequence: Synthetic oligonucleotide
  Sense strand starting at position 773 of SEQ ID NO: 1561503
uguucuugugagcagguaa

SEQ ID NO: 1676752 - RNA, 19 nt, Artificial Sequence
  Description of Artificial Sequence: Synthetic oligonucleotide
  Antisense strand to SEQ ID NO: 1676751
uuaccugcucacaagaaca

SEQ ID NO: 1676753 - RNA, 19 nt, Artificial Sequence
  Description of Artificial Sequence: Synthetic oligonucleotide
  Sense strand starting at position 1793 of SEQ ID NO: 1561503
uguugaggucuguacaagu

SEQ ID NO: 1676754 - RNA, 19 nt, Artificial Sequence
  Description of Artificial Sequence: Synthetic oligonucleotide
  Antisense strand to SEQ ID NO: 1676753
acuuguacagaccucaaca

SEQ ID NO: 1676755 - RNA, 19 nt, Artificial Sequence
  Description of Artificial Sequence: Synthetic oligonucleotide
  Sense strand starting at position 1829 of SEQ ID NO: 1561503
cugugaaaguuccuggauu

SEQ ID NO: 1676756 - RNA, 19 nt, Artificial Sequence
  Description of Artificial Sequence: Synthetic oligonucleotide
  Antisense strand to SEQ ID NO: 1676755
aauccaggaacuuucacag

SEQ ID NO: 1676757 - RNA, 19 nt, Artificial Sequence
  Description of Artificial Sequence: Synthetic oligonucleotide
  Sense strand starting at position 2057 of SEQ ID NO: 1561503
gcacuaugacgucaugacu

SEQ ID NO: 1676758 - RNA, 19 nt, Artificial Sequence
  Description of Artificial Sequence: Synthetic oligonucleotide
  Antisense strand to SEQ ID NO: 1676757
agucaugacgucauagugc

SEQ ID NO: 1676759 - RNA, 19 nt, Artificial Sequence
  Description of Artificial Sequence: Synthetic oligonucleotide
  Sense strand starting at position 2060 of SEQ ID NO: 1561503
cuaugacgucaugacuacu

SEQ ID NO: 1676760 - RNA, 19 nt, Artificial Sequence
  Description of Artificial Sequence: Synthetic oligonucleotide
  Antisense strand to SEQ ID NO: 1676759
aguagucaugacgucauag

SEQ ID NO: 1676761 - RNA, 19 nt, Artificial Sequence
  Description of Artificial Sequence: Synthetic oligonucleotide
  Sense strand starting at position 2066 of SEQ ID NO: 1561503
cgucaugacuacucugaug

SEQ ID NO: 1676762 - RNA, 19 nt, Artificial Sequence
  Description of Artificial Sequence: Synthetic oligonucleotide
  Antisense strand to SEQ ID NO: 1676761
caucagaguagucaugacg

SEQ ID NO: 1676763 - RNA, 19 nt, Artificial Sequence
  Description of Artificial Sequence: Synthetic oligonucleotide
  Sense strand starting at position 2068 of SEQ ID NO: 1561503
ucaugacuacucugaugua

SEQ ID NO: 1676764 - RNA, 19 nt, Artificial Sequence
  Description of Artificial Sequence: Synthetic oligonucleotide
  Antisense strand to SEQ ID NO: 1676763
uacaucagaguagucauga

SEQ ID NO: 1676765 - RNA, 19 nt, Artificial Sequence
  Description of Artificial Sequence: Synthetic oligonucleotide
  Sense strand starting at position 2077 of SEQ ID NO: 1561503
cucugauguagcuaggcaa

SEQ ID NO: 1676766 - RNA, 19 nt, Artificial Sequence
  Description of Artificial Sequence: Synthetic oligonucleotide
  Antisense strand to SEQ ID NO: 1676765
uugccuagcuacaucagag

SEQ ID NO: 1676767 - RNA, 19 nt, Artificial Sequence
  Description of Artificial Sequence: Synthetic oligonucleotide
  Sense strand starting at position 2101 of SEQ ID NO: 1561503
acuucucaucuccagugua

SEQ ID NO: 1676768 - RNA, 19 nt, Artificial Sequence
  Description of Artificial Sequence: Synthetic oligonucleotide
  Antisense strand to SEQ ID NO: 1676767
uacacuggagaugagaagu

SEQ ID NO: 1676769 - RNA, 19 nt, Artificial Sequence
  Description of Artificial Sequence: Synthetic oligonucleotide
  Sense strand starting at position 2104 of SEQ ID NO: 1561503
ucucaucuccaguguaaca

SEQ ID NO: 1676770 - RNA, 19 nt, Artificial Sequence
  Description of Artificial Sequence: Synthetic oligonucleotide
  Antisense strand to SEQ ID NO: 1676769
uguuacacuggagaugaga

SEQ ID NO: 1676771 - RNA, 19 nt, Artificial Sequence
  Description of Artificial Sequence: Synthetic oligonucleotide
  Sense strand starting at position 2114 of SEQ ID NO: 1561503
aguguaacaguguaaucuu

SEQ ID NO: 1676772 - RNA, 19 nt, Artificial Sequence
  Description of Artificial Sequence: Synthetic oligonucleotide
  Antisense strand to SEQ ID NO: 1676771
aagauuacacuguuacacu

SEQ ID NO: 1676773 - RNA, 19 nt, Artificial Sequence
  Description of Artificial Sequence: Synthetic oligonucleotide
  Sense strand starting at position 2146 of SEQ ID NO: 1561503
cauagaucugauuguugac

SEQ ID NO: 1676774 - RNA, 19 nt, Artificial Sequence
  Description of Artificial Sequence: Synthetic oligonucleotide
  Antisense strand to SEQ ID NO: 1676773
gucaacaaucagaucuaug

SEQ ID NO: 1676775 - RNA, 19 nt, Artificial Sequence
  Description of Artificial Sequence: Synthetic oligonucleotide
  Sense strand starting at position 2181 of SEQ ID NO: 1561503
aguguauggcuguacuaug

SEQ ID NO: 1676776 - RNA, 19 nt, Artificial Sequence
  Description of Artificial Sequence: Synthetic oligonucleotide
  Antisense strand to SEQ ID NO: 1676775
cauaguacagccauacacu

SEQ ID NO: 1676777 - RNA, 19 nt, Artificial Sequence
  Description of Artificial Sequence: Synthetic oligonucleotide
  Sense strand starting at position 2283 of SEQ ID NO: 1561503
gacuguacugccuagauau

SEQ ID NO: 1676778 - RNA, 19 nt, Artificial Sequence
  Description of Artificial Sequence: Synthetic oligonucleotide
  Antisense strand to SEQ ID NO: 1676777
auaucuaggcaguacaguc

SEQ ID NO: 1676779 - RNA, 19 nt, Artificial Sequence
  Description of Artificial Sequence: Synthetic oligonucleotide
  Sense strand starting at position 2285 of SEQ ID NO: 1561503
cuguacugccuagauauac

SEQ ID NO: 1676780 - RNA, 19 nt, Artificial Sequence
  Description of Artificial Sequence: Synthetic oligonucleotide
  Antisense strand to SEQ ID NO: 1676779
guauaucuaggcaguacag

SEQ ID NO: 1676781 - RNA, 19 nt, Artificial Sequence
  Description of Artificial Sequence: Synthetic oligonucleotide
  Sense strand starting at position 2708 of SEQ ID NO: 1561503
uuggaacuuucuguguaau

SEQ ID NO: 1676782 - RNA, 19 nt, Artificial Sequence
  Description of Artificial Sequence: Synthetic oligonucleotide
  Antisense strand to SEQ ID NO: 1676781
auuacacagaaaguuccaa

SEQ ID NO: 1676783 - RNA, 19 nt, Artificial Sequence
  Description of Artificial Sequence: Synthetic oligonucleotide
  Sense strand starting at position 2709 of SEQ ID NO: 1561503
uggaacuuucuguguaaua

SEQ ID NO: 1676784 - RNA, 19 nt, Artificial Sequence
  Description of Artificial Sequence: Synthetic oligonucleotide
  Antisense strand to SEQ ID NO: 1676783
uauuacacagaaaguucca

SEQ ID NO: 1676785 - RNA, 19 nt, Artificial Sequence
  Description of Artificial Sequence: Synthetic oligonucleotide
  Sense strand starting at position 2710 of SEQ ID NO: 1561503
ggaacuuucuguguaauau

SEQ ID NO: 1676786 - RNA, 19 nt, Artificial Sequence
  Description of Artificial Sequence: Synthetic oligonucleotide
  Antisense strand to SEQ ID NO: 1676785
auauuacacagaaaguucc

SEQ ID NO: 1676787 - RNA, 19 nt, Artificial Sequence
  Description of Artificial Sequence: Synthetic oligonucleotide
  Sense strand starting at position 2737 of SEQ ID NO: 1561503
cacgguuaaacucgaggau

SEQ ID NO: 1676788 - RNA, 19 nt, Artificial Sequence
  Description of Artificial Sequence: Synthetic oligonucleotide
  Antisense strand to SEQ ID NO: 1676787
auccucgaguuuaaccgug

SEQ ID NO: 1676789 - RNA, 19 nt, Artificial Sequence
  Description of Artificial Sequence: Synthetic oligonucleotide
  Sense strand starting at position 2740 of SEQ ID NO: 1561503
gguuaaacucgaggaucug

SEQ ID NO: 1676790 - RNA, 19 nt, Artificial Sequence
  Description of Artificial Sequence: Synthetic oligonucleotide
  Antisense strand to SEQ ID NO: 1676789
cagauccucgaguuuaacc

SEQ ID NO: 1676791 - RNA, 19 nt, Artificial Sequence
  Description of Artificial Sequence: Synthetic oligonucleotide
  Sense strand starting at position 2825 of SEQ ID NO: 1561503
uggccuccaccugaguauu

SEQ ID NO: 1676792 - RNA, 19 nt, Artificial Sequence
  Description of Artificial Sequence: Synthetic oligonucleotide
  Antisense strand to SEQ ID NO: 1676791
aauacucagguggaggcca

SEQ ID NO: 1676793 - RNA, 19 nt, Artificial Sequence
  Description of Artificial Sequence: Synthetic oligonucleotide
  Sense strand starting at position 2827 of SEQ ID NO: 1561503
gccuccaccugaguauuga

SEQ ID NO: 1676794 - RNA, 19 nt, Artificial Sequence
  Description of Artificial Sequence: Synthetic oligonucleotide
  Antisense strand to SEQ ID NO: 1676793
ucaauacucagguggaggc

SEQ ID NO: 1676795 - RNA, 19 nt, Artificial Sequence
  Description of Artificial Sequence: Synthetic oligonucleotide
  Sense strand starting at position 2828 of SEQ ID NO: 1561503
ccuccaccugaguauugaa

SEQ ID NO: 1676796 - RNA, 19 nt, Artificial Sequence
  Description of Artificial Sequence: Synthetic oligonucleotide
  Antisense strand to SEQ ID NO: 1676795
uucaauacucagguggagg

SEQ ID NO: 1676797 - RNA, 19 nt, Artificial Sequence
  Description of Artificial Sequence: Synthetic oligonucleotide
  Sense strand starting at position 3188 of SEQ ID NO: 1561503
cagagaguuccaggcagag

SEQ ID NO: 1676798 - RNA, 19 nt, Artificial Sequence
  Description of Artificial Sequence: Synthetic oligonucleotide
  Antisense strand to SEQ ID NO: 1676797
cucugccuggaacucucug

SEQ ID NO: 1676799 - RNA, 19 nt, Artificial Sequence
  Description of Artificial Sequence: Synthetic oligonucleotide
  Sense strand starting at position 3216 of SEQ ID NO: 1561503
agaugaagucucugaggca

SEQ ID NO: 1676800 - RNA, 19 nt, Artificial Sequence
  Description of Artificial Sequence: Synthetic oligonucleotide
  Antisense strand to SEQ ID NO: 1676799
ugccucagagacuucaucu

SEQ ID NO: 1676801 - RNA, 19 nt, Artificial Sequence
  Description of Artificial Sequence: Synthetic oligonucleotide
  Sense strand starting at position 3223 of SEQ ID NO: 1561503
gucucugaggcaggagaaa

SEQ ID NO: 1676802 - RNA, 19 nt, Artificial Sequence
  Description of Artificial Sequence: Synthetic oligonucleotide
  Antisense strand to SEQ ID NO: 1676801
uuucuccugccucagagac

SEQ ID NO: 1676803 - RNA, 19 nt, Artificial Sequence
  Description of Artificial Sequence: Synthetic oligonucleotide
  Sense strand starting at position 3314 of SEQ ID NO: 1561503
gugauaagaacuuggagug

SEQ ID NO: 1676804 - RNA, 19 nt, Artificial Sequence
  Description of Artificial Sequence: Synthetic oligonucleotide
  Antisense strand to SEQ ID NO: 1676803
cacuccaaguucuuaucac

SEQ ID NO: 1676805 - RNA, 19 nt, Artificial Sequence
  Description of Artificial Sequence: Synthetic oligonucleotide
  Sense strand starting at position 3393 of SEQ ID NO: 1561503
ggaguaaacuucccuccca

SEQ ID NO: 1676806 - RNA, 19 nt, Artificial Sequence
  Description of Artificial Sequence: Synthetic oligonucleotide
  Antisense strand to SEQ ID NO: 1676805
ugggagggaaguuuacucc

SEQ ID NO: 1676807 - RNA, 19 nt, Artificial Sequence
  Description of Artificial Sequence: Synthetic oligonucleotide
  Sense strand starting at position 3415 of SEQ ID NO: 1561503
cagagaaugugguuggauu

SEQ ID NO: 1676808 - RNA, 19 nt, Artificial Sequence
  Description of Artificial Sequence: Synthetic oligonucleotide
  Antisense strand to SEQ ID NO: 1676807
aauccaaccacauucucug

SEQ ID NO: 1676809 - RNA, 19 nt, Artificial Sequence
  Description of Artificial Sequence: Synthetic oligonucleotide
  Sense strand starting at position 3416 of SEQ ID NO: 1561503
agagaaugugguuggauuc

SEQ ID NO: 1676810 - RNA, 19 nt, Artificial Sequence
  Description of Artificial Sequence: Synthetic oligonucleotide
  Antisense strand to SEQ ID NO: 1676809
gaauccaaccacauucucu

SEQ ID NO: 1676811 - RNA, 19 nt, Artificial Sequence
  Description of Artificial Sequence: Synthetic oligonucleotide
  Sense strand starting at position 3482 of SEQ ID NO: 1561503
augagauucugaccucgac

SEQ ID NO: 1676812 - RNA, 19 nt, Artificial Sequence
  Description of Artificial Sequence: Synthetic oligonucleotide
  Antisense strand to SEQ ID NO: 1676811
gucgaggucagaaucucau

SEQ ID NO: 1676813 - RNA, 19 nt, Artificial Sequence
  Description of Artificial Sequence: Synthetic oligonucleotide
  Sense strand starting at position 3486 of SEQ ID NO: 1561503
gauucugaccucgacuacu

SEQ ID NO: 1676814 - RNA, 19 nt, Artificial Sequence
  Description of Artificial Sequence: Synthetic oligonucleotide
  Antisense strand to SEQ ID NO: 1676813
aguagucgaggucagaauc

SEQ ID NO: 1676815 - RNA, 19 nt, Artificial Sequence
  Description of Artificial Sequence: Synthetic oligonucleotide
  Sense strand starting at position 3628 of SEQ ID NO: 1561503
ccagcuguucuccaaugau

SEQ ID NO: 1676816 - RNA, 19 nt, Artificial Sequence
  Description of Artificial Sequence: Synthetic oligonucleotide
  Antisense strand to SEQ ID NO: 1676815
aucauuggagaacagcugg

SEQ ID NO: 1676817 - RNA, 19 nt, Artificial Sequence
  Description of Artificial Sequence: Synthetic oligonucleotide
  Sense strand starting at position 3768 of SEQ ID NO: 1561503
ccaagaaacugcuuguauc

SEQ ID NO: 1676818 - RNA, 19 nt, Artificial Sequence
  Description of Artificial Sequence: Synthetic oligonucleotide
  Antisense strand to SEQ ID NO: 1676817
gauacaagcaguuucuugg

SEQ ID NO: 1676819 - RNA, 19 nt, Artificial Sequence
  Description of Artificial Sequence: Synthetic oligonucleotide
  Sense strand starting at position 27 of SEQ ID NO: 1561504
gugacugcccucuggcaaa

SEQ ID NO: 1676820 - RNA, 19 nt, Artificial Sequence
  Description of Artificial Sequence: Synthetic oligonucleotide
  Antisense strand to SEQ ID NO: 1676819
uuugccagagggcagucac

SEQ ID NO: 1676821 - RNA, 19 nt, Artificial Sequence
  Description of Artificial Sequence: Synthetic oligonucleotide
  Sense strand starting at position 94 of SEQ ID NO: 1561504
guacaugucuuauagauac

SEQ ID NO: 1676822 - RNA, 19 nt, Artificial Sequence
  Description of Artificial Sequence: Synthetic oligonucleotide
  Antisense strand to SEQ ID NO: 1676821
guaucuauaagacauguac

SEQ ID NO: 1676823 - RNA, 19 nt, Artificial Sequence
  Description of Artificial Sequence: Synthetic oligonucleotide
  Sense strand starting at position 124 of SEQ ID NO: 1561504
uucucaaucucaucugugu

SEQ ID NO: 1676824 - RNA, 19 nt, Artificial Sequence
  Description of Artificial Sequence: Synthetic oligonucleotide
  Antisense strand to SEQ ID NO: 1676823
acacagaugagauugagaa

SEQ ID NO: 1676825 - RNA, 19 nt, Artificial Sequence
  Description of Artificial Sequence: Synthetic oligonucleotide
  Sense strand starting at position 127 of SEQ ID NO: 1561504
ucaaucucaucuguguaau

SEQ ID NO: 1676826 - RNA, 19 nt, Artificial Sequence
  Description of Artificial Sequence: Synthetic oligonucleotide
  Antisense strand to SEQ ID NO: 1676825
auuacacagaugagauuga

SEQ ID NO: 1676827 - RNA, 19 nt, Artificial Sequence
  Description of Artificial Sequence: Synthetic oligonucleotide
  Sense strand starting at position 395 of SEQ ID NO: 1561504
caccauuaugcccgguuau

SEQ ID NO: 1676828 - RNA, 19 nt, Artificial Sequence
  Description of Artificial Sequence: Synthetic oligonucleotide
  Antisense strand to SEQ ID NO: 1676827
auaaccgggcauaauggug

SEQ ID NO: 1676829 - RNA, 19 nt, Artificial Sequence
  Description of Artificial Sequence: Synthetic oligonucleotide
  Sense strand starting at position 396 of SEQ ID NO: 1561504
accauuaugcccgguuauu

SEQ ID NO: 1676830 - RNA, 19 nt, Artificial Sequence
  Description of Artificial Sequence: Synthetic oligonucleotide
  Antisense strand to SEQ ID NO: 1676829
aauaaccgggcauaauggu

SEQ ID NO: 1676831 - RNA, 19 nt, Artificial Sequence
  Description of Artificial Sequence: Synthetic oligonucleotide
  Sense strand starting at position 406 of SEQ ID NO: 1561504
ccgguuauuuacuuacuuu

SEQ ID NO: 1676832 - RNA, 19 nt, Artificial Sequence
  Description of Artificial Sequence: Synthetic oligonucleotide
  Antisense strand to SEQ ID NO: 1676831
aaaguaaguaaauaaccgg

SEQ ID NO: 1676833 - RNA, 19 nt, Artificial Sequence
  Description of Artificial Sequence: Synthetic oligonucleotide
  Sense strand starting at position 941 of SEQ ID NO: 1561504
cucuguucuccuugacaca

SEQ ID NO: 1676834 - RNA, 19 nt, Artificial Sequence
  Description of Artificial Sequence: Synthetic oligonucleotide
  Antisense strand to SEQ ID NO: 1676833
ugugucaaggagaacagag

SEQ ID NO: 1676835 - RNA, 19 nt, Artificial Sequence
  Description of Artificial Sequence: Synthetic oligonucleotide
  Sense strand starting at position 1016 of SEQ ID NO: 1561504
ugaugagucucccucuuug

SEQ ID NO: 1676836 - RNA, 19 nt, Artificial Sequence
  Description of Artificial Sequence: Synthetic oligonucleotide
  Antisense strand to SEQ ID NO: 1676835
caaagagggagacucauca

SEQ ID NO: 1676837 - RNA, 19 nt, Artificial Sequence
  Description of Artificial Sequence: Synthetic oligonucleotide
  Sense strand starting at position 1155 of SEQ ID NO: 1561504
ucugccaucucuuggcaua

SEQ ID NO: 1676838 - RNA, 19 nt, Artificial Sequence
  Description of Artificial Sequence: Synthetic oligonucleotide
  Antisense strand to SEQ ID NO: 1676837
uaugccaagagauggcaga

SEQ ID NO: 1676839 - RNA, 19 nt, Artificial Sequence
  Description of Artificial Sequence: Synthetic oligonucleotide
  Sense strand starting at position 1156 of SEQ ID NO: 1561504
cugccaucucuuggcauau

SEQ ID NO: 1676840 - RNA, 19 nt, Artificial Sequence
  Description of Artificial Sequence: Synthetic oligonucleotide
  Antisense strand to SEQ ID NO: 1676839
auaugccaagagauggcag

SEQ ID NO: 1676841 - RNA, 19 nt, Artificial Sequence
  Description of Artificial Sequence: Synthetic oligonucleotide
  Sense strand starting at position 1820 of SEQ ID NO: 1561504
cucaauuugcucugggcaa

SEQ ID NO: 1676842 - RNA, 19 nt, Artificial Sequence
  Description of Artificial Sequence: Synthetic oligonucleotide
  Antisense strand to SEQ ID NO: 1676841
uugcccagagcaaauugag

SEQ ID NO: 1676843 - RNA, 19 nt, Artificial Sequence
  Description of Artificial Sequence: Synthetic oligonucleotide
  Sense strand starting at position 1821 of SEQ ID NO: 1561504
ucaauuugcucugggcaaa

SEQ ID NO: 1676844 - RNA, 19 nt, Artificial Sequence
  Description of Artificial Sequence: Synthetic oligonucleotide
  Antisense strand to SEQ ID NO: 1676843
uuugcccagagcaaauuga

SEQ ID NO: 1676845 - RNA, 19 nt, Artificial Sequence
  Description of Artificial Sequence: Synthetic oligonucleotide
  Sense strand starting at position 1906 of SEQ ID NO: 1561504
cuaguuagcgcagacuuaa

SEQ ID NO: 1676846 - RNA, 19 nt, Artificial Sequence
  Description of Artificial Sequence: Synthetic oligonucleotide
  Antisense strand to SEQ ID NO: 1676845
uuaagucugcgcuaacuag

SEQ ID NO: 1676847 - RNA, 19 nt, Artificial Sequence
  Description of Artificial Sequence: Synthetic oligonucleotide
  Sense strand starting at position 1950 of SEQ ID NO: 1561504
ggcgauaugaccuacacuc

SEQ ID NO: 1676848 - RNA, 19 nt, Artificial Sequence
  Description of Artificial Sequence: Synthetic oligonucleotide
  Antisense strand to SEQ ID NO: 1676847
gaguguaggucauaucgcc

SEQ ID NO: 1676849 - RNA, 19 nt, Artificial Sequence
  Description of Artificial Sequence: Synthetic oligonucleotide
  Sense strand starting at position 1983 of SEQ ID NO: 1561504
ccggguuugcguuaaucug

SEQ ID NO: 1676850 - RNA, 19 nt, Artificial Sequence
  Description of Artificial Sequence: Synthetic oligonucleotide
  Antisense strand to SEQ ID NO: 1676849
cagauuaacgcaaacccgg

SEQ ID NO: 1676851 - RNA, 19 nt, Artificial Sequence
  Description of Artificial Sequence: Synthetic oligonucleotide
  Sense strand starting at position 2194 of SEQ ID NO: 1561504
cagaaagucugaggcauga

SEQ ID NO: 1676852 - RNA, 19 nt, Artificial Sequence
  Description of Artificial Sequence: Synthetic oligonucleotide
  Antisense strand to SEQ ID NO: 1676851
ucaugccucagacuuucug

SEQ ID NO: 1676853 - RNA, 19 nt, Artificial Sequence
  Description of Artificial Sequence: Synthetic oligonucleotide
  Sense strand starting at position 2198 of SEQ ID NO: 1561504
aagucugaggcaugauaca

SEQ ID NO: 1676854 - RNA, 19 nt, Artificial Sequence
  Description of Artificial Sequence: Synthetic oligonucleotide
  Antisense strand to SEQ ID NO: 1676853
uguaucaugccucagacuu

SEQ ID NO: 1676855 - RNA, 19 nt, Artificial Sequence
  Description of Artificial Sequence: Synthetic oligonucleotide
  Sense strand starting at position 2237 of SEQ ID NO: 1561504
gagagacccucugacauug

SEQ ID NO: 1676856 - RNA, 19 nt, Artificial Sequence
  Description of Artificial Sequence: Synthetic oligonucleotide
  Antisense strand to SEQ ID NO: 1676855
caaugucagagggucucuc

SEQ ID NO: 1676857 - RNA, 19 nt, Artificial Sequence
  Description of Artificial Sequence: Synthetic oligonucleotide
  Sense strand starting at position 2390 of SEQ ID NO: 1561504
agcugauguuaggcauaga

SEQ ID NO: 1676858 - RNA, 19 nt, Artificial Sequence
  Description of Artificial Sequence: Synthetic oligonucleotide
  Antisense strand to SEQ ID NO: 1676857
ucuaugccuaacaucagcu

SEQ ID NO: 1676859 - RNA, 19 nt, Artificial Sequence
  Description of Artificial Sequence: Synthetic oligonucleotide
  Sense strand starting at position 2391 of SEQ ID NO: 1561504
gcugauguuaggcauagau

SEQ ID NO: 1676860 - RNA, 19 nt, Artificial Sequence
  Description of Artificial Sequence: Synthetic oligonucleotide
  Antisense strand to SEQ ID NO: 1676859
aucuaugccuaacaucagc

SEQ ID NO: 1676861 - RNA, 19 nt, Artificial Sequence
  Description of Artificial Sequence: Synthetic oligonucleotide
  Sense strand starting at position 2393 of SEQ ID NO: 1561504
ugauguuaggcauagauuc

SEQ ID NO: 1676862 - RNA, 19 nt, Artificial Sequence
  Description of Artificial Sequence: Synthetic oligonucleotide
  Antisense strand to SEQ ID NO: 1676861
gaaucuaugccuaacauca

SEQ ID NO: 1676863 - RNA, 19 nt, Artificial Sequence
  Description of Artificial Sequence: Synthetic oligonucleotide
  Sense strand starting at position 2400 of SEQ ID NO: 1561504
aggcauagauuccagacau

SEQ ID NO: 1676864 - RNA, 19 nt, Artificial Sequence
  Description of Artificial Sequence: Synthetic oligonucleotide
  Antisense strand to SEQ ID NO: 1676863
augucuggaaucuaugccu

SEQ ID NO: 1676865 - RNA, 19 nt, Artificial Sequence
  Description of Artificial Sequence: Synthetic oligonucleotide
  Sense strand starting at position 2691 of SEQ ID NO: 1561504
cacuguaauugucuggaac

SEQ ID NO: 1676866 - RNA, 19 nt, Artificial Sequence
  Description of Artificial Sequence: Synthetic oligonucleotide
  Antisense strand to SEQ ID NO: 1676865
guuccagacaauuacagug

SEQ ID NO: 1676867 - RNA, 19 nt, Artificial Sequence
  Description of Artificial Sequence: Synthetic oligonucleotide
  Sense strand starting at position 2692 of SEQ ID NO: 1561504
acuguaauugucuggaaca

SEQ ID NO: 1676868 - RNA, 19 nt, Artificial Sequence
  Description of Artificial Sequence: Synthetic oligonucleotide
  Antisense strand to SEQ ID NO: 1676867
uguuccagacaauuacagu

SEQ ID NO: 1676869 - RNA, 19 nt, Artificial Sequence
  Description of Artificial Sequence: Synthetic oligonucleotide
  Sense strand starting at position 2693 of SEQ ID NO: 1561504
cuguaauugucuggaacag

SEQ ID NO: 1676870 - RNA, 19 nt, Artificial Sequence
  Description of Artificial Sequence: Synthetic oligonucleotide
  Antisense strand to SEQ ID NO: 1676869
cuguuccagacaauuacag

SEQ ID NO: 1676871 - RNA, 19 nt, Artificial Sequence
  Description of Artificial Sequence: Synthetic oligonucleotide
  Sense strand starting at position 2750 of SEQ ID NO: 1561504
ggcgguauguaccauguca

SEQ ID NO: 1676872 - RNA, 19 nt, Artificial Sequence
  Description of Artificial Sequence: Synthetic oligonucleotide
  Antisense strand to SEQ ID NO: 1676871
ugacaugguacauaccgcc

SEQ ID NO: 1676873 - RNA, 19 nt, Artificial Sequence
  Description of Artificial Sequence: Synthetic oligonucleotide
  Sense strand starting at position 2752 of SEQ ID NO: 1561504
cgguauguaccaugucaug

SEQ ID NO: 1676874 - RNA, 19 nt, Artificial Sequence
  Description of Artificial Sequence: Synthetic oligonucleotide
  Antisense strand to SEQ ID NO: 1676873
caugacaugguacauaccg

SEQ ID NO: 1676875 - RNA, 19 nt, Artificial Sequence
  Description of Artificial Sequence: Synthetic oligonucleotide
  Sense strand starting at position 3162 of SEQ ID NO: 1561504
ccauguggauauccagaua

SEQ ID NO: 1676876 - RNA, 19 nt, Artificial Sequence
  Description of Artificial Sequence: Synthetic oligonucleotide
  Antisense strand to SEQ ID NO: 1676875
uaucuggauauccacaugg

SEQ ID NO: 1676877 - RNA, 19 nt, Artificial Sequence
  Description of Artificial Sequence: Synthetic oligonucleotide
  Sense strand starting at position 3165 of SEQ ID NO: 1561504
uguggauauccagauaguu

SEQ ID NO: 1676878 - RNA, 19 nt, Artificial Sequence
  Description of Artificial Sequence: Synthetic oligonucleotide
  Antisense strand to SEQ ID NO: 1676877
aacuaucuggauauccaca

SEQ ID NO: 1676879 - RNA, 19 nt, Artificial Sequence
  Description of Artificial Sequence: Synthetic oligonucleotide
  Sense strand starting at position 3167 of SEQ ID NO: 1561504
uggauauccagauaguugu

SEQ ID NO: 1676880 - RNA, 19 nt, Artificial Sequence
  Description of Artificial Sequence: Synthetic oligonucleotide
  Antisense strand to SEQ ID NO: 1676879
acaacuaucuggauaucca

SEQ ID NO: 1676881 - RNA, 19 nt, Artificial Sequence
  Description of Artificial Sequence: Synthetic oligonucleotide
  Sense strand starting at position 3174 of SEQ ID NO: 1561504
ccagauaguuguccuagca

SEQ ID NO: 1676882 - RNA, 19 nt, Artificial Sequence
  Description of Artificial Sequence: Synthetic oligonucleotide
  Antisense strand to SEQ ID NO: 1676881
ugcuaggacaacuaucugg

SEQ ID NO: 1676883 - RNA, 19 nt, Artificial Sequence
  Description of Artificial Sequence: Synthetic oligonucleotide
  Sense strand starting at position 3187 of SEQ ID NO: 1561504
cuagcacauuuauggaaga

SEQ ID NO: 1676884 - RNA, 19 nt, Artificial Sequence
  Description of Artificial Sequence: Synthetic oligonucleotide
  Antisense strand to SEQ ID NO: 1676883
ucuuccauaaaugugcuag

SEQ ID NO: 1676885 - RNA, 19 nt, Artificial Sequence
  Description of Artificial Sequence: Synthetic oligonucleotide
  Sense strand starting at position 3302 of SEQ ID NO: 1561504
uggcgagaucucgacuaaa

SEQ ID NO: 1676886 - RNA, 19 nt, Artificial Sequence
  Description of Artificial Sequence: Synthetic oligonucleotide
  Antisense strand to SEQ ID NO: 1676885
uuuagucgagaucucgcca

SEQ ID NO: 1676887 - RNA, 19 nt, Artificial Sequence
  Description of Artificial Sequence: Synthetic oligonucleotide
  Sense strand starting at position 3305 of SEQ ID NO: 1561504
cgagaucucgacuaaaugc

SEQ ID NO: 1676888 - RNA, 19 nt, Artificial Sequence
  Description of Artificial Sequence: Synthetic oligonucleotide
  Antisense strand to SEQ ID NO: 1676887
gcauuuagucgagaucucg

SEQ ID NO: 1676889 - RNA, 19 nt, Artificial Sequence
  Description of Artificial Sequence: Synthetic oligonucleotide
  Sense strand starting at position 37 of SEQ ID NO: 1561505
gugacugcccucuggcaaa

SEQ ID NO: 1676890 - RNA, 19 nt, Artificial Sequence
  Description of Artificial Sequence: Synthetic oligonucleotide
  Antisense strand to SEQ ID NO: 1676889
uuugccagagggcagucac

SEQ ID NO: 1676891 - RNA, 19 nt, Artificial Sequence
  Description of Artificial Sequence: Synthetic oligonucleotide
  Sense strand starting at position 104 of SEQ ID NO: 1561505
guacaugucuuauagauac

SEQ ID NO: 1676892 - RNA, 19 nt, Artificial Sequence
  Description of Artificial Sequence: Synthetic oligonucleotide
  Antisense strand to SEQ ID NO: 1676891
guaucuauaagacauguac

SEQ ID NO: 1676893 - RNA, 19 nt, Artificial Sequence
  Description of Artificial Sequence: Synthetic oligonucleotide
  Sense strand starting at position 134 of SEQ ID NO: 1561505
uucucaaucucaucugugu

SEQ ID NO: 1676894 - RNA, 19 nt, Artificial Sequence
  Description of Artificial Sequence: Synthetic oligonucleotide
  Antisense strand to SEQ ID NO: 1676893
acacagaugagauugagaa

SEQ ID NO: 1676895 - RNA, 19 nt, Artificial Sequence
  Description of Artificial Sequence: Synthetic oligonucleotide
  Sense strand starting at position 137 of SEQ ID NO: 1561505
ucaaucucaucuguguaau

SEQ ID NO: 1676896 - RNA, 19 nt, Artificial Sequence
  Description of Artificial Sequence: Synthetic oligonucleotide
  Antisense strand to SEQ ID NO: 1676895
auuacacagaugagauuga

SEQ ID NO: 1676897 - RNA, 19 nt, Artificial Sequence
  Description of Artificial Sequence: Synthetic oligonucleotide
  Sense strand starting at position 405 of SEQ ID NO: 1561505
caccauuaugcccgguuau

SEQ ID NO: 1676898 - RNA, 19 nt, Artificial Sequence
  Description of Artificial Sequence: Synthetic oligonucleotide
  Antisense strand to SEQ ID NO: 1676897
auaaccgggcauaauggug

SEQ ID NO: 1676899 - RNA, 19 nt, Artificial Sequence
  Description of Artificial Sequence: Synthetic oligonucleotide
  Sense strand starting at position 406 of SEQ ID NO: 1561505
accauuaugcccgguuauu

SEQ ID NO: 1676900 - RNA, 19 nt, Artificial Sequence
  Description of Artificial Sequence: Synthetic oligonucleotide
  Antisense strand to SEQ ID NO: 1676899
aauaaccgggcauaauggu

SEQ ID NO: 1676901 - RNA, 19 nt, Artificial Sequence
  Description of Artificial Sequence: Synthetic oligonucleotide
  Sense strand starting at position 416 of SEQ ID NO: 1561505
ccgguuauuuacuuacuuu

SEQ ID NO: 1676902 - RNA, 19 nt, Artificial Sequence
  Description of Artificial Sequence: Synthetic oligonucleotide
  Antisense strand to SEQ ID NO: 1676901
aaaguaaguaaauaaccgg

SEQ ID NO: 1676903 - RNA, 19 nt, Artificial Sequence
  Description of Artificial Sequence: Synthetic oligonucleotide
  Sense strand starting at position 951 of SEQ ID NO: 1561505
cucuguucuccuugacaca

SEQ ID NO: 1676904 - RNA, 19 nt, Artificial Sequence
  Description of Artificial Sequence: Synthetic oligonucleotide
  Antisense strand to SEQ ID NO: 1676903
ugugucaaggagaacagag

SEQ ID NO: 1676905 - RNA, 19 nt, Artificial Sequence
  Description of Artificial Sequence: Synthetic oligonucleotide
  Sense strand starting at position 1026 of SEQ ID NO: 1561505
ugaugagucucccucuuug

SEQ ID NO: 1676906 - RNA, 19 nt, Artificial Sequence
  Description of Artificial Sequence: Synthetic oligonucleotide
  Antisense strand to SEQ ID NO: 1676905
caaagagggagacucauca

SEQ ID NO: 1676907 - RNA, 19 nt, Artificial Sequence
  Description of Artificial Sequence: Synthetic oligonucleotide
  Sense strand starting at position 1165 of SEQ ID NO: 1561505
ucugccaucucuuggcaua

SEQ ID NO: 1676908 - RNA, 19 nt, Artificial Sequence
  Description of Artificial Sequence: Synthetic oligonucleotide
  Antisense strand to SEQ ID NO: 1676907
uaugccaagagauggcaga

SEQ ID NO: 1676909 - RNA, 19 nt, Artificial Sequence
  Description of Artificial Sequence: Synthetic oligonucleotide
  Sense strand starting at position 1166 of SEQ ID NO: 1561505
cugccaucucuuggcauau

SEQ ID NO: 1676910 - RNA, 19 nt, Artificial Sequence
  Description of Artificial Sequence: Synthetic oligonucleotide
  Antisense strand to SEQ ID NO: 1676909
auaugccaagagauggcag

SEQ ID NO: 1676911 - RNA, 19 nt, Artificial Sequence
  Description of Artificial Sequence: Synthetic oligonucleotide
  Sense strand starting at position 1830 of SEQ ID NO: 1561505
cucaauuugcucugggcaa

SEQ ID NO: 1676912 - RNA, 19 nt, Artificial Sequence
  Description of Artificial Sequence: Synthetic oligonucleotide
  Antisense strand to SEQ ID NO: 1676911
uugcccagagcaaauugag

SEQ ID NO: 1676913 - RNA, 19 nt, Artificial Sequence
  Description of Artificial Sequence: Synthetic oligonucleotide
  Sense strand starting at position 1831 of SEQ ID NO: 1561505
ucaauuugcucugggcaaa

SEQ ID NO: 1676914 - RNA, 19 nt, Artificial Sequence
  Description of Artificial Sequence: Synthetic oligonucleotide
  Antisense strand to SEQ ID NO: 1676913
uuugcccagagcaaauuga

SEQ ID NO: 1676915 - RNA, 19 nt, Artificial Sequence
  Description of Artificial Sequence: Synthetic oligonucleotide
  Sense strand starting at position 1916 of SEQ ID NO: 1561505
cuaguuagcgcagacuuaa

SEQ ID NO: 1676916 - RNA, 19 nt, Artificial Sequence
  Description of Artificial Sequence: Synthetic oligonucleotide
  Antisense strand to SEQ ID NO: 1676915
uuaagucugcgcuaacuag

SEQ ID NO: 1676917 - RNA, 19 nt, Artificial Sequence
  Description of Artificial Sequence: Synthetic oligonucleotide
  Sense strand starting at position 1960 of SEQ ID NO: 1561505
ggcgauaugaccuacacuc

SEQ ID NO: 1676918 - RNA, 19 nt, Artificial Sequence
  Description of Artificial Sequence: Synthetic oligonucleotide
  Antisense strand to SEQ ID NO: 1676917
gaguguaggucauaucgcc

SEQ ID NO: 1676919 - RNA, 19 nt, Artificial Sequence
  Description of Artificial Sequence: Synthetic oligonucleotide
  Sense strand starting at position 1993 of SEQ ID NO: 1561505
ccggguuugcguuaaucug

SEQ ID NO: 1676920 - RNA, 19 nt, Artificial Sequence
  Description of Artificial Sequence: Synthetic oligonucleotide
  Antisense strand to SEQ ID NO: 1676919
cagauuaacgcaaacccgg

SEQ ID NO: 1676921 - RNA, 19 nt, Artificial Sequence
  Description of Artificial Sequence: Synthetic oligonucleotide
  Sense strand starting at position 2204 of SEQ ID NO: 1561505
cagaaagucugaggcauga

SEQ ID NO: 1676922 - RNA, 19 nt, Artificial Sequence
  Description of Artificial Sequence: Synthetic oligonucleotide
  Antisense strand to SEQ ID NO: 1676921
ucaugccucagacuuucug

SEQ ID NO: 1676923 - RNA, 19 nt, Artificial Sequence
  Description of Artificial Sequence: Synthetic oligonucleotide
  Sense strand starting at position 2208 of SEQ ID NO: 1561505
aagucugaggcaugauaca

SEQ ID NO: 1676924 - RNA, 19 nt, Artificial Sequence
  Description of Artificial Sequence: Synthetic oligonucleotide
  Antisense strand to SEQ ID NO: 1676923
uguaucaugccucagacuu

SEQ ID NO: 1676925 - RNA, 19 nt, Artificial Sequence
  Description of Artificial Sequence: Synthetic oligonucleotide
  Sense strand starting at position 2247 of SEQ ID NO: 1561505
gagagacccucugacauug

SEQ ID NO: 1676926 - RNA, 19 nt, Artificial Sequence
  Description of Artificial Sequence: Synthetic oligonucleotide
  Antisense strand to SEQ ID NO: 1676925
caaugucagagggucucuc

SEQ ID NO: 1676927 - RNA, 19 nt, Artificial Sequence
  Description of Artificial Sequence: Synthetic oligonucleotide
  Sense strand starting at position 2400 of SEQ ID NO: 1561505
agcugauguuaggcauaga

SEQ ID NO: 1676928 - RNA, 19 nt, Artificial Sequence
  Description of Artificial Sequence: Synthetic oligonucleotide
  Antisense strand to SEQ ID NO: 1676927
ucuaugccuaacaucagcu

SEQ ID NO: 1676929 - RNA, 19 nt, Artificial Sequence
  Description of Artificial Sequence: Synthetic oligonucleotide
  Sense strand starting at position 2401 of SEQ ID NO: 1561505
gcugauguuaggcauagau

SEQ ID NO: 1676930 - RNA, 19 nt, Artificial Sequence
  Description of Artificial Sequence: Synthetic oligonucleotide
  Antisense strand to SEQ ID NO: 1676929
aucuaugccuaacaucagc

SEQ ID NO: 1676931 - RNA, 19 nt, Artificial Sequence
  Description of Artificial Sequence: Synthetic oligonucleotide
  Sense strand starting at position 2403 of SEQ ID NO: 1561505
ugauguuaggcauagauuc

SEQ ID NO: 1676932 - RNA, 19 nt, Artificial Sequence
  Description of Artificial Sequence: Synthetic oligonucleotide
  Antisense strand to SEQ ID NO: 1676931
gaaucuaugccuaacauca

SEQ ID NO: 1676933 - RNA, 19 nt, Artificial Sequence
  Description of Artificial Sequence: Synthetic oligonucleotide
  Sense strand starting at position 2410 of SEQ ID NO: 1561505
aggcauagauuccagacau

SEQ ID NO: 1676934 - RNA, 19 nt, Artificial Sequence
  Description of Artificial Sequence: Synthetic oligonucleotide
  Antisense strand to SEQ ID NO: 1676933
augucuggaaucuaugccu

SEQ ID NO: 1676935 - RNA, 19 nt, Artificial Sequence
  Description of Artificial Sequence: Synthetic oligonucleotide
  Sense strand starting at position 2701 of SEQ ID NO: 1561505
cacuguaauugucuggaac

SEQ ID NO: 1676936 - RNA, 19 nt, Artificial Sequence
  Description of Artificial Sequence: Synthetic oligonucleotide
  Antisense strand to SEQ ID NO: 1676935
guuccagacaauuacagug

SEQ ID NO: 1676937 - RNA, 19 nt, Artificial Sequence
  Description of Artificial Sequence: Synthetic oligonucleotide
  Sense strand starting at position 2702 of SEQ ID NO: 1561505
acuguaauugucuggaaca

SEQ ID NO: 1676938 - RNA, 19 nt, Artificial Sequence
  Description of Artificial Sequence: Synthetic oligonucleotide
  Antisense strand to SEQ ID NO: 1676937
uguuccagacaauuacagu

SEQ ID NO: 1676939 - RNA, 19 nt, Artificial Sequence
  Description of Artificial Sequence: Synthetic oligonucleotide
  Sense strand starting at position 2703 of SEQ ID NO: 1561505
cuguaauugucuggaacag

SEQ ID NO: 1676940 - RNA, 19 nt, Artificial Sequence
  Description of Artificial Sequence: Synthetic oligonucleotide
  Antisense strand to SEQ ID NO: 1676939
cuguuccagacaauuacag

SEQ ID NO: 1676941 - RNA, 19 nt, Artificial Sequence
  Description of Artificial Sequence: Synthetic oligonucleotide
  Sense strand starting at position 2760 of SEQ ID NO: 1561505
ggcgguauguaccauguca

SEQ ID NO: 1676942 - RNA, 19 nt, Artificial Sequence
  Description of Artificial Sequence: Synthetic oligonucleotide
  Antisense strand to SEQ ID NO: 1676941
ugacaugguacauaccgcc

SEQ ID NO: 1676943 - RNA, 19 nt, Artificial Sequence
  Description of Artificial Sequence: Synthetic oligonucleotide
  Sense strand starting at position 2762 of SEQ ID NO: 1561505
cgguauguaccaugucaug

SEQ ID NO: 1676944 - RNA, 19 nt, Artificial Sequence
  Description of Artificial Sequence: Synthetic oligonucleotide
  Antisense strand to SEQ ID NO: 1676943
caugacaugguacauaccg

SEQ ID NO: 1676945 - RNA, 19 nt, Artificial Sequence
  Description of Artificial Sequence: Synthetic oligonucleotide
  Sense strand starting at position 3172 of SEQ ID NO: 1561505
ccauguggauauccagaua

SEQ ID NO: 1676946 - RNA, 19 nt, Artificial Sequence
  Description of Artificial Sequence: Synthetic oligonucleotide
  Antisense strand to SEQ ID NO: 1676945
uaucuggauauccacaugg

SEQ ID NO: 1676947 - RNA, 19 nt, Artificial Sequence
  Description of Artificial Sequence: Synthetic oligonucleotide
  Sense strand starting at position 3175 of SEQ ID NO: 1561505
uguggauauccagauaguu

SEQ ID NO: 1676948 - RNA, 19 nt, Artificial Sequence
  Description of Artificial Sequence: Synthetic oligonucleotide
  Antisense strand to SEQ ID NO: 1676947
aacuaucuggauauccaca

SEQ ID NO: 1676949 - RNA, 19 nt, Artificial Sequence
  Description of Artificial Sequence: Synthetic oligonucleotide
  Sense strand starting at position 3177 of SEQ ID NO: 1561505
uggauauccagauaguugu

SEQ ID NO: 1676950 - RNA, 19 nt, Artificial Sequence
  Description of Artificial Sequence: Synthetic oligonucleotide
  Antisense strand to SEQ ID NO: 1676949
acaacuaucuggauaucca

SEQ ID NO: 1676951 - RNA, 19 nt, Artificial Sequence
  Description of Artificial Sequence: Synthetic oligonucleotide
  Sense strand starting at position 3184 of SEQ ID NO: 1561505
ccagauaguuguccuagca

SEQ ID NO: 1676952 - RNA, 19 nt, Artificial Sequence
  Description of Artificial Sequence: Synthetic oligonucleotide
  Antisense strand to SEQ ID NO: 1676951
ugcuaggacaacuaucugg

SEQ ID NO: 1676953 - RNA, 19 nt, Artificial Sequence
  Description of Artificial Sequence: Synthetic oligonucleotide
  Sense strand starting at position 3197 of SEQ ID NO: 1561505
cuagcacauuuauggaaga

SEQ ID NO: 1676954 - RNA, 19 nt, Artificial Sequence
  Description of Artificial Sequence: Synthetic oligonucleotide
  Antisense strand to SEQ ID NO: 1676953
ucuuccauaaaugugcuag

SEQ ID NO: 1676955 - RNA, 19 nt, Artificial Sequence
  Description of Artificial Sequence: Synthetic oligonucleotide
  Sense strand starting at position 3312 of SEQ ID NO: 1561505
uggcgagaucucgacuaaa

SEQ ID NO: 1676956 - RNA, 19 nt, Artificial Sequence
  Description of Artificial Sequence: Synthetic oligonucleotide
  Antisense strand to SEQ ID NO: 1676955
uuuagucgagaucucgcca

SEQ ID NO: 1676957 - RNA, 19 nt, Artificial Sequence
  Description of Artificial Sequence: Synthetic oligonucleotide
  Sense strand starting at position 3315 of SEQ ID NO: 1561505
cgagaucucgacuaaaugc

SEQ ID NO: 1676958 - RNA, 19 nt, Artificial Sequence
  Description of Artificial Sequence: Synthetic oligonucleotide
  Antisense strand to SEQ ID NO: 1676957
gcauuuagucgagaucucg

SEQ ID NO: 1676959 - RNA, 19 nt, Artificial Sequence
  Description of Artificial Sequence: Synthetic oligonucleotide
  Sense strand starting at position 323 of SEQ ID NO: 1561506
cguuguuugccugucaaag

SEQ ID NO: 1676960 - RNA, 19 nt, Artificial Sequence
  Description of Artificial Sequence: Synthetic oligonucleotide
  Antisense strand to SEQ ID NO: 1676959
cuuugacaggcaaacaacg

SEQ ID NO: 1676961 - RNA, 19 nt, Artificial Sequence
  Description of Artificial Sequence: Synthetic oligonucleotide
  Sense strand starting at position 324 of SEQ ID NO: 1561506
guuguuugccugucaaagu

SEQ ID NO: 1676962 - RNA, 19 nt, Artificial Sequence
  Description of Artificial Sequence: Synthetic oligonucleotide
  Antisense strand to SEQ ID NO: 1676961
acuuugacaggcaaacaac

SEQ ID NO: 1676963 - RNA, 19 nt, Artificial Sequence
  Description of Artificial Sequence: Synthetic oligonucleotide
  Sense strand starting at position 426 of SEQ ID NO: 1561506
gcuggaggaucaucugaaa

SEQ ID NO: 1676964 - RNA, 19 nt, Artificial Sequence
  Description of Artificial Sequence: Synthetic oligonucleotide
  Antisense strand to SEQ ID NO: 1676963
uuucagaugauccuccagc

SEQ ID NO: 1676965 - RNA, 19 nt, Artificial Sequence
  Description of Artificial Sequence: Synthetic oligonucleotide
  Sense strand starting at position 568 of SEQ ID NO: 1561506
aucacauguacccgagaga

SEQ ID NO: 1676966 - RNA, 19 nt, Artificial Sequence
  Description of Artificial Sequence: Synthetic oligonucleotide
  Antisense strand to SEQ ID NO: 1676965
ucucucggguacaugugau

SEQ ID NO: 1676967 - RNA, 19 nt, Artificial Sequence
  Description of Artificial Sequence: Synthetic oligonucleotide
  Sense strand starting at position 641 of SEQ ID NO: 1561506
agugaaacuccauguccga

SEQ ID NO: 1676968 - RNA, 19 nt, Artificial Sequence
  Description of Artificial Sequence: Synthetic oligonucleotide
  Antisense strand to SEQ ID NO: 1676967
ucggacauggaguuucacu

SEQ ID NO: 1676969 - RNA, 19 nt, Artificial Sequence
  Description of Artificial Sequence: Synthetic oligonucleotide
  Sense strand starting at position 645 of SEQ ID NO: 1561506
aaacuccauguccgagaaa

SEQ ID NO: 1676970 - RNA, 19 nt, Artificial Sequence
  Description of Artificial Sequence: Synthetic oligonucleotide
  Antisense strand to SEQ ID NO: 1676969
uuucucggacauggaguuu

SEQ ID NO: 1676971 - RNA, 19 nt, Artificial Sequence
  Description of Artificial Sequence: Synthetic oligonucleotide
  Sense strand starting at position 811 of SEQ ID NO: 1561506
uuccuugucuguuugagau

SEQ ID NO: 1676972 - RNA, 19 nt, Artificial Sequence
  Description of Artificial Sequence: Synthetic oligonucleotide
  Antisense strand to SEQ ID NO: 1676971
aucucaaacagacaaggaa

SEQ ID NO: 1676973 - RNA, 19 nt, Artificial Sequence
  Description of Artificial Sequence: Synthetic oligonucleotide
  Sense strand starting at position 819 of SEQ ID NO: 1561506
cuguuugagauagggugua

SEQ ID NO: 1676974 - RNA, 19 nt, Artificial Sequence
  Description of Artificial Sequence: Synthetic oligonucleotide
  Antisense strand to SEQ ID NO: 1676973
uacacccuaucucaaacag

SEQ ID NO: 1676975 - RNA, 19 nt, Artificial Sequence
  Description of Artificial Sequence: Synthetic oligonucleotide
  Sense strand starting at position 978 of SEQ ID NO: 1561506
caauuaaguccagacggua

SEQ ID NO: 1676976 - RNA, 19 nt, Artificial Sequence
  Description of Artificial Sequence: Synthetic oligonucleotide
  Antisense strand to SEQ ID NO: 1676975
uaccgucuggacuuaauug

SEQ ID NO: 1676977 - RNA, 19 nt, Artificial Sequence
  Description of Artificial Sequence: Synthetic oligonucleotide
  Sense strand starting at position 981 of SEQ ID NO: 1561506
uuaaguccagacgguaaau

SEQ ID NO: 1676978 - RNA, 19 nt, Artificial Sequence
  Description of Artificial Sequence: Synthetic oligonucleotide
  Antisense strand to SEQ ID NO: 1676977
auuuaccgucuggacuuaa

SEQ ID NO: 1676979 - RNA, 19 nt, Artificial Sequence
  Description of Artificial Sequence: Synthetic oligonucleotide
  Sense strand starting at position 990 of SEQ ID NO: 1561506
gacgguaaaucauacugaa

SEQ ID NO: 1676980 - RNA, 19 nt, Artificial Sequence
  Description of Artificial Sequence: Synthetic oligonucleotide
  Antisense strand to SEQ ID NO: 1676979
uucaguaugauuuaccguc

SEQ ID NO: 1676981 - RNA, 19 nt, Artificial Sequence
  Description of Artificial Sequence: Synthetic oligonucleotide
  Sense strand starting at position 993 of SEQ ID NO: 1561506
gguaaaucauacugaaaug

SEQ ID NO: 1676982 - RNA, 19 nt, Artificial Sequence
  Description of Artificial Sequence: Synthetic oligonucleotide
  Antisense strand to SEQ ID NO: 1676981
cauuucaguaugauuuacc

SEQ ID NO: 1676983 - RNA, 19 nt, Artificial Sequence
  Description of Artificial Sequence: Synthetic oligonucleotide
  Sense strand starting at position 1011 of SEQ ID NO: 1561506
guguaaauaugacacaaua

SEQ ID NO: 1676984 - RNA, 19 nt, Artificial Sequence
  Description of Artificial Sequence: Synthetic oligonucleotide
  Antisense strand to SEQ ID NO: 1676983
uauugugucauauuuacac

SEQ ID NO: 1676985 - RNA, 19 nt, Artificial Sequence
  Description of Artificial Sequence: Synthetic oligonucleotide
  Sense strand starting at position 1402 of SEQ ID NO: 1561506
auggaaaugcuguauuguc

SEQ ID NO: 1676986 - RNA, 19 nt, Artificial Sequence
  Description of Artificial Sequence: Synthetic oligonucleotide
  Antisense strand to SEQ ID NO: 1676985
gacaauacagcauuuccau

SEQ ID NO: 1676987 - RNA, 19 nt, Artificial Sequence
  Description of Artificial Sequence: Synthetic oligonucleotide
  Sense strand starting at position 1734 of SEQ ID NO: 1561506
uaacaagugcaguguauca

SEQ ID NO: 1676988 - RNA, 19 nt, Artificial Sequence
  Description of Artificial Sequence: Synthetic oligonucleotide
  Antisense strand to SEQ ID NO: 1676987
ugauacacugcacuuguua

SEQ ID NO: 1676989 - RNA, 19 nt, Artificial Sequence
  Description of Artificial Sequence: Synthetic oligonucleotide
  Sense strand starting at position 1741 of SEQ ID NO: 1561506
ugcaguguaucaguuauau

SEQ ID NO: 1676990 - RNA, 19 nt, Artificial Sequence
  Description of Artificial Sequence: Synthetic oligonucleotide
  Antisense strand to SEQ ID NO: 1676989
auauaacugauacacugca

SEQ ID NO: 1676991 - RNA, 19 nt, Artificial Sequence
  Description of Artificial Sequence: Synthetic oligonucleotide
  Sense strand starting at position 1856 of SEQ ID NO: 1561506
uuauauaggcugcagaauu

SEQ ID NO: 1676992 - RNA, 19 nt, Artificial Sequence
  Description of Artificial Sequence: Synthetic oligonucleotide
  Antisense strand to SEQ ID NO: 1676991
aauucugcagccuauauaa

SEQ ID NO: 1676993 - RNA, 19 nt, Artificial Sequence
  Description of Artificial Sequence: Synthetic oligonucleotide
  Sense strand starting at position 1936 of SEQ ID NO: 1561506
agaauugaaauacguguua

SEQ ID NO: 1676994 - RNA, 19 nt, Artificial Sequence
  Description of Artificial Sequence: Synthetic oligonucleotide
  Antisense strand to SEQ ID NO: 1676993
uaacacguauuucaauucu

SEQ ID NO: 1676995 - RNA, 19 nt, Artificial Sequence
  Description of Artificial Sequence: Synthetic oligonucleotide
  Sense strand starting at position 1947 of SEQ ID NO: 1561506
acguguuaagaucacuauc

SEQ ID NO: 1676996 - RNA, 19 nt, Artificial Sequence
  Description of Artificial Sequence: Synthetic oligonucleotide
  Antisense strand to SEQ ID NO: 1676995
gauagugaucuuaacacgu

SEQ ID NO: 1676997 - RNA, 19 nt, Artificial Sequence
  Description of Artificial Sequence: Synthetic oligonucleotide
  Sense strand starting at position 1949 of SEQ ID NO: 1561506
guguuaagaucacuaucuu

SEQ ID NO: 1676998 - RNA, 19 nt, Artificial Sequence
  Description of Artificial Sequence: Synthetic oligonucleotide
  Antisense strand to SEQ ID NO: 1676997
aagauagugaucuuaacac

SEQ ID NO: 1676999 - RNA, 19 nt, Artificial Sequence
  Description of Artificial Sequence: Synthetic oligonucleotide
  Sense strand starting at position 1955 of SEQ ID NO: 1561506
agaucacuaucuucugaug

SEQ ID NO: 1677000 - RNA, 19 nt, Artificial Sequence
  Description of Artificial Sequence: Synthetic oligonucleotide
  Antisense strand to SEQ ID NO: 1676999
caucagaagauagugaucu

SEQ ID NO: 1677001 - RNA, 19 nt, Artificial Sequence
  Description of Artificial Sequence: Synthetic oligonucleotide
  Sense strand starting at position 2060 of SEQ ID NO: 1561506
gcugcauaucaccaggcaa

SEQ ID NO: 1677002 - RNA, 19 nt, Artificial Sequence
  Description of Artificial Sequence: Synthetic oligonucleotide
  Antisense strand to SEQ ID NO: 1677001
uugccuggugauaugcagc

SEQ ID NO: 1677003 - RNA, 19 nt, Artificial Sequence
  Description of Artificial Sequence: Synthetic oligonucleotide
  Sense strand starting at position 2062 of SEQ ID NO: 1561506
ugcauaucaccaggcaaua

SEQ ID NO: 1677004 - RNA, 19 nt, Artificial Sequence
  Description of Artificial Sequence: Synthetic oligonucleotide
  Antisense strand to SEQ ID NO: 1677003
uauugccuggugauaugca

SEQ ID NO: 1677005 - RNA, 19 nt, Artificial Sequence
  Description of Artificial Sequence: Synthetic oligonucleotide
  Sense strand starting at position 2091 of SEQ ID NO: 1561506
guauauaugcauuguccuu

SEQ ID NO: 1677006 - RNA, 19 nt, Artificial Sequence
  Description of Artificial Sequence: Synthetic oligonucleotide
  Antisense strand to SEQ ID NO: 1677005
aaggacaaugcauauauac

SEQ ID NO: 1677007 - RNA, 19 nt, Artificial Sequence
  Description of Artificial Sequence: Synthetic oligonucleotide
  Sense strand starting at position 2104 of SEQ ID NO: 1561506
guccuucguuaucuaguca

SEQ ID NO: 1677008 - RNA, 19 nt, Artificial Sequence
  Description of Artificial Sequence: Synthetic oligonucleotide
  Antisense strand to SEQ ID NO: 1677007
ugacuagauaacgaaggac

SEQ ID NO: 1677009 - RNA, 19 nt, Artificial Sequence
  Description of Artificial Sequence: Synthetic oligonucleotide
  Sense strand starting at position 2108 of SEQ ID NO: 1561506
uucguuaucuagucaacug

SEQ ID NO: 1677010 - RNA, 19 nt, Artificial Sequence
  Description of Artificial Sequence: Synthetic oligonucleotide
  Antisense strand to SEQ ID NO: 1677009
caguugacuagauaacgaa

SEQ ID NO: 1677011 - RNA, 19 nt, Artificial Sequence
  Description of Artificial Sequence: Synthetic oligonucleotide
  Sense strand starting at position 2109 of SEQ ID NO: 1561506
ucguuaucuagucaacugu

SEQ ID NO: 1677012 - RNA, 19 nt, Artificial Sequence
  Description of Artificial Sequence: Synthetic oligonucleotide
  Antisense strand to SEQ ID NO: 1677011
acaguugacuagauaacga

SEQ ID NO: 1677013 - RNA, 19 nt, Artificial Sequence
  Description of Artificial Sequence: Synthetic oligonucleotide
  Sense strand starting at position 2550 of SEQ ID NO: 1561506
uaggcuccuuggucugaaa

SEQ ID NO: 1677014 - RNA, 19 nt, Artificial Sequence
  Description of Artificial Sequence: Synthetic oligonucleotide
  Antisense strand to SEQ ID NO: 1677013
uuucagaccaaggagccua

SEQ ID NO: 1677015 - RNA, 19 nt, Artificial Sequence
  Description of Artificial Sequence: Synthetic oligonucleotide
  Sense strand starting at position 2552 of SEQ ID NO: 1561506
ggcuccuuggucugaaaga

SEQ ID NO: 1677016 - RNA, 19 nt, Artificial Sequence
  Description of Artificial Sequence: Synthetic oligonucleotide
  Antisense strand to SEQ ID NO: 1677015
ucuuucagaccaaggagcc

SEQ ID NO: 1677017 - RNA, 19 nt, Artificial Sequence
  Description of Artificial Sequence: Synthetic oligonucleotide
  Sense strand starting at position 2594 of SEQ ID NO: 1561506
cagaguuguguccaauagg

SEQ ID NO: 1677018 - RNA, 19 nt, Artificial Sequence
  Description of Artificial Sequence: Synthetic oligonucleotide
  Antisense strand to SEQ ID NO: 1677017
ccuauuggacacaacucug

SEQ ID NO: 1677019 - RNA, 19 nt, Artificial Sequence
  Description of Artificial Sequence: Synthetic oligonucleotide
  Sense strand starting at position 2597 of SEQ ID NO: 1561506
aguuguguccaauaggaug

SEQ ID NO: 1677020 - RNA, 19 nt, Artificial Sequence
  Description of Artificial Sequence: Synthetic oligonucleotide
  Antisense strand to SEQ ID NO: 1677019
cauccuauuggacacaacu

SEQ ID NO: 1677021 - RNA, 19 nt, Artificial Sequence
  Description of Artificial Sequence: Synthetic oligonucleotide
  Sense strand starting at position 2634 of SEQ ID NO: 1561506
gugagagaauuuggucaug

SEQ ID NO: 1677022 - RNA, 19 nt, Artificial Sequence
  Description of Artificial Sequence: Synthetic oligonucleotide
  Antisense strand to SEQ ID NO: 1677021
caugaccaaauucucucac

SEQ ID NO: 1677023 - RNA, 19 nt, Artificial Sequence
  Description of Artificial Sequence: Synthetic oligonucleotide
  Sense strand starting at position 2650 of SEQ ID NO: 1561506
auggguguugacuacacau

SEQ ID NO: 1677024 - RNA, 19 nt, Artificial Sequence
  Description of Artificial Sequence: Synthetic oligonucleotide
  Antisense strand to SEQ ID NO: 1677023
auguguagucaacacccau

SEQ ID NO: 1677025 - RNA, 19 nt, Artificial Sequence
  Description of Artificial Sequence: Synthetic oligonucleotide
  Sense strand starting at position 2652 of SEQ ID NO: 1561506
ggguguugacuacacauga

SEQ ID NO: 1677026 - RNA, 19 nt, Artificial Sequence
  Description of Artificial Sequence: Synthetic oligonucleotide
  Antisense strand to SEQ ID NO: 1677025
ucauguguagucaacaccc

SEQ ID NO: 1677027 - RNA, 19 nt, Artificial Sequence
  Description of Artificial Sequence: Synthetic oligonucleotide
  Sense strand starting at position 2666 of SEQ ID NO: 1561506
caugaauaggucuagugcu

SEQ ID NO: 1677028 - RNA, 19 nt, Artificial Sequence
  Description of Artificial Sequence: Synthetic oligonucleotide
  Antisense strand to SEQ ID NO: 1677027
agcacuagaccuauucaug

SEQ ID NO: 1677029 - RNA, 19 nt, Artificial Sequence
  Description of Artificial Sequence: Synthetic oligonucleotide
  Sense strand starting at position 3028 of SEQ ID NO: 1561506
cauuaaagagcugauuguu

SEQ ID NO: 1677030 - RNA, 19 nt, Artificial Sequence
  Description of Artificial Sequence: Synthetic oligonucleotide
  Antisense strand to SEQ ID NO: 1677029
aacaaucagcucuuuaaug

SEQ ID NO: 1677031 - RNA, 19 nt, Artificial Sequence
  Description of Artificial Sequence: Synthetic oligonucleotide
  Sense strand starting at position 3031 of SEQ ID NO: 1561506
uaaagagcugauuguuauu

SEQ ID NO: 1677032 - RNA, 19 nt, Artificial Sequence
  Description of Artificial Sequence: Synthetic oligonucleotide
  Antisense strand to SEQ ID NO: 1677031
aauaacaaucagcucuuua

SEQ ID NO: 1677033 - RNA, 19 nt, Artificial Sequence
  Description of Artificial Sequence: Synthetic oligonucleotide
  Sense strand starting at position 3036 of SEQ ID NO: 1561506
agcugauuguuauuucuuu

SEQ ID NO: 1677034 - RNA, 19 nt, Artificial Sequence
  Description of Artificial Sequence: Synthetic oligonucleotide
  Antisense strand to SEQ ID NO: 1677033
aaagaaauaacaaucagcu

SEQ ID NO: 1677035 - RNA, 19 nt, Artificial Sequence
  Description of Artificial Sequence: Synthetic oligonucleotide
  Sense strand starting at position 3271 of SEQ ID NO: 1561506
cccagcuggguccaaauaa

SEQ ID NO: 1677036 - RNA, 19 nt, Artificial Sequence
  Description of Artificial Sequence: Synthetic oligonucleotide
  Antisense strand to SEQ ID NO: 1677035
uuauuuggacccagcuggg

SEQ ID NO: 1677037 - RNA, 19 nt, Artificial Sequence
  Description of Artificial Sequence: Synthetic oligonucleotide
  Sense strand starting at position 3421 of SEQ ID NO: 1561506
gugauuugcucccaaagug

SEQ ID NO: 1677038 - RNA, 19 nt, Artificial Sequence
  Description of Artificial Sequence: Synthetic oligonucleotide
  Antisense strand to SEQ ID NO: 1677037
cacuuugggagcaaaucac

SEQ ID NO: 1677039 - RNA, 19 nt, Artificial Sequence
  Description of Artificial Sequence: Synthetic oligonucleotide
  Sense strand starting at position 47 of SEQ ID NO: 1561507
ggagaaacauguuugggua

SEQ ID NO: 1677040 - RNA, 19 nt, Artificial Sequence
  Description of Artificial Sequence: Synthetic oligonucleotide
  Antisense strand to SEQ ID NO: 1677039
uacccaaacauguuucucc

SEQ ID NO: 1677041 - RNA, 19 nt, Artificial Sequence
  Description of Artificial Sequence: Synthetic oligonucleotide
  Sense strand starting at position 51 of SEQ ID NO: 1561507
aaacauguuuggguaaaca

SEQ ID NO: 1677042 - RNA, 19 nt, Artificial Sequence
  Description of Artificial Sequence: Synthetic oligonucleotide
  Antisense strand to SEQ ID NO: 1677041
uguuuacccaaacauguuu

SEQ ID NO: 1677043 - RNA, 19 nt, Artificial Sequence
  Description of Artificial Sequence: Synthetic oligonucleotide
  Sense strand starting at position 186 of SEQ ID NO: 1561507
augguauacuauuacagaa

SEQ ID NO: 1677044 - RNA, 19 nt, Artificial Sequence
  Description of Artificial Sequence: Synthetic oligonucleotide
  Antisense strand to SEQ ID NO: 1677043
uucuguaauaguauaccau

SEQ ID NO: 1677045 - RNA, 19 nt, Artificial Sequence
  Description of Artificial Sequence: Synthetic oligonucleotide
  Sense strand starting at position 188 of SEQ ID NO: 1561507
gguauacuauuacagaaau

SEQ ID NO: 1677046 - RNA, 19 nt, Artificial Sequence
  Description of Artificial Sequence: Synthetic oligonucleotide
  Antisense strand to SEQ ID NO: 1677045
auuucuguaauaguauacc

SEQ ID NO: 1677047 - RNA, 19 nt, Artificial Sequence
  Description of Artificial Sequence: Synthetic oligonucleotide
  Sense strand starting at position 233 of SEQ ID NO: 1561507
cauggaugauauguuuacu

SEQ ID NO: 1677048 - RNA, 19 nt, Artificial Sequence
  Description of Artificial Sequence: Synthetic oligonucleotide
  Antisense strand to SEQ ID NO: 1677047
aguaaacauaucauccaug

SEQ ID NO: 1677049 - RNA, 19 nt, Artificial Sequence
  Description of Artificial Sequence: Synthetic oligonucleotide
  Sense strand starting at position 308 of SEQ ID NO: 1561507
gcuuaucugcauugugaaa

SEQ ID NO: 1677050 - RNA, 19 nt, Artificial Sequence
  Description of Artificial Sequence: Synthetic oligonucleotide
  Antisense strand to SEQ ID NO: 1677049
uuucacaaugcagauaagc

SEQ ID NO: 1677051 - RNA, 19 nt, Artificial Sequence
  Description of Artificial Sequence: Synthetic oligonucleotide
  Sense strand starting at position 420 of SEQ ID NO: 1561507
ugugucagaaccugaaaga

SEQ ID NO: 1677052 - RNA, 19 nt, Artificial Sequence
  Description of Artificial Sequence: Synthetic oligonucleotide
  Antisense strand to SEQ ID NO: 1677051
ucuuucagguucugacaca

SEQ ID NO: 1677053 - RNA, 19 nt, Artificial Sequence
  Description of Artificial Sequence: Synthetic oligonucleotide
  Sense strand starting at position 472 of SEQ ID NO: 1561507
caguaaaccugaggaagaa

SEQ ID NO: 1677054 - RNA, 19 nt, Artificial Sequence
  Description of Artificial Sequence: Synthetic oligonucleotide
  Antisense strand to SEQ ID NO: 1677053
uucuuccucagguuuacug

SEQ ID NO: 1677055 - RNA, 19 nt, Artificial Sequence
  Description of Artificial Sequence: Synthetic oligonucleotide
  Sense strand starting at position 614 of SEQ ID NO: 1561507
gagugcagugcucaaucau

SEQ ID NO: 1677056 - RNA, 19 nt, Artificial Sequence
  Description of Artificial Sequence: Synthetic oligonucleotide
  Antisense strand to SEQ ID NO: 1677055
augauugagcacugcacuc

SEQ ID NO: 1677057 - RNA, 19 nt, Artificial Sequence
  Description of Artificial Sequence: Synthetic oligonucleotide
  Sense strand starting at position 940 of SEQ ID NO: 1561507
gaagucaaaugagauuugu

SEQ ID NO: 1677058 - RNA, 19 nt, Artificial Sequence
  Description of Artificial Sequence: Synthetic oligonucleotide
  Antisense strand to SEQ ID NO: 1677057
acaaaucucauuugacuuc

SEQ ID NO: 1677059 - RNA, 19 nt, Artificial Sequence
  Description of Artificial Sequence: Synthetic oligonucleotide
  Sense strand starting at position 957 of SEQ ID NO: 1561507
guaaaccaguccuugcaga

SEQ ID NO: 1677060 - RNA, 19 nt, Artificial Sequence
  Description of Artificial Sequence: Synthetic oligonucleotide
  Antisense strand to SEQ ID NO: 1677059
ucugcaaggacugguuuac

SEQ ID NO: 1677061 - RNA, 19 nt, Artificial Sequence
  Description of Artificial Sequence: Synthetic oligonucleotide
  Sense strand starting at position 1180 of SEQ ID NO: 1561507
cacugagucgcauauuaaa

SEQ ID NO: 1677062 - RNA, 19 nt, Artificial Sequence
  Description of Artificial Sequence: Synthetic oligonucleotide
  Antisense strand to SEQ ID NO: 1677061
uuuaauaugcgacucagug

SEQ ID NO: 1677063 - RNA, 19 nt, Artificial Sequence
  Description of Artificial Sequence: Synthetic oligonucleotide
  Sense strand starting at position 2288 of SEQ ID NO: 1561507
auccgcuuugcacaaagaa

SEQ ID NO: 1677064 - RNA, 19 nt, Artificial Sequence
  Description of Artificial Sequence: Synthetic oligonucleotide
  Antisense strand to SEQ ID NO: 1677063
uucuuugugcaaagcggau

SEQ ID NO: 1677065 - RNA, 19 nt, Artificial Sequence
  Description of Artificial Sequence: Synthetic oligonucleotide
  Sense strand starting at position 2341 of SEQ ID NO: 1561507
acacuuagguguccguaca

SEQ ID NO: 1677066 - RNA, 19 nt, Artificial Sequence
  Description of Artificial Sequence: Synthetic oligonucleotide
  Antisense strand to SEQ ID NO: 1677065
uguacggacaccuaagugu

SEQ ID NO: 1677067 - RNA, 19 nt, Artificial Sequence
  Description of Artificial Sequence: Synthetic oligonucleotide
  Sense strand starting at position 2342 of SEQ ID NO: 1561507
cacuuagguguccguacaa

SEQ ID NO: 1677068 - RNA, 19 nt, Artificial Sequence
  Description of Artificial Sequence: Synthetic oligonucleotide
  Antisense strand to SEQ ID NO: 1677067
uuguacggacaccuaagug

SEQ ID NO: 1677069 - RNA, 19 nt, Artificial Sequence
  Description of Artificial Sequence: Synthetic oligonucleotide
  Sense strand starting at position 2367 of SEQ ID NO: 1561507
acgcuuucuccacagagga

SEQ ID NO: 1677070 - RNA, 19 nt, Artificial Sequence
  Description of Artificial Sequence: Synthetic oligonucleotide
  Antisense strand to SEQ ID NO: 1677069
uccucuguggagaaagcgu

SEQ ID NO: 1677071 - RNA, 19 nt, Artificial Sequence
  Description of Artificial Sequence: Synthetic oligonucleotide
  Sense strand starting at position 2395 of SEQ ID NO: 1561507
aucgcacccugagucauau

SEQ ID NO: 1677072 - RNA, 19 nt, Artificial Sequence
  Description of Artificial Sequence: Synthetic oligonucleotide
  Antisense strand to SEQ ID NO: 1677071
auaugacucagggugcgau

SEQ ID NO: 1677073 - RNA, 19 nt, Artificial Sequence
  Description of Artificial Sequence: Synthetic oligonucleotide
  Sense strand starting at position 2492 of SEQ ID NO: 1561507
gagguacgaggauauuguu

SEQ ID NO: 1677074 - RNA, 19 nt, Artificial Sequence
  Description of Artificial Sequence: Synthetic oligonucleotide
  Antisense strand to SEQ ID NO: 1677073
aacaauauccucguaccuc

SEQ ID NO: 1677075 - RNA, 19 nt, Artificial Sequence
  Description of Artificial Sequence: Synthetic oligonucleotide
  Sense strand starting at position 3038 of SEQ ID NO: 1561507
cguaaauucuaauucugau

SEQ ID NO: 1677076 - RNA, 19 nt, Artificial Sequence
  Description of Artificial Sequence: Synthetic oligonucleotide
  Antisense strand to SEQ ID NO: 1677075
aucagaauuagaauuuacg

SEQ ID NO: 1677077 - RNA, 19 nt, Artificial Sequence
  Description of Artificial Sequence: Synthetic oligonucleotide
  Sense strand starting at position 3072 of SEQ ID NO: 1561507
acaauuccauuggaagaau

SEQ ID NO: 1677078 - RNA, 19 nt, Artificial Sequence
  Description of Artificial Sequence: Synthetic oligonucleotide
  Antisense strand to SEQ ID NO: 1677077
auucuuccaauggaauugu

SEQ ID NO: 1677079 - RNA, 19 nt, Artificial Sequence
  Description of Artificial Sequence: Synthetic oligonucleotide
  Sense strand starting at position 3095 of SEQ ID NO: 1561507
aggaaauuccugcaugcag

SEQ ID NO: 1677080 - RNA, 19 nt, Artificial Sequence
  Description of Artificial Sequence: Synthetic oligonucleotide
  Antisense strand to SEQ ID NO: 1677079
cugcaugcaggaauuuccu

SEQ ID NO: 1677081 - RNA, 19 nt, Artificial Sequence
  Description of Artificial Sequence: Synthetic oligonucleotide
  Sense strand starting at position 3107 of SEQ ID NO: 1561507
caugcaguggaguguuuau

SEQ ID NO: 1677082 - RNA, 19 nt, Artificial Sequence
  Description of Artificial Sequence: Synthetic oligonucleotide
  Antisense strand to SEQ ID NO: 1677081
auaaacacuccacugcaug

SEQ ID NO: 1677083 - RNA, 19 nt, Artificial Sequence
  Description of Artificial Sequence: Synthetic oligonucleotide
  Sense strand starting at position 3199 of SEQ ID NO: 1561507
agaaacauaccguguuacu

SEQ ID NO: 1677084 - RNA, 19 nt, Artificial Sequence
  Description of Artificial Sequence: Synthetic oligonucleotide
  Antisense strand to SEQ ID NO: 1677083
aguaacacgguauguuucu

SEQ ID NO: 1677085 - RNA, 19 nt, Artificial Sequence
  Description of Artificial Sequence: Synthetic oligonucleotide
  Sense strand starting at position 3258 of SEQ ID NO: 1561507
cuauaugacuccuuaggag

SEQ ID NO: 1677086 - RNA, 19 nt, Artificial Sequence
  Description of Artificial Sequence: Synthetic oligonucleotide
  Antisense strand to SEQ ID NO: 1677085
cuccuaaggagucauauag

SEQ ID NO: 1677087 - RNA, 19 nt, Artificial Sequence
  Description of Artificial Sequence: Synthetic oligonucleotide
  Sense strand starting at position 3262 of SEQ ID NO: 1561507
augacuccuuaggagaauu

SEQ ID NO: 1677088 - RNA, 19 nt, Artificial Sequence
  Description of Artificial Sequence: Synthetic oligonucleotide
  Antisense strand to SEQ ID NO: 1677087
aauucuccuaaggagucau

SEQ ID NO: 1677089 - RNA, 19 nt, Artificial Sequence
  Description of Artificial Sequence: Synthetic oligonucleotide
  Sense strand starting at position 3372 of SEQ ID NO: 1561507
acaagaauguucuuagcac

SEQ ID NO: 1677090 - RNA, 19 nt, Artificial Sequence
  Description of Artificial Sequence: Synthetic oligonucleotide
  Antisense strand to SEQ ID NO: 1677089
gugcuaagaacauucuugu

SEQ ID NO: 1677091 - RNA, 19 nt, Artificial Sequence
  Description of Artificial Sequence: Synthetic oligonucleotide
  Sense strand starting at position 3396 of SEQ ID NO: 1561507
ugcauaauacccugaacag

SEQ ID NO: 1677092 - RNA, 19 nt, Artificial Sequence
  Description of Artificial Sequence: Synthetic oligonucleotide
  Antisense strand to SEQ ID NO: 1677091
cuguucaggguauuaugca

SEQ ID NO: 1677093 - RNA, 19 nt, Artificial Sequence
  Description of Artificial Sequence: Synthetic oligonucleotide
  Sense strand starting at position 3420 of SEQ ID NO: 1561507
aguccaaguguccaucagu

SEQ ID NO: 1677094 - RNA, 19 nt, Artificial Sequence
  Description of Artificial Sequence: Synthetic oligonucleotide
  Antisense strand to SEQ ID NO: 1677093
acugauggacacuuggacu

SEQ ID NO: 1677095 - RNA, 19 nt, Artificial Sequence
  Description of Artificial Sequence: Synthetic oligonucleotide
  Sense strand starting at position 3423 of SEQ ID NO: 1561507
ccaaguguccaucaguaca

SEQ ID NO: 1677096 - RNA, 19 nt, Artificial Sequence
  Description of Artificial Sequence: Synthetic oligonucleotide
  Antisense strand to SEQ ID NO: 1677095
uguacugauggacacuugg

SEQ ID NO: 1677097 - RNA, 19 nt, Artificial Sequence
  Description of Artificial Sequence: Synthetic oligonucleotide
  Sense strand starting at position 3428 of SEQ ID NO: 1561507
uguccaucaguacaugaau

SEQ ID NO: 1677098 - RNA, 19 nt, Artificial Sequence
  Description of Artificial Sequence: Synthetic oligonucleotide
  Antisense strand to SEQ ID NO: 1677097
auucauguacugauggaca

SEQ ID NO: 1677099 - RNA, 19 nt, Artificial Sequence
  Description of Artificial Sequence: Synthetic oligonucleotide
  Sense strand starting at position 3431 of SEQ ID NO: 1561507
ccaucaguacaugaaugua

SEQ ID NO: 1677100 - RNA, 19 nt, Artificial Sequence
  Description of Artificial Sequence: Synthetic oligonucleotide
  Antisense strand to SEQ ID NO: 1677099
uacauucauguacugaugg

SEQ ID NO: 1677101 - RNA, 19 nt, Artificial Sequence
  Description of Artificial Sequence: Synthetic oligonucleotide
  Sense strand starting at position 3452 of SEQ ID NO: 1561507
agcaaauugcaguguaauc

SEQ ID NO: 1677102 - RNA, 19 nt, Artificial Sequence
  Description of Artificial Sequence: Synthetic oligonucleotide
  Antisense strand to SEQ ID NO: 1677101
gauuacacugcaauuugcu

SEQ ID NO: 1677103 - RNA, 19 nt, Artificial Sequence
  Description of Artificial Sequence: Synthetic oligonucleotide
  Sense strand starting at position 3463 of SEQ ID NO: 1561507
guguaaucauacccuggaa

SEQ ID NO: 1677104 - RNA, 19 nt, Artificial Sequence
  Description of Artificial Sequence: Synthetic oligonucleotide
  Antisense strand to SEQ ID NO: 1677103
uuccaggguaugauuacac

SEQ ID NO: 1677105 - RNA, 19 nt, Artificial Sequence
  Description of Artificial Sequence: Synthetic oligonucleotide
  Sense strand starting at position 3465 of SEQ ID NO: 1561507
guaaucauacccuggaaua

SEQ ID NO: 1677106 - RNA, 19 nt, Artificial Sequence
  Description of Artificial Sequence: Synthetic oligonucleotide
  Antisense strand to SEQ ID NO: 1677105
uauuccaggguaugauuac

SEQ ID NO: 1677107 - RNA, 19 nt, Artificial Sequence
  Description of Artificial Sequence: Synthetic oligonucleotide
  Sense strand starting at position 3513 of SEQ ID NO: 1561507
agaugcaugcaccaacaua

SEQ ID NO: 1677108 - RNA, 19 nt, Artificial Sequence
  Description of Artificial Sequence: Synthetic oligonucleotide
  Antisense strand to SEQ ID NO: 1677107
uauguuggugcaugcaucu

SEQ ID NO: 1677109 - RNA, 19 nt, Artificial Sequence
  Description of Artificial Sequence: Synthetic oligonucleotide
  Sense strand starting at position 3815 of SEQ ID NO: 1561507
ugaacaaaguucucugugu

SEQ ID NO: 1677110 - RNA, 19 nt, Artificial Sequence
  Description of Artificial Sequence: Synthetic oligonucleotide
  Antisense strand to SEQ ID NO: 1677109
acacagagaacuuuguuca

SEQ ID NO: 1677111 - RNA, 19 nt, Artificial Sequence
  Description of Artificial Sequence: Synthetic oligonucleotide
  Sense strand starting at position 3897 of SEQ ID NO: 1561507
acaagcaucucaguguagu

SEQ ID NO: 1677112 - RNA, 19 nt, Artificial Sequence
  Description of Artificial Sequence: Synthetic oligonucleotide
  Antisense strand to SEQ ID NO: 1677111
acuacacugagaugcuugu

SEQ ID NO: 1677113 - RNA, 19 nt, Artificial Sequence
  Description of Artificial Sequence: Synthetic oligonucleotide
  Sense strand starting at position 3898 of SEQ ID NO: 1561507
caagcaucucaguguagua

SEQ ID NO: 1677114 - RNA, 19 nt, Artificial Sequence
  Description of Artificial Sequence: Synthetic oligonucleotide
  Antisense strand to SEQ ID NO: 1677113
uacuacacugagaugcuug

SEQ ID NO: 1677115 - RNA, 19 nt, Artificial Sequence
  Description of Artificial Sequence: Synthetic oligonucleotide
  Sense strand starting at position 3900 of SEQ ID NO: 1561507
agcaucucaguguaguaua

SEQ ID NO: 1677116 - RNA, 19 nt, Artificial Sequence
  Description of Artificial Sequence: Synthetic oligonucleotide
  Antisense strand to SEQ ID NO: 1677115
uauacuacacugagaugcu

SEQ ID NO: 1677117 - RNA, 19 nt, Artificial Sequence
  Description of Artificial Sequence: Synthetic oligonucleotide
  Sense strand starting at position 3910 of SEQ ID NO: 1561507
uguaguauagagcaguauu

SEQ ID NO: 1677118 - RNA, 19 nt, Artificial Sequence
  Description of Artificial Sequence: Synthetic oligonucleotide
  Antisense strand to SEQ ID NO: 1677117
aauacugcucuauacuaca

SEQ ID NO: 1677119 - RNA, 19 nt, Artificial Sequence
  Description of Artificial Sequence: Synthetic oligonucleotide
  Sense strand starting at position 740 of SEQ ID NO: 1561508
caaggugaauucucagaca

SEQ ID NO: 1677120 - RNA, 19 nt, Artificial Sequence
  Description of Artificial Sequence: Synthetic oligonucleotide
  Antisense strand to SEQ ID NO: 1677119
ugucugagaauucaccuug

SEQ ID NO: 1677121 - RNA, 19 nt, Artificial Sequence
  Description of Artificial Sequence: Synthetic oligonucleotide
  Sense strand starting at position 848 of SEQ ID NO: 1561508
aagcucuuuggguauacau

SEQ ID NO: 1677122 - RNA, 19 nt, Artificial Sequence
  Description of Artificial Sequence: Synthetic oligonucleotide
  Antisense strand to SEQ ID NO: 1677121
auguauacccaaagagcuu

SEQ ID NO: 1677123 - RNA, 19 nt, Artificial Sequence
  Description of Artificial Sequence: Synthetic oligonucleotide
  Sense strand starting at position 870 of SEQ ID NO: 1561508
ucgugucaagaccaaugua

SEQ ID NO: 1677124 - RNA, 19 nt, Artificial Sequence
  Description of Artificial Sequence: Synthetic oligonucleotide
  Antisense strand to SEQ ID NO: 1677123
uacauuggucuugacacga

SEQ ID NO: 1677125 - RNA, 19 nt, Artificial Sequence
  Description of Artificial Sequence: Synthetic oligonucleotide
  Sense strand starting at position 873 of SEQ ID NO: 1561508
ugucaagaccaauguacua

SEQ ID NO: 1677126 - RNA, 19 nt, Artificial Sequence
  Description of Artificial Sequence: Synthetic oligonucleotide
  Antisense strand to SEQ ID NO: 1677125
uaguacauuggucuugaca

SEQ ID NO: 1677127 - RNA, 19 nt, Artificial Sequence
  Description of Artificial Sequence: Synthetic oligonucleotide
  Sense strand starting at position 918 of SEQ ID NO: 1561508
cacauuaugcgcuaaagga

SEQ ID NO: 1677128 - RNA, 19 nt, Artificial Sequence
  Description of Artificial Sequence: Synthetic oligonucleotide
  Antisense strand to SEQ ID NO: 1677127
uccuuuagcgcauaaugug

SEQ ID NO: 1677129 - RNA, 19 nt, Artificial Sequence
  Description of Artificial Sequence: Synthetic oligonucleotide
  Sense strand starting at position 934 of SEQ ID NO: 1561508
ggaguaacuuuacccaaga

SEQ ID NO: 1677130 - RNA, 19 nt, Artificial Sequence
  Description of Artificial Sequence: Synthetic oligonucleotide
  Antisense strand to SEQ ID NO: 1677129
ucuuggguaaaguuacucc

SEQ ID NO: 1677131 - RNA, 19 nt, Artificial Sequence
  Description of Artificial Sequence: Synthetic oligonucleotide
  Sense strand starting at position 935 of SEQ ID NO: 1561508
gaguaacuuuacccaagag

SEQ ID NO: 1677132 - RNA, 19 nt, Artificial Sequence
  Description of Artificial Sequence: Synthetic oligonucleotide
  Antisense strand to SEQ ID NO: 1677131
cucuuggguaaaguuacuc

SEQ ID NO: 1677133 - RNA, 19 nt, Artificial Sequence
  Description of Artificial Sequence: Synthetic oligonucleotide
  Sense strand starting at position 989 of SEQ ID NO: 1561508
acucuaagccuuuggaaua

SEQ ID NO: 1677134 - RNA, 19 nt, Artificial Sequence
  Description of Artificial Sequence: Synthetic oligonucleotide
  Antisense strand to SEQ ID NO: 1677133
uauuccaaaggcuuagagu

SEQ ID NO: 1677135 - RNA, 19 nt, Artificial Sequence
  Description of Artificial Sequence: Synthetic oligonucleotide
  Sense strand starting at position 1116 of SEQ ID NO: 1561508
guuugauaucuggaggagc

SEQ ID NO: 1677136 - RNA, 19 nt, Artificial Sequence
  Description of Artificial Sequence: Synthetic oligonucleotide
  Antisense strand to SEQ ID NO: 1677135
gcuccuccagauaucaaac

SEQ ID NO: 1677137 - RNA, 19 nt, Artificial Sequence
  Description of Artificial Sequence: Synthetic oligonucleotide
  Sense strand starting at position 1227 of SEQ ID NO: 1561508
uggcaacaaugguuacaau

SEQ ID NO: 1677138 - RNA, 19 nt, Artificial Sequence
  Description of Artificial Sequence: Synthetic oligonucleotide
  Antisense strand to SEQ ID NO: 1677137
auuguaaccauuguugcca

SEQ ID NO: 1677139 - RNA, 19 nt, Artificial Sequence
  Description of Artificial Sequence: Synthetic oligonucleotide
  Sense strand starting at position 1642 of SEQ ID NO: 1561508
gucggacucgucgcugauu

SEQ ID NO: 1677140 - RNA, 19 nt, Artificial Sequence
  Description of Artificial Sequence: Synthetic oligonucleotide
  Antisense strand to SEQ ID NO: 1677139
aaucagcgacgaguccgac

SEQ ID NO: 1677141 - RNA, 19 nt, Artificial Sequence
  Description of Artificial Sequence: Synthetic oligonucleotide
  Sense strand starting at position 1650 of SEQ ID NO: 1561508
cgucgcugauuuccucaga

SEQ ID NO: 1677142 - RNA, 19 nt, Artificial Sequence
  Description of Artificial Sequence: Synthetic oligonucleotide
  Antisense strand to SEQ ID NO: 1677141
ucugaggaaaucagcgacg

SEQ ID NO: 1677143 - RNA, 19 nt, Artificial Sequence
  Description of Artificial Sequence: Synthetic oligonucleotide
  Sense strand starting at position 1857 of SEQ ID NO: 1561508
gccgcauccacguccgaaa

SEQ ID NO: 1677144 - RNA, 19 nt, Artificial Sequence
  Description of Artificial Sequence: Synthetic oligonucleotide
  Antisense strand to SEQ ID NO: 1677143
uuucggacguggaugcggc

SEQ ID NO: 1677145 - RNA, 19 nt, Artificial Sequence
  Description of Artificial Sequence: Synthetic oligonucleotide
  Sense strand starting at position 2144 of SEQ ID NO: 1561508
ggcgcaguggcauucuauu

SEQ ID NO: 1677146 - RNA, 19 nt, Artificial Sequence
  Description of Artificial Sequence: Synthetic oligonucleotide
  Antisense strand to SEQ ID NO: 1677145
aauagaaugccacugcgcc

SEQ ID NO: 1677147 - RNA, 19 nt, Artificial Sequence
  Description of Artificial Sequence: Synthetic oligonucleotide
  Sense strand starting at position 2288 of SEQ ID NO: 1561508
ugcucauauccaggacaau

SEQ ID NO: 1677148 - RNA, 19 nt, Artificial Sequence
  Description of Artificial Sequence: Synthetic oligonucleotide
  Antisense strand to SEQ ID NO: 1677147
auuguccuggauaugagca

SEQ ID NO: 1677149 - RNA, 19 nt, Artificial Sequence
  Description of Artificial Sequence: Synthetic oligonucleotide
  Sense strand starting at position 2289 of SEQ ID NO: 1561508
gcucauauccaggacaauu

SEQ ID NO: 1677150 - RNA, 19 nt, Artificial Sequence
  Description of Artificial Sequence: Synthetic oligonucleotide
  Antisense strand to SEQ ID NO: 1677149
aauuguccuggauaugagc

SEQ ID NO: 1677151 - RNA, 19 nt, Artificial Sequence
  Description of Artificial Sequence: Synthetic oligonucleotide
  Sense strand starting at position 2380 of SEQ ID NO: 1561508
ggucacugaaaguguuaga

SEQ ID NO: 1677152 - RNA, 19 nt, Artificial Sequence
  Description of Artificial Sequence: Synthetic oligonucleotide
  Antisense strand to SEQ ID NO: 1677151
ucuaacacuuucagugacc

SEQ ID NO: 1677153 - RNA, 19 nt, Artificial Sequence
  Description of Artificial Sequence: Synthetic oligonucleotide
  Sense strand starting at position 2588 of SEQ ID NO: 1561508
cuacauguuuccuuccaga

SEQ ID NO: 1677154 - RNA, 19 nt, Artificial Sequence
  Description of Artificial Sequence: Synthetic oligonucleotide
  Antisense strand to SEQ ID NO: 1677153
ucuggaaggaaacauguag

SEQ ID NO: 1677155 - RNA, 19 nt, Artificial Sequence
  Description of Artificial Sequence: Synthetic oligonucleotide
  Sense strand starting at position 2593 of SEQ ID NO: 1561508
uguuuccuuccagaaguaa

SEQ ID NO: 1677156 - RNA, 19 nt, Artificial Sequence
  Description of Artificial Sequence: Synthetic oligonucleotide
  Antisense strand to SEQ ID NO: 1677155
uuacuucuggaaggaaaca

SEQ ID NO: 1677157 - RNA, 19 nt, Artificial Sequence
  Description of Artificial Sequence: Synthetic oligonucleotide
  Sense strand starting at position 2650 of SEQ ID NO: 1561508
uuagaaugcgaucauccua

SEQ ID NO: 1677158 - RNA, 19 nt, Artificial Sequence
  Description of Artificial Sequence: Synthetic oligonucleotide
  Antisense strand to SEQ ID NO: 1677157
uaggaugaucgcauucuaa

SEQ ID NO: 1677159 - RNA, 19 nt, Artificial Sequence
  Description of Artificial Sequence: Synthetic oligonucleotide
  Sense strand starting at position 2729 of SEQ ID NO: 1561508
gcagauguuggcguuguaa

SEQ ID NO: 1677160 - RNA, 19 nt, Artificial Sequence
  Description of Artificial Sequence: Synthetic oligonucleotide
  Antisense strand to SEQ ID NO: 1677159
uuacaacgccaacaucugc

SEQ ID NO: 1677161 - RNA, 19 nt, Artificial Sequence
  Description of Artificial Sequence: Synthetic oligonucleotide
  Sense strand starting at position 2741 of SEQ ID NO: 1561508
guuguaacuguagaagauu

SEQ ID NO: 1677162 - RNA, 19 nt, Artificial Sequence
  Description of Artificial Sequence: Synthetic oligonucleotide
  Antisense strand to SEQ ID NO: 1677161
aaucuucuacaguuacaac

SEQ ID NO: 1677163 - RNA, 19 nt, Artificial Sequence
  Description of Artificial Sequence: Synthetic oligonucleotide
  Sense strand starting at position 2846 of SEQ ID NO: 1561508
aggcaaaucugucuuaaua

SEQ ID NO: 1677164 - RNA, 19 nt, Artificial Sequence
  Description of Artificial Sequence: Synthetic oligonucleotide
  Antisense strand to SEQ ID NO: 1677163
uauuaagacagauuugccu

SEQ ID NO: 1677165 - RNA, 19 nt, Artificial Sequence
  Description of Artificial Sequence: Synthetic oligonucleotide
  Sense strand starting at position 2898 of SEQ ID NO: 1561508
gaauuacaaugagagauga

SEQ ID NO: 1677166 - RNA, 19 nt, Artificial Sequence
  Description of Artificial Sequence: Synthetic oligonucleotide
  Antisense strand to SEQ ID NO: 1677165
ucaucucucauuguaauuc

SEQ ID NO: 1677167 - RNA, 19 nt, Artificial Sequence
  Description of Artificial Sequence: Synthetic oligonucleotide
  Sense strand starting at position 2934 of SEQ ID NO: 1561508
ggaacaucugcugaacugu

SEQ ID NO: 1677168 - RNA, 19 nt, Artificial Sequence
  Description of Artificial Sequence: Synthetic oligonucleotide
  Antisense strand to SEQ ID NO: 1677167
acaguucagcagauguucc

SEQ ID NO: 1677169 - RNA, 19 nt, Artificial Sequence
  Description of Artificial Sequence: Synthetic oligonucleotide
  Sense strand starting at position 2940 of SEQ ID NO: 1561508
ucugcugaacuguaagagu

SEQ ID NO: 1677170 - RNA, 19 nt, Artificial Sequence
  Description of Artificial Sequence: Synthetic oligonucleotide
  Antisense strand to SEQ ID NO: 1677169
acucuuacaguucagcaga

SEQ ID NO: 1677171 - RNA, 19 nt, Artificial Sequence
  Description of Artificial Sequence: Synthetic oligonucleotide
  Sense strand starting at position 3029 of SEQ ID NO: 1561508
ugaucugcaggauaguaua

SEQ ID NO: 1677172 - RNA, 19 nt, Artificial Sequence
  Description of Artificial Sequence: Synthetic oligonucleotide
  Antisense strand to SEQ ID NO: 1677171
uauacuauccugcagauca

SEQ ID NO: 1677173 - RNA, 19 nt, Artificial Sequence
  Description of Artificial Sequence: Synthetic oligonucleotide
  Sense strand starting at position 3095 of SEQ ID NO: 1561508
aauugugauugguuaaaca

SEQ ID NO: 1677174 - RNA, 19 nt, Artificial Sequence
  Description of Artificial Sequence: Synthetic oligonucleotide
  Antisense strand to SEQ ID NO: 1677173
uguuuaaccaaucacaauu

SEQ ID NO: 1677175 - RNA, 19 nt, Artificial Sequence
  Description of Artificial Sequence: Synthetic oligonucleotide
  Sense strand starting at position 3380 of SEQ ID NO: 1561508
gacuguuccguacaauuau

SEQ ID NO: 1677176 - RNA, 19 nt, Artificial Sequence
  Description of Artificial Sequence: Synthetic oligonucleotide
  Antisense strand to SEQ ID NO: 1677175
auaauuguacggaacaguc

SEQ ID NO: 1677177 - RNA, 19 nt, Artificial Sequence
  Description of Artificial Sequence: Synthetic oligonucleotide
  Sense strand starting at position 3457 of SEQ ID NO: 1561508
ucauguucguauuucuuga

SEQ ID NO: 1677178 - RNA, 19 nt, Artificial Sequence
  Description of Artificial Sequence: Synthetic oligonucleotide
  Antisense strand to SEQ ID NO: 1677177
ucaagaaauacgaacauga

SEQ ID NO: 1677179 - RNA, 19 nt, Artificial Sequence
  Description of Artificial Sequence: Synthetic oligonucleotide
  Sense strand starting at position 3462 of SEQ ID NO: 1561508
uucguauuucuugaguguu

SEQ ID NO: 1677180 - RNA, 19 nt, Artificial Sequence
  Description of Artificial Sequence: Synthetic oligonucleotide
  Antisense strand to SEQ ID NO: 1677179
aacacucaagaaauacgaa

SEQ ID NO: 1677181 - RNA, 19 nt, Artificial Sequence
  Description of Artificial Sequence: Synthetic oligonucleotide
  Sense strand starting at position 3464 of SEQ ID NO: 1561508
cguauuucuugaguguuau

SEQ ID NO: 1677182 - RNA, 19 nt, Artificial Sequence
  Description of Artificial Sequence: Synthetic oligonucleotide
  Antisense strand to SEQ ID NO: 1677181
auaacacucaagaaauacg

SEQ ID NO: 1677183 - RNA, 19 nt, Artificial Sequence
  Description of Artificial Sequence: Synthetic oligonucleotide
  Sense strand starting at position 3465 of SEQ ID NO: 1561508
guauuucuugaguguuaua

SEQ ID NO: 1677184 - RNA, 19 nt, Artificial Sequence
  Description of Artificial Sequence: Synthetic oligonucleotide
  Antisense strand to SEQ ID NO: 1677183
uauaacacucaagaaauac

SEQ ID NO: 1677185 - RNA, 19 nt, Artificial Sequence
  Description of Artificial Sequence: Synthetic oligonucleotide
  Sense strand starting at position 3525 of SEQ ID NO: 1561508
gaauguuaaucucugguag

SEQ ID NO: 1677186 - RNA, 19 nt, Artificial Sequence
  Description of Artificial Sequence: Synthetic oligonucleotide
  Antisense strand to SEQ ID NO: 1677185
cuaccagagauuaacauuc

SEQ ID NO: 1677187 - RNA, 19 nt, Artificial Sequence
  Description of Artificial Sequence: Synthetic oligonucleotide
  Sense strand starting at position 3608 of SEQ ID NO: 1561508
ccaggagugggcugauaaa

SEQ ID NO: 1677188 - RNA, 19 nt, Artificial Sequence
  Description of Artificial Sequence: Synthetic oligonucleotide
  Antisense strand to SEQ ID NO: 1677187
uuuaucagcccacuccugg

SEQ ID NO: 1677189 - RNA, 19 nt, Artificial Sequence
  Description of Artificial Sequence: Synthetic oligonucleotide
  Sense strand starting at position 3852 of SEQ ID NO: 1561508
gaaauucuagcuuggaaug

SEQ ID NO: 1677190 - RNA, 19 nt, Artificial Sequence
  Description of Artificial Sequence: Synthetic oligonucleotide
  Antisense strand to SEQ ID NO: 1677189
cauuccaagcuagaauuuc

SEQ ID NO: 1677191 - RNA, 19 nt, Artificial Sequence
  Description of Artificial Sequence: Synthetic oligonucleotide
  Sense strand starting at position 3853 of SEQ ID NO: 1561508
aaauucuagcuuggaaugu

SEQ ID NO: 1677192 - RNA, 19 nt, Artificial Sequence
  Description of Artificial Sequence: Synthetic oligonucleotide
  Antisense strand to SEQ ID NO: 1677191
acauuccaagcuagaauuu

SEQ ID NO: 1677193 - RNA, 19 nt, Artificial Sequence
  Description of Artificial Sequence: Synthetic oligonucleotide
  Sense strand starting at position 3901 of SEQ ID NO: 1561508
uuuacaagcuucucagaga

SEQ ID NO: 1677194 - RNA, 19 nt, Artificial Sequence
  Description of Artificial Sequence: Synthetic oligonucleotide
  Antisense strand to SEQ ID NO: 1677193
ucucugagaagcuuguaaa

SEQ ID NO: 1677195 - RNA, 19 nt, Artificial Sequence
  Description of Artificial Sequence: Synthetic oligonucleotide
  Sense strand starting at position 3951 of SEQ ID NO: 1561508
uagaaaguucuauaguguu

SEQ ID NO: 1677196 - RNA, 19 nt, Artificial Sequence
  Description of Artificial Sequence: Synthetic oligonucleotide
  Antisense strand to SEQ ID NO: 1677195
aacacuauagaacuuucua

SEQ ID NO: 1677197 - RNA, 19 nt, Artificial Sequence
  Description of Artificial Sequence: Synthetic oligonucleotide
  Sense strand starting at position 3961 of SEQ ID NO: 1561508
uauaguguucuggacuuaa

SEQ ID NO: 1677198 - RNA, 19 nt, Artificial Sequence
  Description of Artificial Sequence: Synthetic oligonucleotide
  Antisense strand to SEQ ID NO: 1677197
uuaaguccagaacacuaua

SEQ ID NO: 1677199 - RNA, 19 nt, Artificial Sequence
  Description of Artificial Sequence: Synthetic oligonucleotide
  Sense strand starting at position 320 of SEQ ID NO: 1561509
caauuaaagggcuauuagu

SEQ ID NO: 1677200 - RNA, 19 nt, Artificial Sequence
  Description of Artificial Sequence: Synthetic oligonucleotide
  Antisense strand to SEQ ID NO: 1677199
acuaauagcccuuuaauug

SEQ ID NO: 1677201 - RNA, 19 nt, Artificial Sequence
  Description of Artificial Sequence: Synthetic oligonucleotide
  Sense strand starting at position 328 of SEQ ID NO: 1561509
gggcuauuaguagaauucu

SEQ ID NO: 1677202 - RNA, 19 nt, Artificial Sequence
  Description of Artificial Sequence: Synthetic oligonucleotide
  Antisense strand to SEQ ID NO: 1677201
agaauucuacuaauagccc

SEQ ID NO: 1677203 - RNA, 19 nt, Artificial Sequence
  Description of Artificial Sequence: Synthetic oligonucleotide
  Sense strand starting at position 337 of SEQ ID NO: 1561509
guagaauucuaguuaauca

SEQ ID NO: 1677204 - RNA, 19 nt, Artificial Sequence
  Description of Artificial Sequence: Synthetic oligonucleotide
  Antisense strand to SEQ ID NO: 1677203
ugauuaacuagaauucuac

SEQ ID NO: 1677205 - RNA, 19 nt, Artificial Sequence
  Description of Artificial Sequence: Synthetic oligonucleotide
  Sense strand starting at position 372 of SEQ ID NO: 1561509
gaggaaugguacuuauguc

SEQ ID NO: 1677206 - RNA, 19 nt, Artificial Sequence
  Description of Artificial Sequence: Synthetic oligonucleotide
  Antisense strand to SEQ ID NO: 1677205
gacauaaguaccauuccuc

SEQ ID NO: 1677207 - RNA, 19 nt, Artificial Sequence
  Description of Artificial Sequence: Synthetic oligonucleotide
  Sense strand starting at position 376 of SEQ ID NO: 1561509
aaugguacuuaugucugua

SEQ ID NO: 1677208 - RNA, 19 nt, Artificial Sequence
  Description of Artificial Sequence: Synthetic oligonucleotide
  Antisense strand to SEQ ID NO: 1677207
uacagacauaaguaccauu

SEQ ID NO: 1677209 - RNA, 19 nt, Artificial Sequence
  Description of Artificial Sequence: Synthetic oligonucleotide
  Sense strand starting at position 379 of SEQ ID NO: 1561509
gguacuuaugucuguaacu

SEQ ID NO: 1677210 - RNA, 19 nt, Artificial Sequence
  Description of Artificial Sequence: Synthetic oligonucleotide
  Antisense strand to SEQ ID NO: 1677209
aguuacagacauaaguacc

SEQ ID NO: 1677211 - RNA, 19 nt, Artificial Sequence
  Description of Artificial Sequence: Synthetic oligonucleotide
  Sense strand starting at position 473 of SEQ ID NO: 1561509
accaguagagcugaucuaa

SEQ ID NO: 1677212 - RNA, 19 nt, Artificial Sequence
  Description of Artificial Sequence: Synthetic oligonucleotide
  Antisense strand to SEQ ID NO: 1677211
uuagaucagcucuacuggu

SEQ ID NO: 1677213 - RNA, 19 nt, Artificial Sequence
  Description of Artificial Sequence: Synthetic oligonucleotide
  Sense strand starting at position 519 of SEQ ID NO: 1561509
guaggcauauugguauuaa

SEQ ID NO: 1677214 - RNA, 19 nt, Artificial Sequence
  Description of Artificial Sequence: Synthetic oligonucleotide
  Antisense strand to SEQ ID NO: 1677213
uuaauaccaauaugccuac

SEQ ID NO: 1677215 - RNA, 19 nt, Artificial Sequence
  Description of Artificial Sequence: Synthetic oligonucleotide
  Sense strand starting at position 585 of SEQ ID NO: 1561509
auaauauguuaggcagaga

SEQ ID NO: 1677216 - RNA, 19 nt, Artificial Sequence
  Description of Artificial Sequence: Synthetic oligonucleotide
  Antisense strand to SEQ ID NO: 1677215
ucucugccuaacauauuau

SEQ ID NO: 1677217 - RNA, 19 nt, Artificial Sequence
  Description of Artificial Sequence: Synthetic oligonucleotide
  Sense strand starting at position 839 of SEQ ID NO: 1561509
auccaaauguacgcauaaa

SEQ ID NO: 1677218 - RNA, 19 nt, Artificial Sequence
  Description of Artificial Sequence: Synthetic oligonucleotide
  Antisense strand to SEQ ID NO: 1677217
uuuaugcguacauuuggau

SEQ ID NO: 1677219 - RNA, 19 nt, Artificial Sequence
  Description of Artificial Sequence: Synthetic oligonucleotide
  Sense strand starting at position 857 of SEQ ID NO: 1561509
acuuaaugugaaugcacuu

SEQ ID NO: 1677220 - RNA, 19 nt, Artificial Sequence
  Description of Artificial Sequence: Synthetic oligonucleotide
  Antisense strand to SEQ ID NO: 1677219
aagugcauucacauuaagu

SEQ ID NO: 1677221 - RNA, 19 nt, Artificial Sequence
  Description of Artificial Sequence: Synthetic oligonucleotide
  Sense strand starting at position 1030 of SEQ ID NO: 1561509
ugacaaagguuaucuuuga

SEQ ID NO: 1677222 - RNA, 19 nt, Artificial Sequence
  Description of Artificial Sequence: Synthetic oligonucleotide
  Antisense strand to SEQ ID NO: 1677221
ucaaagauaaccuuuguca

SEQ ID NO: 1677223 - RNA, 19 nt, Artificial Sequence
  Description of Artificial Sequence: Synthetic oligonucleotide
  Sense strand starting at position 1034 of SEQ ID NO: 1561509
aaagguuaucuuugaguaa

SEQ ID NO: 1677224 - RNA, 19 nt, Artificial Sequence
  Description of Artificial Sequence: Synthetic oligonucleotide
  Antisense strand to SEQ ID NO: 1677223
uuacucaaagauaaccuuu

SEQ ID NO: 1677225 - RNA, 19 nt, Artificial Sequence
  Description of Artificial Sequence: Synthetic oligonucleotide
  Sense strand starting at position 1038 of SEQ ID NO: 1561509
guuaucuuugaguaaccga

SEQ ID NO: 1677226 - RNA, 19 nt, Artificial Sequence
  Description of Artificial Sequence: Synthetic oligonucleotide
  Antisense strand to SEQ ID NO: 1677225
ucgguuacucaaagauaac

SEQ ID NO: 1677227 - RNA, 19 nt, Artificial Sequence
  Description of Artificial Sequence: Synthetic oligonucleotide
  Sense strand starting at position 1043 of SEQ ID NO: 1561509
cuuugaguaaccgagcuua

SEQ ID NO: 1677228 - RNA, 19 nt, Artificial Sequence
  Description of Artificial Sequence: Synthetic oligonucleotide
  Antisense strand to SEQ ID NO: 1677227
uaagcucgguuacucaaag

SEQ ID NO: 1677229 - RNA, 19 nt, Artificial Sequence
  Description of Artificial Sequence: Synthetic oligonucleotide
  Sense strand starting at position 1053 of SEQ ID NO: 1561509
ccgagcuuaccauggcaga

SEQ ID NO: 1677230 - RNA, 19 nt, Artificial Sequence
  Description of Artificial Sequence: Synthetic oligonucleotide
  Antisense strand to SEQ ID NO: 1677229
ucugccaugguaagcucgg

SEQ ID NO: 1677231 - RNA, 19 nt, Artificial Sequence
  Description of Artificial Sequence: Synthetic oligonucleotide
  Sense strand starting at position 1118 of SEQ ID NO: 1561509
agaggauacgcuggaaacu

SEQ ID NO: 1677232 - RNA, 19 nt, Artificial Sequence
  Description of Artificial Sequence: Synthetic oligonucleotide
  Antisense strand to SEQ ID NO: 1677231
aguuuccagcguauccucu

SEQ ID NO: 1677233 - RNA, 19 nt, Artificial Sequence
  Description of Artificial Sequence: Synthetic oligonucleotide
  Sense strand starting at position 1186 of SEQ ID NO: 1561509
uuagguaugcuagaugacu

SEQ ID NO: 1677234 - RNA, 19 nt, Artificial Sequence
  Description of Artificial Sequence: Synthetic oligonucleotide
  Antisense strand to SEQ ID NO: 1677233
agucaucuagcauaccuaa

SEQ ID NO: 1677235 - RNA, 19 nt, Artificial Sequence
  Description of Artificial Sequence: Synthetic oligonucleotide
  Sense strand starting at position 1188 of SEQ ID NO: 1561509
agguaugcuagaugacuga

SEQ ID NO: 1677236 - RNA, 19 nt, Artificial Sequence
  Description of Artificial Sequence: Synthetic oligonucleotide
  Antisense strand to SEQ ID NO: 1677235
ucagucaucuagcauaccu

SEQ ID NO: 1677237 - RNA, 19 nt, Artificial Sequence
  Description of Artificial Sequence: Synthetic oligonucleotide
  Sense strand starting at position 1218 of SEQ ID NO: 1561509
acuuccauuucugaggauu

SEQ ID NO: 1677238 - RNA, 19 nt, Artificial Sequence
  Description of Artificial Sequence: Synthetic oligonucleotide
  Antisense strand to SEQ ID NO: 1677237
aauccucagaaauggaagu

SEQ ID NO: 1677239 - RNA, 19 nt, Artificial Sequence
  Description of Artificial Sequence: Synthetic oligonucleotide
  Sense strand starting at position 1316 of SEQ ID NO: 1561509
gcuaaugagcaucaauucu

SEQ ID NO: 1677240 - RNA, 19 nt, Artificial Sequence
  Description of Artificial Sequence: Synthetic oligonucleotide
  Antisense strand to SEQ ID NO: 1677239
agaauugaugcucauuagc

SEQ ID NO: 1677241 - RNA, 19 nt, Artificial Sequence
  Description of Artificial Sequence: Synthetic oligonucleotide
  Sense strand starting at position 1461 of SEQ ID NO: 1561509
ucagaaaccuccguaccuu

SEQ ID NO: 1677242 - RNA, 19 nt, Artificial Sequence
  Description of Artificial Sequence: Synthetic oligonucleotide
  Antisense strand to SEQ ID NO: 1677241
aagguacggagguuucuga

SEQ ID NO: 1677243 - RNA, 19 nt, Artificial Sequence
  Description of Artificial Sequence: Synthetic oligonucleotide
  Sense strand starting at position 1631 of SEQ ID NO: 1561509
agcggaucucuagagaucu

SEQ ID NO: 1677244 - RNA, 19 nt, Artificial Sequence
  Description of Artificial Sequence: Synthetic oligonucleotide
  Antisense strand to SEQ ID NO: 1677243
agaucucuagagauccgcu

SEQ ID NO: 1677245 - RNA, 19 nt, Artificial Sequence
  Description of Artificial Sequence: Synthetic oligonucleotide
  Sense strand starting at position 1633 of SEQ ID NO: 1561509
cggaucucuagagaucuuu

SEQ ID NO: 1677246 - RNA, 19 nt, Artificial Sequence
  Description of Artificial Sequence: Synthetic oligonucleotide
  Antisense strand to SEQ ID NO: 1677245
aaagaucucuagagauccg

SEQ ID NO: 1677247 - RNA, 19 nt, Artificial Sequence
  Description of Artificial Sequence: Synthetic oligonucleotide
  Sense strand starting at position 1672 of SEQ ID NO: 1561509
cccugugacuggucccaga

SEQ ID NO: 1677248 - RNA, 19 nt, Artificial Sequence
  Description of Artificial Sequence: Synthetic oligonucleotide
  Antisense strand to SEQ ID NO: 1677247
ucugggaccagucacaggg

SEQ ID NO: 1677249 - RNA, 19 nt, Artificial Sequence
  Description of Artificial Sequence: Synthetic oligonucleotide
  Sense strand starting at position 1764 of SEQ ID NO: 1561509
cgcuaagcuccugaaagaa

SEQ ID NO: 1677250 - RNA, 19 nt, Artificial Sequence
  Description of Artificial Sequence: Synthetic oligonucleotide
  Antisense strand to SEQ ID NO: 1677249
uucuuucaggagcuuagcg

SEQ ID NO: 1677251 - RNA, 19 nt, Artificial Sequence
  Description of Artificial Sequence: Synthetic oligonucleotide
  Sense strand starting at position 2051 of SEQ ID NO: 1561509
gccaucuuugaguaucuga

SEQ ID NO: 1677252 - RNA, 19 nt, Artificial Sequence
  Description of Artificial Sequence: Synthetic oligonucleotide
  Antisense strand to SEQ ID NO: 1677251
ucagauacucaaagauggc

SEQ ID NO: 1677253 - RNA, 19 nt, Artificial Sequence
  Description of Artificial Sequence: Synthetic oligonucleotide
  Sense strand starting at position 2294 of SEQ ID NO: 1561509
acguuuacacuuuguacaa

SEQ ID NO: 1677254 - RNA, 19 nt, Artificial Sequence
  Description of Artificial Sequence: Synthetic oligonucleotide
  Antisense strand to SEQ ID NO: 1677253
uuguacaaaguguaaacgu

SEQ ID NO: 1677255 - RNA, 19 nt, Artificial Sequence
  Description of Artificial Sequence: Synthetic oligonucleotide
  Sense strand starting at position 2295 of SEQ ID NO: 1561509
cguuuacacuuuguacaaa

SEQ ID NO: 1677256 - RNA, 19 nt, Artificial Sequence
  Description of Artificial Sequence: Synthetic oligonucleotide
  Antisense strand to SEQ ID NO: 1677255
uuuguacaaaguguaaacg

SEQ ID NO: 1677257 - RNA, 19 nt, Artificial Sequence
  Description of Artificial Sequence: Synthetic oligonucleotide
  Sense strand starting at position 2320 of SEQ ID NO: 1561509
gaaacaguuccuugugagg

SEQ ID NO: 1677258 - RNA, 19 nt, Artificial Sequence
  Description of Artificial Sequence: Synthetic oligonucleotide
  Antisense strand to SEQ ID NO: 1677257
ccucacaaggaacuguuuc

SEQ ID NO: 1677259 - RNA, 19 nt, Artificial Sequence
  Description of Artificial Sequence: Synthetic oligonucleotide
  Sense strand starting at position 2499 of SEQ ID NO: 1561509
aaauuauguugggugaaag

SEQ ID NO: 1677260 - RNA, 19 nt, Artificial Sequence
  Description of Artificial Sequence: Synthetic oligonucleotide
  Antisense strand to SEQ ID NO: 1677259
cuuucacccaacauaauuu

SEQ ID NO: 1677261 - RNA, 19 nt, Artificial Sequence
  Description of Artificial Sequence: Synthetic oligonucleotide
  Sense strand starting at position 3039 of SEQ ID NO: 1561509
aagucauggcaaugcugaa

SEQ ID NO: 1677262 - RNA, 19 nt, Artificial Sequence
  Description of Artificial Sequence: Synthetic oligonucleotide
  Antisense strand to SEQ ID NO: 1677261
uucagcauugccaugacuu

SEQ ID NO: 1677263 - RNA, 19 nt, Artificial Sequence
  Description of Artificial Sequence: Synthetic oligonucleotide
  Sense strand starting at position 3107 of SEQ ID NO: 1561509
aggaaaugccugugugaau

SEQ ID NO: 1677264 - RNA, 19 nt, Artificial Sequence
  Description of Artificial Sequence: Synthetic oligonucleotide
  Antisense strand to SEQ ID NO: 1677263
auucacacaggcauuuccu

SEQ ID NO: 1677265 - RNA, 19 nt, Artificial Sequence
  Description of Artificial Sequence: Synthetic oligonucleotide
  Sense strand starting at position 3108 of SEQ ID NO: 1561509
ggaaaugccugugugaauc

SEQ ID NO: 1677266 - RNA, 19 nt, Artificial Sequence
  Description of Artificial Sequence: Synthetic oligonucleotide
  Antisense strand to SEQ ID NO: 1677265
gauucacacaggcauuucc

SEQ ID NO: 1677267 - RNA, 19 nt, Artificial Sequence
  Description of Artificial Sequence: Synthetic oligonucleotide
  Sense strand starting at position 3130 of SEQ ID NO: 1561509
gugugugauauagguauca

SEQ ID NO: 1677268 - RNA, 19 nt, Artificial Sequence
  Description of Artificial Sequence: Synthetic oligonucleotide
  Antisense strand to SEQ ID NO: 1677267
ugauaccuauaucacacac

SEQ ID NO: 1677269 - RNA, 19 nt, Artificial Sequence
  Description of Artificial Sequence: Synthetic oligonucleotide
  Sense strand starting at position 3132 of SEQ ID NO: 1561509
gugugauauagguaucagu

SEQ ID NO: 1677270 - RNA, 19 nt, Artificial Sequence
  Description of Artificial Sequence: Synthetic oligonucleotide
  Antisense strand to SEQ ID NO: 1677269
acugauaccuauaucacac

SEQ ID NO: 1677271 - RNA, 19 nt, Artificial Sequence
  Description of Artificial Sequence: Synthetic oligonucleotide
  Sense strand starting at position 3191 of SEQ ID NO: 1561509
ucaaguucguguuccauuu

SEQ ID NO: 1677272 - RNA, 19 nt, Artificial Sequence
  Description of Artificial Sequence: Synthetic oligonucleotide
  Antisense strand to SEQ ID NO: 1677271
aaauggaacacgaacuuga

SEQ ID NO: 1677273 - RNA, 19 nt, Artificial Sequence
  Description of Artificial Sequence: Synthetic oligonucleotide
  Sense strand starting at position 3212 of SEQ ID NO: 1561509
ucuucucacccuugguaua

SEQ ID NO: 1677274 - RNA, 19 nt, Artificial Sequence
  Description of Artificial Sequence: Synthetic oligonucleotide
  Antisense strand to SEQ ID NO: 1677273
uauaccaagggugagaaga

SEQ ID NO: 1677275 - RNA, 19 nt, Artificial Sequence
  Description of Artificial Sequence: Synthetic oligonucleotide
  Sense strand starting at position 3213 of SEQ ID NO: 1561509
cuucucacccuugguauau

SEQ ID NO: 1677276 - RNA, 19 nt, Artificial Sequence
  Description of Artificial Sequence: Synthetic oligonucleotide
  Antisense strand to SEQ ID NO: 1677275
auauaccaagggugagaag

SEQ ID NO: 1677277 - RNA, 19 nt, Artificial Sequence
  Description of Artificial Sequence: Synthetic oligonucleotide
  Sense strand starting at position 3219 of SEQ ID NO: 1561509
acccuugguauaugagagu

SEQ ID NO: 1677278 - RNA, 19 nt, Artificial Sequence
  Description of Artificial Sequence: Synthetic oligonucleotide
  Antisense strand to SEQ ID NO: 1677277
acucucauauaccaagggu

SEQ ID NO: 1677279 - RNA, 19 nt, Artificial Sequence
  Description of Artificial Sequence: Synthetic oligonucleotide
  Sense strand starting at position 252 of SEQ ID NO: 1561510
gucagucauuucuugccua

SEQ ID NO: 1677280 - RNA, 19 nt, Artificial Sequence
  Description of Artificial Sequence: Synthetic oligonucleotide
  Antisense strand to SEQ ID NO: 1677279
uaggcaagaaaugacugac

SEQ ID NO: 1677281 - RNA, 19 nt, Artificial Sequence
  Description of Artificial Sequence: Synthetic oligonucleotide
  Sense strand starting at position 394 of SEQ ID NO: 1561510
augcacaagccuuguagaa

SEQ ID NO: 1677282 - RNA, 19 nt, Artificial Sequence
  Description of Artificial Sequence: Synthetic oligonucleotide
  Antisense strand to SEQ ID NO: 1677281
uucuacaaggcuugugcau

SEQ ID NO: 1677283 - RNA, 19 nt, Artificial Sequence
  Description of Artificial Sequence: Synthetic oligonucleotide
  Sense strand starting at position 567 of SEQ ID NO: 1561510
auguguuucccgcucucau

SEQ ID NO: 1677284 - RNA, 19 nt, Artificial Sequence
  Description of Artificial Sequence: Synthetic oligonucleotide
  Antisense strand to SEQ ID NO: 1677283
augagagcgggaaacacau

SEQ ID NO: 1677285 - RNA, 19 nt, Artificial Sequence
  Description of Artificial Sequence: Synthetic oligonucleotide
  Sense strand starting at position 568 of SEQ ID NO: 1561510
uguguuucccgcucucauu

SEQ ID NO: 1677286 - RNA, 19 nt, Artificial Sequence
  Description of Artificial Sequence: Synthetic oligonucleotide
  Antisense strand to SEQ ID NO: 1677285
aaugagagcgggaaacaca

SEQ ID NO: 1677287 - RNA, 19 nt, Artificial Sequence
  Description of Artificial Sequence: Synthetic oligonucleotide
  Sense strand starting at position 1696 of SEQ ID NO: 1561510
ggguuaucgacaugguuau

SEQ ID NO: 1677288 - RNA, 19 nt, Artificial Sequence
  Description of Artificial Sequence: Synthetic oligonucleotide
  Antisense strand to SEQ ID NO: 1677287
auaaccaugucgauaaccc

SEQ ID NO: 1677289 - RNA, 19 nt, Artificial Sequence
  Description of Artificial Sequence: Synthetic oligonucleotide
  Sense strand starting at position 1697 of SEQ ID NO: 1561510
gguuaucgacaugguuauc

SEQ ID NO: 1677290 - RNA, 19 nt, Artificial Sequence
  Description of Artificial Sequence: Synthetic oligonucleotide
  Antisense strand to SEQ ID NO: 1677289
gauaaccaugucgauaacc

SEQ ID NO: 1677291 - RNA, 19 nt, Artificial Sequence
  Description of Artificial Sequence: Synthetic oligonucleotide
  Sense strand starting at position 1702 of SEQ ID NO: 1561510
ucgacaugguuaucuacau

SEQ ID NO: 1677292 - RNA, 19 nt, Artificial Sequence
  Description of Artificial Sequence: Synthetic oligonucleotide
  Antisense strand to SEQ ID NO: 1677291
auguagauaaccaugucga

SEQ ID NO: 1677293 - RNA, 19 nt, Artificial Sequence
  Description of Artificial Sequence: Synthetic oligonucleotide
  Sense strand starting at position 1706 of SEQ ID NO: 1561510
caugguuaucuacauggca

SEQ ID NO: 1677294 - RNA, 19 nt, Artificial Sequence
  Description of Artificial Sequence: Synthetic oligonucleotide
  Antisense strand to SEQ ID NO: 1677293
ugccauguagauaaccaug

SEQ ID NO: 1677295 - RNA, 19 nt, Artificial Sequence
  Description of Artificial Sequence: Synthetic oligonucleotide
  Sense strand starting at position 1708 of SEQ ID NO: 1561510
ugguuaucuacauggcaga

SEQ ID NO: 1677296 - RNA, 19 nt, Artificial Sequence
  Description of Artificial Sequence: Synthetic oligonucleotide
  Antisense strand to SEQ ID NO: 1677295
ucugccauguagauaacca

SEQ ID NO: 1677297 - RNA, 19 nt, Artificial Sequence
  Description of Artificial Sequence: Synthetic oligonucleotide
  Sense strand starting at position 1774 of SEQ ID NO: 1561510
gaagcaauucucggacuua

SEQ ID NO: 1677298 - RNA, 19 nt, Artificial Sequence
  Description of Artificial Sequence: Synthetic oligonucleotide
  Antisense strand to SEQ ID NO: 1677297
uaaguccgagaauugcuuc

SEQ ID NO: 1677299 - RNA, 19 nt, Artificial Sequence
  Description of Artificial Sequence: Synthetic oligonucleotide
  Sense strand starting at position 1860 of SEQ ID NO: 1561510
agaucacugguacggagaa

SEQ ID NO: 1677300 - RNA, 19 nt, Artificial Sequence
  Description of Artificial Sequence: Synthetic oligonucleotide
  Antisense strand to SEQ ID NO: 1677299
uucuccguaccagugaucu

SEQ ID NO: 1677301 - RNA, 19 nt, Artificial Sequence
  Description of Artificial Sequence: Synthetic oligonucleotide
  Sense strand starting at position 1897 of SEQ ID NO: 1561510
acguuuaauccaggcagac

SEQ ID NO: 1677302 - RNA, 19 nt, Artificial Sequence
  Description of Artificial Sequence: Synthetic oligonucleotide
  Antisense strand to SEQ ID NO: 1677301
gucugccuggauuaaacgu

SEQ ID NO: 1677303 - RNA, 19 nt, Artificial Sequence
  Description of Artificial Sequence: Synthetic oligonucleotide
  Sense strand starting at position 1913 of SEQ ID NO: 1561510
gacggagcgaaguaauguu

SEQ ID NO: 1677304 - RNA, 19 nt, Artificial Sequence
  Description of Artificial Sequence: Synthetic oligonucleotide
  Antisense strand to SEQ ID NO: 1677303
aacauuacuucgcuccguc

SEQ ID NO: 1677305 - RNA, 19 nt, Artificial Sequence
  Description of Artificial Sequence: Synthetic oligonucleotide
  Sense strand starting at position 1920 of SEQ ID NO: 1561510
cgaaguaauguuuaaucca

SEQ ID NO: 1677306 - RNA, 19 nt, Artificial Sequence
  Description of Artificial Sequence: Synthetic oligonucleotide
  Antisense strand to SEQ ID NO: 1677305
uggauuaaacauuacuucg

SEQ ID NO: 1677307 - RNA, 19 nt, Artificial Sequence
  Description of Artificial Sequence: Synthetic oligonucleotide
  Sense strand starting at position 1923 of SEQ ID NO: 1561510
aguaauguuuaauccacgu

SEQ ID NO: 1677308 - RNA, 19 nt, Artificial Sequence
  Description of Artificial Sequence: Synthetic oligonucleotide
  Antisense strand to SEQ ID NO: 1677307
acguggauuaaacauuacu

SEQ ID NO: 1677309 - RNA, 19 nt, Artificial Sequence
  Description of Artificial Sequence: Synthetic oligonucleotide
  Sense strand starting at position 1927 of SEQ ID NO: 1561510
auguuuaauccacguagac

SEQ ID NO: 1677310 - RNA, 19 nt, Artificial Sequence
  Description of Artificial Sequence: Synthetic oligonucleotide
  Antisense strand to SEQ ID NO: 1677309
gucuacguggauuaaacau

SEQ ID NO: 1677311 - RNA, 19 nt, Artificial Sequence
  Description of Artificial Sequence: Synthetic oligonucleotide
  Sense strand starting at position 1929 of SEQ ID NO: 1561510
guuuaauccacguagacug

SEQ ID NO: 1677312 - RNA, 19 nt, Artificial Sequence
  Description of Artificial Sequence: Synthetic oligonucleotide
  Antisense strand to SEQ ID NO: 1677311
cagucuacguggauuaaac

SEQ ID NO: 1677313 - RNA, 19 nt, Artificial Sequence
  Description of Artificial Sequence: Synthetic oligonucleotide
  Sense strand starting at position 1968 of SEQ ID NO: 1561510
ggccuuucccuggcgcaau

SEQ ID NO: 1677314 - RNA, 19 nt, Artificial Sequence
  Description of Artificial Sequence: Synthetic oligonucleotide
  Antisense strand to SEQ ID NO: 1677313
auugcgccagggaaaggcc

SEQ ID NO: 1677315 - RNA, 19 nt, Artificial Sequence
  Description of Artificial Sequence: Synthetic oligonucleotide
  Sense strand starting at position 1980 of SEQ ID NO: 1561510
gcgcaaucugcuuccggga

SEQ ID NO: 1677316 - RNA, 19 nt, Artificial Sequence
  Description of Artificial Sequence: Synthetic oligonucleotide
  Antisense strand to SEQ ID NO: 1677315
ucccggaagcagauugcgc

SEQ ID NO: 1677317 - RNA, 19 nt, Artificial Sequence
  Description of Artificial Sequence: Synthetic oligonucleotide
  Sense strand starting at position 2216 of SEQ ID NO: 1561510
cgaaauagagccuguuauu

SEQ ID NO: 1677318 - RNA, 19 nt, Artificial Sequence
  Description of Artificial Sequence: Synthetic oligonucleotide
  Antisense strand to SEQ ID NO: 1677317
aauaacaggcucuauuucg

SEQ ID NO: 1677319 - RNA, 19 nt, Artificial Sequence
  Description of Artificial Sequence: Synthetic oligonucleotide
  Sense strand starting at position 2226 of SEQ ID NO: 1561510
ccuguuauuuacucugguu

SEQ ID NO: 1677320 - RNA, 19 nt, Artificial Sequence
  Description of Artificial Sequence: Synthetic oligonucleotide
  Antisense strand to SEQ ID NO: 1677319
aaccagaguaaauaacagg

SEQ ID NO: 1677321 - RNA, 19 nt, Artificial Sequence
  Description of Artificial Sequence: Synthetic oligonucleotide
  Sense strand starting at position 2336 of SEQ ID NO: 1561510
aagguuaaagcuuaaaguu

SEQ ID NO: 1677322 - RNA, 19 nt, Artificial Sequence
  Description of Artificial Sequence: Synthetic oligonucleotide
  Antisense strand to SEQ ID NO: 1677321
aacuuuaagcuuuaaccuu

SEQ ID NO: 1677323 - RNA, 19 nt, Artificial Sequence
  Description of Artificial Sequence: Synthetic oligonucleotide
  Sense strand starting at position 2469 of SEQ ID NO: 1561510
cucaauagucagggaacua

SEQ ID NO: 1677324 - RNA, 19 nt, Artificial Sequence
  Description of Artificial Sequence: Synthetic oligonucleotide
  Antisense strand to SEQ ID NO: 1677323
uaguucccugacuauugag

SEQ ID NO: 1677325 - RNA, 19 nt, Artificial Sequence
  Description of Artificial Sequence: Synthetic oligonucleotide
  Sense strand starting at position 2664 of SEQ ID NO: 1561510
ggauguauccuaugccuuu

SEQ ID NO: 1677326 - RNA, 19 nt, Artificial Sequence
  Description of Artificial Sequence: Synthetic oligonucleotide
  Antisense strand to SEQ ID NO: 1677325
aaaggcauaggauacaucc

SEQ ID NO: 1677327 - RNA, 19 nt, Artificial Sequence
  Description of Artificial Sequence: Synthetic oligonucleotide
  Sense strand starting at position 2711 of SEQ ID NO: 1561510
cuucucuggccucacagau

SEQ ID NO: 1677328 - RNA, 19 nt, Artificial Sequence
  Description of Artificial Sequence: Synthetic oligonucleotide
  Antisense strand to SEQ ID NO: 1677327
aucugugaggccagagaag

SEQ ID NO: 1677329 - RNA, 19 nt, Artificial Sequence
  Description of Artificial Sequence: Synthetic oligonucleotide
  Sense strand starting at position 2769 of SEQ ID NO: 1561510
ccuugauucucacccaugu

SEQ ID NO: 1677330 - RNA, 19 nt, Artificial Sequence
  Description of Artificial Sequence: Synthetic oligonucleotide
  Antisense strand to SEQ ID NO: 1677329
acaugggugagaaucaagg

SEQ ID NO: 1677331 - RNA, 19 nt, Artificial Sequence
  Description of Artificial Sequence: Synthetic oligonucleotide
  Sense strand starting at position 2810 of SEQ ID NO: 1561510
gguauucugcccuaagagc

SEQ ID NO: 1677332 - RNA, 19 nt, Artificial Sequence
  Description of Artificial Sequence: Synthetic oligonucleotide
  Antisense strand to SEQ ID NO: 1677331
gcucuuagggcagaauacc

SEQ ID NO: 1677333 - RNA, 19 nt, Artificial Sequence
  Description of Artificial Sequence: Synthetic oligonucleotide
  Sense strand starting at position 3215 of SEQ ID NO: 1561510
ugcagugagccaugagaag

SEQ ID NO: 1677334 - RNA, 19 nt, Artificial Sequence
  Description of Artificial Sequence: Synthetic oligonucleotide
  Antisense strand to SEQ ID NO: 1677333
cuucucauggcucacugca

SEQ ID NO: 1677335 - RNA, 19 nt, Artificial Sequence
  Description of Artificial Sequence: Synthetic oligonucleotide
  Sense strand starting at position 3351 of SEQ ID NO: 1561510
agcagaaaguuugugacuu

SEQ ID NO: 1677336 - RNA, 19 nt, Artificial Sequence
  Description of Artificial Sequence: Synthetic oligonucleotide
  Antisense strand to SEQ ID NO: 1677335
aagucacaaacuuucugcu

SEQ ID NO: 1677337 - RNA, 19 nt, Artificial Sequence
  Description of Artificial Sequence: Synthetic oligonucleotide
  Sense strand starting at position 3359 of SEQ ID NO: 1561510
guuugugacuuauuuacgu

SEQ ID NO: 1677338 - RNA, 19 nt, Artificial Sequence
  Description of Artificial Sequence: Synthetic oligonucleotide
  Antisense strand to SEQ ID NO: 1677337
acguaaauaagucacaaac

SEQ ID NO: 1677339 - RNA, 19 nt, Artificial Sequence
  Description of Artificial Sequence: Synthetic oligonucleotide
  Sense strand starting at position 3364 of SEQ ID NO: 1561510
ugacuuauuuacguucuuu

SEQ ID NO: 1677340 - RNA, 19 nt, Artificial Sequence
  Description of Artificial Sequence: Synthetic oligonucleotide
  Antisense strand to SEQ ID NO: 1677339
aaagaacguaaauaaguca

SEQ ID NO: 1677341 - RNA, 19 nt, Artificial Sequence
  Description of Artificial Sequence: Synthetic oligonucleotide
  Sense strand starting at position 3374 of SEQ ID NO: 1561510
acguucuuuccacagaaag

SEQ ID NO: 1677342 - RNA, 19 nt, Artificial Sequence
  Description of Artificial Sequence: Synthetic oligonucleotide
  Antisense strand to SEQ ID NO: 1677341
cuuucuguggaaagaacgu

SEQ ID NO: 1677343 - RNA, 19 nt, Artificial Sequence
  Description of Artificial Sequence: Synthetic oligonucleotide
  Sense strand starting at position 3394 of SEQ ID NO: 1561510
ccauauguccuuggccaua

SEQ ID NO: 1677344 - RNA, 19 nt, Artificial Sequence
  Description of Artificial Sequence: Synthetic oligonucleotide
  Antisense strand to SEQ ID NO: 1677343
uauggccaaggacauaugg

SEQ ID NO: 1677345 - RNA, 19 nt, Artificial Sequence
  Description of Artificial Sequence: Synthetic oligonucleotide
  Sense strand starting at position 3396 of SEQ ID NO: 1561510
auauguccuuggccauaaa

SEQ ID NO: 1677346 - RNA, 19 nt, Artificial Sequence
  Description of Artificial Sequence: Synthetic oligonucleotide
  Antisense strand to SEQ ID NO: 1677345
uuuauggccaaggacauau

SEQ ID NO: 1677347 - RNA, 19 nt, Artificial Sequence
  Description of Artificial Sequence: Synthetic oligonucleotide
  Sense strand starting at position 3399 of SEQ ID NO: 1561510
uguccuuggccauaaagaa

SEQ ID NO: 1677348 - RNA, 19 nt, Artificial Sequence
  Description of Artificial Sequence: Synthetic oligonucleotide
  Antisense strand to SEQ ID NO: 1677347
uucuuuauggccaaggaca

SEQ ID NO: 1677349 - RNA, 19 nt, Artificial Sequence
  Description of Artificial Sequence: Synthetic oligonucleotide
  Sense strand starting at position 3772 of SEQ ID NO: 1561510
gaauccuuggguugacaug

SEQ ID NO: 1677350 - RNA, 19 nt, Artificial Sequence
  Description of Artificial Sequence: Synthetic oligonucleotide
  Antisense strand to SEQ ID NO: 1677349
caugucaacccaaggauuc

SEQ ID NO: 1677351 - RNA, 19 nt, Artificial Sequence
  Description of Artificial Sequence: Synthetic oligonucleotide
  Sense strand starting at position 3842 of SEQ ID NO: 1561510
uuuggauaucuggaugcau

SEQ ID NO: 1677352 - RNA, 19 nt, Artificial Sequence
  Description of Artificial Sequence: Synthetic oligonucleotide
  Antisense strand to SEQ ID NO: 1677351
augcauccagauauccaaa

SEQ ID NO: 1677353 - RNA, 19 nt, Artificial Sequence
  Description of Artificial Sequence: Synthetic oligonucleotide
  Sense strand starting at position 3844 of SEQ ID NO: 1561510
uggauaucuggaugcauuc

SEQ ID NO: 1677354 - RNA, 19 nt, Artificial Sequence
  Description of Artificial Sequence: Synthetic oligonucleotide
  Antisense strand to SEQ ID NO: 1677353
gaaugcauccagauaucca

SEQ ID NO: 1677355 - RNA, 19 nt, Artificial Sequence
  Description of Artificial Sequence: Synthetic oligonucleotide
  Sense strand starting at position 3861 of SEQ ID NO: 1561510
ucauaaccauccuuguguu

SEQ ID NO: 1677356 - RNA, 19 nt, Artificial Sequence
  Description of Artificial Sequence: Synthetic oligonucleotide
  Antisense strand to SEQ ID NO: 1677355
aacacaaggaugguuauga

SEQ ID NO: 1677357 - RNA, 19 nt, Artificial Sequence
  Description of Artificial Sequence: Synthetic oligonucleotide
  Sense strand starting at position 3869 of SEQ ID NO: 1561510
auccuuguguuaccagaaa

SEQ ID NO: 1677358 - RNA, 19 nt, Artificial Sequence
  Description of Artificial Sequence: Synthetic oligonucleotide
  Antisense strand to SEQ ID NO: 1677357
uuucugguaacacaaggau

SEQ ID NO: 1677359 - RNA, 19 nt, Artificial Sequence
  Description of Artificial Sequence: Synthetic oligonucleotide
  Sense strand starting at position 85 of SEQ ID NO: 1561511
accugaaaguucccaguua

SEQ ID NO: 1677360 - RNA, 19 nt, Artificial Sequence
  Description of Artificial Sequence: Synthetic oligonucleotide
  Antisense strand to SEQ ID NO: 1677359
uaacugggaacuuucaggu

SEQ ID NO: 1677361 - RNA, 19 nt, Artificial Sequence
  Description of Artificial Sequence: Synthetic oligonucleotide
  Sense strand starting at position 86 of SEQ ID NO: 1561511
ccugaaaguucccaguuac

SEQ ID NO: 1677362 - RNA, 19 nt, Artificial Sequence
  Description of Artificial Sequence: Synthetic oligonucleotide
  Antisense strand to SEQ ID NO: 1677361
guaacugggaacuuucagg

SEQ ID NO: 1677363 - RNA, 19 nt, Artificial Sequence
  Description of Artificial Sequence: Synthetic oligonucleotide
  Sense strand starting at position 98 of SEQ ID NO: 1561511
caguuacauuaguaaggga

SEQ ID NO: 1677364 - RNA, 19 nt, Artificial Sequence
  Description of Artificial Sequence: Synthetic oligonucleotide
  Antisense strand to SEQ ID NO: 1677363
ucccuuacuaauguaacug

SEQ ID NO: 1677365 - RNA, 19 nt, Artificial Sequence
  Description of Artificial Sequence: Synthetic oligonucleotide
  Sense strand starting at position 101 of SEQ ID NO: 1561511
uuacauuaguaagggagau

SEQ ID NO: 1677366 - RNA, 19 nt, Artificial Sequence
  Description of Artificial Sequence: Synthetic oligonucleotide
  Antisense strand to SEQ ID NO: 1677365
aucucccuuacuaauguaa

SEQ ID NO: 1677367 - RNA, 19 nt, Artificial Sequence
  Description of Artificial Sequence: Synthetic oligonucleotide
  Sense strand starting at position 580 of SEQ ID NO: 1561511
aaagucacgccuuagaauu

SEQ ID NO: 1677368 - RNA, 19 nt, Artificial Sequence
  Description of Artificial Sequence: Synthetic oligonucleotide
  Antisense strand to SEQ ID NO: 1677367
aauucuaaggcgugacuuu

SEQ ID NO: 1677369 - RNA, 19 nt, Artificial Sequence
  Description of Artificial Sequence: Synthetic oligonucleotide
  Sense strand starting at position 800 of SEQ ID NO: 1561511
ccuuccaugccuugauuga

SEQ ID NO: 1677370 - RNA, 19 nt, Artificial Sequence
  Description of Artificial Sequence: Synthetic oligonucleotide
  Antisense strand to SEQ ID NO: 1677369
ucaaucaaggcauggaagg

SEQ ID NO: 1677371 - RNA, 19 nt, Artificial Sequence
  Description of Artificial Sequence: Synthetic oligonucleotide
  Sense strand starting at position 801 of SEQ ID NO: 1561511
cuuccaugccuugauugau

SEQ ID NO: 1677372 - RNA, 19 nt, Artificial Sequence
  Description of Artificial Sequence: Synthetic oligonucleotide
  Antisense strand to SEQ ID NO: 1677371
aucaaucaaggcauggaag

SEQ ID NO: 1677373 - RNA, 19 nt, Artificial Sequence
  Description of Artificial Sequence: Synthetic oligonucleotide
  Sense strand starting at position 832 of SEQ ID NO: 1561511
auuccugucucgcugaaau

SEQ ID NO: 1677374 - RNA, 19 nt, Artificial Sequence
  Description of Artificial Sequence: Synthetic oligonucleotide
  Antisense strand to SEQ ID NO: 1677373
auuucagcgagacaggaau

SEQ ID NO: 1677375 - RNA, 19 nt, Artificial Sequence
  Description of Artificial Sequence: Synthetic oligonucleotide
  Sense strand starting at position 834 of SEQ ID NO: 1561511
uccugucucgcugaaauga

SEQ ID NO: 1677376 - RNA, 19 nt, Artificial Sequence
  Description of Artificial Sequence: Synthetic oligonucleotide
  Antisense strand to SEQ ID NO: 1677375
ucauuucagcgagacagga

SEQ ID NO: 1677377 - RNA, 19 nt, Artificial Sequence
  Description of Artificial Sequence: Synthetic oligonucleotide
  Sense strand starting at position 886 of SEQ ID NO: 1561511
ccacuuacucgaggcuaca

SEQ ID NO: 1677378 - RNA, 19 nt, Artificial Sequence
  Description of Artificial Sequence: Synthetic oligonucleotide
  Antisense strand to SEQ ID NO: 1677377
uguagccucgaguaagugg

SEQ ID NO: 1677379 - RNA, 19 nt, Artificial Sequence
  Description of Artificial Sequence: Synthetic oligonucleotide
  Sense strand starting at position 919 of SEQ ID NO: 1561511
uuggucacguucucucaua

SEQ ID NO: 1677380 - RNA, 19 nt, Artificial Sequence
  Description of Artificial Sequence: Synthetic oligonucleotide
  Antisense strand to SEQ ID NO: 1677379
uaugagagaacgugaccaa

SEQ ID NO: 1677381 - RNA, 19 nt, Artificial Sequence
  Description of Artificial Sequence: Synthetic oligonucleotide
  Sense strand starting at position 920 of SEQ ID NO: 1561511
uggucacguucucucauau

SEQ ID NO: 1677382 - RNA, 19 nt, Artificial Sequence
  Description of Artificial Sequence: Synthetic oligonucleotide
  Antisense strand to SEQ ID NO: 1677381
auaugagagaacgugacca

SEQ ID NO: 1677383 - RNA, 19 nt, Artificial Sequence
  Description of Artificial Sequence: Synthetic oligonucleotide
  Sense strand starting at position 930 of SEQ ID NO: 1561511
cucucauauucggcguaga

SEQ ID NO: 1677384 - RNA, 19 nt, Artificial Sequence
  Description of Artificial Sequence: Synthetic oligonucleotide
  Antisense strand to SEQ ID NO: 1677383
ucuacgccgaauaugagag

SEQ ID NO: 1677385 - RNA, 19 nt, Artificial Sequence
  Description of Artificial Sequence: Synthetic oligonucleotide
  Sense strand starting at position 931 of SEQ ID NO: 1561511
ucucauauucggcguagaa

SEQ ID NO: 1677386 - RNA, 19 nt, Artificial Sequence
  Description of Artificial Sequence: Synthetic oligonucleotide
  Antisense strand to SEQ ID NO: 1677385
uucuacgccgaauaugaga

SEQ ID NO: 1677387 - RNA, 19 nt, Artificial Sequence
  Description of Artificial Sequence: Synthetic oligonucleotide
  Sense strand starting at position 933 of SEQ ID NO: 1561511
ucauauucggcguagaaca

SEQ ID NO: 1677388 - RNA, 19 nt, Artificial Sequence
  Description of Artificial Sequence: Synthetic oligonucleotide
  Antisense strand to SEQ ID NO: 1677387
uguucuacgccgaauauga

SEQ ID NO: 1677389 - RNA, 19 nt, Artificial Sequence
  Description of Artificial Sequence: Synthetic oligonucleotide
  Sense strand starting at position 935 of SEQ ID NO: 1561511
auauucggcguagaacaua

SEQ ID NO: 1677390 - RNA, 19 nt, Artificial Sequence
  Description of Artificial Sequence: Synthetic oligonucleotide
  Antisense strand to SEQ ID NO: 1677389
uauguucuacgccgaauau

SEQ ID NO: 1677391 - RNA, 19 nt, Artificial Sequence
  Description of Artificial Sequence: Synthetic oligonucleotide
  Sense strand starting at position 975 of SEQ ID NO: 1561511
uuugcucuuuccguuauca

SEQ ID NO: 1677392 - RNA, 19 nt, Artificial Sequence
  Description of Artificial Sequence: Synthetic oligonucleotide
  Antisense strand to SEQ ID NO: 1677391
ugauaacggaaagagcaaa

SEQ ID NO: 1677393 - RNA, 19 nt, Artificial Sequence
  Description of Artificial Sequence: Synthetic oligonucleotide
  Sense strand starting at position 977 of SEQ ID NO: 1561511
ugcucuuuccguuaucaaa

SEQ ID NO: 1677394 - RNA, 19 nt, Artificial Sequence
  Description of Artificial Sequence: Synthetic oligonucleotide
  Antisense strand to SEQ ID NO: 1677393
uuugauaacggaaagagca

SEQ ID NO: 1677395 - RNA, 19 nt, Artificial Sequence
  Description of Artificial Sequence: Synthetic oligonucleotide
  Sense strand starting at position 1011 of SEQ ID NO: 1561511
ggguguuucucauucagga

SEQ ID NO: 1677396 - RNA, 19 nt, Artificial Sequence
  Description of Artificial Sequence: Synthetic oligonucleotide
  Antisense strand to SEQ ID NO: 1677395
uccugaaugagaaacaccc

SEQ ID NO: 1677397 - RNA, 19 nt, Artificial Sequence
  Description of Artificial Sequence: Synthetic oligonucleotide
  Sense strand starting at position 1056 of SEQ ID NO: 1561511
cuccuauucugagaagcaa

SEQ ID NO: 1677398 - RNA, 19 nt, Artificial Sequence
  Description of Artificial Sequence: Synthetic oligonucleotide
  Antisense strand to SEQ ID NO: 1677397
uugcuucucagaauaggag

SEQ ID NO: 1677399 - RNA, 19 nt, Artificial Sequence
  Description of Artificial Sequence: Synthetic oligonucleotide
  Sense strand starting at position 1860 of SEQ ID NO: 1561511
cacggaucccucuaacagu

SEQ ID NO: 1677400 - RNA, 19 nt, Artificial Sequence
  Description of Artificial Sequence: Synthetic oligonucleotide
  Antisense strand to SEQ ID NO: 1677399
acuguuagagggauccgug

SEQ ID NO: 1677401 - RNA, 19 nt, Artificial Sequence
  Description of Artificial Sequence: Synthetic oligonucleotide
  Sense strand starting at position 2160 of SEQ ID NO: 1561511
cagauuaucuaagcgagcu

SEQ ID NO: 1677402 - RNA, 19 nt, Artificial Sequence
  Description of Artificial Sequence: Synthetic oligonucleotide
  Antisense strand to SEQ ID NO: 1677401
agcucgcuuagauaaucug

SEQ ID NO: 1677403 - RNA, 19 nt, Artificial Sequence
  Description of Artificial Sequence: Synthetic oligonucleotide
  Sense strand starting at position 2161 of SEQ ID NO: 1561511
agauuaucuaagcgagcuc

SEQ ID NO: 1677404 - RNA, 19 nt, Artificial Sequence
  Description of Artificial Sequence: Synthetic oligonucleotide
  Antisense strand to SEQ ID NO: 1677403
gagcucgcuuagauaaucu

SEQ ID NO: 1677405 - RNA, 19 nt, Artificial Sequence
  Description of Artificial Sequence: Synthetic oligonucleotide
  Sense strand starting at position 2187 of SEQ ID NO: 1561511
gcgucuugcucuuugggua

SEQ ID NO: 1677406 - RNA, 19 nt, Artificial Sequence
  Description of Artificial Sequence: Synthetic oligonucleotide
  Antisense strand to SEQ ID NO: 1677405
uacccaaagagcaagacgc

SEQ ID NO: 1677407 - RNA, 19 nt, Artificial Sequence
  Description of Artificial Sequence: Synthetic oligonucleotide
  Sense strand starting at position 2216 of SEQ ID NO: 1561511
agccaaauuugcuccgaau

SEQ ID NO: 1677408 - RNA, 19 nt, Artificial Sequence
  Description of Artificial Sequence: Synthetic oligonucleotide
  Antisense strand to SEQ ID NO: 1677407
auucggagcaaauuuggcu

SEQ ID NO: 1677409 - RNA, 19 nt, Artificial Sequence
  Description of Artificial Sequence: Synthetic oligonucleotide
  Sense strand starting at position 2250 of SEQ ID NO: 1561511
cguugucuuccucacucaa

SEQ ID NO: 1677410 - RNA, 19 nt, Artificial Sequence
  Description of Artificial Sequence: Synthetic oligonucleotide
  Antisense strand to SEQ ID NO: 1677409
uugagugaggaagacaacg

SEQ ID NO: 1677411 - RNA, 19 nt, Artificial Sequence
  Description of Artificial Sequence: Synthetic oligonucleotide
  Sense strand starting at position 2285 of SEQ ID NO: 1561511
cuuugucuugcacaggaaa

SEQ ID NO: 1677412 - RNA, 19 nt, Artificial Sequence
  Description of Artificial Sequence: Synthetic oligonucleotide
  Antisense strand to SEQ ID NO: 1677411
uuuccugugcaagacaaag

SEQ ID NO: 1677413 - RNA, 19 nt, Artificial Sequence
  Description of Artificial Sequence: Synthetic oligonucleotide
  Sense strand starting at position 2452 of SEQ ID NO: 1561511
ugcagagaaucuccauuga

SEQ ID NO: 1677414 - RNA, 19 nt, Artificial Sequence
  Description of Artificial Sequence: Synthetic oligonucleotide
  Antisense strand to SEQ ID NO: 1677413
ucaauggagauucucugca

SEQ ID NO: 1677415 - RNA, 19 nt, Artificial Sequence
  Description of Artificial Sequence: Synthetic oligonucleotide
  Sense strand starting at position 2518 of SEQ ID NO: 1561511
agaagagauugugaccuga

SEQ ID NO: 1677416 - RNA, 19 nt, Artificial Sequence
  Description of Artificial Sequence: Synthetic oligonucleotide
  Antisense strand to SEQ ID NO: 1677415
ucaggucacaaucucuucu

SEQ ID NO: 1677417 - RNA, 19 nt, Artificial Sequence
  Description of Artificial Sequence: Synthetic oligonucleotide
  Sense strand starting at position 3181 of SEQ ID NO: 1561511
cugugaaggucagaauuag

SEQ ID NO: 1677418 - RNA, 19 nt, Artificial Sequence
  Description of Artificial Sequence: Synthetic oligonucleotide
  Antisense strand to SEQ ID NO: 1677417
cuaauucugaccuucacag

SEQ ID NO: 1677419 - RNA, 19 nt, Artificial Sequence
  Description of Artificial Sequence: Synthetic oligonucleotide
  Sense strand starting at position 3600 of SEQ ID NO: 1561511
agcuuaaacugacucaagu

SEQ ID NO: 1677420 - RNA, 19 nt, Artificial Sequence
  Description of Artificial Sequence: Synthetic oligonucleotide
  Antisense strand to SEQ ID NO: 1677419
acuugagucaguuuaagcu

SEQ ID NO: 1677421 - RNA, 19 nt, Artificial Sequence
  Description of Artificial Sequence: Synthetic oligonucleotide
  Sense strand starting at position 3622 of SEQ ID NO: 1561511
gagcuuccuguuggugaaa

SEQ ID NO: 1677422 - RNA, 19 nt, Artificial Sequence
  Description of Artificial Sequence: Synthetic oligonucleotide
  Antisense strand to SEQ ID NO: 1677421
uuucaccaacaggaagcuc

SEQ ID NO: 1677423 - RNA, 19 nt, Artificial Sequence
  Description of Artificial Sequence: Synthetic oligonucleotide
  Sense strand starting at position 3639 of SEQ ID NO: 1561511
aaaugaaggucuuaaagga

SEQ ID NO: 1677424 - RNA, 19 nt, Artificial Sequence
  Description of Artificial Sequence: Synthetic oligonucleotide
  Antisense strand to SEQ ID NO: 1677423
uccuuuaagaccuucauuu

SEQ ID NO: 1677425 - RNA, 19 nt, Artificial Sequence
  Description of Artificial Sequence: Synthetic oligonucleotide
  Sense strand starting at position 3777 of SEQ ID NO: 1561511
gucacaguuuggcuuccaa

SEQ ID NO: 1677426 - RNA, 19 nt, Artificial Sequence
  Description of Artificial Sequence: Synthetic oligonucleotide
  Antisense strand to SEQ ID NO: 1677425
uuggaagccaaacugugac

SEQ ID NO: 1677427 - RNA, 19 nt, Artificial Sequence
  Description of Artificial Sequence: Synthetic oligonucleotide
  Sense strand starting at position 3787 of SEQ ID NO: 1561511
ggcuuccaagcuuggaaau

SEQ ID NO: 1677428 - RNA, 19 nt, Artificial Sequence
  Description of Artificial Sequence: Synthetic oligonucleotide
  Antisense strand to SEQ ID NO: 1677427
auuuccaagcuuggaagcc

SEQ ID NO: 1677429 - RNA, 19 nt, Artificial Sequence
  Description of Artificial Sequence: Synthetic oligonucleotide
  Sense strand starting at position 3788 of SEQ ID NO: 1561511
gcuuccaagcuuggaaaua

SEQ ID NO: 1677430 - RNA, 19 nt, Artificial Sequence
  Description of Artificial Sequence: Synthetic oligonucleotide
  Antisense strand to SEQ ID NO: 1677429
uauuuccaagcuuggaagc

SEQ ID NO: 1677431 - RNA, 19 nt, Artificial Sequence
  Description of Artificial Sequence: Synthetic oligonucleotide
  Sense strand starting at position 3789 of SEQ ID NO: 1561511
cuuccaagcuuggaaauau

SEQ ID NO: 1677432 - RNA, 19 nt, Artificial Sequence
  Description of Artificial Sequence: Synthetic oligonucleotide
  Antisense strand to SEQ ID NO: 1677431
auauuuccaagcuuggaag

SEQ ID NO: 1677433 - RNA, 19 nt, Artificial Sequence
  Description of Artificial Sequence: Synthetic oligonucleotide
  Sense strand starting at position 3833 of SEQ ID NO: 1561511
ccuugugaacugugcauga

SEQ ID NO: 1677434 - RNA, 19 nt, Artificial Sequence
  Description of Artificial Sequence: Synthetic oligonucleotide
  Antisense strand to SEQ ID NO: 1677433
ucaugcacaguucacaagg

SEQ ID NO: 1677435 - RNA, 19 nt, Artificial Sequence
  Description of Artificial Sequence: Synthetic oligonucleotide
  Sense strand starting at position 3835 of SEQ ID NO: 1561511
uugugaacugugcaugaag

SEQ ID NO: 1677436 - RNA, 19 nt, Artificial Sequence
  Description of Artificial Sequence: Synthetic oligonucleotide
  Antisense strand to SEQ ID NO: 1677435
cuucaugcacaguucacaa

SEQ ID NO: 1677437 - RNA, 19 nt, Artificial Sequence
  Description of Artificial Sequence: Synthetic oligonucleotide
  Sense strand starting at position 3837 of SEQ ID NO: 1561511
gugaacugugcaugaagca

SEQ ID NO: 1677438 - RNA, 19 nt, Artificial Sequence
  Description of Artificial Sequence: Synthetic oligonucleotide
  Antisense strand to SEQ ID NO: 1677437
ugcuucaugcacaguucac

SEQ ID NO: 1677439 - RNA, 19 nt, Artificial Sequence
  Description of Artificial Sequence: Synthetic oligonucleotide
  Sense strand starting at position 14 of SEQ ID NO: 1561512
agccaucuccaauguagga

SEQ ID NO: 1677440 - RNA, 19 nt, Artificial Sequence
  Description of Artificial Sequence: Synthetic oligonucleotide
  Antisense strand to SEQ ID NO: 1677439
uccuacauuggagauggcu

SEQ ID NO: 1677441 - RNA, 19 nt, Artificial Sequence
  Description of Artificial Sequence: Synthetic oligonucleotide
  Sense strand starting at position 88 of SEQ ID NO: 1561512
gguacuucuuccuguugca

SEQ ID NO: 1677442 - RNA, 19 nt, Artificial Sequence
  Description of Artificial Sequence: Synthetic oligonucleotide
  Antisense strand to SEQ ID NO: 1677441
ugcaacaggaagaaguacc

SEQ ID NO: 1677443 - RNA, 19 nt, Artificial Sequence
  Description of Artificial Sequence: Synthetic oligonucleotide
  Sense strand starting at position 102 of SEQ ID NO: 1561512
uugcaauacuucuuaggaa

SEQ ID NO: 1677444 - RNA, 19 nt, Artificial Sequence
  Description of Artificial Sequence: Synthetic oligonucleotide
  Antisense strand to SEQ ID NO: 1677443
uuccuaagaaguauugcaa

SEQ ID NO: 1677445 - RNA, 19 nt, Artificial Sequence
  Description of Artificial Sequence: Synthetic oligonucleotide
  Sense strand starting at position 103 of SEQ ID NO: 1561512
ugcaauacuucuuaggaau

SEQ ID NO: 1677446 - RNA, 19 nt, Artificial Sequence
  Description of Artificial Sequence: Synthetic oligonucleotide
  Antisense strand to SEQ ID NO: 1677445
auuccuaagaaguauugca

SEQ ID NO: 1677447 - RNA, 19 nt, Artificial Sequence
  Description of Artificial Sequence: Synthetic oligonucleotide
  Sense strand starting at position 318 of SEQ ID NO: 1561512
gugagcagucuugagauau

SEQ ID NO: 1677448 - RNA, 19 nt, Artificial Sequence
  Description of Artificial Sequence: Synthetic oligonucleotide
  Antisense strand to SEQ ID NO: 1677447
auaucucaagacugcucac

SEQ ID NO: 1677449 - RNA, 19 nt, Artificial Sequence
  Description of Artificial Sequence: Synthetic oligonucleotide
  Sense strand starting at position 444 of SEQ ID NO: 1561512
gggucugaggcagagaguu

SEQ ID NO: 1677450 - RNA, 19 nt, Artificial Sequence
  Description of Artificial Sequence: Synthetic oligonucleotide
  Antisense strand to SEQ ID NO: 1677449
aacucucugccucagaccc

SEQ ID NO: 1677451 - RNA, 19 nt, Artificial Sequence
  Description of Artificial Sequence: Synthetic oligonucleotide
  Sense strand starting at position 632 of SEQ ID NO: 1561512
aagcgacacugugucuaaa

SEQ ID NO: 1677452 - RNA, 19 nt, Artificial Sequence
  Description of Artificial Sequence: Synthetic oligonucleotide
  Antisense strand to SEQ ID NO: 1677451
uuuagacacagugucgcuu

SEQ ID NO: 1677453 - RNA, 19 nt, Artificial Sequence
  Description of Artificial Sequence: Synthetic oligonucleotide
  Sense strand starting at position 725 of SEQ ID NO: 1561512
cuuuaauguccacaucagu

SEQ ID NO: 1677454 - RNA, 19 nt, Artificial Sequence
  Description of Artificial Sequence: Synthetic oligonucleotide
  Antisense strand to SEQ ID NO: 1677453
acugauguggacauuaaag

SEQ ID NO: 1677455 - RNA, 19 nt, Artificial Sequence
  Description of Artificial Sequence: Synthetic oligonucleotide
  Sense strand starting at position 760 of SEQ ID NO: 1561512
gaaacuaaguguuagaaac

SEQ ID NO: 1677456 - RNA, 19 nt, Artificial Sequence
  Description of Artificial Sequence: Synthetic oligonucleotide
  Antisense strand to SEQ ID NO: 1677455
guuucuaacacuuaguuuc

SEQ ID NO: 1677457 - RNA, 19 nt, Artificial Sequence
  Description of Artificial Sequence: Synthetic oligonucleotide
  Sense strand starting at position 882 of SEQ ID NO: 1561512
gcgcgaugauuggaucuca

SEQ ID NO: 1677458 - RNA, 19 nt, Artificial Sequence
  Description of Artificial Sequence: Synthetic oligonucleotide
  Antisense strand to SEQ ID NO: 1677457
ugagauccaaucaucgcgc

SEQ ID NO: 1677459 - RNA, 19 nt, Artificial Sequence
  Description of Artificial Sequence: Synthetic oligonucleotide
  Sense strand starting at position 1173 of SEQ ID NO: 1561512
ccuauuggcugggaucaga

SEQ ID NO: 1677460 - RNA, 19 nt, Artificial Sequence
  Description of Artificial Sequence: Synthetic oligonucleotide
  Antisense strand to SEQ ID NO: 1677459
ucugaucccagccaauagg

SEQ ID NO: 1677461 - RNA, 19 nt, Artificial Sequence
  Description of Artificial Sequence: Synthetic oligonucleotide
  Sense strand starting at position 1204 of SEQ ID NO: 1561512
agcugauccugguaagcuu

SEQ ID NO: 1677462 - RNA, 19 nt, Artificial Sequence
  Description of Artificial Sequence: Synthetic oligonucleotide
  Antisense strand to SEQ ID NO: 1677461
aagcuuaccaggaucagcu

SEQ ID NO: 1677463 - RNA, 19 nt, Artificial Sequence
  Description of Artificial Sequence: Synthetic oligonucleotide
  Sense strand starting at position 1243 of SEQ ID NO: 1561512
uaaaguaaaugcgcgauuu

SEQ ID NO: 1677464 - RNA, 19 nt, Artificial Sequence
  Description of Artificial Sequence: Synthetic oligonucleotide
  Antisense strand to SEQ ID NO: 1677463
aaaucgcgcauuuacuuua

SEQ ID NO: 1677465 - RNA, 19 nt, Artificial Sequence
  Description of Artificial Sequence: Synthetic oligonucleotide
  Sense strand starting at position 1244 of SEQ ID NO: 1561512
aaaguaaaugcgcgauuug

SEQ ID NO: 1677466 - RNA, 19 nt, Artificial Sequence
  Description of Artificial Sequence: Synthetic oligonucleotide
  Antisense strand to SEQ ID NO: 1677465
caaaucgcgcauuuacuuu

SEQ ID NO: 1677467 - RNA, 19 nt, Artificial Sequence
  Description of Artificial Sequence: Synthetic oligonucleotide
  Sense strand starting at position 1295 of SEQ ID NO: 1561512
aggguugauuuacaacuuu

SEQ ID NO: 1677468 - RNA, 19 nt, Artificial Sequence
  Description of Artificial Sequence: Synthetic oligonucleotide
  Antisense strand to SEQ ID NO: 1677467
aaaguuguaaaucaacccu

SEQ ID NO: 1677469 - RNA, 19 nt, Artificial Sequence
  Description of Artificial Sequence: Synthetic oligonucleotide
  Sense strand starting at position 1871 of SEQ ID NO: 1561512
cggugucuuagcuguggau

SEQ ID NO: 1677470 - RNA, 19 nt, Artificial Sequence
  Description of Artificial Sequence: Synthetic oligonucleotide
  Antisense strand to SEQ ID NO: 1677469
auccacagcuaagacaccg

SEQ ID NO: 1677471 - RNA, 19 nt, Artificial Sequence
  Description of Artificial Sequence: Synthetic oligonucleotide
  Sense strand starting at position 2017 of SEQ ID NO: 1561512
cugcguuccugauuggaug

SEQ ID NO: 1677472 - RNA, 19 nt, Artificial Sequence
  Description of Artificial Sequence: Synthetic oligonucleotide
  Antisense strand to SEQ ID NO: 1677471
cauccaaucaggaacgcag

SEQ ID NO: 1677473 - RNA, 19 nt, Artificial Sequence
  Description of Artificial Sequence: Synthetic oligonucleotide
  Sense strand starting at position 2047 of SEQ ID NO: 1561512
accaucccugauuggauaa

SEQ ID NO: 1677474 - RNA, 19 nt, Artificial Sequence
  Description of Artificial Sequence: Synthetic oligonucleotide
  Antisense strand to SEQ ID NO: 1677473
uuauccaaucagggauggu

SEQ ID NO: 1677475 - RNA, 19 nt, Artificial Sequence
  Description of Artificial Sequence: Synthetic oligonucleotide
  Sense strand starting at position 2098 of SEQ ID NO: 1561512
gacaguagaugugaucaga

SEQ ID NO: 1677476 - RNA, 19 nt, Artificial Sequence
  Description of Artificial Sequence: Synthetic oligonucleotide
  Antisense strand to SEQ ID NO: 1677475
ucugaucacaucuacuguc

SEQ ID NO: 1677477 - RNA, 19 nt, Artificial Sequence
  Description of Artificial Sequence: Synthetic oligonucleotide
  Sense strand starting at position 2117 of SEQ ID NO: 1561512
cgcugagcugagugaagaa

SEQ ID NO: 1677478 - RNA, 19 nt, Artificial Sequence
  Description of Artificial Sequence: Synthetic oligonucleotide
  Antisense strand to SEQ ID NO: 1677477
uucuucacucagcucagcg

SEQ ID NO: 1677479 - RNA, 19 nt, Artificial Sequence
  Description of Artificial Sequence: Synthetic oligonucleotide
  Sense strand starting at position 2201 of SEQ ID NO: 1561512
cccagagcaugggagaauu

SEQ ID NO: 1677480 - RNA, 19 nt, Artificial Sequence
  Description of Artificial Sequence: Synthetic oligonucleotide
  Antisense strand to SEQ ID NO: 1677479
aauucucccaugcucuggg

SEQ ID NO: 1677481 - RNA, 19 nt, Artificial Sequence
  Description of Artificial Sequence: Synthetic oligonucleotide
  Sense strand starting at position 2209 of SEQ ID NO: 1561512
augggagaauucuaucuuu

SEQ ID NO: 1677482 - RNA, 19 nt, Artificial Sequence
  Description of Artificial Sequence: Synthetic oligonucleotide
  Antisense strand to SEQ ID NO: 1677481
aaagauagaauucucccau

SEQ ID NO: 1677483 - RNA, 19 nt, Artificial Sequence
  Description of Artificial Sequence: Synthetic oligonucleotide
  Sense strand starting at position 2330 of SEQ ID NO: 1561512
uuacuuuggcaauaaugua

SEQ ID NO: 1677484 - RNA, 19 nt, Artificial Sequence
  Description of Artificial Sequence: Synthetic oligonucleotide
  Antisense strand to SEQ ID NO: 1677483
uacauuauugccaaaguaa

SEQ ID NO: 1677485 - RNA, 19 nt, Artificial Sequence
  Description of Artificial Sequence: Synthetic oligonucleotide
  Sense strand starting at position 2657 of SEQ ID NO: 1561512
uguugaaucucaucucuag

SEQ ID NO: 1677486 - RNA, 19 nt, Artificial Sequence
  Description of Artificial Sequence: Synthetic oligonucleotide
  Antisense strand to SEQ ID NO: 1677485
cuagagaugagauucaaca

SEQ ID NO: 1677487 - RNA, 19 nt, Artificial Sequence
  Description of Artificial Sequence: Synthetic oligonucleotide
  Sense strand starting at position 2909 of SEQ ID NO: 1561512
ccuggaacagguuauguga

SEQ ID NO: 1677488 - RNA, 19 nt, Artificial Sequence
  Description of Artificial Sequence: Synthetic oligonucleotide
  Antisense strand to SEQ ID NO: 1677487
ucacauaaccuguuccagg

SEQ ID NO: 1677489 - RNA, 19 nt, Artificial Sequence
  Description of Artificial Sequence: Synthetic oligonucleotide
  Sense strand starting at position 3413 of SEQ ID NO: 1561512
gcugaugaauccuccauag

SEQ ID NO: 1677490 - RNA, 19 nt, Artificial Sequence
  Description of Artificial Sequence: Synthetic oligonucleotide
  Antisense strand to SEQ ID NO: 1677489
cuauggaggauucaucagc

SEQ ID NO: 1677491 - RNA, 19 nt, Artificial Sequence
  Description of Artificial Sequence: Synthetic oligonucleotide
  Sense strand starting at position 3523 of SEQ ID NO: 1561512
ccauuuaccugggauaaag

SEQ ID NO: 1677492 - RNA, 19 nt, Artificial Sequence
  Description of Artificial Sequence: Synthetic oligonucleotide
  Antisense strand to SEQ ID NO: 1677491
cuuuaucccagguaaaugg

SEQ ID NO: 1677493 - RNA, 19 nt, Artificial Sequence
  Description of Artificial Sequence: Synthetic oligonucleotide
  Sense strand starting at position 3555 of SEQ ID NO: 1561512
aaagguauugugugcgugu

SEQ ID NO: 1677494 - RNA, 19 nt, Artificial Sequence
  Description of Artificial Sequence: Synthetic oligonucleotide
  Antisense strand to SEQ ID NO: 1677493
acacgcacacaauaccuuu

SEQ ID NO: 1677495 - RNA, 19 nt, Artificial Sequence
  Description of Artificial Sequence: Synthetic oligonucleotide
  Sense strand starting at position 3558 of SEQ ID NO: 1561512
gguauugugugcgugucuu

SEQ ID NO: 1677496 - RNA, 19 nt, Artificial Sequence
  Description of Artificial Sequence: Synthetic oligonucleotide
  Antisense strand to SEQ ID NO: 1677495
aagacacgcacacaauacc

SEQ ID NO: 1677497 - RNA, 19 nt, Artificial Sequence
  Description of Artificial Sequence: Synthetic oligonucleotide
  Sense strand starting at position 3588 of SEQ ID NO: 1561512
ucauguguuuccugcacag

SEQ ID NO: 1677498 - RNA, 19 nt, Artificial Sequence
  Description of Artificial Sequence: Synthetic oligonucleotide
  Antisense strand to SEQ ID NO: 1677497
cugugcaggaaacacauga

SEQ ID NO: 1677499 - RNA, 19 nt, Artificial Sequence
  Description of Artificial Sequence: Synthetic oligonucleotide
  Sense strand starting at position 3592 of SEQ ID NO: 1561512
guguuuccugcacagaaca

SEQ ID NO: 1677500 - RNA, 19 nt, Artificial Sequence
  Description of Artificial Sequence: Synthetic oligonucleotide
  Antisense strand to SEQ ID NO: 1677499
uguucugugcaggaaacac

SEQ ID NO: 1677501 - RNA, 19 nt, Artificial Sequence
  Description of Artificial Sequence: Synthetic oligonucleotide
  Sense strand starting at position 3651 of SEQ ID NO: 1561512
uguuuaaucuugucugcau

SEQ ID NO: 1677502 - RNA, 19 nt, Artificial Sequence
  Description of Artificial Sequence: Synthetic oligonucleotide
  Antisense strand to SEQ ID NO: 1677501
augcagacaagauuaaaca

SEQ ID NO: 1677503 - RNA, 19 nt, Artificial Sequence
  Description of Artificial Sequence: Synthetic oligonucleotide
  Sense strand starting at position 3652 of SEQ ID NO: 1561512
guuuaaucuugucugcaug

SEQ ID NO: 1677504 - RNA, 19 nt, Artificial Sequence
  Description of Artificial Sequence: Synthetic oligonucleotide
  Antisense strand to SEQ ID NO: 1677503
caugcagacaagauuaaac

SEQ ID NO: 1677505 - RNA, 19 nt, Artificial Sequence
  Description of Artificial Sequence: Synthetic oligonucleotide
  Sense strand starting at position 3744 of SEQ ID NO: 1561512
uuguaugcuucaggagguu

SEQ ID NO: 1677506 - RNA, 19 nt, Artificial Sequence
  Description of Artificial Sequence: Synthetic oligonucleotide
  Antisense strand to SEQ ID NO: 1677505
aaccuccugaagcauacaa

SEQ ID NO: 1677507 - RNA, 19 nt, Artificial Sequence
  Description of Artificial Sequence: Synthetic oligonucleotide
  Sense strand starting at position 3891 of SEQ ID NO: 1561512
uuuagcucagcagaguuua

SEQ ID NO: 1677508 - RNA, 19 nt, Artificial Sequence
  Description of Artificial Sequence: Synthetic oligonucleotide
  Antisense strand to SEQ ID NO: 1677507
uaaacucugcugagcuaaa

SEQ ID NO: 1677509 - RNA, 19 nt, Artificial Sequence
  Description of Artificial Sequence: Synthetic oligonucleotide
  Sense strand starting at position 3899 of SEQ ID NO: 1561512
agcagaguuuauuacccau

SEQ ID NO: 1677510 - RNA, 19 nt, Artificial Sequence
  Description of Artificial Sequence: Synthetic oligonucleotide
  Antisense strand to SEQ ID NO: 1677509
auggguaauaaacucugcu

SEQ ID NO: 1677511 - RNA, 19 nt, Artificial Sequence
  Description of Artificial Sequence: Synthetic oligonucleotide
  Sense strand starting at position 9 of SEQ ID NO: 1561513
gggcaagaaucauaucugu

SEQ ID NO: 1677512 - RNA, 19 nt, Artificial Sequence
  Description of Artificial Sequence: Synthetic oligonucleotide
  Antisense strand to SEQ ID NO: 1677511
acagauaugauucuugccc

SEQ ID NO: 1677513 - RNA, 19 nt, Artificial Sequence
  Description of Artificial Sequence: Synthetic oligonucleotide
  Sense strand starting at position 124 of SEQ ID NO: 1561513
gggugagcuuugagaggga

SEQ ID NO: 1677514 - RNA, 19 nt, Artificial Sequence
  Description of Artificial Sequence: Synthetic oligonucleotide
  Antisense strand to SEQ ID NO: 1677513
ucccucucaaagcucaccc

SEQ ID NO: 1677515 - RNA, 19 nt, Artificial Sequence
  Description of Artificial Sequence: Synthetic oligonucleotide
  Sense strand starting at position 318 of SEQ ID NO: 1561513
ggaggaugcucugaagaca

SEQ ID NO: 1677516 - RNA, 19 nt, Artificial Sequence
  Description of Artificial Sequence: Synthetic oligonucleotide
  Antisense strand to SEQ ID NO: 1677515
ugucuucagagcauccucc

SEQ ID NO: 1677517 - RNA, 19 nt, Artificial Sequence
  Description of Artificial Sequence: Synthetic oligonucleotide
  Sense strand starting at position 594 of SEQ ID NO: 1561513
acagcagggucucauacau

SEQ ID NO: 1677518 - RNA, 19 nt, Artificial Sequence
  Description of Artificial Sequence: Synthetic oligonucleotide
  Antisense strand to SEQ ID NO: 1677517
auguaugagacccugcugu

SEQ ID NO: 1677519 - RNA, 19 nt, Artificial Sequence
  Description of Artificial Sequence: Synthetic oligonucleotide
  Sense strand starting at position 620 of SEQ ID NO: 1561513
cugcuuuccucuccuguga

SEQ ID NO: 1677520 - RNA, 19 nt, Artificial Sequence
  Description of Artificial Sequence: Synthetic oligonucleotide
  Antisense strand to SEQ ID NO: 1677519
ucacaggagaggaaagcag

SEQ ID NO: 1677521 - RNA, 19 nt, Artificial Sequence
  Description of Artificial Sequence: Synthetic oligonucleotide
  Sense strand starting at position 715 of SEQ ID NO: 1561513
guuugaaaugugcaauaaa

SEQ ID NO: 1677522 - RNA, 19 nt, Artificial Sequence
  Description of Artificial Sequence: Synthetic oligonucleotide
  Antisense strand to SEQ ID NO: 1677521
uuuauugcacauuucaaac

SEQ ID NO: 1677523 - RNA, 19 nt, Artificial Sequence
  Description of Artificial Sequence: Synthetic oligonucleotide
  Sense strand starting at position 745 of SEQ ID NO: 1561513
ugauaaugucgugacugga

SEQ ID NO: 1677524 - RNA, 19 nt, Artificial Sequence
  Description of Artificial Sequence: Synthetic oligonucleotide
  Antisense strand to SEQ ID NO: 1677523
uccagucacgacauuauca

SEQ ID NO: 1677525 - RNA, 19 nt, Artificial Sequence
  Description of Artificial Sequence: Synthetic oligonucleotide
  Sense strand starting at position 748 of SEQ ID NO: 1561513
uaaugucgugacuggaguu

SEQ ID NO: 1677526 - RNA, 19 nt, Artificial Sequence
  Description of Artificial Sequence: Synthetic oligonucleotide
  Antisense strand to SEQ ID NO: 1677525
aacuccagucacgacauua

SEQ ID NO: 1677527 - RNA, 19 nt, Artificial Sequence
  Description of Artificial Sequence: Synthetic oligonucleotide
  Sense strand starting at position 749 of SEQ ID NO: 1561513
aaugucgugacuggaguua

SEQ ID NO: 1677528 - RNA, 19 nt, Artificial Sequence
  Description of Artificial Sequence: Synthetic oligonucleotide
  Antisense strand to SEQ ID NO: 1677527
uaacuccagucacgacauu

SEQ ID NO: 1677529 - RNA, 19 nt, Artificial Sequence
  Description of Artificial Sequence: Synthetic oligonucleotide
  Sense strand starting at position 772 of SEQ ID NO: 1561513
uugggaauauggugaaaga

SEQ ID NO: 1677530 - RNA, 19 nt, Artificial Sequence
  Description of Artificial Sequence: Synthetic oligonucleotide
  Antisense strand to SEQ ID NO: 1677529
ucuuucaccauauucccaa

SEQ ID NO: 1677531 - RNA, 19 nt, Artificial Sequence
  Description of Artificial Sequence: Synthetic oligonucleotide
  Sense strand starting at position 782 of SEQ ID NO: 1561513
ggugaaagaagugguauca

SEQ ID NO: 1677532 - RNA, 19 nt, Artificial Sequence
  Description of Artificial Sequence: Synthetic oligonucleotide
  Antisense strand to SEQ ID NO: 1677531
ugauaccacuucuuucacc

SEQ ID NO: 1677533 - RNA, 19 nt, Artificial Sequence
  Description of Artificial Sequence: Synthetic oligonucleotide
  Sense strand starting at position 804 of SEQ ID NO: 1561513
auuauuugcaagcgccaga

SEQ ID NO: 1677534 - RNA, 19 nt, Artificial Sequence
  Description of Artificial Sequence: Synthetic oligonucleotide
  Antisense strand to SEQ ID NO: 1677533
ucuggcgcuugcaaauaau

SEQ ID NO: 1677535 - RNA, 19 nt, Artificial Sequence
  Description of Artificial Sequence: Synthetic oligonucleotide
  Sense strand starting at position 928 of SEQ ID NO: 1561513
cugguuuccuacccaagga

SEQ ID NO: 1677536 - RNA, 19 nt, Artificial Sequence
  Description of Artificial Sequence: Synthetic oligonucleotide
  Antisense strand to SEQ ID NO: 1677535
uccuuggguaggaaaccag

SEQ ID NO: 1677537 - RNA, 19 nt, Artificial Sequence
  Description of Artificial Sequence: Synthetic oligonucleotide
  Sense strand starting at position 948 of SEQ ID NO: 1561513
acagaaaucuaagucgaau

SEQ ID NO: 1677538 - RNA, 19 nt, Artificial Sequence
  Description of Artificial Sequence: Synthetic oligonucleotide
  Antisense strand to SEQ ID NO: 1677537
auucgacuuagauuucugu

SEQ ID NO: 1677539 - RNA, 19 nt, Artificial Sequence
  Description of Artificial Sequence: Synthetic oligonucleotide
  Sense strand starting at position 950 of SEQ ID NO: 1561513
agaaaucuaagucgaauga

SEQ ID NO: 1677540 - RNA, 19 nt, Artificial Sequence
  Description of Artificial Sequence: Synthetic oligonucleotide
  Antisense strand to SEQ ID NO: 1677539
ucauucgacuuagauuucu

SEQ ID NO: 1677541 - RNA, 19 nt, Artificial Sequence
  Description of Artificial Sequence: Synthetic oligonucleotide
  Sense strand starting at position 954 of SEQ ID NO: 1561513
aucuaagucgaaugaaauu

SEQ ID NO: 1677542 - RNA, 19 nt, Artificial Sequence
  Description of Artificial Sequence: Synthetic oligonucleotide
  Antisense strand to SEQ ID NO: 1677541
aauuucauucgacuuagau

SEQ ID NO: 1677543 - RNA, 19 nt, Artificial Sequence
  Description of Artificial Sequence: Synthetic oligonucleotide
  Sense strand starting at position 1014 of SEQ ID NO: 1561513
uuggucucagucugaauau

SEQ ID NO: 1677544 - RNA, 19 nt, Artificial Sequence
  Description of Artificial Sequence: Synthetic oligonucleotide
  Antisense strand to SEQ ID NO: 1677543
auauucagacugagaccaa

SEQ ID NO: 1677545 - RNA, 19 nt, Artificial Sequence
  Description of Artificial Sequence: Synthetic oligonucleotide
  Sense strand starting at position 1015 of SEQ ID NO: 1561513
uggucucagucugaauaug

SEQ ID NO: 1677546 - RNA, 19 nt, Artificial Sequence
  Description of Artificial Sequence: Synthetic oligonucleotide
  Antisense strand to SEQ ID NO: 1677545
cauauucagacugagacca

SEQ ID NO: 1677547 - RNA, 19 nt, Artificial Sequence
  Description of Artificial Sequence: Synthetic oligonucleotide
  Sense strand starting at position 1068 of SEQ ID NO: 1561513
gcuauauugcgaggcugau

SEQ ID NO: 1677548 - RNA, 19 nt, Artificial Sequence
  Description of Artificial Sequence: Synthetic oligonucleotide
  Antisense strand to SEQ ID NO: 1677547
aucagccucgcaauauagc

SEQ ID NO: 1677549 - RNA, 19 nt, Artificial Sequence
  Description of Artificial Sequence: Synthetic oligonucleotide
  Sense strand starting at position 1193 of SEQ ID NO: 1561513
accaguuuauaaggaaaua

SEQ ID NO: 1677550 - RNA, 19 nt, Artificial Sequence
  Description of Artificial Sequence: Synthetic oligonucleotide
  Antisense strand to SEQ ID NO: 1677549
uauuuccuuauaaacuggu

SEQ ID NO: 1677551 - RNA, 19 nt, Artificial Sequence
  Description of Artificial Sequence: Synthetic oligonucleotide
  Sense strand starting at position 1409 of SEQ ID NO: 1561513
gagcuucuccaucgaugag

SEQ ID NO: 1677552 - RNA, 19 nt, Artificial Sequence
  Description of Artificial Sequence: Synthetic oligonucleotide
  Antisense strand to SEQ ID NO: 1677551
cucaucgauggagaagcuc

SEQ ID NO: 1677553 - RNA, 19 nt, Artificial Sequence
  Description of Artificial Sequence: Synthetic oligonucleotide
  Sense strand starting at position 1426 of SEQ ID NO: 1561513
agccgcuguuugcucaaau

SEQ ID NO: 1677554 - RNA, 19 nt, Artificial Sequence
  Description of Artificial Sequence: Synthetic oligonucleotide
  Antisense strand to SEQ ID NO: 1677553
auuugagcaaacagcggcu

SEQ ID NO: 1677555 - RNA, 19 nt, Artificial Sequence
  Description of Artificial Sequence: Synthetic oligonucleotide
  Sense strand starting at position 1427 of SEQ ID NO: 1561513
gccgcuguuugcucaaaua

SEQ ID NO: 1677556 - RNA, 19 nt, Artificial Sequence
  Description of Artificial Sequence: Synthetic oligonucleotide
  Antisense strand to SEQ ID NO: 1677555
uauuugagcaaacagcggc

SEQ ID NO: 1677557 - RNA, 19 nt, Artificial Sequence
  Description of Artificial Sequence: Synthetic oligonucleotide
  Sense strand starting at position 2099 of SEQ ID NO: 1561513
guagcaguguugacugguu

SEQ ID NO: 1677558 - RNA, 19 nt, Artificial Sequence
  Description of Artificial Sequence: Synthetic oligonucleotide
  Antisense strand to SEQ ID NO: 1677557
aaccagucaacacugcuac

SEQ ID NO: 1677559 - RNA, 19 nt, Artificial Sequence
  Description of Artificial Sequence: Synthetic oligonucleotide
  Sense strand starting at position 2398 of SEQ ID NO: 1561513
uaccgaggcuggucucuaa

SEQ ID NO: 1677560 - RNA, 19 nt, Artificial Sequence
  Description of Artificial Sequence: Synthetic oligonucleotide
  Antisense strand to SEQ ID NO: 1677559
uuagagaccagccucggua

SEQ ID NO: 1677561 - RNA, 19 nt, Artificial Sequence
  Description of Artificial Sequence: Synthetic oligonucleotide
  Sense strand starting at position 2891 of SEQ ID NO: 1561513
ggccaauauuugcauuuaa

SEQ ID NO: 1677562 - RNA, 19 nt, Artificial Sequence
  Description of Artificial Sequence: Synthetic oligonucleotide
  Antisense strand to SEQ ID NO: 1677561
uuaaaugcaaauauuggcc

SEQ ID NO: 1677563 - RNA, 19 nt, Artificial Sequence
  Description of Artificial Sequence: Synthetic oligonucleotide
  Sense strand starting at position 2920 of SEQ ID NO: 1561513
gcuucuagcuugccagagu

SEQ ID NO: 1677564 - RNA, 19 nt, Artificial Sequence
  Description of Artificial Sequence: Synthetic oligonucleotide
  Antisense strand to SEQ ID NO: 1677563
acucuggcaagcuagaagc

SEQ ID NO: 1677565 - RNA, 19 nt, Artificial Sequence
  Description of Artificial Sequence: Synthetic oligonucleotide
  Sense strand starting at position 2974 of SEQ ID NO: 1561513
ccuucuaauuccuuccgga

SEQ ID NO: 1677566 - RNA, 19 nt, Artificial Sequence
  Description of Artificial Sequence: Synthetic oligonucleotide
  Antisense strand to SEQ ID NO: 1677565
uccggaaggaauuagaagg

SEQ ID NO: 1677567 - RNA, 19 nt, Artificial Sequence
  Description of Artificial Sequence: Synthetic oligonucleotide
  Sense strand starting at position 2978 of SEQ ID NO: 1561513
cuaauuccuuccggacaca

SEQ ID NO: 1677568 - RNA, 19 nt, Artificial Sequence
  Description of Artificial Sequence: Synthetic oligonucleotide
  Antisense strand to SEQ ID NO: 1677567
uguguccggaaggaauuag

SEQ ID NO: 1677569 - RNA, 19 nt, Artificial Sequence
  Description of Artificial Sequence: Synthetic oligonucleotide
  Sense strand starting at position 2991 of SEQ ID NO: 1561513
gacacaaggucaccaguau

SEQ ID NO: 1677570 - RNA, 19 nt, Artificial Sequence
  Description of Artificial Sequence: Synthetic oligonucleotide
  Antisense strand to SEQ ID NO: 1677569
auacuggugaccuuguguc

SEQ ID NO: 1677571 - RNA, 19 nt, Artificial Sequence
  Description of Artificial Sequence: Synthetic oligonucleotide
  Sense strand starting at position 3003 of SEQ ID NO: 1561513
ccaguaugugcagggaacu

SEQ ID NO: 1677572 - RNA, 19 nt, Artificial Sequence
  Description of Artificial Sequence: Synthetic oligonucleotide
  Antisense strand to SEQ ID NO: 1677571
aguucccugcacauacugg

SEQ ID NO: 1677573 - RNA, 19 nt, Artificial Sequence
  Description of Artificial Sequence: Synthetic oligonucleotide
  Sense strand starting at position 3041 of SEQ ID NO: 1561513
gagcaaucgccuugccuca

SEQ ID NO: 1677574 - RNA, 19 nt, Artificial Sequence
  Description of Artificial Sequence: Synthetic oligonucleotide
  Antisense strand to SEQ ID NO: 1677573
ugaggcaaggcgauugcuc

SEQ ID NO: 1677575 - RNA, 19 nt, Artificial Sequence
  Description of Artificial Sequence: Synthetic oligonucleotide
  Sense strand starting at position 3102 of SEQ ID NO: 1561513
ggaggaagggccugauguu

SEQ ID NO: 1677576 - RNA, 19 nt, Artificial Sequence
  Description of Artificial Sequence: Synthetic oligonucleotide
  Antisense strand to SEQ ID NO: 1677575
aacaucaggcccuuccucc

SEQ ID NO: 1677577 - RNA, 19 nt, Artificial Sequence
  Description of Artificial Sequence: Synthetic oligonucleotide
  Sense strand starting at position 3186 of SEQ ID NO: 1561513
aaacaucuauacguggaaa

SEQ ID NO: 1677578 - RNA, 19 nt, Artificial Sequence
  Description of Artificial Sequence: Synthetic oligonucleotide
  Antisense strand to SEQ ID NO: 1677577
uuuccacguauagauguuu

SEQ ID NO: 1677579 - RNA, 19 nt, Artificial Sequence
  Description of Artificial Sequence: Synthetic oligonucleotide
  Sense strand starting at position 3212 of SEQ ID NO: 1561513
agaaauaacugaggugaga

SEQ ID NO: 1677580 - RNA, 19 nt, Artificial Sequence
  Description of Artificial Sequence: Synthetic oligonucleotide
  Antisense strand to SEQ ID NO: 1677579
ucucaccucaguuauuucu

SEQ ID NO: 1677581 - RNA, 19 nt, Artificial Sequence
  Description of Artificial Sequence: Synthetic oligonucleotide
  Sense strand starting at position 3229 of SEQ ID NO: 1561513
gaggaaggaugcucucuga

SEQ ID NO: 1677582 - RNA, 19 nt, Artificial Sequence
  Description of Artificial Sequence: Synthetic oligonucleotide
  Antisense strand to SEQ ID NO: 1677581
ucagagagcauccuuccuc

SEQ ID NO: 1677583 - RNA, 19 nt, Artificial Sequence
  Description of Artificial Sequence: Synthetic oligonucleotide
  Sense strand starting at position 3232 of SEQ ID NO: 1561513
gaaggaugcucucugauga

SEQ ID NO: 1677584 - RNA, 19 nt, Artificial Sequence
  Description of Artificial Sequence: Synthetic oligonucleotide
  Antisense strand to SEQ ID NO: 1677583
ucaucagagagcauccuuc

SEQ ID NO: 1677585 - RNA, 19 nt, Artificial Sequence
  Description of Artificial Sequence: Synthetic oligonucleotide
  Sense strand starting at position 3233 of SEQ ID NO: 1561513
aaggaugcucucugaugaa

SEQ ID NO: 1677586 - RNA, 19 nt, Artificial Sequence
  Description of Artificial Sequence: Synthetic oligonucleotide
  Antisense strand to SEQ ID NO: 1677585
uucaucagagagcauccuu

SEQ ID NO: 1677587 - RNA, 19 nt, Artificial Sequence
  Description of Artificial Sequence: Synthetic oligonucleotide
  Sense strand starting at position 3246 of SEQ ID NO: 1561513
gaugaagugaugugggaug

SEQ ID NO: 1677588 - RNA, 19 nt, Artificial Sequence
  Description of Artificial Sequence: Synthetic oligonucleotide
  Antisense strand to SEQ ID NO: 1677587
caucccacaucacuucauc

SEQ ID NO: 1677589 - RNA, 19 nt, Artificial Sequence
  Description of Artificial Sequence: Synthetic oligonucleotide
  Sense strand starting at position 3316 of SEQ ID NO: 1561513
ggagcacgccuguaaucua

SEQ ID NO: 1677590 - RNA, 19 nt, Artificial Sequence
  Description of Artificial Sequence: Synthetic oligonucleotide
  Antisense strand to SEQ ID NO: 1677589
uagauuacaggcgugcucc

SEQ ID NO: 1677591 - RNA, 19 nt, Artificial Sequence
  Description of Artificial Sequence: Synthetic oligonucleotide
  Sense strand starting at position 95 of SEQ ID NO: 1561514
cuucuaauguaccaggauu

SEQ ID NO: 1677592 - RNA, 19 nt, Artificial Sequence
  Description of Artificial Sequence: Synthetic oligonucleotide
  Antisense strand to SEQ ID NO: 1677591
aauccugguacauuagaag

SEQ ID NO: 1677593 - RNA, 19 nt, Artificial Sequence
  Description of Artificial Sequence: Synthetic oligonucleotide
  Sense strand starting at position 227 of SEQ ID NO: 1561514
gccugacauuggccuauga

SEQ ID NO: 1677594 - RNA, 19 nt, Artificial Sequence
  Description of Artificial Sequence: Synthetic oligonucleotide
  Antisense strand to SEQ ID NO: 1677593
ucauaggccaaugucaggc

SEQ ID NO: 1677595 - RNA, 19 nt, Artificial Sequence
  Description of Artificial Sequence: Synthetic oligonucleotide
  Sense strand starting at position 348 of SEQ ID NO: 1561514
cuauauaaccagugugcuu

SEQ ID NO: 1677596 - RNA, 19 nt, Artificial Sequence
  Description of Artificial Sequence: Synthetic oligonucleotide
  Antisense strand to SEQ ID NO: 1677595
aagcacacugguuauauag

SEQ ID NO: 1677597 - RNA, 19 nt, Artificial Sequence
  Description of Artificial Sequence: Synthetic oligonucleotide
  Sense strand starting at position 355 of SEQ ID NO: 1561514
accagugugcuuucuguuu

SEQ ID NO: 1677598 - RNA, 19 nt, Artificial Sequence
  Description of Artificial Sequence: Synthetic oligonucleotide
  Antisense strand to SEQ ID NO: 1677597
aaacagaaagcacacuggu

SEQ ID NO: 1677599 - RNA, 19 nt, Artificial Sequence
  Description of Artificial Sequence: Synthetic oligonucleotide
  Sense strand starting at position 394 of SEQ ID NO: 1561514
gaaugucaacgccgggaaa

SEQ ID NO: 1677600 - RNA, 19 nt, Artificial Sequence
  Description of Artificial Sequence: Synthetic oligonucleotide
  Antisense strand to SEQ ID NO: 1677599
uuucccggcguugacauuc

SEQ ID NO: 1677601 - RNA, 19 nt, Artificial Sequence
  Description of Artificial Sequence: Synthetic oligonucleotide
  Sense strand starting at position 458 of SEQ ID NO: 1561514
uacaauaaugucuggcaga

SEQ ID NO: 1677602 - RNA, 19 nt, Artificial Sequence
  Description of Artificial Sequence: Synthetic oligonucleotide
  Antisense strand to SEQ ID NO: 1677601
ucugccagacauuauugua

SEQ ID NO: 1677603 - RNA, 19 nt, Artificial Sequence
  Description of Artificial Sequence: Synthetic oligonucleotide
  Sense strand starting at position 459 of SEQ ID NO: 1561514
acaauaaugucuggcagag

SEQ ID NO: 1677604 - RNA, 19 nt, Artificial Sequence
  Description of Artificial Sequence: Synthetic oligonucleotide
  Antisense strand to SEQ ID NO: 1677603
cucugccagacauuauugu

SEQ ID NO: 1677605 - RNA, 19 nt, Artificial Sequence
  Description of Artificial Sequence: Synthetic oligonucleotide
  Sense strand starting at position 461 of SEQ ID NO: 1561514
aauaaugucuggcagagug

SEQ ID NO: 1677606 - RNA, 19 nt, Artificial Sequence
  Description of Artificial Sequence: Synthetic oligonucleotide
  Antisense strand to SEQ ID NO: 1677605
cacucugccagacauuauu

SEQ ID NO: 1677607 - RNA, 19 nt, Artificial Sequence
  Description of Artificial Sequence: Synthetic oligonucleotide
  Sense strand starting at position 477 of SEQ ID NO: 1561514
gugugugcgcaguaaacaa

SEQ ID NO: 1677608 - RNA, 19 nt, Artificial Sequence
  Description of Artificial Sequence: Synthetic oligonucleotide
  Antisense strand to SEQ ID NO: 1677607
uuguuuacugcgcacacac

SEQ ID NO: 1677609 - RNA, 19 nt, Artificial Sequence
  Description of Artificial Sequence: Synthetic oligonucleotide
  Sense strand starting at position 872 of SEQ ID NO: 1561514
agauaaguguacccuuuaa

SEQ ID NO: 1677610 - RNA, 19 nt, Artificial Sequence
  Description of Artificial Sequence: Synthetic oligonucleotide
  Antisense strand to SEQ ID NO: 1677609
uuaaaggguacacuuaucu

SEQ ID NO: 1677611 - RNA, 19 nt, Artificial Sequence
  Description of Artificial Sequence: Synthetic oligonucleotide
  Sense strand starting at position 879 of SEQ ID NO: 1561514
uguacccuuuaauauguaa

SEQ ID NO: 1677612 - RNA, 19 nt, Artificial Sequence
  Description of Artificial Sequence: Synthetic oligonucleotide
  Antisense strand to SEQ ID NO: 1677611
uuacauauuaaaggguaca

SEQ ID NO: 1677613 - RNA, 19 nt, Artificial Sequence
  Description of Artificial Sequence: Synthetic oligonucleotide
  Sense strand starting at position 1001 of SEQ ID NO: 1561514
gcugcacgugccuuugaga

SEQ ID NO: 1677614 - RNA, 19 nt, Artificial Sequence
  Description of Artificial Sequence: Synthetic oligonucleotide
  Antisense strand to SEQ ID NO: 1677613
ucucaaaggcacgugcagc

SEQ ID NO: 1677615 - RNA, 19 nt, Artificial Sequence
  Description of Artificial Sequence: Synthetic oligonucleotide
  Sense strand starting at position 1039 of SEQ ID NO: 1561514
aagagauauccgugcccug

SEQ ID NO: 1677616 - RNA, 19 nt, Artificial Sequence
  Description of Artificial Sequence: Synthetic oligonucleotide
  Antisense strand to SEQ ID NO: 1677615
cagggcacggauaucucuu

SEQ ID NO: 1677617 - RNA, 19 nt, Artificial Sequence
  Description of Artificial Sequence: Synthetic oligonucleotide
  Sense strand starting at position 1042 of SEQ ID NO: 1561514
agauauccgugcccugaaa

SEQ ID NO: 1677618 - RNA, 19 nt, Artificial Sequence
  Description of Artificial Sequence: Synthetic oligonucleotide
  Antisense strand to SEQ ID NO: 1677617
uuucagggcacggauaucu

SEQ ID NO: 1677619 - RNA, 19 nt, Artificial Sequence
  Description of Artificial Sequence: Synthetic oligonucleotide
  Sense strand starting at position 1044 of SEQ ID NO: 1561514
auauccgugcccugaaaga

SEQ ID NO: 1677620 - RNA, 19 nt, Artificial Sequence
  Description of Artificial Sequence: Synthetic oligonucleotide
  Antisense strand to SEQ ID NO: 1677619
ucuuucagggcacggauau

SEQ ID NO: 1677621 - RNA, 19 nt, Artificial Sequence
  Description of Artificial Sequence: Synthetic oligonucleotide
  Sense strand starting at position 1190 of SEQ ID NO: 1561514
cagggaucgcuuugaagca

SEQ ID NO: 1677622 - RNA, 19 nt, Artificial Sequence
  Description of Artificial Sequence: Synthetic oligonucleotide
  Antisense strand to SEQ ID NO: 1677621
ugcuucaaagcgaucccug

SEQ ID NO: 1677623 - RNA, 19 nt, Artificial Sequence
  Description of Artificial Sequence: Synthetic oligonucleotide
  Sense strand starting at position 1191 of SEQ ID NO: 1561514
agggaucgcuuugaagcaa

SEQ ID NO: 1677624 - RNA, 19 nt, Artificial Sequence
  Description of Artificial Sequence: Synthetic oligonucleotide
  Antisense strand to SEQ ID NO: 1677623
uugcuucaaagcgaucccu

SEQ ID NO: 1677625 - RNA, 19 nt, Artificial Sequence
  Description of Artificial Sequence: Synthetic oligonucleotide
  Sense strand starting at position 1252 of SEQ ID NO: 1561514
acuggccuuuaaugagaua

SEQ ID NO: 1677626 - RNA, 19 nt, Artificial Sequence
  Description of Artificial Sequence: Synthetic oligonucleotide
  Antisense strand to SEQ ID NO: 1677625
uaucucauuaaaggccagu

SEQ ID NO: 1677627 - RNA, 19 nt, Artificial Sequence
  Description of Artificial Sequence: Synthetic oligonucleotide
  Sense strand starting at position 1390 of SEQ ID NO: 1561514
gcaaaugucggaggugaaa

SEQ ID NO: 1677628 - RNA, 19 nt, Artificial Sequence
  Description of Artificial Sequence: Synthetic oligonucleotide
  Antisense strand to SEQ ID NO: 1677627
uuucaccuccgacauuugc

SEQ ID NO: 1677629 - RNA, 19 nt, Artificial Sequence
  Description of Artificial Sequence: Synthetic oligonucleotide
  Sense strand starting at position 1392 of SEQ ID NO: 1561514
aaaugucggaggugaaaua

SEQ ID NO: 1677630 - RNA, 19 nt, Artificial Sequence
  Description of Artificial Sequence: Synthetic oligonucleotide
  Antisense strand to SEQ ID NO: 1677629
uauuucaccuccgacauuu

SEQ ID NO: 1677631 - RNA, 19 nt, Artificial Sequence
  Description of Artificial Sequence: Synthetic oligonucleotide
  Sense strand starting at position 2102 of SEQ ID NO: 1561514
gagccacgugcucaggauu

SEQ ID NO: 1677632 - RNA, 19 nt, Artificial Sequence
  Description of Artificial Sequence: Synthetic oligonucleotide
  Antisense strand to SEQ ID NO: 1677631
aauccugagcacguggcuc

SEQ ID NO: 1677633 - RNA, 19 nt, Artificial Sequence
  Description of Artificial Sequence: Synthetic oligonucleotide
  Sense strand starting at position 2356 of SEQ ID NO: 1561514
agugccauuugggauggau

SEQ ID NO: 1677634 - RNA, 19 nt, Artificial Sequence
  Description of Artificial Sequence: Synthetic oligonucleotide
  Antisense strand to SEQ ID NO: 1677633
auccaucccaaauggcacu

SEQ ID NO: 1677635 - RNA, 19 nt, Artificial Sequence
  Description of Artificial Sequence: Synthetic oligonucleotide
  Sense strand starting at position 2852 of SEQ ID NO: 1561514
gcaguacccucagcuugaa

SEQ ID NO: 1677636 - RNA, 19 nt, Artificial Sequence
  Description of Artificial Sequence: Synthetic oligonucleotide
  Antisense strand to SEQ ID NO: 1677635
uucaagcugaggguacugc

SEQ ID NO: 1677637 - RNA, 19 nt, Artificial Sequence
  Description of Artificial Sequence: Synthetic oligonucleotide
  Sense strand starting at position 2934 of SEQ ID NO: 1561514
gcaagaucccacuggaaag

SEQ ID NO: 1677638 - RNA, 19 nt, Artificial Sequence
  Description of Artificial Sequence: Synthetic oligonucleotide
  Antisense strand to SEQ ID NO: 1677637
cuuuccagugggaucuugc

SEQ ID NO: 1677639 - RNA, 19 nt, Artificial Sequence
  Description of Artificial Sequence: Synthetic oligonucleotide
  Sense strand starting at position 2977 of SEQ ID NO: 1561514
cuuacaugcucagcgacau

SEQ ID NO: 1677640 - RNA, 19 nt, Artificial Sequence
  Description of Artificial Sequence: Synthetic oligonucleotide
  Antisense strand to SEQ ID NO: 1677639
augucgcugagcauguaag

SEQ ID NO: 1677641 - RNA, 19 nt, Artificial Sequence
  Description of Artificial Sequence: Synthetic oligonucleotide
  Sense strand starting at position 2978 of SEQ ID NO: 1561514
uuacaugcucagcgacauu

SEQ ID NO: 1677642 - RNA, 19 nt, Artificial Sequence
  Description of Artificial Sequence: Synthetic oligonucleotide
  Antisense strand to SEQ ID NO: 1677641
aaugucgcugagcauguaa

SEQ ID NO: 1677643 - RNA, 19 nt, Artificial Sequence
  Description of Artificial Sequence: Synthetic oligonucleotide
  Sense strand starting at position 2987 of SEQ ID NO: 1561514
cagcgacauuuaucuaugu

SEQ ID NO: 1677644 - RNA, 19 nt, Artificial Sequence
  Description of Artificial Sequence: Synthetic oligonucleotide
  Antisense strand to SEQ ID NO: 1677643
acauagauaaaugucgcug

SEQ ID NO: 1677645 - RNA, 19 nt, Artificial Sequence
  Description of Artificial Sequence: Synthetic oligonucleotide
  Sense strand starting at position 2996 of SEQ ID NO: 1561514
uuaucuaugucccaugaca

SEQ ID NO: 1677646 - RNA, 19 nt, Artificial Sequence
  Description of Artificial Sequence: Synthetic oligonucleotide
  Antisense strand to SEQ ID NO: 1677645
ugucaugggacauagauaa

SEQ ID NO: 1677647 - RNA, 19 nt, Artificial Sequence
  Description of Artificial Sequence: Synthetic oligonucleotide
  Sense strand starting at position 3029 of SEQ ID NO: 1561514
ugucuuugcugcccaggua

SEQ ID NO: 1677648 - RNA, 19 nt, Artificial Sequence
  Description of Artificial Sequence: Synthetic oligonucleotide
  Antisense strand to SEQ ID NO: 1677647
uaccugggcagcaaagaca

SEQ ID NO: 1677649 - RNA, 19 nt, Artificial Sequence
  Description of Artificial Sequence: Synthetic oligonucleotide
  Sense strand starting at position 3084 of SEQ ID NO: 1561514
gacgguacuuguuuguuga

SEQ ID NO: 1677650 - RNA, 19 nt, Artificial Sequence
  Description of Artificial Sequence: Synthetic oligonucleotide
  Antisense strand to SEQ ID NO: 1677649
ucaacaaacaaguaccguc

SEQ ID NO: 1677651 - RNA, 19 nt, Artificial Sequence
  Description of Artificial Sequence: Synthetic oligonucleotide
  Sense strand starting at position 3085 of SEQ ID NO: 1561514
acgguacuuguuuguugaa

SEQ ID NO: 1677652 - RNA, 19 nt, Artificial Sequence
  Description of Artificial Sequence: Synthetic oligonucleotide
  Antisense strand to SEQ ID NO: 1677651
uucaacaaacaaguaccgu

SEQ ID NO: 1677653 - RNA, 19 nt, Artificial Sequence
  Description of Artificial Sequence: Synthetic oligonucleotide
  Sense strand starting at position 3086 of SEQ ID NO: 1561514
cgguacuuguuuguugaau

SEQ ID NO: 1677654 - RNA, 19 nt, Artificial Sequence
  Description of Artificial Sequence: Synthetic oligonucleotide
  Antisense strand to SEQ ID NO: 1677653
auucaacaaacaaguaccg

SEQ ID NO: 1677655 - RNA, 19 nt, Artificial Sequence
  Description of Artificial Sequence: Synthetic oligonucleotide
  Sense strand starting at position 3087 of SEQ ID NO: 1561514
gguacuuguuuguugaaug

SEQ ID NO: 1677656 - RNA, 19 nt, Artificial Sequence
  Description of Artificial Sequence: Synthetic oligonucleotide
  Antisense strand to SEQ ID NO: 1677655
cauucaacaaacaaguacc

SEQ ID NO: 1677657 - RNA, 19 nt, Artificial Sequence
  Description of Artificial Sequence: Synthetic oligonucleotide
  Sense strand starting at position 3214 of SEQ ID NO: 1561514
gcugaugucuccgugcauu

SEQ ID NO: 1677658 - RNA, 19 nt, Artificial Sequence
  Description of Artificial Sequence: Synthetic oligonucleotide
  Antisense strand to SEQ ID NO: 1677657
aaugcacggagacaucagc

SEQ ID NO: 1677659 - RNA, 19 nt, Artificial Sequence
  Description of Artificial Sequence: Synthetic oligonucleotide
  Sense strand starting at position 3224 of SEQ ID NO: 1561514
ccgugcauucgugcgugua

SEQ ID NO: 1677660 - RNA, 19 nt, Artificial Sequence
  Description of Artificial Sequence: Synthetic oligonucleotide
  Antisense strand to SEQ ID NO: 1677659
uacacgcacgaaugcacgg

SEQ ID NO: 1677661 - RNA, 19 nt, Artificial Sequence
  Description of Artificial Sequence: Synthetic oligonucleotide
  Sense strand starting at position 3418 of SEQ ID NO: 1561514
uggucucugcaguagugaa

SEQ ID NO: 1677662 - RNA, 19 nt, Artificial Sequence
  Description of Artificial Sequence: Synthetic oligonucleotide
  Antisense strand to SEQ ID NO: 1677661
uucacuacugcagagacca

SEQ ID NO: 1677663 - RNA, 19 nt, Artificial Sequence
  Description of Artificial Sequence: Synthetic oligonucleotide
  Sense strand starting at position 3545 of SEQ ID NO: 1561514
auaagcuuccuguggugua

SEQ ID NO: 1677664 - RNA, 19 nt, Artificial Sequence
  Description of Artificial Sequence: Synthetic oligonucleotide
  Antisense strand to SEQ ID NO: 1677663
uacaccacaggaagcuuau

SEQ ID NO: 1677665 - RNA, 19 nt, Artificial Sequence
  Description of Artificial Sequence: Synthetic oligonucleotide
  Sense strand starting at position 3705 of SEQ ID NO: 1561514
gagagauuggcauggcuaa

SEQ ID NO: 1677666 - RNA, 19 nt, Artificial Sequence
  Description of Artificial Sequence: Synthetic oligonucleotide
  Antisense strand to SEQ ID NO: 1677665
uuagccaugccaaucucuc

SEQ ID NO: 1677667 - RNA, 19 nt, Artificial Sequence
  Description of Artificial Sequence: Synthetic oligonucleotide
  Sense strand starting at position 3787 of SEQ ID NO: 1561514
agucaauggccuugggcaa

SEQ ID NO: 1677668 - RNA, 19 nt, Artificial Sequence
  Description of Artificial Sequence: Synthetic oligonucleotide
  Antisense strand to SEQ ID NO: 1677667
uugcccaaggccauugacu

SEQ ID NO: 1677669 - RNA, 19 nt, Artificial Sequence
  Description of Artificial Sequence: Synthetic oligonucleotide
  Sense strand starting at position 3820 of SEQ ID NO: 1561514
aaaggugguguggauucaa

SEQ ID NO: 1677670 - RNA, 19 nt, Artificial Sequence
  Description of Artificial Sequence: Synthetic oligonucleotide
  Antisense strand to SEQ ID NO: 1677669
uugaauccacaccaccuuu

SEQ ID NO: 1677671 - RNA, 19 nt, Artificial Sequence
  Description of Artificial Sequence: Synthetic oligonucleotide
  Sense strand starting at position 40 of SEQ ID NO: 1561515
agagcaagguuuguagcaa

SEQ ID NO: 1677672 - RNA, 19 nt, Artificial Sequence
  Description of Artificial Sequence: Synthetic oligonucleotide
  Antisense strand to SEQ ID NO: 1677671
uugcuacaaaccuugcucu

SEQ ID NO: 1677673 - RNA, 19 nt, Artificial Sequence
  Description of Artificial Sequence: Synthetic oligonucleotide
  Sense strand starting at position 83 of SEQ ID NO: 1561515
cacggaagcuuauuagaga

SEQ ID NO: 1677674 - RNA, 19 nt, Artificial Sequence
  Description of Artificial Sequence: Synthetic oligonucleotide
  Antisense strand to SEQ ID NO: 1677673
ucucuaauaagcuuccgug

SEQ ID NO: 1677675 - RNA, 19 nt, Artificial Sequence
  Description of Artificial Sequence: Synthetic oligonucleotide
  Sense strand starting at position 133 of SEQ ID NO: 1561515
gcucaagaaucuguaaguu

SEQ ID NO: 1677676 - RNA, 19 nt, Artificial Sequence
  Description of Artificial Sequence: Synthetic oligonucleotide
  Antisense strand to SEQ ID NO: 1677675
aacuuacagauucuugagc

SEQ ID NO: 1677677 - RNA, 19 nt, Artificial Sequence
  Description of Artificial Sequence: Synthetic oligonucleotide
  Sense strand starting at position 193 of SEQ ID NO: 1561515
ucauuaugugggcauacuu

SEQ ID NO: 1677678 - RNA, 19 nt, Artificial Sequence
  Description of Artificial Sequence: Synthetic oligonucleotide
  Antisense strand to SEQ ID NO: 1677677
aaguaugcccacauaauga

SEQ ID NO: 1677679 - RNA, 19 nt, Artificial Sequence
  Description of Artificial Sequence: Synthetic oligonucleotide
  Sense strand starting at position 200 of SEQ ID NO: 1561515
gugggcauacuugauuaaa

SEQ ID NO: 1677680 - RNA, 19 nt, Artificial Sequence
  Description of Artificial Sequence: Synthetic oligonucleotide
  Antisense strand to SEQ ID NO: 1677679
uuuaaucaaguaugcccac

SEQ ID NO: 1677681 - RNA, 19 nt, Artificial Sequence
  Description of Artificial Sequence: Synthetic oligonucleotide
  Sense strand starting at position 288 of SEQ ID NO: 1561515
cucaaaugacaugguuagu

SEQ ID NO: 1677682 - RNA, 19 nt, Artificial Sequence
  Description of Artificial Sequence: Synthetic oligonucleotide
  Antisense strand to SEQ ID NO: 1677681
acuaaccaugucauuugag

SEQ ID NO: 1677683 - RNA, 19 nt, Artificial Sequence
  Description of Artificial Sequence: Synthetic oligonucleotide
  Sense strand starting at position 385 of SEQ ID NO: 1561515
aggcacuguuuacugaaga

SEQ ID NO: 1677684 - RNA, 19 nt, Artificial Sequence
  Description of Artificial Sequence: Synthetic oligonucleotide
  Antisense strand to SEQ ID NO: 1677683
ucuucaguaaacagugccu

SEQ ID NO: 1677685 - RNA, 19 nt, Artificial Sequence
  Description of Artificial Sequence: Synthetic oligonucleotide
  Sense strand starting at position 422 of SEQ ID NO: 1561515
agacaugugccaggaaaca

SEQ ID NO: 1677686 - RNA, 19 nt, Artificial Sequence
  Description of Artificial Sequence: Synthetic oligonucleotide
  Antisense strand to SEQ ID NO: 1677685
uguuuccuggcacaugucu

SEQ ID NO: 1677687 - RNA, 19 nt, Artificial Sequence
  Description of Artificial Sequence: Synthetic oligonucleotide
  Sense strand starting at position 803 of SEQ ID NO: 1561515
ggagacugaugcuuaagca

SEQ ID NO: 1677688 - RNA, 19 nt, Artificial Sequence
  Description of Artificial Sequence: Synthetic oligonucleotide
  Antisense strand to SEQ ID NO: 1677687
ugcuuaagcaucagucucc

SEQ ID NO: 1677689 - RNA, 19 nt, Artificial Sequence
  Description of Artificial Sequence: Synthetic oligonucleotide
  Sense strand starting at position 804 of SEQ ID NO: 1561515
gagacugaugcuuaagcaa

SEQ ID NO: 1677690 - RNA, 19 nt, Artificial Sequence
  Description of Artificial Sequence: Synthetic oligonucleotide
  Antisense strand to SEQ ID NO: 1677689
uugcuuaagcaucagucuc

SEQ ID NO: 1677691 - RNA, 19 nt, Artificial Sequence
  Description of Artificial Sequence: Synthetic oligonucleotide
  Sense strand starting at position 823 of SEQ ID NO: 1561515
acuaaauauugccugagaa

SEQ ID NO: 1677692 - RNA, 19 nt, Artificial Sequence
  Description of Artificial Sequence: Synthetic oligonucleotide
  Antisense strand to SEQ ID NO: 1677691
uucucaggcaauauuuagu

SEQ ID NO: 1677693 - RNA, 19 nt, Artificial Sequence
  Description of Artificial Sequence: Synthetic oligonucleotide
  Sense strand starting at position 824 of SEQ ID NO: 1561515
cuaaauauugccugagaac

SEQ ID NO: 1677694 - RNA, 19 nt, Artificial Sequence
  Description of Artificial Sequence: Synthetic oligonucleotide
  Antisense strand to SEQ ID NO: 1677693
guucucaggcaauauuuag

SEQ ID NO: 1677695 - RNA, 19 nt, Artificial Sequence
  Description of Artificial Sequence: Synthetic oligonucleotide
  Sense strand starting at position 825 of SEQ ID NO: 1561515
uaaauauugccugagaacg

SEQ ID NO: 1677696 - RNA, 19 nt, Artificial Sequence
  Description of Artificial Sequence: Synthetic oligonucleotide
  Antisense strand to SEQ ID NO: 1677695
cguucucaggcaauauuua

SEQ ID NO: 1677697 - RNA, 19 nt, Artificial Sequence
  Description of Artificial Sequence: Synthetic oligonucleotide
  Sense strand starting at position 1119 of SEQ ID NO: 1561515
ccuggagucucuguuaauc

SEQ ID NO: 1677698 - RNA, 19 nt, Artificial Sequence
  Description of Artificial Sequence: Synthetic oligonucleotide
  Antisense strand to SEQ ID NO: 1677697
gauuaacagagacuccagg

SEQ ID NO: 1677699 - RNA, 19 nt, Artificial Sequence
  Description of Artificial Sequence: Synthetic oligonucleotide
  Sense strand starting at position 1609 of SEQ ID NO: 1561515
ccuagaguucuccauccag

SEQ ID NO: 1677700 - RNA, 19 nt, Artificial Sequence
  Description of Artificial Sequence: Synthetic oligonucleotide
  Antisense strand to SEQ ID NO: 1677699
cuggauggagaacucuagg

SEQ ID NO: 1677701 - RNA, 19 nt, Artificial Sequence
  Description of Artificial Sequence: Synthetic oligonucleotide
  Sense strand starting at position 1616 of SEQ ID NO: 1561515
uucuccauccagugaucca

SEQ ID NO: 1677702 - RNA, 19 nt, Artificial Sequence
  Description of Artificial Sequence: Synthetic oligonucleotide
  Antisense strand to SEQ ID NO: 1677701
uggaucacuggauggagaa

SEQ ID NO: 1677703 - RNA, 19 nt, Artificial Sequence
  Description of Artificial Sequence: Synthetic oligonucleotide
  Sense strand starting at position 1991 of SEQ ID NO: 1561515
gcuucucuucgaggaggua

SEQ ID NO: 1677704 - RNA, 19 nt, Artificial Sequence
  Description of Artificial Sequence: Synthetic oligonucleotide
  Antisense strand to SEQ ID NO: 1677703
uaccuccucgaagagaagc

SEQ ID NO: 1677705 - RNA, 19 nt, Artificial Sequence
  Description of Artificial Sequence: Synthetic oligonucleotide
  Sense strand starting at position 1992 of SEQ ID NO: 1561515
cuucucuucgaggagguaa

SEQ ID NO: 1677706 - RNA, 19 nt, Artificial Sequence
  Description of Artificial Sequence: Synthetic oligonucleotide
  Antisense strand to SEQ ID NO: 1677705
uuaccuccucgaagagaag

SEQ ID NO: 1677707 - RNA, 19 nt, Artificial Sequence
  Description of Artificial Sequence: Synthetic oligonucleotide
  Sense strand starting at position 2056 of SEQ ID NO: 1561515
guagaucugccguacagaa

SEQ ID NO: 1677708 - RNA, 19 nt, Artificial Sequence
  Description of Artificial Sequence: Synthetic oligonucleotide
  Antisense strand to SEQ ID NO: 1677707
uucuguacggcagaucuac

SEQ ID NO: 1677709 - RNA, 19 nt, Artificial Sequence
  Description of Artificial Sequence: Synthetic oligonucleotide
  Sense strand starting at position 2086 of SEQ ID NO: 1561515
guucuugugucauuaaacc

SEQ ID NO: 1677710 - RNA, 19 nt, Artificial Sequence
  Description of Artificial Sequence: Synthetic oligonucleotide
  Antisense strand to SEQ ID NO: 1677709
gguuuaaugacacaagaac

SEQ ID NO: 1677711 - RNA, 19 nt, Artificial Sequence
  Description of Artificial Sequence: Synthetic oligonucleotide
  Sense strand starting at position 2092 of SEQ ID NO: 1561515
gugucauuaaaccgggaug

SEQ ID NO: 1677712 - RNA, 19 nt, Artificial Sequence
  Description of Artificial Sequence: Synthetic oligonucleotide
  Antisense strand to SEQ ID NO: 1677711
caucccgguuuaaugacac

SEQ ID NO: 1677713 - RNA, 19 nt, Artificial Sequence
  Description of Artificial Sequence: Synthetic oligonucleotide
  Sense strand starting at position 2093 of SEQ ID NO: 1561515
ugucauuaaaccgggauga

SEQ ID NO: 1677714 - RNA, 19 nt, Artificial Sequence
  Description of Artificial Sequence: Synthetic oligonucleotide
  Antisense strand to SEQ ID NO: 1677713
ucaucccgguuuaaugaca

SEQ ID NO: 1677715 - RNA, 19 nt, Artificial Sequence
  Description of Artificial Sequence: Synthetic oligonucleotide
  Sense strand starting at position 2094 of SEQ ID NO: 1561515
gucauuaaaccgggaugac

SEQ ID NO: 1677716 - RNA, 19 nt, Artificial Sequence
  Description of Artificial Sequence: Synthetic oligonucleotide
  Antisense strand to SEQ ID NO: 1677715
gucaucccgguuuaaugac

SEQ ID NO: 1677717 - RNA, 19 nt, Artificial Sequence
  Description of Artificial Sequence: Synthetic oligonucleotide
  Sense strand starting at position 2104 of SEQ ID NO: 1561515
cgggaugacucuccugaaa

SEQ ID NO: 1677718 - RNA, 19 nt, Artificial Sequence
  Description of Artificial Sequence: Synthetic oligonucleotide
  Antisense strand to SEQ ID NO: 1677717
uuucaggagagucaucccg

SEQ ID NO: 1677719 - RNA, 19 nt, Artificial Sequence
  Description of Artificial Sequence: Synthetic oligonucleotide
  Sense strand starting at position 2150 of SEQ ID NO: 1561515
ucuagaguuuaucugaaca

SEQ ID NO: 1677720 - RNA, 19 nt, Artificial Sequence
  Description of Artificial Sequence: Synthetic oligonucleotide
  Antisense strand to SEQ ID NO: 1677719
uguucagauaaacucuaga

SEQ ID NO: 1677721 - RNA, 19 nt, Artificial Sequence
  Description of Artificial Sequence: Synthetic oligonucleotide
  Sense strand starting at position 2205 of SEQ ID NO: 1561515
agaagucucgcgcuucuau

SEQ ID NO: 1677722 - RNA, 19 nt, Artificial Sequence
  Description of Artificial Sequence: Synthetic oligonucleotide
  Antisense strand to SEQ ID NO: 1677721
auagaagcgcgagacuucu

SEQ ID NO: 1677723 - RNA, 19 nt, Artificial Sequence
  Description of Artificial Sequence: Synthetic oligonucleotide
  Sense strand starting at position 2319 of SEQ ID NO: 1561515
aaauuugccuuggaaaguc

SEQ ID NO: 1677724 - RNA, 19 nt, Artificial Sequence
  Description of Artificial Sequence: Synthetic oligonucleotide
  Antisense strand to SEQ ID NO: 1677723
gacuuuccaaggcaaauuu

SEQ ID NO: 1677725 - RNA, 19 nt, Artificial Sequence
  Description of Artificial Sequence: Synthetic oligonucleotide
  Sense strand starting at position 2327 of SEQ ID NO: 1561515
cuuggaaagucccuaauga

SEQ ID NO: 1677726 - RNA, 19 nt, Artificial Sequence
  Description of Artificial Sequence: Synthetic oligonucleotide
  Antisense strand to SEQ ID NO: 1677725
ucauuagggacuuuccaag

SEQ ID NO: 1677727 - RNA, 19 nt, Artificial Sequence
  Description of Artificial Sequence: Synthetic oligonucleotide
  Sense strand starting at position 2344 of SEQ ID NO: 1561515
gacauaauagcaugugagu

SEQ ID NO: 1677728 - RNA, 19 nt, Artificial Sequence
  Description of Artificial Sequence: Synthetic oligonucleotide
  Antisense strand to SEQ ID NO: 1677727
acucacaugcuauuauguc

SEQ ID NO: 1677729 - RNA, 19 nt, Artificial Sequence
  Description of Artificial Sequence: Synthetic oligonucleotide
  Sense strand starting at position 2375 of SEQ ID NO: 1561515
aucgguugagauugaguuu

SEQ ID NO: 1677730 - RNA, 19 nt, Artificial Sequence
  Description of Artificial Sequence: Synthetic oligonucleotide
  Antisense strand to SEQ ID NO: 1677729
aaacucaaucucaaccgau

SEQ ID NO: 1677731 - RNA, 19 nt, Artificial Sequence
  Description of Artificial Sequence: Synthetic oligonucleotide
  Sense strand starting at position 2430 of SEQ ID NO: 1561515
ucaagugaauuguugcuua

SEQ ID NO: 1677732 - RNA, 19 nt, Artificial Sequence
  Description of Artificial Sequence: Synthetic oligonucleotide
  Antisense strand to SEQ ID NO: 1677731
uaagcaacaauucacuuga

SEQ ID NO: 1677733 - RNA, 19 nt, Artificial Sequence
  Description of Artificial Sequence: Synthetic oligonucleotide
  Sense strand starting at position 2435 of SEQ ID NO: 1561515
ugaauuguugcuuauguuu

SEQ ID NO: 1677734 - RNA, 19 nt, Artificial Sequence
  Description of Artificial Sequence: Synthetic oligonucleotide
  Antisense strand to SEQ ID NO: 1677733
aaacauaagcaacaauuca

SEQ ID NO: 1677735 - RNA, 19 nt, Artificial Sequence
  Description of Artificial Sequence: Synthetic oligonucleotide
  Sense strand starting at position 2515 of SEQ ID NO: 1561515
uuugaauucuggucugcau

SEQ ID NO: 1677736 - RNA, 19 nt, Artificial Sequence
  Description of Artificial Sequence: Synthetic oligonucleotide
  Antisense strand to SEQ ID NO: 1677735
augcagaccagaauucaaa

SEQ ID NO: 1677737 - RNA, 19 nt, Artificial Sequence
  Description of Artificial Sequence: Synthetic oligonucleotide
  Sense strand starting at position 2517 of SEQ ID NO: 1561515
ugaauucuggucugcauuu

SEQ ID NO: 1677738 - RNA, 19 nt, Artificial Sequence
  Description of Artificial Sequence: Synthetic oligonucleotide
  Antisense strand to SEQ ID NO: 1677737
aaaugcagaccagaauuca

SEQ ID NO: 1677739 - RNA, 19 nt, Artificial Sequence
  Description of Artificial Sequence: Synthetic oligonucleotide
  Sense strand starting at position 2542 of SEQ ID NO: 1561515
ugcuuugacacaggagaca

SEQ ID NO: 1677740 - RNA, 19 nt, Artificial Sequence
  Description of Artificial Sequence: Synthetic oligonucleotide
  Antisense strand to SEQ ID NO: 1677739
ugucuccugugucaaagca

SEQ ID NO: 1677741 - RNA, 19 nt, Artificial Sequence
  Description of Artificial Sequence: Synthetic oligonucleotide
  Sense strand starting at position 2561 of SEQ ID NO: 1561515
gugaaauggcacugaugug

SEQ ID NO: 1677742 - RNA, 19 nt, Artificial Sequence
  Description of Artificial Sequence: Synthetic oligonucleotide
  Antisense strand to SEQ ID NO: 1677741
cacaucagugccauuucac

SEQ ID NO: 1677743 - RNA, 19 nt, Artificial Sequence
  Description of Artificial Sequence: Synthetic oligonucleotide
  Sense strand starting at position 2576 of SEQ ID NO: 1561515
uguguucccucuccugaca

SEQ ID NO: 1677744 - RNA, 19 nt, Artificial Sequence
  Description of Artificial Sequence: Synthetic oligonucleotide
  Antisense strand to SEQ ID NO: 1677743
ugucaggagagggaacaca

SEQ ID NO: 1677745 - RNA, 19 nt, Artificial Sequence
  Description of Artificial Sequence: Synthetic oligonucleotide
  Sense strand starting at position 2957 of SEQ ID NO: 1561515
cccagaaagccagguauua

SEQ ID NO: 1677746 - RNA, 19 nt, Artificial Sequence
  Description of Artificial Sequence: Synthetic oligonucleotide
  Antisense strand to SEQ ID NO: 1677745
uaauaccuggcuuucuggg

SEQ ID NO: 1677747 - RNA, 19 nt, Artificial Sequence
  Description of Artificial Sequence: Synthetic oligonucleotide
  Sense strand starting at position 3267 of SEQ ID NO: 1561515
caccgagacguuuauguau

SEQ ID NO: 1677748 - RNA, 19 nt, Artificial Sequence
  Description of Artificial Sequence: Synthetic oligonucleotide
  Antisense strand to SEQ ID NO: 1677747
auacauaaacgucucggug

SEQ ID NO: 1677749 - RNA, 19 nt, Artificial Sequence
  Description of Artificial Sequence: Synthetic oligonucleotide
  Sense strand starting at position 3311 of SEQ ID NO: 1561515
uucuuaagcuuguuuauga

SEQ ID NO: 1677750 - RNA, 19 nt, Artificial Sequence
  Description of Artificial Sequence: Synthetic oligonucleotide
  Antisense strand to SEQ ID NO: 1677749
ucauaaacaagcuuaagaa

SEQ ID NO: 1677751 - RNA, 19 nt, Artificial Sequence
  Description of Artificial Sequence: Synthetic oligonucleotide
  Sense strand starting at position 551 of SEQ ID NO: 1561516
accagaauguccgcuccau

SEQ ID NO: 1677752 - RNA, 19 nt, Artificial Sequence
  Description of Artificial Sequence: Synthetic oligonucleotide
  Antisense strand to SEQ ID NO: 1677751
auggagcggacauucuggu

SEQ ID NO: 1677753 - RNA, 19 nt, Artificial Sequence
  Description of Artificial Sequence: Synthetic oligonucleotide
  Sense strand starting at position 566 of SEQ ID NO: 1561516
ccaugaggcagguaucuuu

SEQ ID NO: 1677754 - RNA, 19 nt, Artificial Sequence
  Description of Artificial Sequence: Synthetic oligonucleotide
  Antisense strand to SEQ ID NO: 1677753
aaagauaccugccucaugg

SEQ ID NO: 1677755 - RNA, 19 nt, Artificial Sequence
  Description of Artificial Sequence: Synthetic oligonucleotide
  Sense strand starting at position 602 of SEQ ID NO: 1561516
aguccugcucuugagcaua

SEQ ID NO: 1677756 - RNA, 19 nt, Artificial Sequence
  Description of Artificial Sequence: Synthetic oligonucleotide
  Antisense strand to SEQ ID NO: 1677755
uaugcucaagagcaggacu

SEQ ID NO: 1677757 - RNA, 19 nt, Artificial Sequence
  Description of Artificial Sequence: Synthetic oligonucleotide
  Sense strand starting at position 604 of SEQ ID NO: 1561516
uccugcucuugagcauaua

SEQ ID NO: 1677758 - RNA, 19 nt, Artificial Sequence
  Description of Artificial Sequence: Synthetic oligonucleotide
  Antisense strand to SEQ ID NO: 1677757
uauaugcucaagagcagga

SEQ ID NO: 1677759 - RNA, 19 nt, Artificial Sequence
  Description of Artificial Sequence: Synthetic oligonucleotide
  Sense strand starting at position 605 of SEQ ID NO: 1561516
ccugcucuugagcauauaa

SEQ ID NO: 1677760 - RNA, 19 nt, Artificial Sequence
  Description of Artificial Sequence: Synthetic oligonucleotide
  Antisense strand to SEQ ID NO: 1677759
uuauaugcucaagagcagg

SEQ ID NO: 1677761 - RNA, 19 nt, Artificial Sequence
  Description of Artificial Sequence: Synthetic oligonucleotide
  Sense strand starting at position 651 of SEQ ID NO: 1561516
ggguauaacuuagcaggau

SEQ ID NO: 1677762 - RNA, 19 nt, Artificial Sequence
  Description of Artificial Sequence: Synthetic oligonucleotide
  Antisense strand to SEQ ID NO: 1677761
auccugcuaaguuauaccc

SEQ ID NO: 1677763 - RNA, 19 nt, Artificial Sequence
  Description of Artificial Sequence: Synthetic oligonucleotide
  Sense strand starting at position 659 of SEQ ID NO: 1561516
cuuagcaggaucuguuuga

SEQ ID NO: 1677764 - RNA, 19 nt, Artificial Sequence
  Description of Artificial Sequence: Synthetic oligonucleotide
  Antisense strand to SEQ ID NO: 1677763
ucaaacagauccugcuaag

SEQ ID NO: 1677765 - RNA, 19 nt, Artificial Sequence
  Description of Artificial Sequence: Synthetic oligonucleotide
  Sense strand starting at position 660 of SEQ ID NO: 1561516
uuagcaggaucuguuugau

SEQ ID NO: 1677766 - RNA, 19 nt, Artificial Sequence
  Description of Artificial Sequence: Synthetic oligonucleotide
  Antisense strand to SEQ ID NO: 1677765
aucaaacagauccugcuaa

SEQ ID NO: 1677767 - RNA, 19 nt, Artificial Sequence
  Description of Artificial Sequence: Synthetic oligonucleotide
  Sense strand starting at position 663 of SEQ ID NO: 1561516
gcaggaucuguuugauucu

SEQ ID NO: 1677768 - RNA, 19 nt, Artificial Sequence
  Description of Artificial Sequence: Synthetic oligonucleotide
  Antisense strand to SEQ ID NO: 1677767
agaaucaaacagauccugc

SEQ ID NO: 1677769 - RNA, 19 nt, Artificial Sequence
  Description of Artificial Sequence: Synthetic oligonucleotide
  Sense strand starting at position 664 of SEQ ID NO: 1561516
caggaucuguuugauucuu

SEQ ID NO: 1677770 - RNA, 19 nt, Artificial Sequence
  Description of Artificial Sequence: Synthetic oligonucleotide
  Antisense strand to SEQ ID NO: 1677769
aagaaucaaacagauccug

SEQ ID NO: 1677771 - RNA, 19 nt, Artificial Sequence
  Description of Artificial Sequence: Synthetic oligonucleotide
  Sense strand starting at position 666 of SEQ ID NO: 1561516
ggaucuguuugauucuuga

SEQ ID NO: 1677772 - RNA, 19 nt, Artificial Sequence
  Description of Artificial Sequence: Synthetic oligonucleotide
  Antisense strand to SEQ ID NO: 1677771
ucaagaaucaaacagaucc

SEQ ID NO: 1677773 - RNA, 19 nt, Artificial Sequence
  Description of Artificial Sequence: Synthetic oligonucleotide
  Sense strand starting at position 670 of SEQ ID NO: 1561516
cuguuugauucuugacucu

SEQ ID NO: 1677774 - RNA, 19 nt, Artificial Sequence
  Description of Artificial Sequence: Synthetic oligonucleotide
  Antisense strand to SEQ ID NO: 1677773
agagucaagaaucaaacag

SEQ ID NO: 1677775 - RNA, 19 nt, Artificial Sequence
  Description of Artificial Sequence: Synthetic oligonucleotide
  Sense strand starting at position 745 of SEQ ID NO: 1561516
caaggauuuccuugcggca

SEQ ID NO: 1677776 - RNA, 19 nt, Artificial Sequence
  Description of Artificial Sequence: Synthetic oligonucleotide
  Antisense strand to SEQ ID NO: 1677775
ugccgcaaggaaauccuug

SEQ ID NO: 1677777 - RNA, 19 nt, Artificial Sequence
  Description of Artificial Sequence: Synthetic oligonucleotide
  Sense strand starting at position 757 of SEQ ID NO: 1561516
ugcggcacugcuugugaua

SEQ ID NO: 1677778 - RNA, 19 nt, Artificial Sequence
  Description of Artificial Sequence: Synthetic oligonucleotide
  Antisense strand to SEQ ID NO: 1677777
uaucacaagcagugccgca

SEQ ID NO: 1677779 - RNA, 19 nt, Artificial Sequence
  Description of Artificial Sequence: Synthetic oligonucleotide
  Sense strand starting at position 762 of SEQ ID NO: 1561516
cacugcuugugauacggaa

SEQ ID NO: 1677780 - RNA, 19 nt, Artificial Sequence
  Description of Artificial Sequence: Synthetic oligonucleotide
  Antisense strand to SEQ ID NO: 1677779
uuccguaucacaagcagug

SEQ ID NO: 1677781 - RNA, 19 nt, Artificial Sequence
  Description of Artificial Sequence: Synthetic oligonucleotide
  Sense strand starting at position 764 of SEQ ID NO: 1561516
cugcuugugauacggaaua

SEQ ID NO: 1677782 - RNA, 19 nt, Artificial Sequence
  Description of Artificial Sequence: Synthetic oligonucleotide
  Antisense strand to SEQ ID NO: 1677781
uauuccguaucacaagcag

SEQ ID NO: 1677783 - RNA, 19 nt, Artificial Sequence
  Description of Artificial Sequence: Synthetic oligonucleotide
  Sense strand starting at position 766 of SEQ ID NO: 1561516
gcuugugauacggaauaaa

SEQ ID NO: 1677784 - RNA, 19 nt, Artificial Sequence
  Description of Artificial Sequence: Synthetic oligonucleotide
  Antisense strand to SEQ ID NO: 1677783
uuuauuccguaucacaagc

SEQ ID NO: 1677785 - RNA, 19 nt, Artificial Sequence
  Description of Artificial Sequence: Synthetic oligonucleotide
  Sense strand starting at position 778 of SEQ ID NO: 1561516
gaauaaacgucauccucgu

SEQ ID NO: 1677786 - RNA, 19 nt, Artificial Sequence
  Description of Artificial Sequence: Synthetic oligonucleotide
  Antisense strand to SEQ ID NO: 1677785
acgaggaugacguuuauuc

SEQ ID NO: 1677787 - RNA, 19 nt, Artificial Sequence
  Description of Artificial Sequence: Synthetic oligonucleotide
  Sense strand starting at position 918 of SEQ ID NO: 1561516
ccuucucaagacugagaau

SEQ ID NO: 1677788 - RNA, 19 nt, Artificial Sequence
  Description of Artificial Sequence: Synthetic oligonucleotide
  Antisense strand to SEQ ID NO: 1677787
auucucagucuugagaagg

SEQ ID NO: 1677789 - RNA, 19 nt, Artificial Sequence
  Description of Artificial Sequence: Synthetic oligonucleotide
  Sense strand starting at position 921 of SEQ ID NO: 1561516
ucucaagacugagaauuua

SEQ ID NO: 1677790 - RNA, 19 nt, Artificial Sequence
  Description of Artificial Sequence: Synthetic oligonucleotide
  Antisense strand to SEQ ID NO: 1677789
uaaauucucagucuugaga

SEQ ID NO: 1677791 - RNA, 19 nt, Artificial Sequence
  Description of Artificial Sequence: Synthetic oligonucleotide
  Sense strand starting at position 1069 of SEQ ID NO: 1561516
cccggauguguuggaucua

SEQ ID NO: 1677792 - RNA, 19 nt, Artificial Sequence
  Description of Artificial Sequence: Synthetic oligonucleotide
  Antisense strand to SEQ ID NO: 1677791
uagauccaacacauccggg

SEQ ID NO: 1677793 - RNA, 19 nt, Artificial Sequence
  Description of Artificial Sequence: Synthetic oligonucleotide
  Sense strand starting at position 1074 of SEQ ID NO: 1561516
auguguuggaucuaggguu

SEQ ID NO: 1677794 - RNA, 19 nt, Artificial Sequence
  Description of Artificial Sequence: Synthetic oligonucleotide
  Antisense strand to SEQ ID NO: 1677793
aacccuagauccaacacau

SEQ ID NO: 1677795 - RNA, 19 nt, Artificial Sequence
  Description of Artificial Sequence: Synthetic oligonucleotide
  Sense strand starting at position 1082 of SEQ ID NO: 1561516
gaucuaggguugugggaau

SEQ ID NO: 1677796 - RNA, 19 nt, Artificial Sequence
  Description of Artificial Sequence: Synthetic oligonucleotide
  Antisense strand to SEQ ID NO: 1677795
auucccacaacccuagauc

SEQ ID NO: 1677797 - RNA, 19 nt, Artificial Sequence
  Description of Artificial Sequence: Synthetic oligonucleotide
  Sense strand starting at position 1345 of SEQ ID NO: 1561516
cugggugcacccuaggauu

SEQ ID NO: 1677798 - RNA, 19 nt, Artificial Sequence
  Description of Artificial Sequence: Synthetic oligonucleotide
  Antisense strand to SEQ ID NO: 1677797
aauccuagggugcacccag

SEQ ID NO: 1677799 - RNA, 19 nt, Artificial Sequence
  Description of Artificial Sequence: Synthetic oligonucleotide
  Sense strand starting at position 1584 of SEQ ID NO: 1561516
ggccgcgcuccagagagau

SEQ ID NO: 1677800 - RNA, 19 nt, Artificial Sequence
  Description of Artificial Sequence: Synthetic oligonucleotide
  Antisense strand to SEQ ID NO: 1677799
aucucucuggagcgcggcc

SEQ ID NO: 1677801 - RNA, 19 nt, Artificial Sequence
  Description of Artificial Sequence: Synthetic oligonucleotide
  Sense strand starting at position 1590 of SEQ ID NO: 1561516
gcuccagagagaugaggua

SEQ ID NO: 1677802 - RNA, 19 nt, Artificial Sequence
  Description of Artificial Sequence: Synthetic oligonucleotide
  Antisense strand to SEQ ID NO: 1677801
uaccucaucucucuggagc

SEQ ID NO: 1677803 - RNA, 19 nt, Artificial Sequence
  Description of Artificial Sequence: Synthetic oligonucleotide
  Sense strand starting at position 1938 of SEQ ID NO: 1561516
cgagaaauuucucacgguc

SEQ ID NO: 1677804 - RNA, 19 nt, Artificial Sequence
  Description of Artificial Sequence: Synthetic oligonucleotide
  Antisense strand to SEQ ID NO: 1677803
gaccgugagaaauuucucg

SEQ ID NO: 1677805 - RNA, 19 nt, Artificial Sequence
  Description of Artificial Sequence: Synthetic oligonucleotide
  Sense strand starting at position 1940 of SEQ ID NO: 1561516
agaaauuucucacggucuc

SEQ ID NO: 1677806 - RNA, 19 nt, Artificial Sequence
  Description of Artificial Sequence: Synthetic oligonucleotide
  Antisense strand to SEQ ID NO: 1677805
gagaccgugagaaauuucu

SEQ ID NO: 1677807 - RNA, 19 nt, Artificial Sequence
  Description of Artificial Sequence: Synthetic oligonucleotide
  Sense strand starting at position 2037 of SEQ ID NO: 1561516
uuauuugaauucggagaac

SEQ ID NO: 1677808 - RNA, 19 nt, Artificial Sequence
  Description of Artificial Sequence: Synthetic oligonucleotide
  Antisense strand to SEQ ID NO: 1677807
guucuccgaauucaaauaa

SEQ ID NO: 1677809 - RNA, 19 nt, Artificial Sequence
  Description of Artificial Sequence: Synthetic oligonucleotide
  Sense strand starting at position 2126 of SEQ ID NO: 1561516
augccauacugcuagagau

SEQ ID NO: 1677810 - RNA, 19 nt, Artificial Sequence
  Description of Artificial Sequence: Synthetic oligonucleotide
  Antisense strand to SEQ ID NO: 1677809
aucucuagcaguauggcau

SEQ ID NO: 1677811 - RNA, 19 nt, Artificial Sequence
  Description of Artificial Sequence: Synthetic oligonucleotide
  Sense strand starting at position 2128 of SEQ ID NO: 1561516
gccauacugcuagagauga

SEQ ID NO: 1677812 - RNA, 19 nt, Artificial Sequence
  Description of Artificial Sequence: Synthetic oligonucleotide
  Antisense strand to SEQ ID NO: 1677811
ucaucucuagcaguauggc

SEQ ID NO: 1677813 - RNA, 19 nt, Artificial Sequence
  Description of Artificial Sequence: Synthetic oligonucleotide
  Sense strand starting at position 3010 of SEQ ID NO: 1561516
ucuguauucugccaggaag

SEQ ID NO: 1677814 - RNA, 19 nt, Artificial Sequence
  Description of Artificial Sequence: Synthetic oligonucleotide
  Antisense strand to SEQ ID NO: 1677813
cuuccuggcagaauacaga

SEQ ID NO: 1677815 - RNA, 19 nt, Artificial Sequence
  Description of Artificial Sequence: Synthetic oligonucleotide
  Sense strand starting at position 3114 of SEQ ID NO: 1561516
uagguuuguccuggugaca

SEQ ID NO: 1677816 - RNA, 19 nt, Artificial Sequence
  Description of Artificial Sequence: Synthetic oligonucleotide
  Antisense strand to SEQ ID NO: 1677815
ugucaccaggacaaaccua

SEQ ID NO: 1677817 - RNA, 19 nt, Artificial Sequence
  Description of Artificial Sequence: Synthetic oligonucleotide
  Sense strand starting at position 3312 of SEQ ID NO: 1561516
gggugguguuuggaauguu

SEQ ID NO: 1677818 - RNA, 19 nt, Artificial Sequence
  Description of Artificial Sequence: Synthetic oligonucleotide
  Antisense strand to SEQ ID NO: 1677817
aacauuccaaacaccaccc

SEQ ID NO: 1677819 - RNA, 19 nt, Artificial Sequence
  Description of Artificial Sequence: Synthetic oligonucleotide
  Sense strand starting at position 3313 of SEQ ID NO: 1561516
ggugguguuuggaauguuu

SEQ ID NO: 1677820 - RNA, 19 nt, Artificial Sequence
  Description of Artificial Sequence: Synthetic oligonucleotide
  Antisense strand to SEQ ID NO: 1677819
aaacauuccaaacaccacc

SEQ ID NO: 1677821 - RNA, 19 nt, Artificial Sequence
  Description of Artificial Sequence: Synthetic oligonucleotide
  Sense strand starting at position 3485 of SEQ ID NO: 1561516
ugggauuacgagcacacau

SEQ ID NO: 1677822 - RNA, 19 nt, Artificial Sequence
  Description of Artificial Sequence: Synthetic oligonucleotide
  Antisense strand to SEQ ID NO: 1677821
augugugcucguaauccca

SEQ ID NO: 1677823 - RNA, 19 nt, Artificial Sequence
  Description of Artificial Sequence: Synthetic oligonucleotide
  Sense strand starting at position 3540 of SEQ ID NO: 1561516
ugaugucaaacucguaguu

SEQ ID NO: 1677824 - RNA, 19 nt, Artificial Sequence
  Description of Artificial Sequence: Synthetic oligonucleotide
  Antisense strand to SEQ ID NO: 1677823
aacuacgaguuugacauca

SEQ ID NO: 1677825 - RNA, 19 nt, Artificial Sequence
  Description of Artificial Sequence: Synthetic oligonucleotide
  Sense strand starting at position 3542 of SEQ ID NO: 1561516
augucaaacucguaguugu

SEQ ID NO: 1677826 - RNA, 19 nt, Artificial Sequence
  Description of Artificial Sequence: Synthetic oligonucleotide
  Antisense strand to SEQ ID NO: 1677825
acaacuacgaguuugacau

SEQ ID NO: 1677827 - RNA, 19 nt, Artificial Sequence
  Description of Artificial Sequence: Synthetic oligonucleotide
  Sense strand starting at position 3590 of SEQ ID NO: 1561516
agcugcaucggguaguaga

SEQ ID NO: 1677828 - RNA, 19 nt, Artificial Sequence
  Description of Artificial Sequence: Synthetic oligonucleotide
  Antisense strand to SEQ ID NO: 1677827
ucuacuacccgaugcagcu

SEQ ID NO: 1677829 - RNA, 19 nt, Artificial Sequence
  Description of Artificial Sequence: Synthetic oligonucleotide
  Sense strand starting at position 3923 of SEQ ID NO: 1561516
gauuccugguguggagaca

SEQ ID NO: 1677830 - RNA, 19 nt, Artificial Sequence
  Description of Artificial Sequence: Synthetic oligonucleotide
  Antisense strand to SEQ ID NO: 1677829
ugucuccacaccaggaauc

SEQ ID NO: 1677831 - RNA, 19 nt, Artificial Sequence
  Description of Artificial Sequence: Synthetic oligonucleotide
  Sense strand starting at position 16 of SEQ ID NO: 1561517
cccauaacugaaugaguca

SEQ ID NO: 1677832 - RNA, 19 nt, Artificial Sequence
  Description of Artificial Sequence: Synthetic oligonucleotide
  Antisense strand to SEQ ID NO: 1677831
ugacucauucaguuauggg

SEQ ID NO: 1677833 - RNA, 19 nt, Artificial Sequence
  Description of Artificial Sequence: Synthetic oligonucleotide
  Sense strand starting at position 127 of SEQ ID NO: 1561517
ugugauucucaccagcauc

SEQ ID NO: 1677834 - RNA, 19 nt, Artificial Sequence
  Description of Artificial Sequence: Synthetic oligonucleotide
  Antisense strand to SEQ ID NO: 1677833
gaugcuggugagaaucaca

SEQ ID NO: 1677835 - RNA, 19 nt, Artificial Sequence
  Description of Artificial Sequence: Synthetic oligonucleotide
  Sense strand starting at position 441 of SEQ ID NO: 1561517
cacgccagucugggaaaua

SEQ ID NO: 1677836 - RNA, 19 nt, Artificial Sequence
  Description of Artificial Sequence: Synthetic oligonucleotide
  Antisense strand to SEQ ID NO: 1677835
uauuucccagacuggcgug

SEQ ID NO: 1677837 - RNA, 19 nt, Artificial Sequence
  Description of Artificial Sequence: Synthetic oligonucleotide
  Sense strand starting at position 462 of SEQ ID NO: 1561517
gugagauucugucuuaaga

SEQ ID NO: 1677838 - RNA, 19 nt, Artificial Sequence
  Description of Artificial Sequence: Synthetic oligonucleotide
  Antisense strand to SEQ ID NO: 1677837
ucuuaagacagaaucucac

SEQ ID NO: 1677839 - RNA, 19 nt, Artificial Sequence
  Description of Artificial Sequence: Synthetic oligonucleotide
  Sense strand starting at position 525 of SEQ ID NO: 1561517
cgauguaauuauccauauc

SEQ ID NO: 1677840 - RNA, 19 nt, Artificial Sequence
  Description of Artificial Sequence: Synthetic oligonucleotide
  Antisense strand to SEQ ID NO: 1677839
gauauggauaauuacaucg

SEQ ID NO: 1677841 - RNA, 19 nt, Artificial Sequence
  Description of Artificial Sequence: Synthetic oligonucleotide
  Sense strand starting at position 1218 of SEQ ID NO: 1561517
acugguuucccucauucuu

SEQ ID NO: 1677842 - RNA, 19 nt, Artificial Sequence
  Description of Artificial Sequence: Synthetic oligonucleotide
  Antisense strand to SEQ ID NO: 1677841
aagaaugagggaaaccagu

SEQ ID NO: 1677843 - RNA, 19 nt, Artificial Sequence
  Description of Artificial Sequence: Synthetic oligonucleotide
  Sense strand starting at position 1760 of SEQ ID NO: 1561517
ggaccagccugugugauuu

SEQ ID NO: 1677844 - RNA, 19 nt, Artificial Sequence
  Description of Artificial Sequence: Synthetic oligonucleotide
  Antisense strand to SEQ ID NO: 1677843
aaaucacacaggcuggucc

SEQ ID NO: 1677845 - RNA, 19 nt, Artificial Sequence
  Description of Artificial Sequence: Synthetic oligonucleotide
  Sense strand starting at position 1801 of SEQ ID NO: 1561517
cagagucucgcggcaaagu

SEQ ID NO: 1677846 - RNA, 19 nt, Artificial Sequence
  Description of Artificial Sequence: Synthetic oligonucleotide
  Antisense strand to SEQ ID NO: 1677845
acuuugccgcgagacucug

SEQ ID NO: 1677847 - RNA, 19 nt, Artificial Sequence
  Description of Artificial Sequence: Synthetic oligonucleotide
  Sense strand starting at position 1809 of SEQ ID NO: 1561517
cgcggcaaagucugaauuu

SEQ ID NO: 1677848 - RNA, 19 nt, Artificial Sequence
  Description of Artificial Sequence: Synthetic oligonucleotide
  Antisense strand to SEQ ID NO: 1677847
aaauucagacuuugccgcg

SEQ ID NO: 1677849 - RNA, 19 nt, Artificial Sequence
  Description of Artificial Sequence: Synthetic oligonucleotide
  Sense strand starting at position 1854 of SEQ ID NO: 1561517
gacuuuaagggcuauacga

SEQ ID NO: 1677850 - RNA, 19 nt, Artificial Sequence
  Description of Artificial Sequence: Synthetic oligonucleotide
  Antisense strand to SEQ ID NO: 1677849
ucguauagcccuuaaaguc

SEQ ID NO: 1677851 - RNA, 19 nt, Artificial Sequence
  Description of Artificial Sequence: Synthetic oligonucleotide
  Sense strand starting at position 1915 of SEQ ID NO: 1561517
gcagguuuaaucuagauag

SEQ ID NO: 1677852 - RNA, 19 nt, Artificial Sequence
  Description of Artificial Sequence: Synthetic oligonucleotide
  Antisense strand to SEQ ID NO: 1677851
cuaucuagauuaaaccugc

SEQ ID NO: 1677853 - RNA, 19 nt, Artificial Sequence
  Description of Artificial Sequence: Synthetic oligonucleotide
  Sense strand starting at position 2223 of SEQ ID NO: 1561517
accaauggccaguaauaua

SEQ ID NO: 1677854 - RNA, 19 nt, Artificial Sequence
  Description of Artificial Sequence: Synthetic oligonucleotide
  Antisense strand to SEQ ID NO: 1677853
uauauuacuggccauuggu

SEQ ID NO: 1677855 - RNA, 19 nt, Artificial Sequence
  Description of Artificial Sequence: Synthetic oligonucleotide
  Sense strand starting at position 2242 of SEQ ID NO: 1561517
agcaaucaugcauauguaa

SEQ ID NO: 1677856 - RNA, 19 nt, Artificial Sequence
  Description of Artificial Sequence: Synthetic oligonucleotide
  Antisense strand to SEQ ID NO: 1677855
uuacauaugcaugauugcu

SEQ ID NO: 1677857 - RNA, 19 nt, Artificial Sequence
  Description of Artificial Sequence: Synthetic oligonucleotide
  Sense strand starting at position 2258 of SEQ ID NO: 1561517
uaaugaaggcgccauaaca

SEQ ID NO: 1677858 - RNA, 19 nt, Artificial Sequence
  Description of Artificial Sequence: Synthetic oligonucleotide
  Antisense strand to SEQ ID NO: 1677857
uguuauggcgccuucauua

SEQ ID NO: 1677859 - RNA, 19 nt, Artificial Sequence
  Description of Artificial Sequence: Synthetic oligonucleotide
  Sense strand starting at position 2299 of SEQ ID NO: 1561517
ggagcuucuggauagguga

SEQ ID NO: 1677860 - RNA, 19 nt, Artificial Sequence
  Description of Artificial Sequence: Synthetic oligonucleotide
  Antisense strand to SEQ ID NO: 1677859
ucaccuauccagaagcucc

SEQ ID NO: 1677861 - RNA, 19 nt, Artificial Sequence
  Description of Artificial Sequence: Synthetic oligonucleotide
  Sense strand starting at position 2422 of SEQ ID NO: 1561517
ucugucaacuuuguaauau

SEQ ID NO: 1677862 - RNA, 19 nt, Artificial Sequence
  Description of Artificial Sequence: Synthetic oligonucleotide
  Antisense strand to SEQ ID NO: 1677861
auauuacaaaguugacaga

SEQ ID NO: 1677863 - RNA, 19 nt, Artificial Sequence
  Description of Artificial Sequence: Synthetic oligonucleotide
  Sense strand starting at position 2450 of SEQ ID NO: 1561517
uacguaaaucuauguaaag

SEQ ID NO: 1677864 - RNA, 19 nt, Artificial Sequence
  Description of Artificial Sequence: Synthetic oligonucleotide
  Antisense strand to SEQ ID NO: 1677863
cuuuacauagauuuacgua

SEQ ID NO: 1677865 - RNA, 19 nt, Artificial Sequence
  Description of Artificial Sequence: Synthetic oligonucleotide
  Sense strand starting at position 2452 of SEQ ID NO: 1561517
cguaaaucuauguaaagug

SEQ ID NO: 1677866 - RNA, 19 nt, Artificial Sequence
  Description of Artificial Sequence: Synthetic oligonucleotide
  Antisense strand to SEQ ID NO: 1677865
cacuuuacauagauuuacg

SEQ ID NO: 1677867 - RNA, 19 nt, Artificial Sequence
  Description of Artificial Sequence: Synthetic oligonucleotide
  Sense strand starting at position 2544 of SEQ ID NO: 1561517
auaucugaucuguaagcac

SEQ ID NO: 1677868 - RNA, 19 nt, Artificial Sequence
  Description of Artificial Sequence: Synthetic oligonucleotide
  Antisense strand to SEQ ID NO: 1677867
gugcuuacagaucagauau

SEQ ID NO: 1677869 - RNA, 19 nt, Artificial Sequence
  Description of Artificial Sequence: Synthetic oligonucleotide
  Sense strand starting at position 2568 of SEQ ID NO: 1561517
acaaccucugcuugagacu

SEQ ID NO: 1677870 - RNA, 19 nt, Artificial Sequence
  Description of Artificial Sequence: Synthetic oligonucleotide
  Antisense strand to SEQ ID NO: 1677869
agucucaagcagagguugu

SEQ ID NO: 1677871 - RNA, 19 nt, Artificial Sequence
  Description of Artificial Sequence: Synthetic oligonucleotide
  Sense strand starting at position 2580 of SEQ ID NO: 1561517
ugagacuggcauugaaaug

SEQ ID NO: 1677872 - RNA, 19 nt, Artificial Sequence
  Description of Artificial Sequence: Synthetic oligonucleotide
  Antisense strand to SEQ ID NO: 1677871
cauuucaaugccagucuca

SEQ ID NO: 1677873 - RNA, 19 nt, Artificial Sequence
  Description of Artificial Sequence: Synthetic oligonucleotide
  Sense strand starting at position 2591 of SEQ ID NO: 1561517
uugaaaugugugcacuauu

SEQ ID NO: 1677874 - RNA, 19 nt, Artificial Sequence
  Description of Artificial Sequence: Synthetic oligonucleotide
  Antisense strand to SEQ ID NO: 1677873
aauagugcacacauuucaa

SEQ ID NO: 1677875 - RNA, 19 nt, Artificial Sequence
  Description of Artificial Sequence: Synthetic oligonucleotide
  Sense strand starting at position 2601 of SEQ ID NO: 1561517
ugcacuauugugggacuga

SEQ ID NO: 1677876 - RNA, 19 nt, Artificial Sequence
  Description of Artificial Sequence: Synthetic oligonucleotide
  Antisense strand to SEQ ID NO: 1677875
ucagucccacaauagugca

SEQ ID NO: 1677877 - RNA, 19 nt, Artificial Sequence
  Description of Artificial Sequence: Synthetic oligonucleotide
  Sense strand starting at position 2759 of SEQ ID NO: 1561517
uguguugugagagaacagu

SEQ ID NO: 1677878 - RNA, 19 nt, Artificial Sequence
  Description of Artificial Sequence: Synthetic oligonucleotide
  Antisense strand to SEQ ID NO: 1677877
acuguucucucacaacaca

SEQ ID NO: 1677879 - RNA, 19 nt, Artificial Sequence
  Description of Artificial Sequence: Synthetic oligonucleotide
  Sense strand starting at position 2993 of SEQ ID NO: 1561517
uucccuaaguaguuauaau

SEQ ID NO: 1677880 - RNA, 19 nt, Artificial Sequence
  Description of Artificial Sequence: Synthetic oligonucleotide
  Antisense strand to SEQ ID NO: 1677879
auuauaacuacuuagggaa

SEQ ID NO: 1677881 - RNA, 19 nt, Artificial Sequence
  Description of Artificial Sequence: Synthetic oligonucleotide
  Sense strand starting at position 3014 of SEQ ID NO: 1561517
ccucuaaaucuguguggag

SEQ ID NO: 1677882 - RNA, 19 nt, Artificial Sequence
  Description of Artificial Sequence: Synthetic oligonucleotide
  Antisense strand to SEQ ID NO: 1677881
cuccacacagauuuagagg

SEQ ID NO: 1677883 - RNA, 19 nt, Artificial Sequence
  Description of Artificial Sequence: Synthetic oligonucleotide
  Sense strand starting at position 3082 of SEQ ID NO: 1561517
acaagcugaucucuauaga

SEQ ID NO: 1677884 - RNA, 19 nt, Artificial Sequence
  Description of Artificial Sequence: Synthetic oligonucleotide
  Antisense strand to SEQ ID NO: 1677883
ucuauagagaucagcuugu

SEQ ID NO: 1677885 - RNA, 19 nt, Artificial Sequence
  Description of Artificial Sequence: Synthetic oligonucleotide
  Sense strand starting at position 3085 of SEQ ID NO: 1561517
agcugaucucuauagaagu

SEQ ID NO: 1677886 - RNA, 19 nt, Artificial Sequence
  Description of Artificial Sequence: Synthetic oligonucleotide
  Antisense strand to SEQ ID NO: 1677885
acuucuauagagaucagcu

SEQ ID NO: 1677887 - RNA, 19 nt, Artificial Sequence
  Description of Artificial Sequence: Synthetic oligonucleotide
  Sense strand starting at position 3129 of SEQ ID NO: 1561517
agugauacuccguaucuag

SEQ ID NO: 1677888 - RNA, 19 nt, Artificial Sequence
  Description of Artificial Sequence: Synthetic oligonucleotide
  Antisense strand to SEQ ID NO: 1677887
cuagauacggaguaucacu

SEQ ID NO: 1677889 - RNA, 19 nt, Artificial Sequence
  Description of Artificial Sequence: Synthetic oligonucleotide
  Sense strand starting at position 3132 of SEQ ID NO: 1561517
gauacuccguaucuagaua

SEQ ID NO: 1677890 - RNA, 19 nt, Artificial Sequence
  Description of Artificial Sequence: Synthetic oligonucleotide
  Antisense strand to SEQ ID NO: 1677889
uaucuagauacggaguauc

SEQ ID NO: 1677891 - RNA, 19 nt, Artificial Sequence
  Description of Artificial Sequence: Synthetic oligonucleotide
  Sense strand starting at position 3150 of SEQ ID NO: 1561517
aagcuaaagcacgaaugau

SEQ ID NO: 1677892 - RNA, 19 nt, Artificial Sequence
  Description of Artificial Sequence: Synthetic oligonucleotide
  Antisense strand to SEQ ID NO: 1677891
aucauucgugcuuuagcuu

SEQ ID NO: 1677893 - RNA, 19 nt, Artificial Sequence
  Description of Artificial Sequence: Synthetic oligonucleotide
  Sense strand starting at position 3159 of SEQ ID NO: 1561517
cacgaaugaugucuucuga

SEQ ID NO: 1677894 - RNA, 19 nt, Artificial Sequence
  Description of Artificial Sequence: Synthetic oligonucleotide
  Antisense strand to SEQ ID NO: 1677893
ucagaagacaucauucgug

SEQ ID NO: 1677895 - RNA, 19 nt, Artificial Sequence
  Description of Artificial Sequence: Synthetic oligonucleotide
  Sense strand starting at position 3168 of SEQ ID NO: 1561517
ugucuucugaggugacaag

SEQ ID NO: 1677896 - RNA, 19 nt, Artificial Sequence
  Description of Artificial Sequence: Synthetic oligonucleotide
  Antisense strand to SEQ ID NO: 1677895
cuugucaccucagaagaca

SEQ ID NO: 1677897 - RNA, 19 nt, Artificial Sequence
  Description of Artificial Sequence: Synthetic oligonucleotide
  Sense strand starting at position 3229 of SEQ ID NO: 1561517
ugugaugauaauggcaaua

SEQ ID NO: 1677898 - RNA, 19 nt, Artificial Sequence
  Description of Artificial Sequence: Synthetic oligonucleotide
  Antisense strand to SEQ ID NO: 1677897
uauugccauuaucaucaca

SEQ ID NO: 1677899 - RNA, 19 nt, Artificial Sequence
  Description of Artificial Sequence: Synthetic oligonucleotide
  Sense strand starting at position 3234 of SEQ ID NO: 1561517
ugauaauggcaauagcaau

SEQ ID NO: 1677900 - RNA, 19 nt, Artificial Sequence
  Description of Artificial Sequence: Synthetic oligonucleotide
  Antisense strand to SEQ ID NO: 1677899
auugcuauugccauuauca

SEQ ID NO: 1677901 - RNA, 19 nt, Artificial Sequence
  Description of Artificial Sequence: Synthetic oligonucleotide
  Sense strand starting at position 3240 of SEQ ID NO: 1561517
uggcaauagcaaugacuga

SEQ ID NO: 1677902 - RNA, 19 nt, Artificial Sequence
  Description of Artificial Sequence: Synthetic oligonucleotide
  Antisense strand to SEQ ID NO: 1677901
ucagucauugcuauugcca

SEQ ID NO: 1677903 - RNA, 19 nt, Artificial Sequence
  Description of Artificial Sequence: Synthetic oligonucleotide
  Sense strand starting at position 3262 of SEQ ID NO: 1561517
uucugaacacuaugugcaa

SEQ ID NO: 1677904 - RNA, 19 nt, Artificial Sequence
  Description of Artificial Sequence: Synthetic oligonucleotide
  Antisense strand to SEQ ID NO: 1677903
uugcacauaguguucagaa

SEQ ID NO: 1677905 - RNA, 19 nt, Artificial Sequence
  Description of Artificial Sequence: Synthetic oligonucleotide
  Sense strand starting at position 3290 of SEQ ID NO: 1561517
cggaauacuuuaccuguau

SEQ ID NO: 1677906 - RNA, 19 nt, Artificial Sequence
  Description of Artificial Sequence: Synthetic oligonucleotide
  Antisense strand to SEQ ID NO: 1677905
auacagguaaaguauuccg

SEQ ID NO: 1677907 - RNA, 19 nt, Artificial Sequence
  Description of Artificial Sequence: Synthetic oligonucleotide
  Sense strand starting at position 3291 of SEQ ID NO: 1561517
ggaauacuuuaccuguauu

SEQ ID NO: 1677908 - RNA, 19 nt, Artificial Sequence
  Description of Artificial Sequence: Synthetic oligonucleotide
  Antisense strand to SEQ ID NO: 1677907
aauacagguaaaguauucc

SEQ ID NO: 1677909 - RNA, 19 nt, Artificial Sequence
  Description of Artificial Sequence: Synthetic oligonucleotide
  Sense strand starting at position 3981 of SEQ ID NO: 1561517
ccuaaagaaucaguuaagu

SEQ ID NO: 1677910 - RNA, 19 nt, Artificial Sequence
  Description of Artificial Sequence: Synthetic oligonucleotide
  Antisense strand to SEQ ID NO: 1677909
acuuaacugauucuuuagg

SEQ ID NO: 1677911 - RNA, 19 nt, Artificial Sequence
  Description of Artificial Sequence: Synthetic oligonucleotide
  Sense strand starting at position 45 of SEQ ID NO: 1561518
gcaucacgguccucucaau

SEQ ID NO: 1677912 - RNA, 19 nt, Artificial Sequence
  Description of Artificial Sequence: Synthetic oligonucleotide
  Antisense strand to SEQ ID NO: 1677911
auugagaggaccgugaugc

SEQ ID NO: 1677913 - RNA, 19 nt, Artificial Sequence
  Description of Artificial Sequence: Synthetic oligonucleotide
  Sense strand starting at position 151 of SEQ ID NO: 1561518
gugcuacuggccugguaaa

SEQ ID NO: 1677914 - RNA, 19 nt, Artificial Sequence
  Description of Artificial Sequence: Synthetic oligonucleotide
  Antisense strand to SEQ ID NO: 1677913
uuuaccaggccaguagcac

SEQ ID NO: 1677915 - RNA, 19 nt, Artificial Sequence
  Description of Artificial Sequence: Synthetic oligonucleotide
  Sense strand starting at position 152 of SEQ ID NO: 1561518
ugcuacuggccugguaaau

SEQ ID NO: 1677916 - RNA, 19 nt, Artificial Sequence
  Description of Artificial Sequence: Synthetic oligonucleotide
  Antisense strand to SEQ ID NO: 1677915
auuuaccaggccaguagca

SEQ ID NO: 1677917 - RNA, 19 nt, Artificial Sequence
  Description of Artificial Sequence: Synthetic oligonucleotide
  Sense strand starting at position 301 of SEQ ID NO: 1561518
uuuccagacccauguguua

SEQ ID NO: 1677918 - RNA, 19 nt, Artificial Sequence
  Description of Artificial Sequence: Synthetic oligonucleotide
  Antisense strand to SEQ ID NO: 1677917
uaacacaugggucuggaaa

SEQ ID NO: 1677919 - RNA, 19 nt, Artificial Sequence
  Description of Artificial Sequence: Synthetic oligonucleotide
  Sense strand starting at position 330 of SEQ ID NO: 1561518
ucccuuagucccugacacu

SEQ ID NO: 1677920 - RNA, 19 nt, Artificial Sequence
  Description of Artificial Sequence: Synthetic oligonucleotide
  Antisense strand to SEQ ID NO: 1677919
agugucagggacuaaggga

SEQ ID NO: 1677921 - RNA, 19 nt, Artificial Sequence
  Description of Artificial Sequence: Synthetic oligonucleotide
  Sense strand starting at position 331 of SEQ ID NO: 1561518
cccuuagucccugacacuu

SEQ ID NO: 1677922 - RNA, 19 nt, Artificial Sequence
  Description of Artificial Sequence: Synthetic oligonucleotide
  Antisense strand to SEQ ID NO: 1677921
aagugucagggacuaaggg

SEQ ID NO: 1677923 - RNA, 19 nt, Artificial Sequence
  Description of Artificial Sequence: Synthetic oligonucleotide
  Sense strand starting at position 395 of SEQ ID NO: 1561518
ucaggaagauccuuuguuc

SEQ ID NO: 1677924 - RNA, 19 nt, Artificial Sequence
  Description of Artificial Sequence: Synthetic oligonucleotide
  Antisense strand to SEQ ID NO: 1677923
gaacaaaggaucuuccuga

SEQ ID NO: 1677925 - RNA, 19 nt, Artificial Sequence
  Description of Artificial Sequence: Synthetic oligonucleotide
  Sense strand starting at position 398 of SEQ ID NO: 1561518
ggaagauccuuuguuccug

SEQ ID NO: 1677926 - RNA, 19 nt, Artificial Sequence
  Description of Artificial Sequence: Synthetic oligonucleotide
  Antisense strand to SEQ ID NO: 1677925
caggaacaaaggaucuucc

SEQ ID NO: 1677927 - RNA, 19 nt, Artificial Sequence
  Description of Artificial Sequence: Synthetic oligonucleotide
  Sense strand starting at position 399 of SEQ ID NO: 1561518
gaagauccuuuguuccuga

SEQ ID NO: 1677928 - RNA, 19 nt, Artificial Sequence
  Description of Artificial Sequence: Synthetic oligonucleotide
  Antisense strand to SEQ ID NO: 1677927
ucaggaacaaaggaucuuc

SEQ ID NO: 1677929 - RNA, 19 nt, Artificial Sequence
  Description of Artificial Sequence: Synthetic oligonucleotide
  Sense strand starting at position 485 of SEQ ID NO: 1561518
gaucuagacguccaaguua

SEQ ID NO: 1677930 - RNA, 19 nt, Artificial Sequence
  Description of Artificial Sequence: Synthetic oligonucleotide
  Antisense strand to SEQ ID NO: 1677929
uaacuuggacgucuagauc

SEQ ID NO: 1677931 - RNA, 19 nt, Artificial Sequence
  Description of Artificial Sequence: Synthetic oligonucleotide
  Sense strand starting at position 568 of SEQ ID NO: 1561518
uuauucuccagguguggga

SEQ ID NO: 1677932 - RNA, 19 nt, Artificial Sequence
  Description of Artificial Sequence: Synthetic oligonucleotide
  Antisense strand to SEQ ID NO: 1677931
ucccacaccuggagaauaa

SEQ ID NO: 1677933 - RNA, 19 nt, Artificial Sequence
  Description of Artificial Sequence: Synthetic oligonucleotide
  Sense strand starting at position 584 of SEQ ID NO: 1561518
ggacgccugcgguuauuau

SEQ ID NO: 1677934 - RNA, 19 nt, Artificial Sequence
  Description of Artificial Sequence: Synthetic oligonucleotide
  Antisense strand to SEQ ID NO: 1677933
auaauaaccgcaggcgucc

SEQ ID NO: 1677935 - RNA, 19 nt, Artificial Sequence
  Description of Artificial Sequence: Synthetic oligonucleotide
  Sense strand starting at position 591 of SEQ ID NO: 1561518
ugcgguuauuaugcuaaua

SEQ ID NO: 1677936 - RNA, 19 nt, Artificial Sequence
  Description of Artificial Sequence: Synthetic oligonucleotide
  Antisense strand to SEQ ID NO: 1677935
uauuagcauaauaaccgca

SEQ ID NO: 1677937 - RNA, 19 nt, Artificial Sequence
  Description of Artificial Sequence: Synthetic oligonucleotide
  Sense strand starting at position 613 of SEQ ID NO: 1561518
aaacgaugaucauugaugu

SEQ ID NO: 1677938 - RNA, 19 nt, Artificial Sequence
  Description of Artificial Sequence: Synthetic oligonucleotide
  Antisense strand to SEQ ID NO: 1677937
acaucaaugaucaucguuu

SEQ ID NO: 1677939 - RNA, 19 nt, Artificial Sequence
  Description of Artificial Sequence: Synthetic oligonucleotide
  Sense strand starting at position 619 of SEQ ID NO: 1561518
ugaucauugauguggcacu

SEQ ID NO: 1677940 - RNA, 19 nt, Artificial Sequence
  Description of Artificial Sequence: Synthetic oligonucleotide
  Antisense strand to SEQ ID NO: 1677939
agugccacaucaaugauca

SEQ ID NO: 1677941 - RNA, 19 nt, Artificial Sequence
  Description of Artificial Sequence: Synthetic oligonucleotide
  Sense strand starting at position 676 of SEQ ID NO: 1561518
gagguugguucuguuauua

SEQ ID NO: 1677942 - RNA, 19 nt, Artificial Sequence
  Description of Artificial Sequence: Synthetic oligonucleotide
  Antisense strand to SEQ ID NO: 1677941
uaauaacagaaccaaccuc

SEQ ID NO: 1677943 - RNA, 19 nt, Artificial Sequence
  Description of Artificial Sequence: Synthetic oligonucleotide
  Sense strand starting at position 714 of SEQ ID NO: 1561518
ccgaggagugguggacuua

SEQ ID NO: 1677944 - RNA, 19 nt, Artificial Sequence
  Description of Artificial Sequence: Synthetic oligonucleotide
  Antisense strand to SEQ ID NO: 1677943
uaaguccaccacuccucgg

SEQ ID NO: 1677945 - RNA, 19 nt, Artificial Sequence
  Description of Artificial Sequence: Synthetic oligonucleotide
  Sense strand starting at position 715 of SEQ ID NO: 1561518
cgaggagugguggacuuaa

SEQ ID NO: 1677946 - RNA, 19 nt, Artificial Sequence
  Description of Artificial Sequence: Synthetic oligonucleotide
  Antisense strand to SEQ ID NO: 1677945
uuaaguccaccacuccucg

SEQ ID NO: 1677947 - RNA, 19 nt, Artificial Sequence
  Description of Artificial Sequence: Synthetic oligonucleotide
  Sense strand starting at position 874 of SEQ ID NO: 1561518
ggcucuguccuccacucaa

SEQ ID NO: 1677948 - RNA, 19 nt, Artificial Sequence
  Description of Artificial Sequence: Synthetic oligonucleotide
  Antisense strand to SEQ ID NO: 1677947
uugaguggaggacagagcc

SEQ ID NO: 1677949 - RNA, 19 nt, Artificial Sequence
  Description of Artificial Sequence: Synthetic oligonucleotide
  Sense strand starting at position 1013 of SEQ ID NO: 1561518
gaugcaaaguccuccagua

SEQ ID NO: 1677950 - RNA, 19 nt, Artificial Sequence
  Description of Artificial Sequence: Synthetic oligonucleotide
  Antisense strand to SEQ ID NO: 1677949
uacuggaggacuuugcauc

SEQ ID NO: 1677951 - RNA, 19 nt, Artificial Sequence
  Description of Artificial Sequence: Synthetic oligonucleotide
  Sense strand starting at position 1015 of SEQ ID NO: 1561518
ugcaaaguccuccaguauu

SEQ ID NO: 1677952 - RNA, 19 nt, Artificial Sequence
  Description of Artificial Sequence: Synthetic oligonucleotide
  Antisense strand to SEQ ID NO: 1677951
aauacuggaggacuuugca

SEQ ID NO: 1677953 - RNA, 19 nt, Artificial Sequence
  Description of Artificial Sequence: Synthetic oligonucleotide
  Sense strand starting at position 1096 of SEQ ID NO: 1561518
ccuaaacacggugauuagu

SEQ ID NO: 1677954 - RNA, 19 nt, Artificial Sequence
  Description of Artificial Sequence: Synthetic oligonucleotide
  Antisense strand to SEQ ID NO: 1677953
acuaaucaccguguuuagg

SEQ ID NO: 1677955 - RNA, 19 nt, Artificial Sequence
  Description of Artificial Sequence: Synthetic oligonucleotide
  Sense strand starting at position 1098 of SEQ ID NO: 1561518
uaaacacggugauuaguau

SEQ ID NO: 1677956 - RNA, 19 nt, Artificial Sequence
  Description of Artificial Sequence: Synthetic oligonucleotide
  Antisense strand to SEQ ID NO: 1677955
auacuaaucaccguguuua

SEQ ID NO: 1677957 - RNA, 19 nt, Artificial Sequence
  Description of Artificial Sequence: Synthetic oligonucleotide
  Sense strand starting at position 1104 of SEQ ID NO: 1561518
cggugauuaguaugugaca

SEQ ID NO: 1677958 - RNA, 19 nt, Artificial Sequence
  Description of Artificial Sequence: Synthetic oligonucleotide
  Antisense strand to SEQ ID NO: 1677957
ugucacauacuaaucaccg

SEQ ID NO: 1677959 - RNA, 19 nt, Artificial Sequence
  Description of Artificial Sequence: Synthetic oligonucleotide
  Sense strand starting at position 1105 of SEQ ID NO: 1561518
ggugauuaguaugugacaa

SEQ ID NO: 1677960 - RNA, 19 nt, Artificial Sequence
  Description of Artificial Sequence: Synthetic oligonucleotide
  Antisense strand to SEQ ID NO: 1677959
uugucacauacuaaucacc

SEQ ID NO: 1677961 - RNA, 19 nt, Artificial Sequence
  Description of Artificial Sequence: Synthetic oligonucleotide
  Sense strand starting at position 1106 of SEQ ID NO: 1561518
gugauuaguaugugacaag

SEQ ID NO: 1677962 - RNA, 19 nt, Artificial Sequence
  Description of Artificial Sequence: Synthetic oligonucleotide
  Antisense strand to SEQ ID NO: 1677961
cuugucacauacuaaucac

SEQ ID NO: 1677963 - RNA, 19 nt, Artificial Sequence
  Description of Artificial Sequence: Synthetic oligonucleotide
  Sense strand starting at position 2268 of SEQ ID NO: 1561518
ccucgagcucuuuaaccaa

SEQ ID NO: 1677964 - RNA, 19 nt, Artificial Sequence
  Description of Artificial Sequence: Synthetic oligonucleotide
  Antisense strand to SEQ ID NO: 1677963
uugguuaaagagcucgagg

SEQ ID NO: 1677965 - RNA, 19 nt, Artificial Sequence
  Description of Artificial Sequence: Synthetic oligonucleotide
  Sense strand starting at position 2993 of SEQ ID NO: 1561518
uuguguuacccugaacaug

SEQ ID NO: 1677966 - RNA, 19 nt, Artificial Sequence
  Description of Artificial Sequence: Synthetic oligonucleotide
  Antisense strand to SEQ ID NO: 1677965
cauguucaggguaacacaa

SEQ ID NO: 1677967 - RNA, 19 nt, Artificial Sequence
  Description of Artificial Sequence: Synthetic oligonucleotide
  Sense strand starting at position 3275 of SEQ ID NO: 1561518
gaauauguauacuugugua

SEQ ID NO: 1677968 - RNA, 19 nt, Artificial Sequence
  Description of Artificial Sequence: Synthetic oligonucleotide
  Antisense strand to SEQ ID NO: 1677967
uacacaaguauacauauuc

SEQ ID NO: 1677969 - RNA, 19 nt, Artificial Sequence
  Description of Artificial Sequence: Synthetic oligonucleotide
  Sense strand starting at position 3289 of SEQ ID NO: 1561518
guguauauuuacgucuauu

SEQ ID NO: 1677970 - RNA, 19 nt, Artificial Sequence
  Description of Artificial Sequence: Synthetic oligonucleotide
  Antisense strand to SEQ ID NO: 1677969
aauagacguaaauauacac

SEQ ID NO: 1677971 - RNA, 19 nt, Artificial Sequence
  Description of Artificial Sequence: Synthetic oligonucleotide
  Sense strand starting at position 3352 of SEQ ID NO: 1561518
gagaucuuguggcccauaa

SEQ ID NO: 1677972 - RNA, 19 nt, Artificial Sequence
  Description of Artificial Sequence: Synthetic oligonucleotide
  Antisense strand to SEQ ID NO: 1677971
uuaugggccacaagaucuc

SEQ ID NO: 1677973 - RNA, 19 nt, Artificial Sequence
  Description of Artificial Sequence: Synthetic oligonucleotide
  Sense strand starting at position 3354 of SEQ ID NO: 1561518
gaucuuguggcccauaaag

SEQ ID NO: 1677974 - RNA, 19 nt, Artificial Sequence
  Description of Artificial Sequence: Synthetic oligonucleotide
  Antisense strand to SEQ ID NO: 1677973
cuuuaugggccacaagauc

SEQ ID NO: 1677975 - RNA, 19 nt, Artificial Sequence
  Description of Artificial Sequence: Synthetic oligonucleotide
  Sense strand starting at position 3379 of SEQ ID NO: 1561518
auacuauccgacuaagguu

SEQ ID NO: 1677976 - RNA, 19 nt, Artificial Sequence
  Description of Artificial Sequence: Synthetic oligonucleotide
  Antisense strand to SEQ ID NO: 1677975
aaccuuagucggauaguau

SEQ ID NO: 1677977 - RNA, 19 nt, Artificial Sequence
  Description of Artificial Sequence: Synthetic oligonucleotide
  Sense strand starting at position 3439 of SEQ ID NO: 1561518
gugggaagccagugauuga

SEQ ID NO: 1677978 - RNA, 19 nt, Artificial Sequence
  Description of Artificial Sequence: Synthetic oligonucleotide
  Antisense strand to SEQ ID NO: 1677977
ucaaucacuggcuucccac

SEQ ID NO: 1677979 - RNA, 19 nt, Artificial Sequence
  Description of Artificial Sequence: Synthetic oligonucleotide
  Sense strand starting at position 3440 of SEQ ID NO: 1561518
ugggaagccagugauugau

SEQ ID NO: 1677980 - RNA, 19 nt, Artificial Sequence
  Description of Artificial Sequence: Synthetic oligonucleotide
  Antisense strand to SEQ ID NO: 1677979
aucaaucacuggcuuccca

SEQ ID NO: 1677981 - RNA, 19 nt, Artificial Sequence
  Description of Artificial Sequence: Synthetic oligonucleotide
  Sense strand starting at position 3443 of SEQ ID NO: 1561518
gaagccagugauugauuga

SEQ ID NO: 1677982 - RNA, 19 nt, Artificial Sequence
  Description of Artificial Sequence: Synthetic oligonucleotide
  Antisense strand to SEQ ID NO: 1677981
ucaaucaaucacuggcuuc

SEQ ID NO: 1677983 - RNA, 19 nt, Artificial Sequence
  Description of Artificial Sequence: Synthetic oligonucleotide
  Sense strand starting at position 3466 of SEQ ID NO: 1561518
uugauugauuugggacgga

SEQ ID NO: 1677984 - RNA, 19 nt, Artificial Sequence
  Description of Artificial Sequence: Synthetic oligonucleotide
  Antisense strand to SEQ ID NO: 1677983
uccgucccaaaucaaucaa

SEQ ID NO: 1677985 - RNA, 19 nt, Artificial Sequence
  Description of Artificial Sequence: Synthetic oligonucleotide
  Sense strand starting at position 3809 of SEQ ID NO: 1561518
guugcauagguggguauau

SEQ ID NO: 1677986 - RNA, 19 nt, Artificial Sequence
  Description of Artificial Sequence: Synthetic oligonucleotide
  Antisense strand to SEQ ID NO: 1677985
auauacccaccuaugcaac

SEQ ID NO: 1677987 - RNA, 19 nt, Artificial Sequence
  Description of Artificial Sequence: Synthetic oligonucleotide
  Sense strand starting at position 3856 of SEQ ID NO: 1561518
ucuuucuucccaggugacu

SEQ ID NO: 1677988 - RNA, 19 nt, Artificial Sequence
  Description of Artificial Sequence: Synthetic oligonucleotide
  Antisense strand to SEQ ID NO: 1677987
agucaccugggaagaaaga

SEQ ID NO: 1677989 - RNA, 19 nt, Artificial Sequence
  Description of Artificial Sequence: Synthetic oligonucleotide
  Sense strand starting at position 3981 of SEQ ID NO: 1561518
agauacuacuauuaggacu

SEQ ID NO: 1677990 - RNA, 19 nt, Artificial Sequence
  Description of Artificial Sequence: Synthetic oligonucleotide
  Antisense strand to SEQ ID NO: 1677989
aguccuaauaguaguaucu

SEQ ID NO: 1677991 - RNA, 19 nt, Artificial Sequence
  Description of Artificial Sequence: Synthetic oligonucleotide
  Sense strand starting at position 1076 of SEQ ID NO: 1561519
ucucuaguugccuaaguga

SEQ ID NO: 1677992 - RNA, 19 nt, Artificial Sequence
  Description of Artificial Sequence: Synthetic oligonucleotide
  Antisense strand to SEQ ID NO: 1677991
ucacuuaggcaacuagaga

SEQ ID NO: 1677993 - RNA, 19 nt, Artificial Sequence
  Description of Artificial Sequence: Synthetic oligonucleotide
  Sense strand starting at position 1193 of SEQ ID NO: 1561519
cagucauagcugcauauga

SEQ ID NO: 1677994 - RNA, 19 nt, Artificial Sequence
  Description of Artificial Sequence: Synthetic oligonucleotide
  Antisense strand to SEQ ID NO: 1677993
ucauaugcagcuaugacug

SEQ ID NO: 1677995 - RNA, 19 nt, Artificial Sequence
  Description of Artificial Sequence: Synthetic oligonucleotide
  Sense strand starting at position 1195 of SEQ ID NO: 1561519
gucauagcugcauaugaug

SEQ ID NO: 1677996 - RNA, 19 nt, Artificial Sequence
  Description of Artificial Sequence: Synthetic oligonucleotide
  Antisense strand to SEQ ID NO: 1677995
caucauaugcagcuaugac

SEQ ID NO: 1677997 - RNA, 19 nt, Artificial Sequence
  Description of Artificial Sequence: Synthetic oligonucleotide
  Sense strand starting at position 1284 of SEQ ID NO: 1561519
ccauuacucuugguacauc

SEQ ID NO: 1677998 - RNA, 19 nt, Artificial Sequence
  Description of Artificial Sequence: Synthetic oligonucleotide
  Antisense strand to SEQ ID NO: 1677997
gauguaccaagaguaaugg

SEQ ID NO: 1677999 - RNA, 19 nt, Artificial Sequence
  Description of Artificial Sequence: Synthetic oligonucleotide
  Sense strand starting at position 1307 of SEQ ID NO: 1561519
accaaagcauuccuggaau

SEQ ID NO: 1678000 - RNA, 19 nt, Artificial Sequence
  Description of Artificial Sequence: Synthetic oligonucleotide
  Antisense strand to SEQ ID NO: 1677999
auuccaggaaugcuuuggu

SEQ ID NO: 1678001 - RNA, 19 nt, Artificial Sequence
  Description of Artificial Sequence: Synthetic oligonucleotide
  Sense strand starting at position 1318 of SEQ ID NO: 1561519
ccuggaauccacugcagua

SEQ ID NO: 1678002 - RNA, 19 nt, Artificial Sequence
  Description of Artificial Sequence: Synthetic oligonucleotide
  Antisense strand to SEQ ID NO: 1678001
uacugcaguggauuccagg

SEQ ID NO: 1678003 - RNA, 19 nt, Artificial Sequence
  Description of Artificial Sequence: Synthetic oligonucleotide
  Sense strand starting at position 1515 of SEQ ID NO: 1561519
agucacaguuccucaaacu

SEQ ID NO: 1678004 - RNA, 19 nt, Artificial Sequence
  Description of Artificial Sequence: Synthetic oligonucleotide
  Antisense strand to SEQ ID NO: 1678003
aguuugaggaacugugacu

SEQ ID NO: 1678005 - RNA, 19 nt, Artificial Sequence
  Description of Artificial Sequence: Synthetic oligonucleotide
  Sense strand starting at position 1534 of SEQ ID NO: 1561519
cugcucuguguugaugaga

SEQ ID NO: 1678006 - RNA, 19 nt, Artificial Sequence
  Description of Artificial Sequence: Synthetic oligonucleotide
  Antisense strand to SEQ ID NO: 1678005
ucucaucaacacagagcag

SEQ ID NO: 1678007 - RNA, 19 nt, Artificial Sequence
  Description of Artificial Sequence: Synthetic oligonucleotide
  Sense strand starting at position 1710 of SEQ ID NO: 1561519
acgauucggagucggagaa

SEQ ID NO: 1678008 - RNA, 19 nt, Artificial Sequence
  Description of Artificial Sequence: Synthetic oligonucleotide
  Antisense strand to SEQ ID NO: 1678007
uucuccgacuccgaaucgu

SEQ ID NO: 1678009 - RNA, 19 nt, Artificial Sequence
  Description of Artificial Sequence: Synthetic oligonucleotide
  Sense strand starting at position 1711 of SEQ ID NO: 1561519
cgauucggagucggagaaa

SEQ ID NO: 1678010 - RNA, 19 nt, Artificial Sequence
  Description of Artificial Sequence: Synthetic oligonucleotide
  Antisense strand to SEQ ID NO: 1678009
uuucuccgacuccgaaucg

SEQ ID NO: 1678011 - RNA, 19 nt, Artificial Sequence
  Description of Artificial Sequence: Synthetic oligonucleotide
  Sense strand starting at position 1937 of SEQ ID NO: 1561519
ccacacaagcguuacagaa

SEQ ID NO: 1678012 - RNA, 19 nt, Artificial Sequence
  Description of Artificial Sequence: Synthetic oligonucleotide
  Antisense strand to SEQ ID NO: 1678011
uucuguaacgcuugugugg

SEQ ID NO: 1678013 - RNA, 19 nt, Artificial Sequence
  Description of Artificial Sequence: Synthetic oligonucleotide
  Sense strand starting at position 2060 of SEQ ID NO: 1561519
gcccucauuggguaugcaa

SEQ ID NO: 1678014 - RNA, 19 nt, Artificial Sequence
  Description of Artificial Sequence: Synthetic oligonucleotide
  Antisense strand to SEQ ID NO: 1678013
uugcauacccaaugagggc

SEQ ID NO: 1678015 - RNA, 19 nt, Artificial Sequence
  Description of Artificial Sequence: Synthetic oligonucleotide
  Sense strand starting at position 2082 of SEQ ID NO: 1561519
auagguuuguggguagagu

SEQ ID NO: 1678016 - RNA, 19 nt, Artificial Sequence
  Description of Artificial Sequence: Synthetic oligonucleotide
  Antisense strand to SEQ ID NO: 1678015
acucuacccacaaaccuau

SEQ ID NO: 1678017 - RNA, 19 nt, Artificial Sequence
  Description of Artificial Sequence: Synthetic oligonucleotide
  Sense strand starting at position 2101 of SEQ ID NO: 1561519
gugguucccacugagcuau

SEQ ID NO: 1678018 - RNA, 19 nt, Artificial Sequence
  Description of Artificial Sequence: Synthetic oligonucleotide
  Antisense strand to SEQ ID NO: 1678017
auagcucagugggaaccac

SEQ ID NO: 1678019 - RNA, 19 nt, Artificial Sequence
  Description of Artificial Sequence: Synthetic oligonucleotide
  Sense strand starting at position 2173 of SEQ ID NO: 1561519
gggccaaguuguuugggaa

SEQ ID NO: 1678020 - RNA, 19 nt, Artificial Sequence
  Description of Artificial Sequence: Synthetic oligonucleotide
  Antisense strand to SEQ ID NO: 1678019
uucccaaacaacuuggccc

SEQ ID NO: 1678021 - RNA, 19 nt, Artificial Sequence
  Description of Artificial Sequence: Synthetic oligonucleotide
  Sense strand starting at position 2174 of SEQ ID NO: 1561519
ggccaaguuguuugggaaa

SEQ ID NO: 1678022 - RNA, 19 nt, Artificial Sequence
  Description of Artificial Sequence: Synthetic oligonucleotide
  Antisense strand to SEQ ID NO: 1678021
uuucccaaacaacuuggcc

SEQ ID NO: 1678023 - RNA, 19 nt, Artificial Sequence
  Description of Artificial Sequence: Synthetic oligonucleotide
  Sense strand starting at position 2564 of SEQ ID NO: 1561519
gaccuagauucccuggagu

SEQ ID NO: 1678024 - RNA, 19 nt, Artificial Sequence
  Description of Artificial Sequence: Synthetic oligonucleotide
  Antisense strand to SEQ ID NO: 1678023
acuccagggaaucuagguc

SEQ ID NO: 1678025 - RNA, 19 nt, Artificial Sequence
  Description of Artificial Sequence: Synthetic oligonucleotide
  Sense strand starting at position 2566 of SEQ ID NO: 1561519
ccuagauucccuggagugu

SEQ ID NO: 1678026 - RNA, 19 nt, Artificial Sequence
  Description of Artificial Sequence: Synthetic oligonucleotide
  Antisense strand to SEQ ID NO: 1678025
acacuccagggaaucuagg

SEQ ID NO: 1678027 - RNA, 19 nt, Artificial Sequence
  Description of Artificial Sequence: Synthetic oligonucleotide
  Sense strand starting at position 2567 of SEQ ID NO: 1561519
cuagauucccuggagugua

SEQ ID NO: 1678028 - RNA, 19 nt, Artificial Sequence
  Description of Artificial Sequence: Synthetic oligonucleotide
  Antisense strand to SEQ ID NO: 1678027
uacacuccagggaaucuag

SEQ ID NO: 1678029 - RNA, 19 nt, Artificial Sequence
  Description of Artificial Sequence: Synthetic oligonucleotide
  Sense strand starting at position 2598 of SEQ ID NO: 1561519
cgcagaaauguugagacau

SEQ ID NO: 1678030 - RNA, 19 nt, Artificial Sequence
  Description of Artificial Sequence: Synthetic oligonucleotide
  Antisense strand to SEQ ID NO: 1678029
augucucaacauuucugcg

SEQ ID NO: 1678031 - RNA, 19 nt, Artificial Sequence
  Description of Artificial Sequence: Synthetic oligonucleotide
  Sense strand starting at position 2600 of SEQ ID NO: 1561519
cagaaauguugagacauuu

SEQ ID NO: 1678032 - RNA, 19 nt, Artificial Sequence
  Description of Artificial Sequence: Synthetic oligonucleotide
  Antisense strand to SEQ ID NO: 1678031
aaaugucucaacauuucug

SEQ ID NO: 1678033 - RNA, 19 nt, Artificial Sequence
  Description of Artificial Sequence: Synthetic oligonucleotide
  Sense strand starting at position 2734 of SEQ ID NO: 1561519
gcacucaagcuuuacagua

SEQ ID NO: 1678034 - RNA, 19 nt, Artificial Sequence
  Description of Artificial Sequence: Synthetic oligonucleotide
  Antisense strand to SEQ ID NO: 1678033
uacuguaaagcuugagugc

SEQ ID NO: 1678035 - RNA, 19 nt, Artificial Sequence
  Description of Artificial Sequence: Synthetic oligonucleotide
  Sense strand starting at position 2837 of SEQ ID NO: 1561519
uguggagucucccugaaac

SEQ ID NO: 1678036 - RNA, 19 nt, Artificial Sequence
  Description of Artificial Sequence: Synthetic oligonucleotide
  Antisense strand to SEQ ID NO: 1678035
guuucagggagacuccaca

SEQ ID NO: 1678037 - RNA, 19 nt, Artificial Sequence
  Description of Artificial Sequence: Synthetic oligonucleotide
  Sense strand starting at position 2890 of SEQ ID NO: 1561519
cuggguaaucagugauguc

SEQ ID NO: 1678038 - RNA, 19 nt, Artificial Sequence
  Description of Artificial Sequence: Synthetic oligonucleotide
  Antisense strand to SEQ ID NO: 1678037
gacaucacugauuacccag

SEQ ID NO: 1678039 - RNA, 19 nt, Artificial Sequence
  Description of Artificial Sequence: Synthetic oligonucleotide
  Sense strand starting at position 2891 of SEQ ID NO: 1561519
uggguaaucagugaugucu

SEQ ID NO: 1678040 - RNA, 19 nt, Artificial Sequence
  Description of Artificial Sequence: Synthetic oligonucleotide
  Antisense strand to SEQ ID NO: 1678039
agacaucacugauuaccca

SEQ ID NO: 1678041 - RNA, 19 nt, Artificial Sequence
  Description of Artificial Sequence: Synthetic oligonucleotide
  Sense strand starting at position 2960 of SEQ ID NO: 1561519
guaaguauggugucugugu

SEQ ID NO: 1678042 - RNA, 19 nt, Artificial Sequence
  Description of Artificial Sequence: Synthetic oligonucleotide
  Antisense strand to SEQ ID NO: 1678041
acacagacaccauacuuac

SEQ ID NO: 1678043 - RNA, 19 nt, Artificial Sequence
  Description of Artificial Sequence: Synthetic oligonucleotide
  Sense strand starting at position 2974 of SEQ ID NO: 1561519
uguguuaggaggugagauu

SEQ ID NO: 1678044 - RNA, 19 nt, Artificial Sequence
  Description of Artificial Sequence: Synthetic oligonucleotide
  Antisense strand to SEQ ID NO: 1678043
aaucucaccuccuaacaca

SEQ ID NO: 1678045 - RNA, 19 nt, Artificial Sequence
  Description of Artificial Sequence: Synthetic oligonucleotide
  Sense strand starting at position 2975 of SEQ ID NO: 1561519
guguuaggaggugagauua

SEQ ID NO: 1678046 - RNA, 19 nt, Artificial Sequence
  Description of Artificial Sequence: Synthetic oligonucleotide
  Antisense strand to SEQ ID NO: 1678045
uaaucucaccuccuaacac

SEQ ID NO: 1678047 - RNA, 19 nt, Artificial Sequence
  Description of Artificial Sequence: Synthetic oligonucleotide
  Sense strand starting at position 3023 of SEQ ID NO: 1561519
aauaaugauuccguaguua

SEQ ID NO: 1678048 - RNA, 19 nt, Artificial Sequence
  Description of Artificial Sequence: Synthetic oligonucleotide
  Antisense strand to SEQ ID NO: 1678047
uaacuacggaaucauuauu

SEQ ID NO: 1678049 - RNA, 19 nt, Artificial Sequence
  Description of Artificial Sequence: Synthetic oligonucleotide
  Sense strand starting at position 3108 of SEQ ID NO: 1561519
aguaaaguuugagccugaa

SEQ ID NO: 1678050 - RNA, 19 nt, Artificial Sequence
  Description of Artificial Sequence: Synthetic oligonucleotide
  Antisense strand to SEQ ID NO: 1678049
uucaggcucaaacuuuacu

SEQ ID NO: 1678051 - RNA, 19 nt, Artificial Sequence
  Description of Artificial Sequence: Synthetic oligonucleotide
  Sense strand starting at position 3111 of SEQ ID NO: 1561519
aaaguuugagccugaauac

SEQ ID NO: 1678052 - RNA, 19 nt, Artificial Sequence
  Description of Artificial Sequence: Synthetic oligonucleotide
  Antisense strand to SEQ ID NO: 1678051
guauucaggcucaaacuuu

SEQ ID NO: 1678053 - RNA, 19 nt, Artificial Sequence
  Description of Artificial Sequence: Synthetic oligonucleotide
  Sense strand starting at position 3112 of SEQ ID NO: 1561519
aaguuugagccugaauacu

SEQ ID NO: 1678054 - RNA, 19 nt, Artificial Sequence
  Description of Artificial Sequence: Synthetic oligonucleotide
  Antisense strand to SEQ ID NO: 1678053
aguauucaggcucaaacuu

SEQ ID NO: 1678055 - RNA, 19 nt, Artificial Sequence
  Description of Artificial Sequence: Synthetic oligonucleotide
  Sense strand starting at position 3149 of SEQ ID NO: 1561519
ugaaguuaagcauaugguu

SEQ ID NO: 1678056 - RNA, 19 nt, Artificial Sequence
  Description of Artificial Sequence: Synthetic oligonucleotide
  Antisense strand to SEQ ID NO: 1678055
aaccauaugcuuaacuuca

SEQ ID NO: 1678057 - RNA, 19 nt, Artificial Sequence
  Description of Artificial Sequence: Synthetic oligonucleotide
  Sense strand starting at position 3169 of SEQ ID NO: 1561519
uguugugaucuugaccaca

SEQ ID NO: 1678058 - RNA, 19 nt, Artificial Sequence
  Description of Artificial Sequence: Synthetic oligonucleotide
  Antisense strand to SEQ ID NO: 1678057
uguggucaagaucacaaca

SEQ ID NO: 1678059 - RNA, 19 nt, Artificial Sequence
  Description of Artificial Sequence: Synthetic oligonucleotide
  Sense strand starting at position 3171 of SEQ ID NO: 1561519
uugugaucuugaccacacu

SEQ ID NO: 1678060 - RNA, 19 nt, Artificial Sequence
  Description of Artificial Sequence: Synthetic oligonucleotide
  Antisense strand to SEQ ID NO: 1678059
aguguggucaagaucacaa

SEQ ID NO: 1678061 - RNA, 19 nt, Artificial Sequence
  Description of Artificial Sequence: Synthetic oligonucleotide
  Sense strand starting at position 3172 of SEQ ID NO: 1561519
ugugaucuugaccacacuu

SEQ ID NO: 1678062 - RNA, 19 nt, Artificial Sequence
  Description of Artificial Sequence: Synthetic oligonucleotide
  Antisense strand to SEQ ID NO: 1678061
aaguguggucaagaucaca

SEQ ID NO: 1678063 - RNA, 19 nt, Artificial Sequence
  Description of Artificial Sequence: Synthetic oligonucleotide
  Sense strand starting at position 3275 of SEQ ID NO: 1561519
uugugcugucuugauaauu

SEQ ID NO: 1678064 - RNA, 19 nt, Artificial Sequence
  Description of Artificial Sequence: Synthetic oligonucleotide
  Antisense strand to SEQ ID NO: 1678063
aauuaucaagacagcacaa

SEQ ID NO: 1678065 - RNA, 19 nt, Artificial Sequence
  Description of Artificial Sequence: Synthetic oligonucleotide
  Sense strand starting at position 3353 of SEQ ID NO: 1561519
guguuaguagcaugaaaga

SEQ ID NO: 1678066 - RNA, 19 nt, Artificial Sequence
  Description of Artificial Sequence: Synthetic oligonucleotide
  Antisense strand to SEQ ID NO: 1678065
ucuuucaugcuacuaacac

SEQ ID NO: 1678067 - RNA, 19 nt, Artificial Sequence
  Description of Artificial Sequence: Synthetic oligonucleotide
  Sense strand starting at position 3409 of SEQ ID NO: 1561519
ggacauguccugcauauaa

SEQ ID NO: 1678068 - RNA, 19 nt, Artificial Sequence
  Description of Artificial Sequence: Synthetic oligonucleotide
  Antisense strand to SEQ ID NO: 1678067
uuauaugcaggacaugucc

SEQ ID NO: 1678069 - RNA, 19 nt, Artificial Sequence
  Description of Artificial Sequence: Synthetic oligonucleotide
  Sense strand starting at position 3411 of SEQ ID NO: 1561519
acauguccugcauauaaug

SEQ ID NO: 1678070 - RNA, 19 nt, Artificial Sequence
  Description of Artificial Sequence: Synthetic oligonucleotide
  Antisense strand to SEQ ID NO: 1678069
cauuauaugcaggacaugu

SEQ ID NO: 1678071 - RNA, 19 nt, Artificial Sequence
  Description of Artificial Sequence: Synthetic oligonucleotide
  Sense strand starting at position 86 of SEQ ID NO: 1561520
cuaucaguccaagggcauu

SEQ ID NO: 1678072 - RNA, 19 nt, Artificial Sequence
  Description of Artificial Sequence: Synthetic oligonucleotide
  Antisense strand to SEQ ID NO: 1678071
aaugcccuuggacugauag

SEQ ID NO: 1678073 - RNA, 19 nt, Artificial Sequence
  Description of Artificial Sequence: Synthetic oligonucleotide
  Sense strand starting at position 106 of SEQ ID NO: 1561520
aucuguuuccauugagagg

SEQ ID NO: 1678074 - RNA, 19 nt, Artificial Sequence
  Description of Artificial Sequence: Synthetic oligonucleotide
  Antisense strand to SEQ ID NO: 1678073
ccucucaauggaaacagau

SEQ ID NO: 1678075 - RNA, 19 nt, Artificial Sequence
  Description of Artificial Sequence: Synthetic oligonucleotide
  Sense strand starting at position 194 of SEQ ID NO: 1561520
agcagacauagccauggua

SEQ ID NO: 1678076 - RNA, 19 nt, Artificial Sequence
  Description of Artificial Sequence: Synthetic oligonucleotide
  Antisense strand to SEQ ID NO: 1678075
uaccauggcuaugucugcu

SEQ ID NO: 1678077 - RNA, 19 nt, Artificial Sequence
  Description of Artificial Sequence: Synthetic oligonucleotide
  Sense strand starting at position 196 of SEQ ID NO: 1561520
cagacauagccaugguaga

SEQ ID NO: 1678078 - RNA, 19 nt, Artificial Sequence
  Description of Artificial Sequence: Synthetic oligonucleotide
  Antisense strand to SEQ ID NO: 1678077
ucuaccauggcuaugucug

SEQ ID NO: 1678079 - RNA, 19 nt, Artificial Sequence
  Description of Artificial Sequence: Synthetic oligonucleotide
  Sense strand starting at position 197 of SEQ ID NO: 1561520
agacauagccaugguagau

SEQ ID NO: 1678080 - RNA, 19 nt, Artificial Sequence
  Description of Artificial Sequence: Synthetic oligonucleotide
  Antisense strand to SEQ ID NO: 1678079
aucuaccauggcuaugucu

SEQ ID NO: 1678081 - RNA, 19 nt, Artificial Sequence
  Description of Artificial Sequence: Synthetic oligonucleotide
  Sense strand starting at position 201 of SEQ ID NO: 1561520
auagccaugguagauauau

SEQ ID NO: 1678082 - RNA, 19 nt, Artificial Sequence
  Description of Artificial Sequence: Synthetic oligonucleotide
  Antisense strand to SEQ ID NO: 1678081
auauaucuaccauggcuau

SEQ ID NO: 1678083 - RNA, 19 nt, Artificial Sequence
  Description of Artificial Sequence: Synthetic oligonucleotide
  Sense strand starting at position 209 of SEQ ID NO: 1561520
gguagauauauugguuuau

SEQ ID NO: 1678084 - RNA, 19 nt, Artificial Sequence
  Description of Artificial Sequence: Synthetic oligonucleotide
  Antisense strand to SEQ ID NO: 1678083
auaaaccaauauaucuacc

SEQ ID NO: 1678085 - RNA, 19 nt, Artificial Sequence
  Description of Artificial Sequence: Synthetic oligonucleotide
  Sense strand starting at position 334 of SEQ ID NO: 1561520
cuaucucugugccuagaga

SEQ ID NO: 1678086 - RNA, 19 nt, Artificial Sequence
  Description of Artificial Sequence: Synthetic oligonucleotide
  Antisense strand to SEQ ID NO: 1678085
ucucuaggcacagagauag

SEQ ID NO: 1678087 - RNA, 19 nt, Artificial Sequence
  Description of Artificial Sequence: Synthetic oligonucleotide
  Sense strand starting at position 393 of SEQ ID NO: 1561520
guaucagggaauuguucuu

SEQ ID NO: 1678088 - RNA, 19 nt, Artificial Sequence
  Description of Artificial Sequence: Synthetic oligonucleotide
  Antisense strand to SEQ ID NO: 1678087
aagaacaauucccugauac

SEQ ID NO: 1678089 - RNA, 19 nt, Artificial Sequence
  Description of Artificial Sequence: Synthetic oligonucleotide
  Sense strand starting at position 499 of SEQ ID NO: 1561520
guaucuaaaguguacaaua

SEQ ID NO: 1678090 - RNA, 19 nt, Artificial Sequence
  Description of Artificial Sequence: Synthetic oligonucleotide
  Antisense strand to SEQ ID NO: 1678089
uauuguacacuuuagauac

SEQ ID NO: 1678091 - RNA, 19 nt, Artificial Sequence
  Description of Artificial Sequence: Synthetic oligonucleotide
  Sense strand starting at position 656 of SEQ ID NO: 1561520
gcuugagagaacugugaaa

SEQ ID NO: 1678092 - RNA, 19 nt, Artificial Sequence
  Description of Artificial Sequence: Synthetic oligonucleotide
  Antisense strand to SEQ ID NO: 1678091
uuucacaguucucucaagc

SEQ ID NO: 1678093 - RNA, 19 nt, Artificial Sequence
  Description of Artificial Sequence: Synthetic oligonucleotide
  Sense strand starting at position 693 of SEQ ID NO: 1561520
ucuccuguggagugugaaa

SEQ ID NO: 1678094 - RNA, 19 nt, Artificial Sequence
  Description of Artificial Sequence: Synthetic oligonucleotide
  Antisense strand to SEQ ID NO: 1678093
uuucacacuccacaggaga

SEQ ID NO: 1678095 - RNA, 19 nt, Artificial Sequence
  Description of Artificial Sequence: Synthetic oligonucleotide
  Sense strand starting at position 726 of SEQ ID NO: 1561520
ggcaauuagacggagguua

SEQ ID NO: 1678096 - RNA, 19 nt, Artificial Sequence
  Description of Artificial Sequence: Synthetic oligonucleotide
  Antisense strand to SEQ ID NO: 1678095
uaaccuccgucuaauugcc

SEQ ID NO: 1678097 - RNA, 19 nt, Artificial Sequence
  Description of Artificial Sequence: Synthetic oligonucleotide
  Sense strand starting at position 728 of SEQ ID NO: 1561520
caauuagacggagguuacu

SEQ ID NO: 1678098 - RNA, 19 nt, Artificial Sequence
  Description of Artificial Sequence: Synthetic oligonucleotide
  Antisense strand to SEQ ID NO: 1678097
aguaaccuccgucuaauug

SEQ ID NO: 1678099 - RNA, 19 nt, Artificial Sequence
  Description of Artificial Sequence: Synthetic oligonucleotide
  Sense strand starting at position 889 of SEQ ID NO: 1561520
accuuaauuguacaaguca

SEQ ID NO: 1678100 - RNA, 19 nt, Artificial Sequence
  Description of Artificial Sequence: Synthetic oligonucleotide
  Antisense strand to SEQ ID NO: 1678099
ugacuuguacaauuaaggu

SEQ ID NO: 1678101 - RNA, 19 nt, Artificial Sequence
  Description of Artificial Sequence: Synthetic oligonucleotide
  Sense strand starting at position 1018 of SEQ ID NO: 1561520
agcugaaugcuccacaauu

SEQ ID NO: 1678102 - RNA, 19 nt, Artificial Sequence
  Description of Artificial Sequence: Synthetic oligonucleotide
  Antisense strand to SEQ ID NO: 1678101
aauuguggagcauucagcu

SEQ ID NO: 1678103 - RNA, 19 nt, Artificial Sequence
  Description of Artificial Sequence: Synthetic oligonucleotide
  Sense strand starting at position 1376 of SEQ ID NO: 1561520
gcugguauuacugaccuga

SEQ ID NO: 1678104 - RNA, 19 nt, Artificial Sequence
  Description of Artificial Sequence: Synthetic oligonucleotide
  Antisense strand to SEQ ID NO: 1678103
ucaggucaguaauaccagc

SEQ ID NO: 1678105 - RNA, 19 nt, Artificial Sequence
  Description of Artificial Sequence: Synthetic oligonucleotide
  Sense strand starting at position 1790 of SEQ ID NO: 1561520
cgggaugucgcacccguaa

SEQ ID NO: 1678106 - RNA, 19 nt, Artificial Sequence
  Description of Artificial Sequence: Synthetic oligonucleotide
  Antisense strand to SEQ ID NO: 1678105
uuacgggugcgacaucccg

SEQ ID NO: 1678107 - RNA, 19 nt, Artificial Sequence
  Description of Artificial Sequence: Synthetic oligonucleotide
  Sense strand starting at position 1849 of SEQ ID NO: 1561520
agcuguggaucucucaauu

SEQ ID NO: 1678108 - RNA, 19 nt, Artificial Sequence
  Description of Artificial Sequence: Synthetic oligonucleotide
  Antisense strand to SEQ ID NO: 1678107
aauugagagauccacagcu

SEQ ID NO: 1678109 - RNA, 19 nt, Artificial Sequence
  Description of Artificial Sequence: Synthetic oligonucleotide
  Sense strand starting at position 2042 of SEQ ID NO: 1561520
cugauuggacaacguuuaa

SEQ ID NO: 1678110 - RNA, 19 nt, Artificial Sequence
  Description of Artificial Sequence: Synthetic oligonucleotide
  Antisense strand to SEQ ID NO: 1678109
uuaaacguuguccaaucag

SEQ ID NO: 1678111 - RNA, 19 nt, Artificial Sequence
  Description of Artificial Sequence: Synthetic oligonucleotide
  Sense strand starting at position 2198 of SEQ ID NO: 1561520
uguauuuaaccuuguguau

SEQ ID NO: 1678112 - RNA, 19 nt, Artificial Sequence
  Description of Artificial Sequence: Synthetic oligonucleotide
  Antisense strand to SEQ ID NO: 1678111
auacacaagguuaaauaca

SEQ ID NO: 1678113 - RNA, 19 nt, Artificial Sequence
  Description of Artificial Sequence: Synthetic oligonucleotide
  Sense strand starting at position 2210 of SEQ ID NO: 1561520
uguguauaaggucauauac

SEQ ID NO: 1678114 - RNA, 19 nt, Artificial Sequence
  Description of Artificial Sequence: Synthetic oligonucleotide
  Antisense strand to SEQ ID NO: 1678113
guauaugaccuuauacaca

SEQ ID NO: 1678115 - RNA, 19 nt, Artificial Sequence
  Description of Artificial Sequence: Synthetic oligonucleotide
  Sense strand starting at position 2433 of SEQ ID NO: 1561520
aguggaauugauuguaaca

SEQ ID NO: 1678116 - RNA, 19 nt, Artificial Sequence
  Description of Artificial Sequence: Synthetic oligonucleotide
  Antisense strand to SEQ ID NO: 1678115
uguuacaaucaauuccacu

SEQ ID NO: 1678117 - RNA, 19 nt, Artificial Sequence
  Description of Artificial Sequence: Synthetic oligonucleotide
  Sense strand starting at position 2803 of SEQ ID NO: 1561520
aacaguuagugaccauaga

SEQ ID NO: 1678118 - RNA, 19 nt, Artificial Sequence
  Description of Artificial Sequence: Synthetic oligonucleotide
  Antisense strand to SEQ ID NO: 1678117
ucuauggucacuaacuguu

SEQ ID NO: 1678119 - RNA, 19 nt, Artificial Sequence
  Description of Artificial Sequence: Synthetic oligonucleotide
  Sense strand starting at position 2997 of SEQ ID NO: 1561520
agucuuaaccuccaauguu

SEQ ID NO: 1678120 - RNA, 19 nt, Artificial Sequence
  Description of Artificial Sequence: Synthetic oligonucleotide
  Antisense strand to SEQ ID NO: 1678119
aacauuggagguuaagacu

SEQ ID NO: 1678121 - RNA, 19 nt, Artificial Sequence
  Description of Artificial Sequence: Synthetic oligonucleotide
  Sense strand starting at position 3114 of SEQ ID NO: 1561520
ugaacugugugaguauaag

SEQ ID NO: 1678122 - RNA, 19 nt, Artificial Sequence
  Description of Artificial Sequence: Synthetic oligonucleotide
  Antisense strand to SEQ ID NO: 1678121
cuuauacucacacaguuca

SEQ ID NO: 1678123 - RNA, 19 nt, Artificial Sequence
  Description of Artificial Sequence: Synthetic oligonucleotide
  Sense strand starting at position 3144 of SEQ ID NO: 1561520
cgcagacaugucuacaugu

SEQ ID NO: 1678124 - RNA, 19 nt, Artificial Sequence
  Description of Artificial Sequence: Synthetic oligonucleotide
  Antisense strand to SEQ ID NO: 1678123
acauguagacaugucugcg

SEQ ID NO: 1678125 - RNA, 19 nt, Artificial Sequence
  Description of Artificial Sequence: Synthetic oligonucleotide
  Sense strand starting at position 3469 of SEQ ID NO: 1561520
gcacucugcccacaggaaa

SEQ ID NO: 1678126 - RNA, 19 nt, Artificial Sequence
  Description of Artificial Sequence: Synthetic oligonucleotide
  Antisense strand to SEQ ID NO: 1678125
uuuccugugggcagagugc

SEQ ID NO: 1678127 - RNA, 19 nt, Artificial Sequence
  Description of Artificial Sequence: Synthetic oligonucleotide
  Sense strand starting at position 3492 of SEQ ID NO: 1561520
gugacuuaucauuaagccu

SEQ ID NO: 1678128 - RNA, 19 nt, Artificial Sequence
  Description of Artificial Sequence: Synthetic oligonucleotide
  Antisense strand to SEQ ID NO: 1678127
aggcuuaaugauaagucac

SEQ ID NO: 1678129 - RNA, 19 nt, Artificial Sequence
  Description of Artificial Sequence: Synthetic oligonucleotide
  Sense strand starting at position 3633 of SEQ ID NO: 1561520
guuguaacauauuccuauu

SEQ ID NO: 1678130 - RNA, 19 nt, Artificial Sequence
  Description of Artificial Sequence: Synthetic oligonucleotide
  Antisense strand to SEQ ID NO: 1678129
aauaggaauauguuacaac

SEQ ID NO: 1678131 - RNA, 19 nt, Artificial Sequence
  Description of Artificial Sequence: Synthetic oligonucleotide
  Sense strand starting at position 3699 of SEQ ID NO: 1561520
ugacauauuccuggcccaa

SEQ ID NO: 1678132 - RNA, 19 nt, Artificial Sequence
  Description of Artificial Sequence: Synthetic oligonucleotide
  Antisense strand to SEQ ID NO: 1678131
uugggccaggaauauguca

SEQ ID NO: 1678133 - RNA, 19 nt, Artificial Sequence
  Description of Artificial Sequence: Synthetic oligonucleotide
  Sense strand starting at position 3701 of SEQ ID NO: 1561520
acauauuccuggcccaagu

SEQ ID NO: 1678134 - RNA, 19 nt, Artificial Sequence
  Description of Artificial Sequence: Synthetic oligonucleotide
  Antisense strand to SEQ ID NO: 1678133
acuugggccaggaauaugu

SEQ ID NO: 1678135 - RNA, 19 nt, Artificial Sequence
  Description of Artificial Sequence: Synthetic oligonucleotide
  Sense strand starting at position 3728 of SEQ ID NO: 1561520
caacauguccuucgggaac

SEQ ID NO: 1678136 - RNA, 19 nt, Artificial Sequence
  Description of Artificial Sequence: Synthetic oligonucleotide
  Antisense strand to SEQ ID NO: 1678135
guucccgaaggacauguug

SEQ ID NO: 1678137 - RNA, 19 nt, Artificial Sequence
  Description of Artificial Sequence: Synthetic oligonucleotide
  Sense strand starting at position 3755 of SEQ ID NO: 1561520
accuuuaaccuuggguaca

SEQ ID NO: 1678138 - RNA, 19 nt, Artificial Sequence
  Description of Artificial Sequence: Synthetic oligonucleotide
  Antisense strand to SEQ ID NO: 1678137
uguacccaagguuaaaggu

SEQ ID NO: 1678139 - RNA, 19 nt, Artificial Sequence
  Description of Artificial Sequence: Synthetic oligonucleotide
  Sense strand starting at position 3765 of SEQ ID NO: 1561520
uuggguacaucaucucaca

SEQ ID NO: 1678140 - RNA, 19 nt, Artificial Sequence
  Description of Artificial Sequence: Synthetic oligonucleotide
  Antisense strand to SEQ ID NO: 1678139
ugugagaugauguacccaa

SEQ ID NO: 1678141 - RNA, 19 nt, Artificial Sequence
  Description of Artificial Sequence: Synthetic oligonucleotide
  Sense strand starting at position 3835 of SEQ ID NO: 1561520
cuagguucuccaugaguuc

SEQ ID NO: 1678142 - RNA, 19 nt, Artificial Sequence
  Description of Artificial Sequence: Synthetic oligonucleotide
  Antisense strand to SEQ ID NO: 1678141
gaacucauggagaaccuag

SEQ ID NO: 1678143 - RNA, 19 nt, Artificial Sequence
  Description of Artificial Sequence: Synthetic oligonucleotide
  Sense strand starting at position 3864 of SEQ ID NO: 1561520
cugaauuuaugucugcuua

SEQ ID NO: 1678144 - RNA, 19 nt, Artificial Sequence
  Description of Artificial Sequence: Synthetic oligonucleotide
  Antisense strand to SEQ ID NO: 1678143
uaagcagacauaaauucag

SEQ ID NO: 1678145 - RNA, 19 nt, Artificial Sequence
  Description of Artificial Sequence: Synthetic oligonucleotide
  Sense strand starting at position 3909 of SEQ ID NO: 1561520
gguguauaacacugauaac

SEQ ID NO: 1678146 - RNA, 19 nt, Artificial Sequence
  Description of Artificial Sequence: Synthetic oligonucleotide
  Antisense strand to SEQ ID NO: 1678145
guuaucaguguuauacacc

SEQ ID NO: 1678147 - RNA, 19 nt, Artificial Sequence
  Description of Artificial Sequence: Synthetic oligonucleotide
  Sense strand starting at position 3932 of SEQ ID NO: 1561520
ggguaaucauagguaaucu

SEQ ID NO: 1678148 - RNA, 19 nt, Artificial Sequence
  Description of Artificial Sequence: Synthetic oligonucleotide
  Antisense strand to SEQ ID NO: 1678147
agauuaccuaugauuaccc

SEQ ID NO: 1678149 - RNA, 19 nt, Artificial Sequence
  Description of Artificial Sequence: Synthetic oligonucleotide
  Sense strand starting at position 3941 of SEQ ID NO: 1561520
uagguaaucugacuugaau

SEQ ID NO: 1678150 - RNA, 19 nt, Artificial Sequence
  Description of Artificial Sequence: Synthetic oligonucleotide
  Antisense strand to SEQ ID NO: 1678149
auucaagucagauuaccua

SEQ ID NO: 1678151 - RNA, 19 nt, Artificial Sequence
  Description of Artificial Sequence: Synthetic oligonucleotide
  Sense strand starting at position 57 of SEQ ID NO: 1561521
acuguaaucccaggaguag

SEQ ID NO: 1678152 - RNA, 19 nt, Artificial Sequence
  Description of Artificial Sequence: Synthetic oligonucleotide
  Antisense strand to SEQ ID NO: 1678151
cuacuccugggauuacagu

SEQ ID NO: 1678153 - RNA, 19 nt, Artificial Sequence
  Description of Artificial Sequence: Synthetic oligonucleotide
  Sense strand starting at position 58 of SEQ ID NO: 1561521
cuguaaucccaggaguagu

SEQ ID NO: 1678154 - RNA, 19 nt, Artificial Sequence
  Description of Artificial Sequence: Synthetic oligonucleotide
  Antisense strand to SEQ ID NO: 1678153
acuacuccugggauuacag

SEQ ID NO: 1678155 - RNA, 19 nt, Artificial Sequence
  Description of Artificial Sequence: Synthetic oligonucleotide
  Sense strand starting at position 68 of SEQ ID NO: 1561521
aggaguaguugacuccaau

SEQ ID NO: 1678156 - RNA, 19 nt, Artificial Sequence
  Description of Artificial Sequence: Synthetic oligonucleotide
  Antisense strand to SEQ ID NO: 1678155
auuggagucaacuacuccu

SEQ ID NO: 1678157 - RNA, 19 nt, Artificial Sequence
  Description of Artificial Sequence: Synthetic oligonucleotide
  Sense strand starting at position 71 of SEQ ID NO: 1561521
aguaguugacuccaauuau

SEQ ID NO: 1678158 - RNA, 19 nt, Artificial Sequence
  Description of Artificial Sequence: Synthetic oligonucleotide
  Antisense strand to SEQ ID NO: 1678157
auaauuggagucaacuacu

SEQ ID NO: 1678159 - RNA, 19 nt, Artificial Sequence
  Description of Artificial Sequence: Synthetic oligonucleotide
  Sense strand starting at position 278 of SEQ ID NO: 1561521
cagacucaccuguguagua

SEQ ID NO: 1678160 - RNA, 19 nt, Artificial Sequence
  Description of Artificial Sequence: Synthetic oligonucleotide
  Antisense strand to SEQ ID NO: 1678159
uacuacacaggugagucug

SEQ ID NO: 1678161 - RNA, 19 nt, Artificial Sequence
  Description of Artificial Sequence: Synthetic oligonucleotide
  Sense strand starting at position 280 of SEQ ID NO: 1561521
gacucaccuguguaguaca

SEQ ID NO: 1678162 - RNA, 19 nt, Artificial Sequence
  Description of Artificial Sequence: Synthetic oligonucleotide
  Antisense strand to SEQ ID NO: 1678161
uguacuacacaggugaguc

SEQ ID NO: 1678163 - RNA, 19 nt, Artificial Sequence
  Description of Artificial Sequence: Synthetic oligonucleotide
  Sense strand starting at position 410 of SEQ ID NO: 1561521
auggauuucuaauaaucug

SEQ ID NO: 1678164 - RNA, 19 nt, Artificial Sequence
  Description of Artificial Sequence: Synthetic oligonucleotide
  Antisense strand to SEQ ID NO: 1678163
cagauuauuagaaauccau

SEQ ID NO: 1678165 - RNA, 19 nt, Artificial Sequence
  Description of Artificial Sequence: Synthetic oligonucleotide
  Sense strand starting at position 506 of SEQ ID NO: 1561521
acccuuaggcaugauaauu

SEQ ID NO: 1678166 - RNA, 19 nt, Artificial Sequence
  Description of Artificial Sequence: Synthetic oligonucleotide
  Antisense strand to SEQ ID NO: 1678165
aauuaucaugccuaagggu

SEQ ID NO: 1678167 - RNA, 19 nt, Artificial Sequence
  Description of Artificial Sequence: Synthetic oligonucleotide
  Sense strand starting at position 709 of SEQ ID NO: 1561521
ugguucuaugguuaggaga

SEQ ID NO: 1678168 - RNA, 19 nt, Artificial Sequence
  Description of Artificial Sequence: Synthetic oligonucleotide
  Antisense strand to SEQ ID NO: 1678167
ucuccuaaccauagaacca

SEQ ID NO: 1678169 - RNA, 19 nt, Artificial Sequence
  Description of Artificial Sequence: Synthetic oligonucleotide
  Sense strand starting at position 751 of SEQ ID NO: 1561521
aagagcaauugugcuauca

SEQ ID NO: 1678170 - RNA, 19 nt, Artificial Sequence
  Description of Artificial Sequence: Synthetic oligonucleotide
  Antisense strand to SEQ ID NO: 1678169
ugauagcacaauugcucuu

SEQ ID NO: 1678171 - RNA, 19 nt, Artificial Sequence
  Description of Artificial Sequence: Synthetic oligonucleotide
  Sense strand starting at position 780 of SEQ ID NO: 1561521
acucauauauguguaacca

SEQ ID NO: 1678172 - RNA, 19 nt, Artificial Sequence
  Description of Artificial Sequence: Synthetic oligonucleotide
  Antisense strand to SEQ ID NO: 1678171
ugguuacacauauaugagu

SEQ ID NO: 1678173 - RNA, 19 nt, Artificial Sequence
  Description of Artificial Sequence: Synthetic oligonucleotide
  Sense strand starting at position 781 of SEQ ID NO: 1561521
cucauauauguguaaccaa

SEQ ID NO: 1678174 - RNA, 19 nt, Artificial Sequence
  Description of Artificial Sequence: Synthetic oligonucleotide
  Antisense strand to SEQ ID NO: 1678173
uugguuacacauauaugag

SEQ ID NO: 1678175 - RNA, 19 nt, Artificial Sequence
  Description of Artificial Sequence: Synthetic oligonucleotide
  Sense strand starting at position 788 of SEQ ID NO: 1561521
auguguaaccaacguagaa

SEQ ID NO: 1678176 - RNA, 19 nt, Artificial Sequence
  Description of Artificial Sequence: Synthetic oligonucleotide
  Antisense strand to SEQ ID NO: 1678175
uucuacguugguuacacau

SEQ ID NO: 1678177 - RNA, 19 nt, Artificial Sequence
  Description of Artificial Sequence: Synthetic oligonucleotide
  Sense strand starting at position 790 of SEQ ID NO: 1561521
guguaaccaacguagaaua

SEQ ID NO: 1678178 - RNA, 19 nt, Artificial Sequence
  Description of Artificial Sequence: Synthetic oligonucleotide
  Antisense strand to SEQ ID NO: 1678177
uauucuacguugguuacac

SEQ ID NO: 1678179 - RNA, 19 nt, Artificial Sequence
  Description of Artificial Sequence: Synthetic oligonucleotide
  Sense strand starting at position 792 of SEQ ID NO: 1561521
guaaccaacguagaauaua

SEQ ID NO: 1678180 - RNA, 19 nt, Artificial Sequence
  Description of Artificial Sequence: Synthetic oligonucleotide
  Antisense strand to SEQ ID NO: 1678179
uauauucuacguugguuac

SEQ ID NO: 1678181 - RNA, 19 nt, Artificial Sequence
  Description of Artificial Sequence: Synthetic oligonucleotide
  Sense strand starting at position 810 of SEQ ID NO: 1561521
aaccaaagcgaguauccau

SEQ ID NO: 1678182 - RNA, 19 nt, Artificial Sequence
  Description of Artificial Sequence: Synthetic oligonucleotide
  Antisense strand to SEQ ID NO: 1678181
auggauacucgcuuugguu

SEQ ID NO: 1678183 - RNA, 19 nt, Artificial Sequence
  Description of Artificial Sequence: Synthetic oligonucleotide
  Sense strand starting at position 818 of SEQ ID NO: 1561521
cgaguauccaugggaccuu

SEQ ID NO: 1678184 - RNA, 19 nt, Artificial Sequence
  Description of Artificial Sequence: Synthetic oligonucleotide
  Antisense strand to SEQ ID NO: 1678183
aaggucccauggauacucg

SEQ ID NO: 1678185 - RNA, 19 nt, Artificial Sequence
  Description of Artificial Sequence: Synthetic oligonucleotide
  Sense strand starting at position 985 of SEQ ID NO: 1561521
gccucaauccuuggaccua

SEQ ID NO: 1678186 - RNA, 19 nt, Artificial Sequence
  Description of Artificial Sequence: Synthetic oligonucleotide
  Antisense strand to SEQ ID NO: 1678185
uagguccaaggauugaggc

SEQ ID NO: 1678187 - RNA, 19 nt, Artificial Sequence
  Description of Artificial Sequence: Synthetic oligonucleotide
  Sense strand starting at position 1126 of SEQ ID NO: 1561521
gccuuacguuuauuugauu

SEQ ID NO: 1678188 - RNA, 19 nt, Artificial Sequence
  Description of Artificial Sequence: Synthetic oligonucleotide
  Antisense strand to SEQ ID NO: 1678187
aaucaaauaaacguaaggc

SEQ ID NO: 1678189 - RNA, 19 nt, Artificial Sequence
  Description of Artificial Sequence: Synthetic oligonucleotide
  Sense strand starting at position 1243 of SEQ ID NO: 1561521
uguuuaucaugagugcaga

SEQ ID NO: 1678190 - RNA, 19 nt, Artificial Sequence
  Description of Artificial Sequence: Synthetic oligonucleotide
  Antisense strand to SEQ ID NO: 1678189
ucugcacucaugauaaaca

SEQ ID NO: 1678191 - RNA, 19 nt, Artificial Sequence
  Description of Artificial Sequence: Synthetic oligonucleotide
  Sense strand starting at position 1244 of SEQ ID NO: 1561521
guuuaucaugagugcagaa

SEQ ID NO: 1678192 - RNA, 19 nt, Artificial Sequence
  Description of Artificial Sequence: Synthetic oligonucleotide
  Antisense strand to SEQ ID NO: 1678191
uucugcacucaugauaaac

SEQ ID NO: 1678193 - RNA, 19 nt, Artificial Sequence
  Description of Artificial Sequence: Synthetic oligonucleotide
  Sense strand starting at position 1246 of SEQ ID NO: 1561521
uuaucaugagugcagaaug

SEQ ID NO: 1678194 - RNA, 19 nt, Artificial Sequence
  Description of Artificial Sequence: Synthetic oligonucleotide
  Antisense strand to SEQ ID NO: 1678193
cauucugcacucaugauaa

SEQ ID NO: 1678195 - RNA, 19 nt, Artificial Sequence
  Description of Artificial Sequence: Synthetic oligonucleotide
  Sense strand starting at position 1697 of SEQ ID NO: 1561521
aauucugcuguguagaauc

SEQ ID NO: 1678196 - RNA, 19 nt, Artificial Sequence
  Description of Artificial Sequence: Synthetic oligonucleotide
  Antisense strand to SEQ ID NO: 1678195
gauucuacacagcagaauu

SEQ ID NO: 1678197 - RNA, 19 nt, Artificial Sequence
  Description of Artificial Sequence: Synthetic oligonucleotide
  Sense strand starting at position 1764 of SEQ ID NO: 1561521
ugucaaugcucccuggaaa

SEQ ID NO: 1678198 - RNA, 19 nt, Artificial Sequence
  Description of Artificial Sequence: Synthetic oligonucleotide
  Antisense strand to SEQ ID NO: 1678197
uuuccagggagcauugaca

SEQ ID NO: 1678199 - RNA, 19 nt, Artificial Sequence
  Description of Artificial Sequence: Synthetic oligonucleotide
  Sense strand starting at position 1806 of SEQ ID NO: 1561521
ccaauuggucaugggcaga

SEQ ID NO: 1678200 - RNA, 19 nt, Artificial Sequence
  Description of Artificial Sequence: Synthetic oligonucleotide
  Antisense strand to SEQ ID NO: 1678199
ucugcccaugaccaauugg

SEQ ID NO: 1678201 - RNA, 19 nt, Artificial Sequence
  Description of Artificial Sequence: Synthetic oligonucleotide
  Sense strand starting at position 1811 of SEQ ID NO: 1561521
uggucaugggcagaacuuu

SEQ ID NO: 1678202 - RNA, 19 nt, Artificial Sequence
  Description of Artificial Sequence: Synthetic oligonucleotide
  Antisense strand to SEQ ID NO: 1678201
aaaguucugcccaugacca

SEQ ID NO: 1678203 - RNA, 19 nt, Artificial Sequence
  Description of Artificial Sequence: Synthetic oligonucleotide
  Sense strand starting at position 1976 of SEQ ID NO: 1561521
uccauaacaucuguguaua

SEQ ID NO: 1678204 - RNA, 19 nt, Artificial Sequence
  Description of Artificial Sequence: Synthetic oligonucleotide
  Antisense strand to SEQ ID NO: 1678203
uauacacagauguuaugga

SEQ ID NO: 1678205 - RNA, 19 nt, Artificial Sequence
  Description of Artificial Sequence: Synthetic oligonucleotide
  Sense strand starting at position 1977 of SEQ ID NO: 1561521
ccauaacaucuguguauau

SEQ ID NO: 1678206 - RNA, 19 nt, Artificial Sequence
  Description of Artificial Sequence: Synthetic oligonucleotide
  Antisense strand to SEQ ID NO: 1678205
auauacacagauguuaugg

SEQ ID NO: 1678207 - RNA, 19 nt, Artificial Sequence
  Description of Artificial Sequence: Synthetic oligonucleotide
  Sense strand starting at position 1979 of SEQ ID NO: 1561521
auaacaucuguguauaugu

SEQ ID NO: 1678208 - RNA, 19 nt, Artificial Sequence
  Description of Artificial Sequence: Synthetic oligonucleotide
  Antisense strand to SEQ ID NO: 1678207
acauauacacagauguuau

SEQ ID NO: 1678209 - RNA, 19 nt, Artificial Sequence
  Description of Artificial Sequence: Synthetic oligonucleotide
  Sense strand starting at position 2479 of SEQ ID NO: 1561521
uaaugugugcaauaagcua

SEQ ID NO: 1678210 - RNA, 19 nt, Artificial Sequence
  Description of Artificial Sequence: Synthetic oligonucleotide
  Antisense strand to SEQ ID NO: 1678209
uagcuuauugcacacauua

SEQ ID NO: 1678211 - RNA, 19 nt, Artificial Sequence
  Description of Artificial Sequence: Synthetic oligonucleotide
  Sense strand starting at position 2484 of SEQ ID NO: 1561521
ugugcaauaagcuagagau

SEQ ID NO: 1678212 - RNA, 19 nt, Artificial Sequence
  Description of Artificial Sequence: Synthetic oligonucleotide
  Antisense strand to SEQ ID NO: 1678211
aucucuagcuuauugcaca

SEQ ID NO: 1678213 - RNA, 19 nt, Artificial Sequence
  Description of Artificial Sequence: Synthetic oligonucleotide
  Sense strand starting at position 2777 of SEQ ID NO: 1561521
gauauuuaaugaugaagag

SEQ ID NO: 1678214 - RNA, 19 nt, Artificial Sequence
  Description of Artificial Sequence: Synthetic oligonucleotide
  Antisense strand to SEQ ID NO: 1678213
cucuucaucauuaaauauc

SEQ ID NO: 1678215 - RNA, 19 nt, Artificial Sequence
  Description of Artificial Sequence: Synthetic oligonucleotide
  Sense strand starting at position 2915 of SEQ ID NO: 1561521
aguauuacugcugagauau

SEQ ID NO: 1678216 - RNA, 19 nt, Artificial Sequence
  Description of Artificial Sequence: Synthetic oligonucleotide
  Antisense strand to SEQ ID NO: 1678215
auaucucagcaguaauacu

SEQ ID NO: 1678217 - RNA, 19 nt, Artificial Sequence
  Description of Artificial Sequence: Synthetic oligonucleotide
  Sense strand starting at position 3019 of SEQ ID NO: 1561521
ucccauguucuguaacuuu

SEQ ID NO: 1678218 - RNA, 19 nt, Artificial Sequence
  Description of Artificial Sequence: Synthetic oligonucleotide
  Antisense strand to SEQ ID NO: 1678217
aaaguuacagaacauggga

SEQ ID NO: 1678219 - RNA, 19 nt, Artificial Sequence
  Description of Artificial Sequence: Synthetic oligonucleotide
  Sense strand starting at position 3155 of SEQ ID NO: 1561521
ucuuguacugcauagacau

SEQ ID NO: 1678220 - RNA, 19 nt, Artificial Sequence
  Description of Artificial Sequence: Synthetic oligonucleotide
  Antisense strand to SEQ ID NO: 1678219
augucuaugcaguacaaga

SEQ ID NO: 1678221 - RNA, 19 nt, Artificial Sequence
  Description of Artificial Sequence: Synthetic oligonucleotide
  Sense strand starting at position 3363 of SEQ ID NO: 1561521
uagagaaagcucugguaua

SEQ ID NO: 1678222 - RNA, 19 nt, Artificial Sequence
  Description of Artificial Sequence: Synthetic oligonucleotide
  Antisense strand to SEQ ID NO: 1678221
uauaccagagcuuucucua

SEQ ID NO: 1678223 - RNA, 19 nt, Artificial Sequence
  Description of Artificial Sequence: Synthetic oligonucleotide
  Sense strand starting at position 3404 of SEQ ID NO: 1561521
agacuuugauuauuguaag

SEQ ID NO: 1678224 - RNA, 19 nt, Artificial Sequence
  Description of Artificial Sequence: Synthetic oligonucleotide
  Antisense strand to SEQ ID NO: 1678223
cuuacaauaaucaaagucu

SEQ ID NO: 1678225 - RNA, 19 nt, Artificial Sequence
  Description of Artificial Sequence: Synthetic oligonucleotide
  Sense strand starting at position 3545 of SEQ ID NO: 1561521
cucagacauguuuagguga

SEQ ID NO: 1678226 - RNA, 19 nt, Artificial Sequence
  Description of Artificial Sequence: Synthetic oligonucleotide
  Antisense strand to SEQ ID NO: 1678225
ucaccuaaacaugucugag

SEQ ID NO: 1678227 - RNA, 19 nt, Artificial Sequence
  Description of Artificial Sequence: Synthetic oligonucleotide
  Sense strand starting at position 3781 of SEQ ID NO: 1561521
ugaguagcuccacagagau

SEQ ID NO: 1678228 - RNA, 19 nt, Artificial Sequence
  Description of Artificial Sequence: Synthetic oligonucleotide
  Antisense strand to SEQ ID NO: 1678227
aucucuguggagcuacuca

SEQ ID NO: 1678229 - RNA, 19 nt, Artificial Sequence
  Description of Artificial Sequence: Synthetic oligonucleotide
  Sense strand starting at position 3892 of SEQ ID NO: 1561521
guguacugucccuaccaaa

SEQ ID NO: 1678230 - RNA, 19 nt, Artificial Sequence
  Description of Artificial Sequence: Synthetic oligonucleotide
  Antisense strand to SEQ ID NO: 1678229
uuugguagggacaguacac

SEQ ID NO: 1678231 - RNA, 19 nt, Artificial Sequence
  Description of Artificial Sequence: Synthetic oligonucleotide
  Sense strand starting at position 66 of SEQ ID NO: 1561522
cugauaacccauuguugac

SEQ ID NO: 1678232 - RNA, 19 nt, Artificial Sequence
  Description of Artificial Sequence: Synthetic oligonucleotide
  Antisense strand to SEQ ID NO: 1678231
gucaacaauggguuaucag

SEQ ID NO: 1678233 - RNA, 19 nt, Artificial Sequence
  Description of Artificial Sequence: Synthetic oligonucleotide
  Sense strand starting at position 240 of SEQ ID NO: 1561522
agaaguggaucaucacagu

SEQ ID NO: 1678234 - RNA, 19 nt, Artificial Sequence
  Description of Artificial Sequence: Synthetic oligonucleotide
  Antisense strand to SEQ ID NO: 1678233
acugugaugauccacuucu

SEQ ID NO: 1678235 - RNA, 19 nt, Artificial Sequence
  Description of Artificial Sequence: Synthetic oligonucleotide
  Sense strand starting at position 399 of SEQ ID NO: 1561522
gguguuguucaaggucaac

SEQ ID NO: 1678236 - RNA, 19 nt, Artificial Sequence
  Description of Artificial Sequence: Synthetic oligonucleotide
  Antisense strand to SEQ ID NO: 1678235
guugaccuugaacaacacc

SEQ ID NO: 1678237 - RNA, 19 nt, Artificial Sequence
  Description of Artificial Sequence: Synthetic oligonucleotide
  Sense strand starting at position 419 of SEQ ID NO: 1561522
guauuaaacuaacugguua

SEQ ID NO: 1678238 - RNA, 19 nt, Artificial Sequence
  Description of Artificial Sequence: Synthetic oligonucleotide
  Antisense strand to SEQ ID NO: 1678237
uaaccaguuaguuuaauac

SEQ ID NO: 1678239 - RNA, 19 nt, Artificial Sequence
  Description of Artificial Sequence: Synthetic oligonucleotide
  Sense strand starting at position 477 of SEQ ID NO: 1561522
agugaaacacugugaaauc

SEQ ID NO: 1678240 - RNA, 19 nt, Artificial Sequence
  Description of Artificial Sequence: Synthetic oligonucleotide
  Antisense strand to SEQ ID NO: 1678239
gauuucacaguguuucacu

SEQ ID NO: 1678241 - RNA, 19 nt, Artificial Sequence
  Description of Artificial Sequence: Synthetic oligonucleotide
  Sense strand starting at position 1059 of SEQ ID NO: 1561522
gucacaguuucuucccauu

SEQ ID NO: 1678242 - RNA, 19 nt, Artificial Sequence
  Description of Artificial Sequence: Synthetic oligonucleotide
  Antisense strand to SEQ ID NO: 1678241
aaugggaagaaacugugac

SEQ ID NO: 1678243 - RNA, 19 nt, Artificial Sequence
  Description of Artificial Sequence: Synthetic oligonucleotide
  Sense strand starting at position 1121 of SEQ ID NO: 1561522
ggaauuaacugagcuaagu

SEQ ID NO: 1678244 - RNA, 19 nt, Artificial Sequence
  Description of Artificial Sequence: Synthetic oligonucleotide
  Antisense strand to SEQ ID NO: 1678243
acuuagcucaguuaauucc

SEQ ID NO: 1678245 - RNA, 19 nt, Artificial Sequence
  Description of Artificial Sequence: Synthetic oligonucleotide
  Sense strand starting at position 1140 of SEQ ID NO: 1561522
caguuaacccucuggcuga

SEQ ID NO: 1678246 - RNA, 19 nt, Artificial Sequence
  Description of Artificial Sequence: Synthetic oligonucleotide
  Antisense strand to SEQ ID NO: 1678245
ucagccagaggguuaacug

SEQ ID NO: 1678247 - RNA, 19 nt, Artificial Sequence
  Description of Artificial Sequence: Synthetic oligonucleotide
  Sense strand starting at position 1143 of SEQ ID NO: 1561522
uuaacccucuggcugaaua

SEQ ID NO: 1678248 - RNA, 19 nt, Artificial Sequence
  Description of Artificial Sequence: Synthetic oligonucleotide
  Antisense strand to SEQ ID NO: 1678247
uauucagccagaggguuaa

SEQ ID NO: 1678249 - RNA, 19 nt, Artificial Sequence
  Description of Artificial Sequence: Synthetic oligonucleotide
  Sense strand starting at position 1157 of SEQ ID NO: 1561522
gaauaaggguugcuucuga

SEQ ID NO: 1678250 - RNA, 19 nt, Artificial Sequence
  Description of Artificial Sequence: Synthetic oligonucleotide
  Antisense strand to SEQ ID NO: 1678249
ucagaagcaacccuuauuc

SEQ ID NO: 1678251 - RNA, 19 nt, Artificial Sequence
  Description of Artificial Sequence: Synthetic oligonucleotide
  Sense strand starting at position 1567 of SEQ ID NO: 1561522
gcgcauuucucccucuuua

SEQ ID NO: 1678252 - RNA, 19 nt, Artificial Sequence
  Description of Artificial Sequence: Synthetic oligonucleotide
  Antisense strand to SEQ ID NO: 1678251
uaaagagggagaaaugcgc

SEQ ID NO: 1678253 - RNA, 19 nt, Artificial Sequence
  Description of Artificial Sequence: Synthetic oligonucleotide
  Sense strand starting at position 1605 of SEQ ID NO: 1561522
cucuguucucccuggagaa

SEQ ID NO: 1678254 - RNA, 19 nt, Artificial Sequence
  Description of Artificial Sequence: Synthetic oligonucleotide
  Antisense strand to SEQ ID NO: 1678253
uucuccagggagaacagag

SEQ ID NO: 1678255 - RNA, 19 nt, Artificial Sequence
  Description of Artificial Sequence: Synthetic oligonucleotide
  Sense strand starting at position 1606 of SEQ ID NO: 1561522
ucuguucucccuggagaag

SEQ ID NO: 1678256 - RNA, 19 nt, Artificial Sequence
  Description of Artificial Sequence: Synthetic oligonucleotide
  Antisense strand to SEQ ID NO: 1678255
cuucuccagggagaacaga

SEQ ID NO: 1678257 - RNA, 19 nt, Artificial Sequence
  Description of Artificial Sequence: Synthetic oligonucleotide
  Sense strand starting at position 2236 of SEQ ID NO: 1561522
ccagcaguacucgauucuu

SEQ ID NO: 1678258 - RNA, 19 nt, Artificial Sequence
  Description of Artificial Sequence: Synthetic oligonucleotide
  Antisense strand to SEQ ID NO: 1678257
aagaaucgaguacugcugg

SEQ ID NO: 1678259 - RNA, 19 nt, Artificial Sequence
  Description of Artificial Sequence: Synthetic oligonucleotide
  Sense strand starting at position 2259 of SEQ ID NO: 1561522
uuuggauucccuugaaucu

SEQ ID NO: 1678260 - RNA, 19 nt, Artificial Sequence
  Description of Artificial Sequence: Synthetic oligonucleotide
  Antisense strand to SEQ ID NO: 1678259
agauucaagggaauccaaa

SEQ ID NO: 1678261 - RNA, 19 nt, Artificial Sequence
  Description of Artificial Sequence: Synthetic oligonucleotide
  Sense strand starting at position 2344 of SEQ ID NO: 1561522
cggagcuuaagaugggaaa

SEQ ID NO: 1678262 - RNA, 19 nt, Artificial Sequence
  Description of Artificial Sequence: Synthetic oligonucleotide
  Antisense strand to SEQ ID NO: 1678261
uuucccaucuuaagcuccg

SEQ ID NO: 1678263 - RNA, 19 nt, Artificial Sequence
  Description of Artificial Sequence: Synthetic oligonucleotide
  Sense strand starting at position 2484 of SEQ ID NO: 1561522
uucugaaauccggacgauu

SEQ ID NO: 1678264 - RNA, 19 nt, Artificial Sequence
  Description of Artificial Sequence: Synthetic oligonucleotide
  Antisense strand to SEQ ID NO: 1678263
aaucguccggauuucagaa

SEQ ID NO: 1678265 - RNA, 19 nt, Artificial Sequence
  Description of Artificial Sequence: Synthetic oligonucleotide
  Sense strand starting at position 2486 of SEQ ID NO: 1561522
cugaaauccggacgauuaa

SEQ ID NO: 1678266 - RNA, 19 nt, Artificial Sequence
  Description of Artificial Sequence: Synthetic oligonucleotide
  Antisense strand to SEQ ID NO: 1678265
uuaaucguccggauuucag

SEQ ID NO: 1678267 - RNA, 19 nt, Artificial Sequence
  Description of Artificial Sequence: Synthetic oligonucleotide
  Sense strand starting at position 2533 of SEQ ID NO: 1561522
aguugucugcguaggugau

SEQ ID NO: 1678268 - RNA, 19 nt, Artificial Sequence
  Description of Artificial Sequence: Synthetic oligonucleotide
  Antisense strand to SEQ ID NO: 1678267
aucaccuacgcagacaacu

SEQ ID NO: 1678269 - RNA, 19 nt, Artificial Sequence
  Description of Artificial Sequence: Synthetic oligonucleotide
  Sense strand starting at position 2673 of SEQ ID NO: 1561522
ggcugaguuccagagaauu

SEQ ID NO: 1678270 - RNA, 19 nt, Artificial Sequence
  Description of Artificial Sequence: Synthetic oligonucleotide
  Antisense strand to SEQ ID NO: 1678269
aauucucuggaacucagcc

SEQ ID NO: 1678271 - RNA, 19 nt, Artificial Sequence
  Description of Artificial Sequence: Synthetic oligonucleotide
  Sense strand starting at position 2726 of SEQ ID NO: 1561522
ggcugaggcuuggcuuuaa

SEQ ID NO: 1678272 - RNA, 19 nt, Artificial Sequence
  Description of Artificial Sequence: Synthetic oligonucleotide
  Antisense strand to SEQ ID NO: 1678271
uuaaagccaagccucagcc

SEQ ID NO: 1678273 - RNA, 19 nt, Artificial Sequence
  Description of Artificial Sequence: Synthetic oligonucleotide
  Sense strand starting at position 2750 of SEQ ID NO: 1561522
cgcaaaguucugcuuguau

SEQ ID NO: 1678274 - RNA, 19 nt, Artificial Sequence
  Description of Artificial Sequence: Synthetic oligonucleotide
  Antisense strand to SEQ ID NO: 1678273
auacaagcagaacuuugcg

SEQ ID NO: 1678275 - RNA, 19 nt, Artificial Sequence
  Description of Artificial Sequence: Synthetic oligonucleotide
  Sense strand starting at position 2800 of SEQ ID NO: 1561522
augcacauuucuugagaua

SEQ ID NO: 1678276 - RNA, 19 nt, Artificial Sequence
  Description of Artificial Sequence: Synthetic oligonucleotide
  Antisense strand to SEQ ID NO: 1678275
uaucucaagaaaugugcau

SEQ ID NO: 1678277 - RNA, 19 nt, Artificial Sequence
  Description of Artificial Sequence: Synthetic oligonucleotide
  Sense strand starting at position 3196 of SEQ ID NO: 1561522
uggccuuuagucuguaaag

SEQ ID NO: 1678278 - RNA, 19 nt, Artificial Sequence
  Description of Artificial Sequence: Synthetic oligonucleotide
  Antisense strand to SEQ ID NO: 1678277
cuuuacagacuaaaggcca

SEQ ID NO: 1678279 - RNA, 19 nt, Artificial Sequence
  Description of Artificial Sequence: Synthetic oligonucleotide
  Sense strand starting at position 3197 of SEQ ID NO: 1561522
ggccuuuagucuguaaagu

SEQ ID NO: 1678280 - RNA, 19 nt, Artificial Sequence
  Description of Artificial Sequence: Synthetic oligonucleotide
  Antisense strand to SEQ ID NO: 1678279
acuuuacagacuaaaggcc

SEQ ID NO: 1678281 - RNA, 19 nt, Artificial Sequence
  Description of Artificial Sequence: Synthetic oligonucleotide
  Sense strand starting at position 3198 of SEQ ID NO: 1561522
gccuuuagucuguaaaguc

SEQ ID NO: 1678282 - RNA, 19 nt, Artificial Sequence
  Description of Artificial Sequence: Synthetic oligonucleotide
  Antisense strand to SEQ ID NO: 1678281
gacuuuacagacuaaaggc

SEQ ID NO: 1678283 - RNA, 19 nt, Artificial Sequence
  Description of Artificial Sequence: Synthetic oligonucleotide
  Sense strand starting at position 3206 of SEQ ID NO: 1561522
ucuguaaagucuuuauucu

SEQ ID NO: 1678284 - RNA, 19 nt, Artificial Sequence
  Description of Artificial Sequence: Synthetic oligonucleotide
  Antisense strand to SEQ ID NO: 1678283
agaauaaagacuuuacaga

SEQ ID NO: 1678285 - RNA, 19 nt, Artificial Sequence
  Description of Artificial Sequence: Synthetic oligonucleotide
  Sense strand starting at position 3207 of SEQ ID NO: 1561522
cuguaaagucuuuauucuc

SEQ ID NO: 1678286 - RNA, 19 nt, Artificial Sequence
  Description of Artificial Sequence: Synthetic oligonucleotide
  Antisense strand to SEQ ID NO: 1678285
gagaauaaagacuuuacag

SEQ ID NO: 1678287 - RNA, 19 nt, Artificial Sequence
  Description of Artificial Sequence: Synthetic oligonucleotide
  Sense strand starting at position 3223 of SEQ ID NO: 1561522
cucaguuauuuggaagagu

SEQ ID NO: 1678288 - RNA, 19 nt, Artificial Sequence
  Description of Artificial Sequence: Synthetic oligonucleotide
  Antisense strand to SEQ ID NO: 1678287
acucuuccaaauaacugag

SEQ ID NO: 1678289 - RNA, 19 nt, Artificial Sequence
  Description of Artificial Sequence: Synthetic oligonucleotide
  Sense strand starting at position 3250 of SEQ ID NO: 1561522
cauaauaugugcuuggcaa

SEQ ID NO: 1678290 - RNA, 19 nt, Artificial Sequence
  Description of Artificial Sequence: Synthetic oligonucleotide
  Antisense strand to SEQ ID NO: 1678289
uugccaagcacauauuaug

SEQ ID NO: 1678291 - RNA, 19 nt, Artificial Sequence
  Description of Artificial Sequence: Synthetic oligonucleotide
  Sense strand starting at position 3251 of SEQ ID NO: 1561522
auaauaugugcuuggcaau

SEQ ID NO: 1678292 - RNA, 19 nt, Artificial Sequence
  Description of Artificial Sequence: Synthetic oligonucleotide
  Antisense strand to SEQ ID NO: 1678291
auugccaagcacauauuau

SEQ ID NO: 1678293 - RNA, 19 nt, Artificial Sequence
  Description of Artificial Sequence: Synthetic oligonucleotide
  Sense strand starting at position 3252 of SEQ ID NO: 1561522
uaauaugugcuuggcaauu

SEQ ID NO: 1678294 - RNA, 19 nt, Artificial Sequence
  Description of Artificial Sequence: Synthetic oligonucleotide
  Antisense strand to SEQ ID NO: 1678293
aauugccaagcacauauua

SEQ ID NO: 1678295 - RNA, 19 nt, Artificial Sequence
  Description of Artificial Sequence: Synthetic oligonucleotide
  Sense strand starting at position 3365 of SEQ ID NO: 1561522
ugaguaaaccaaggucuau

SEQ ID NO: 1678296 - RNA, 19 nt, Artificial Sequence
  Description of Artificial Sequence: Synthetic oligonucleotide
  Antisense strand to SEQ ID NO: 1678295
auagaccuugguuuacuca

SEQ ID NO: 1678297 - RNA, 19 nt, Artificial Sequence
  Description of Artificial Sequence: Synthetic oligonucleotide
  Sense strand starting at position 3418 of SEQ ID NO: 1561522
ggaauuacaucugauaaca

SEQ ID NO: 1678298 - RNA, 19 nt, Artificial Sequence
  Description of Artificial Sequence: Synthetic oligonucleotide
  Antisense strand to SEQ ID NO: 1678297
uguuaucagauguaauucc

SEQ ID NO: 1678299 - RNA, 19 nt, Artificial Sequence
  Description of Artificial Sequence: Synthetic oligonucleotide
  Sense strand starting at position 3619 of SEQ ID NO: 1561522
cuacgaugucucgaucuuu

SEQ ID NO: 1678300 - RNA, 19 nt, Artificial Sequence
  Description of Artificial Sequence: Synthetic oligonucleotide
  Antisense strand to SEQ ID NO: 1678299
aaagaucgagacaucguag

SEQ ID NO: 1678301 - RNA, 19 nt, Artificial Sequence
  Description of Artificial Sequence: Synthetic oligonucleotide
  Sense strand starting at position 3725 of SEQ ID NO: 1561522
guauuaaaugcacaagauu

SEQ ID NO: 1678302 - RNA, 19 nt, Artificial Sequence
  Description of Artificial Sequence: Synthetic oligonucleotide
  Antisense strand to SEQ ID NO: 1678301
aaucuugugcauuuaauac

SEQ ID NO: 1678303 - RNA, 19 nt, Artificial Sequence
  Description of Artificial Sequence: Synthetic oligonucleotide
  Sense strand starting at position 3940 of SEQ ID NO: 1561522
ccuaauguuguacauuaau

SEQ ID NO: 1678304 - RNA, 19 nt, Artificial Sequence
  Description of Artificial Sequence: Synthetic oligonucleotide
  Antisense strand to SEQ ID NO: 1678303
auuaauguacaacauuagg

SEQ ID NO: 1678305 - RNA, 19 nt, Artificial Sequence
  Description of Artificial Sequence: Synthetic oligonucleotide
  Sense strand starting at position 3949 of SEQ ID NO: 1561522
guacauuaauuuccgugau

SEQ ID NO: 1678306 - RNA, 19 nt, Artificial Sequence
  Description of Artificial Sequence: Synthetic oligonucleotide
  Antisense strand to SEQ ID NO: 1678305
aucacggaaauuaauguac

SEQ ID NO: 1678307 - RNA, 19 nt, Artificial Sequence
  Description of Artificial Sequence: Synthetic oligonucleotide
  Sense strand starting at position 3950 of SEQ ID NO: 1561522
uacauuaauuuccgugaug

SEQ ID NO: 1678308 - RNA, 19 nt, Artificial Sequence
  Description of Artificial Sequence: Synthetic oligonucleotide
  Antisense strand to SEQ ID NO: 1678307
caucacggaaauuaaugua

SEQ ID NO: 1678309 - RNA, 19 nt, Artificial Sequence
  Description of Artificial Sequence: Synthetic oligonucleotide
  Sense strand starting at position 3963 of SEQ ID NO: 1561522
gugaugggugccguaguau

SEQ ID NO: 1678310 - RNA, 19 nt, Artificial Sequence
  Description of Artificial Sequence: Synthetic oligonucleotide
  Antisense strand to SEQ ID NO: 1678309
auacuacggcacccaucac

SEQ ID NO: 1678311 - RNA, 19 nt, Artificial Sequence
  Description of Artificial Sequence: Synthetic oligonucleotide
  Sense strand starting at position 363 of SEQ ID NO: 1561523
gggcacugugccugggaua

SEQ ID NO: 1678312 - RNA, 19 nt, Artificial Sequence
  Description of Artificial Sequence: Synthetic oligonucleotide
  Antisense strand to SEQ ID NO: 1678311
uaucccaggcacagugccc

SEQ ID NO: 1678313 - RNA, 19 nt, Artificial Sequence
  Description of Artificial Sequence: Synthetic oligonucleotide
  Sense strand starting at position 364 of SEQ ID NO: 1561523
ggcacugugccugggauaa

SEQ ID NO: 1678314 - RNA, 19 nt, Artificial Sequence
  Description of Artificial Sequence: Synthetic oligonucleotide
  Antisense strand to SEQ ID NO: 1678313
uuaucccaggcacagugcc

SEQ ID NO: 1678315 - RNA, 19 nt, Artificial Sequence
  Description of Artificial Sequence: Synthetic oligonucleotide
  Sense strand starting at position 419 of SEQ ID NO: 1561523
gcugguacuguuuaauaau

SEQ ID NO: 1678316 - RNA, 19 nt, Artificial Sequence
  Description of Artificial Sequence: Synthetic oligonucleotide
  Antisense strand to SEQ ID NO: 1678315
auuauuaaacaguaccagc

SEQ ID NO: 1678317 - RNA, 19 nt, Artificial Sequence
  Description of Artificial Sequence: Synthetic oligonucleotide
  Sense strand starting at position 578 of SEQ ID NO: 1561523
uuauauugugucuguuuac

SEQ ID NO: 1678318 - RNA, 19 nt, Artificial Sequence
  Description of Artificial Sequence: Synthetic oligonucleotide
  Antisense strand to SEQ ID NO: 1678317
guaaacagacacaauauaa

SEQ ID NO: 1678319 - RNA, 19 nt, Artificial Sequence
  Description of Artificial Sequence: Synthetic oligonucleotide
  Sense strand starting at position 579 of SEQ ID NO: 1561523
uauauugugucuguuuacu

SEQ ID NO: 1678320 - RNA, 19 nt, Artificial Sequence
  Description of Artificial Sequence: Synthetic oligonucleotide
  Antisense strand to SEQ ID NO: 1678319
aguaaacagacacaauaua

SEQ ID NO: 1678321 - RNA, 19 nt, Artificial Sequence
  Description of Artificial Sequence: Synthetic oligonucleotide
  Sense strand starting at position 588 of SEQ ID NO: 1561523
ucuguuuacuuguuuguga

SEQ ID NO: 1678322 - RNA, 19 nt, Artificial Sequence
  Description of Artificial Sequence: Synthetic oligonucleotide
  Antisense strand to SEQ ID NO: 1678321
ucacaaacaaguaaacaga

SEQ ID NO: 1678323 - RNA, 19 nt, Artificial Sequence
  Description of Artificial Sequence: Synthetic oligonucleotide
  Sense strand starting at position 590 of SEQ ID NO: 1561523
uguuuacuuguuugugacu

SEQ ID NO: 1678324 - RNA, 19 nt, Artificial Sequence
  Description of Artificial Sequence: Synthetic oligonucleotide
  Antisense strand to SEQ ID NO: 1678323
agucacaaacaaguaaaca

SEQ ID NO: 1678325 - RNA, 19 nt, Artificial Sequence
  Description of Artificial Sequence: Synthetic oligonucleotide
  Sense strand starting at position 591 of SEQ ID NO: 1561523
guuuacuuguuugugacuu

SEQ ID NO: 1678326 - RNA, 19 nt, Artificial Sequence
  Description of Artificial Sequence: Synthetic oligonucleotide
  Antisense strand to SEQ ID NO: 1678325
aagucacaaacaaguaaac

SEQ ID NO: 1678327 - RNA, 19 nt, Artificial Sequence
  Description of Artificial Sequence: Synthetic oligonucleotide
  Sense strand starting at position 597 of SEQ ID NO: 1561523
uuguuugugacuuguagag

SEQ ID NO: 1678328 - RNA, 19 nt, Artificial Sequence
  Description of Artificial Sequence: Synthetic oligonucleotide
  Antisense strand to SEQ ID NO: 1678327
cucuacaagucacaaacaa

SEQ ID NO: 1678329 - RNA, 19 nt, Artificial Sequence
  Description of Artificial Sequence: Synthetic oligonucleotide
  Sense strand starting at position 622 of SEQ ID NO: 1561523
cuagaucuguaagaauaga

SEQ ID NO: 1678330 - RNA, 19 nt, Artificial Sequence
  Description of Artificial Sequence: Synthetic oligonucleotide
  Antisense strand to SEQ ID NO: 1678329
ucuauucuuacagaucuag

SEQ ID NO: 1678331 - RNA, 19 nt, Artificial Sequence
  Description of Artificial Sequence: Synthetic oligonucleotide
  Sense strand starting at position 799 of SEQ ID NO: 1561523
aaaucaguucuaugaggca

SEQ ID NO: 1678332 - RNA, 19 nt, Artificial Sequence
  Description of Artificial Sequence: Synthetic oligonucleotide
  Antisense strand to SEQ ID NO: 1678331
ugccucauagaacugauuu

SEQ ID NO: 1678333 - RNA, 19 nt, Artificial Sequence
  Description of Artificial Sequence: Synthetic oligonucleotide
  Sense strand starting at position 804 of SEQ ID NO: 1561523
aguucuaugaggcaagacu

SEQ ID NO: 1678334 - RNA, 19 nt, Artificial Sequence
  Description of Artificial Sequence: Synthetic oligonucleotide
  Antisense strand to SEQ ID NO: 1678333
agucuugccucauagaacu

SEQ ID NO: 1678335 - RNA, 19 nt, Artificial Sequence
  Description of Artificial Sequence: Synthetic oligonucleotide
  Sense strand starting at position 979 of SEQ ID NO: 1561523
aucucagaguuuguauaau

SEQ ID NO: 1678336 - RNA, 19 nt, Artificial Sequence
  Description of Artificial Sequence: Synthetic oligonucleotide
  Antisense strand to SEQ ID NO: 1678335
auuauacaaacucugagau

SEQ ID NO: 1678337 - RNA, 19 nt, Artificial Sequence
  Description of Artificial Sequence: Synthetic oligonucleotide
  Sense strand starting at position 1055 of SEQ ID NO: 1561523
ugaacacauuuauaaaggu

SEQ ID NO: 1678338 - RNA, 19 nt, Artificial Sequence
  Description of Artificial Sequence: Synthetic oligonucleotide
  Antisense strand to SEQ ID NO: 1678337
accuuuauaaauguguuca

SEQ ID NO: 1678339 - RNA, 19 nt, Artificial Sequence
  Description of Artificial Sequence: Synthetic oligonucleotide
  Sense strand starting at position 1167 of SEQ ID NO: 1561523
aggugaugacaucgcaagu

SEQ ID NO: 1678340 - RNA, 19 nt, Artificial Sequence
  Description of Artificial Sequence: Synthetic oligonucleotide
  Antisense strand to SEQ ID NO: 1678339
acuugcgaugucaucaccu

SEQ ID NO: 1678341 - RNA, 19 nt, Artificial Sequence
  Description of Artificial Sequence: Synthetic oligonucleotide
  Sense strand starting at position 1378 of SEQ ID NO: 1561523
guggcaaaugucuguaauu

SEQ ID NO: 1678342 - RNA, 19 nt, Artificial Sequence
  Description of Artificial Sequence: Synthetic oligonucleotide
  Antisense strand to SEQ ID NO: 1678341
aauuacagacauuugccac

SEQ ID NO: 1678343 - RNA, 19 nt, Artificial Sequence
  Description of Artificial Sequence: Synthetic oligonucleotide
  Sense strand starting at position 1379 of SEQ ID NO: 1561523
uggcaaaugucuguaauua

SEQ ID NO: 1678344 - RNA, 19 nt, Artificial Sequence
  Description of Artificial Sequence: Synthetic oligonucleotide
  Antisense strand to SEQ ID NO: 1678343
uaauuacagacauuugcca

SEQ ID NO: 1678345 - RNA, 19 nt, Artificial Sequence
  Description of Artificial Sequence: Synthetic oligonucleotide
  Sense strand starting at position 1380 of SEQ ID NO: 1561523
ggcaaaugucuguaauuac

SEQ ID NO: 1678346 - RNA, 19 nt, Artificial Sequence
  Description of Artificial Sequence: Synthetic oligonucleotide
  Antisense strand to SEQ ID NO: 1678345
guaauuacagacauuugcc

SEQ ID NO: 1678347 - RNA, 19 nt, Artificial Sequence
  Description of Artificial Sequence: Synthetic oligonucleotide
  Sense strand starting at position 1716 of SEQ ID NO: 1561523
gccaucuuaugguccaagu

SEQ ID NO: 1678348 - RNA, 19 nt, Artificial Sequence
  Description of Artificial Sequence: Synthetic oligonucleotide
  Antisense strand to SEQ ID NO: 1678347
acuuggaccauaagauggc

SEQ ID NO: 1678349 - RNA, 19 nt, Artificial Sequence
  Description of Artificial Sequence: Synthetic oligonucleotide
  Sense strand starting at position 1757 of SEQ ID NO: 1561523
gagaacucagggcgcaaau

SEQ ID NO: 1678350 - RNA, 19 nt, Artificial Sequence
  Description of Artificial Sequence: Synthetic oligonucleotide
  Antisense strand to SEQ ID NO: 1678349
auuugcgcccugaguucuc

SEQ ID NO: 1678351 - RNA, 19 nt, Artificial Sequence
  Description of Artificial Sequence: Synthetic oligonucleotide
  Sense strand starting at position 1832 of SEQ ID NO: 1561523
ggaugucggacccgacauu

SEQ ID NO: 1678352 - RNA, 19 nt, Artificial Sequence
  Description of Artificial Sequence: Synthetic oligonucleotide
  Antisense strand to SEQ ID NO: 1678351
aaugucggguccgacaucc

SEQ ID NO: 1678353 - RNA, 19 nt, Artificial Sequence
  Description of Artificial Sequence: Synthetic oligonucleotide
  Sense strand starting at position 1879 of SEQ ID NO: 1561523
uggcgucuuagcuauggau

SEQ ID NO: 1678354 - RNA, 19 nt, Artificial Sequence
  Description of Artificial Sequence: Synthetic oligonucleotide
  Antisense strand to SEQ ID NO: 1678353
auccauagcuaagacgcca

SEQ ID NO: 1678355 - RNA, 19 nt, Artificial Sequence
  Description of Artificial Sequence: Synthetic oligonucleotide
  Sense strand starting at position 1886 of SEQ ID NO: 1561523
uuagcuauggaucgccaau

SEQ ID NO: 1678356 - RNA, 19 nt, Artificial Sequence
  Description of Artificial Sequence: Synthetic oligonucleotide
  Antisense strand to SEQ ID NO: 1678355
auuggcgauccauagcuaa

SEQ ID NO: 1678357 - RNA, 19 nt, Artificial Sequence
  Description of Artificial Sequence: Synthetic oligonucleotide
  Sense strand starting at position 2079 of SEQ ID NO: 1561523
cugacuggauaaugauuaa

SEQ ID NO: 1678358 - RNA, 19 nt, Artificial Sequence
  Description of Artificial Sequence: Synthetic oligonucleotide
  Antisense strand to SEQ ID NO: 1678357
uuaaucauuauccagucag

SEQ ID NO: 1678359 - RNA, 19 nt, Artificial Sequence
  Description of Artificial Sequence: Synthetic oligonucleotide
  Sense strand starting at position 2109 of SEQ ID NO: 1561523
ucagguccugagugacaga

SEQ ID NO: 1678360 - RNA, 19 nt, Artificial Sequence
  Description of Artificial Sequence: Synthetic oligonucleotide
  Antisense strand to SEQ ID NO: 1678359
ucugucacucaggaccuga

SEQ ID NO: 1678361 - RNA, 19 nt, Artificial Sequence
  Description of Artificial Sequence: Synthetic oligonucleotide
  Sense strand starting at position 2112 of SEQ ID NO: 1561523
gguccugagugacagaaga

SEQ ID NO: 1678362 - RNA, 19 nt, Artificial Sequence
  Description of Artificial Sequence: Synthetic oligonucleotide
  Antisense strand to SEQ ID NO: 1678361
ucuucugucacucaggacc

SEQ ID NO: 1678363 - RNA, 19 nt, Artificial Sequence
  Description of Artificial Sequence: Synthetic oligonucleotide
  Sense strand starting at position 2138 of SEQ ID NO: 1561523
agaugcucugcugaaugaa

SEQ ID NO: 1678364 - RNA, 19 nt, Artificial Sequence
  Description of Artificial Sequence: Synthetic oligonucleotide
  Antisense strand to SEQ ID NO: 1678363
uucauucagcagagcaucu

SEQ ID NO: 1678365 - RNA, 19 nt, Artificial Sequence
  Description of Artificial Sequence: Synthetic oligonucleotide
  Sense strand starting at position 2423 of SEQ ID NO: 1561523
gcuugaugcccgucacuca

SEQ ID NO: 1678366 - RNA, 19 nt, Artificial Sequence
  Description of Artificial Sequence: Synthetic oligonucleotide
  Antisense strand to SEQ ID NO: 1678365
ugagugacgggcaucaagc

SEQ ID NO: 1678367 - RNA, 19 nt, Artificial Sequence
  Description of Artificial Sequence: Synthetic oligonucleotide
  Sense strand starting at position 2469 of SEQ ID NO: 1561523
guuacucaggccugggaga

SEQ ID NO: 1678368 - RNA, 19 nt, Artificial Sequence
  Description of Artificial Sequence: Synthetic oligonucleotide
  Antisense strand to SEQ ID NO: 1678367
ucucccaggccugaguaac

SEQ ID NO: 1678369 - RNA, 19 nt, Artificial Sequence
  Description of Artificial Sequence: Synthetic oligonucleotide
  Sense strand starting at position 3074 of SEQ ID NO: 1561523
gcuacaugauaguuacaga

SEQ ID NO: 1678370 - RNA, 19 nt, Artificial Sequence
  Description of Artificial Sequence: Synthetic oligonucleotide
  Antisense strand to SEQ ID NO: 1678369
ucuguaacuaucauguagc

SEQ ID NO: 1678371 - RNA, 19 nt, Artificial Sequence
  Description of Artificial Sequence: Synthetic oligonucleotide
  Sense strand starting at position 3103 of SEQ ID NO: 1561523
ucccauagguacuugucaa

SEQ ID NO: 1678372 - RNA, 19 nt, Artificial Sequence
  Description of Artificial Sequence: Synthetic oligonucleotide
  Antisense strand to SEQ ID NO: 1678371
uugacaaguaccuauggga

SEQ ID NO: 1678373 - RNA, 19 nt, Artificial Sequence
  Description of Artificial Sequence: Synthetic oligonucleotide
  Sense strand starting at position 3188 of SEQ ID NO: 1561523
gcccuaacucacuagagca

SEQ ID NO: 1678374 - RNA, 19 nt, Artificial Sequence
  Description of Artificial Sequence: Synthetic oligonucleotide
  Antisense strand to SEQ ID NO: 1678373
ugcucuagugaguuagggc

SEQ ID NO: 1678375 - RNA, 19 nt, Artificial Sequence
  Description of Artificial Sequence: Synthetic oligonucleotide
  Sense strand starting at position 3447 of SEQ ID NO: 1561523
aggcuuguauggguguauu

SEQ ID NO: 1678376 - RNA, 19 nt, Artificial Sequence
  Description of Artificial Sequence: Synthetic oligonucleotide
  Antisense strand to SEQ ID NO: 1678375
aauacacccauacaagccu

SEQ ID NO: 1678377 - RNA, 19 nt, Artificial Sequence
  Description of Artificial Sequence: Synthetic oligonucleotide
  Sense strand starting at position 3458 of SEQ ID NO: 1561523
gguguauuuguauaggcuu

SEQ ID NO: 1678378 - RNA, 19 nt, Artificial Sequence
  Description of Artificial Sequence: Synthetic oligonucleotide
  Antisense strand to SEQ ID NO: 1678377
aagccuauacaaauacacc

SEQ ID NO: 1678379 - RNA, 19 nt, Artificial Sequence
  Description of Artificial Sequence: Synthetic oligonucleotide
  Sense strand starting at position 3465 of SEQ ID NO: 1561523
uuguauaggcuuuauuaga

SEQ ID NO: 1678380 - RNA, 19 nt, Artificial Sequence
  Description of Artificial Sequence: Synthetic oligonucleotide
  Antisense strand to SEQ ID NO: 1678379
ucuaauaaagccuauacaa

SEQ ID NO: 1678381 - RNA, 19 nt, Artificial Sequence
  Description of Artificial Sequence: Synthetic oligonucleotide
  Sense strand starting at position 3470 of SEQ ID NO: 1561523
uaggcuuuauuagaaggaa

SEQ ID NO: 1678382 - RNA, 19 nt, Artificial Sequence
  Description of Artificial Sequence: Synthetic oligonucleotide
  Antisense strand to SEQ ID NO: 1678381
uuccuucuaauaaagccua

SEQ ID NO: 1678383 - RNA, 19 nt, Artificial Sequence
  Description of Artificial Sequence: Synthetic oligonucleotide
  Sense strand starting at position 3537 of SEQ ID NO: 1561523
cuuccaugucaugaacgau

SEQ ID NO: 1678384 - RNA, 19 nt, Artificial Sequence
  Description of Artificial Sequence: Synthetic oligonucleotide
  Antisense strand to SEQ ID NO: 1678383
aucguucaugacauggaag

SEQ ID NO: 1678385 - RNA, 19 nt, Artificial Sequence
  Description of Artificial Sequence: Synthetic oligonucleotide
  Sense strand starting at position 3540 of SEQ ID NO: 1561523
ccaugucaugaacgaugau

SEQ ID NO: 1678386 - RNA, 19 nt, Artificial Sequence
  Description of Artificial Sequence: Synthetic oligonucleotide
  Antisense strand to SEQ ID NO: 1678385
aucaucguucaugacaugg

SEQ ID NO: 1678387 - RNA, 19 nt, Artificial Sequence
  Description of Artificial Sequence: Synthetic oligonucleotide
  Sense strand starting at position 3543 of SEQ ID NO: 1561523
ugucaugaacgaugauguu

SEQ ID NO: 1678388 - RNA, 19 nt, Artificial Sequence
  Description of Artificial Sequence: Synthetic oligonucleotide
  Antisense strand to SEQ ID NO: 1678387
aacaucaucguucaugaca

SEQ ID NO: 1678389 - RNA, 19 nt, Artificial Sequence
  Description of Artificial Sequence: Synthetic oligonucleotide
  Sense strand starting at position 3573 of SEQ ID NO: 1561523
gcugucuuugugcaaagua

SEQ ID NO: 1678390 - RNA, 19 nt, Artificial Sequence
  Description of Artificial Sequence: Synthetic oligonucleotide
  Antisense strand to SEQ ID NO: 1678389
uacuuugcacaaagacagc

SEQ ID NO: 1678391 - RNA, 19 nt, Artificial Sequence
  Description of Artificial Sequence: Synthetic oligonucleotide
  Sense strand starting at position 48 of SEQ ID NO: 1561524
uauagauugugucccagga

SEQ ID NO: 1678392 - RNA, 19 nt, Artificial Sequence
  Description of Artificial Sequence: Synthetic oligonucleotide
  Antisense strand to SEQ ID NO: 1678391
uccugggacacaaucuaua

SEQ ID NO: 1678393 - RNA, 19 nt, Artificial Sequence
  Description of Artificial Sequence: Synthetic oligonucleotide
  Sense strand starting at position 131 of SEQ ID NO: 1561524
gaagccuggguuggugaaa

SEQ ID NO: 1678394 - RNA, 19 nt, Artificial Sequence
  Description of Artificial Sequence: Synthetic oligonucleotide
  Antisense strand to SEQ ID NO: 1678393
uuucaccaacccaggcuuc

SEQ ID NO: 1678395 - RNA, 19 nt, Artificial Sequence
  Description of Artificial Sequence: Synthetic oligonucleotide
  Sense strand starting at position 264 of SEQ ID NO: 1561524
cggcaauacugauuggaac

SEQ ID NO: 1678396 - RNA, 19 nt, Artificial Sequence
  Description of Artificial Sequence: Synthetic oligonucleotide
  Antisense strand to SEQ ID NO: 1678395
guuccaaucaguauugccg

SEQ ID NO: 1678397 - RNA, 19 nt, Artificial Sequence
  Description of Artificial Sequence: Synthetic oligonucleotide
  Sense strand starting at position 265 of SEQ ID NO: 1561524
ggcaauacugauuggaaca

SEQ ID NO: 1678398 - RNA, 19 nt, Artificial Sequence
  Description of Artificial Sequence: Synthetic oligonucleotide
  Antisense strand to SEQ ID NO: 1678397
uguuccaaucaguauugcc

SEQ ID NO: 1678399 - RNA, 19 nt, Artificial Sequence
  Description of Artificial Sequence: Synthetic oligonucleotide
  Sense strand starting at position 317 of SEQ ID NO: 1561524
auucuaucauuugggacau

SEQ ID NO: 1678400 - RNA, 19 nt, Artificial Sequence
  Description of Artificial Sequence: Synthetic oligonucleotide
  Antisense strand to SEQ ID NO: 1678399
augucccaaaugauagaau

SEQ ID NO: 1678401 - RNA, 19 nt, Artificial Sequence
  Description of Artificial Sequence: Synthetic oligonucleotide
  Sense strand starting at position 402 of SEQ ID NO: 1561524
cccacugugucccuuagau

SEQ ID NO: 1678402 - RNA, 19 nt, Artificial Sequence
  Description of Artificial Sequence: Synthetic oligonucleotide
  Antisense strand to SEQ ID NO: 1678401
aucuaagggacacaguggg

SEQ ID NO: 1678403 - RNA, 19 nt, Artificial Sequence
  Description of Artificial Sequence: Synthetic oligonucleotide
  Sense strand starting at position 552 of SEQ ID NO: 1561524
agcacuguaucucuaagaa

SEQ ID NO: 1678404 - RNA, 19 nt, Artificial Sequence
  Description of Artificial Sequence: Synthetic oligonucleotide
  Antisense strand to SEQ ID NO: 1678403
uucuuagagauacagugcu

SEQ ID NO: 1678405 - RNA, 19 nt, Artificial Sequence
  Description of Artificial Sequence: Synthetic oligonucleotide
  Sense strand starting at position 617 of SEQ ID NO: 1561524
uugcuuucagaggaaaggu

SEQ ID NO: 1678406 - RNA, 19 nt, Artificial Sequence
  Description of Artificial Sequence: Synthetic oligonucleotide
  Antisense strand to SEQ ID NO: 1678405
accuuuccucugaaagcaa

SEQ ID NO: 1678407 - RNA, 19 nt, Artificial Sequence
  Description of Artificial Sequence: Synthetic oligonucleotide
  Sense strand starting at position 900 of SEQ ID NO: 1561524
ggugucugugccuaggaaa

SEQ ID NO: 1678408 - RNA, 19 nt, Artificial Sequence
  Description of Artificial Sequence: Synthetic oligonucleotide
  Antisense strand to SEQ ID NO: 1678407
uuuccuaggcacagacacc

SEQ ID NO: 1678409 - RNA, 19 nt, Artificial Sequence
  Description of Artificial Sequence: Synthetic oligonucleotide
  Sense strand starting at position 973 of SEQ ID NO: 1561524
ugguggaguguugggauua

SEQ ID NO: 1678410 - RNA, 19 nt, Artificial Sequence
  Description of Artificial Sequence: Synthetic oligonucleotide
  Antisense strand to SEQ ID NO: 1678409
uaaucccaacacuccacca

SEQ ID NO: 1678411 - RNA, 19 nt, Artificial Sequence
  Description of Artificial Sequence: Synthetic oligonucleotide
  Sense strand starting at position 978 of SEQ ID NO: 1561524
gaguguugggauuauucuc

SEQ ID NO: 1678412 - RNA, 19 nt, Artificial Sequence
  Description of Artificial Sequence: Synthetic oligonucleotide
  Antisense strand to SEQ ID NO: 1678411
gagaauaaucccaacacuc

SEQ ID NO: 1678413 - RNA, 19 nt, Artificial Sequence
  Description of Artificial Sequence: Synthetic oligonucleotide
  Sense strand starting at position 983 of SEQ ID NO: 1561524
uugggauuauucucugcuu

SEQ ID NO: 1678414 - RNA, 19 nt, Artificial Sequence
  Description of Artificial Sequence: Synthetic oligonucleotide
  Antisense strand to SEQ ID NO: 1678413
aagcagagaauaaucccaa

SEQ ID NO: 1678415 - RNA, 19 nt, Artificial Sequence
  Description of Artificial Sequence: Synthetic oligonucleotide
  Sense strand starting at position 984 of SEQ ID NO: 1561524
ugggauuauucucugcuuu

SEQ ID NO: 1678416 - RNA, 19 nt, Artificial Sequence
  Description of Artificial Sequence: Synthetic oligonucleotide
  Antisense strand to SEQ ID NO: 1678415
aaagcagagaauaauccca

SEQ ID NO: 1678417 - RNA, 19 nt, Artificial Sequence
  Description of Artificial Sequence: Synthetic oligonucleotide
  Sense strand starting at position 1152 of SEQ ID NO: 1561524
gaaguugguguugaagaau

SEQ ID NO: 1678418 - RNA, 19 nt, Artificial Sequence
  Description of Artificial Sequence: Synthetic oligonucleotide
  Antisense strand to SEQ ID NO: 1678417
auucuucaacaccaacuuc

SEQ ID NO: 1678419 - RNA, 19 nt, Artificial Sequence
  Description of Artificial Sequence: Synthetic oligonucleotide
  Sense strand starting at position 1242 of SEQ ID NO: 1561524
uugagauucuguuugucac

SEQ ID NO: 1678420 - RNA, 19 nt, Artificial Sequence
  Description of Artificial Sequence: Synthetic oligonucleotide
  Antisense strand to SEQ ID NO: 1678419
gugacaaacagaaucucaa

SEQ ID NO: 1678421 - RNA, 19 nt, Artificial Sequence
  Description of Artificial Sequence: Synthetic oligonucleotide
  Sense strand starting at position 1243 of SEQ ID NO: 1561524
ugagauucuguuugucaca

SEQ ID NO: 1678422 - RNA, 19 nt, Artificial Sequence
  Description of Artificial Sequence: Synthetic oligonucleotide
  Antisense strand to SEQ ID NO: 1678421
ugugacaaacagaaucuca

SEQ ID NO: 1678423 - RNA, 19 nt, Artificial Sequence
  Description of Artificial Sequence: Synthetic oligonucleotide
  Sense strand starting at position 1245 of SEQ ID NO: 1561524
agauucuguuugucacaca

SEQ ID NO: 1678424 - RNA, 19 nt, Artificial Sequence
  Description of Artificial Sequence: Synthetic oligonucleotide
  Antisense strand to SEQ ID NO: 1678423
ugugugacaaacagaaucu

SEQ ID NO: 1678425 - RNA, 19 nt, Artificial Sequence
  Description of Artificial Sequence: Synthetic oligonucleotide
  Sense strand starting at position 1287 of SEQ ID NO: 1561524
acuucuguggaguguuaaa

SEQ ID NO: 1678426 - RNA, 19 nt, Artificial Sequence
  Description of Artificial Sequence: Synthetic oligonucleotide
  Antisense strand to SEQ ID NO: 1678425
uuuaacacuccacagaagu

SEQ ID NO: 1678427 - RNA, 19 nt, Artificial Sequence
  Description of Artificial Sequence: Synthetic oligonucleotide
  Sense strand starting at position 1530 of SEQ ID NO: 1561524
acgagucaguuacugaauu

SEQ ID NO: 1678428 - RNA, 19 nt, Artificial Sequence
  Description of Artificial Sequence: Synthetic oligonucleotide
  Antisense strand to SEQ ID NO: 1678427
aauucaguaacugacucgu

SEQ ID NO: 1678429 - RNA, 19 nt, Artificial Sequence
  Description of Artificial Sequence: Synthetic oligonucleotide
  Sense strand starting at position 1629 of SEQ ID NO: 1561524
gugcucucugagcauaaau

SEQ ID NO: 1678430 - RNA, 19 nt, Artificial Sequence
  Description of Artificial Sequence: Synthetic oligonucleotide
  Antisense strand to SEQ ID NO: 1678429
auuuaugcucagagagcac

SEQ ID NO: 1678431 - RNA, 19 nt, Artificial Sequence
  Description of Artificial Sequence: Synthetic oligonucleotide
  Sense strand starting at position 1631 of SEQ ID NO: 1561524
gcucucugagcauaaauca

SEQ ID NO: 1678432 - RNA, 19 nt, Artificial Sequence
  Description of Artificial Sequence: Synthetic oligonucleotide
  Antisense strand to SEQ ID NO: 1678431
ugauuuaugcucagagagc

SEQ ID NO: 1678433 - RNA, 19 nt, Artificial Sequence
  Description of Artificial Sequence: Synthetic oligonucleotide
  Sense strand starting at position 2114 of SEQ ID NO: 1561524
gagucuuagcucuggaucu

SEQ ID NO: 1678434 - RNA, 19 nt, Artificial Sequence
  Description of Artificial Sequence: Synthetic oligonucleotide
  Antisense strand to SEQ ID NO: 1678433
agauccagagcuaagacuc

SEQ ID NO: 1678435 - RNA, 19 nt, Artificial Sequence
  Description of Artificial Sequence: Synthetic oligonucleotide
  Sense strand starting at position 2116 of SEQ ID NO: 1561524
gucuuagcucuggaucuca

SEQ ID NO: 1678436 - RNA, 19 nt, Artificial Sequence
  Description of Artificial Sequence: Synthetic oligonucleotide
  Antisense strand to SEQ ID NO: 1678435
ugagauccagagcuaagac

SEQ ID NO: 1678437 - RNA, 19 nt, Artificial Sequence
  Description of Artificial Sequence: Synthetic oligonucleotide
  Sense strand starting at position 2311 of SEQ ID NO: 1561524
cacucuagcgcccaugauu

SEQ ID NO: 1678438 - RNA, 19 nt, Artificial Sequence
  Description of Artificial Sequence: Synthetic oligonucleotide
  Antisense strand to SEQ ID NO: 1678437
aaucaugggcgcuagagug

SEQ ID NO: 1678439 - RNA, 19 nt, Artificial Sequence
  Description of Artificial Sequence: Synthetic oligonucleotide
  Sense strand starting at position 2372 of SEQ ID NO: 1561524
ggaggcgugaucugagaau

SEQ ID NO: 1678440 - RNA, 19 nt, Artificial Sequence
  Description of Artificial Sequence: Synthetic oligonucleotide
  Antisense strand to SEQ ID NO: 1678439
auucucagaucacgccucc

SEQ ID NO: 1678441 - RNA, 19 nt, Artificial Sequence
  Description of Artificial Sequence: Synthetic oligonucleotide
  Sense strand starting at position 2381 of SEQ ID NO: 1561524
aucugagaauguguugaau

SEQ ID NO: 1678442 - RNA, 19 nt, Artificial Sequence
  Description of Artificial Sequence: Synthetic oligonucleotide
  Antisense strand to SEQ ID NO: 1678441
auucaacacauucucagau

SEQ ID NO: 1678443 - RNA, 19 nt, Artificial Sequence
  Description of Artificial Sequence: Synthetic oligonucleotide
  Sense strand starting at position 2387 of SEQ ID NO: 1561524
gaauguguugaauaaggca

SEQ ID NO: 1678444 - RNA, 19 nt, Artificial Sequence
  Description of Artificial Sequence: Synthetic oligonucleotide
  Antisense strand to SEQ ID NO: 1678443
ugccuuauucaacacauuc

SEQ ID NO: 1678445 - RNA, 19 nt, Artificial Sequence
  Description of Artificial Sequence: Synthetic oligonucleotide
  Sense strand starting at position 2392 of SEQ ID NO: 1561524
uguugaauaaggcaagagu

SEQ ID NO: 1678446 - RNA, 19 nt, Artificial Sequence
  Description of Artificial Sequence: Synthetic oligonucleotide
  Antisense strand to SEQ ID NO: 1678445
acucuugccuuauucaaca

SEQ ID NO: 1678447 - RNA, 19 nt, Artificial Sequence
  Description of Artificial Sequence: Synthetic oligonucleotide
  Sense strand starting at position 2438 of SEQ ID NO: 1561524
gcgcgcuuccuuccugaau

SEQ ID NO: 1678448 - RNA, 19 nt, Artificial Sequence
  Description of Artificial Sequence: Synthetic oligonucleotide
  Antisense strand to SEQ ID NO: 1678447
auucaggaaggaagcgcgc

SEQ ID NO: 1678449 - RNA, 19 nt, Artificial Sequence
  Description of Artificial Sequence: Synthetic oligonucleotide
  Sense strand starting at position 2520 of SEQ ID NO: 1561524
gugaauaguauacauaugu

SEQ ID NO: 1678450 - RNA, 19 nt, Artificial Sequence
  Description of Artificial Sequence: Synthetic oligonucleotide
  Antisense strand to SEQ ID NO: 1678449
acauauguauacuauucac

SEQ ID NO: 1678451 - RNA, 19 nt, Artificial Sequence
  Description of Artificial Sequence: Synthetic oligonucleotide
  Sense strand starting at position 2658 of SEQ ID NO: 1561524
agaaauaaacugugaagca

SEQ ID NO: 1678452 - RNA, 19 nt, Artificial Sequence
  Description of Artificial Sequence: Synthetic oligonucleotide
  Antisense strand to SEQ ID NO: 1678451
ugcuucacaguuuauuucu

SEQ ID NO: 1678453 - RNA, 19 nt, Artificial Sequence
  Description of Artificial Sequence: Synthetic oligonucleotide
  Sense strand starting at position 3145 of SEQ ID NO: 1561524
ggcaaaucccggcagcaua

SEQ ID NO: 1678454 - RNA, 19 nt, Artificial Sequence
  Description of Artificial Sequence: Synthetic oligonucleotide
  Antisense strand to SEQ ID NO: 1678453
uaugcugccgggauuugcc

SEQ ID NO: 1678455 - RNA, 19 nt, Artificial Sequence
  Description of Artificial Sequence: Synthetic oligonucleotide
  Sense strand starting at position 3591 of SEQ ID NO: 1561524
guugcaacagaccaauuaa

SEQ ID NO: 1678456 - RNA, 19 nt, Artificial Sequence
  Description of Artificial Sequence: Synthetic oligonucleotide
  Antisense strand to SEQ ID NO: 1678455
uuaauuggucuguugcaac

SEQ ID NO: 1678457 - RNA, 19 nt, Artificial Sequence
  Description of Artificial Sequence: Synthetic oligonucleotide
  Sense strand starting at position 3608 of SEQ ID NO: 1561524
aaauuagaauccuuggagu

SEQ ID NO: 1678458 - RNA, 19 nt, Artificial Sequence
  Description of Artificial Sequence: Synthetic oligonucleotide
  Antisense strand to SEQ ID NO: 1678457
acuccaaggauucuaauuu

SEQ ID NO: 1678459 - RNA, 19 nt, Artificial Sequence
  Description of Artificial Sequence: Synthetic oligonucleotide
  Sense strand starting at position 3610 of SEQ ID NO: 1561524
auuagaauccuuggaguug

SEQ ID NO: 1678460 - RNA, 19 nt, Artificial Sequence
  Description of Artificial Sequence: Synthetic oligonucleotide
  Antisense strand to SEQ ID NO: 1678459
caacuccaaggauucuaau

SEQ ID NO: 1678461 - RNA, 19 nt, Artificial Sequence
  Description of Artificial Sequence: Synthetic oligonucleotide
  Sense strand starting at position 3621 of SEQ ID NO: 1561524
uggaguuggaucugggcaa

SEQ ID NO: 1678462 - RNA, 19 nt, Artificial Sequence
  Description of Artificial Sequence: Synthetic oligonucleotide
  Antisense strand to SEQ ID NO: 1678461
uugcccagauccaacucca

SEQ ID NO: 1678463 - RNA, 19 nt, Artificial Sequence
  Description of Artificial Sequence: Synthetic oligonucleotide
  Sense strand starting at position 3650 of SEQ ID NO: 1561524
uaaagcucucagggugauu

SEQ ID NO: 1678464 - RNA, 19 nt, Artificial Sequence
  Description of Artificial Sequence: Synthetic oligonucleotide
  Antisense strand to SEQ ID NO: 1678463
aaucacccugagagcuuua

SEQ ID NO: 1678465 - RNA, 19 nt, Artificial Sequence
  Description of Artificial Sequence: Synthetic oligonucleotide
  Sense strand starting at position 3653 of SEQ ID NO: 1561524
agcucucagggugauuaca

SEQ ID NO: 1678466 - RNA, 19 nt, Artificial Sequence
  Description of Artificial Sequence: Synthetic oligonucleotide
  Antisense strand to SEQ ID NO: 1678465
uguaaucacccugagagcu

SEQ ID NO: 1678467 - RNA, 19 nt, Artificial Sequence
  Description of Artificial Sequence: Synthetic oligonucleotide
  Sense strand starting at position 3661 of SEQ ID NO: 1561524
gggugauuacaguguguag

SEQ ID NO: 1678468 - RNA, 19 nt, Artificial Sequence
  Description of Artificial Sequence: Synthetic oligonucleotide
  Antisense strand to SEQ ID NO: 1678467
cuacacacuguaaucaccc

SEQ ID NO: 1678469 - RNA, 19 nt, Artificial Sequence
  Description of Artificial Sequence: Synthetic oligonucleotide
  Sense strand starting at position 3982 of SEQ ID NO: 1561524
gaauuacaggugugaccua

SEQ ID NO: 1678470 - RNA, 19 nt, Artificial Sequence
  Description of Artificial Sequence: Synthetic oligonucleotide
  Antisense strand to SEQ ID NO: 1678469
uaggucacaccuguaauuc

SEQ ID NO: 1678471 - RNA, 19 nt, Artificial Sequence
  Description of Artificial Sequence: Synthetic oligonucleotide
  Sense strand starting at position 51 of SEQ ID NO: 1561525
cggcaauacugauuggaac

SEQ ID NO: 1678472 - RNA, 19 nt, Artificial Sequence
  Description of Artificial Sequence: Synthetic oligonucleotide
  Antisense strand to SEQ ID NO: 1678471
guuccaaucaguauugccg

SEQ ID NO: 1678473 - RNA, 19 nt, Artificial Sequence
  Description of Artificial Sequence: Synthetic oligonucleotide
  Sense strand starting at position 52 of SEQ ID NO: 1561525
ggcaauacugauuggaaca

SEQ ID NO: 1678474 - RNA, 19 nt, Artificial Sequence
  Description of Artificial Sequence: Synthetic oligonucleotide
  Antisense strand to SEQ ID NO: 1678473
uguuccaaucaguauugcc

SEQ ID NO: 1678475 - RNA, 19 nt, Artificial Sequence
  Description of Artificial Sequence: Synthetic oligonucleotide
  Sense strand starting at position 104 of SEQ ID NO: 1561525
auucuaucauuugggacau

SEQ ID NO: 1678476 - RNA, 19 nt, Artificial Sequence
  Description of Artificial Sequence: Synthetic oligonucleotide
  Antisense strand to SEQ ID NO: 1678475
augucccaaaugauagaau

SEQ ID NO: 1678477 - RNA, 19 nt, Artificial Sequence
  Description of Artificial Sequence: Synthetic oligonucleotide
  Sense strand starting at position 189 of SEQ ID NO: 1561525
cccacugugucccuuagau

SEQ ID NO: 1678478 - RNA, 19 nt, Artificial Sequence
  Description of Artificial Sequence: Synthetic oligonucleotide
  Antisense strand to SEQ ID NO: 1678477
aucuaagggacacaguggg

SEQ ID NO: 1678479 - RNA, 19 nt, Artificial Sequence
  Description of Artificial Sequence: Synthetic oligonucleotide
  Sense strand starting at position 339 of SEQ ID NO: 1561525
agcacuguaucucuaagaa

SEQ ID NO: 1678480 - RNA, 19 nt, Artificial Sequence
  Description of Artificial Sequence: Synthetic oligonucleotide
  Antisense strand to SEQ ID NO: 1678479
uucuuagagauacagugcu

SEQ ID NO: 1678481 - RNA, 19 nt, Artificial Sequence
  Description of Artificial Sequence: Synthetic oligonucleotide
  Sense strand starting at position 404 of SEQ ID NO: 1561525
uugcuuucagaggaaaggu

SEQ ID NO: 1678482 - RNA, 19 nt, Artificial Sequence
  Description of Artificial Sequence: Synthetic oligonucleotide
  Antisense strand to SEQ ID NO: 1678481
accuuuccucugaaagcaa

SEQ ID NO: 1678483 - RNA, 19 nt, Artificial Sequence
  Description of Artificial Sequence: Synthetic oligonucleotide
  Sense strand starting at position 687 of SEQ ID NO: 1561525
ggugucugugccuaggaaa

SEQ ID NO: 1678484 - RNA, 19 nt, Artificial Sequence
  Description of Artificial Sequence: Synthetic oligonucleotide
  Antisense strand to SEQ ID NO: 1678483
uuuccuaggcacagacacc

SEQ ID NO: 1678485 - RNA, 19 nt, Artificial Sequence
  Description of Artificial Sequence: Synthetic oligonucleotide
  Sense strand starting at position 760 of SEQ ID NO: 1561525
ugguggaguguugggauua

SEQ ID NO: 1678486 - RNA, 19 nt, Artificial Sequence
  Description of Artificial Sequence: Synthetic oligonucleotide
  Antisense strand to SEQ ID NO: 1678485
uaaucccaacacuccacca

SEQ ID NO: 1678487 - RNA, 19 nt, Artificial Sequence
  Description of Artificial Sequence: Synthetic oligonucleotide
  Sense strand starting at position 765 of SEQ ID NO: 1561525
gaguguugggauuauucuc

SEQ ID NO: 1678488 - RNA, 19 nt, Artificial Sequence
  Description of Artificial Sequence: Synthetic oligonucleotide
  Antisense strand to SEQ ID NO: 1678487
gagaauaaucccaacacuc

SEQ ID NO: 1678489 - RNA, 19 nt, Artificial Sequence
  Description of Artificial Sequence: Synthetic oligonucleotide
  Sense strand starting at position 770 of SEQ ID NO: 1561525
uugggauuauucucugcuu

SEQ ID NO: 1678490 - RNA, 19 nt, Artificial Sequence
  Description of Artificial Sequence: Synthetic oligonucleotide
  Antisense strand to SEQ ID NO: 1678489
aagcagagaauaaucccaa

SEQ ID NO: 1678491 - RNA, 19 nt, Artificial Sequence
  Description of Artificial Sequence: Synthetic oligonucleotide
  Sense strand starting at position 771 of SEQ ID NO: 1561525
ugggauuauucucugcuuu

SEQ ID NO: 1678492 - RNA, 19 nt, Artificial Sequence
  Description of Artificial Sequence: Synthetic oligonucleotide
  Antisense strand to SEQ ID NO: 1678491
aaagcagagaauaauccca

SEQ ID NO: 1678493 - RNA, 19 nt, Artificial Sequence
  Description of Artificial Sequence: Synthetic oligonucleotide
  Sense strand starting at position 939 of SEQ ID NO: 1561525
gaaguugguguugaagaau

SEQ ID NO: 1678494 - RNA, 19 nt, Artificial Sequence
  Description of Artificial Sequence: Synthetic oligonucleotide
  Antisense strand to SEQ ID NO: 1678493
auucuucaacaccaacuuc

SEQ ID NO: 1678495 - RNA, 19 nt, Artificial Sequence
  Description of Artificial Sequence: Synthetic oligonucleotide
  Sense strand starting at position 1029 of SEQ ID NO: 1561525
uugagauucuguuugucac

SEQ ID NO: 1678496 - RNA, 19 nt, Artificial Sequence
  Description of Artificial Sequence: Synthetic oligonucleotide
  Antisense strand to SEQ ID NO: 1678495
gugacaaacagaaucucaa

SEQ ID NO: 1678497 - RNA, 19 nt, Artificial Sequence
  Description of Artificial Sequence: Synthetic oligonucleotide
  Sense strand starting at position 1030 of SEQ ID NO: 1561525
ugagauucuguuugucaca

SEQ ID NO: 1678498 - RNA, 19 nt, Artificial Sequence
  Description of Artificial Sequence: Synthetic oligonucleotide
  Antisense strand to SEQ ID NO: 1678497
ugugacaaacagaaucuca

SEQ ID NO: 1678499 - RNA, 19 nt, Artificial Sequence
  Description of Artificial Sequence: Synthetic oligonucleotide
  Sense strand starting at position 1032 of SEQ ID NO: 1561525
agauucuguuugucacaca

SEQ ID NO: 1678500 - RNA, 19 nt, Artificial Sequence
  Description of Artificial Sequence: Synthetic oligonucleotide
  Antisense strand to SEQ ID NO: 1678499
ugugugacaaacagaaucu

SEQ ID NO: 1678501 - RNA, 19 nt, Artificial Sequence
  Description of Artificial Sequence: Synthetic oligonucleotide
  Sense strand starting at position 1074 of SEQ ID NO: 1561525
acuucuguggaguguuaaa

SEQ ID NO: 1678502 - RNA, 19 nt, Artificial Sequence
  Description of Artificial Sequence: Synthetic oligonucleotide
  Antisense strand to SEQ ID NO: 1678501
uuuaacacuccacagaagu

SEQ ID NO: 1678503 - RNA, 19 nt, Artificial Sequence
  Description of Artificial Sequence: Synthetic oligonucleotide
  Sense strand starting at position 1317 of SEQ ID NO: 1561525
acgagucaguuacugaauu

SEQ ID NO: 1678504 - RNA, 19 nt, Artificial Sequence
  Description of Artificial Sequence: Synthetic oligonucleotide
  Antisense strand to SEQ ID NO: 1678503
aauucaguaacugacucgu

SEQ ID NO: 1678505 - RNA, 19 nt, Artificial Sequence
  Description of Artificial Sequence: Synthetic oligonucleotide
  Sense strand starting at position 1416 of SEQ ID NO: 1561525
gugcucucugagcauaaau

SEQ ID NO: 1678506 - RNA, 19 nt, Artificial Sequence
  Description of Artificial Sequence: Synthetic oligonucleotide
  Antisense strand to SEQ ID NO: 1678505
auuuaugcucagagagcac

SEQ ID NO: 1678507 - RNA, 19 nt, Artificial Sequence
  Description of Artificial Sequence: Synthetic oligonucleotide
  Sense strand starting at position 1418 of SEQ ID NO: 1561525
gcucucugagcauaaauca

SEQ ID NO: 1678508 - RNA, 19 nt, Artificial Sequence
  Description of Artificial Sequence: Synthetic oligonucleotide
  Antisense strand to SEQ ID NO: 1678507
ugauuuaugcucagagagc

SEQ ID NO: 1678509 - RNA, 19 nt, Artificial Sequence
  Description of Artificial Sequence: Synthetic oligonucleotide
  Sense strand starting at position 1901 of SEQ ID NO: 1561525
gagucuuagcucuggaucu

SEQ ID NO: 1678510 - RNA, 19 nt, Artificial Sequence
  Description of Artificial Sequence: Synthetic oligonucleotide
  Antisense strand to SEQ ID NO: 1678509
agauccagagcuaagacuc

SEQ ID NO: 1678511 - RNA, 19 nt, Artificial Sequence
  Description of Artificial Sequence: Synthetic oligonucleotide
  Sense strand starting at position 1903 of SEQ ID NO: 1561525
gucuuagcucuggaucuca

SEQ ID NO: 1678512 - RNA, 19 nt, Artificial Sequence
  Description of Artificial Sequence: Synthetic oligonucleotide
  Antisense strand to SEQ ID NO: 1678511
ugagauccagagcuaagac

SEQ ID NO: 1678513 - RNA, 19 nt, Artificial Sequence
  Description of Artificial Sequence: Synthetic oligonucleotide
  Sense strand starting at position 2159 of SEQ ID NO: 1561525
ggaggcgugaucugagaau

SEQ ID NO: 1678514 - RNA, 19 nt, Artificial Sequence
  Description of Artificial Sequence: Synthetic oligonucleotide
  Antisense strand to SEQ ID NO: 1678513
auucucagaucacgccucc

SEQ ID NO: 1678515 - RNA, 19 nt, Artificial Sequence
  Description of Artificial Sequence: Synthetic oligonucleotide
  Sense strand starting at position 2168 of SEQ ID NO: 1561525
aucugagaauguguugaau

SEQ ID NO: 1678516 - RNA, 19 nt, Artificial Sequence
  Description of Artificial Sequence: Synthetic oligonucleotide
  Antisense strand to SEQ ID NO: 1678515
auucaacacauucucagau

SEQ ID NO: 1678517 - RNA, 19 nt, Artificial Sequence
  Description of Artificial Sequence: Synthetic oligonucleotide
  Sense strand starting at position 2174 of SEQ ID NO: 1561525
gaauguguugaauaaggca

SEQ ID NO: 1678518 - RNA, 19 nt, Artificial Sequence
  Description of Artificial Sequence: Synthetic oligonucleotide
  Antisense strand to SEQ ID NO: 1678517
ugccuuauucaacacauuc

SEQ ID NO: 1678519 - RNA, 19 nt, Artificial Sequence
  Description of Artificial Sequence: Synthetic oligonucleotide
  Sense strand starting at position 2179 of SEQ ID NO: 1561525
uguugaauaaggcaagagu

SEQ ID NO: 1678520 - RNA, 19 nt, Artificial Sequence
  Description of Artificial Sequence: Synthetic oligonucleotide
  Antisense strand to SEQ ID NO: 1678519
acucuugccuuauucaaca

SEQ ID NO: 1678521 - RNA, 19 nt, Artificial Sequence
  Description of Artificial Sequence: Synthetic oligonucleotide
  Sense strand starting at position 2225 of SEQ ID NO: 1561525
gcgcgcuuccuuccugaau

SEQ ID NO: 1678522 - RNA, 19 nt, Artificial Sequence
  Description of Artificial Sequence: Synthetic oligonucleotide
  Antisense strand to SEQ ID NO: 1678521
auucaggaaggaagcgcgc

SEQ ID NO: 1678523 - RNA, 19 nt, Artificial Sequence
  Description of Artificial Sequence: Synthetic oligonucleotide
  Sense strand starting at position 2307 of SEQ ID NO: 1561525
gugaauaguauacauaugu

SEQ ID NO: 1678524 - RNA, 19 nt, Artificial Sequence
  Description of Artificial Sequence: Synthetic oligonucleotide
  Antisense strand to SEQ ID NO: 1678523
acauauguauacuauucac

SEQ ID NO: 1678525 - RNA, 19 nt, Artificial Sequence
  Description of Artificial Sequence: Synthetic oligonucleotide
  Sense strand starting at position 2445 of SEQ ID NO: 1561525
agaaauaaacugugaagca

SEQ ID NO: 1678526 - RNA, 19 nt, Artificial Sequence
  Description of Artificial Sequence: Synthetic oligonucleotide
  Antisense strand to SEQ ID NO: 1678525
ugcuucacaguuuauuucu

SEQ ID NO: 1678527 - RNA, 19 nt, Artificial Sequence
  Description of Artificial Sequence: Synthetic oligonucleotide
  Sense strand starting at position 2932 of SEQ ID NO: 1561525
ggcaaaucccggcagcaua

SEQ ID NO: 1678528 - RNA, 19 nt, Artificial Sequence
  Description of Artificial Sequence: Synthetic oligonucleotide
  Antisense strand to SEQ ID NO: 1678527
uaugcugccgggauuugcc

SEQ ID NO: 1678529 - RNA, 19 nt, Artificial Sequence
  Description of Artificial Sequence: Synthetic oligonucleotide
  Sense strand starting at position 3378 of SEQ ID NO: 1561525
guugcaacagaccaauuaa

SEQ ID NO: 1678530 - RNA, 19 nt, Artificial Sequence
  Description of Artificial Sequence: Synthetic oligonucleotide
  Antisense strand to SEQ ID NO: 1678529
uuaauuggucuguugcaac

SEQ ID NO: 1678531 - RNA, 19 nt, Artificial Sequence
  Description of Artificial Sequence: Synthetic oligonucleotide
  Sense strand starting at position 3395 of SEQ ID NO: 1561525
aaauuagaauccuuggagu

SEQ ID NO: 1678532 - RNA, 19 nt, Artificial Sequence
  Description of Artificial Sequence: Synthetic oligonucleotide
  Antisense strand to SEQ ID NO: 1678531
acuccaaggauucuaauuu

SEQ ID NO: 1678533 - RNA, 19 nt, Artificial Sequence
  Description of Artificial Sequence: Synthetic oligonucleotide
  Sense strand starting at position 3397 of SEQ ID NO: 1561525
auuagaauccuuggaguug

SEQ ID NO: 1678534 - RNA, 19 nt, Artificial Sequence
  Description of Artificial Sequence: Synthetic oligonucleotide
  Antisense strand to SEQ ID NO: 1678533
caacuccaaggauucuaau

SEQ ID NO: 1678535 - RNA, 19 nt, Artificial Sequence
  Description of Artificial Sequence: Synthetic oligonucleotide
  Sense strand starting at position 3408 of SEQ ID NO: 1561525
uggaguuggaucugggcaa

SEQ ID NO: 1678536 - RNA, 19 nt, Artificial Sequence
  Description of Artificial Sequence: Synthetic oligonucleotide
  Antisense strand to SEQ ID NO: 1678535
uugcccagauccaacucca

SEQ ID NO: 1678537 - RNA, 19 nt, Artificial Sequence
  Description of Artificial Sequence: Synthetic oligonucleotide
  Sense strand starting at position 3437 of SEQ ID NO: 1561525
uaaagcucucagggugauu

SEQ ID NO: 1678538 - RNA, 19 nt, Artificial Sequence
  Description of Artificial Sequence: Synthetic oligonucleotide
  Antisense strand to SEQ ID NO: 1678537
aaucacccugagagcuuua

SEQ ID NO: 1678539 - RNA, 19 nt, Artificial Sequence
  Description of Artificial Sequence: Synthetic oligonucleotide
  Sense strand starting at position 3440 of SEQ ID NO: 1561525
agcucucagggugauuaca

SEQ ID NO: 1678540 - RNA, 19 nt, Artificial Sequence
  Description of Artificial Sequence: Synthetic oligonucleotide
  Antisense strand to SEQ ID NO: 1678539
uguaaucacccugagagcu

SEQ ID NO: 1678541 - RNA, 19 nt, Artificial Sequence
  Description of Artificial Sequence: Synthetic oligonucleotide
  Sense strand starting at position 3448 of SEQ ID NO: 1561525
gggugauuacaguguguag

SEQ ID NO: 1678542 - RNA, 19 nt, Artificial Sequence
  Description of Artificial Sequence: Synthetic oligonucleotide
  Antisense strand to SEQ ID NO: 1678541
cuacacacuguaaucaccc

SEQ ID NO: 1678543 - RNA, 19 nt, Artificial Sequence
  Description of Artificial Sequence: Synthetic oligonucleotide
  Sense strand starting at position 3769 of SEQ ID NO: 1561525
gaauuacaggugugaccua

SEQ ID NO: 1678544 - RNA, 19 nt, Artificial Sequence
  Description of Artificial Sequence: Synthetic oligonucleotide
  Antisense strand to SEQ ID NO: 1678543
uaggucacaccuguaauuc

SEQ ID NO: 1678545 - RNA, 19 nt, Artificial Sequence
  Description of Artificial Sequence: Synthetic oligonucleotide
  Sense strand starting at position 3853 of SEQ ID NO: 1561525
aaacguuugcugcugaguu

SEQ ID NO: 1678546 - RNA, 19 nt, Artificial Sequence
  Description of Artificial Sequence: Synthetic oligonucleotide
  Antisense strand to SEQ ID NO: 1678545
aacucagcagcaaacguuu

SEQ ID NO: 1678547 - RNA, 19 nt, Artificial Sequence
  Description of Artificial Sequence: Synthetic oligonucleotide
  Sense strand starting at position 3935 of SEQ ID NO: 1561525
cgcuuuguuccugauugaa

SEQ ID NO: 1678548 - RNA, 19 nt, Artificial Sequence
  Description of Artificial Sequence: Synthetic oligonucleotide
  Antisense strand to SEQ ID NO: 1678547
uucaaucaggaacaaagcg

SEQ ID NO: 1678549 - RNA, 19 nt, Artificial Sequence
  Description of Artificial Sequence: Synthetic oligonucleotide
  Sense strand starting at position 3947 of SEQ ID NO: 1561525
gauugaaccugguuccaug

SEQ ID NO: 1678550 - RNA, 19 nt, Artificial Sequence
  Description of Artificial Sequence: Synthetic oligonucleotide
  Antisense strand to SEQ ID NO: 1678549
cauggaaccagguucaauc

SEQ ID NO: 1678551 - RNA, 19 nt, Artificial Sequence
  Description of Artificial Sequence: Synthetic oligonucleotide
  Sense strand starting at position 150 of SEQ ID NO: 1561526
cuucgucucugugucuuau

SEQ ID NO: 1678552 - RNA, 19 nt, Artificial Sequence
  Description of Artificial Sequence: Synthetic oligonucleotide
  Antisense strand to SEQ ID NO: 1678551
auaagacacagagacgaag

SEQ ID NO: 1678553 - RNA, 19 nt, Artificial Sequence
  Description of Artificial Sequence: Synthetic oligonucleotide
  Sense strand starting at position 151 of SEQ ID NO: 1561526
uucgucucugugucuuauu

SEQ ID NO: 1678554 - RNA, 19 nt, Artificial Sequence
  Description of Artificial Sequence: Synthetic oligonucleotide
  Antisense strand to SEQ ID NO: 1678553
aauaagacacagagacgaa

SEQ ID NO: 1678555 - RNA, 19 nt, Artificial Sequence
  Description of Artificial Sequence: Synthetic oligonucleotide
  Sense strand starting at position 152 of SEQ ID NO: 1561526
ucgucucugugucuuauuu

SEQ ID NO: 1678556 - RNA, 19 nt, Artificial Sequence
  Description of Artificial Sequence: Synthetic oligonucleotide
  Antisense strand to SEQ ID NO: 1678555
aaauaagacacagagacga

SEQ ID NO: 1678557 - RNA, 19 nt, Artificial Sequence
  Description of Artificial Sequence: Synthetic oligonucleotide
  Sense strand starting at position 160 of SEQ ID NO: 1561526
gugucuuauuucuuuacuc

SEQ ID NO: 1678558 - RNA, 19 nt, Artificial Sequence
  Description of Artificial Sequence: Synthetic oligonucleotide
  Antisense strand to SEQ ID NO: 1678557
gaguaaagaaauaagacac

SEQ ID NO: 1678559 - RNA, 19 nt, Artificial Sequence
  Description of Artificial Sequence: Synthetic oligonucleotide
  Sense strand starting at position 180 of SEQ ID NO: 1561526
gucucuugucucuaccuga

SEQ ID NO: 1678560 - RNA, 19 nt, Artificial Sequence
  Description of Artificial Sequence: Synthetic oligonucleotide
  Antisense strand to SEQ ID NO: 1678559
ucagguagagacaagagac

SEQ ID NO: 1678561 - RNA, 19 nt, Artificial Sequence
  Description of Artificial Sequence: Synthetic oligonucleotide
  Sense strand starting at position 185 of SEQ ID NO: 1561526
uugucucuaccugacaaga

SEQ ID NO: 1678562 - RNA, 19 nt, Artificial Sequence
  Description of Artificial Sequence: Synthetic oligonucleotide
  Antisense strand to SEQ ID NO: 1678561
ucuugucagguagagacaa

SEQ ID NO: 1678563 - RNA, 19 nt, Artificial Sequence
  Description of Artificial Sequence: Synthetic oligonucleotide
  Sense strand starting at position 187 of SEQ ID NO: 1561526
gucucuaccugacaagaaa

SEQ ID NO: 1678564 - RNA, 19 nt, Artificial Sequence
  Description of Artificial Sequence: Synthetic oligonucleotide
  Antisense strand to SEQ ID NO: 1678563
uuucuugucagguagagac

SEQ ID NO: 1678565 - RNA, 19 nt, Artificial Sequence
  Description of Artificial Sequence: Synthetic oligonucleotide
  Sense strand starting at position 391 of SEQ ID NO: 1561526
aguaccuucccagguaagu

SEQ ID NO: 1678566 - RNA, 19 nt, Artificial Sequence
  Description of Artificial Sequence: Synthetic oligonucleotide
  Antisense strand to SEQ ID NO: 1678565
acuuaccugggaagguacu

SEQ ID NO: 1678567 - RNA, 19 nt, Artificial Sequence
  Description of Artificial Sequence: Synthetic oligonucleotide
  Sense strand starting at position 641 of SEQ ID NO: 1561526
aaggguaagucacaccuua

SEQ ID NO: 1678568 - RNA, 19 nt, Artificial Sequence
  Description of Artificial Sequence: Synthetic oligonucleotide
  Antisense strand to SEQ ID NO: 1678567
uaaggugugacuuacccuu

SEQ ID NO: 1678569 - RNA, 19 nt, Artificial Sequence
  Description of Artificial Sequence: Synthetic oligonucleotide
  Sense strand starting at position 1178 of SEQ ID NO: 1561526
ucccuuucugccuaaggaa

SEQ ID NO: 1678570 - RNA, 19 nt, Artificial Sequence
  Description of Artificial Sequence: Synthetic oligonucleotide
  Antisense strand to SEQ ID NO: 1678569
uuccuuaggcagaaaggga

SEQ ID NO: 1678571 - RNA, 19 nt, Artificial Sequence
  Description of Artificial Sequence: Synthetic oligonucleotide
  Sense strand starting at position 1181 of SEQ ID NO: 1561526
cuuucugccuaaggaaauu

SEQ ID NO: 1678572 - RNA, 19 nt, Artificial Sequence
  Description of Artificial Sequence: Synthetic oligonucleotide
  Antisense strand to SEQ ID NO: 1678571
aauuuccuuaggcagaaag

SEQ ID NO: 1678573 - RNA, 19 nt, Artificial Sequence
  Description of Artificial Sequence: Synthetic oligonucleotide
  Sense strand starting at position 1339 of SEQ ID NO: 1561526
ccuauucggcuccgaauaa

SEQ ID NO: 1678574 - RNA, 19 nt, Artificial Sequence
  Description of Artificial Sequence: Synthetic oligonucleotide
  Antisense strand to SEQ ID NO: 1678573
uuauucggagccgaauagg

SEQ ID NO: 1678575 - RNA, 19 nt, Artificial Sequence
  Description of Artificial Sequence: Synthetic oligonucleotide
  Sense strand starting at position 1340 of SEQ ID NO: 1561526
cuauucggcuccgaauaaa

SEQ ID NO: 1678576 - RNA, 19 nt, Artificial Sequence
  Description of Artificial Sequence: Synthetic oligonucleotide
  Antisense strand to SEQ ID NO: 1678575
uuuauucggagccgaauag

SEQ ID NO: 1678577 - RNA, 19 nt, Artificial Sequence
  Description of Artificial Sequence: Synthetic oligonucleotide
  Sense strand starting at position 1414 of SEQ ID NO: 1561526
gggugugucucauucguga

SEQ ID NO: 1678578 - RNA, 19 nt, Artificial Sequence
  Description of Artificial Sequence: Synthetic oligonucleotide
  Antisense strand to SEQ ID NO: 1678577
ucacgaaugagacacaccc

SEQ ID NO: 1678579 - RNA, 19 nt, Artificial Sequence
  Description of Artificial Sequence: Synthetic oligonucleotide
  Sense strand starting at position 1416 of SEQ ID NO: 1561526
gugugucucauucgugaau

SEQ ID NO: 1678580 - RNA, 19 nt, Artificial Sequence
  Description of Artificial Sequence: Synthetic oligonucleotide
  Antisense strand to SEQ ID NO: 1678579
auucacgaaugagacacac

SEQ ID NO: 1678581 - RNA, 19 nt, Artificial Sequence
  Description of Artificial Sequence: Synthetic oligonucleotide
  Sense strand starting at position 1417 of SEQ ID NO: 1561526
ugugucucauucgugaauc

SEQ ID NO: 1678582 - RNA, 19 nt, Artificial Sequence
  Description of Artificial Sequence: Synthetic oligonucleotide
  Antisense strand to SEQ ID NO: 1678581
gauucacgaaugagacaca

SEQ ID NO: 1678583 - RNA, 19 nt, Artificial Sequence
  Description of Artificial Sequence: Synthetic oligonucleotide
  Sense strand starting at position 1458 of SEQ ID NO: 1561526
uuguuaacguuccucaguu

SEQ ID NO: 1678584 - RNA, 19 nt, Artificial Sequence
  Description of Artificial Sequence: Synthetic oligonucleotide
  Antisense strand to SEQ ID NO: 1678583
aacugaggaacguuaacaa

SEQ ID NO: 1678585 - RNA, 19 nt, Artificial Sequence
  Description of Artificial Sequence: Synthetic oligonucleotide
  Sense strand starting at position 1459 of SEQ ID NO: 1561526
uguuaacguuccucaguuu

SEQ ID NO: 1678586 - RNA, 19 nt, Artificial Sequence
  Description of Artificial Sequence: Synthetic oligonucleotide
  Antisense strand to SEQ ID NO: 1678585
aaacugaggaacguuaaca

SEQ ID NO: 1678587 - RNA, 19 nt, Artificial Sequence
  Description of Artificial Sequence: Synthetic oligonucleotide
  Sense strand starting at position 1460 of SEQ ID NO: 1561526
guuaacguuccucaguuua

SEQ ID NO: 1678588 - RNA, 19 nt, Artificial Sequence
  Description of Artificial Sequence: Synthetic oligonucleotide
  Antisense strand to SEQ ID NO: 1678587
uaaacugaggaacguuaac

SEQ ID NO: 1678589 - RNA, 19 nt, Artificial Sequence
  Description of Artificial Sequence: Synthetic oligonucleotide
  Sense strand starting at position 2052 of SEQ ID NO: 1561526
cccucagugucuggaggaa

SEQ ID NO: 1678590 - RNA, 19 nt, Artificial Sequence
  Description of Artificial Sequence: Synthetic oligonucleotide
  Antisense strand to SEQ ID NO: 1678589
uuccuccagacacugaggg

SEQ ID NO: 1678591 - RNA, 19 nt, Artificial Sequence
  Description of Artificial Sequence: Synthetic oligonucleotide
  Sense strand starting at position 2186 of SEQ ID NO: 1561526
ggauucugaccacagcuuu

SEQ ID NO: 1678592 - RNA, 19 nt, Artificial Sequence
  Description of Artificial Sequence: Synthetic oligonucleotide
  Antisense strand to SEQ ID NO: 1678591
aaagcuguggucagaaucc

SEQ ID NO: 1678593 - RNA, 19 nt, Artificial Sequence
  Description of Artificial Sequence: Synthetic oligonucleotide
  Sense strand starting at position 2261 of SEQ ID NO: 1561526
acuugcuauugauagagga

SEQ ID NO: 1678594 - RNA, 19 nt, Artificial Sequence
  Description of Artificial Sequence: Synthetic oligonucleotide
  Antisense strand to SEQ ID NO: 1678593
uccucuaucaauagcaagu

SEQ ID NO: 1678595 - RNA, 19 nt, Artificial Sequence
  Description of Artificial Sequence: Synthetic oligonucleotide
  Sense strand starting at position 2634 of SEQ ID NO: 1561526
ccuuuauccaggugacgcu

SEQ ID NO: 1678596 - RNA, 19 nt, Artificial Sequence
  Description of Artificial Sequence: Synthetic oligonucleotide
  Antisense strand to SEQ ID NO: 1678595
agcgucaccuggauaaagg

SEQ ID NO: 1678597 - RNA, 19 nt, Artificial Sequence
  Description of Artificial Sequence: Synthetic oligonucleotide
  Sense strand starting at position 2643 of SEQ ID NO: 1561526
aggugacgcucccaaacau

SEQ ID NO: 1678598 - RNA, 19 nt, Artificial Sequence
  Description of Artificial Sequence: Synthetic oligonucleotide
  Antisense strand to SEQ ID NO: 1678597
auguuugggagcgucaccu

SEQ ID NO: 1678599 - RNA, 19 nt, Artificial Sequence
  Description of Artificial Sequence: Synthetic oligonucleotide
  Sense strand starting at position 3010 of SEQ ID NO: 1561526
uaugaauaucucugucgga

SEQ ID NO: 1678600 - RNA, 19 nt, Artificial Sequence
  Description of Artificial Sequence: Synthetic oligonucleotide
  Antisense strand to SEQ ID NO: 1678599
uccgacagagauauucaua

SEQ ID NO: 1678601 - RNA, 19 nt, Artificial Sequence
  Description of Artificial Sequence: Synthetic oligonucleotide
  Sense strand starting at position 3011 of SEQ ID NO: 1561526
augaauaucucugucggau

SEQ ID NO: 1678602 - RNA, 19 nt, Artificial Sequence
  Description of Artificial Sequence: Synthetic oligonucleotide
  Antisense strand to SEQ ID NO: 1678601
auccgacagagauauucau

SEQ ID NO: 1678603 - RNA, 19 nt, Artificial Sequence
  Description of Artificial Sequence: Synthetic oligonucleotide
  Sense strand starting at position 3014 of SEQ ID NO: 1561526
aauaucucugucggauaua

SEQ ID NO: 1678604 - RNA, 19 nt, Artificial Sequence
  Description of Artificial Sequence: Synthetic oligonucleotide
  Antisense strand to SEQ ID NO: 1678603
uauauccgacagagauauu

SEQ ID NO: 1678605 - RNA, 19 nt, Artificial Sequence
  Description of Artificial Sequence: Synthetic oligonucleotide
  Sense strand starting at position 3015 of SEQ ID NO: 1561526
auaucucugucggauauaa

SEQ ID NO: 1678606 - RNA, 19 nt, Artificial Sequence
  Description of Artificial Sequence: Synthetic oligonucleotide
  Antisense strand to SEQ ID NO: 1678605
uuauauccgacagagauau

SEQ ID NO: 1678607 - RNA, 19 nt, Artificial Sequence
  Description of Artificial Sequence: Synthetic oligonucleotide
  Sense strand starting at position 3093 of SEQ ID NO: 1561526
ucauuuguuuagcaaggca

SEQ ID NO: 1678608 - RNA, 19 nt, Artificial Sequence
  Description of Artificial Sequence: Synthetic oligonucleotide
  Antisense strand to SEQ ID NO: 1678607
ugccuugcuaaacaaauga

SEQ ID NO: 1678609 - RNA, 19 nt, Artificial Sequence
  Description of Artificial Sequence: Synthetic oligonucleotide
  Sense strand starting at position 3096 of SEQ ID NO: 1561526
uuuguuuagcaaggcaauu

SEQ ID NO: 1678610 - RNA, 19 nt, Artificial Sequence
  Description of Artificial Sequence: Synthetic oligonucleotide
  Antisense strand to SEQ ID NO: 1678609
aauugccuugcuaaacaaa

SEQ ID NO: 1678611 - RNA, 19 nt, Artificial Sequence
  Description of Artificial Sequence: Synthetic oligonucleotide
  Sense strand starting at position 3204 of SEQ ID NO: 1561526
ggucccuaucucuguguca

SEQ ID NO: 1678612 - RNA, 19 nt, Artificial Sequence
  Description of Artificial Sequence: Synthetic oligonucleotide
  Antisense strand to SEQ ID NO: 1678611
ugacacagagauagggacc

SEQ ID NO: 1678613 - RNA, 19 nt, Artificial Sequence
  Description of Artificial Sequence: Synthetic oligonucleotide
  Sense strand starting at position 3270 of SEQ ID NO: 1561526
uggcuacuuguacguauuu

SEQ ID NO: 1678614 - RNA, 19 nt, Artificial Sequence
  Description of Artificial Sequence: Synthetic oligonucleotide
  Antisense strand to SEQ ID NO: 1678613
aaauacguacaaguagcca

SEQ ID NO: 1678615 - RNA, 19 nt, Artificial Sequence
  Description of Artificial Sequence: Synthetic oligonucleotide
  Sense strand starting at position 3324 of SEQ ID NO: 1561526
agagauggagcgugugaga

SEQ ID NO: 1678616 - RNA, 19 nt, Artificial Sequence
  Description of Artificial Sequence: Synthetic oligonucleotide
  Antisense strand to SEQ ID NO: 1678615
ucucacacgcuccaucucu

SEQ ID NO: 1678617 - RNA, 19 nt, Artificial Sequence
  Description of Artificial Sequence: Synthetic oligonucleotide
  Sense strand starting at position 3462 of SEQ ID NO: 1561526
gaaaguugagcuggagaac

SEQ ID NO: 1678618 - RNA, 19 nt, Artificial Sequence
  Description of Artificial Sequence: Synthetic oligonucleotide
  Antisense strand to SEQ ID NO: 1678617
guucuccagcucaacuuuc

SEQ ID NO: 1678619 - RNA, 19 nt, Artificial Sequence
  Description of Artificial Sequence: Synthetic oligonucleotide
  Sense strand starting at position 3499 of SEQ ID NO: 1561526
caggcuaagucuuugaaga

SEQ ID NO: 1678620 - RNA, 19 nt, Artificial Sequence
  Description of Artificial Sequence: Synthetic oligonucleotide
  Antisense strand to SEQ ID NO: 1678619
ucuucaaagacuuagccug

SEQ ID NO: 1678621 - RNA, 19 nt, Artificial Sequence
  Description of Artificial Sequence: Synthetic oligonucleotide
  Sense strand starting at position 3500 of SEQ ID NO: 1561526
aggcuaagucuuugaagag

SEQ ID NO: 1678622 - RNA, 19 nt, Artificial Sequence
  Description of Artificial Sequence: Synthetic oligonucleotide
  Antisense strand to SEQ ID NO: 1678621
cucuucaaagacuuagccu

SEQ ID NO: 1678623 - RNA, 19 nt, Artificial Sequence
  Description of Artificial Sequence: Synthetic oligonucleotide
  Sense strand starting at position 3501 of SEQ ID NO: 1561526
ggcuaagucuuugaagaga

SEQ ID NO: 1678624 - RNA, 19 nt, Artificial Sequence
  Description of Artificial Sequence: Synthetic oligonucleotide
  Antisense strand to SEQ ID NO: 1678623
ucucuucaaagacuuagcc

SEQ ID NO: 1678625 - RNA, 19 nt, Artificial Sequence
  Description of Artificial Sequence: Synthetic oligonucleotide
  Sense strand starting at position 3836 of SEQ ID NO: 1561526
agagaaauuuacuguaugu

SEQ ID NO: 1678626 - RNA, 19 nt, Artificial Sequence
  Description of Artificial Sequence: Synthetic oligonucleotide
  Antisense strand to SEQ ID NO: 1678625
acauacaguaaauuucucu

SEQ ID NO: 1678627 - RNA, 19 nt, Artificial Sequence
  Description of Artificial Sequence: Synthetic oligonucleotide
  Sense strand starting at position 3916 of SEQ ID NO: 1561526
uggcuuugcuguuugauuu

SEQ ID NO: 1678628 - RNA, 19 nt, Artificial Sequence
  Description of Artificial Sequence: Synthetic oligonucleotide
  Antisense strand to SEQ ID NO: 1678627
aaaucaaacagcaaagcca

SEQ ID NO: 1678629 - RNA, 19 nt, Artificial Sequence
  Description of Artificial Sequence: Synthetic oligonucleotide
  Sense strand starting at position 3923 of SEQ ID NO: 1561526
gcuguuugauuugaucuuu

SEQ ID NO: 1678630 - RNA, 19 nt, Artificial Sequence
  Description of Artificial Sequence: Synthetic oligonucleotide
  Antisense strand to SEQ ID NO: 1678629
aaagaucaaaucaaacagc

SEQ ID NO: 1678631 - RNA, 19 nt, Artificial Sequence
  Description of Artificial Sequence: Synthetic oligonucleotide
  Sense strand starting at position 120 of SEQ ID NO: 1561527
ggagauuccacagguugga

SEQ ID NO: 1678632 - RNA, 19 nt, Artificial Sequence
  Description of Artificial Sequence: Synthetic oligonucleotide
  Antisense strand to SEQ ID NO: 1678631
uccaaccuguggaaucucc

SEQ ID NO: 1678633 - RNA, 19 nt, Artificial Sequence
  Description of Artificial Sequence: Synthetic oligonucleotide
  Sense strand starting at position 208 of SEQ ID NO: 1561527
uuauacuucugacuggcua

SEQ ID NO: 1678634 - RNA, 19 nt, Artificial Sequence
  Description of Artificial Sequence: Synthetic oligonucleotide
  Antisense strand to SEQ ID NO: 1678633
uagccagucagaaguauaa

SEQ ID NO: 1678635 - RNA, 19 nt, Artificial Sequence
  Description of Artificial Sequence: Synthetic oligonucleotide
  Sense strand starting at position 248 of SEQ ID NO: 1561527
ucuccuugaguuugauuaa

SEQ ID NO: 1678636 - RNA, 19 nt, Artificial Sequence
  Description of Artificial Sequence: Synthetic oligonucleotide
  Antisense strand to SEQ ID NO: 1678635
uuaaucaaacucaaggaga

SEQ ID NO: 1678637 - RNA, 19 nt, Artificial Sequence
  Description of Artificial Sequence: Synthetic oligonucleotide
  Sense strand starting at position 306 of SEQ ID NO: 1561527
acugguuuaucaccaaggu

SEQ ID NO: 1678638 - RNA, 19 nt, Artificial Sequence
  Description of Artificial Sequence: Synthetic oligonucleotide
  Antisense strand to SEQ ID NO: 1678637
accuuggugauaaaccagu

SEQ ID NO: 1678639 - RNA, 19 nt, Artificial Sequence
  Description of Artificial Sequence: Synthetic oligonucleotide
  Sense strand starting at position 310 of SEQ ID NO: 1561527
guuuaucaccaaggucauu

SEQ ID NO: 1678640 - RNA, 19 nt, Artificial Sequence
  Description of Artificial Sequence: Synthetic oligonucleotide
  Antisense strand to SEQ ID NO: 1678639
aaugaccuuggugauaaac

SEQ ID NO: 1678641 - RNA, 19 nt, Artificial Sequence
  Description of Artificial Sequence: Synthetic oligonucleotide
  Sense strand starting at position 315 of SEQ ID NO: 1561527
ucaccaaggucauuacgaa

SEQ ID NO: 1678642 - RNA, 19 nt, Artificial Sequence
  Description of Artificial Sequence: Synthetic oligonucleotide
  Antisense strand to SEQ ID NO: 1678641
uucguaaugaccuugguga

SEQ ID NO: 1678643 - RNA, 19 nt, Artificial Sequence
  Description of Artificial Sequence: Synthetic oligonucleotide
  Sense strand starting at position 469 of SEQ ID NO: 1561527
aagccaguccuuuggguuu

SEQ ID NO: 1678644 - RNA, 19 nt, Artificial Sequence
  Description of Artificial Sequence: Synthetic oligonucleotide
  Antisense strand to SEQ ID NO: 1678643
aaacccaaaggacuggcuu

SEQ ID NO: 1678645 - RNA, 19 nt, Artificial Sequence
  Description of Artificial Sequence: Synthetic oligonucleotide
  Sense strand starting at position 540 of SEQ ID NO: 1561527
uugccugggucuuucugaa

SEQ ID NO: 1678646 - RNA, 19 nt, Artificial Sequence
  Description of Artificial Sequence: Synthetic oligonucleotide
  Antisense strand to SEQ ID NO: 1678645
uucagaaagacccaggcaa

SEQ ID NO: 1678647 - RNA, 19 nt, Artificial Sequence
  Description of Artificial Sequence: Synthetic oligonucleotide
  Sense strand starting at position 627 of SEQ ID NO: 1561527
cucuuauugcucuagagau

SEQ ID NO: 1678648 - RNA, 19 nt, Artificial Sequence
  Description of Artificial Sequence: Synthetic oligonucleotide
  Antisense strand to SEQ ID NO: 1678647
aucucuagagcaauaagag

SEQ ID NO: 1678649 - RNA, 19 nt, Artificial Sequence
  Description of Artificial Sequence: Synthetic oligonucleotide
  Sense strand starting at position 629 of SEQ ID NO: 1561527
cuuauugcucuagagauua

SEQ ID NO: 1678650 - RNA, 19 nt, Artificial Sequence
  Description of Artificial Sequence: Synthetic oligonucleotide
  Antisense strand to SEQ ID NO: 1678649
uaaucucuagagcaauaag

SEQ ID NO: 1678651 - RNA, 19 nt, Artificial Sequence
  Description of Artificial Sequence: Synthetic oligonucleotide
  Sense strand starting at position 1045 of SEQ ID NO: 1561527
gucuuaugauggccuagaa

SEQ ID NO: 1678652 - RNA, 19 nt, Artificial Sequence
  Description of Artificial Sequence: Synthetic oligonucleotide
  Antisense strand to SEQ ID NO: 1678651
uucuaggccaucauaagac

SEQ ID NO: 1678653 - RNA, 19 nt, Artificial Sequence
  Description of Artificial Sequence: Synthetic oligonucleotide
  Sense strand starting at position 1067 of SEQ ID NO: 1561527
uccagaacauauugaagaa

SEQ ID NO: 1678654 - RNA, 19 nt, Artificial Sequence
  Description of Artificial Sequence: Synthetic oligonucleotide
  Antisense strand to SEQ ID NO: 1678653
uucuucaauauguucugga

SEQ ID NO: 1678655 - RNA, 19 nt, Artificial Sequence
  Description of Artificial Sequence: Synthetic oligonucleotide
  Sense strand starting at position 1131 of SEQ ID NO: 1561527
aucgauuccuuauuacaga

SEQ ID NO: 1678656 - RNA, 19 nt, Artificial Sequence
  Description of Artificial Sequence: Synthetic oligonucleotide
  Antisense strand to SEQ ID NO: 1678655
ucuguaauaaggaaucgau

SEQ ID NO: 1678657 - RNA, 19 nt, Artificial Sequence
  Description of Artificial Sequence: Synthetic oligonucleotide
  Sense strand starting at position 1209 of SEQ ID NO: 1561527
gucaaaucuagaugggauu

SEQ ID NO: 1678658 - RNA, 19 nt, Artificial Sequence
  Description of Artificial Sequence: Synthetic oligonucleotide
  Antisense strand to SEQ ID NO: 1678657
aaucccaucuagauuugac

SEQ ID NO: 1678659 - RNA, 19 nt, Artificial Sequence
  Description of Artificial Sequence: Synthetic oligonucleotide
  Sense strand starting at position 1340 of SEQ ID NO: 1561527
uggucauacuuucuuguau

SEQ ID NO: 1678660 - RNA, 19 nt, Artificial Sequence
  Description of Artificial Sequence: Synthetic oligonucleotide
  Antisense strand to SEQ ID NO: 1678659
auacaagaaaguaugacca

SEQ ID NO: 1678661 - RNA, 19 nt, Artificial Sequence
  Description of Artificial Sequence: Synthetic oligonucleotide
  Sense strand starting at position 1341 of SEQ ID NO: 1561527
ggucauacuuucuuguauu

SEQ ID NO: 1678662 - RNA, 19 nt, Artificial Sequence
  Description of Artificial Sequence: Synthetic oligonucleotide
  Antisense strand to SEQ ID NO: 1678661
aauacaagaaaguaugacc

SEQ ID NO: 1678663 - RNA, 19 nt, Artificial Sequence
  Description of Artificial Sequence: Synthetic oligonucleotide
  Sense strand starting at position 1364 of SEQ ID NO: 1561527
gccaguggucagcaaacua

SEQ ID NO: 1678664 - RNA, 19 nt, Artificial Sequence
  Description of Artificial Sequence: Synthetic oligonucleotide
  Antisense strand to SEQ ID NO: 1678663
uaguuugcugaccacuggc

SEQ ID NO: 1678665 - RNA, 19 nt, Artificial Sequence
  Description of Artificial Sequence: Synthetic oligonucleotide
  Sense strand starting at position 1405 of SEQ ID NO: 1561527
cugccacuugaaugcauaa

SEQ ID NO: 1678666 - RNA, 19 nt, Artificial Sequence
  Description of Artificial Sequence: Synthetic oligonucleotide
  Antisense strand to SEQ ID NO: 1678665
uuaugcauucaaguggcag

SEQ ID NO: 1678667 - RNA, 19 nt, Artificial Sequence
  Description of Artificial Sequence: Synthetic oligonucleotide
  Sense strand starting at position 1497 of SEQ ID NO: 1561527
gcugaauugcaauagaaac

SEQ ID NO: 1678668 - RNA, 19 nt, Artificial Sequence
  Description of Artificial Sequence: Synthetic oligonucleotide
  Antisense strand to SEQ ID NO: 1678667
guuucuauugcaauucagc

SEQ ID NO: 1678669 - RNA, 19 nt, Artificial Sequence
  Description of Artificial Sequence: Synthetic oligonucleotide
  Sense strand starting at position 1648 of SEQ ID NO: 1561527
uacaaaguuagccgagagu

SEQ ID NO: 1678670 - RNA, 19 nt, Artificial Sequence
  Description of Artificial Sequence: Synthetic oligonucleotide
  Antisense strand to SEQ ID NO: 1678669
acucucggcuaacuuugua

SEQ ID NO: 1678671 - RNA, 19 nt, Artificial Sequence
  Description of Artificial Sequence: Synthetic oligonucleotide
  Sense strand starting at position 1966 of SEQ ID NO: 1561527
uucuguaacucagcaguuu

SEQ ID NO: 1678672 - RNA, 19 nt, Artificial Sequence
  Description of Artificial Sequence: Synthetic oligonucleotide
  Antisense strand to SEQ ID NO: 1678671
aaacugcugaguuacagaa

SEQ ID NO: 1678673 - RNA, 19 nt, Artificial Sequence
  Description of Artificial Sequence: Synthetic oligonucleotide
  Sense strand starting at position 2087 of SEQ ID NO: 1561527
acucaugagccuggauguu

SEQ ID NO: 1678674 - RNA, 19 nt, Artificial Sequence
  Description of Artificial Sequence: Synthetic oligonucleotide
  Antisense strand to SEQ ID NO: 1678673
aacauccaggcucaugagu

SEQ ID NO: 1678675 - RNA, 19 nt, Artificial Sequence
  Description of Artificial Sequence: Synthetic oligonucleotide
  Sense strand starting at position 2100 of SEQ ID NO: 1561527
gauguugcagcccaucaau

SEQ ID NO: 1678676 - RNA, 19 nt, Artificial Sequence
  Description of Artificial Sequence: Synthetic oligonucleotide
  Antisense strand to SEQ ID NO: 1678675
auugaugggcugcaacauc

SEQ ID NO: 1678677 - RNA, 19 nt, Artificial Sequence
  Description of Artificial Sequence: Synthetic oligonucleotide
  Sense strand starting at position 2103 of SEQ ID NO: 1561527
guugcagcccaucaauuau

SEQ ID NO: 1678678 - RNA, 19 nt, Artificial Sequence
  Description of Artificial Sequence: Synthetic oligonucleotide
  Antisense strand to SEQ ID NO: 1678677
auaauugaugggcugcaac

SEQ ID NO: 1678679 - RNA, 19 nt, Artificial Sequence
  Description of Artificial Sequence: Synthetic oligonucleotide
  Sense strand starting at position 2201 of SEQ ID NO: 1561527
ccugcucuugugggaaagu

SEQ ID NO: 1678680 - RNA, 19 nt, Artificial Sequence
  Description of Artificial Sequence: Synthetic oligonucleotide
  Antisense strand to SEQ ID NO: 1678679
acuuucccacaagagcagg

SEQ ID NO: 1678681 - RNA, 19 nt, Artificial Sequence
  Description of Artificial Sequence: Synthetic oligonucleotide
  Sense strand starting at position 2260 of SEQ ID NO: 1561527
cugguccuuguugaucaua

SEQ ID NO: 1678682 - RNA, 19 nt, Artificial Sequence
  Description of Artificial Sequence: Synthetic oligonucleotide
  Antisense strand to SEQ ID NO: 1678681
uaugaucaacaaggaccag

SEQ ID NO: 1678683 - RNA, 19 nt, Artificial Sequence
  Description of Artificial Sequence: Synthetic oligonucleotide
  Sense strand starting at position 2262 of SEQ ID NO: 1561527
gguccuuguugaucauaaa

SEQ ID NO: 1678684 - RNA, 19 nt, Artificial Sequence
  Description of Artificial Sequence: Synthetic oligonucleotide
  Antisense strand to SEQ ID NO: 1678683
uuuaugaucaacaaggacc

SEQ ID NO: 1678685 - RNA, 19 nt, Artificial Sequence
  Description of Artificial Sequence: Synthetic oligonucleotide
  Sense strand starting at position 2263 of SEQ ID NO: 1561527
guccuuguugaucauaaag

SEQ ID NO: 1678686 - RNA, 19 nt, Artificial Sequence
  Description of Artificial Sequence: Synthetic oligonucleotide
  Antisense strand to SEQ ID NO: 1678685
cuuuaugaucaacaaggac

SEQ ID NO: 1678687 - RNA, 19 nt, Artificial Sequence
  Description of Artificial Sequence: Synthetic oligonucleotide
  Sense strand starting at position 2283 of SEQ ID NO: 1561527
agagguuaagagugcuauu

SEQ ID NO: 1678688 - RNA, 19 nt, Artificial Sequence
  Description of Artificial Sequence: Synthetic oligonucleotide
  Antisense strand to SEQ ID NO: 1678687
aauagcacucuuaaccucu

SEQ ID NO: 1678689 - RNA, 19 nt, Artificial Sequence
  Description of Artificial Sequence: Synthetic oligonucleotide
  Sense strand starting at position 2301 of SEQ ID NO: 1561527
uuuguaaguuaacugaaga

SEQ ID NO: 1678690 - RNA, 19 nt, Artificial Sequence
  Description of Artificial Sequence: Synthetic oligonucleotide
  Antisense strand to SEQ ID NO: 1678689
ucuucaguuaacuuacaaa

SEQ ID NO: 1678691 - RNA, 19 nt, Artificial Sequence
  Description of Artificial Sequence: Synthetic oligonucleotide
  Sense strand starting at position 2334 of SEQ ID NO: 1561527
cugucaaucugcccaugau

SEQ ID NO: 1678692 - RNA, 19 nt, Artificial Sequence
  Description of Artificial Sequence: Synthetic oligonucleotide
  Antisense strand to SEQ ID NO: 1678691
aucaugggcagauugacag

SEQ ID NO: 1678693 - RNA, 19 nt, Artificial Sequence
  Description of Artificial Sequence: Synthetic oligonucleotide
  Sense strand starting at position 2335 of SEQ ID NO: 1561527
ugucaaucugcccaugaua

SEQ ID NO: 1678694 - RNA, 19 nt, Artificial Sequence
  Description of Artificial Sequence: Synthetic oligonucleotide
  Antisense strand to SEQ ID NO: 1678693
uaucaugggcagauugaca

SEQ ID NO: 1678695 - RNA, 19 nt, Artificial Sequence
  Description of Artificial Sequence: Synthetic oligonucleotide
  Sense strand starting at position 2947 of SEQ ID NO: 1561527
gcuaaaucugccugcacag

SEQ ID NO: 1678696 - RNA, 19 nt, Artificial Sequence
  Description of Artificial Sequence: Synthetic oligonucleotide
  Antisense strand to SEQ ID NO: 1678695
cugugcaggcagauuuagc

SEQ ID NO: 1678697 - RNA, 19 nt, Artificial Sequence
  Description of Artificial Sequence: Synthetic oligonucleotide
  Sense strand starting at position 2984 of SEQ ID NO: 1561527
agaauacuuggccaagcau

SEQ ID NO: 1678698 - RNA, 19 nt, Artificial Sequence
  Description of Artificial Sequence: Synthetic oligonucleotide
  Antisense strand to SEQ ID NO: 1678697
augcuuggccaaguauucu

SEQ ID NO: 1678699 - RNA, 19 nt, Artificial Sequence
  Description of Artificial Sequence: Synthetic oligonucleotide
  Sense strand starting at position 3413 of SEQ ID NO: 1561527
guaacauucuuugcuguau

SEQ ID NO: 1678700 - RNA, 19 nt, Artificial Sequence
  Description of Artificial Sequence: Synthetic oligonucleotide
  Antisense strand to SEQ ID NO: 1678699
auacagcaaagaauguuac

SEQ ID NO: 1678701 - RNA, 19 nt, Artificial Sequence
  Description of Artificial Sequence: Synthetic oligonucleotide
  Sense strand starting at position 3422 of SEQ ID NO: 1561527
uuugcuguauuaguaacaa

SEQ ID NO: 1678702 - RNA, 19 nt, Artificial Sequence
  Description of Artificial Sequence: Synthetic oligonucleotide
  Antisense strand to SEQ ID NO: 1678701
uuguuacuaauacagcaaa

SEQ ID NO: 1678703 - RNA, 19 nt, Artificial Sequence
  Description of Artificial Sequence: Synthetic oligonucleotide
  Sense strand starting at position 3467 of SEQ ID NO: 1561527
ugagaaugacuuugcaaag

SEQ ID NO: 1678704 - RNA, 19 nt, Artificial Sequence
  Description of Artificial Sequence: Synthetic oligonucleotide
  Antisense strand to SEQ ID NO: 1678703
cuuugcaaagucauucuca

SEQ ID NO: 1678705 - RNA, 19 nt, Artificial Sequence
  Description of Artificial Sequence: Synthetic oligonucleotide
  Sense strand starting at position 3552 of SEQ ID NO: 1561527
agaauuaucuuagaaugag

SEQ ID NO: 1678706 - RNA, 19 nt, Artificial Sequence
  Description of Artificial Sequence: Synthetic oligonucleotide
  Antisense strand to SEQ ID NO: 1678705
cucauucuaagauaauucu

SEQ ID NO: 1678707 - RNA, 19 nt, Artificial Sequence
  Description of Artificial Sequence: Synthetic oligonucleotide
  Sense strand starting at position 3555 of SEQ ID NO: 1561527
auuaucuuagaaugaguca

SEQ ID NO: 1678708 - RNA, 19 nt, Artificial Sequence
  Description of Artificial Sequence: Synthetic oligonucleotide
  Antisense strand to SEQ ID NO: 1678707
ugacucauucuaagauaau

SEQ ID NO: 1678709 - RNA, 19 nt, Artificial Sequence
  Description of Artificial Sequence: Synthetic oligonucleotide
  Sense strand starting at position 3558 of SEQ ID NO: 1561527
aucuuagaaugagucaauu

SEQ ID NO: 1678710 - RNA, 19 nt, Artificial Sequence
  Description of Artificial Sequence: Synthetic oligonucleotide
  Antisense strand to SEQ ID NO: 1678709
aauugacucauucuaagau

SEQ ID NO: 1678711 - RNA, 19 nt, Artificial Sequence
  Description of Artificial Sequence: Synthetic oligonucleotide
  Sense strand starting at position 52 of SEQ ID NO: 1561528
uuccuuccugugugagauu

SEQ ID NO: 1678712 - RNA, 19 nt, Artificial Sequence
  Description of Artificial Sequence: Synthetic oligonucleotide
  Antisense strand to SEQ ID NO: 1678711
aaucucacacaggaaggaa

SEQ ID NO: 1678713 - RNA, 19 nt, Artificial Sequence
  Description of Artificial Sequence: Synthetic oligonucleotide
  Sense strand starting at position 198 of SEQ ID NO: 1561528
auccuuccgcuugaauaaa

SEQ ID NO: 1678714 - RNA, 19 nt, Artificial Sequence
  Description of Artificial Sequence: Synthetic oligonucleotide
  Antisense strand to SEQ ID NO: 1678713
uuuauucaagcggaaggau

SEQ ID NO: 1678715 - RNA, 19 nt, Artificial Sequence
  Description of Artificial Sequence: Synthetic oligonucleotide
  Sense strand starting at position 241 of SEQ ID NO: 1561528
uucuauuauuucggaguga

SEQ ID NO: 1678716 - RNA, 19 nt, Artificial Sequence
  Description of Artificial Sequence: Synthetic oligonucleotide
  Antisense strand to SEQ ID NO: 1678715
ucacuccgaaauaauagaa

SEQ ID NO: 1678717 - RNA, 19 nt, Artificial Sequence
  Description of Artificial Sequence: Synthetic oligonucleotide
  Sense strand starting at position 242 of SEQ ID NO: 1561528
ucuauuauuucggagugac

SEQ ID NO: 1678718 - RNA, 19 nt, Artificial Sequence
  Description of Artificial Sequence: Synthetic oligonucleotide
  Antisense strand to SEQ ID NO: 1678717
gucacuccgaaauaauaga

SEQ ID NO: 1678719 - RNA, 19 nt, Artificial Sequence
  Description of Artificial Sequence: Synthetic oligonucleotide
  Sense strand starting at position 309 of SEQ ID NO: 1561528
ugguuugucuccucacgua

SEQ ID NO: 1678720 - RNA, 19 nt, Artificial Sequence
  Description of Artificial Sequence: Synthetic oligonucleotide
  Antisense strand to SEQ ID NO: 1678719
uacgugaggagacaaacca

SEQ ID NO: 1678721 - RNA, 19 nt, Artificial Sequence
  Description of Artificial Sequence: Synthetic oligonucleotide
  Sense strand starting at position 830 of SEQ ID NO: 1561528
cagacugcuuguggcaaga

SEQ ID NO: 1678722 - RNA, 19 nt, Artificial Sequence
  Description of Artificial Sequence: Synthetic oligonucleotide
  Antisense strand to SEQ ID NO: 1678721
ucuugccacaagcagucug

SEQ ID NO: 1678723 - RNA, 19 nt, Artificial Sequence
  Description of Artificial Sequence: Synthetic oligonucleotide
  Sense strand starting at position 843 of SEQ ID NO: 1561528
gcaagaagauacuaacuua

SEQ ID NO: 1678724 - RNA, 19 nt, Artificial Sequence
  Description of Artificial Sequence: Synthetic oligonucleotide
  Antisense strand to SEQ ID NO: 1678723
uaaguuaguaucuucuugc

SEQ ID NO: 1678725 - RNA, 19 nt, Artificial Sequence
  Description of Artificial Sequence: Synthetic oligonucleotide
  Sense strand starting at position 895 of SEQ ID NO: 1561528
aaagucacgccucagaauu

SEQ ID NO: 1678726 - RNA, 19 nt, Artificial Sequence
  Description of Artificial Sequence: Synthetic oligonucleotide
  Antisense strand to SEQ ID NO: 1678725
aauucugaggcgugacuuu

SEQ ID NO: 1678727 - RNA, 19 nt, Artificial Sequence
  Description of Artificial Sequence: Synthetic oligonucleotide
  Sense strand starting at position 1252 of SEQ ID NO: 1561528
ccuauucggcucugaauaa

SEQ ID NO: 1678728 - RNA, 19 nt, Artificial Sequence
  Description of Artificial Sequence: Synthetic oligonucleotide
  Antisense strand to SEQ ID NO: 1678727
uuauucagagccgaauagg

SEQ ID NO: 1678729 - RNA, 19 nt, Artificial Sequence
  Description of Artificial Sequence: Synthetic oligonucleotide
  Sense strand starting at position 1253 of SEQ ID NO: 1561528
cuauucggcucugaauaaa

SEQ ID NO: 1678730 - RNA, 19 nt, Artificial Sequence
  Description of Artificial Sequence: Synthetic oligonucleotide
  Antisense strand to SEQ ID NO: 1678729
uuuauucagagccgaauag

SEQ ID NO: 1678731 - RNA, 19 nt, Artificial Sequence
  Description of Artificial Sequence: Synthetic oligonucleotide
  Sense strand starting at position 1493 of SEQ ID NO: 1561528
cccguugcuuccgcacaau

SEQ ID NO: 1678732 - RNA, 19 nt, Artificial Sequence
  Description of Artificial Sequence: Synthetic oligonucleotide
  Antisense strand to SEQ ID NO: 1678731
auugugcggaagcaacggg

SEQ ID NO: 1678733 - RNA, 19 nt, Artificial Sequence
  Description of Artificial Sequence: Synthetic oligonucleotide
  Sense strand starting at position 2013 of SEQ ID NO: 1561528
gcaccucugauuggaugaa

SEQ ID NO: 1678734 - RNA, 19 nt, Artificial Sequence
  Description of Artificial Sequence: Synthetic oligonucleotide
  Antisense strand to SEQ ID NO: 1678733
uucauccaaucagaggugc

SEQ ID NO: 1678735 - RNA, 19 nt, Artificial Sequence
  Description of Artificial Sequence: Synthetic oligonucleotide
  Sense strand starting at position 2095 of SEQ ID NO: 1561528
gccagacugacggauucua

SEQ ID NO: 1678736 - RNA, 19 nt, Artificial Sequence
  Description of Artificial Sequence: Synthetic oligonucleotide
  Antisense strand to SEQ ID NO: 1678735
uagaauccgucagucuggc

SEQ ID NO: 1678737 - RNA, 19 nt, Artificial Sequence
  Description of Artificial Sequence: Synthetic oligonucleotide
  Sense strand starting at position 2181 of SEQ ID NO: 1561528
acuugcuauugauagaaga

SEQ ID NO: 1678738 - RNA, 19 nt, Artificial Sequence
  Description of Artificial Sequence: Synthetic oligonucleotide
  Antisense strand to SEQ ID NO: 1678737
ucuucuaucaauagcaagu

SEQ ID NO: 1678739 - RNA, 19 nt, Artificial Sequence
  Description of Artificial Sequence: Synthetic oligonucleotide
  Sense strand starting at position 2576 of SEQ ID NO: 1561528
cuagcucuagccugaucuu

SEQ ID NO: 1678740 - RNA, 19 nt, Artificial Sequence
  Description of Artificial Sequence: Synthetic oligonucleotide
  Antisense strand to SEQ ID NO: 1678739
aagaucaggcuagagcuag

SEQ ID NO: 1678741 - RNA, 19 nt, Artificial Sequence
  Description of Artificial Sequence: Synthetic oligonucleotide
  Sense strand starting at position 3202 of SEQ ID NO: 1561528
cagagacuguccucaacgu

SEQ ID NO: 1678742 - RNA, 19 nt, Artificial Sequence
  Description of Artificial Sequence: Synthetic oligonucleotide
  Antisense strand to SEQ ID NO: 1678741
acguugaggacagucucug

SEQ ID NO: 1678743 - RNA, 19 nt, Artificial Sequence
  Description of Artificial Sequence: Synthetic oligonucleotide
  Sense strand starting at position 3206 of SEQ ID NO: 1561528
gacuguccucaacguggaa

SEQ ID NO: 1678744 - RNA, 19 nt, Artificial Sequence
  Description of Artificial Sequence: Synthetic oligonucleotide
  Antisense strand to SEQ ID NO: 1678743
uuccacguugaggacaguc

SEQ ID NO: 1678745 - RNA, 19 nt, Artificial Sequence
  Description of Artificial Sequence: Synthetic oligonucleotide
  Sense strand starting at position 3280 of SEQ ID NO: 1561528
aucgauuaguuucgcgaga

SEQ ID NO: 1678746 - RNA, 19 nt, Artificial Sequence
  Description of Artificial Sequence: Synthetic oligonucleotide
  Antisense strand to SEQ ID NO: 1678745
ucucgcgaaacuaaucgau

SEQ ID NO: 1678747 - RNA, 19 nt, Artificial Sequence
  Description of Artificial Sequence: Synthetic oligonucleotide
  Sense strand starting at position 3281 of SEQ ID NO: 1561528
ucgauuaguuucgcgagac

SEQ ID NO: 1678748 - RNA, 19 nt, Artificial Sequence
  Description of Artificial Sequence: Synthetic oligonucleotide
  Antisense strand to SEQ ID NO: 1678747
gucucgcgaaacuaaucga

SEQ ID NO: 1678749 - RNA, 19 nt, Artificial Sequence
  Description of Artificial Sequence: Synthetic oligonucleotide
  Sense strand starting at position 3282 of SEQ ID NO: 1561528
cgauuaguuucgcgagaca

SEQ ID NO: 1678750 - RNA, 19 nt, Artificial Sequence
  Description of Artificial Sequence: Synthetic oligonucleotide
  Antisense strand to SEQ ID NO: 1678749
ugucucgcgaaacuaaucg

SEQ ID NO: 1678751 - RNA, 19 nt, Artificial Sequence
  Description of Artificial Sequence: Synthetic oligonucleotide
  Sense strand starting at position 3285 of SEQ ID NO: 1561528
uuaguuucgcgagacaaac

SEQ ID NO: 1678752 - RNA, 19 nt, Artificial Sequence
  Description of Artificial Sequence: Synthetic oligonucleotide
  Antisense strand to SEQ ID NO: 1678751
guuugucucgcgaaacuaa

SEQ ID NO: 1678753 - RNA, 19 nt, Artificial Sequence
  Description of Artificial Sequence: Synthetic oligonucleotide
  Sense strand starting at position 3308 of SEQ ID NO: 1561528
ucaaucccauuguguaaau

SEQ ID NO: 1678754 - RNA, 19 nt, Artificial Sequence
  Description of Artificial Sequence: Synthetic oligonucleotide
  Antisense strand to SEQ ID NO: 1678753
auuuacacaaugggauuga

SEQ ID NO: 1678755 - RNA, 19 nt, Artificial Sequence
  Description of Artificial Sequence: Synthetic oligonucleotide
  Sense strand starting at position 3351 of SEQ ID NO: 1561528
uccuccuaugcuuauguau

SEQ ID NO: 1678756 - RNA, 19 nt, Artificial Sequence
  Description of Artificial Sequence: Synthetic oligonucleotide
  Antisense strand to SEQ ID NO: 1678755
auacauaagcauaggagga

SEQ ID NO: 1678757 - RNA, 19 nt, Artificial Sequence
  Description of Artificial Sequence: Synthetic oligonucleotide
  Sense strand starting at position 3687 of SEQ ID NO: 1561528
gccaguagcuaucauaacu

SEQ ID NO: 1678758 - RNA, 19 nt, Artificial Sequence
  Description of Artificial Sequence: Synthetic oligonucleotide
  Antisense strand to SEQ ID NO: 1678757
aguuaugauagcuacuggc

SEQ ID NO: 1678759 - RNA, 19 nt, Artificial Sequence
  Description of Artificial Sequence: Synthetic oligonucleotide
  Sense strand starting at position 3708 of SEQ ID NO: 1561528
gcccaaucgggacgugaaa

SEQ ID NO: 1678760 - RNA, 19 nt, Artificial Sequence
  Description of Artificial Sequence: Synthetic oligonucleotide
  Antisense strand to SEQ ID NO: 1678759
uuucacgucccgauugggc

SEQ ID NO: 1678761 - RNA, 19 nt, Artificial Sequence
  Description of Artificial Sequence: Synthetic oligonucleotide
  Sense strand starting at position 3814 of SEQ ID NO: 1561528
cuugcuuccuuauggaaag

SEQ ID NO: 1678762 - RNA, 19 nt, Artificial Sequence
  Description of Artificial Sequence: Synthetic oligonucleotide
  Antisense strand to SEQ ID NO: 1678761
cuuuccauaaggaagcaag

SEQ ID NO: 1678763 - RNA, 19 nt, Artificial Sequence
  Description of Artificial Sequence: Synthetic oligonucleotide
  Sense strand starting at position 3815 of SEQ ID NO: 1561528
uugcuuccuuauggaaaga

SEQ ID NO: 1678764 - RNA, 19 nt, Artificial Sequence
  Description of Artificial Sequence: Synthetic oligonucleotide
  Antisense strand to SEQ ID NO: 1678763
ucuuuccauaaggaagcaa

SEQ ID NO: 1678765 - RNA, 19 nt, Artificial Sequence
  Description of Artificial Sequence: Synthetic oligonucleotide
  Sense strand starting at position 3882 of SEQ ID NO: 1561528
ucucgcugucagggaauaa

SEQ ID NO: 1678766 - RNA, 19 nt, Artificial Sequence
  Description of Artificial Sequence: Synthetic oligonucleotide
  Antisense strand to SEQ ID NO: 1678765
uuauucccugacagcgaga

SEQ ID NO: 1678767 - RNA, 19 nt, Artificial Sequence
  Description of Artificial Sequence: Synthetic oligonucleotide
  Sense strand starting at position 3883 of SEQ ID NO: 1561528
cucgcugucagggaauaaa

SEQ ID NO: 1678768 - RNA, 19 nt, Artificial Sequence
  Description of Artificial Sequence: Synthetic oligonucleotide
  Antisense strand to SEQ ID NO: 1678767
uuuauucccugacagcgag

SEQ ID NO: 1678769 - RNA, 19 nt, Artificial Sequence
  Description of Artificial Sequence: Synthetic oligonucleotide
  Sense strand starting at position 118 of SEQ ID NO: 1561529
aaggguuggccuuaucaaa

SEQ ID NO: 1678770 - RNA, 19 nt, Artificial Sequence
  Description of Artificial Sequence: Synthetic oligonucleotide
  Antisense strand to SEQ ID NO: 1678769
uuugauaaggccaacccuu

SEQ ID NO: 1678771 - RNA, 19 nt, Artificial Sequence
  Description of Artificial Sequence: Synthetic oligonucleotide
  Sense strand starting at position 166 of SEQ ID NO: 1561529
ucacauaccugggauaaag

SEQ ID NO: 1678772 - RNA, 19 nt, Artificial Sequence
  Description of Artificial Sequence: Synthetic oligonucleotide
  Antisense strand to SEQ ID NO: 1678771
cuuuaucccagguauguga

SEQ ID NO: 1678773 - RNA, 19 nt, Artificial Sequence
  Description of Artificial Sequence: Synthetic oligonucleotide
  Sense strand starting at position 183 of SEQ ID NO: 1561529
agaaacuuccuuugcaagu

SEQ ID NO: 1678774 - RNA, 19 nt, Artificial Sequence
  Description of Artificial Sequence: Synthetic oligonucleotide
  Antisense strand to SEQ ID NO: 1678773
acuugcaaaggaaguuucu

SEQ ID NO: 1678775 - RNA, 19 nt, Artificial Sequence
  Description of Artificial Sequence: Synthetic oligonucleotide
  Sense strand starting at position 1147 of SEQ ID NO: 1561529
gcuccauccucacgucuua

SEQ ID NO: 1678776 - RNA, 19 nt, Artificial Sequence
  Description of Artificial Sequence: Synthetic oligonucleotide
  Antisense strand to SEQ ID NO: 1678775
uaagacgugaggauggagc

SEQ ID NO: 1678777 - RNA, 19 nt, Artificial Sequence
  Description of Artificial Sequence: Synthetic oligonucleotide
  Sense strand starting at position 1194 of SEQ ID NO: 1561529
auucuucgaucguccucaa

SEQ ID NO: 1678778 - RNA, 19 nt, Artificial Sequence
  Description of Artificial Sequence: Synthetic oligonucleotide
  Antisense strand to SEQ ID NO: 1678777
uugaggacgaucgaagaau

SEQ ID NO: 1678779 - RNA, 19 nt, Artificial Sequence
  Description of Artificial Sequence: Synthetic oligonucleotide
  Sense strand starting at position 1197 of SEQ ID NO: 1561529
cuucgaucguccucaaucu

SEQ ID NO: 1678780 - RNA, 19 nt, Artificial Sequence
  Description of Artificial Sequence: Synthetic oligonucleotide
  Antisense strand to SEQ ID NO: 1678779
agauugaggacgaucgaag

SEQ ID NO: 1678781 - RNA, 19 nt, Artificial Sequence
  Description of Artificial Sequence: Synthetic oligonucleotide
  Sense strand starting at position 1253 of SEQ ID NO: 1561529
ugccgcucucccuguuaaa

SEQ ID NO: 1678782 - RNA, 19 nt, Artificial Sequence
  Description of Artificial Sequence: Synthetic oligonucleotide
  Antisense strand to SEQ ID NO: 1678781
uuuaacagggagagcggca

SEQ ID NO: 1678783 - RNA, 19 nt, Artificial Sequence
  Description of Artificial Sequence: Synthetic oligonucleotide
  Sense strand starting at position 1254 of SEQ ID NO: 1561529
gccgcucucccuguuaaau

SEQ ID NO: 1678784 - RNA, 19 nt, Artificial Sequence
  Description of Artificial Sequence: Synthetic oligonucleotide
  Antisense strand to SEQ ID NO: 1678783
auuuaacagggagagcggc

SEQ ID NO: 1678785 - RNA, 19 nt, Artificial Sequence
  Description of Artificial Sequence: Synthetic oligonucleotide
  Sense strand starting at position 1256 of SEQ ID NO: 1561529
cgcucucccuguuaaauuc

SEQ ID NO: 1678786 - RNA, 19 nt, Artificial Sequence
  Description of Artificial Sequence: Synthetic oligonucleotide
  Antisense strand to SEQ ID NO: 1678785
gaauuuaacagggagagcg

SEQ ID NO: 1678787 - RNA, 19 nt, Artificial Sequence
  Description of Artificial Sequence: Synthetic oligonucleotide
  Sense strand starting at position 1613 of SEQ ID NO: 1561529
uguuaugggucuuucucau

SEQ ID NO: 1678788 - RNA, 19 nt, Artificial Sequence
  Description of Artificial Sequence: Synthetic oligonucleotide
  Antisense strand to SEQ ID NO: 1678787
augagaaagacccauaaca

SEQ ID NO: 1678789 - RNA, 19 nt, Artificial Sequence
  Description of Artificial Sequence: Synthetic oligonucleotide
  Sense strand starting at position 1619 of SEQ ID NO: 1561529
gggucuuucucauucuucu

SEQ ID NO: 1678790 - RNA, 19 nt, Artificial Sequence
  Description of Artificial Sequence: Synthetic oligonucleotide
  Antisense strand to SEQ ID NO: 1678789
agaagaaugagaaagaccc

SEQ ID NO: 1678791 - RNA, 19 nt, Artificial Sequence
  Description of Artificial Sequence: Synthetic oligonucleotide
  Sense strand starting at position 1698 of SEQ ID NO: 1561529
acaggaggguuugaaguaa

SEQ ID NO: 1678792 - RNA, 19 nt, Artificial Sequence
  Description of Artificial Sequence: Synthetic oligonucleotide
  Antisense strand to SEQ ID NO: 1678791
uuacuucaaacccuccugu

SEQ ID NO: 1678793 - RNA, 19 nt, Artificial Sequence
  Description of Artificial Sequence: Synthetic oligonucleotide
  Sense strand starting at position 1984 of SEQ ID NO: 1561529
gcgccuaaagguugagacu

SEQ ID NO: 1678794 - RNA, 19 nt, Artificial Sequence
  Description of Artificial Sequence: Synthetic oligonucleotide
  Antisense strand to SEQ ID NO: 1678793
agucucaaccuuuaggcgc

SEQ ID NO: 1678795 - RNA, 19 nt, Artificial Sequence
  Description of Artificial Sequence: Synthetic oligonucleotide
  Sense strand starting at position 2208 of SEQ ID NO: 1561529
cugcauuugcucugguuga

SEQ ID NO: 1678796 - RNA, 19 nt, Artificial Sequence
  Description of Artificial Sequence: Synthetic oligonucleotide
  Antisense strand to SEQ ID NO: 1678795
ucaaccagagcaaaugcag

SEQ ID NO: 1678797 - RNA, 19 nt, Artificial Sequence
  Description of Artificial Sequence: Synthetic oligonucleotide
  Sense strand starting at position 2209 of SEQ ID NO: 1561529
ugcauuugcucugguugaa

SEQ ID NO: 1678798 - RNA, 19 nt, Artificial Sequence
  Description of Artificial Sequence: Synthetic oligonucleotide
  Antisense strand to SEQ ID NO: 1678797
uucaaccagagcaaaugca

SEQ ID NO: 1678799 - RNA, 19 nt, Artificial Sequence
  Description of Artificial Sequence: Synthetic oligonucleotide
  Sense strand starting at position 2605 of SEQ ID NO: 1561529
auucgaaagcccuggaauu

SEQ ID NO: 1678800 - RNA, 19 nt, Artificial Sequence
  Description of Artificial Sequence: Synthetic oligonucleotide
  Antisense strand to SEQ ID NO: 1678799
aauuccagggcuuucgaau

SEQ ID NO: 1678801 - RNA, 19 nt, Artificial Sequence
  Description of Artificial Sequence: Synthetic oligonucleotide
  Sense strand starting at position 2607 of SEQ ID NO: 1561529
ucgaaagcccuggaauugu

SEQ ID NO: 1678802 - RNA, 19 nt, Artificial Sequence
  Description of Artificial Sequence: Synthetic oligonucleotide
  Antisense strand to SEQ ID NO: 1678801
acaauuccagggcuuucga

SEQ ID NO: 1678803 - RNA, 19 nt, Artificial Sequence
  Description of Artificial Sequence: Synthetic oligonucleotide
  Sense strand starting at position 2858 of SEQ ID NO: 1561529
gcuuaaacauagcaggaau

SEQ ID NO: 1678804 - RNA, 19 nt, Artificial Sequence
  Description of Artificial Sequence: Synthetic oligonucleotide
  Antisense strand to SEQ ID NO: 1678803
auuccugcuauguuuaagc

SEQ ID NO: 1678805 - RNA, 19 nt, Artificial Sequence
  Description of Artificial Sequence: Synthetic oligonucleotide
  Sense strand starting at position 3066 of SEQ ID NO: 1561529
ccaguuaauugucccagca

SEQ ID NO: 1678806 - RNA, 19 nt, Artificial Sequence
  Description of Artificial Sequence: Synthetic oligonucleotide
  Antisense strand to SEQ ID NO: 1678805
ugcugggacaauuaacugg

SEQ ID NO: 1678807 - RNA, 19 nt, Artificial Sequence
  Description of Artificial Sequence: Synthetic oligonucleotide
  Sense strand starting at position 3068 of SEQ ID NO: 1561529
aguuaauugucccagcaca

SEQ ID NO: 1678808 - RNA, 19 nt, Artificial Sequence
  Description of Artificial Sequence: Synthetic oligonucleotide
  Antisense strand to SEQ ID NO: 1678807
ugugcugggacaauuaacu

SEQ ID NO: 1678809 - RNA, 19 nt, Artificial Sequence
  Description of Artificial Sequence: Synthetic oligonucleotide
  Sense strand starting at position 3142 of SEQ ID NO: 1561529
ggaguauuucucugucgcu

SEQ ID NO: 1678810 - RNA, 19 nt, Artificial Sequence
  Description of Artificial Sequence: Synthetic oligonucleotide
  Antisense strand to SEQ ID NO: 1678809
agcgacagagaaauacucc

SEQ ID NO: 1678811 - RNA, 19 nt, Artificial Sequence
  Description of Artificial Sequence: Synthetic oligonucleotide
  Sense strand starting at position 3143 of SEQ ID NO: 1561529
gaguauuucucugucgcuc

SEQ ID NO: 1678812 - RNA, 19 nt, Artificial Sequence
  Description of Artificial Sequence: Synthetic oligonucleotide
  Antisense strand to SEQ ID NO: 1678811
gagcgacagagaaauacuc

SEQ ID NO: 1678813 - RNA, 19 nt, Artificial Sequence
  Description of Artificial Sequence: Synthetic oligonucleotide
  Sense strand starting at position 3432 of SEQ ID NO: 1561529
ucacuucgcucuuaaaugu

SEQ ID NO: 1678814 - RNA, 19 nt, Artificial Sequence
  Description of Artificial Sequence: Synthetic oligonucleotide
  Antisense strand to SEQ ID NO: 1678813
acauuuaagagcgaaguga

SEQ ID NO: 1678815 - RNA, 19 nt, Artificial Sequence
  Description of Artificial Sequence: Synthetic oligonucleotide
  Sense strand starting at position 3439 of SEQ ID NO: 1561529
gcucuuaaauguugagaaa

SEQ ID NO: 1678816 - RNA, 19 nt, Artificial Sequence
  Description of Artificial Sequence: Synthetic oligonucleotide
  Antisense strand to SEQ ID NO: 1678815
uuucucaacauuuaagagc

SEQ ID NO: 1678817 - RNA, 19 nt, Artificial Sequence
  Description of Artificial Sequence: Synthetic oligonucleotide
  Sense strand starting at position 3926 of SEQ ID NO: 1561529
uagaguuuauuuggacaca

SEQ ID NO: 1678818 - RNA, 19 nt, Artificial Sequence
  Description of Artificial Sequence: Synthetic oligonucleotide
  Antisense strand to SEQ ID NO: 1678817
uguguccaaauaaacucua

SEQ ID NO: 1678819 - RNA, 19 nt, Artificial Sequence
  Description of Artificial Sequence: Synthetic oligonucleotide
  Sense strand starting at position 3927 of SEQ ID NO: 1561529
agaguuuauuuggacacaa

SEQ ID NO: 1678820 - RNA, 19 nt, Artificial Sequence
  Description of Artificial Sequence: Synthetic oligonucleotide
  Antisense strand to SEQ ID NO: 1678819
uuguguccaaauaaacucu

SEQ ID NO: 1678821 - RNA, 19 nt, Artificial Sequence
  Description of Artificial Sequence: Synthetic oligonucleotide
  Sense strand starting at position 756 of SEQ ID NO: 1561530
gcuccauccucacgucuua

SEQ ID NO: 1678822 - RNA, 19 nt, Artificial Sequence
  Description of Artificial Sequence: Synthetic oligonucleotide
  Antisense strand to SEQ ID NO: 1678821
uaagacgugaggauggagc

SEQ ID NO: 1678823 - RNA, 19 nt, Artificial Sequence
  Description of Artificial Sequence: Synthetic oligonucleotide
  Sense strand starting at position 803 of SEQ ID NO: 1561530
auucuucgaucguccucaa

SEQ ID NO: 1678824 - RNA, 19 nt, Artificial Sequence
  Description of Artificial Sequence: Synthetic oligonucleotide
  Antisense strand to SEQ ID NO: 1678823
uugaggacgaucgaagaau

SEQ ID NO: 1678825 - RNA, 19 nt, Artificial Sequence
  Description of Artificial Sequence: Synthetic oligonucleotide
  Sense strand starting at position 806 of SEQ ID NO: 1561530
cuucgaucguccucaaucu

SEQ ID NO: 1678826 - RNA, 19 nt, Artificial Sequence
  Description of Artificial Sequence: Synthetic oligonucleotide
  Antisense strand to SEQ ID NO: 1678825
agauugaggacgaucgaag

SEQ ID NO: 1678827 - RNA, 19 nt, Artificial Sequence
  Description of Artificial Sequence: Synthetic oligonucleotide
  Sense strand starting at position 862 of SEQ ID NO: 1561530
ugccgcucucccuguuaaa

SEQ ID NO: 1678828 - RNA, 19 nt, Artificial Sequence
  Description of Artificial Sequence: Synthetic oligonucleotide
  Antisense strand to SEQ ID NO: 1678827
uuuaacagggagagcggca

SEQ ID NO: 1678829 - RNA, 19 nt, Artificial Sequence
  Description of Artificial Sequence: Synthetic oligonucleotide
  Sense strand starting at position 863 of SEQ ID NO: 1561530
gccgcucucccuguuaaau

SEQ ID NO: 1678830 - RNA, 19 nt, Artificial Sequence
  Description of Artificial Sequence: Synthetic oligonucleotide
  Antisense strand to SEQ ID NO: 1678829
auuuaacagggagagcggc

SEQ ID NO: 1678831 - RNA, 19 nt, Artificial Sequence
  Description of Artificial Sequence: Synthetic oligonucleotide
  Sense strand starting at position 865 of SEQ ID NO: 1561530
cgcucucccuguuaaauuc

SEQ ID NO: 1678832 - RNA, 19 nt, Artificial Sequence
  Description of Artificial Sequence: Synthetic oligonucleotide
  Antisense strand to SEQ ID NO: 1678831
gaauuuaacagggagagcg

SEQ ID NO: 1678833 - RNA, 19 nt, Artificial Sequence
  Description of Artificial Sequence: Synthetic oligonucleotide
  Sense strand starting at position 1222 of SEQ ID NO: 1561530
uguuaugggucuuucucau

SEQ ID NO: 1678834 - RNA, 19 nt, Artificial Sequence
  Description of Artificial Sequence: Synthetic oligonucleotide
  Antisense strand to SEQ ID NO: 1678833
augagaaagacccauaaca

SEQ ID NO: 1678835 - RNA, 19 nt, Artificial Sequence
  Description of Artificial Sequence: Synthetic oligonucleotide
  Sense strand starting at position 1228 of SEQ ID NO: 1561530
gggucuuucucauucuucu

SEQ ID NO: 1678836 - RNA, 19 nt, Artificial Sequence
  Description of Artificial Sequence: Synthetic oligonucleotide
  Antisense strand to SEQ ID NO: 1678835
agaagaaugagaaagaccc

SEQ ID NO: 1678837 - RNA, 19 nt, Artificial Sequence
  Description of Artificial Sequence: Synthetic oligonucleotide
  Sense strand starting at position 1307 of SEQ ID NO: 1561530
acaggaggguuugaaguaa

SEQ ID NO: 1678838 - RNA, 19 nt, Artificial Sequence
  Description of Artificial Sequence: Synthetic oligonucleotide
  Antisense strand to SEQ ID NO: 1678837
uuacuucaaacccuccugu

SEQ ID NO: 1678839 - RNA, 19 nt, Artificial Sequence
  Description of Artificial Sequence: Synthetic oligonucleotide
  Sense strand starting at position 1593 of SEQ ID NO: 1561530
gcgccuaaagguugagacu

SEQ ID NO: 1678840 - RNA, 19 nt, Artificial Sequence
  Description of Artificial Sequence: Synthetic oligonucleotide
  Antisense strand to SEQ ID NO: 1678839
agucucaaccuuuaggcgc

SEQ ID NO: 1678841 - RNA, 19 nt, Artificial Sequence
  Description of Artificial Sequence: Synthetic oligonucleotide
  Sense strand starting at position 1817 of SEQ ID NO: 1561530
cugcauuugcucugguuga

SEQ ID NO: 1678842 - RNA, 19 nt, Artificial Sequence
  Description of Artificial Sequence: Synthetic oligonucleotide
  Antisense strand to SEQ ID NO: 1678841
ucaaccagagcaaaugcag

SEQ ID NO: 1678843 - RNA, 19 nt, Artificial Sequence
  Description of Artificial Sequence: Synthetic oligonucleotide
  Sense strand starting at position 1818 of SEQ ID NO: 1561530
ugcauuugcucugguugaa

SEQ ID NO: 1678844 - RNA, 19 nt, Artificial Sequence
  Description of Artificial Sequence: Synthetic oligonucleotide
  Antisense strand to SEQ ID NO: 1678843
uucaaccagagcaaaugca

SEQ ID NO: 1678845 - RNA, 19 nt, Artificial Sequence
  Description of Artificial Sequence: Synthetic oligonucleotide
  Sense strand starting at position 2214 of SEQ ID NO: 1561530
auucgaaagcccuggaauu

SEQ ID NO: 1678846 - RNA, 19 nt, Artificial Sequence
  Description of Artificial Sequence: Synthetic oligonucleotide
  Antisense strand to SEQ ID NO: 1678845
aauuccagggcuuucgaau

SEQ ID NO: 1678847 - RNA, 19 nt, Artificial Sequence
  Description of Artificial Sequence: Synthetic oligonucleotide
  Sense strand starting at position 2216 of SEQ ID NO: 1561530
ucgaaagcccuggaauugu

SEQ ID NO: 1678848 - RNA, 19 nt, Artificial Sequence
  Description of Artificial Sequence: Synthetic oligonucleotide
  Antisense strand to SEQ ID NO: 1678847
acaauuccagggcuuucga

SEQ ID NO: 1678849 - RNA, 19 nt, Artificial Sequence
  Description of Artificial Sequence: Synthetic oligonucleotide
  Sense strand starting at position 2467 of SEQ ID NO: 1561530
gcuuaaacauagcaggaau

SEQ ID NO: 1678850 - RNA, 19 nt, Artificial Sequence
  Description of Artificial Sequence: Synthetic oligonucleotide
  Antisense strand to SEQ ID NO: 1678849
auuccugcuauguuuaagc

SEQ ID NO: 1678851 - RNA, 19 nt, Artificial Sequence
  Description of Artificial Sequence: Synthetic oligonucleotide
  Sense strand starting at position 2675 of SEQ ID NO: 1561530
ccaguuaauugucccagca

SEQ ID NO: 1678852 - RNA, 19 nt, Artificial Sequence
  Description of Artificial Sequence: Synthetic oligonucleotide
  Antisense strand to SEQ ID NO: 1678851
ugcugggacaauuaacugg

SEQ ID NO: 1678853 - RNA, 19 nt, Artificial Sequence
  Description of Artificial Sequence: Synthetic oligonucleotide
  Sense strand starting at position 2677 of SEQ ID NO: 1561530
aguuaauugucccagcaca

SEQ ID NO: 1678854 - RNA, 19 nt, Artificial Sequence
  Description of Artificial Sequence: Synthetic oligonucleotide
  Antisense strand to SEQ ID NO: 1678853
ugugcugggacaauuaacu

SEQ ID NO: 1678855 - RNA, 19 nt, Artificial Sequence
  Description of Artificial Sequence: Synthetic oligonucleotide
  Sense strand starting at position 2751 of SEQ ID NO: 1561530
ggaguauuucucugucgcu

SEQ ID NO: 1678856 - RNA, 19 nt, Artificial Sequence
  Description of Artificial Sequence: Synthetic oligonucleotide
  Antisense strand to SEQ ID NO: 1678855
agcgacagagaaauacucc

SEQ ID NO: 1678857 - RNA, 19 nt, Artificial Sequence
  Description of Artificial Sequence: Synthetic oligonucleotide
  Sense strand starting at position 2752 of SEQ ID NO: 1561530
gaguauuucucugucgcuc

SEQ ID NO: 1678858 - RNA, 19 nt, Artificial Sequence
  Description of Artificial Sequence: Synthetic oligonucleotide
  Antisense strand to SEQ ID NO: 1678857
gagcgacagagaaauacuc

SEQ ID NO: 1678859 - RNA, 19 nt, Artificial Sequence
  Description of Artificial Sequence: Synthetic oligonucleotide
  Sense strand starting at position 3041 of SEQ ID NO: 1561530
ucacuucgcucuuaaaugu

SEQ ID NO: 1678860 - RNA, 19 nt, Artificial Sequence
  Description of Artificial Sequence: Synthetic oligonucleotide
  Antisense strand to SEQ ID NO: 1678859
acauuuaagagcgaaguga

SEQ ID NO: 1678861 - RNA, 19 nt, Artificial Sequence
  Description of Artificial Sequence: Synthetic oligonucleotide
  Sense strand starting at position 3048 of SEQ ID NO: 1561530
gcucuuaaauguugagaaa

SEQ ID NO: 1678862 - RNA, 19 nt, Artificial Sequence
  Description of Artificial Sequence: Synthetic oligonucleotide
  Antisense strand to SEQ ID NO: 1678861
uuucucaacauuuaagagc

SEQ ID NO: 1678863 - RNA, 19 nt, Artificial Sequence
  Description of Artificial Sequence: Synthetic oligonucleotide
  Sense strand starting at position 3535 of SEQ ID NO: 1561530
uagaguuuauuuggacaca

SEQ ID NO: 1678864 - RNA, 19 nt, Artificial Sequence
  Description of Artificial Sequence: Synthetic oligonucleotide
  Antisense strand to SEQ ID NO: 1678863
uguguccaaauaaacucua

SEQ ID NO: 1678865 - RNA, 19 nt, Artificial Sequence
  Description of Artificial Sequence: Synthetic oligonucleotide
  Sense strand starting at position 3536 of SEQ ID NO: 1561530
agaguuuauuuggacacaa

SEQ ID NO: 1678866 - RNA, 19 nt, Artificial Sequence
  Description of Artificial Sequence: Synthetic oligonucleotide
  Antisense strand to SEQ ID NO: 1678865
uuguguccaaauaaacucu

SEQ ID NO: 1678867 - RNA, 19 nt, Artificial Sequence
  Description of Artificial Sequence: Synthetic oligonucleotide
  Sense strand starting at position 3651 of SEQ ID NO: 1561530
agagaagcuuucccagaac

SEQ ID NO: 1678868 - RNA, 19 nt, Artificial Sequence
  Description of Artificial Sequence: Synthetic oligonucleotide
  Antisense strand to SEQ ID NO: 1678867
guucugggaaagcuucucu

SEQ ID NO: 1678869 - RNA, 19 nt, Artificial Sequence
  Description of Artificial Sequence: Synthetic oligonucleotide
  Sense strand starting at position 3709 of SEQ ID NO: 1561530
cagcuugacuggugaugga

SEQ ID NO: 1678870 - RNA, 19 nt, Artificial Sequence
  Description of Artificial Sequence: Synthetic oligonucleotide
  Antisense strand to SEQ ID NO: 1678869
uccaucaccagucaagcug

SEQ ID NO: 1678871 - RNA, 19 nt, Artificial Sequence
  Description of Artificial Sequence: Synthetic oligonucleotide
  Sense strand starting at position 121 of SEQ ID NO: 1561531
aacagaugugucugacuga

SEQ ID NO: 1678872 - RNA, 19 nt, Artificial Sequence
  Description of Artificial Sequence: Synthetic oligonucleotide
  Antisense strand to SEQ ID NO: 1678871
ucagucagacacaucuguu

SEQ ID NO: 1678873 - RNA, 19 nt, Artificial Sequence
  Description of Artificial Sequence: Synthetic oligonucleotide
  Sense strand starting at position 124 of SEQ ID NO: 1561531
agaugugucugacugauau

SEQ ID NO: 1678874 - RNA, 19 nt, Artificial Sequence
  Description of Artificial Sequence: Synthetic oligonucleotide
  Antisense strand to SEQ ID NO: 1678873
auaucagucagacacaucu

SEQ ID NO: 1678875 - RNA, 19 nt, Artificial Sequence
  Description of Artificial Sequence: Synthetic oligonucleotide
  Sense strand starting at position 372 of SEQ ID NO: 1561531
agcacugugucuccaagaa

SEQ ID NO: 1678876 - RNA, 19 nt, Artificial Sequence
  Description of Artificial Sequence: Synthetic oligonucleotide
  Antisense strand to SEQ ID NO: 1678875
uucuuggagacacagugcu

SEQ ID NO: 1678877 - RNA, 19 nt, Artificial Sequence
  Description of Artificial Sequence: Synthetic oligonucleotide
  Sense strand starting at position 448 of SEQ ID NO: 1561531
ggaagaguaugccaggaga

SEQ ID NO: 1678878 - RNA, 19 nt, Artificial Sequence
  Description of Artificial Sequence: Synthetic oligonucleotide
  Antisense strand to SEQ ID NO: 1678877
ucuccuggcauacucuucc

SEQ ID NO: 1678879 - RNA, 19 nt, Artificial Sequence
  Description of Artificial Sequence: Synthetic oligonucleotide
  Sense strand starting at position 450 of SEQ ID NO: 1561531
aagaguaugccaggagaug

SEQ ID NO: 1678880 - RNA, 19 nt, Artificial Sequence
  Description of Artificial Sequence: Synthetic oligonucleotide
  Antisense strand to SEQ ID NO: 1678879
caucuccuggcauacucuu

SEQ ID NO: 1678881 - RNA, 19 nt, Artificial Sequence
  Description of Artificial Sequence: Synthetic oligonucleotide
  Sense strand starting at position 525 of SEQ ID NO: 1561531
gguuguccucagggagaaa

SEQ ID NO: 1678882 - RNA, 19 nt, Artificial Sequence
  Description of Artificial Sequence: Synthetic oligonucleotide
  Antisense strand to SEQ ID NO: 1678881
uuucucccugaggacaacc

SEQ ID NO: 1678883 - RNA, 19 nt, Artificial Sequence
  Description of Artificial Sequence: Synthetic oligonucleotide
  Sense strand starting at position 586 of SEQ ID NO: 1561531
aagucaugauguguaucuu

SEQ ID NO: 1678884 - RNA, 19 nt, Artificial Sequence
  Description of Artificial Sequence: Synthetic oligonucleotide
  Antisense strand to SEQ ID NO: 1678883
aagauacacaucaugacuu

SEQ ID NO: 1678885 - RNA, 19 nt, Artificial Sequence
  Description of Artificial Sequence: Synthetic oligonucleotide
  Sense strand starting at position 594 of SEQ ID NO: 1561531
auguguaucuugguuuacu

SEQ ID NO: 1678886 - RNA, 19 nt, Artificial Sequence
  Description of Artificial Sequence: Synthetic oligonucleotide
  Antisense strand to SEQ ID NO: 1678885
aguaaaccaagauacacau

SEQ ID NO: 1678887 - RNA, 19 nt, Artificial Sequence
  Description of Artificial Sequence: Synthetic oligonucleotide
  Sense strand starting at position 602 of SEQ ID NO: 1561531
cuugguuuacuccagacag

SEQ ID NO: 1678888 - RNA, 19 nt, Artificial Sequence
  Description of Artificial Sequence: Synthetic oligonucleotide
  Antisense strand to SEQ ID NO: 1678887
cugucuggaguaaaccaag

SEQ ID NO: 1678889 - RNA, 19 nt, Artificial Sequence
  Description of Artificial Sequence: Synthetic oligonucleotide
  Sense strand starting at position 604 of SEQ ID NO: 1561531
ugguuuacuccagacagua

SEQ ID NO: 1678890 - RNA, 19 nt, Artificial Sequence
  Description of Artificial Sequence: Synthetic oligonucleotide
  Antisense strand to SEQ ID NO: 1678889
uacugucuggaguaaacca

SEQ ID NO: 1678891 - RNA, 19 nt, Artificial Sequence
  Description of Artificial Sequence: Synthetic oligonucleotide
  Sense strand starting at position 663 of SEQ ID NO: 1561531
gacacaucacuccguaaag

SEQ ID NO: 1678892 - RNA, 19 nt, Artificial Sequence
  Description of Artificial Sequence: Synthetic oligonucleotide
  Antisense strand to SEQ ID NO: 1678891
cuuuacggagugauguguc

SEQ ID NO: 1678893 - RNA, 19 nt, Artificial Sequence
  Description of Artificial Sequence: Synthetic oligonucleotide
  Sense strand starting at position 664 of SEQ ID NO: 1561531
acacaucacuccguaaagu

SEQ ID NO: 1678894 - RNA, 19 nt, Artificial Sequence
  Description of Artificial Sequence: Synthetic oligonucleotide
  Antisense strand to SEQ ID NO: 1678893
acuuuacggagugaugugu

SEQ ID NO: 1678895 - RNA, 19 nt, Artificial Sequence
  Description of Artificial Sequence: Synthetic oligonucleotide
  Sense strand starting at position 673 of SEQ ID NO: 1561531
uccguaaaguuuccaaaga

SEQ ID NO: 1678896 - RNA, 19 nt, Artificial Sequence
  Description of Artificial Sequence: Synthetic oligonucleotide
  Antisense strand to SEQ ID NO: 1678895
ucuuuggaaacuuuacgga

SEQ ID NO: 1678897 - RNA, 19 nt, Artificial Sequence
  Description of Artificial Sequence: Synthetic oligonucleotide
  Sense strand starting at position 719 of SEQ ID NO: 1561531
ugauaagauuucugugccu

SEQ ID NO: 1678898 - RNA, 19 nt, Artificial Sequence
  Description of Artificial Sequence: Synthetic oligonucleotide
  Antisense strand to SEQ ID NO: 1678897
aggcacagaaaucuuauca

SEQ ID NO: 1678899 - RNA, 19 nt, Artificial Sequence
  Description of Artificial Sequence: Synthetic oligonucleotide
  Sense strand starting at position 917 of SEQ ID NO: 1561531
aacaguugagaaugugaau

SEQ ID NO: 1678900 - RNA, 19 nt, Artificial Sequence
  Description of Artificial Sequence: Synthetic oligonucleotide
  Antisense strand to SEQ ID NO: 1678899
auucacauucucaacuguu

SEQ ID NO: 1678901 - RNA, 19 nt, Artificial Sequence
  Description of Artificial Sequence: Synthetic oligonucleotide
  Sense strand starting at position 1111 of SEQ ID NO: 1561531
cccuguggagugugagaau

SEQ ID NO: 1678902 - RNA, 19 nt, Artificial Sequence
  Description of Artificial Sequence: Synthetic oligonucleotide
  Antisense strand to SEQ ID NO: 1678901
auucucacacuccacaggg

SEQ ID NO: 1678903 - RNA, 19 nt, Artificial Sequence
  Description of Artificial Sequence: Synthetic oligonucleotide
  Sense strand starting at position 1120 of SEQ ID NO: 1561531
gugugagaauaauuaagug

SEQ ID NO: 1678904 - RNA, 19 nt, Artificial Sequence
  Description of Artificial Sequence: Synthetic oligonucleotide
  Antisense strand to SEQ ID NO: 1678903
cacuuaauuauucucacac

SEQ ID NO: 1678905 - RNA, 19 nt, Artificial Sequence
  Description of Artificial Sequence: Synthetic oligonucleotide
  Sense strand starting at position 1188 of SEQ ID NO: 1561531
gcaacagcuacguaaaugu

SEQ ID NO: 1678906 - RNA, 19 nt, Artificial Sequence
  Description of Artificial Sequence: Synthetic oligonucleotide
  Antisense strand to SEQ ID NO: 1678905
acauuuacguagcuguugc

SEQ ID NO: 1678907 - RNA, 19 nt, Artificial Sequence
  Description of Artificial Sequence: Synthetic oligonucleotide
  Sense strand starting at position 1958 of SEQ ID NO: 1561531
cugcgugucugagugaacu

SEQ ID NO: 1678908 - RNA, 19 nt, Artificial Sequence
  Description of Artificial Sequence: Synthetic oligonucleotide
  Antisense strand to SEQ ID NO: 1678907
aguucacucagacacgcag

SEQ ID NO: 1678909 - RNA, 19 nt, Artificial Sequence
  Description of Artificial Sequence: Synthetic oligonucleotide
  Sense strand starting at position 1960 of SEQ ID NO: 1561531
gcgugucugagugaacugu

SEQ ID NO: 1678910 - RNA, 19 nt, Artificial Sequence
  Description of Artificial Sequence: Synthetic oligonucleotide
  Antisense strand to SEQ ID NO: 1678909
acaguucacucagacacgc

SEQ ID NO: 1678911 - RNA, 19 nt, Artificial Sequence
  Description of Artificial Sequence: Synthetic oligonucleotide
  Sense strand starting at position 2037 of SEQ ID NO: 1561531
gacggaagaugugaucaga

SEQ ID NO: 1678912 - RNA, 19 nt, Artificial Sequence
  Description of Artificial Sequence: Synthetic oligonucleotide
  Antisense strand to SEQ ID NO: 1678911
ucugaucacaucuuccguc

SEQ ID NO: 1678913 - RNA, 19 nt, Artificial Sequence
  Description of Artificial Sequence: Synthetic oligonucleotide
  Sense strand starting at position 2061 of SEQ ID NO: 1561531
ggcugaaugaagugugaca

SEQ ID NO: 1678914 - RNA, 19 nt, Artificial Sequence
  Description of Artificial Sequence: Synthetic oligonucleotide
  Antisense strand to SEQ ID NO: 1678913
ugucacacuucauucagcc

SEQ ID NO: 1678915 - RNA, 19 nt, Artificial Sequence
  Description of Artificial Sequence: Synthetic oligonucleotide
  Sense strand starting at position 2140 of SEQ ID NO: 1561531
gaggguguuugccuuuaau

SEQ ID NO: 1678916 - RNA, 19 nt, Artificial Sequence
  Description of Artificial Sequence: Synthetic oligonucleotide
  Antisense strand to SEQ ID NO: 1678915
auuaaaggcaaacacccuc

SEQ ID NO: 1678917 - RNA, 19 nt, Artificial Sequence
  Description of Artificial Sequence: Synthetic oligonucleotide
  Sense strand starting at position 2143 of SEQ ID NO: 1561531
gguguuugccuuuaaucuu

SEQ ID NO: 1678918 - RNA, 19 nt, Artificial Sequence
  Description of Artificial Sequence: Synthetic oligonucleotide
  Antisense strand to SEQ ID NO: 1678917
aagauuaaaggcaaacacc

SEQ ID NO: 1678919 - RNA, 19 nt, Artificial Sequence
  Description of Artificial Sequence: Synthetic oligonucleotide
  Sense strand starting at position 2152 of SEQ ID NO: 1561531
cuuuaaucuuguguauaag

SEQ ID NO: 1678920 - RNA, 19 nt, Artificial Sequence
  Description of Artificial Sequence: Synthetic oligonucleotide
  Antisense strand to SEQ ID NO: 1678919
cuuauacacaagauuaaag

SEQ ID NO: 1678921 - RNA, 19 nt, Artificial Sequence
  Description of Artificial Sequence: Synthetic oligonucleotide
  Sense strand starting at position 2624 of SEQ ID NO: 1561531
ggaggcaauucucugaaau

SEQ ID NO: 1678922 - RNA, 19 nt, Artificial Sequence
  Description of Artificial Sequence: Synthetic oligonucleotide
  Antisense strand to SEQ ID NO: 1678921
auuucagagaauugccucc

SEQ ID NO: 1678923 - RNA, 19 nt, Artificial Sequence
  Description of Artificial Sequence: Synthetic oligonucleotide
  Sense strand starting at position 2626 of SEQ ID NO: 1561531
aggcaauucucugaaauaa

SEQ ID NO: 1678924 - RNA, 19 nt, Artificial Sequence
  Description of Artificial Sequence: Synthetic oligonucleotide
  Antisense strand to SEQ ID NO: 1678923
uuauuucagagaauugccu

SEQ ID NO: 1678925 - RNA, 19 nt, Artificial Sequence
  Description of Artificial Sequence: Synthetic oligonucleotide
  Sense strand starting at position 2728 of SEQ ID NO: 1561531
uucagaguucgagaucagu

SEQ ID NO: 1678926 - RNA, 19 nt, Artificial Sequence
  Description of Artificial Sequence: Synthetic oligonucleotide
  Antisense strand to SEQ ID NO: 1678925
acugaucucgaacucugaa

SEQ ID NO: 1678927 - RNA, 19 nt, Artificial Sequence
  Description of Artificial Sequence: Synthetic oligonucleotide
  Sense strand starting at position 2973 of SEQ ID NO: 1561531
aaaugugagccacauguaa

SEQ ID NO: 1678928 - RNA, 19 nt, Artificial Sequence
  Description of Artificial Sequence: Synthetic oligonucleotide
  Antisense strand to SEQ ID NO: 1678927
uuacauguggcucacauuu

SEQ ID NO: 1678929 - RNA, 19 nt, Artificial Sequence
  Description of Artificial Sequence: Synthetic oligonucleotide
  Sense strand starting at position 3181 of SEQ ID NO: 1561531
ccggcuaauuuguagccaa

SEQ ID NO: 1678930 - RNA, 19 nt, Artificial Sequence
  Description of Artificial Sequence: Synthetic oligonucleotide
  Antisense strand to SEQ ID NO: 1678929
uuggcuacaaauuagccgg

SEQ ID NO: 1678931 - RNA, 19 nt, Artificial Sequence
  Description of Artificial Sequence: Synthetic oligonucleotide
  Sense strand starting at position 3184 of SEQ ID NO: 1561531
gcuaauuuguagccaaacu

SEQ ID NO: 1678932 - RNA, 19 nt, Artificial Sequence
  Description of Artificial Sequence: Synthetic oligonucleotide
  Antisense strand to SEQ ID NO: 1678931
aguuuggcuacaaauuagc

SEQ ID NO: 1678933 - RNA, 19 nt, Artificial Sequence
  Description of Artificial Sequence: Synthetic oligonucleotide
  Sense strand starting at position 3245 of SEQ ID NO: 1561531
aggugaaauugauuguaac

SEQ ID NO: 1678934 - RNA, 19 nt, Artificial Sequence
  Description of Artificial Sequence: Synthetic oligonucleotide
  Antisense strand to SEQ ID NO: 1678933
guuacaaucaauuucaccu

SEQ ID NO: 1678935 - RNA, 19 nt, Artificial Sequence
  Description of Artificial Sequence: Synthetic oligonucleotide
  Sense strand starting at position 3246 of SEQ ID NO: 1561531
ggugaaauugauuguaaca

SEQ ID NO: 1678936 - RNA, 19 nt, Artificial Sequence
  Description of Artificial Sequence: Synthetic oligonucleotide
  Antisense strand to SEQ ID NO: 1678935
uguuacaaucaauuucacc

SEQ ID NO: 1678937 - RNA, 19 nt, Artificial Sequence
  Description of Artificial Sequence: Synthetic oligonucleotide
  Sense strand starting at position 3321 of SEQ ID NO: 1561531
auuaaugaagugugucuau

SEQ ID NO: 1678938 - RNA, 19 nt, Artificial Sequence
  Description of Artificial Sequence: Synthetic oligonucleotide
  Antisense strand to SEQ ID NO: 1678937
auagacacacuucauuaau

SEQ ID NO: 1678939 - RNA, 19 nt, Artificial Sequence
  Description of Artificial Sequence: Synthetic oligonucleotide
  Sense strand starting at position 3324 of SEQ ID NO: 1561531
aaugaagugugucuauaua

SEQ ID NO: 1678940 - RNA, 19 nt, Artificial Sequence
  Description of Artificial Sequence: Synthetic oligonucleotide
  Antisense strand to SEQ ID NO: 1678939
uauauagacacacuucauu

SEQ ID NO: 1678941 - RNA, 19 nt, Artificial Sequence
  Description of Artificial Sequence: Synthetic oligonucleotide
  Sense strand starting at position 3356 of SEQ ID NO: 1561531
cuuugaaacuaacucguau

SEQ ID NO: 1678942 - RNA, 19 nt, Artificial Sequence
  Description of Artificial Sequence: Synthetic oligonucleotide
  Antisense strand to SEQ ID NO: 1678941
auacgaguuaguuucaaag

SEQ ID NO: 1678943 - RNA, 19 nt, Artificial Sequence
  Description of Artificial Sequence: Synthetic oligonucleotide
  Sense strand starting at position 3480 of SEQ ID NO: 1561531
gggugaacgaccugaacau

SEQ ID NO: 1678944 - RNA, 19 nt, Artificial Sequence
  Description of Artificial Sequence: Synthetic oligonucleotide
  Antisense strand to SEQ ID NO: 1678943
auguucaggucguucaccc

SEQ ID NO: 1678945 - RNA, 19 nt, Artificial Sequence
  Description of Artificial Sequence: Synthetic oligonucleotide
  Sense strand starting at position 3549 of SEQ ID NO: 1561531
uucgguucugaggguagaa

SEQ ID NO: 1678946 - RNA, 19 nt, Artificial Sequence
  Description of Artificial Sequence: Synthetic oligonucleotide
  Antisense strand to SEQ ID NO: 1678945
uucuacccucagaaccgaa

SEQ ID NO: 1678947 - RNA, 19 nt, Artificial Sequence
  Description of Artificial Sequence: Synthetic oligonucleotide
  Sense strand starting at position 3564 of SEQ ID NO: 1561531
agaacagacaguggucaua

SEQ ID NO: 1678948 - RNA, 19 nt, Artificial Sequence
  Description of Artificial Sequence: Synthetic oligonucleotide
  Antisense strand to SEQ ID NO: 1678947
uaugaccacugucuguucu

SEQ ID NO: 1678949 - RNA, 19 nt, Artificial Sequence
  Description of Artificial Sequence: Synthetic oligonucleotide
  Sense strand starting at position 3566 of SEQ ID NO: 1561531
aacagacaguggucauaga

SEQ ID NO: 1678950 - RNA, 19 nt, Artificial Sequence
  Description of Artificial Sequence: Synthetic oligonucleotide
  Antisense strand to SEQ ID NO: 1678949
ucuaugaccacugucuguu

SEQ ID NO: 1678951 - RNA, 19 nt, Artificial Sequence
  Description of Artificial Sequence: Synthetic oligonucleotide
  Sense strand starting at position 148 of SEQ ID NO: 1561532
aacagaugugucugacuga

SEQ ID NO: 1678952 - RNA, 19 nt, Artificial Sequence
  Description of Artificial Sequence: Synthetic oligonucleotide
  Antisense strand to SEQ ID NO: 1678951
ucagucagacacaucuguu

SEQ ID NO: 1678953 - RNA, 19 nt, Artificial Sequence
  Description of Artificial Sequence: Synthetic oligonucleotide
  Sense strand starting at position 151 of SEQ ID NO: 1561532
agaugugucugacugauau

SEQ ID NO: 1678954 - RNA, 19 nt, Artificial Sequence
  Description of Artificial Sequence: Synthetic oligonucleotide
  Antisense strand to SEQ ID NO: 1678953
auaucagucagacacaucu

SEQ ID NO: 1678955 - RNA, 19 nt, Artificial Sequence
  Description of Artificial Sequence: Synthetic oligonucleotide
  Sense strand starting at position 399 of SEQ ID NO: 1561532
agcacugugucuccaagaa

SEQ ID NO: 1678956 - RNA, 19 nt, Artificial Sequence
  Description of Artificial Sequence: Synthetic oligonucleotide
  Antisense strand to SEQ ID NO: 1678955
uucuuggagacacagugcu

SEQ ID NO: 1678957 - RNA, 19 nt, Artificial Sequence
  Description of Artificial Sequence: Synthetic oligonucleotide
  Sense strand starting at position 475 of SEQ ID NO: 1561532
ggaagaguaugccaggaga

SEQ ID NO: 1678958 - RNA, 19 nt, Artificial Sequence
  Description of Artificial Sequence: Synthetic oligonucleotide
  Antisense strand to SEQ ID NO: 1678957
ucuccuggcauacucuucc

SEQ ID NO: 1678959 - RNA, 19 nt, Artificial Sequence
  Description of Artificial Sequence: Synthetic oligonucleotide
  Sense strand starting at position 477 of SEQ ID NO: 1561532
aagaguaugccaggagaug

SEQ ID NO: 1678960 - RNA, 19 nt, Artificial Sequence
  Description of Artificial Sequence: Synthetic oligonucleotide
  Antisense strand to SEQ ID NO: 1678959
caucuccuggcauacucuu

SEQ ID NO: 1678961 - RNA, 19 nt, Artificial Sequence
  Description of Artificial Sequence: Synthetic oligonucleotide
  Sense strand starting at position 552 of SEQ ID NO: 1561532
gguuguccucagggagaaa

SEQ ID NO: 1678962 - RNA, 19 nt, Artificial Sequence
  Description of Artificial Sequence: Synthetic oligonucleotide
  Antisense strand to SEQ ID NO: 1678961
uuucucccugaggacaacc

SEQ ID NO: 1678963 - RNA, 19 nt, Artificial Sequence
  Description of Artificial Sequence: Synthetic oligonucleotide
  Sense strand starting at position 613 of SEQ ID NO: 1561532
aagucaugauguguaucuu

SEQ ID NO: 1678964 - RNA, 19 nt, Artificial Sequence
  Description of Artificial Sequence: Synthetic oligonucleotide
  Antisense strand to SEQ ID NO: 1678963
aagauacacaucaugacuu

SEQ ID NO: 1678965 - RNA, 19 nt, Artificial Sequence
  Description of Artificial Sequence: Synthetic oligonucleotide
  Sense strand starting at position 621 of SEQ ID NO: 1561532
auguguaucuugguuuacu

SEQ ID NO: 1678966 - RNA, 19 nt, Artificial Sequence
  Description of Artificial Sequence: Synthetic oligonucleotide
  Antisense strand to SEQ ID NO: 1678965
aguaaaccaagauacacau

SEQ ID NO: 1678967 - RNA, 19 nt, Artificial Sequence
  Description of Artificial Sequence: Synthetic oligonucleotide
  Sense strand starting at position 629 of SEQ ID NO: 1561532
cuugguuuacuccagacag

SEQ ID NO: 1678968 - RNA, 19 nt, Artificial Sequence
  Description of Artificial Sequence: Synthetic oligonucleotide
  Antisense strand to SEQ ID NO: 1678967
cugucuggaguaaaccaag

SEQ ID NO: 1678969 - RNA, 19 nt, Artificial Sequence
  Description of Artificial Sequence: Synthetic oligonucleotide
  Sense strand starting at position 631 of SEQ ID NO: 1561532
ugguuuacuccagacagua

SEQ ID NO: 1678970 - RNA, 19 nt, Artificial Sequence
  Description of Artificial Sequence: Synthetic oligonucleotide
  Antisense strand to SEQ ID NO: 1678969
uacugucuggaguaaacca

SEQ ID NO: 1678971 - RNA, 19 nt, Artificial Sequence
  Description of Artificial Sequence: Synthetic oligonucleotide
  Sense strand starting at position 690 of SEQ ID NO: 1561532
gacacaucacuccguaaag

SEQ ID NO: 1678972 - RNA, 19 nt, Artificial Sequence
  Description of Artificial Sequence: Synthetic oligonucleotide
  Antisense strand to SEQ ID NO: 1678971
cuuuacggagugauguguc

SEQ ID NO: 1678973 - RNA, 19 nt, Artificial Sequence
  Description of Artificial Sequence: Synthetic oligonucleotide
  Sense strand starting at position 691 of SEQ ID NO: 1561532
acacaucacuccguaaagu

SEQ ID NO: 1678974 - RNA, 19 nt, Artificial Sequence
  Description of Artificial Sequence: Synthetic oligonucleotide
  Antisense strand to SEQ ID NO: 1678973
acuuuacggagugaugugu

SEQ ID NO: 1678975 - RNA, 19 nt, Artificial Sequence
  Description of Artificial Sequence: Synthetic oligonucleotide
  Sense strand starting at position 700 of SEQ ID NO: 1561532
uccguaaaguuuccaaaga

SEQ ID NO: 1678976 - RNA, 19 nt, Artificial Sequence
  Description of Artificial Sequence: Synthetic oligonucleotide
  Antisense strand to SEQ ID NO: 1678975
ucuuuggaaacuuuacgga

SEQ ID NO: 1678977 - RNA, 19 nt, Artificial Sequence
  Description of Artificial Sequence: Synthetic oligonucleotide
  Sense strand starting at position 746 of SEQ ID NO: 1561532
ugauaagauuucugugccu

SEQ ID NO: 1678978 - RNA, 19 nt, Artificial Sequence
  Description of Artificial Sequence: Synthetic oligonucleotide
  Antisense strand to SEQ ID NO: 1678977
aggcacagaaaucuuauca

SEQ ID NO: 1678979 - RNA, 19 nt, Artificial Sequence
  Description of Artificial Sequence: Synthetic oligonucleotide
  Sense strand starting at position 944 of SEQ ID NO: 1561532
aacaguugagaaugugaau

SEQ ID NO: 1678980 - RNA, 19 nt, Artificial Sequence
  Description of Artificial Sequence: Synthetic oligonucleotide
  Antisense strand to SEQ ID NO: 1678979
auucacauucucaacuguu

SEQ ID NO: 1678981 - RNA, 19 nt, Artificial Sequence
  Description of Artificial Sequence: Synthetic oligonucleotide
  Sense strand starting at position 1138 of SEQ ID NO: 1561532
cccuguggagugugagaau

SEQ ID NO: 1678982 - RNA, 19 nt, Artificial Sequence
  Description of Artificial Sequence: Synthetic oligonucleotide
  Antisense strand to SEQ ID NO: 1678981
auucucacacuccacaggg

SEQ ID NO: 1678983 - RNA, 19 nt, Artificial Sequence
  Description of Artificial Sequence: Synthetic oligonucleotide
  Sense strand starting at position 1147 of SEQ ID NO: 1561532
gugugagaauaauuaagug

SEQ ID NO: 1678984 - RNA, 19 nt, Artificial Sequence
  Description of Artificial Sequence: Synthetic oligonucleotide
  Antisense strand to SEQ ID NO: 1678983
cacuuaauuauucucacac

SEQ ID NO: 1678985 - RNA, 19 nt, Artificial Sequence
  Description of Artificial Sequence: Synthetic oligonucleotide
  Sense strand starting at position 1215 of SEQ ID NO: 1561532
gcaacagcuacguaaaugu

SEQ ID NO: 1678986 - RNA, 19 nt, Artificial Sequence
  Description of Artificial Sequence: Synthetic oligonucleotide
  Antisense strand to SEQ ID NO: 1678985
acauuuacguagcuguugc

SEQ ID NO: 1678987 - RNA, 19 nt, Artificial Sequence
  Description of Artificial Sequence: Synthetic oligonucleotide
  Sense strand starting at position 1985 of SEQ ID NO: 1561532
cugcgugucugagugaacu

SEQ ID NO: 1678988 - RNA, 19 nt, Artificial Sequence
  Description of Artificial Sequence: Synthetic oligonucleotide
  Antisense strand to SEQ ID NO: 1678987
aguucacucagacacgcag

SEQ ID NO: 1678989 - RNA, 19 nt, Artificial Sequence
  Description of Artificial Sequence: Synthetic oligonucleotide
  Sense strand starting at position 1987 of SEQ ID NO: 1561532
gcgugucugagugaacugu

SEQ ID NO: 1678990 - RNA, 19 nt, Artificial Sequence
  Description of Artificial Sequence: Synthetic oligonucleotide
  Antisense strand to SEQ ID NO: 1678989
acaguucacucagacacgc

SEQ ID NO: 1678991 - RNA, 19 nt, Artificial Sequence
  Description of Artificial Sequence: Synthetic oligonucleotide
  Sense strand starting at position 2064 of SEQ ID NO: 1561532
gacggaagaugugaucaga

SEQ ID NO: 1678992 - RNA, 19 nt, Artificial Sequence
  Description of Artificial Sequence: Synthetic oligonucleotide
  Antisense strand to SEQ ID NO: 1678991
ucugaucacaucuuccguc

SEQ ID NO: 1678993 - RNA, 19 nt, Artificial Sequence
  Description of Artificial Sequence: Synthetic oligonucleotide
  Sense strand starting at position 2088 of SEQ ID NO: 1561532
ggcugaaugaagugugaca

SEQ ID NO: 1678994 - RNA, 19 nt, Artificial Sequence
  Description of Artificial Sequence: Synthetic oligonucleotide
  Antisense strand to SEQ ID NO: 1678993
ugucacacuucauucagcc

SEQ ID NO: 1678995 - RNA, 19 nt, Artificial Sequence
  Description of Artificial Sequence: Synthetic oligonucleotide
  Sense strand starting at position 2167 of SEQ ID NO: 1561532
gaggguguuugccuuuaau

SEQ ID NO: 1678996 - RNA, 19 nt, Artificial Sequence
  Description of Artificial Sequence: Synthetic oligonucleotide
  Antisense strand to SEQ ID NO: 1678995
auuaaaggcaaacacccuc

SEQ ID NO: 1678997 - RNA, 19 nt, Artificial Sequence
  Description of Artificial Sequence: Synthetic oligonucleotide
  Sense strand starting at position 2170 of SEQ ID NO: 1561532
gguguuugccuuuaaucuu

SEQ ID NO: 1678998 - RNA, 19 nt, Artificial Sequence
  Description of Artificial Sequence: Synthetic oligonucleotide
  Antisense strand to SEQ ID NO: 1678997
aagauuaaaggcaaacacc

SEQ ID NO: 1678999 - RNA, 19 nt, Artificial Sequence
  Description of Artificial Sequence: Synthetic oligonucleotide
  Sense strand starting at position 2179 of SEQ ID NO: 1561532
cuuuaaucuuguguauaag

SEQ ID NO: 1679000 - RNA, 19 nt, Artificial Sequence
  Description of Artificial Sequence: Synthetic oligonucleotide
  Antisense strand to SEQ ID NO: 1678999
cuuauacacaagauuaaag

SEQ ID NO: 1679001 - RNA, 19 nt, Artificial Sequence
  Description of Artificial Sequence: Synthetic oligonucleotide
  Sense strand starting at position 2651 of SEQ ID NO: 1561532
ggaggcaauucucugaaau

SEQ ID NO: 1679002 - RNA, 19 nt, Artificial Sequence
  Description of Artificial Sequence: Synthetic oligonucleotide
  Antisense strand to SEQ ID NO: 1679001
auuucagagaauugccucc

SEQ ID NO: 1679003 - RNA, 19 nt, Artificial Sequence
  Description of Artificial Sequence: Synthetic oligonucleotide
  Sense strand starting at position 2653 of SEQ ID NO: 1561532
aggcaauucucugaaauaa

SEQ ID NO: 1679004 - RNA, 19 nt, Artificial Sequence
  Description of Artificial Sequence: Synthetic oligonucleotide
  Antisense strand to SEQ ID NO: 1679003
uuauuucagagaauugccu

SEQ ID NO: 1679005 - RNA, 19 nt, Artificial Sequence
  Description of Artificial Sequence: Synthetic oligonucleotide
  Sense strand starting at position 2755 of SEQ ID NO: 1561532
uucagaguucgagaucagu

SEQ ID NO: 1679006 - RNA, 19 nt, Artificial Sequence
  Description of Artificial Sequence: Synthetic oligonucleotide
  Antisense strand to SEQ ID NO: 1679005
acugaucucgaacucugaa

SEQ ID NO: 1679007 - RNA, 19 nt, Artificial Sequence
  Description of Artificial Sequence: Synthetic oligonucleotide
  Sense strand starting at position 3000 of SEQ ID NO: 1561532
aaaugugagccacauguaa

SEQ ID NO: 1679008 - RNA, 19 nt, Artificial Sequence
  Description of Artificial Sequence: Synthetic oligonucleotide
  Antisense strand to SEQ ID NO: 1679007
uuacauguggcucacauuu

SEQ ID NO: 1679009 - RNA, 19 nt, Artificial Sequence
  Description of Artificial Sequence: Synthetic oligonucleotide
  Sense strand starting at position 3208 of SEQ ID NO: 1561532
ccggcuaauuuguagccaa

SEQ ID NO: 1679010 - RNA, 19 nt, Artificial Sequence
  Description of Artificial Sequence: Synthetic oligonucleotide
  Antisense strand to SEQ ID NO: 1679009
uuggcuacaaauuagccgg

SEQ ID NO: 1679011 - RNA, 19 nt, Artificial Sequence
  Description of Artificial Sequence: Synthetic oligonucleotide
  Sense strand starting at position 3211 of SEQ ID NO: 1561532
gcuaauuuguagccaaacu

SEQ ID NO: 1679012 - RNA, 19 nt, Artificial Sequence
  Description of Artificial Sequence: Synthetic oligonucleotide
  Antisense strand to SEQ ID NO: 1679011
aguuuggcuacaaauuagc

SEQ ID NO: 1679013 - RNA, 19 nt, Artificial Sequence
  Description of Artificial Sequence: Synthetic oligonucleotide
  Sense strand starting at position 3272 of SEQ ID NO: 1561532
aggugaaauugauuguaac

SEQ ID NO: 1679014 - RNA, 19 nt, Artificial Sequence
  Description of Artificial Sequence: Synthetic oligonucleotide
  Antisense strand to SEQ ID NO: 1679013
guuacaaucaauuucaccu

SEQ ID NO: 1679015 - RNA, 19 nt, Artificial Sequence
  Description of Artificial Sequence: Synthetic oligonucleotide
  Sense strand starting at position 3273 of SEQ ID NO: 1561532
ggugaaauugauuguaaca

SEQ ID NO: 1679016 - RNA, 19 nt, Artificial Sequence
  Description of Artificial Sequence: Synthetic oligonucleotide
  Antisense strand to SEQ ID NO: 1679015
uguuacaaucaauuucacc

SEQ ID NO: 1679017 - RNA, 19 nt, Artificial Sequence
  Description of Artificial Sequence: Synthetic oligonucleotide
  Sense strand starting at position 3348 of SEQ ID NO: 1561532
auuaaugaagugugucuau

SEQ ID NO: 1679018 - RNA, 19 nt, Artificial Sequence
  Description of Artificial Sequence: Synthetic oligonucleotide
  Antisense strand to SEQ ID NO: 1679017
auagacacacuucauuaau

SEQ ID NO: 1679019 - RNA, 19 nt, Artificial Sequence
  Description of Artificial Sequence: Synthetic oligonucleotide
  Sense strand starting at position 3351 of SEQ ID NO: 1561532
aaugaagugugucuauaua

SEQ ID NO: 1679020 - RNA, 19 nt, Artificial Sequence
  Description of Artificial Sequence: Synthetic oligonucleotide
  Antisense strand to SEQ ID NO: 1679019
uauauagacacacuucauu

SEQ ID NO: 1679021 - RNA, 19 nt, Artificial Sequence
  Description of Artificial Sequence: Synthetic oligonucleotide
  Sense strand starting at position 3383 of SEQ ID NO: 1561532
cuuugaaacuaacucguau

SEQ ID NO: 1679022 - RNA, 19 nt, Artificial Sequence
  Description of Artificial Sequence: Synthetic oligonucleotide
  Antisense strand to SEQ ID NO: 1679021
auacgaguuaguuucaaag

SEQ ID NO: 1679023 - RNA, 19 nt, Artificial Sequence
  Description of Artificial Sequence: Synthetic oligonucleotide
  Sense strand starting at position 3507 of SEQ ID NO: 1561532
gggugaacgaccugaacau

SEQ ID NO: 1679024 - RNA, 19 nt, Artificial Sequence
  Description of Artificial Sequence: Synthetic oligonucleotide
  Antisense strand to SEQ ID NO: 1679023
auguucaggucguucaccc

SEQ ID NO: 1679025 - RNA, 19 nt, Artificial Sequence
  Description of Artificial Sequence: Synthetic oligonucleotide
  Sense strand starting at position 3576 of SEQ ID NO: 1561532
uucgguucugaggguagaa

SEQ ID NO: 1679026 - RNA, 19 nt, Artificial Sequence
  Description of Artificial Sequence: Synthetic oligonucleotide
  Antisense strand to SEQ ID NO: 1679025
uucuacccucagaaccgaa

SEQ ID NO: 1679027 - RNA, 19 nt, Artificial Sequence
  Description of Artificial Sequence: Synthetic oligonucleotide
  Sense strand starting at position 3591 of SEQ ID NO: 1561532
agaacagacaguggucaua

SEQ ID NO: 1679028 - RNA, 19 nt, Artificial Sequence
  Description of Artificial Sequence: Synthetic oligonucleotide
  Antisense strand to SEQ ID NO: 1679027
uaugaccacugucuguucu

SEQ ID NO: 1679029 - RNA, 19 nt, Artificial Sequence
  Description of Artificial Sequence: Synthetic oligonucleotide
  Sense strand starting at position 3593 of SEQ ID NO: 1561532
aacagacaguggucauaga

SEQ ID NO: 1679030 - RNA, 19 nt, Artificial Sequence
  Description of Artificial Sequence: Synthetic oligonucleotide
  Antisense strand to SEQ ID NO: 1679029
ucuaugaccacugucuguu

SEQ ID NO: 1679031 - RNA, 19 nt, Artificial Sequence
  Description of Artificial Sequence: Synthetic oligonucleotide
  Sense strand starting at position 150 of SEQ ID NO: 1561533
aacagaugugucugacuga

SEQ ID NO: 1679032 - RNA, 19 nt, Artificial Sequence
  Description of Artificial Sequence: Synthetic oligonucleotide
  Antisense strand to SEQ ID NO: 1679031
ucagucagacacaucuguu

SEQ ID NO: 1679033 - RNA, 19 nt, Artificial Sequence
  Description of Artificial Sequence: Synthetic oligonucleotide
  Sense strand starting at position 153 of SEQ ID NO: 1561533
agaugugucugacugauau

SEQ ID NO: 1679034 - RNA, 19 nt, Artificial Sequence
  Description of Artificial Sequence: Synthetic oligonucleotide
  Antisense strand to SEQ ID NO: 1679033
auaucagucagacacaucu

SEQ ID NO: 1679035 - RNA, 19 nt, Artificial Sequence
  Description of Artificial Sequence: Synthetic oligonucleotide
  Sense strand starting at position 401 of SEQ ID NO: 1561533
agcacugugucuccaagaa

SEQ ID NO: 1679036 - RNA, 19 nt, Artificial Sequence
  Description of Artificial Sequence: Synthetic oligonucleotide
  Antisense strand to SEQ ID NO: 1679035
uucuuggagacacagugcu

SEQ ID NO: 1679037 - RNA, 19 nt, Artificial Sequence
  Description of Artificial Sequence: Synthetic oligonucleotide
  Sense strand starting at position 477 of SEQ ID NO: 1561533
ggaagaguaugccaggaga

SEQ ID NO: 1679038 - RNA, 19 nt, Artificial Sequence
  Description of Artificial Sequence: Synthetic oligonucleotide
  Antisense strand to SEQ ID NO: 1679037
ucuccuggcauacucuucc

SEQ ID NO: 1679039 - RNA, 19 nt, Artificial Sequence
  Description of Artificial Sequence: Synthetic oligonucleotide
  Sense strand starting at position 479 of SEQ ID NO: 1561533
aagaguaugccaggagaug

SEQ ID NO: 1679040 - RNA, 19 nt, Artificial Sequence
  Description of Artificial Sequence: Synthetic oligonucleotide
  Antisense strand to SEQ ID NO: 1679039
caucuccuggcauacucuu

SEQ ID NO: 1679041 - RNA, 19 nt, Artificial Sequence
  Description of Artificial Sequence: Synthetic oligonucleotide
  Sense strand starting at position 554 of SEQ ID NO: 1561533
gguuguccucagggagaaa

SEQ ID NO: 1679042 - RNA, 19 nt, Artificial Sequence
  Description of Artificial Sequence: Synthetic oligonucleotide
  Antisense strand to SEQ ID NO: 1679041
uuucucccugaggacaacc

SEQ ID NO: 1679043 - RNA, 19 nt, Artificial Sequence
  Description of Artificial Sequence: Synthetic oligonucleotide
  Sense strand starting at position 615 of SEQ ID NO: 1561533
aagucaugauguguaucuu

SEQ ID NO: 1679044 - RNA, 19 nt, Artificial Sequence
  Description of Artificial Sequence: Synthetic oligonucleotide
  Antisense strand to SEQ ID NO: 1679043
aagauacacaucaugacuu

SEQ ID NO: 1679045 - RNA, 19 nt, Artificial Sequence
  Description of Artificial Sequence: Synthetic oligonucleotide
  Sense strand starting at position 623 of SEQ ID NO: 1561533
auguguaucuugguuuacu

SEQ ID NO: 1679046 - RNA, 19 nt, Artificial Sequence
  Description of Artificial Sequence: Synthetic oligonucleotide
  Antisense strand to SEQ ID NO: 1679045
aguaaaccaagauacacau

SEQ ID NO: 1679047 - RNA, 19 nt, Artificial Sequence
  Description of Artificial Sequence: Synthetic oligonucleotide
  Sense strand starting at position 631 of SEQ ID NO: 1561533
cuugguuuacuccagacag

SEQ ID NO: 1679048 - RNA, 19 nt, Artificial Sequence
  Description of Artificial Sequence: Synthetic oligonucleotide
  Antisense strand to SEQ ID NO: 1679047
cugucuggaguaaaccaag

SEQ ID NO: 1679049 - RNA, 19 nt, Artificial Sequence
  Description of Artificial Sequence: Synthetic oligonucleotide
  Sense strand starting at position 633 of SEQ ID NO: 1561533
ugguuuacuccagacagua

SEQ ID NO: 1679050 - RNA, 19 nt, Artificial Sequence
  Description of Artificial Sequence: Synthetic oligonucleotide
  Antisense strand to SEQ ID NO: 1679049
uacugucuggaguaaacca

SEQ ID NO: 1679051 - RNA, 19 nt, Artificial Sequence
  Description of Artificial Sequence: Synthetic oligonucleotide
  Sense strand starting at position 692 of SEQ ID NO: 1561533
gacacaucacuccguaaag

SEQ ID NO: 1679052 - RNA, 19 nt, Artificial Sequence
  Description of Artificial Sequence: Synthetic oligonucleotide
  Antisense strand to SEQ ID NO: 1679051
cuuuacggagugauguguc

SEQ ID NO: 1679053 - RNA, 19 nt, Artificial Sequence
  Description of Artificial Sequence: Synthetic oligonucleotide
  Sense strand starting at position 693 of SEQ ID NO: 1561533
acacaucacuccguaaagu

SEQ ID NO: 1679054 - RNA, 19 nt, Artificial Sequence
  Description of Artificial Sequence: Synthetic oligonucleotide
  Antisense strand to SEQ ID NO: 1679053
acuuuacggagugaugugu

SEQ ID NO: 1679055 - RNA, 19 nt, Artificial Sequence
  Description of Artificial Sequence: Synthetic oligonucleotide
  Sense strand starting at position 702 of SEQ ID NO: 1561533
uccguaaaguuuccaaaga

SEQ ID NO: 1679056 - RNA, 19 nt, Artificial Sequence
  Description of Artificial Sequence: Synthetic oligonucleotide
  Antisense strand to SEQ ID NO: 1679055
ucuuuggaaacuuuacgga

SEQ ID NO: 1679057 - RNA, 19 nt, Artificial Sequence
  Description of Artificial Sequence: Synthetic oligonucleotide
  Sense strand starting at position 748 of SEQ ID NO: 1561533
ugauaagauuucugugccu

SEQ ID NO: 1679058 - RNA, 19 nt, Artificial Sequence
  Description of Artificial Sequence: Synthetic oligonucleotide
  Antisense strand to SEQ ID NO: 1679057
aggcacagaaaucuuauca

SEQ ID NO: 1679059 - RNA, 19 nt, Artificial Sequence
  Description of Artificial Sequence: Synthetic oligonucleotide
  Sense strand starting at position 946 of SEQ ID NO: 1561533
aacaguugagaaugugaau

SEQ ID NO: 1679060 - RNA, 19 nt, Artificial Sequence
  Description of Artificial Sequence: Synthetic oligonucleotide
  Antisense strand to SEQ ID NO: 1679059
auucacauucucaacuguu

SEQ ID NO: 1679061 - RNA, 19 nt, Artificial Sequence
  Description of Artificial Sequence: Synthetic oligonucleotide
  Sense strand starting at position 1140 of SEQ ID NO: 1561533
cccuguggagugugagaau

SEQ ID NO: 1679062 - RNA, 19 nt, Artificial Sequence
  Description of Artificial Sequence: Synthetic oligonucleotide
  Antisense strand to SEQ ID NO: 1679061
auucucacacuccacaggg

SEQ ID NO: 1679063 - RNA, 19 nt, Artificial Sequence
  Description of Artificial Sequence: Synthetic oligonucleotide
  Sense strand starting at position 1149 of SEQ ID NO: 1561533
gugugagaauaauuaagug

SEQ ID NO: 1679064 - RNA, 19 nt, Artificial Sequence
  Description of Artificial Sequence: Synthetic oligonucleotide
  Antisense strand to SEQ ID NO: 1679063
cacuuaauuauucucacac

SEQ ID NO: 1679065 - RNA, 19 nt, Artificial Sequence
  Description of Artificial Sequence: Synthetic oligonucleotide
  Sense strand starting at position 1217 of SEQ ID NO: 1561533
gcaacagcuacguaaaugu

SEQ ID NO: 1679066 - RNA, 19 nt, Artificial Sequence
  Description of Artificial Sequence: Synthetic oligonucleotide
  Antisense strand to SEQ ID NO: 1679065
acauuuacguagcuguugc

SEQ ID NO: 1679067 - RNA, 19 nt, Artificial Sequence
  Description of Artificial Sequence: Synthetic oligonucleotide
  Sense strand starting at position 1987 of SEQ ID NO: 1561533
cugcgugucugagugaacu

SEQ ID NO: 1679068 - RNA, 19 nt, Artificial Sequence
  Description of Artificial Sequence: Synthetic oligonucleotide
  Antisense strand to SEQ ID NO: 1679067
aguucacucagacacgcag

SEQ ID NO: 1679069 - RNA, 19 nt, Artificial Sequence
  Description of Artificial Sequence: Synthetic oligonucleotide
  Sense strand starting at position 1989 of SEQ ID NO: 1561533
gcgugucugagugaacugu

SEQ ID NO: 1679070 - RNA, 19 nt, Artificial Sequence
  Description of Artificial Sequence: Synthetic oligonucleotide
  Antisense strand to SEQ ID NO: 1679069
acaguucacucagacacgc

SEQ ID NO: 1679071 - RNA, 19 nt, Artificial Sequence
  Description of Artificial Sequence: Synthetic oligonucleotide
  Sense strand starting at position 2066 of SEQ ID NO: 1561533
gacggaagaugugaucaga

SEQ ID NO: 1679072 - RNA, 19 nt, Artificial Sequence
  Description of Artificial Sequence: Synthetic oligonucleotide
  Antisense strand to SEQ ID NO: 1679071
ucugaucacaucuuccguc

SEQ ID NO: 1679073 - RNA, 19 nt, Artificial Sequence
  Description of Artificial Sequence: Synthetic oligonucleotide
  Sense strand starting at position 2090 of SEQ ID NO: 1561533
ggcugaaugaagugugaca

SEQ ID NO: 1679074 - RNA, 19 nt, Artificial Sequence
  Description of Artificial Sequence: Synthetic oligonucleotide
  Antisense strand to SEQ ID NO: 1679073
ugucacacuucauucagcc

SEQ ID NO: 1679075 - RNA, 19 nt, Artificial Sequence
  Description of Artificial Sequence: Synthetic oligonucleotide
  Sense strand starting at position 2169 of SEQ ID NO: 1561533
gaggguguuugccuuuaau

SEQ ID NO: 1679076 - RNA, 19 nt, Artificial Sequence
  Description of Artificial Sequence: Synthetic oligonucleotide
  Antisense strand to SEQ ID NO: 1679075
auuaaaggcaaacacccuc

SEQ ID NO: 1679077 - RNA, 19 nt, Artificial Sequence
  Description of Artificial Sequence: Synthetic oligonucleotide
  Sense strand starting at position 2172 of SEQ ID NO: 1561533
gguguuugccuuuaaucuu

SEQ ID NO: 1679078 - RNA, 19 nt, Artificial Sequence
  Description of Artificial Sequence: Synthetic oligonucleotide
  Antisense strand to SEQ ID NO: 1679077
aagauuaaaggcaaacacc

SEQ ID NO: 1679079 - RNA, 19 nt, Artificial Sequence
  Description of Artificial Sequence: Synthetic oligonucleotide
  Sense strand starting at position 2181 of SEQ ID NO: 1561533
cuuuaaucuuguguauaag

SEQ ID NO: 1679080 - RNA, 19 nt, Artificial Sequence
  Description of Artificial Sequence: Synthetic oligonucleotide
  Antisense strand to SEQ ID NO: 1679079
cuuauacacaagauuaaag

SEQ ID NO: 1679081 - RNA, 19 nt, Artificial Sequence
  Description of Artificial Sequence: Synthetic oligonucleotide
  Sense strand starting at position 2653 of SEQ ID NO: 1561533
ggaggcaauucucugaaau

SEQ ID NO: 1679082 - RNA, 19 nt, Artificial Sequence
  Description of Artificial Sequence: Synthetic oligonucleotide
  Antisense strand to SEQ ID NO: 1679081
auuucagagaauugccucc

SEQ ID NO: 1679083 - RNA, 19 nt, Artificial Sequence
  Description of Artificial Sequence: Synthetic oligonucleotide
  Sense strand starting at position 2655 of SEQ ID NO: 1561533
aggcaauucucugaaauaa

SEQ ID NO: 1679084 - RNA, 19 nt, Artificial Sequence
  Description of Artificial Sequence: Synthetic oligonucleotide
  Antisense strand to SEQ ID NO: 1679083
uuauuucagagaauugccu

SEQ ID NO: 1679085 - RNA, 19 nt, Artificial Sequence
  Description of Artificial Sequence: Synthetic oligonucleotide
  Sense strand starting at position 2757 of SEQ ID NO: 1561533
uucagaguucgagaucagu

SEQ ID NO: 1679086 - RNA, 19 nt, Artificial Sequence
  Description of Artificial Sequence: Synthetic oligonucleotide
  Antisense strand to SEQ ID NO: 1679085
acugaucucgaacucugaa

SEQ ID NO: 1679087 - RNA, 19 nt, Artificial Sequence
  Description of Artificial Sequence: Synthetic oligonucleotide
  Sense strand starting at position 3002 of SEQ ID NO: 1561533
aaaugugagccacauguaa

SEQ ID NO: 1679088 - RNA, 19 nt, Artificial Sequence
  Description of Artificial Sequence: Synthetic oligonucleotide
  Antisense strand to SEQ ID NO: 1679087
uuacauguggcucacauuu

SEQ ID NO: 1679089 - RNA, 19 nt, Artificial Sequence
  Description of Artificial Sequence: Synthetic oligonucleotide
  Sense strand starting at position 3210 of SEQ ID NO: 1561533
ccggcuaauuuguagccaa

SEQ ID NO: 1679090 - RNA, 19 nt, Artificial Sequence
  Description of Artificial Sequence: Synthetic oligonucleotide
  Antisense strand to SEQ ID NO: 1679089
uuggcuacaaauuagccgg

SEQ ID NO: 1679091 - RNA, 19 nt, Artificial Sequence
  Description of Artificial Sequence: Synthetic oligonucleotide
  Sense strand starting at position 3213 of SEQ ID NO: 1561533
gcuaauuuguagccaaacu

SEQ ID NO: 1679092 - RNA, 19 nt, Artificial Sequence
  Description of Artificial Sequence: Synthetic oligonucleotide
  Antisense strand to SEQ ID NO: 1679091
aguuuggcuacaaauuagc

SEQ ID NO: 1679093 - RNA, 19 nt, Artificial Sequence
  Description of Artificial Sequence: Synthetic oligonucleotide
  Sense strand starting at position 3274 of SEQ ID NO: 1561533
aggugaaauugauuguaac

SEQ ID NO: 1679094 - RNA, 19 nt, Artificial Sequence
  Description of Artificial Sequence: Synthetic oligonucleotide
  Antisense strand to SEQ ID NO: 1679093
guuacaaucaauuucaccu

SEQ ID NO: 1679095 - RNA, 19 nt, Artificial Sequence
  Description of Artificial Sequence: Synthetic oligonucleotide
  Sense strand starting at position 3275 of SEQ ID NO: 1561533
ggugaaauugauuguaaca

SEQ ID NO: 1679096 - RNA, 19 nt, Artificial Sequence
  Description of Artificial Sequence: Synthetic oligonucleotide
  Antisense strand to SEQ ID NO: 1679095
uguuacaaucaauuucacc

SEQ ID NO: 1679097 - RNA, 19 nt, Artificial Sequence
  Description of Artificial Sequence: Synthetic oligonucleotide
  Sense strand starting at position 3350 of SEQ ID NO: 1561533
auuaaugaagugugucuau

SEQ ID NO: 1679098 - RNA, 19 nt, Artificial Sequence
  Description of Artificial Sequence: Synthetic oligonucleotide
  Antisense strand to SEQ ID NO: 1679097
auagacacacuucauuaau

SEQ ID NO: 1679099 - RNA, 19 nt, Artificial Sequence
  Description of Artificial Sequence: Synthetic oligonucleotide
  Sense strand starting at position 3353 of SEQ ID NO: 1561533
aaugaagugugucuauaua

SEQ ID NO: 1679100 - RNA, 19 nt, Artificial Sequence
  Description of Artificial Sequence: Synthetic oligonucleotide
  Antisense strand to SEQ ID NO: 1679099
uauauagacacacuucauu

SEQ ID NO: 1679101 - RNA, 19 nt, Artificial Sequence
  Description of Artificial Sequence: Synthetic oligonucleotide
  Sense strand starting at position 3385 of SEQ ID NO: 1561533
cuuugaaacuaacucguau

SEQ ID NO: 1679102 - RNA, 19 nt, Artificial Sequence
  Description of Artificial Sequence: Synthetic oligonucleotide
  Antisense strand to SEQ ID NO: 1679101
auacgaguuaguuucaaag

SEQ ID NO: 1679103 - RNA, 19 nt, Artificial Sequence
  Description of Artificial Sequence: Synthetic oligonucleotide
  Sense strand starting at position 3509 of SEQ ID NO: 1561533
gggugaacgaccugaacau

SEQ ID NO: 1679104 - RNA, 19 nt, Artificial Sequence
  Description of Artificial Sequence: Synthetic oligonucleotide
  Antisense strand to SEQ ID NO: 1679103
auguucaggucguucaccc

SEQ ID NO: 1679105 - RNA, 19 nt, Artificial Sequence
  Description of Artificial Sequence: Synthetic oligonucleotide
  Sense strand starting at position 3578 of SEQ ID NO: 1561533
uucgguucugaggguagaa

SEQ ID NO: 1679106 - RNA, 19 nt, Artificial Sequence
  Description of Artificial Sequence: Synthetic oligonucleotide
  Antisense strand to SEQ ID NO: 1679105
uucuacccucagaaccgaa

SEQ ID NO: 1679107 - RNA, 19 nt, Artificial Sequence
  Description of Artificial Sequence: Synthetic oligonucleotide
  Sense strand starting at position 3593 of SEQ ID NO: 1561533
agaacagacaguggucaua

SEQ ID NO: 1679108 - RNA, 19 nt, Artificial Sequence
  Description of Artificial Sequence: Synthetic oligonucleotide
  Antisense strand to SEQ ID NO: 1679107
uaugaccacugucuguucu

SEQ ID NO: 1679109 - RNA, 19 nt, Artificial Sequence
  Description of Artificial Sequence: Synthetic oligonucleotide
  Sense strand starting at position 3595 of SEQ ID NO: 1561533
aacagacaguggucauaga

SEQ ID NO: 1679110 - RNA, 19 nt, Artificial Sequence
  Description of Artificial Sequence: Synthetic oligonucleotide
  Antisense strand to SEQ ID NO: 1679109
ucuaugaccacugucuguu

SEQ ID NO: 1679111 - RNA, 19 nt, Artificial Sequence
  Description of Artificial Sequence: Synthetic oligonucleotide
  Sense strand starting at position 19 of SEQ ID NO: 1561534
ucgauuacaucccuuggga

SEQ ID NO: 1679112 - RNA, 19 nt, Artificial Sequence
  Description of Artificial Sequence: Synthetic oligonucleotide
  Antisense strand to SEQ ID NO: 1679111
ucccaagggauguaaucga

SEQ ID NO: 1679113 - RNA, 19 nt, Artificial Sequence
  Description of Artificial Sequence: Synthetic oligonucleotide
  Sense strand starting at position 50 of SEQ ID NO: 1561534
ggucuuagagcuuggaguc

SEQ ID NO: 1679114 - RNA, 19 nt, Artificial Sequence
  Description of Artificial Sequence: Synthetic oligonucleotide
  Antisense strand to SEQ ID NO: 1679113
gacuccaagcucuaagacc

SEQ ID NO: 1679115 - RNA, 19 nt, Artificial Sequence
  Description of Artificial Sequence: Synthetic oligonucleotide
  Sense strand starting at position 51 of SEQ ID NO: 1561534
gucuuagagcuuggaguca

SEQ ID NO: 1679116 - RNA, 19 nt, Artificial Sequence
  Description of Artificial Sequence: Synthetic oligonucleotide
  Antisense strand to SEQ ID NO: 1679115
ugacuccaagcucuaagac

SEQ ID NO: 1679117 - RNA, 19 nt, Artificial Sequence
  Description of Artificial Sequence: Synthetic oligonucleotide
  Sense strand starting at position 129 of SEQ ID NO: 1561534
ugagacaaacccuguguuu

SEQ ID NO: 1679118 - RNA, 19 nt, Artificial Sequence
  Description of Artificial Sequence: Synthetic oligonucleotide
  Antisense strand to SEQ ID NO: 1679117
aaacacaggguuugucuca

SEQ ID NO: 1679119 - RNA, 19 nt, Artificial Sequence
  Description of Artificial Sequence: Synthetic oligonucleotide
  Sense strand starting at position 131 of SEQ ID NO: 1561534
agacaaacccuguguuuga

SEQ ID NO: 1679120 - RNA, 19 nt, Artificial Sequence
  Description of Artificial Sequence: Synthetic oligonucleotide
  Antisense strand to SEQ ID NO: 1679119
ucaaacacaggguuugucu

SEQ ID NO: 1679121 - RNA, 19 nt, Artificial Sequence
  Description of Artificial Sequence: Synthetic oligonucleotide
  Sense strand starting at position 247 of SEQ ID NO: 1561534
ugcuauacauucucagaag

SEQ ID NO: 1679122 - RNA, 19 nt, Artificial Sequence
  Description of Artificial Sequence: Synthetic oligonucleotide
  Antisense strand to SEQ ID NO: 1679121
cuucugagaauguauagca

SEQ ID NO: 1679123 - RNA, 19 nt, Artificial Sequence
  Description of Artificial Sequence: Synthetic oligonucleotide
  Sense strand starting at position 300 of SEQ ID NO: 1561534
auaucauacugggauauuu

SEQ ID NO: 1679124 - RNA, 19 nt, Artificial Sequence
  Description of Artificial Sequence: Synthetic oligonucleotide
  Antisense strand to SEQ ID NO: 1679123
aaauaucccaguaugauau

SEQ ID NO: 1679125 - RNA, 19 nt, Artificial Sequence
  Description of Artificial Sequence: Synthetic oligonucleotide
  Sense strand starting at position 625 of SEQ ID NO: 1561534
cgcuccuagcuugauauuu

SEQ ID NO: 1679126 - RNA, 19 nt, Artificial Sequence
  Description of Artificial Sequence: Synthetic oligonucleotide
  Antisense strand to SEQ ID NO: 1679125
aaauaucaagcuaggagcg

SEQ ID NO: 1679127 - RNA, 19 nt, Artificial Sequence
  Description of Artificial Sequence: Synthetic oligonucleotide
  Sense strand starting at position 667 of SEQ ID NO: 1561534
uuucuugccucuuuggaaa

SEQ ID NO: 1679128 - RNA, 19 nt, Artificial Sequence
  Description of Artificial Sequence: Synthetic oligonucleotide
  Antisense strand to SEQ ID NO: 1679127
uuuccaaagaggcaagaaa

SEQ ID NO: 1679129 - RNA, 19 nt, Artificial Sequence
  Description of Artificial Sequence: Synthetic oligonucleotide
  Sense strand starting at position 846 of SEQ ID NO: 1561534
aguagccgugauuacagau

SEQ ID NO: 1679130 - RNA, 19 nt, Artificial Sequence
  Description of Artificial Sequence: Synthetic oligonucleotide
  Antisense strand to SEQ ID NO: 1679129
aucuguaaucacggcuacu

SEQ ID NO: 1679131 - RNA, 19 nt, Artificial Sequence
  Description of Artificial Sequence: Synthetic oligonucleotide
  Sense strand starting at position 936 of SEQ ID NO: 1561534
uaggucuccuaauuacgua

SEQ ID NO: 1679132 - RNA, 19 nt, Artificial Sequence
  Description of Artificial Sequence: Synthetic oligonucleotide
  Antisense strand to SEQ ID NO: 1679131
uacguaauuaggagaccua

SEQ ID NO: 1679133 - RNA, 19 nt, Artificial Sequence
  Description of Artificial Sequence: Synthetic oligonucleotide
  Sense strand starting at position 975 of SEQ ID NO: 1561534
ucaauuaagugaguaaauc

SEQ ID NO: 1679134 - RNA, 19 nt, Artificial Sequence
  Description of Artificial Sequence: Synthetic oligonucleotide
  Antisense strand to SEQ ID NO: 1679133
gauuuacucacuuaauuga

SEQ ID NO: 1679135 - RNA, 19 nt, Artificial Sequence
  Description of Artificial Sequence: Synthetic oligonucleotide
  Sense strand starting at position 1113 of SEQ ID NO: 1561534
gagagauacuggcaagaga

SEQ ID NO: 1679136 - RNA, 19 nt, Artificial Sequence
  Description of Artificial Sequence: Synthetic oligonucleotide
  Antisense strand to SEQ ID NO: 1679135
ucucuugccaguaucucuc

SEQ ID NO: 1679137 - RNA, 19 nt, Artificial Sequence
  Description of Artificial Sequence: Synthetic oligonucleotide
  Sense strand starting at position 1197 of SEQ ID NO: 1561534
cccaaagcauacguuaaau

SEQ ID NO: 1679138 - RNA, 19 nt, Artificial Sequence
  Description of Artificial Sequence: Synthetic oligonucleotide
  Antisense strand to SEQ ID NO: 1679137
auuuaacguaugcuuuggg

SEQ ID NO: 1679139 - RNA, 19 nt, Artificial Sequence
  Description of Artificial Sequence: Synthetic oligonucleotide
  Sense strand starting at position 1266 of SEQ ID NO: 1561534
cugcgucugguugaaauaa

SEQ ID NO: 1679140 - RNA, 19 nt, Artificial Sequence
  Description of Artificial Sequence: Synthetic oligonucleotide
  Antisense strand to SEQ ID NO: 1679139
uuauuucaaccagacgcag

SEQ ID NO: 1679141 - RNA, 19 nt, Artificial Sequence
  Description of Artificial Sequence: Synthetic oligonucleotide
  Sense strand starting at position 1288 of SEQ ID NO: 1561534
cguugugaacuggagagaa

SEQ ID NO: 1679142 - RNA, 19 nt, Artificial Sequence
  Description of Artificial Sequence: Synthetic oligonucleotide
  Antisense strand to SEQ ID NO: 1679141
uucucuccaguucacaacg

SEQ ID NO: 1679143 - RNA, 19 nt, Artificial Sequence
  Description of Artificial Sequence: Synthetic oligonucleotide
  Sense strand starting at position 1303 of SEQ ID NO: 1561534
agaagacauuggcauuuga

SEQ ID NO: 1679144 - RNA, 19 nt, Artificial Sequence
  Description of Artificial Sequence: Synthetic oligonucleotide
  Antisense strand to SEQ ID NO: 1679143
ucaaaugccaaugucuucu

SEQ ID NO: 1679145 - RNA, 19 nt, Artificial Sequence
  Description of Artificial Sequence: Synthetic oligonucleotide
  Sense strand starting at position 1340 of SEQ ID NO: 1561534
gggauuuaaucccagcucu

SEQ ID NO: 1679146 - RNA, 19 nt, Artificial Sequence
  Description of Artificial Sequence: Synthetic oligonucleotide
  Antisense strand to SEQ ID NO: 1679145
agagcugggauuaaauccc

SEQ ID NO: 1679147 - RNA, 19 nt, Artificial Sequence
  Description of Artificial Sequence: Synthetic oligonucleotide
  Sense strand starting at position 1389 of SEQ ID NO: 1561534
ggguuugagaucuggcuuc

SEQ ID NO: 1679148 - RNA, 19 nt, Artificial Sequence
  Description of Artificial Sequence: Synthetic oligonucleotide
  Antisense strand to SEQ ID NO: 1679147
gaagccagaucucaaaccc

SEQ ID NO: 1679149 - RNA, 19 nt, Artificial Sequence
  Description of Artificial Sequence: Synthetic oligonucleotide
  Sense strand starting at position 1396 of SEQ ID NO: 1561534
agaucuggcuucccauaca

SEQ ID NO: 1679150 - RNA, 19 nt, Artificial Sequence
  Description of Artificial Sequence: Synthetic oligonucleotide
  Antisense strand to SEQ ID NO: 1679149
uguaugggaagccagaucu

SEQ ID NO: 1679151 - RNA, 19 nt, Artificial Sequence
  Description of Artificial Sequence: Synthetic oligonucleotide
  Sense strand starting at position 1433 of SEQ ID NO: 1561534
cgaguccucccuugggaag

SEQ ID NO: 1679152 - RNA, 19 nt, Artificial Sequence
  Description of Artificial Sequence: Synthetic oligonucleotide
  Antisense strand to SEQ ID NO: 1679151
cuucccaagggaggacucg

SEQ ID NO: 1679153 - RNA, 19 nt, Artificial Sequence
  Description of Artificial Sequence: Synthetic oligonucleotide
  Sense strand starting at position 1434 of SEQ ID NO: 1561534
gaguccucccuugggaaga

SEQ ID NO: 1679154 - RNA, 19 nt, Artificial Sequence
  Description of Artificial Sequence: Synthetic oligonucleotide
  Antisense strand to SEQ ID NO: 1679153
ucuucccaagggaggacuc

SEQ ID NO: 1679155 - RNA, 19 nt, Artificial Sequence
  Description of Artificial Sequence: Synthetic oligonucleotide
  Sense strand starting at position 2149 of SEQ ID NO: 1561534
acggauauuugcgucuaag

SEQ ID NO: 1679156 - RNA, 19 nt, Artificial Sequence
  Description of Artificial Sequence: Synthetic oligonucleotide
  Antisense strand to SEQ ID NO: 1679155
cuuagacgcaaauauccgu

SEQ ID NO: 1679157 - RNA, 19 nt, Artificial Sequence
  Description of Artificial Sequence: Synthetic oligonucleotide
  Sense strand starting at position 2262 of SEQ ID NO: 1561534
caggcucaguuuccagaaa

SEQ ID NO: 1679158 - RNA, 19 nt, Artificial Sequence
  Description of Artificial Sequence: Synthetic oligonucleotide
  Antisense strand to SEQ ID NO: 1679157
uuucuggaaacugagccug

SEQ ID NO: 1679159 - RNA, 19 nt, Artificial Sequence
  Description of Artificial Sequence: Synthetic oligonucleotide
  Sense strand starting at position 2284 of SEQ ID NO: 1561534
gcucuuuguccacagcgaa

SEQ ID NO: 1679160 - RNA, 19 nt, Artificial Sequence
  Description of Artificial Sequence: Synthetic oligonucleotide
  Antisense strand to SEQ ID NO: 1679159
uucgcuguggacaaagagc

SEQ ID NO: 1679161 - RNA, 19 nt, Artificial Sequence
  Description of Artificial Sequence: Synthetic oligonucleotide
  Sense strand starting at position 2474 of SEQ ID NO: 1561534
ugacaacugacaggguuua

SEQ ID NO: 1679162 - RNA, 19 nt, Artificial Sequence
  Description of Artificial Sequence: Synthetic oligonucleotide
  Antisense strand to SEQ ID NO: 1679161
uaaacccugucaguuguca

SEQ ID NO: 1679163 - RNA, 19 nt, Artificial Sequence
  Description of Artificial Sequence: Synthetic oligonucleotide
  Sense strand starting at position 2487 of SEQ ID NO: 1561534
gguuuaggccgucacccau

SEQ ID NO: 1679164 - RNA, 19 nt, Artificial Sequence
  Description of Artificial Sequence: Synthetic oligonucleotide
  Antisense strand to SEQ ID NO: 1679163
augggugacggccuaaacc

SEQ ID NO: 1679165 - RNA, 19 nt, Artificial Sequence
  Description of Artificial Sequence: Synthetic oligonucleotide
  Sense strand starting at position 2524 of SEQ ID NO: 1561534
cuuugcucuagugggaagu

SEQ ID NO: 1679166 - RNA, 19 nt, Artificial Sequence
  Description of Artificial Sequence: Synthetic oligonucleotide
  Antisense strand to SEQ ID NO: 1679165
acuucccacuagagcaaag

SEQ ID NO: 1679167 - RNA, 19 nt, Artificial Sequence
  Description of Artificial Sequence: Synthetic oligonucleotide
  Sense strand starting at position 2714 of SEQ ID NO: 1561534
gugcccagugaggaauuau

SEQ ID NO: 1679168 - RNA, 19 nt, Artificial Sequence
  Description of Artificial Sequence: Synthetic oligonucleotide
  Antisense strand to SEQ ID NO: 1679167
auaauuccucacugggcac

SEQ ID NO: 1679169 - RNA, 19 nt, Artificial Sequence
  Description of Artificial Sequence: Synthetic oligonucleotide
  Sense strand starting at position 2784 of SEQ ID NO: 1561534
ggauauuuauuucggacca

SEQ ID NO: 1679170 - RNA, 19 nt, Artificial Sequence
  Description of Artificial Sequence: Synthetic oligonucleotide
  Antisense strand to SEQ ID NO: 1679169
ugguccgaaauaaauaucc

SEQ ID NO: 1679171 - RNA, 19 nt, Artificial Sequence
  Description of Artificial Sequence: Synthetic oligonucleotide
  Sense strand starting at position 2785 of SEQ ID NO: 1561534
gauauuuauuucggaccag

SEQ ID NO: 1679172 - RNA, 19 nt, Artificial Sequence
  Description of Artificial Sequence: Synthetic oligonucleotide
  Antisense strand to SEQ ID NO: 1679171
cugguccgaaauaaauauc

SEQ ID NO: 1679173 - RNA, 19 nt, Artificial Sequence
  Description of Artificial Sequence: Synthetic oligonucleotide
  Sense strand starting at position 2786 of SEQ ID NO: 1561534
auauuuauuucggaccagu

SEQ ID NO: 1679174 - RNA, 19 nt, Artificial Sequence
  Description of Artificial Sequence: Synthetic oligonucleotide
  Antisense strand to SEQ ID NO: 1679173
acugguccgaaauaaauau

SEQ ID NO: 1679175 - RNA, 19 nt, Artificial Sequence
  Description of Artificial Sequence: Synthetic oligonucleotide
  Sense strand starting at position 2807 of SEQ ID NO: 1561534
uugacuaugucccuagaga

SEQ ID NO: 1679176 - RNA, 19 nt, Artificial Sequence
  Description of Artificial Sequence: Synthetic oligonucleotide
  Antisense strand to SEQ ID NO: 1679175
ucucuagggacauagucaa

SEQ ID NO: 1679177 - RNA, 19 nt, Artificial Sequence
  Description of Artificial Sequence: Synthetic oligonucleotide
  Sense strand starting at position 3183 of SEQ ID NO: 1561534
aaauguaaauggcuaugau

SEQ ID NO: 1679178 - RNA, 19 nt, Artificial Sequence
  Description of Artificial Sequence: Synthetic oligonucleotide
  Antisense strand to SEQ ID NO: 1679177
aucauagccauuuacauuu

SEQ ID NO: 1679179 - RNA, 19 nt, Artificial Sequence
  Description of Artificial Sequence: Synthetic oligonucleotide
  Sense strand starting at position 3186 of SEQ ID NO: 1561534
uguaaauggcuaugauauc

SEQ ID NO: 1679180 - RNA, 19 nt, Artificial Sequence
  Description of Artificial Sequence: Synthetic oligonucleotide
  Antisense strand to SEQ ID NO: 1679179
gauaucauagccauuuaca

SEQ ID NO: 1679181 - RNA, 19 nt, Artificial Sequence
  Description of Artificial Sequence: Synthetic oligonucleotide
  Sense strand starting at position 3195 of SEQ ID NO: 1561534
cuaugauaucgauaaggca

SEQ ID NO: 1679182 - RNA, 19 nt, Artificial Sequence
  Description of Artificial Sequence: Synthetic oligonucleotide
  Antisense strand to SEQ ID NO: 1679181
ugccuuaucgauaucauag

SEQ ID NO: 1679183 - RNA, 19 nt, Artificial Sequence
  Description of Artificial Sequence: Synthetic oligonucleotide
  Sense strand starting at position 3269 of SEQ ID NO: 1561534
uggcauguacuaggaaacu

SEQ ID NO: 1679184 - RNA, 19 nt, Artificial Sequence
  Description of Artificial Sequence: Synthetic oligonucleotide
  Antisense strand to SEQ ID NO: 1679183
aguuuccuaguacaugcca

SEQ ID NO: 1679185 - RNA, 19 nt, Artificial Sequence
  Description of Artificial Sequence: Synthetic oligonucleotide
  Sense strand starting at position 3351 of SEQ ID NO: 1561534
guuccagcacuuuaggaaa

SEQ ID NO: 1679186 - RNA, 19 nt, Artificial Sequence
  Description of Artificial Sequence: Synthetic oligonucleotide
  Antisense strand to SEQ ID NO: 1679185
uuuccuaaagugcuggaac

SEQ ID NO: 1679187 - RNA, 19 nt, Artificial Sequence
  Description of Artificial Sequence: Synthetic oligonucleotide
  Sense strand starting at position 3522 of SEQ ID NO: 1561534
gcccgaggauuguuugaac

SEQ ID NO: 1679188 - RNA, 19 nt, Artificial Sequence
  Description of Artificial Sequence: Synthetic oligonucleotide
  Antisense strand to SEQ ID NO: 1679187
guucaaacaauccucgggc

SEQ ID NO: 1679189 - RNA, 19 nt, Artificial Sequence
  Description of Artificial Sequence: Synthetic oligonucleotide
  Sense strand starting at position 3871 of SEQ ID NO: 1561534
cuauguguucuuugugaga

SEQ ID NO: 1679190 - RNA, 19 nt, Artificial Sequence
  Description of Artificial Sequence: Synthetic oligonucleotide
  Antisense strand to SEQ ID NO: 1679189
ucucacaaagaacacauag

SEQ ID NO: 1679191 - RNA, 19 nt, Artificial Sequence
  Description of Artificial Sequence: Synthetic oligonucleotide
  Sense strand starting at position 128 of SEQ ID NO: 1561535
auaggaaggucuuaauuuc

SEQ ID NO: 1679192 - RNA, 19 nt, Artificial Sequence
  Description of Artificial Sequence: Synthetic oligonucleotide
  Antisense strand to SEQ ID NO: 1679191
gaaauuaagaccuuccuau

SEQ ID NO: 1679193 - RNA, 19 nt, Artificial Sequence
  Description of Artificial Sequence: Synthetic oligonucleotide
  Sense strand starting at position 298 of SEQ ID NO: 1561535
cuggaagugacuugcccaa

SEQ ID NO: 1679194 - RNA, 19 nt, Artificial Sequence
  Description of Artificial Sequence: Synthetic oligonucleotide
  Antisense strand to SEQ ID NO: 1679193
uugggcaagucacuuccag

SEQ ID NO: 1679195 - RNA, 19 nt, Artificial Sequence
  Description of Artificial Sequence: Synthetic oligonucleotide
  Sense strand starting at position 305 of SEQ ID NO: 1561535
ugacuugcccaagaguaug

SEQ ID NO: 1679196 - RNA, 19 nt, Artificial Sequence
  Description of Artificial Sequence: Synthetic oligonucleotide
  Antisense strand to SEQ ID NO: 1679195
cauacucuugggcaaguca

SEQ ID NO: 1679197 - RNA, 19 nt, Artificial Sequence
  Description of Artificial Sequence: Synthetic oligonucleotide
  Sense strand starting at position 341 of SEQ ID NO: 1561535
ccaguuuggccuuagaucu

SEQ ID NO: 1679198 - RNA, 19 nt, Artificial Sequence
  Description of Artificial Sequence: Synthetic oligonucleotide
  Antisense strand to SEQ ID NO: 1679197
agaucuaaggccaaacugg

SEQ ID NO: 1679199 - RNA, 19 nt, Artificial Sequence
  Description of Artificial Sequence: Synthetic oligonucleotide
  Sense strand starting at position 349 of SEQ ID NO: 1561535
gccuuagaucuggauucuu

SEQ ID NO: 1679200 - RNA, 19 nt, Artificial Sequence
  Description of Artificial Sequence: Synthetic oligonucleotide
  Antisense strand to SEQ ID NO: 1679199
aagaauccagaucuaaggc

SEQ ID NO: 1679201 - RNA, 19 nt, Artificial Sequence
  Description of Artificial Sequence: Synthetic oligonucleotide
  Sense strand starting at position 550 of SEQ ID NO: 1561535
gggugagucacuuagucug

SEQ ID NO: 1679202 - RNA, 19 nt, Artificial Sequence
  Description of Artificial Sequence: Synthetic oligonucleotide
  Antisense strand to SEQ ID NO: 1679201
cagacuaagugacucaccc

SEQ ID NO: 1679203 - RNA, 19 nt, Artificial Sequence
  Description of Artificial Sequence: Synthetic oligonucleotide
  Sense strand starting at position 555 of SEQ ID NO: 1561535
agucacuuagucugagacu

SEQ ID NO: 1679204 - RNA, 19 nt, Artificial Sequence
  Description of Artificial Sequence: Synthetic oligonucleotide
  Antisense strand to SEQ ID NO: 1679203
agucucagacuaagugacu

SEQ ID NO: 1679205 - RNA, 19 nt, Artificial Sequence
  Description of Artificial Sequence: Synthetic oligonucleotide
  Sense strand starting at position 597 of SEQ ID NO: 1561535
ggaugaugauggucucuac

SEQ ID NO: 1679206 - RNA, 19 nt, Artificial Sequence
  Description of Artificial Sequence: Synthetic oligonucleotide
  Antisense strand to SEQ ID NO: 1679205
guagagaccaucaucaucc

SEQ ID NO: 1679207 - RNA, 19 nt, Artificial Sequence
  Description of Artificial Sequence: Synthetic oligonucleotide
  Sense strand starting at position 601 of SEQ ID NO: 1561535
gaugauggucucuaccuca

SEQ ID NO: 1679208 - RNA, 19 nt, Artificial Sequence
  Description of Artificial Sequence: Synthetic oligonucleotide
  Antisense strand to SEQ ID NO: 1679207
ugagguagagaccaucauc

SEQ ID NO: 1679209 - RNA, 19 nt, Artificial Sequence
  Description of Artificial Sequence: Synthetic oligonucleotide
  Sense strand starting at position 606 of SEQ ID NO: 1561535
uggucucuaccucagaguu

SEQ ID NO: 1679210 - RNA, 19 nt, Artificial Sequence
  Description of Artificial Sequence: Synthetic oligonucleotide
  Antisense strand to SEQ ID NO: 1679209
aacucugagguagagacca

SEQ ID NO: 1679211 - RNA, 19 nt, Artificial Sequence
  Description of Artificial Sequence: Synthetic oligonucleotide
  Sense strand starting at position 616 of SEQ ID NO: 1561535
cucagaguuacugggacau

SEQ ID NO: 1679212 - RNA, 19 nt, Artificial Sequence
  Description of Artificial Sequence: Synthetic oligonucleotide
  Antisense strand to SEQ ID NO: 1679211
augucccaguaacucugag

SEQ ID NO: 1679213 - RNA, 19 nt, Artificial Sequence
  Description of Artificial Sequence: Synthetic oligonucleotide
  Sense strand starting at position 833 of SEQ ID NO: 1561535
gccuucuaugggcaggaaa

SEQ ID NO: 1679214 - RNA, 19 nt, Artificial Sequence
  Description of Artificial Sequence: Synthetic oligonucleotide
  Antisense strand to SEQ ID NO: 1679213
uuuccugcccauagaaggc

SEQ ID NO: 1679215 - RNA, 19 nt, Artificial Sequence
  Description of Artificial Sequence: Synthetic oligonucleotide
  Sense strand starting at position 919 of SEQ ID NO: 1561535
cucccuuguccaggcauau

SEQ ID NO: 1679216 - RNA, 19 nt, Artificial Sequence
  Description of Artificial Sequence: Synthetic oligonucleotide
  Antisense strand to SEQ ID NO: 1679215
auaugccuggacaagggag

SEQ ID NO: 1679217 - RNA, 19 nt, Artificial Sequence
  Description of Artificial Sequence: Synthetic oligonucleotide
  Sense strand starting at position 931 of SEQ ID NO: 1561535
ggcauauagucuuuggaag

SEQ ID NO: 1679218 - RNA, 19 nt, Artificial Sequence
  Description of Artificial Sequence: Synthetic oligonucleotide
  Antisense strand to SEQ ID NO: 1679217
cuuccaaagacuauaugcc

SEQ ID NO: 1679219 - RNA, 19 nt, Artificial Sequence
  Description of Artificial Sequence: Synthetic oligonucleotide
  Sense strand starting at position 932 of SEQ ID NO: 1561535
gcauauagucuuuggaaga

SEQ ID NO: 1679220 - RNA, 19 nt, Artificial Sequence
  Description of Artificial Sequence: Synthetic oligonucleotide
  Antisense strand to SEQ ID NO: 1679219
ucuuccaaagacuauaugc

SEQ ID NO: 1679221 - RNA, 19 nt, Artificial Sequence
  Description of Artificial Sequence: Synthetic oligonucleotide
  Sense strand starting at position 1273 of SEQ ID NO: 1561535
gaccaagacucugaagaag

SEQ ID NO: 1679222 - RNA, 19 nt, Artificial Sequence
  Description of Artificial Sequence: Synthetic oligonucleotide
  Antisense strand to SEQ ID NO: 1679221
cuucuucagagucuugguc

SEQ ID NO: 1679223 - RNA, 19 nt, Artificial Sequence
  Description of Artificial Sequence: Synthetic oligonucleotide
  Sense strand starting at position 2836 of SEQ ID NO: 1561535
ucacaucugcugcagacau

SEQ ID NO: 1679224 - RNA, 19 nt, Artificial Sequence
  Description of Artificial Sequence: Synthetic oligonucleotide
  Antisense strand to SEQ ID NO: 1679223
augucugcagcagauguga

SEQ ID NO: 1679225 - RNA, 19 nt, Artificial Sequence
  Description of Artificial Sequence: Synthetic oligonucleotide
  Sense strand starting at position 2972 of SEQ ID NO: 1561535
ugagcauagguguagaaua

SEQ ID NO: 1679226 - RNA, 19 nt, Artificial Sequence
  Description of Artificial Sequence: Synthetic oligonucleotide
  Antisense strand to SEQ ID NO: 1679225
uauucuacaccuaugcuca

SEQ ID NO: 1679227 - RNA, 19 nt, Artificial Sequence
  Description of Artificial Sequence: Synthetic oligonucleotide
  Sense strand starting at position 2999 of SEQ ID NO: 1561535
aggagacuaucgguuugga

SEQ ID NO: 1679228 - RNA, 19 nt, Artificial Sequence
  Description of Artificial Sequence: Synthetic oligonucleotide
  Antisense strand to SEQ ID NO: 1679227
uccaaaccgauagucuccu

SEQ ID NO: 1679229 - RNA, 19 nt, Artificial Sequence
  Description of Artificial Sequence: Synthetic oligonucleotide
  Sense strand starting at position 3050 of SEQ ID NO: 1561535
ucgaaauggagcuacucau

SEQ ID NO: 1679230 - RNA, 19 nt, Artificial Sequence
  Description of Artificial Sequence: Synthetic oligonucleotide
  Antisense strand to SEQ ID NO: 1679229
augaguagcuccauuucga

SEQ ID NO: 1679231 - RNA, 19 nt, Artificial Sequence
  Description of Artificial Sequence: Synthetic oligonucleotide
  Sense strand starting at position 3160 of SEQ ID NO: 1561535
gccaguuuagcaggcauga

SEQ ID NO: 1679232 - RNA, 19 nt, Artificial Sequence
  Description of Artificial Sequence: Synthetic oligonucleotide
  Antisense strand to SEQ ID NO: 1679231
ucaugccugcuaaacuggc

SEQ ID NO: 1679233 - RNA, 19 nt, Artificial Sequence
  Description of Artificial Sequence: Synthetic oligonucleotide
  Sense strand starting at position 3194 of SEQ ID NO: 1561535
uugcuuuaaccaugauagg

SEQ ID NO: 1679234 - RNA, 19 nt, Artificial Sequence
  Description of Artificial Sequence: Synthetic oligonucleotide
  Antisense strand to SEQ ID NO: 1679233
ccuaucaugguuaaagcaa

SEQ ID NO: 1679235 - RNA, 19 nt, Artificial Sequence
  Description of Artificial Sequence: Synthetic oligonucleotide
  Sense strand starting at position 3197 of SEQ ID NO: 1561535
cuuuaaccaugauagggaa

SEQ ID NO: 1679236 - RNA, 19 nt, Artificial Sequence
  Description of Artificial Sequence: Synthetic oligonucleotide
  Antisense strand to SEQ ID NO: 1679235
uucccuaucaugguuaaag

SEQ ID NO: 1679237 - RNA, 19 nt, Artificial Sequence
  Description of Artificial Sequence: Synthetic oligonucleotide
  Sense strand starting at position 3269 of SEQ ID NO: 1561535
cccguuucuguguaugaag

SEQ ID NO: 1679238 - RNA, 19 nt, Artificial Sequence
  Description of Artificial Sequence: Synthetic oligonucleotide
  Antisense strand to SEQ ID NO: 1679237
cuucauacacagaaacggg

SEQ ID NO: 1679239 - RNA, 19 nt, Artificial Sequence
  Description of Artificial Sequence: Synthetic oligonucleotide
  Sense strand starting at position 3427 of SEQ ID NO: 1561535
cauuaauccuuguugugag

SEQ ID NO: 1679240 - RNA, 19 nt, Artificial Sequence
  Description of Artificial Sequence: Synthetic oligonucleotide
  Antisense strand to SEQ ID NO: 1679239
cucacaacaaggauuaaug

SEQ ID NO: 1679241 - RNA, 19 nt, Artificial Sequence
  Description of Artificial Sequence: Synthetic oligonucleotide
  Sense strand starting at position 3442 of SEQ ID NO: 1561535
ugaguuuccuuuguucuga

SEQ ID NO: 1679242 - RNA, 19 nt, Artificial Sequence
  Description of Artificial Sequence: Synthetic oligonucleotide
  Antisense strand to SEQ ID NO: 1679241
ucagaacaaaggaaacuca

SEQ ID NO: 1679243 - RNA, 19 nt, Artificial Sequence
  Description of Artificial Sequence: Synthetic oligonucleotide
  Sense strand starting at position 3507 of SEQ ID NO: 1561535
agcuacuuuccagauuagu

SEQ ID NO: 1679244 - RNA, 19 nt, Artificial Sequence
  Description of Artificial Sequence: Synthetic oligonucleotide
  Antisense strand to SEQ ID NO: 1679243
acuaaucuggaaaguagcu

SEQ ID NO: 1679245 - RNA, 19 nt, Artificial Sequence
  Description of Artificial Sequence: Synthetic oligonucleotide
  Sense strand starting at position 3513 of SEQ ID NO: 1561535
uuuccagauuaguugggua

SEQ ID NO: 1679246 - RNA, 19 nt, Artificial Sequence
  Description of Artificial Sequence: Synthetic oligonucleotide
  Antisense strand to SEQ ID NO: 1679245
uacccaacuaaucuggaaa

SEQ ID NO: 1679247 - RNA, 19 nt, Artificial Sequence
  Description of Artificial Sequence: Synthetic oligonucleotide
  Sense strand starting at position 3515 of SEQ ID NO: 1561535
uccagauuaguuggguaau

SEQ ID NO: 1679248 - RNA, 19 nt, Artificial Sequence
  Description of Artificial Sequence: Synthetic oligonucleotide
  Antisense strand to SEQ ID NO: 1679247
auuacccaacuaaucugga

SEQ ID NO: 1679249 - RNA, 19 nt, Artificial Sequence
  Description of Artificial Sequence: Synthetic oligonucleotide
  Sense strand starting at position 3517 of SEQ ID NO: 1561535
cagauuaguuggguaauac

SEQ ID NO: 1679250 - RNA, 19 nt, Artificial Sequence
  Description of Artificial Sequence: Synthetic oligonucleotide
  Antisense strand to SEQ ID NO: 1679249
guauuacccaacuaaucug

SEQ ID NO: 1679251 - RNA, 19 nt, Artificial Sequence
  Description of Artificial Sequence: Synthetic oligonucleotide
  Sense strand starting at position 3673 of SEQ ID NO: 1561535
gccuuagguggugauuaau

SEQ ID NO: 1679252 - RNA, 19 nt, Artificial Sequence
  Description of Artificial Sequence: Synthetic oligonucleotide
  Antisense strand to SEQ ID NO: 1679251
auuaaucaccaccuaaggc

SEQ ID NO: 1679253 - RNA, 19 nt, Artificial Sequence
  Description of Artificial Sequence: Synthetic oligonucleotide
  Sense strand starting at position 3676 of SEQ ID NO: 1561535
uuagguggugauuaaugau

SEQ ID NO: 1679254 - RNA, 19 nt, Artificial Sequence
  Description of Artificial Sequence: Synthetic oligonucleotide
  Antisense strand to SEQ ID NO: 1679253
aucauuaaucaccaccuaa

SEQ ID NO: 1679255 - RNA, 19 nt, Artificial Sequence
  Description of Artificial Sequence: Synthetic oligonucleotide
  Sense strand starting at position 3682 of SEQ ID NO: 1561535
ggugauuaaugauguauuu

SEQ ID NO: 1679256 - RNA, 19 nt, Artificial Sequence
  Description of Artificial Sequence: Synthetic oligonucleotide
  Antisense strand to SEQ ID NO: 1679255
aaauacaucauuaaucacc

SEQ ID NO: 1679257 - RNA, 19 nt, Artificial Sequence
  Description of Artificial Sequence: Synthetic oligonucleotide
  Sense strand starting at position 3716 of SEQ ID NO: 1561535
uucugagauaaauguggau

SEQ ID NO: 1679258 - RNA, 19 nt, Artificial Sequence
  Description of Artificial Sequence: Synthetic oligonucleotide
  Antisense strand to SEQ ID NO: 1679257
auccacauuuaucucagaa

SEQ ID NO: 1679259 - RNA, 19 nt, Artificial Sequence
  Description of Artificial Sequence: Synthetic oligonucleotide
  Sense strand starting at position 3719 of SEQ ID NO: 1561535
ugagauaaauguggauuua

SEQ ID NO: 1679260 - RNA, 19 nt, Artificial Sequence
  Description of Artificial Sequence: Synthetic oligonucleotide
  Antisense strand to SEQ ID NO: 1679259
uaaauccacauuuaucuca

SEQ ID NO: 1679261 - RNA, 19 nt, Artificial Sequence
  Description of Artificial Sequence: Synthetic oligonucleotide
  Sense strand starting at position 3775 of SEQ ID NO: 1561535
cagagagaccuaugucucu

SEQ ID NO: 1679262 - RNA, 19 nt, Artificial Sequence
  Description of Artificial Sequence: Synthetic oligonucleotide
  Antisense strand to SEQ ID NO: 1679261
agagacauaggucucucug

SEQ ID NO: 1679263 - RNA, 19 nt, Artificial Sequence
  Description of Artificial Sequence: Synthetic oligonucleotide
  Sense strand starting at position 3780 of SEQ ID NO: 1561535
agaccuaugucucuuaggu

SEQ ID NO: 1679264 - RNA, 19 nt, Artificial Sequence
  Description of Artificial Sequence: Synthetic oligonucleotide
  Antisense strand to SEQ ID NO: 1679263
accuaagagacauaggucu

SEQ ID NO: 1679265 - RNA, 19 nt, Artificial Sequence
  Description of Artificial Sequence: Synthetic oligonucleotide
  Sense strand starting at position 3884 of SEQ ID NO: 1561535
aggaucucuuccgauauuu

SEQ ID NO: 1679266 - RNA, 19 nt, Artificial Sequence
  Description of Artificial Sequence: Synthetic oligonucleotide
  Antisense strand to SEQ ID NO: 1679265
aaauaucggaagagauccu

SEQ ID NO: 1679267 - RNA, 19 nt, Artificial Sequence
  Description of Artificial Sequence: Synthetic oligonucleotide
  Sense strand starting at position 3950 of SEQ ID NO: 1561535
uccagacucgaucauuagu

SEQ ID NO: 1679268 - RNA, 19 nt, Artificial Sequence
  Description of Artificial Sequence: Synthetic oligonucleotide
  Antisense strand to SEQ ID NO: 1679267
acuaaugaucgagucugga

SEQ ID NO: 1679269 - RNA, 19 nt, Artificial Sequence
  Description of Artificial Sequence: Synthetic oligonucleotide
  Sense strand starting at position 3953 of SEQ ID NO: 1561535
agacucgaucauuagucua

SEQ ID NO: 1679270 - RNA, 19 nt, Artificial Sequence
  Description of Artificial Sequence: Synthetic oligonucleotide
  Antisense strand to SEQ ID NO: 1679269
uagacuaaugaucgagucu

SEQ ID NO: 1679271 - RNA, 19 nt, Artificial Sequence
  Description of Artificial Sequence: Synthetic oligonucleotide
  Sense strand starting at position 25 of SEQ ID NO: 1561536
ccaggaggcagauguuauu

SEQ ID NO: 1679272 - RNA, 19 nt, Artificial Sequence
  Description of Artificial Sequence: Synthetic oligonucleotide
  Antisense strand to SEQ ID NO: 1679271
aauaacaucugccuccugg

SEQ ID NO: 1679273 - RNA, 19 nt, Artificial Sequence
  Description of Artificial Sequence: Synthetic oligonucleotide
  Sense strand starting at position 218 of SEQ ID NO: 1561536
cugacauaaccauggugga

SEQ ID NO: 1679274 - RNA, 19 nt, Artificial Sequence
  Description of Artificial Sequence: Synthetic oligonucleotide
  Antisense strand to SEQ ID NO: 1679273
uccaccaugguuaugucag

SEQ ID NO: 1679275 - RNA, 19 nt, Artificial Sequence
  Description of Artificial Sequence: Synthetic oligonucleotide
  Sense strand starting at position 219 of SEQ ID NO: 1561536
ugacauaaccaugguggau

SEQ ID NO: 1679276 - RNA, 19 nt, Artificial Sequence
  Description of Artificial Sequence: Synthetic oligonucleotide
  Antisense strand to SEQ ID NO: 1679275
auccaccaugguuauguca

SEQ ID NO: 1679277 - RNA, 19 nt, Artificial Sequence
  Description of Artificial Sequence: Synthetic oligonucleotide
  Sense strand starting at position 231 of SEQ ID NO: 1561536
gguggauaucuugguugau

SEQ ID NO: 1679278 - RNA, 19 nt, Artificial Sequence
  Description of Artificial Sequence: Synthetic oligonucleotide
  Antisense strand to SEQ ID NO: 1679277
aucaaccaagauauccacc

SEQ ID NO: 1679279 - RNA, 19 nt, Artificial Sequence
  Description of Artificial Sequence: Synthetic oligonucleotide
  Sense strand starting at position 232 of SEQ ID NO: 1561536
guggauaucuugguugauc

SEQ ID NO: 1679280 - RNA, 19 nt, Artificial Sequence
  Description of Artificial Sequence: Synthetic oligonucleotide
  Antisense strand to SEQ ID NO: 1679279
gaucaaccaagauauccac

SEQ ID NO: 1679281 - RNA, 19 nt, Artificial Sequence
  Description of Artificial Sequence: Synthetic oligonucleotide
  Sense strand starting at position 354 of SEQ ID NO: 1561536
ugacaagaucuuuguaccu

SEQ ID NO: 1679282 - RNA, 19 nt, Artificial Sequence
  Description of Artificial Sequence: Synthetic oligonucleotide
  Antisense strand to SEQ ID NO: 1679281
agguacaaagaucuuguca

SEQ ID NO: 1679283 - RNA, 19 nt, Artificial Sequence
  Description of Artificial Sequence: Synthetic oligonucleotide
  Sense strand starting at position 356 of SEQ ID NO: 1561536
acaagaucuuuguaccuag

SEQ ID NO: 1679284 - RNA, 19 nt, Artificial Sequence
  Description of Artificial Sequence: Synthetic oligonucleotide
  Antisense strand to SEQ ID NO: 1679283
cuagguacaaagaucuugu

SEQ ID NO: 1679285 - RNA, 19 nt, Artificial Sequence
  Description of Artificial Sequence: Synthetic oligonucleotide
  Sense strand starting at position 359 of SEQ ID NO: 1561536
agaucuuuguaccuagaga

SEQ ID NO: 1679286 - RNA, 19 nt, Artificial Sequence
  Description of Artificial Sequence: Synthetic oligonucleotide
  Antisense strand to SEQ ID NO: 1679285
ucucuagguacaaagaucu

SEQ ID NO: 1679287 - RNA, 19 nt, Artificial Sequence
  Description of Artificial Sequence: Synthetic oligonucleotide
  Sense strand starting at position 558 of SEQ ID NO: 1561536
aggugauaacgugaauuag

SEQ ID NO: 1679288 - RNA, 19 nt, Artificial Sequence
  Description of Artificial Sequence: Synthetic oligonucleotide
  Antisense strand to SEQ ID NO: 1679287
cuaauucacguuaucaccu

SEQ ID NO: 1679289 - RNA, 19 nt, Artificial Sequence
  Description of Artificial Sequence: Synthetic oligonucleotide
  Sense strand starting at position 640 of SEQ ID NO: 1561536
cagagugaggcuggagaua

SEQ ID NO: 1679290 - RNA, 19 nt, Artificial Sequence
  Description of Artificial Sequence: Synthetic oligonucleotide
  Antisense strand to SEQ ID NO: 1679289
uaucuccagccucacucug

SEQ ID NO: 1679291 - RNA, 19 nt, Artificial Sequence
  Description of Artificial Sequence: Synthetic oligonucleotide
  Sense strand starting at position 745 of SEQ ID NO: 1561536
auaauuaagcggcgggaaa

SEQ ID NO: 1679292 - RNA, 19 nt, Artificial Sequence
  Description of Artificial Sequence: Synthetic oligonucleotide
  Antisense strand to SEQ ID NO: 1679291
uuucccgccgcuuaauuau

SEQ ID NO: 1679293 - RNA, 19 nt, Artificial Sequence
  Description of Artificial Sequence: Synthetic oligonucleotide
  Sense strand starting at position 746 of SEQ ID NO: 1561536
uaauuaagcggcgggaaau

SEQ ID NO: 1679294 - RNA, 19 nt, Artificial Sequence
  Description of Artificial Sequence: Synthetic oligonucleotide
  Antisense strand to SEQ ID NO: 1679293
auuucccgccgcuuaauua

SEQ ID NO: 1679295 - RNA, 19 nt, Artificial Sequence
  Description of Artificial Sequence: Synthetic oligonucleotide
  Sense strand starting at position 747 of SEQ ID NO: 1561536
aauuaagcggcgggaaauu

SEQ ID NO: 1679296 - RNA, 19 nt, Artificial Sequence
  Description of Artificial Sequence: Synthetic oligonucleotide
  Antisense strand to SEQ ID NO: 1679295
aauuucccgccgcuuaauu

SEQ ID NO: 1679297 - RNA, 19 nt, Artificial Sequence
  Description of Artificial Sequence: Synthetic oligonucleotide
  Sense strand starting at position 995 of SEQ ID NO: 1561536
gaagcauuggaucgcuuga

SEQ ID NO: 1679298 - RNA, 19 nt, Artificial Sequence
  Description of Artificial Sequence: Synthetic oligonucleotide
  Antisense strand to SEQ ID NO: 1679297
ucaagcgauccaaugcuuc

SEQ ID NO: 1679299 - RNA, 19 nt, Artificial Sequence
  Description of Artificial Sequence: Synthetic oligonucleotide
  Sense strand starting at position 1367 of SEQ ID NO: 1561536
ugaaucacgcuuugauuaa

SEQ ID NO: 1679300 - RNA, 19 nt, Artificial Sequence
  Description of Artificial Sequence: Synthetic oligonucleotide
  Antisense strand to SEQ ID NO: 1679299
uuaaucaaagcgugauuca

SEQ ID NO: 1679301 - RNA, 19 nt, Artificial Sequence
  Description of Artificial Sequence: Synthetic oligonucleotide
  Sense strand starting at position 1380 of SEQ ID NO: 1561536
gauuaaaugcuuuaguguu

SEQ ID NO: 1679302 - RNA, 19 nt, Artificial Sequence
  Description of Artificial Sequence: Synthetic oligonucleotide
  Antisense strand to SEQ ID NO: 1679301
aacacuaaagcauuuaauc

SEQ ID NO: 1679303 - RNA, 19 nt, Artificial Sequence
  Description of Artificial Sequence: Synthetic oligonucleotide
  Sense strand starting at position 1500 of SEQ ID NO: 1561536
uccaguggucccugcacaa

SEQ ID NO: 1679304 - RNA, 19 nt, Artificial Sequence
  Description of Artificial Sequence: Synthetic oligonucleotide
  Antisense strand to SEQ ID NO: 1679303
uugugcagggaccacugga

SEQ ID NO: 1679305 - RNA, 19 nt, Artificial Sequence
  Description of Artificial Sequence: Synthetic oligonucleotide
  Sense strand starting at position 2069 of SEQ ID NO: 1561536
gacagaagaugugaucagu

SEQ ID NO: 1679306 - RNA, 19 nt, Artificial Sequence
  Description of Artificial Sequence: Synthetic oligonucleotide
  Antisense strand to SEQ ID NO: 1679305
acugaucacaucuucuguc

SEQ ID NO: 1679307 - RNA, 19 nt, Artificial Sequence
  Description of Artificial Sequence: Synthetic oligonucleotide
  Sense strand starting at position 2185 of SEQ ID NO: 1561536
ugccuuuaaacuugugugu

SEQ ID NO: 1679308 - RNA, 19 nt, Artificial Sequence
  Description of Artificial Sequence: Synthetic oligonucleotide
  Antisense strand to SEQ ID NO: 1679307
acacacaaguuuaaaggca

SEQ ID NO: 1679309 - RNA, 19 nt, Artificial Sequence
  Description of Artificial Sequence: Synthetic oligonucleotide
  Sense strand starting at position 2188 of SEQ ID NO: 1561536
cuuuaaacuuguguguaaa

SEQ ID NO: 1679310 - RNA, 19 nt, Artificial Sequence
  Description of Artificial Sequence: Synthetic oligonucleotide
  Antisense strand to SEQ ID NO: 1679309
uuuacacacaaguuuaaag

SEQ ID NO: 1679311 - RNA, 19 nt, Artificial Sequence
  Description of Artificial Sequence: Synthetic oligonucleotide
  Sense strand starting at position 2189 of SEQ ID NO: 1561536
uuuaaacuuguguguaaag

SEQ ID NO: 1679312 - RNA, 19 nt, Artificial Sequence
  Description of Artificial Sequence: Synthetic oligonucleotide
  Antisense strand to SEQ ID NO: 1679311
cuuuacacacaaguuuaaa

SEQ ID NO: 1679313 - RNA, 19 nt, Artificial Sequence
  Description of Artificial Sequence: Synthetic oligonucleotide
  Sense strand starting at position 2190 of SEQ ID NO: 1561536
uuaaacuuguguguaaagu

SEQ ID NO: 1679314 - RNA, 19 nt, Artificial Sequence
  Description of Artificial Sequence: Synthetic oligonucleotide
  Antisense strand to SEQ ID NO: 1679313
acuuuacacacaaguuuaa

SEQ ID NO: 1679315 - RNA, 19 nt, Artificial Sequence
  Description of Artificial Sequence: Synthetic oligonucleotide
  Sense strand starting at position 2191 of SEQ ID NO: 1561536
uaaacuuguguguaaaguc

SEQ ID NO: 1679316 - RNA, 19 nt, Artificial Sequence
  Description of Artificial Sequence: Synthetic oligonucleotide
  Antisense strand to SEQ ID NO: 1679315
gacuuuacacacaaguuua

SEQ ID NO: 1679317 - RNA, 19 nt, Artificial Sequence
  Description of Artificial Sequence: Synthetic oligonucleotide
  Sense strand starting at position 2307 of SEQ ID NO: 1561536
gcuucuuucuggucuuuga

SEQ ID NO: 1679318 - RNA, 19 nt, Artificial Sequence
  Description of Artificial Sequence: Synthetic oligonucleotide
  Antisense strand to SEQ ID NO: 1679317
ucaaagaccagaaagaagc

SEQ ID NO: 1679319 - RNA, 19 nt, Artificial Sequence
  Description of Artificial Sequence: Synthetic oligonucleotide
  Sense strand starting at position 2370 of SEQ ID NO: 1561536
aaaugugagccauauguga

SEQ ID NO: 1679320 - RNA, 19 nt, Artificial Sequence
  Description of Artificial Sequence: Synthetic oligonucleotide
  Antisense strand to SEQ ID NO: 1679319
ucacauauggcucacauuu

SEQ ID NO: 1679321 - RNA, 19 nt, Artificial Sequence
  Description of Artificial Sequence: Synthetic oligonucleotide
  Sense strand starting at position 2372 of SEQ ID NO: 1561536
augugagccauaugugaau

SEQ ID NO: 1679322 - RNA, 19 nt, Artificial Sequence
  Description of Artificial Sequence: Synthetic oligonucleotide
  Antisense strand to SEQ ID NO: 1679321
auucacauauggcucacau

SEQ ID NO: 1679323 - RNA, 19 nt, Artificial Sequence
  Description of Artificial Sequence: Synthetic oligonucleotide
  Sense strand starting at position 2494 of SEQ ID NO: 1561536
gugugagaaauauguaauu

SEQ ID NO: 1679324 - RNA, 19 nt, Artificial Sequence
  Description of Artificial Sequence: Synthetic oligonucleotide
  Antisense strand to SEQ ID NO: 1679323
aauuacauauuucucacac

SEQ ID NO: 1679325 - RNA, 19 nt, Artificial Sequence
  Description of Artificial Sequence: Synthetic oligonucleotide
  Sense strand starting at position 2639 of SEQ ID NO: 1561536
ugaugucagcggugugaag

SEQ ID NO: 1679326 - RNA, 19 nt, Artificial Sequence
  Description of Artificial Sequence: Synthetic oligonucleotide
  Antisense strand to SEQ ID NO: 1679325
cuucacaccgcugacauca

SEQ ID NO: 1679327 - RNA, 19 nt, Artificial Sequence
  Description of Artificial Sequence: Synthetic oligonucleotide
  Sense strand starting at position 2736 of SEQ ID NO: 1561536
aacagauaguggccaaaga

SEQ ID NO: 1679328 - RNA, 19 nt, Artificial Sequence
  Description of Artificial Sequence: Synthetic oligonucleotide
  Antisense strand to SEQ ID NO: 1679327
ucuuuggccacuaucuguu

SEQ ID NO: 1679329 - RNA, 19 nt, Artificial Sequence
  Description of Artificial Sequence: Synthetic oligonucleotide
  Sense strand starting at position 3070 of SEQ ID NO: 1561536
ggaacaauguuagcaucca

SEQ ID NO: 1679330 - RNA, 19 nt, Artificial Sequence
  Description of Artificial Sequence: Synthetic oligonucleotide
  Antisense strand to SEQ ID NO: 1679329
uggaugcuaacauuguucc

SEQ ID NO: 1679331 - RNA, 19 nt, Artificial Sequence
  Description of Artificial Sequence: Synthetic oligonucleotide
  Sense strand starting at position 3280 of SEQ ID NO: 1561536
uuauuauuguauccaaggu

SEQ ID NO: 1679332 - RNA, 19 nt, Artificial Sequence
  Description of Artificial Sequence: Synthetic oligonucleotide
  Antisense strand to SEQ ID NO: 1679331
accuuggauacaauaauaa

SEQ ID NO: 1679333 - RNA, 19 nt, Artificial Sequence
  Description of Artificial Sequence: Synthetic oligonucleotide
  Sense strand starting at position 3295 of SEQ ID NO: 1561536
agguuaacugaggagugua

SEQ ID NO: 1679334 - RNA, 19 nt, Artificial Sequence
  Description of Artificial Sequence: Synthetic oligonucleotide
  Antisense strand to SEQ ID NO: 1679333
uacacuccucaguuaaccu

SEQ ID NO: 1679335 - RNA, 19 nt, Artificial Sequence
  Description of Artificial Sequence: Synthetic oligonucleotide
  Sense strand starting at position 3347 of SEQ ID NO: 1561536
guauuugcauagcaccaaa

SEQ ID NO: 1679336 - RNA, 19 nt, Artificial Sequence
  Description of Artificial Sequence: Synthetic oligonucleotide
  Antisense strand to SEQ ID NO: 1679335
uuuggugcuaugcaaauac

SEQ ID NO: 1679337 - RNA, 19 nt, Artificial Sequence
  Description of Artificial Sequence: Synthetic oligonucleotide
  Sense strand starting at position 3358 of SEQ ID NO: 1561536
gcaccaaaguaucugacua

SEQ ID NO: 1679338 - RNA, 19 nt, Artificial Sequence
  Description of Artificial Sequence: Synthetic oligonucleotide
  Antisense strand to SEQ ID NO: 1679337
uagucagauacuuuggugc

SEQ ID NO: 1679339 - RNA, 19 nt, Artificial Sequence
  Description of Artificial Sequence: Synthetic oligonucleotide
  Sense strand starting at position 3430 of SEQ ID NO: 1561536
gacucuuuguuacuggauu

SEQ ID NO: 1679340 - RNA, 19 nt, Artificial Sequence
  Description of Artificial Sequence: Synthetic oligonucleotide
  Antisense strand to SEQ ID NO: 1679339
aauccaguaacaaagaguc

SEQ ID NO: 1679341 - RNA, 19 nt, Artificial Sequence
  Description of Artificial Sequence: Synthetic oligonucleotide
  Sense strand starting at position 3431 of SEQ ID NO: 1561536
acucuuuguuacuggauuu

SEQ ID NO: 1679342 - RNA, 19 nt, Artificial Sequence
  Description of Artificial Sequence: Synthetic oligonucleotide
  Antisense strand to SEQ ID NO: 1679341
aaauccaguaacaaagagu

SEQ ID NO: 1679343 - RNA, 19 nt, Artificial Sequence
  Description of Artificial Sequence: Synthetic oligonucleotide
  Sense strand starting at position 3638 of SEQ ID NO: 1561536
aaacuuaccugggugugau

SEQ ID NO: 1679344 - RNA, 19 nt, Artificial Sequence
  Description of Artificial Sequence: Synthetic oligonucleotide
  Antisense strand to SEQ ID NO: 1679343
aucacacccagguaaguuu

SEQ ID NO: 1679345 - RNA, 19 nt, Artificial Sequence
  Description of Artificial Sequence: Synthetic oligonucleotide
  Sense strand starting at position 3946 of SEQ ID NO: 1561536
guuugauugagcugcacuc

SEQ ID NO: 1679346 - RNA, 19 nt, Artificial Sequence
  Description of Artificial Sequence: Synthetic oligonucleotide
  Antisense strand to SEQ ID NO: 1679345
gagugcagcucaaucaaac

SEQ ID NO: 1679347 - RNA, 19 nt, Artificial Sequence
  Description of Artificial Sequence: Synthetic oligonucleotide
  Sense strand starting at position 3956 of SEQ ID NO: 1561536
gcugcacucuggccaagau

SEQ ID NO: 1679348 - RNA, 19 nt, Artificial Sequence
  Description of Artificial Sequence: Synthetic oligonucleotide
  Antisense strand to SEQ ID NO: 1679347
aucuuggccagagugcagc

SEQ ID NO: 1679349 - RNA, 19 nt, Artificial Sequence
  Description of Artificial Sequence: Synthetic oligonucleotide
  Sense strand starting at position 3975 of SEQ ID NO: 1561536
gacagagcugucuacaaau

SEQ ID NO: 1679350 - RNA, 19 nt, Artificial Sequence
  Description of Artificial Sequence: Synthetic oligonucleotide
  Antisense strand to SEQ ID NO: 1679349
auuuguagacagcucuguc

SEQ ID NO: 1679351 - RNA, 19 nt, Artificial Sequence
  Description of Artificial Sequence: Synthetic oligonucleotide
  Sense strand starting at position 7 of SEQ ID NO: 1561537
ucaauuaguugauugucua

SEQ ID NO: 1679352 - RNA, 19 nt, Artificial Sequence
  Description of Artificial Sequence: Synthetic oligonucleotide
  Antisense strand to SEQ ID NO: 1679351
uagacaaucaacuaauuga

SEQ ID NO: 1679353 - RNA, 19 nt, Artificial Sequence
  Description of Artificial Sequence: Synthetic oligonucleotide
  Sense strand starting at position 28 of SEQ ID NO: 1561537
acugaagugugacugaaga

SEQ ID NO: 1679354 - RNA, 19 nt, Artificial Sequence
  Description of Artificial Sequence: Synthetic oligonucleotide
  Antisense strand to SEQ ID NO: 1679353
ucuucagucacacuucagu

SEQ ID NO: 1679355 - RNA, 19 nt, Artificial Sequence
  Description of Artificial Sequence: Synthetic oligonucleotide
  Sense strand starting at position 42 of SEQ ID NO: 1561537
gaagauacgucacccuaug

SEQ ID NO: 1679356 - RNA, 19 nt, Artificial Sequence
  Description of Artificial Sequence: Synthetic oligonucleotide
  Antisense strand to SEQ ID NO: 1679355
cauagggugacguaucuuc

SEQ ID NO: 1679357 - RNA, 19 nt, Artificial Sequence
  Description of Artificial Sequence: Synthetic oligonucleotide
  Sense strand starting at position 100 of SEQ ID NO: 1561537
cuaagauaucugugacuag

SEQ ID NO: 1679358 - RNA, 19 nt, Artificial Sequence
  Description of Artificial Sequence: Synthetic oligonucleotide
  Antisense strand to SEQ ID NO: 1679357
cuagucacagauaucuuag

SEQ ID NO: 1679359 - RNA, 19 nt, Artificial Sequence
  Description of Artificial Sequence: Synthetic oligonucleotide
  Sense strand starting at position 103 of SEQ ID NO: 1561537
agauaucugugacuaggua

SEQ ID NO: 1679360 - RNA, 19 nt, Artificial Sequence
  Description of Artificial Sequence: Synthetic oligonucleotide
  Antisense strand to SEQ ID NO: 1679359
uaccuagucacagauaucu

SEQ ID NO: 1679361 - RNA, 19 nt, Artificial Sequence
  Description of Artificial Sequence: Synthetic oligonucleotide
  Sense strand starting at position 435 of SEQ ID NO: 1561537
agaaaugagaaccguuuga

SEQ ID NO: 1679362 - RNA, 19 nt, Artificial Sequence
  Description of Artificial Sequence: Synthetic oligonucleotide
  Antisense strand to SEQ ID NO: 1679361
ucaaacgguucucauuucu

SEQ ID NO: 1679363 - RNA, 19 nt, Artificial Sequence
  Description of Artificial Sequence: Synthetic oligonucleotide
  Sense strand starting at position 635 of SEQ ID NO: 1561537
ggcauuuggcaacgucaga

SEQ ID NO: 1679364 - RNA, 19 nt, Artificial Sequence
  Description of Artificial Sequence: Synthetic oligonucleotide
  Antisense strand to SEQ ID NO: 1679363
ucugacguugccaaaugcc

SEQ ID NO: 1679365 - RNA, 19 nt, Artificial Sequence
  Description of Artificial Sequence: Synthetic oligonucleotide
  Sense strand starting at position 791 of SEQ ID NO: 1561537
cauuaaguggcaggaaauu

SEQ ID NO: 1679366 - RNA, 19 nt, Artificial Sequence
  Description of Artificial Sequence: Synthetic oligonucleotide
  Antisense strand to SEQ ID NO: 1679365
aauuuccugccacuuaaug

SEQ ID NO: 1679367 - RNA, 19 nt, Artificial Sequence
  Description of Artificial Sequence: Synthetic oligonucleotide
  Sense strand starting at position 856 of SEQ ID NO: 1561537
gucuaaacucaagagcauu

SEQ ID NO: 1679368 - RNA, 19 nt, Artificial Sequence
  Description of Artificial Sequence: Synthetic oligonucleotide
  Antisense strand to SEQ ID NO: 1679367
aaugcucuugaguuuagac

SEQ ID NO: 1679369 - RNA, 19 nt, Artificial Sequence
  Description of Artificial Sequence: Synthetic oligonucleotide
  Sense strand starting at position 884 of SEQ ID NO: 1561537
auuacuacauuggcagaaa

SEQ ID NO: 1679370 - RNA, 19 nt, Artificial Sequence
  Description of Artificial Sequence: Synthetic oligonucleotide
  Antisense strand to SEQ ID NO: 1679369
uuucugccaauguaguaau

SEQ ID NO: 1679371 - RNA, 19 nt, Artificial Sequence
  Description of Artificial Sequence: Synthetic oligonucleotide
  Sense strand starting at position 911 of SEQ ID NO: 1561537
aggcuuaacgcuuaaccaa

SEQ ID NO: 1679372 - RNA, 19 nt, Artificial Sequence
  Description of Artificial Sequence: Synthetic oligonucleotide
  Antisense strand to SEQ ID NO: 1679371
uugguuaagcguuaagccu

SEQ ID NO: 1679373 - RNA, 19 nt, Artificial Sequence
  Description of Artificial Sequence: Synthetic oligonucleotide
  Sense strand starting at position 1476 of SEQ ID NO: 1561537
ugcagugaggcccauaaau

SEQ ID NO: 1679374 - RNA, 19 nt, Artificial Sequence
  Description of Artificial Sequence: Synthetic oligonucleotide
  Antisense strand to SEQ ID NO: 1679373
auuuaugggccucacugca

SEQ ID NO: 1679375 - RNA, 19 nt, Artificial Sequence
  Description of Artificial Sequence: Synthetic oligonucleotide
  Sense strand starting at position 2105 of SEQ ID NO: 1561537
uuucuaaggcccugaguga

SEQ ID NO: 1679376 - RNA, 19 nt, Artificial Sequence
  Description of Artificial Sequence: Synthetic oligonucleotide
  Antisense strand to SEQ ID NO: 1679375
ucacucagggccuuagaaa

SEQ ID NO: 1679377 - RNA, 19 nt, Artificial Sequence
  Description of Artificial Sequence: Synthetic oligonucleotide
  Sense strand starting at position 2125 of SEQ ID NO: 1561537
agaagaugucaucagacgu

SEQ ID NO: 1679378 - RNA, 19 nt, Artificial Sequence
  Description of Artificial Sequence: Synthetic oligonucleotide
  Antisense strand to SEQ ID NO: 1679377
acgucugaugacaucuucu

SEQ ID NO: 1679379 - RNA, 19 nt, Artificial Sequence
  Description of Artificial Sequence: Synthetic oligonucleotide
  Sense strand starting at position 2138 of SEQ ID NO: 1561537
agacguugggcugaaugaa

SEQ ID NO: 1679380 - RNA, 19 nt, Artificial Sequence
  Description of Artificial Sequence: Synthetic oligonucleotide
  Antisense strand to SEQ ID NO: 1679379
uucauucagcccaacgucu

SEQ ID NO: 1679381 - RNA, 19 nt, Artificial Sequence
  Description of Artificial Sequence: Synthetic oligonucleotide
  Sense strand starting at position 2670 of SEQ ID NO: 1561537
ucugguucugcuuaguaaa

SEQ ID NO: 1679382 - RNA, 19 nt, Artificial Sequence
  Description of Artificial Sequence: Synthetic oligonucleotide
  Antisense strand to SEQ ID NO: 1679381
uuuacuaagcagaaccaga

SEQ ID NO: 1679383 - RNA, 19 nt, Artificial Sequence
  Description of Artificial Sequence: Synthetic oligonucleotide
  Sense strand starting at position 2672 of SEQ ID NO: 1561537
ugguucugcuuaguaaaca

SEQ ID NO: 1679384 - RNA, 19 nt, Artificial Sequence
  Description of Artificial Sequence: Synthetic oligonucleotide
  Antisense strand to SEQ ID NO: 1679383
uguuuacuaagcagaacca

SEQ ID NO: 1679385 - RNA, 19 nt, Artificial Sequence
  Description of Artificial Sequence: Synthetic oligonucleotide
  Sense strand starting at position 2734 of SEQ ID NO: 1561537
augccuaacuuacugagaa

SEQ ID NO: 1679386 - RNA, 19 nt, Artificial Sequence
  Description of Artificial Sequence: Synthetic oligonucleotide
  Antisense strand to SEQ ID NO: 1679385
uucucaguaaguuaggcau

SEQ ID NO: 1679387 - RNA, 19 nt, Artificial Sequence
  Description of Artificial Sequence: Synthetic oligonucleotide
  Sense strand starting at position 2836 of SEQ ID NO: 1561537
uucgccuuccuuuacaaga

SEQ ID NO: 1679388 - RNA, 19 nt, Artificial Sequence
  Description of Artificial Sequence: Synthetic oligonucleotide
  Antisense strand to SEQ ID NO: 1679387
ucuuguaaaggaaggcgaa

SEQ ID NO: 1679389 - RNA, 19 nt, Artificial Sequence
  Description of Artificial Sequence: Synthetic oligonucleotide
  Sense strand starting at position 2883 of SEQ ID NO: 1561537
gacaaagauucgucuucug

SEQ ID NO: 1679390 - RNA, 19 nt, Artificial Sequence
  Description of Artificial Sequence: Synthetic oligonucleotide
  Antisense strand to SEQ ID NO: 1679389
cagaagacgaaucuuuguc

SEQ ID NO: 1679391 - RNA, 19 nt, Artificial Sequence
  Description of Artificial Sequence: Synthetic oligonucleotide
  Sense strand starting at position 2886 of SEQ ID NO: 1561537
aaagauucgucuucuguaa

SEQ ID NO: 1679392 - RNA, 19 nt, Artificial Sequence
  Description of Artificial Sequence: Synthetic oligonucleotide
  Antisense strand to SEQ ID NO: 1679391
uuacagaagacgaaucuuu

SEQ ID NO: 1679393 - RNA, 19 nt, Artificial Sequence
  Description of Artificial Sequence: Synthetic oligonucleotide
  Sense strand starting at position 3252 of SEQ ID NO: 1561537
cagagaugugagugcauaa

SEQ ID NO: 1679394 - RNA, 19 nt, Artificial Sequence
  Description of Artificial Sequence: Synthetic oligonucleotide
  Antisense strand to SEQ ID NO: 1679393
uuaugcacucacaucucug

SEQ ID NO: 1679395 - RNA, 19 nt, Artificial Sequence
  Description of Artificial Sequence: Synthetic oligonucleotide
  Sense strand starting at position 3285 of SEQ ID NO: 1561537
ggguuauguuauguaaaua

SEQ ID NO: 1679396 - RNA, 19 nt, Artificial Sequence
  Description of Artificial Sequence: Synthetic oligonucleotide
  Antisense strand to SEQ ID NO: 1679395
uauuuacauaacauaaccc

SEQ ID NO: 1679397 - RNA, 19 nt, Artificial Sequence
  Description of Artificial Sequence: Synthetic oligonucleotide
  Sense strand starting at position 3286 of SEQ ID NO: 1561537
gguuauguuauguaaauag

SEQ ID NO: 1679398 - RNA, 19 nt, Artificial Sequence
  Description of Artificial Sequence: Synthetic oligonucleotide
  Antisense strand to SEQ ID NO: 1679397
cuauuuacauaacauaacc

SEQ ID NO: 1679399 - RNA, 19 nt, Artificial Sequence
  Description of Artificial Sequence: Synthetic oligonucleotide
  Sense strand starting at position 3295 of SEQ ID NO: 1561537
auguaaauagucuggagca

SEQ ID NO: 1679400 - RNA, 19 nt, Artificial Sequence
  Description of Artificial Sequence: Synthetic oligonucleotide
  Antisense strand to SEQ ID NO: 1679399
ugcuccagacuauuuacau

SEQ ID NO: 1679401 - RNA, 19 nt, Artificial Sequence
  Description of Artificial Sequence: Synthetic oligonucleotide
  Sense strand starting at position 3297 of SEQ ID NO: 1561537
guaaauagucuggagcaca

SEQ ID NO: 1679402 - RNA, 19 nt, Artificial Sequence
  Description of Artificial Sequence: Synthetic oligonucleotide
  Antisense strand to SEQ ID NO: 1679401
ugugcuccagacuauuuac

SEQ ID NO: 1679403 - RNA, 19 nt, Artificial Sequence
  Description of Artificial Sequence: Synthetic oligonucleotide
  Sense strand starting at position 3355 of SEQ ID NO: 1561537
uugagucucuguuuaaaug

SEQ ID NO: 1679404 - RNA, 19 nt, Artificial Sequence
  Description of Artificial Sequence: Synthetic oligonucleotide
  Antisense strand to SEQ ID NO: 1679403
cauuuaaacagagacucaa

SEQ ID NO: 1679405 - RNA, 19 nt, Artificial Sequence
  Description of Artificial Sequence: Synthetic oligonucleotide
  Sense strand starting at position 3356 of SEQ ID NO: 1561537
ugagucucuguuuaaaugu

SEQ ID NO: 1679406 - RNA, 19 nt, Artificial Sequence
  Description of Artificial Sequence: Synthetic oligonucleotide
  Antisense strand to SEQ ID NO: 1679405
acauuuaaacagagacuca

SEQ ID NO: 1679407 - RNA, 19 nt, Artificial Sequence
  Description of Artificial Sequence: Synthetic oligonucleotide
  Sense strand starting at position 3363 of SEQ ID NO: 1561537
cuguuuaaaugucuacaua

SEQ ID NO: 1679408 - RNA, 19 nt, Artificial Sequence
  Description of Artificial Sequence: Synthetic oligonucleotide
  Antisense strand to SEQ ID NO: 1679407
uauguagacauuuaaacag

SEQ ID NO: 1679409 - RNA, 19 nt, Artificial Sequence
  Description of Artificial Sequence: Synthetic oligonucleotide
  Sense strand starting at position 3364 of SEQ ID NO: 1561537
uguuuaaaugucuacauac

SEQ ID NO: 1679410 - RNA, 19 nt, Artificial Sequence
  Description of Artificial Sequence: Synthetic oligonucleotide
  Antisense strand to SEQ ID NO: 1679409
guauguagacauuuaaaca

SEQ ID NO: 1679411 - RNA, 19 nt, Artificial Sequence
  Description of Artificial Sequence: Synthetic oligonucleotide
  Sense strand starting at position 3382 of SEQ ID NO: 1561537
cacaacaguuuguucgauu

SEQ ID NO: 1679412 - RNA, 19 nt, Artificial Sequence
  Description of Artificial Sequence: Synthetic oligonucleotide
  Antisense strand to SEQ ID NO: 1679411
aaucgaacaaacuguugug

SEQ ID NO: 1679413 - RNA, 19 nt, Artificial Sequence
  Description of Artificial Sequence: Synthetic oligonucleotide
  Sense strand starting at position 3383 of SEQ ID NO: 1561537
acaacaguuuguucgauua

SEQ ID NO: 1679414 - RNA, 19 nt, Artificial Sequence
  Description of Artificial Sequence: Synthetic oligonucleotide
  Antisense strand to SEQ ID NO: 1679413
uaaucgaacaaacuguugu

SEQ ID NO: 1679415 - RNA, 19 nt, Artificial Sequence
  Description of Artificial Sequence: Synthetic oligonucleotide
  Sense strand starting at position 3391 of SEQ ID NO: 1561537
uuguucgauuauguagaca

SEQ ID NO: 1679416 - RNA, 19 nt, Artificial Sequence
  Description of Artificial Sequence: Synthetic oligonucleotide
  Antisense strand to SEQ ID NO: 1679415
ugucuacauaaucgaacaa

SEQ ID NO: 1679417 - RNA, 19 nt, Artificial Sequence
  Description of Artificial Sequence: Synthetic oligonucleotide
  Sense strand starting at position 3609 of SEQ ID NO: 1561537
acagguuuaauucgaguua

SEQ ID NO: 1679418 - RNA, 19 nt, Artificial Sequence
  Description of Artificial Sequence: Synthetic oligonucleotide
  Antisense strand to SEQ ID NO: 1679417
uaacucgaauuaaaccugu

SEQ ID NO: 1679419 - RNA, 19 nt, Artificial Sequence
  Description of Artificial Sequence: Synthetic oligonucleotide
  Sense strand starting at position 3762 of SEQ ID NO: 1561537
uuuccuggcuggguuauaa

SEQ ID NO: 1679420 - RNA, 19 nt, Artificial Sequence
  Description of Artificial Sequence: Synthetic oligonucleotide
  Antisense strand to SEQ ID NO: 1679419
uuauaacccagccaggaaa

SEQ ID NO: 1679421 - RNA, 19 nt, Artificial Sequence
  Description of Artificial Sequence: Synthetic oligonucleotide
  Sense strand starting at position 3783 of SEQ ID NO: 1561537
agauuagcuuccuuaguug

SEQ ID NO: 1679422 - RNA, 19 nt, Artificial Sequence
  Description of Artificial Sequence: Synthetic oligonucleotide
  Antisense strand to SEQ ID NO: 1679421
caacuaaggaagcuaaucu

SEQ ID NO: 1679423 - RNA, 19 nt, Artificial Sequence
  Description of Artificial Sequence: Synthetic oligonucleotide
  Sense strand starting at position 3878 of SEQ ID NO: 1561537
gugucuauuaggcacagua

SEQ ID NO: 1679424 - RNA, 19 nt, Artificial Sequence
  Description of Artificial Sequence: Synthetic oligonucleotide
  Antisense strand to SEQ ID NO: 1679423
uacugugccuaauagacac

SEQ ID NO: 1679425 - RNA, 19 nt, Artificial Sequence
  Description of Artificial Sequence: Synthetic oligonucleotide
  Sense strand starting at position 3880 of SEQ ID NO: 1561537
gucuauuaggcacaguaaa

SEQ ID NO: 1679426 - RNA, 19 nt, Artificial Sequence
  Description of Artificial Sequence: Synthetic oligonucleotide
  Antisense strand to SEQ ID NO: 1679425
uuuacugugccuaauagac

SEQ ID NO: 1679427 - RNA, 19 nt, Artificial Sequence
  Description of Artificial Sequence: Synthetic oligonucleotide
  Sense strand starting at position 3950 of SEQ ID NO: 1561537
gcugcagauuucccuuaga

SEQ ID NO: 1679428 - RNA, 19 nt, Artificial Sequence
  Description of Artificial Sequence: Synthetic oligonucleotide
  Antisense strand to SEQ ID NO: 1679427
ucuaagggaaaucugcagc

SEQ ID NO: 1679429 - RNA, 19 nt, Artificial Sequence
  Description of Artificial Sequence: Synthetic oligonucleotide
  Sense strand starting at position 3981 of SEQ ID NO: 1561537
cuguaauaaggcuacagau

SEQ ID NO: 1679430 - RNA, 19 nt, Artificial Sequence
  Description of Artificial Sequence: Synthetic oligonucleotide
  Antisense strand to SEQ ID NO: 1679429
aucuguagccuuauuacag

SEQ ID NO: 1679431 - RNA, 19 nt, Artificial Sequence
  Description of Artificial Sequence: Synthetic oligonucleotide
  Sense strand starting at position 102 of SEQ ID NO: 1561538
auauuaauaucucaaggga

SEQ ID NO: 1679432 - RNA, 19 nt, Artificial Sequence
  Description of Artificial Sequence: Synthetic oligonucleotide
  Antisense strand to SEQ ID NO: 1679431
ucccuugagauauuaauau

SEQ ID NO: 1679433 - RNA, 19 nt, Artificial Sequence
  Description of Artificial Sequence: Synthetic oligonucleotide
  Sense strand starting at position 105 of SEQ ID NO: 1561538
uuaauaucucaagggagua

SEQ ID NO: 1679434 - RNA, 19 nt, Artificial Sequence
  Description of Artificial Sequence: Synthetic oligonucleotide
  Antisense strand to SEQ ID NO: 1679433
uacucccuugagauauuaa

SEQ ID NO: 1679435 - RNA, 19 nt, Artificial Sequence
  Description of Artificial Sequence: Synthetic oligonucleotide
  Sense strand starting at position 176 of SEQ ID NO: 1561538
cugcucucuugagaagcua

SEQ ID NO: 1679436 - RNA, 19 nt, Artificial Sequence
  Description of Artificial Sequence: Synthetic oligonucleotide
  Antisense strand to SEQ ID NO: 1679435
uagcuucucaagagagcag

SEQ ID NO: 1679437 - RNA, 19 nt, Artificial Sequence
  Description of Artificial Sequence: Synthetic oligonucleotide
  Sense strand starting at position 209 of SEQ ID NO: 1561538
gguugucuuaugggagauc

SEQ ID NO: 1679438 - RNA, 19 nt, Artificial Sequence
  Description of Artificial Sequence: Synthetic oligonucleotide
  Antisense strand to SEQ ID NO: 1679437
gaucucccauaagacaacc

SEQ ID NO: 1679439 - RNA, 19 nt, Artificial Sequence
  Description of Artificial Sequence: Synthetic oligonucleotide
  Sense strand starting at position 210 of SEQ ID NO: 1561538
guugucuuaugggagauca

SEQ ID NO: 1679440 - RNA, 19 nt, Artificial Sequence
  Description of Artificial Sequence: Synthetic oligonucleotide
  Antisense strand to SEQ ID NO: 1679439
ugaucucccauaagacaac

SEQ ID NO: 1679441 - RNA, 19 nt, Artificial Sequence
  Description of Artificial Sequence: Synthetic oligonucleotide
  Sense strand starting at position 437 of SEQ ID NO: 1561538
uugugauaucugugucuac

SEQ ID NO: 1679442 - RNA, 19 nt, Artificial Sequence
  Description of Artificial Sequence: Synthetic oligonucleotide
  Antisense strand to SEQ ID NO: 1679441
guagacacagauaucacaa

SEQ ID NO: 1679443 - RNA, 19 nt, Artificial Sequence
  Description of Artificial Sequence: Synthetic oligonucleotide
  Sense strand starting at position 440 of SEQ ID NO: 1561538
ugauaucugugucuacgga

SEQ ID NO: 1679444 - RNA, 19 nt, Artificial Sequence
  Description of Artificial Sequence: Synthetic oligonucleotide
  Antisense strand to SEQ ID NO: 1679443
uccguagacacagauauca

SEQ ID NO: 1679445 - RNA, 19 nt, Artificial Sequence
  Description of Artificial Sequence: Synthetic oligonucleotide
  Sense strand starting at position 441 of SEQ ID NO: 1561538
gauaucugugucuacggaa

SEQ ID NO: 1679446 - RNA, 19 nt, Artificial Sequence
  Description of Artificial Sequence: Synthetic oligonucleotide
  Antisense strand to SEQ ID NO: 1679445
uuccguagacacagauauc

SEQ ID NO: 1679447 - RNA, 19 nt, Artificial Sequence
  Description of Artificial Sequence: Synthetic oligonucleotide
  Sense strand starting at position 651 of SEQ ID NO: 1561538
cagagucaggccggagaaa

SEQ ID NO: 1679448 - RNA, 19 nt, Artificial Sequence
  Description of Artificial Sequence: Synthetic oligonucleotide
  Antisense strand to SEQ ID NO: 1679447
uuucuccggccugacucug

SEQ ID NO: 1679449 - RNA, 19 nt, Artificial Sequence
  Description of Artificial Sequence: Synthetic oligonucleotide
  Sense strand starting at position 652 of SEQ ID NO: 1561538
agagucaggccggagaaau

SEQ ID NO: 1679450 - RNA, 19 nt, Artificial Sequence
  Description of Artificial Sequence: Synthetic oligonucleotide
  Antisense strand to SEQ ID NO: 1679449
auuucuccggccugacucu

SEQ ID NO: 1679451 - RNA, 19 nt, Artificial Sequence
  Description of Artificial Sequence: Synthetic oligonucleotide
  Sense strand starting at position 786 of SEQ ID NO: 1561538
ggcuguaguuccuaauuuc

SEQ ID NO: 1679452 - RNA, 19 nt, Artificial Sequence
  Description of Artificial Sequence: Synthetic oligonucleotide
  Antisense strand to SEQ ID NO: 1679451
gaaauuaggaacuacagcc

SEQ ID NO: 1679453 - RNA, 19 nt, Artificial Sequence
  Description of Artificial Sequence: Synthetic oligonucleotide
  Sense strand starting at position 1219 of SEQ ID NO: 1561538
ccaucuugauaguacgaau

SEQ ID NO: 1679454 - RNA, 19 nt, Artificial Sequence
  Description of Artificial Sequence: Synthetic oligonucleotide
  Antisense strand to SEQ ID NO: 1679453
auucguacuaucaagaugg

SEQ ID NO: 1679455 - RNA, 19 nt, Artificial Sequence
  Description of Artificial Sequence: Synthetic oligonucleotide
  Sense strand starting at position 1222 of SEQ ID NO: 1561538
ucuugauaguacgaauuaa

SEQ ID NO: 1679456 - RNA, 19 nt, Artificial Sequence
  Description of Artificial Sequence: Synthetic oligonucleotide
  Antisense strand to SEQ ID NO: 1679455
uuaauucguacuaucaaga

SEQ ID NO: 1679457 - RNA, 19 nt, Artificial Sequence
  Description of Artificial Sequence: Synthetic oligonucleotide
  Sense strand starting at position 1370 of SEQ ID NO: 1561538
uggaaucacucuuugguua

SEQ ID NO: 1679458 - RNA, 19 nt, Artificial Sequence
  Description of Artificial Sequence: Synthetic oligonucleotide
  Antisense strand to SEQ ID NO: 1679457
uaaccaaagagugauucca

SEQ ID NO: 1679459 - RNA, 19 nt, Artificial Sequence
  Description of Artificial Sequence: Synthetic oligonucleotide
  Sense strand starting at position 1371 of SEQ ID NO: 1561538
ggaaucacucuuugguuaa

SEQ ID NO: 1679460 - RNA, 19 nt, Artificial Sequence
  Description of Artificial Sequence: Synthetic oligonucleotide
  Antisense strand to SEQ ID NO: 1679459
uuaaccaaagagugauucc

SEQ ID NO: 1679461 - RNA, 19 nt, Artificial Sequence
  Description of Artificial Sequence: Synthetic oligonucleotide
  Sense strand starting at position 1394 of SEQ ID NO: 1561538
uuuaauauuugugcgguga

SEQ ID NO: 1679462 - RNA, 19 nt, Artificial Sequence
  Description of Artificial Sequence: Synthetic oligonucleotide
  Antisense strand to SEQ ID NO: 1679461
ucaccgcacaaauauuaaa

SEQ ID NO: 1679463 - RNA, 19 nt, Artificial Sequence
  Description of Artificial Sequence: Synthetic oligonucleotide
  Sense strand starting at position 1396 of SEQ ID NO: 1561538
uaauauuugugcggugacu

SEQ ID NO: 1679464 - RNA, 19 nt, Artificial Sequence
  Description of Artificial Sequence: Synthetic oligonucleotide
  Antisense strand to SEQ ID NO: 1679463
agucaccgcacaaauauua

SEQ ID NO: 1679465 - RNA, 19 nt, Artificial Sequence
  Description of Artificial Sequence: Synthetic oligonucleotide
  Sense strand starting at position 1398 of SEQ ID NO: 1561538
auauuugugcggugacuuc

SEQ ID NO: 1679466 - RNA, 19 nt, Artificial Sequence
  Description of Artificial Sequence: Synthetic oligonucleotide
  Antisense strand to SEQ ID NO: 1679465
gaagucaccgcacaaauau

SEQ ID NO: 1679467 - RNA, 19 nt, Artificial Sequence
  Description of Artificial Sequence: Synthetic oligonucleotide
  Sense strand starting at position 1405 of SEQ ID NO: 1561538
ugcggugacuucugcaaau

SEQ ID NO: 1679468 - RNA, 19 nt, Artificial Sequence
  Description of Artificial Sequence: Synthetic oligonucleotide
  Antisense strand to SEQ ID NO: 1679467
auuugcagaagucaccgca

SEQ ID NO: 1679469 - RNA, 19 nt, Artificial Sequence
  Description of Artificial Sequence: Synthetic oligonucleotide
  Sense strand starting at position 1498 of SEQ ID NO: 1561538
ucaggauucuccugugacg

SEQ ID NO: 1679470 - RNA, 19 nt, Artificial Sequence
  Description of Artificial Sequence: Synthetic oligonucleotide
  Antisense strand to SEQ ID NO: 1679469
cgucacaggagaauccuga

SEQ ID NO: 1679471 - RNA, 19 nt, Artificial Sequence
  Description of Artificial Sequence: Synthetic oligonucleotide
  Sense strand starting at position 1500 of SEQ ID NO: 1561538
aggauucuccugugacgac

SEQ ID NO: 1679472 - RNA, 19 nt, Artificial Sequence
  Description of Artificial Sequence: Synthetic oligonucleotide
  Antisense strand to SEQ ID NO: 1679471
gucgucacaggagaauccu

SEQ ID NO: 1679473 - RNA, 19 nt, Artificial Sequence
  Description of Artificial Sequence: Synthetic oligonucleotide
  Sense strand starting at position 1843 of SEQ ID NO: 1561538
uggcgacuuaguugugaau

SEQ ID NO: 1679474 - RNA, 19 nt, Artificial Sequence
  Description of Artificial Sequence: Synthetic oligonucleotide
  Antisense strand to SEQ ID NO: 1679473
auucacaacuaagucgcca

SEQ ID NO: 1679475 - RNA, 19 nt, Artificial Sequence
  Description of Artificial Sequence: Synthetic oligonucleotide
  Sense strand starting at position 1845 of SEQ ID NO: 1561538
gcgacuuaguugugaaucu

SEQ ID NO: 1679476 - RNA, 19 nt, Artificial Sequence
  Description of Artificial Sequence: Synthetic oligonucleotide
  Antisense strand to SEQ ID NO: 1679475
agauucacaacuaagucgc

SEQ ID NO: 1679477 - RNA, 19 nt, Artificial Sequence
  Description of Artificial Sequence: Synthetic oligonucleotide
  Sense strand starting at position 1852 of SEQ ID NO: 1561538
aguugugaaucucccaaua

SEQ ID NO: 1679478 - RNA, 19 nt, Artificial Sequence
  Description of Artificial Sequence: Synthetic oligonucleotide
  Antisense strand to SEQ ID NO: 1679477
uauugggagauucacaacu

SEQ ID NO: 1679479 - RNA, 19 nt, Artificial Sequence
  Description of Artificial Sequence: Synthetic oligonucleotide
  Sense strand starting at position 2088 of SEQ ID NO: 1561538
gacggaagauguuaucaga

SEQ ID NO: 1679480 - RNA, 19 nt, Artificial Sequence
  Description of Artificial Sequence: Synthetic oligonucleotide
  Antisense strand to SEQ ID NO: 1679479
ucugauaacaucuuccguc

SEQ ID NO: 1679481 - RNA, 19 nt, Artificial Sequence
  Description of Artificial Sequence: Synthetic oligonucleotide
  Sense strand starting at position 2240 of SEQ ID NO: 1561538
ccuggucgaccuggugaaa

SEQ ID NO: 1679482 - RNA, 19 nt, Artificial Sequence
  Description of Artificial Sequence: Synthetic oligonucleotide
  Antisense strand to SEQ ID NO: 1679481
uuucaccaggucgaccagg

SEQ ID NO: 1679483 - RNA, 19 nt, Artificial Sequence
  Description of Artificial Sequence: Synthetic oligonucleotide
  Sense strand starting at position 3081 of SEQ ID NO: 1561538
guggccugaaccuguagua

SEQ ID NO: 1679484 - RNA, 19 nt, Artificial Sequence
  Description of Artificial Sequence: Synthetic oligonucleotide
  Antisense strand to SEQ ID NO: 1679483
uacuacagguucaggccac

SEQ ID NO: 1679485 - RNA, 19 nt, Artificial Sequence
  Description of Artificial Sequence: Synthetic oligonucleotide
  Sense strand starting at position 3249 of SEQ ID NO: 1561538
acuuaaacuuaugagaguu

SEQ ID NO: 1679486 - RNA, 19 nt, Artificial Sequence
  Description of Artificial Sequence: Synthetic oligonucleotide
  Antisense strand to SEQ ID NO: 1679485
aacucucauaaguuuaagu

SEQ ID NO: 1679487 - RNA, 19 nt, Artificial Sequence
  Description of Artificial Sequence: Synthetic oligonucleotide
  Sense strand starting at position 3363 of SEQ ID NO: 1561538
cugagauuucggugcacca

SEQ ID NO: 1679488 - RNA, 19 nt, Artificial Sequence
  Description of Artificial Sequence: Synthetic oligonucleotide
  Antisense strand to SEQ ID NO: 1679487
uggugcaccgaaaucucag

SEQ ID NO: 1679489 - RNA, 19 nt, Artificial Sequence
  Description of Artificial Sequence: Synthetic oligonucleotide
  Sense strand starting at position 3460 of SEQ ID NO: 1561538
cccagaguccauuauguaa

SEQ ID NO: 1679490 - RNA, 19 nt, Artificial Sequence
  Description of Artificial Sequence: Synthetic oligonucleotide
  Antisense strand to SEQ ID NO: 1679489
uuacauaauggacucuggg

SEQ ID NO: 1679491 - RNA, 19 nt, Artificial Sequence
  Description of Artificial Sequence: Synthetic oligonucleotide
  Sense strand starting at position 3695 of SEQ ID NO: 1561538
gacggaguuugcuguaauu

SEQ ID NO: 1679492 - RNA, 19 nt, Artificial Sequence
  Description of Artificial Sequence: Synthetic oligonucleotide
  Antisense strand to SEQ ID NO: 1679491
aauuacagcaaacuccguc

SEQ ID NO: 1679493 - RNA, 19 nt, Artificial Sequence
  Description of Artificial Sequence: Synthetic oligonucleotide
  Sense strand starting at position 3697 of SEQ ID NO: 1561538
cggaguuugcuguaauuac

SEQ ID NO: 1679494 - RNA, 19 nt, Artificial Sequence
  Description of Artificial Sequence: Synthetic oligonucleotide
  Antisense strand to SEQ ID NO: 1679493
guaauuacagcaaacuccg

SEQ ID NO: 1679495 - RNA, 19 nt, Artificial Sequence
  Description of Artificial Sequence: Synthetic oligonucleotide
  Sense strand starting at position 86 of SEQ ID NO: 1561539
cccgaaacauucugauaaa

SEQ ID NO: 1679496 - RNA, 19 nt, Artificial Sequence
  Description of Artificial Sequence: Synthetic oligonucleotide
  Antisense strand to SEQ ID NO: 1679495
uuuaucagaauguuucggg

SEQ ID NO: 1679497 - RNA, 19 nt, Artificial Sequence
  Description of Artificial Sequence: Synthetic oligonucleotide
  Sense strand starting at position 238 of SEQ ID NO: 1561539
gccauccaaugcuuuguua

SEQ ID NO: 1679498 - RNA, 19 nt, Artificial Sequence
  Description of Artificial Sequence: Synthetic oligonucleotide
  Antisense strand to SEQ ID NO: 1679497
uaacaaagcauuggauggc

SEQ ID NO: 1679499 - RNA, 19 nt, Artificial Sequence
  Description of Artificial Sequence: Synthetic oligonucleotide
  Sense strand starting at position 604 of SEQ ID NO: 1561539
gacaaauaguaaugugaau

SEQ ID NO: 1679500 - RNA, 19 nt, Artificial Sequence
  Description of Artificial Sequence: Synthetic oligonucleotide
  Antisense strand to SEQ ID NO: 1679499
auucacauuacuauuuguc

SEQ ID NO: 1679501 - RNA, 19 nt, Artificial Sequence
  Description of Artificial Sequence: Synthetic oligonucleotide
  Sense strand starting at position 613 of SEQ ID NO: 1561539
uaaugugaaucagagagga

SEQ ID NO: 1679502 - RNA, 19 nt, Artificial Sequence
  Description of Artificial Sequence: Synthetic oligonucleotide
  Antisense strand to SEQ ID NO: 1679501
uccucucugauucacauua

SEQ ID NO: 1679503 - RNA, 19 nt, Artificial Sequence
  Description of Artificial Sequence: Synthetic oligonucleotide
  Sense strand starting at position 636 of SEQ ID NO: 1561539
auugacauuugggaaggua

SEQ ID NO: 1679504 - RNA, 19 nt, Artificial Sequence
  Description of Artificial Sequence: Synthetic oligonucleotide
  Antisense strand to SEQ ID NO: 1679503
uaccuucccaaaugucaau

SEQ ID NO: 1679505 - RNA, 19 nt, Artificial Sequence
  Description of Artificial Sequence: Synthetic oligonucleotide
  Sense strand starting at position 728 of SEQ ID NO: 1561539
auaauacucuccuugggau

SEQ ID NO: 1679506 - RNA, 19 nt, Artificial Sequence
  Description of Artificial Sequence: Synthetic oligonucleotide
  Antisense strand to SEQ ID NO: 1679505
aucccaaggagaguauuau

SEQ ID NO: 1679507 - RNA, 19 nt, Artificial Sequence
  Description of Artificial Sequence: Synthetic oligonucleotide
  Sense strand starting at position 843 of SEQ ID NO: 1561539
uggcucuagucccugauau

SEQ ID NO: 1679508 - RNA, 19 nt, Artificial Sequence
  Description of Artificial Sequence: Synthetic oligonucleotide
  Antisense strand to SEQ ID NO: 1679507
auaucagggacuagagcca

SEQ ID NO: 1679509 - RNA, 19 nt, Artificial Sequence
  Description of Artificial Sequence: Synthetic oligonucleotide
  Sense strand starting at position 844 of SEQ ID NO: 1561539
ggcucuagucccugauauc

SEQ ID NO: 1679510 - RNA, 19 nt, Artificial Sequence
  Description of Artificial Sequence: Synthetic oligonucleotide
  Antisense strand to SEQ ID NO: 1679509
gauaucagggacuagagcc

SEQ ID NO: 1679511 - RNA, 19 nt, Artificial Sequence
  Description of Artificial Sequence: Synthetic oligonucleotide
  Sense strand starting at position 845 of SEQ ID NO: 1561539
gcucuagucccugauaucu

SEQ ID NO: 1679512 - RNA, 19 nt, Artificial Sequence
  Description of Artificial Sequence: Synthetic oligonucleotide
  Antisense strand to SEQ ID NO: 1679511
agauaucagggacuagagc

SEQ ID NO: 1679513 - RNA, 19 nt, Artificial Sequence
  Description of Artificial Sequence: Synthetic oligonucleotide
  Sense strand starting at position 847 of SEQ ID NO: 1561539
ucuagucccugauaucuac

SEQ ID NO: 1679514 - RNA, 19 nt, Artificial Sequence
  Description of Artificial Sequence: Synthetic oligonucleotide
  Antisense strand to SEQ ID NO: 1679513
guagauaucagggacuaga

SEQ ID NO: 1679515 - RNA, 19 nt, Artificial Sequence
  Description of Artificial Sequence: Synthetic oligonucleotide
  Sense strand starting at position 1114 of SEQ ID NO: 1561539
aggagaucgcgcuauugca

SEQ ID NO: 1679516 - RNA, 19 nt, Artificial Sequence
  Description of Artificial Sequence: Synthetic oligonucleotide
  Antisense strand to SEQ ID NO: 1679515
ugcaauagcgcgaucuccu

SEQ ID NO: 1679517 - RNA, 19 nt, Artificial Sequence
  Description of Artificial Sequence: Synthetic oligonucleotide
  Sense strand starting at position 1287 of SEQ ID NO: 1561539
acgggaaauuuccaucuug

SEQ ID NO: 1679518 - RNA, 19 nt, Artificial Sequence
  Description of Artificial Sequence: Synthetic oligonucleotide
  Antisense strand to SEQ ID NO: 1679517
caagauggaaauuucccgu

SEQ ID NO: 1679519 - RNA, 19 nt, Artificial Sequence
  Description of Artificial Sequence: Synthetic oligonucleotide
  Sense strand starting at position 1295 of SEQ ID NO: 1561539
uuuccaucuugauuguaca

SEQ ID NO: 1679520 - RNA, 19 nt, Artificial Sequence
  Description of Artificial Sequence: Synthetic oligonucleotide
  Antisense strand to SEQ ID NO: 1679519
uguacaaucaagauggaaa

SEQ ID NO: 1679521 - RNA, 19 nt, Artificial Sequence
  Description of Artificial Sequence: Synthetic oligonucleotide
  Sense strand starting at position 1308 of SEQ ID NO: 1561539
uguacaaacugagaaacua

SEQ ID NO: 1679522 - RNA, 19 nt, Artificial Sequence
  Description of Artificial Sequence: Synthetic oligonucleotide
  Antisense strand to SEQ ID NO: 1679521
uaguuucucaguuuguaca

SEQ ID NO: 1679523 - RNA, 19 nt, Artificial Sequence
  Description of Artificial Sequence: Synthetic oligonucleotide
  Sense strand starting at position 1472 of SEQ ID NO: 1561539
uuuauuacuuuagugguga

SEQ ID NO: 1679524 - RNA, 19 nt, Artificial Sequence
  Description of Artificial Sequence: Synthetic oligonucleotide
  Antisense strand to SEQ ID NO: 1679523
ucaccacuaaaguaauaaa

SEQ ID NO: 1679525 - RNA, 19 nt, Artificial Sequence
  Description of Artificial Sequence: Synthetic oligonucleotide
  Sense strand starting at position 1480 of SEQ ID NO: 1561539
uuuaguggugaccgccaua

SEQ ID NO: 1679526 - RNA, 19 nt, Artificial Sequence
  Description of Artificial Sequence: Synthetic oligonucleotide
  Antisense strand to SEQ ID NO: 1679525
uauggcggucaccacuaaa

SEQ ID NO: 1679527 - RNA, 19 nt, Artificial Sequence
  Description of Artificial Sequence: Synthetic oligonucleotide
  Sense strand starting at position 1483 of SEQ ID NO: 1561539
aguggugaccgccauaaau

SEQ ID NO: 1679528 - RNA, 19 nt, Artificial Sequence
  Description of Artificial Sequence: Synthetic oligonucleotide
  Antisense strand to SEQ ID NO: 1679527
auuuauggcggucaccacu

SEQ ID NO: 1679529 - RNA, 19 nt, Artificial Sequence
  Description of Artificial Sequence: Synthetic oligonucleotide
  Sense strand starting at position 1611 of SEQ ID NO: 1561539
cugcacaaucucggagaga

SEQ ID NO: 1679530 - RNA, 19 nt, Artificial Sequence
  Description of Artificial Sequence: Synthetic oligonucleotide
  Antisense strand to SEQ ID NO: 1679529
ucucuccgagauugugcag

SEQ ID NO: 1679531 - RNA, 19 nt, Artificial Sequence
  Description of Artificial Sequence: Synthetic oligonucleotide
  Sense strand starting at position 1725 of SEQ ID NO: 1561539
cagcgcauucgccaucuua

SEQ ID NO: 1679532 - RNA, 19 nt, Artificial Sequence
  Description of Artificial Sequence: Synthetic oligonucleotide
  Antisense strand to SEQ ID NO: 1679531
uaagauggcgaaugcgcug

SEQ ID NO: 1679533 - RNA, 19 nt, Artificial Sequence
  Description of Artificial Sequence: Synthetic oligonucleotide
  Sense strand starting at position 1727 of SEQ ID NO: 1561539
gcgcauucgccaucuuaug

SEQ ID NO: 1679534 - RNA, 19 nt, Artificial Sequence
  Description of Artificial Sequence: Synthetic oligonucleotide
  Antisense strand to SEQ ID NO: 1679533
cauaagauggcgaaugcgc

SEQ ID NO: 1679535 - RNA, 19 nt, Artificial Sequence
  Description of Artificial Sequence: Synthetic oligonucleotide
  Sense strand starting at position 2101 of SEQ ID NO: 1561539
agucccugauuggauaauu

SEQ ID NO: 1679536 - RNA, 19 nt, Artificial Sequence
  Description of Artificial Sequence: Synthetic oligonucleotide
  Antisense strand to SEQ ID NO: 1679535
aauuauccaaucagggacu

SEQ ID NO: 1679537 - RNA, 19 nt, Artificial Sequence
  Description of Artificial Sequence: Synthetic oligonucleotide
  Sense strand starting at position 2136 of SEQ ID NO: 1561539
cucagauccugagugacaa

SEQ ID NO: 1679538 - RNA, 19 nt, Artificial Sequence
  Description of Artificial Sequence: Synthetic oligonucleotide
  Antisense strand to SEQ ID NO: 1679537
uugucacucaggaucugag

SEQ ID NO: 1679539 - RNA, 19 nt, Artificial Sequence
  Description of Artificial Sequence: Synthetic oligonucleotide
  Sense strand starting at position 2137 of SEQ ID NO: 1561539
ucagauccugagugacaaa

SEQ ID NO: 1679540 - RNA, 19 nt, Artificial Sequence
  Description of Artificial Sequence: Synthetic oligonucleotide
  Antisense strand to SEQ ID NO: 1679539
uuugucacucaggaucuga

SEQ ID NO: 1679541 - RNA, 19 nt, Artificial Sequence
  Description of Artificial Sequence: Synthetic oligonucleotide
  Sense strand starting at position 2496 of SEQ ID NO: 1561539
aguaaagagugacagucua

SEQ ID NO: 1679542 - RNA, 19 nt, Artificial Sequence
  Description of Artificial Sequence: Synthetic oligonucleotide
  Antisense strand to SEQ ID NO: 1679541
uagacugucacucuuuacu

SEQ ID NO: 1679543 - RNA, 19 nt, Artificial Sequence
  Description of Artificial Sequence: Synthetic oligonucleotide
  Sense strand starting at position 2535 of SEQ ID NO: 1561539
gggcuucuucccugagcua

SEQ ID NO: 1679544 - RNA, 19 nt, Artificial Sequence
  Description of Artificial Sequence: Synthetic oligonucleotide
  Antisense strand to SEQ ID NO: 1679543
uagcucagggaagaagccc

SEQ ID NO: 1679545 - RNA, 19 nt, Artificial Sequence
  Description of Artificial Sequence: Synthetic oligonucleotide
  Sense strand starting at position 2536 of SEQ ID NO: 1561539
ggcuucuucccugagcuaa

SEQ ID NO: 1679546 - RNA, 19 nt, Artificial Sequence
  Description of Artificial Sequence: Synthetic oligonucleotide
  Antisense strand to SEQ ID NO: 1679545
uuagcucagggaagaagcc

SEQ ID NO: 1679547 - RNA, 19 nt, Artificial Sequence
  Description of Artificial Sequence: Synthetic oligonucleotide
  Sense strand starting at position 2602 of SEQ ID NO: 1561539
aaggucauauucuuucgua

SEQ ID NO: 1679548 - RNA, 19 nt, Artificial Sequence
  Description of Artificial Sequence: Synthetic oligonucleotide
  Antisense strand to SEQ ID NO: 1679547
uacgaaagaauaugaccuu

SEQ ID NO: 1679549 - RNA, 19 nt, Artificial Sequence
  Description of Artificial Sequence: Synthetic oligonucleotide
  Sense strand starting at position 2603 of SEQ ID NO: 1561539
aggucauauucuuucguaa

SEQ ID NO: 1679550 - RNA, 19 nt, Artificial Sequence
  Description of Artificial Sequence: Synthetic oligonucleotide
  Antisense strand to SEQ ID NO: 1679549
uuacgaaagaauaugaccu

SEQ ID NO: 1679551 - RNA, 19 nt, Artificial Sequence
  Description of Artificial Sequence: Synthetic oligonucleotide
  Sense strand starting at position 2716 of SEQ ID NO: 1561539
ccaucagauugccugagau

SEQ ID NO: 1679552 - RNA, 19 nt, Artificial Sequence
  Description of Artificial Sequence: Synthetic oligonucleotide
  Antisense strand to SEQ ID NO: 1679551
aucucaggcaaucugaugg

SEQ ID NO: 1679553 - RNA, 19 nt, Artificial Sequence
  Description of Artificial Sequence: Synthetic oligonucleotide
  Sense strand starting at position 2763 of SEQ ID NO: 1561539
aaaugugagcuacauguga

SEQ ID NO: 1679554 - RNA, 19 nt, Artificial Sequence
  Description of Artificial Sequence: Synthetic oligonucleotide
  Antisense strand to SEQ ID NO: 1679553
ucacauguagcucacauuu

SEQ ID NO: 1679555 - RNA, 19 nt, Artificial Sequence
  Description of Artificial Sequence: Synthetic oligonucleotide
  Sense strand starting at position 2765 of SEQ ID NO: 1561539
augugagcuacaugugaau

SEQ ID NO: 1679556 - RNA, 19 nt, Artificial Sequence
  Description of Artificial Sequence: Synthetic oligonucleotide
  Antisense strand to SEQ ID NO: 1679555
auucacauguagcucacau

SEQ ID NO: 1679557 - RNA, 19 nt, Artificial Sequence
  Description of Artificial Sequence: Synthetic oligonucleotide
  Sense strand starting at position 2834 of SEQ ID NO: 1561539
cgguauuuauuguagcaau

SEQ ID NO: 1679558 - RNA, 19 nt, Artificial Sequence
  Description of Artificial Sequence: Synthetic oligonucleotide
  Antisense strand to SEQ ID NO: 1679557
auugcuacaauaaauaccg

SEQ ID NO: 1679559 - RNA, 19 nt, Artificial Sequence
  Description of Artificial Sequence: Synthetic oligonucleotide
  Sense strand starting at position 3010 of SEQ ID NO: 1561539
gcacucagucgccacacau

SEQ ID NO: 1679560 - RNA, 19 nt, Artificial Sequence
  Description of Artificial Sequence: Synthetic oligonucleotide
  Antisense strand to SEQ ID NO: 1679559
auguguggcgacugagugc

SEQ ID NO: 1679561 - RNA, 19 nt, Artificial Sequence
  Description of Artificial Sequence: Synthetic oligonucleotide
  Sense strand starting at position 3154 of SEQ ID NO: 1561539
aacagauaguagccauaga

SEQ ID NO: 1679562 - RNA, 19 nt, Artificial Sequence
  Description of Artificial Sequence: Synthetic oligonucleotide
  Antisense strand to SEQ ID NO: 1679561
ucuauggcuacuaucuguu

SEQ ID NO: 1679563 - RNA, 19 nt, Artificial Sequence
  Description of Artificial Sequence: Synthetic oligonucleotide
  Sense strand starting at position 3319 of SEQ ID NO: 1561539
agucuugaccuccaauguu

SEQ ID NO: 1679564 - RNA, 19 nt, Artificial Sequence
  Description of Artificial Sequence: Synthetic oligonucleotide
  Antisense strand to SEQ ID NO: 1679563
aacauuggaggucaagacu

SEQ ID NO: 1679565 - RNA, 19 nt, Artificial Sequence
  Description of Artificial Sequence: Synthetic oligonucleotide
  Sense strand starting at position 3328 of SEQ ID NO: 1561539
cuccaauguuuagauauga

SEQ ID NO: 1679566 - RNA, 19 nt, Artificial Sequence
  Description of Artificial Sequence: Synthetic oligonucleotide
  Antisense strand to SEQ ID NO: 1679565
ucauaucuaaacauuggag

SEQ ID NO: 1679567 - RNA, 19 nt, Artificial Sequence
  Description of Artificial Sequence: Synthetic oligonucleotide
  Sense strand starting at position 3377 of SEQ ID NO: 1561539
cuauuuguccuuggcccua

SEQ ID NO: 1679568 - RNA, 19 nt, Artificial Sequence
  Description of Artificial Sequence: Synthetic oligonucleotide
  Antisense strand to SEQ ID NO: 1679567
uagggccaaggacaaauag

SEQ ID NO: 1679569 - RNA, 19 nt, Artificial Sequence
  Description of Artificial Sequence: Synthetic oligonucleotide
  Sense strand starting at position 3581 of SEQ ID NO: 1561539
guaaucaacuugucaauga

SEQ ID NO: 1679570 - RNA, 19 nt, Artificial Sequence
  Description of Artificial Sequence: Synthetic oligonucleotide
  Antisense strand to SEQ ID NO: 1679569
ucauugacaaguugauuac

SEQ ID NO: 1679571 - RNA, 19 nt, Artificial Sequence
  Description of Artificial Sequence: Synthetic oligonucleotide
  Sense strand starting at position 3678 of SEQ ID NO: 1561539
ccauaauugagauggucag

SEQ ID NO: 1679572 - RNA, 19 nt, Artificial Sequence
  Description of Artificial Sequence: Synthetic oligonucleotide
  Antisense strand to SEQ ID NO: 1679571
cugaccaucucaauuaugg

SEQ ID NO: 1679573 - RNA, 19 nt, Artificial Sequence
  Description of Artificial Sequence: Synthetic oligonucleotide
  Sense strand starting at position 3682 of SEQ ID NO: 1561539
aauugagauggucagcuau

SEQ ID NO: 1679574 - RNA, 19 nt, Artificial Sequence
  Description of Artificial Sequence: Synthetic oligonucleotide
  Antisense strand to SEQ ID NO: 1679573
auagcugaccaucucaauu

SEQ ID NO: 1679575 - RNA, 19 nt, Artificial Sequence
  Description of Artificial Sequence: Synthetic oligonucleotide
  Sense strand starting at position 140 of SEQ ID NO: 1561540
aacauuugguuguagaaug

SEQ ID NO: 1679576 - RNA, 19 nt, Artificial Sequence
  Description of Artificial Sequence: Synthetic oligonucleotide
  Antisense strand to SEQ ID NO: 1679575
cauucuacaaccaaauguu

SEQ ID NO: 1679577 - RNA, 19 nt, Artificial Sequence
  Description of Artificial Sequence: Synthetic oligonucleotide
  Sense strand starting at position 206 of SEQ ID NO: 1561540
uuccaugaaucucagagaa

SEQ ID NO: 1679578 - RNA, 19 nt, Artificial Sequence
  Description of Artificial Sequence: Synthetic oligonucleotide
  Antisense strand to SEQ ID NO: 1679577
uucucugagauucauggaa

SEQ ID NO: 1679579 - RNA, 19 nt, Artificial Sequence
  Description of Artificial Sequence: Synthetic oligonucleotide
  Sense strand starting at position 208 of SEQ ID NO: 1561540
ccaugaaucucagagaauc

SEQ ID NO: 1679580 - RNA, 19 nt, Artificial Sequence
  Description of Artificial Sequence: Synthetic oligonucleotide
  Antisense strand to SEQ ID NO: 1679579
gauucucugagauucaugg

SEQ ID NO: 1679581 - RNA, 19 nt, Artificial Sequence
  Description of Artificial Sequence: Synthetic oligonucleotide
  Sense strand starting at position 255 of SEQ ID NO: 1561540
ccucaauacccgcauaaga

SEQ ID NO: 1679582 - RNA, 19 nt, Artificial Sequence
  Description of Artificial Sequence: Synthetic oligonucleotide
  Antisense strand to SEQ ID NO: 1679581
ucuuaugcggguauugagg

SEQ ID NO: 1679583 - RNA, 19 nt, Artificial Sequence
  Description of Artificial Sequence: Synthetic oligonucleotide
  Sense strand starting at position 257 of SEQ ID NO: 1561540
ucaauacccgcauaagauu

SEQ ID NO: 1679584 - RNA, 19 nt, Artificial Sequence
  Description of Artificial Sequence: Synthetic oligonucleotide
  Antisense strand to SEQ ID NO: 1679583
aaucuuaugcggguauuga

SEQ ID NO: 1679585 - RNA, 19 nt, Artificial Sequence
  Description of Artificial Sequence: Synthetic oligonucleotide
  Sense strand starting at position 284 of SEQ ID NO: 1561540
cgcaaugugucucuaagaa

SEQ ID NO: 1679586 - RNA, 19 nt, Artificial Sequence
  Description of Artificial Sequence: Synthetic oligonucleotide
  Antisense strand to SEQ ID NO: 1679585
uucuuagagacacauugcg

SEQ ID NO: 1679587 - RNA, 19 nt, Artificial Sequence
  Description of Artificial Sequence: Synthetic oligonucleotide
  Sense strand starting at position 317 of SEQ ID NO: 1561540
gggugaagacaauguuaau

SEQ ID NO: 1679588 - RNA, 19 nt, Artificial Sequence
  Description of Artificial Sequence: Synthetic oligonucleotide
  Antisense strand to SEQ ID NO: 1679587
auuaacauugucuucaccc

SEQ ID NO: 1679589 - RNA, 19 nt, Artificial Sequence
  Description of Artificial Sequence: Synthetic oligonucleotide
  Sense strand starting at position 326 of SEQ ID NO: 1561540
caauguuaaugucugaagu

SEQ ID NO: 1679590 - RNA, 19 nt, Artificial Sequence
  Description of Artificial Sequence: Synthetic oligonucleotide
  Antisense strand to SEQ ID NO: 1679589
acuucagacauuaacauug

SEQ ID NO: 1679591 - RNA, 19 nt, Artificial Sequence
  Description of Artificial Sequence: Synthetic oligonucleotide
  Sense strand starting at position 327 of SEQ ID NO: 1561540
aauguuaaugucugaagug

SEQ ID NO: 1679592 - RNA, 19 nt, Artificial Sequence
  Description of Artificial Sequence: Synthetic oligonucleotide
  Antisense strand to SEQ ID NO: 1679591
cacuucagacauuaacauu

SEQ ID NO: 1679593 - RNA, 19 nt, Artificial Sequence
  Description of Artificial Sequence: Synthetic oligonucleotide
  Sense strand starting at position 336 of SEQ ID NO: 1561540
gucugaagugguuagcuuu

SEQ ID NO: 1679594 - RNA, 19 nt, Artificial Sequence
  Description of Artificial Sequence: Synthetic oligonucleotide
  Antisense strand to SEQ ID NO: 1679593
aaagcuaaccacuucagac

SEQ ID NO: 1679595 - RNA, 19 nt, Artificial Sequence
  Description of Artificial Sequence: Synthetic oligonucleotide
  Sense strand starting at position 364 of SEQ ID NO: 1561540
ccaggagauuccucuuagc

SEQ ID NO: 1679596 - RNA, 19 nt, Artificial Sequence
  Description of Artificial Sequence: Synthetic oligonucleotide
  Antisense strand to SEQ ID NO: 1679595
gcuaagaggaaucuccugg

SEQ ID NO: 1679597 - RNA, 19 nt, Artificial Sequence
  Description of Artificial Sequence: Synthetic oligonucleotide
  Sense strand starting at position 392 of SEQ ID NO: 1561540
uccaccugcucucuugaga

SEQ ID NO: 1679598 - RNA, 19 nt, Artificial Sequence
  Description of Artificial Sequence: Synthetic oligonucleotide
  Antisense strand to SEQ ID NO: 1679597
ucucaagagagcaggugga

SEQ ID NO: 1679599 - RNA, 19 nt, Artificial Sequence
  Description of Artificial Sequence: Synthetic oligonucleotide
  Sense strand starting at position 428 of SEQ ID NO: 1561540
cuuguuguccugugagaga

SEQ ID NO: 1679600 - RNA, 19 nt, Artificial Sequence
  Description of Artificial Sequence: Synthetic oligonucleotide
  Antisense strand to SEQ ID NO: 1679599
ucucucacaggacaacaag

SEQ ID NO: 1679601 - RNA, 19 nt, Artificial Sequence
  Description of Artificial Sequence: Synthetic oligonucleotide
  Sense strand starting at position 736 of SEQ ID NO: 1561540
gggcgauauuuacaaacag

SEQ ID NO: 1679602 - RNA, 19 nt, Artificial Sequence
  Description of Artificial Sequence: Synthetic oligonucleotide
  Antisense strand to SEQ ID NO: 1679601
cuguuuguaaauaucgccc

SEQ ID NO: 1679603 - RNA, 19 nt, Artificial Sequence
  Description of Artificial Sequence: Synthetic oligonucleotide
  Sense strand starting at position 870 of SEQ ID NO: 1561540
guuggcauuugggauaauc

SEQ ID NO: 1679604 - RNA, 19 nt, Artificial Sequence
  Description of Artificial Sequence: Synthetic oligonucleotide
  Antisense strand to SEQ ID NO: 1679603
gauuaucccaaaugccaac

SEQ ID NO: 1679605 - RNA, 19 nt, Artificial Sequence
  Description of Artificial Sequence: Synthetic oligonucleotide
  Sense strand starting at position 878 of SEQ ID NO: 1561540
uugggauaaucagaagaaa

SEQ ID NO: 1679606 - RNA, 19 nt, Artificial Sequence
  Description of Artificial Sequence: Synthetic oligonucleotide
  Antisense strand to SEQ ID NO: 1679605
uuucuucugauuaucccaa

SEQ ID NO: 1679607 - RNA, 19 nt, Artificial Sequence
  Description of Artificial Sequence: Synthetic oligonucleotide
  Sense strand starting at position 1008 of SEQ ID NO: 1561540
ucuccuguggagugugaaa

SEQ ID NO: 1679608 - RNA, 19 nt, Artificial Sequence
  Description of Artificial Sequence: Synthetic oligonucleotide
  Antisense strand to SEQ ID NO: 1679607
uuucacacuccacaggaga

SEQ ID NO: 1679609 - RNA, 19 nt, Artificial Sequence
  Description of Artificial Sequence: Synthetic oligonucleotide
  Sense strand starting at position 1029 of SEQ ID NO: 1561540
aguuaagugacaggcaauu

SEQ ID NO: 1679610 - RNA, 19 nt, Artificial Sequence
  Description of Artificial Sequence: Synthetic oligonucleotide
  Antisense strand to SEQ ID NO: 1679609
aauugccugucacuuaacu

SEQ ID NO: 1679611 - RNA, 19 nt, Artificial Sequence
  Description of Artificial Sequence: Synthetic oligonucleotide
  Sense strand starting at position 1212 of SEQ ID NO: 1561540
ggugcaaauuuagaaacua

SEQ ID NO: 1679612 - RNA, 19 nt, Artificial Sequence
  Description of Artificial Sequence: Synthetic oligonucleotide
  Antisense strand to SEQ ID NO: 1679611
uaguuucuaaauuugcacc

SEQ ID NO: 1679613 - RNA, 19 nt, Artificial Sequence
  Description of Artificial Sequence: Synthetic oligonucleotide
  Sense strand starting at position 1242 of SEQ ID NO: 1561540
cuaaccgauuacugaauuu

SEQ ID NO: 1679614 - RNA, 19 nt, Artificial Sequence
  Description of Artificial Sequence: Synthetic oligonucleotide
  Antisense strand to SEQ ID NO: 1679613
aaauucaguaaucgguuag

SEQ ID NO: 1679615 - RNA, 19 nt, Artificial Sequence
  Description of Artificial Sequence: Synthetic oligonucleotide
  Sense strand starting at position 1302 of SEQ ID NO: 1561540
gcccgucccauggauaaca

SEQ ID NO: 1679616 - RNA, 19 nt, Artificial Sequence
  Description of Artificial Sequence: Synthetic oligonucleotide
  Antisense strand to SEQ ID NO: 1679615
uguuauccaugggacgggc

SEQ ID NO: 1679617 - RNA, 19 nt, Artificial Sequence
  Description of Artificial Sequence: Synthetic oligonucleotide
  Sense strand starting at position 1329 of SEQ ID NO: 1561540
cccauaacugggugcucua

SEQ ID NO: 1679618 - RNA, 19 nt, Artificial Sequence
  Description of Artificial Sequence: Synthetic oligonucleotide
  Antisense strand to SEQ ID NO: 1679617
uagagcacccaguuauggg

SEQ ID NO: 1679619 - RNA, 19 nt, Artificial Sequence
  Description of Artificial Sequence: Synthetic oligonucleotide
  Sense strand starting at position 1332 of SEQ ID NO: 1561540
auaacugggugcucuacaa

SEQ ID NO: 1679620 - RNA, 19 nt, Artificial Sequence
  Description of Artificial Sequence: Synthetic oligonucleotide
  Antisense strand to SEQ ID NO: 1679619
uuguagagcacccaguuau

SEQ ID NO: 1679621 - RNA, 19 nt, Artificial Sequence
  Description of Artificial Sequence: Synthetic oligonucleotide
  Sense strand starting at position 1484 of SEQ ID NO: 1561540
aggauucuccucugacgau

SEQ ID NO: 1679622 - RNA, 19 nt, Artificial Sequence
  Description of Artificial Sequence: Synthetic oligonucleotide
  Antisense strand to SEQ ID NO: 1679621
aucgucagaggagaauccu

SEQ ID NO: 1679623 - RNA, 19 nt, Artificial Sequence
  Description of Artificial Sequence: Synthetic oligonucleotide
  Sense strand starting at position 1513 of SEQ ID NO: 1561540
uccugcauaaucugggaga

SEQ ID NO: 1679624 - RNA, 19 nt, Artificial Sequence
  Description of Artificial Sequence: Synthetic oligonucleotide
  Antisense strand to SEQ ID NO: 1679623
ucucccagauuaugcagga

SEQ ID NO: 1679625 - RNA, 19 nt, Artificial Sequence
  Description of Artificial Sequence: Synthetic oligonucleotide
  Sense strand starting at position 1515 of SEQ ID NO: 1561540
cugcauaaucugggagaga

SEQ ID NO: 1679626 - RNA, 19 nt, Artificial Sequence
  Description of Artificial Sequence: Synthetic oligonucleotide
  Antisense strand to SEQ ID NO: 1679625
ucucucccagauuaugcag

SEQ ID NO: 1679627 - RNA, 19 nt, Artificial Sequence
  Description of Artificial Sequence: Synthetic oligonucleotide
  Sense strand starting at position 2061 of SEQ ID NO: 1561540
cccugagugacagauguga

SEQ ID NO: 1679628 - RNA, 19 nt, Artificial Sequence
  Description of Artificial Sequence: Synthetic oligonucleotide
  Antisense strand to SEQ ID NO: 1679627
ucacaucugucacucaggg

SEQ ID NO: 1679629 - RNA, 19 nt, Artificial Sequence
  Description of Artificial Sequence: Synthetic oligonucleotide
  Sense strand starting at position 2171 of SEQ ID NO: 1561540
ggguacugacuuuaaccuu

SEQ ID NO: 1679630 - RNA, 19 nt, Artificial Sequence
  Description of Artificial Sequence: Synthetic oligonucleotide
  Antisense strand to SEQ ID NO: 1679629
aagguuaaagucaguaccc

SEQ ID NO: 1679631 - RNA, 19 nt, Artificial Sequence
  Description of Artificial Sequence: Synthetic oligonucleotide
  Sense strand starting at position 2528 of SEQ ID NO: 1561540
gugacagagugagaugaaa

SEQ ID NO: 1679632 - RNA, 19 nt, Artificial Sequence
  Description of Artificial Sequence: Synthetic oligonucleotide
  Antisense strand to SEQ ID NO: 1679631
uuucaucucacucugucac

SEQ ID NO: 1679633 - RNA, 19 nt, Artificial Sequence
  Description of Artificial Sequence: Synthetic oligonucleotide
  Sense strand starting at position 2800 of SEQ ID NO: 1561540
cuggaccuccaauguuaga

SEQ ID NO: 1679634 - RNA, 19 nt, Artificial Sequence
  Description of Artificial Sequence: Synthetic oligonucleotide
  Antisense strand to SEQ ID NO: 1679633
ucuaacauuggagguccag

SEQ ID NO: 1679635 - RNA, 19 nt, Artificial Sequence
  Description of Artificial Sequence: Synthetic oligonucleotide
  Sense strand starting at position 2949 of SEQ ID NO: 1561540
uguauugcagcguuacuca

SEQ ID NO: 1679636 - RNA, 19 nt, Artificial Sequence
  Description of Artificial Sequence: Synthetic oligonucleotide
  Antisense strand to SEQ ID NO: 1679635
ugaguaacgcugcaauaca

SEQ ID NO: 1679637 - RNA, 19 nt, Artificial Sequence
  Description of Artificial Sequence: Synthetic oligonucleotide
  Sense strand starting at position 2957 of SEQ ID NO: 1561540
agcguuacucaacauuauc

SEQ ID NO: 1679638 - RNA, 19 nt, Artificial Sequence
  Description of Artificial Sequence: Synthetic oligonucleotide
  Antisense strand to SEQ ID NO: 1679637
gauaauguugaguaacgcu

SEQ ID NO: 1679639 - RNA, 19 nt, Artificial Sequence
  Description of Artificial Sequence: Synthetic oligonucleotide
  Sense strand starting at position 3021 of SEQ ID NO: 1561540
uauggagcccacuguuaga

SEQ ID NO: 1679640 - RNA, 19 nt, Artificial Sequence
  Description of Artificial Sequence: Synthetic oligonucleotide
  Antisense strand to SEQ ID NO: 1679639
ucuaacagugggcuccaua

SEQ ID NO: 1679641 - RNA, 19 nt, Artificial Sequence
  Description of Artificial Sequence: Synthetic oligonucleotide
  Sense strand starting at position 3233 of SEQ ID NO: 1561540
acugcuucuugacuaggaa

SEQ ID NO: 1679642 - RNA, 19 nt, Artificial Sequence
  Description of Artificial Sequence: Synthetic oligonucleotide
  Antisense strand to SEQ ID NO: 1679641
uuccuagucaagaagcagu

SEQ ID NO: 1679643 - RNA, 19 nt, Artificial Sequence
  Description of Artificial Sequence: Synthetic oligonucleotide
  Sense strand starting at position 3487 of SEQ ID NO: 1561540
gaaauaaggucagccguau

SEQ ID NO: 1679644 - RNA, 19 nt, Artificial Sequence
  Description of Artificial Sequence: Synthetic oligonucleotide
  Antisense strand to SEQ ID NO: 1679643
auacggcugaccuuauuuc

SEQ ID NO: 1679645 - RNA, 19 nt, Artificial Sequence
  Description of Artificial Sequence: Synthetic oligonucleotide
  Sense strand starting at position 3526 of SEQ ID NO: 1561540
uccauaucucaaugggaac

SEQ ID NO: 1679646 - RNA, 19 nt, Artificial Sequence
  Description of Artificial Sequence: Synthetic oligonucleotide
  Antisense strand to SEQ ID NO: 1679645
guucccauugagauaugga

SEQ ID NO: 1679647 - RNA, 19 nt, Artificial Sequence
  Description of Artificial Sequence: Synthetic oligonucleotide
  Sense strand starting at position 3557 of SEQ ID NO: 1561540
gcacguggcaaaggauaua

SEQ ID NO: 1679648 - RNA, 19 nt, Artificial Sequence
  Description of Artificial Sequence: Synthetic oligonucleotide
  Antisense strand to SEQ ID NO: 1679647
uauauccuuugccacgugc

SEQ ID NO: 1679649 - RNA, 19 nt, Artificial Sequence
  Description of Artificial Sequence: Synthetic oligonucleotide
  Sense strand starting at position 3592 of SEQ ID NO: 1561540
gcugcaauuucugcaauua

SEQ ID NO: 1679650 - RNA, 19 nt, Artificial Sequence
  Description of Artificial Sequence: Synthetic oligonucleotide
  Antisense strand to SEQ ID NO: 1679649
uaauugcagaaauugcagc

SEQ ID NO: 1679651 - RNA, 19 nt, Artificial Sequence
  Description of Artificial Sequence: Synthetic oligonucleotide
  Sense strand starting at position 3711 of SEQ ID NO: 1561540
aggauaaauucugacucca

SEQ ID NO: 1679652 - RNA, 19 nt, Artificial Sequence
  Description of Artificial Sequence: Synthetic oligonucleotide
  Antisense strand to SEQ ID NO: 1679651
uggagucagaauuuauccu

SEQ ID NO: 1679653 - RNA, 19 nt, Artificial Sequence
  Description of Artificial Sequence: Synthetic oligonucleotide
  Sense strand starting at position 3775 of SEQ ID NO: 1561540
gccacagacccuugaaauu

SEQ ID NO: 1679654 - RNA, 19 nt, Artificial Sequence
  Description of Artificial Sequence: Synthetic oligonucleotide
  Antisense strand to SEQ ID NO: 1679653
aauuucaagggucuguggc

SEQ ID NO: 1679655 - RNA, 19 nt, Artificial Sequence
  Description of Artificial Sequence: Synthetic oligonucleotide
  Sense strand starting at position 72 of SEQ ID NO: 1561541
gcggcaaaucaugcuugua

SEQ ID NO: 1679656 - RNA, 19 nt, Artificial Sequence
  Description of Artificial Sequence: Synthetic oligonucleotide
  Antisense strand to SEQ ID NO: 1679655
uacaagcaugauuugccgc

SEQ ID NO: 1679657 - RNA, 19 nt, Artificial Sequence
  Description of Artificial Sequence: Synthetic oligonucleotide
  Sense strand starting at position 118 of SEQ ID NO: 1561541
gguagaucacgaugucaga

SEQ ID NO: 1679658 - RNA, 19 nt, Artificial Sequence
  Description of Artificial Sequence: Synthetic oligonucleotide
  Antisense strand to SEQ ID NO: 1679657
ucugacaucgugaucuacc

SEQ ID NO: 1679659 - RNA, 19 nt, Artificial Sequence
  Description of Artificial Sequence: Synthetic oligonucleotide
  Sense strand starting at position 510 of SEQ ID NO: 1561541
aacuaauguguugacgaau

SEQ ID NO: 1679660 - RNA, 19 nt, Artificial Sequence
  Description of Artificial Sequence: Synthetic oligonucleotide
  Antisense strand to SEQ ID NO: 1679659
auucgucaacacauuaguu

SEQ ID NO: 1679661 - RNA, 19 nt, Artificial Sequence
  Description of Artificial Sequence: Synthetic oligonucleotide
  Sense strand starting at position 513 of SEQ ID NO: 1561541
uaauguguugacgaaucua

SEQ ID NO: 1679662 - RNA, 19 nt, Artificial Sequence
  Description of Artificial Sequence: Synthetic oligonucleotide
  Antisense strand to SEQ ID NO: 1679661
uagauucgucaacacauua

SEQ ID NO: 1679663 - RNA, 19 nt, Artificial Sequence
  Description of Artificial Sequence: Synthetic oligonucleotide
  Sense strand starting at position 518 of SEQ ID NO: 1561541
uguugacgaaucuauguaa

SEQ ID NO: 1679664 - RNA, 19 nt, Artificial Sequence
  Description of Artificial Sequence: Synthetic oligonucleotide
  Antisense strand to SEQ ID NO: 1679663
uuacauagauucgucaaca

SEQ ID NO: 1679665 - RNA, 19 nt, Artificial Sequence
  Description of Artificial Sequence: Synthetic oligonucleotide
  Sense strand starting at position 521 of SEQ ID NO: 1561541
ugacgaaucuauguaacuc

SEQ ID NO: 1679666 - RNA, 19 nt, Artificial Sequence
  Description of Artificial Sequence: Synthetic oligonucleotide
  Antisense strand to SEQ ID NO: 1679665
gaguuacauagauucguca

SEQ ID NO: 1679667 - RNA, 19 nt, Artificial Sequence
  Description of Artificial Sequence: Synthetic oligonucleotide
  Sense strand starting at position 633 of SEQ ID NO: 1561541
agcauuccuggcuaacaua

SEQ ID NO: 1679668 - RNA, 19 nt, Artificial Sequence
  Description of Artificial Sequence: Synthetic oligonucleotide
  Antisense strand to SEQ ID NO: 1679667
uauguuagccaggaaugcu

SEQ ID NO: 1679669 - RNA, 19 nt, Artificial Sequence
  Description of Artificial Sequence: Synthetic oligonucleotide
  Sense strand starting at position 878 of SEQ ID NO: 1561541
ugaggccuugcuugagaca

SEQ ID NO: 1679670 - RNA, 19 nt, Artificial Sequence
  Description of Artificial Sequence: Synthetic oligonucleotide
  Antisense strand to SEQ ID NO: 1679669
ugucucaagcaaggccuca

SEQ ID NO: 1679671 - RNA, 19 nt, Artificial Sequence
  Description of Artificial Sequence: Synthetic oligonucleotide
  Sense strand starting at position 887 of SEQ ID NO: 1561541
gcuugagacacauguggaa

SEQ ID NO: 1679672 - RNA, 19 nt, Artificial Sequence
  Description of Artificial Sequence: Synthetic oligonucleotide
  Antisense strand to SEQ ID NO: 1679671
uuccacaugugucucaagc

SEQ ID NO: 1679673 - RNA, 19 nt, Artificial Sequence
  Description of Artificial Sequence: Synthetic oligonucleotide
  Sense strand starting at position 973 of SEQ ID NO: 1561541
aagcucuagucccuggauu

SEQ ID NO: 1679674 - RNA, 19 nt, Artificial Sequence
  Description of Artificial Sequence: Synthetic oligonucleotide
  Antisense strand to SEQ ID NO: 1679673
aauccagggacuagagcuu

SEQ ID NO: 1679675 - RNA, 19 nt, Artificial Sequence
  Description of Artificial Sequence: Synthetic oligonucleotide
  Sense strand starting at position 974 of SEQ ID NO: 1561541
agcucuagucccuggauuu

SEQ ID NO: 1679676 - RNA, 19 nt, Artificial Sequence
  Description of Artificial Sequence: Synthetic oligonucleotide
  Antisense strand to SEQ ID NO: 1679675
aaauccagggacuagagcu

SEQ ID NO: 1679677 - RNA, 19 nt, Artificial Sequence
  Description of Artificial Sequence: Synthetic oligonucleotide
  Sense strand starting at position 1033 of SEQ ID NO: 1561541
uugggaaauuacuacauua

SEQ ID NO: 1679678 - RNA, 19 nt, Artificial Sequence
  Description of Artificial Sequence: Synthetic oligonucleotide
  Antisense strand to SEQ ID NO: 1679677
uaauguaguaauuucccaa

SEQ ID NO: 1679679 - RNA, 19 nt, Artificial Sequence
  Description of Artificial Sequence: Synthetic oligonucleotide
  Sense strand starting at position 1319 of SEQ ID NO: 1561541
gggccaggcuuaucuugaa

SEQ ID NO: 1679680 - RNA, 19 nt, Artificial Sequence
  Description of Artificial Sequence: Synthetic oligonucleotide
  Antisense strand to SEQ ID NO: 1679679
uucaagauaagccuggccc

SEQ ID NO: 1679681 - RNA, 19 nt, Artificial Sequence
  Description of Artificial Sequence: Synthetic oligonucleotide
  Sense strand starting at position 1531 of SEQ ID NO: 1561541
cugcacauucugggagaga

SEQ ID NO: 1679682 - RNA, 19 nt, Artificial Sequence
  Description of Artificial Sequence: Synthetic oligonucleotide
  Antisense strand to SEQ ID NO: 1679681
ucucucccagaaugugcag

SEQ ID NO: 1679683 - RNA, 19 nt, Artificial Sequence
  Description of Artificial Sequence: Synthetic oligonucleotide
  Sense strand starting at position 1696 of SEQ ID NO: 1561541
gagaacucagggugcagau

SEQ ID NO: 1679684 - RNA, 19 nt, Artificial Sequence
  Description of Artificial Sequence: Synthetic oligonucleotide
  Antisense strand to SEQ ID NO: 1679683
aucugcacccugaguucuc

SEQ ID NO: 1679685 - RNA, 19 nt, Artificial Sequence
  Description of Artificial Sequence: Synthetic oligonucleotide
  Sense strand starting at position 2043 of SEQ ID NO: 1561541
auuggauaaugcuuaaauc

SEQ ID NO: 1679686 - RNA, 19 nt, Artificial Sequence
  Description of Artificial Sequence: Synthetic oligonucleotide
  Antisense strand to SEQ ID NO: 1679685
gauuuaagcauuauccaau

SEQ ID NO: 1679687 - RNA, 19 nt, Artificial Sequence
  Description of Artificial Sequence: Synthetic oligonucleotide
  Sense strand starting at position 2084 of SEQ ID NO: 1561541
gacagaagauaugaucaga

SEQ ID NO: 1679688 - RNA, 19 nt, Artificial Sequence
  Description of Artificial Sequence: Synthetic oligonucleotide
  Antisense strand to SEQ ID NO: 1679687
ucugaucauaucuucuguc

SEQ ID NO: 1679689 - RNA, 19 nt, Artificial Sequence
  Description of Artificial Sequence: Synthetic oligonucleotide
  Sense strand starting at position 2095 of SEQ ID NO: 1561541
ugaucagaugcuggguuaa

SEQ ID NO: 1679690 - RNA, 19 nt, Artificial Sequence
  Description of Artificial Sequence: Synthetic oligonucleotide
  Antisense strand to SEQ ID NO: 1679689
uuaacccagcaucugauca

SEQ ID NO: 1679691 - RNA, 19 nt, Artificial Sequence
  Description of Artificial Sequence: Synthetic oligonucleotide
  Sense strand starting at position 2097 of SEQ ID NO: 1561541
aucagaugcuggguuaagu

SEQ ID NO: 1679692 - RNA, 19 nt, Artificial Sequence
  Description of Artificial Sequence: Synthetic oligonucleotide
  Antisense strand to SEQ ID NO: 1679691
acuuaacccagcaucugau

SEQ ID NO: 1679693 - RNA, 19 nt, Artificial Sequence
  Description of Artificial Sequence: Synthetic oligonucleotide
  Sense strand starting at position 2187 of SEQ ID NO: 1561541
cccagagcaugggaauauu

SEQ ID NO: 1679694 - RNA, 19 nt, Artificial Sequence
  Description of Artificial Sequence: Synthetic oligonucleotide
  Antisense strand to SEQ ID NO: 1679693
aauauucccaugcucuggg

SEQ ID NO: 1679695 - RNA, 19 nt, Artificial Sequence
  Description of Artificial Sequence: Synthetic oligonucleotide
  Sense strand starting at position 2220 of SEQ ID NO: 1561541
cucucuuucuuguugaaug

SEQ ID NO: 1679696 - RNA, 19 nt, Artificial Sequence
  Description of Artificial Sequence: Synthetic oligonucleotide
  Antisense strand to SEQ ID NO: 1679695
cauucaacaagaaagagag

SEQ ID NO: 1679697 - RNA, 19 nt, Artificial Sequence
  Description of Artificial Sequence: Synthetic oligonucleotide
  Sense strand starting at position 2222 of SEQ ID NO: 1561541
cucuuucuuguugaaugua

SEQ ID NO: 1679698 - RNA, 19 nt, Artificial Sequence
  Description of Artificial Sequence: Synthetic oligonucleotide
  Antisense strand to SEQ ID NO: 1679697
uacauucaacaagaaagag

SEQ ID NO: 1679699 - RNA, 19 nt, Artificial Sequence
  Description of Artificial Sequence: Synthetic oligonucleotide
  Sense strand starting at position 2956 of SEQ ID NO: 1561541
cauccagcgcuguauugaa

SEQ ID NO: 1679700 - RNA, 19 nt, Artificial Sequence
  Description of Artificial Sequence: Synthetic oligonucleotide
  Antisense strand to SEQ ID NO: 1679699
uucaauacagcgcuggaug

SEQ ID NO: 1679701 - RNA, 19 nt, Artificial Sequence
  Description of Artificial Sequence: Synthetic oligonucleotide
  Sense strand starting at position 2963 of SEQ ID NO: 1561541
cgcuguauugaagaaaucu

SEQ ID NO: 1679702 - RNA, 19 nt, Artificial Sequence
  Description of Artificial Sequence: Synthetic oligonucleotide
  Antisense strand to SEQ ID NO: 1679701
agauuucuucaauacagcg

SEQ ID NO: 1679703 - RNA, 19 nt, Artificial Sequence
  Description of Artificial Sequence: Synthetic oligonucleotide
  Sense strand starting at position 3217 of SEQ ID NO: 1561541
ucccucucugguggugaau

SEQ ID NO: 1679704 - RNA, 19 nt, Artificial Sequence
  Description of Artificial Sequence: Synthetic oligonucleotide
  Antisense strand to SEQ ID NO: 1679703
auucaccaccagagaggga

SEQ ID NO: 1679705 - RNA, 19 nt, Artificial Sequence
  Description of Artificial Sequence: Synthetic oligonucleotide
  Sense strand starting at position 3298 of SEQ ID NO: 1561541
uucccauuuccucgucuua

SEQ ID NO: 1679706 - RNA, 19 nt, Artificial Sequence
  Description of Artificial Sequence: Synthetic oligonucleotide
  Antisense strand to SEQ ID NO: 1679705
uaagacgaggaaaugggaa

SEQ ID NO: 1679707 - RNA, 19 nt, Artificial Sequence
  Description of Artificial Sequence: Synthetic oligonucleotide
  Sense strand starting at position 3300 of SEQ ID NO: 1561541
cccauuuccucgucuuauu

SEQ ID NO: 1679708 - RNA, 19 nt, Artificial Sequence
  Description of Artificial Sequence: Synthetic oligonucleotide
  Antisense strand to SEQ ID NO: 1679707
aauaagacgaggaaauggg

SEQ ID NO: 1679709 - RNA, 19 nt, Artificial Sequence
  Description of Artificial Sequence: Synthetic oligonucleotide
  Sense strand starting at position 3305 of SEQ ID NO: 1561541
uuccucgucuuauuaagau

SEQ ID NO: 1679710 - RNA, 19 nt, Artificial Sequence
  Description of Artificial Sequence: Synthetic oligonucleotide
  Antisense strand to SEQ ID NO: 1679709
aucuuaauaagacgaggaa

SEQ ID NO: 1679711 - RNA, 19 nt, Artificial Sequence
  Description of Artificial Sequence: Synthetic oligonucleotide
  Sense strand starting at position 3312 of SEQ ID NO: 1561541
ucuuauuaagauuggcuua

SEQ ID NO: 1679712 - RNA, 19 nt, Artificial Sequence
  Description of Artificial Sequence: Synthetic oligonucleotide
  Antisense strand to SEQ ID NO: 1679711
uaagccaaucuuaauaaga

SEQ ID NO: 1679713 - RNA, 19 nt, Artificial Sequence
  Description of Artificial Sequence: Synthetic oligonucleotide
  Sense strand starting at position 3317 of SEQ ID NO: 1561541
uuaagauuggcuuauuaca

SEQ ID NO: 1679714 - RNA, 19 nt, Artificial Sequence
  Description of Artificial Sequence: Synthetic oligonucleotide
  Antisense strand to SEQ ID NO: 1679713
uguaauaagccaaucuuaa

SEQ ID NO: 1679715 - RNA, 19 nt, Artificial Sequence
  Description of Artificial Sequence: Synthetic oligonucleotide
  Sense strand starting at position 3325 of SEQ ID NO: 1561541
ggcuuauuacaucaaucug

SEQ ID NO: 1679716 - RNA, 19 nt, Artificial Sequence
  Description of Artificial Sequence: Synthetic oligonucleotide
  Antisense strand to SEQ ID NO: 1679715
cagauugauguaauaagcc

SEQ ID NO: 1679717 - RNA, 19 nt, Artificial Sequence
  Description of Artificial Sequence: Synthetic oligonucleotide
  Sense strand starting at position 3397 of SEQ ID NO: 1561541
uuaugucugcauugccauu

SEQ ID NO: 1679718 - RNA, 19 nt, Artificial Sequence
  Description of Artificial Sequence: Synthetic oligonucleotide
  Antisense strand to SEQ ID NO: 1679717
aauggcaaugcagacauaa

SEQ ID NO: 1679719 - RNA, 19 nt, Artificial Sequence
  Description of Artificial Sequence: Synthetic oligonucleotide
  Sense strand starting at position 3430 of SEQ ID NO: 1561541
guuguuuacccuuaauggu

SEQ ID NO: 1679720 - RNA, 19 nt, Artificial Sequence
  Description of Artificial Sequence: Synthetic oligonucleotide
  Antisense strand to SEQ ID NO: 1679719
accauuaaggguaaacaac

SEQ ID NO: 1679721 - RNA, 19 nt, Artificial Sequence
  Description of Artificial Sequence: Synthetic oligonucleotide
  Sense strand starting at position 3613 of SEQ ID NO: 1561541
cucccucuuggugauuaaa

SEQ ID NO: 1679722 - RNA, 19 nt, Artificial Sequence
  Description of Artificial Sequence: Synthetic oligonucleotide
  Antisense strand to SEQ ID NO: 1679721
uuuaaucaccaagagggag

SEQ ID NO: 1679723 - RNA, 19 nt, Artificial Sequence
  Description of Artificial Sequence: Synthetic oligonucleotide
  Sense strand starting at position 3615 of SEQ ID NO: 1561541
cccucuuggugauuaaaug

SEQ ID NO: 1679724 - RNA, 19 nt, Artificial Sequence
  Description of Artificial Sequence: Synthetic oligonucleotide
  Antisense strand to SEQ ID NO: 1679723
cauuuaaucaccaagaggg

SEQ ID NO: 1679725 - RNA, 19 nt, Artificial Sequence
  Description of Artificial Sequence: Synthetic oligonucleotide
  Sense strand starting at position 3621 of SEQ ID NO: 1561541
uggugauuaaauggucaag

SEQ ID NO: 1679726 - RNA, 19 nt, Artificial Sequence
  Description of Artificial Sequence: Synthetic oligonucleotide
  Antisense strand to SEQ ID NO: 1679725
cuugaccauuuaaucacca

SEQ ID NO: 1679727 - RNA, 19 nt, Artificial Sequence
  Description of Artificial Sequence: Synthetic oligonucleotide
  Sense strand starting at position 3668 of SEQ ID NO: 1561541
ucuaaauuagugcaguuua

SEQ ID NO: 1679728 - RNA, 19 nt, Artificial Sequence
  Description of Artificial Sequence: Synthetic oligonucleotide
  Antisense strand to SEQ ID NO: 1679727
uaaacugcacuaauuuaga

SEQ ID NO: 1679729 - RNA, 19 nt, Artificial Sequence
  Description of Artificial Sequence: Synthetic oligonucleotide
  Sense strand starting at position 3819 of SEQ ID NO: 1561541
agauaaauguaagcggaaa

SEQ ID NO: 1679730 - RNA, 19 nt, Artificial Sequence
  Description of Artificial Sequence: Synthetic oligonucleotide
  Antisense strand to SEQ ID NO: 1679729
uuuccgcuuacauuuaucu

SEQ ID NO: 1679731 - RNA, 19 nt, Artificial Sequence
  Description of Artificial Sequence: Synthetic oligonucleotide
  Sense strand starting at position 3874 of SEQ ID NO: 1561541
gccagucaaugucuugacu

SEQ ID NO: 1679732 - RNA, 19 nt, Artificial Sequence
  Description of Artificial Sequence: Synthetic oligonucleotide
  Antisense strand to SEQ ID NO: 1679731
agucaagacauugacuggc

SEQ ID NO: 1679733 - RNA, 19 nt, Artificial Sequence
  Description of Artificial Sequence: Synthetic oligonucleotide
  Sense strand starting at position 3877 of SEQ ID NO: 1561541
agucaaugucuugacugau

SEQ ID NO: 1679734 - RNA, 19 nt, Artificial Sequence
  Description of Artificial Sequence: Synthetic oligonucleotide
  Antisense strand to SEQ ID NO: 1679733
aucagucaagacauugacu

SEQ ID NO: 1679735 - RNA, 19 nt, Artificial Sequence
  Description of Artificial Sequence: Synthetic oligonucleotide
  Sense strand starting at position 69 of SEQ ID NO: 1561542
cccagaccugucugaccua

SEQ ID NO: 1679736 - RNA, 19 nt, Artificial Sequence
  Description of Artificial Sequence: Synthetic oligonucleotide
  Antisense strand to SEQ ID NO: 1679735
uaggucagacaggucuggg

SEQ ID NO: 1679737 - RNA, 19 nt, Artificial Sequence
  Description of Artificial Sequence: Synthetic oligonucleotide
  Sense strand starting at position 377 of SEQ ID NO: 1561542
uugaaucuauggucccaga

SEQ ID NO: 1679738 - RNA, 19 nt, Artificial Sequence
  Description of Artificial Sequence: Synthetic oligonucleotide
  Antisense strand to SEQ ID NO: 1679737
ucugggaccauagauucaa

SEQ ID NO: 1679739 - RNA, 19 nt, Artificial Sequence
  Description of Artificial Sequence: Synthetic oligonucleotide
  Sense strand starting at position 397 of SEQ ID NO: 1561542
ggcuaucaucaacauguga

SEQ ID NO: 1679740 - RNA, 19 nt, Artificial Sequence
  Description of Artificial Sequence: Synthetic oligonucleotide
  Antisense strand to SEQ ID NO: 1679739
ucacauguugaugauagcc

SEQ ID NO: 1679741 - RNA, 19 nt, Artificial Sequence
  Description of Artificial Sequence: Synthetic oligonucleotide
  Sense strand starting at position 437 of SEQ ID NO: 1561542
acuagauucugacuugcuu

SEQ ID NO: 1679742 - RNA, 19 nt, Artificial Sequence
  Description of Artificial Sequence: Synthetic oligonucleotide
  Antisense strand to SEQ ID NO: 1679741
aagcaagucagaaucuagu

SEQ ID NO: 1679743 - RNA, 19 nt, Artificial Sequence
  Description of Artificial Sequence: Synthetic oligonucleotide
  Sense strand starting at position 445 of SEQ ID NO: 1561542
cugacuugcuugguuauuu

SEQ ID NO: 1679744 - RNA, 19 nt, Artificial Sequence
  Description of Artificial Sequence: Synthetic oligonucleotide
  Antisense strand to SEQ ID NO: 1679743
aaauaaccaagcaagucag

SEQ ID NO: 1679745 - RNA, 19 nt, Artificial Sequence
  Description of Artificial Sequence: Synthetic oligonucleotide
  Sense strand starting at position 446 of SEQ ID NO: 1561542
ugacuugcuugguuauuua

SEQ ID NO: 1679746 - RNA, 19 nt, Artificial Sequence
  Description of Artificial Sequence: Synthetic oligonucleotide
  Antisense strand to SEQ ID NO: 1679745
uaaauaaccaagcaaguca

SEQ ID NO: 1679747 - RNA, 19 nt, Artificial Sequence
  Description of Artificial Sequence: Synthetic oligonucleotide
  Sense strand starting at position 477 of SEQ ID NO: 1561542
uuccuuacuguuuaaguca

SEQ ID NO: 1679748 - RNA, 19 nt, Artificial Sequence
  Description of Artificial Sequence: Synthetic oligonucleotide
  Antisense strand to SEQ ID NO: 1679747
ugacuuaaacaguaaggaa

SEQ ID NO: 1679749 - RNA, 19 nt, Artificial Sequence
  Description of Artificial Sequence: Synthetic oligonucleotide
  Sense strand starting at position 517 of SEQ ID NO: 1561542
aaguuaaugaguuguagga

SEQ ID NO: 1679750 - RNA, 19 nt, Artificial Sequence
  Description of Artificial Sequence: Synthetic oligonucleotide
  Antisense strand to SEQ ID NO: 1679749
uccuacaacucauuaacuu

SEQ ID NO: 1679751 - RNA, 19 nt, Artificial Sequence
  Description of Artificial Sequence: Synthetic oligonucleotide
  Sense strand starting at position 556 of SEQ ID NO: 1561542
guuacugguccguucagca

SEQ ID NO: 1679752 - RNA, 19 nt, Artificial Sequence
  Description of Artificial Sequence: Synthetic oligonucleotide
  Antisense strand to SEQ ID NO: 1679751
ugcugaacggaccaguaac

SEQ ID NO: 1679753 - RNA, 19 nt, Artificial Sequence
  Description of Artificial Sequence: Synthetic oligonucleotide
  Sense strand starting at position 779 of SEQ ID NO: 1561542
agggcaacuccuuauccau

SEQ ID NO: 1679754 - RNA, 19 nt, Artificial Sequence
  Description of Artificial Sequence: Synthetic oligonucleotide
  Antisense strand to SEQ ID NO: 1679753
auggauaaggaguugcccu

SEQ ID NO: 1679755 - RNA, 19 nt, Artificial Sequence
  Description of Artificial Sequence: Synthetic oligonucleotide
  Sense strand starting at position 943 of SEQ ID NO: 1561542
guaggauucuuccuucuca

SEQ ID NO: 1679756 - RNA, 19 nt, Artificial Sequence
  Description of Artificial Sequence: Synthetic oligonucleotide
  Antisense strand to SEQ ID NO: 1679755
ugagaaggaagaauccuac

SEQ ID NO: 1679757 - RNA, 19 nt, Artificial Sequence
  Description of Artificial Sequence: Synthetic oligonucleotide
  Sense strand starting at position 1090 of SEQ ID NO: 1561542
aggaucuucugucugaaac

SEQ ID NO: 1679758 - RNA, 19 nt, Artificial Sequence
  Description of Artificial Sequence: Synthetic oligonucleotide
  Antisense strand to SEQ ID NO: 1679757
guuucagacagaagauccu

SEQ ID NO: 1679759 - RNA, 19 nt, Artificial Sequence
  Description of Artificial Sequence: Synthetic oligonucleotide
  Sense strand starting at position 1091 of SEQ ID NO: 1561542
ggaucuucugucugaaacc

SEQ ID NO: 1679760 - RNA, 19 nt, Artificial Sequence
  Description of Artificial Sequence: Synthetic oligonucleotide
  Antisense strand to SEQ ID NO: 1679759
gguuucagacagaagaucc

SEQ ID NO: 1679761 - RNA, 19 nt, Artificial Sequence
  Description of Artificial Sequence: Synthetic oligonucleotide
  Sense strand starting at position 1237 of SEQ ID NO: 1561542
ugacccuaucucugagauc

SEQ ID NO: 1679762 - RNA, 19 nt, Artificial Sequence
  Description of Artificial Sequence: Synthetic oligonucleotide
  Antisense strand to SEQ ID NO: 1679761
gaucucagagauaggguca

SEQ ID NO: 1679763 - RNA, 19 nt, Artificial Sequence
  Description of Artificial Sequence: Synthetic oligonucleotide
  Sense strand starting at position 1258 of SEQ ID NO: 1561542
uccagagucucaucacauc

SEQ ID NO: 1679764 - RNA, 19 nt, Artificial Sequence
  Description of Artificial Sequence: Synthetic oligonucleotide
  Antisense strand to SEQ ID NO: 1679763
gaugugaugagacucugga

SEQ ID NO: 1679765 - RNA, 19 nt, Artificial Sequence
  Description of Artificial Sequence: Synthetic oligonucleotide
  Sense strand starting at position 1551 of SEQ ID NO: 1561542
gagacgugucggucuccga

SEQ ID NO: 1679766 - RNA, 19 nt, Artificial Sequence
  Description of Artificial Sequence: Synthetic oligonucleotide
  Antisense strand to SEQ ID NO: 1679765
ucggagaccgacacgucuc

SEQ ID NO: 1679767 - RNA, 19 nt, Artificial Sequence
  Description of Artificial Sequence: Synthetic oligonucleotide
  Sense strand starting at position 2032 of SEQ ID NO: 1561542
gucucucugcuagaccaau

SEQ ID NO: 1679768 - RNA, 19 nt, Artificial Sequence
  Description of Artificial Sequence: Synthetic oligonucleotide
  Antisense strand to SEQ ID NO: 1679767
auuggucuagcagagagac

SEQ ID NO: 1679769 - RNA, 19 nt, Artificial Sequence
  Description of Artificial Sequence: Synthetic oligonucleotide
  Sense strand starting at position 2404 of SEQ ID NO: 1561542
agcgacauggcugaccaua

SEQ ID NO: 1679770 - RNA, 19 nt, Artificial Sequence
  Description of Artificial Sequence: Synthetic oligonucleotide
  Antisense strand to SEQ ID NO: 1679769
uauggucagccaugucgcu

SEQ ID NO: 1679771 - RNA, 19 nt, Artificial Sequence
  Description of Artificial Sequence: Synthetic oligonucleotide
  Sense strand starting at position 2406 of SEQ ID NO: 1561542
cgacauggcugaccauaau

SEQ ID NO: 1679772 - RNA, 19 nt, Artificial Sequence
  Description of Artificial Sequence: Synthetic oligonucleotide
  Antisense strand to SEQ ID NO: 1679771
auuauggucagccaugucg

SEQ ID NO: 1679773 - RNA, 19 nt, Artificial Sequence
  Description of Artificial Sequence: Synthetic oligonucleotide
  Sense strand starting at position 2575 of SEQ ID NO: 1561542
aggaauaucuuucugucga

SEQ ID NO: 1679774 - RNA, 19 nt, Artificial Sequence
  Description of Artificial Sequence: Synthetic oligonucleotide
  Antisense strand to SEQ ID NO: 1679773
ucgacagaaagauauuccu

SEQ ID NO: 1679775 - RNA, 19 nt, Artificial Sequence
  Description of Artificial Sequence: Synthetic oligonucleotide
  Sense strand starting at position 2580 of SEQ ID NO: 1561542
uaucuuucugucgacgaaa

SEQ ID NO: 1679776 - RNA, 19 nt, Artificial Sequence
  Description of Artificial Sequence: Synthetic oligonucleotide
  Antisense strand to SEQ ID NO: 1679775
uuucgucgacagaaagaua

SEQ ID NO: 1679777 - RNA, 19 nt, Artificial Sequence
  Description of Artificial Sequence: Synthetic oligonucleotide
  Sense strand starting at position 2610 of SEQ ID NO: 1561542
uugugaaauaguugaagag

SEQ ID NO: 1679778 - RNA, 19 nt, Artificial Sequence
  Description of Artificial Sequence: Synthetic oligonucleotide
  Antisense strand to SEQ ID NO: 1679777
cucuucaacuauuucacaa

SEQ ID NO: 1679779 - RNA, 19 nt, Artificial Sequence
  Description of Artificial Sequence: Synthetic oligonucleotide
  Sense strand starting at position 2665 of SEQ ID NO: 1561542
augacacggcuccaagaua

SEQ ID NO: 1679780 - RNA, 19 nt, Artificial Sequence
  Description of Artificial Sequence: Synthetic oligonucleotide
  Antisense strand to SEQ ID NO: 1679779
uaucuuggagccgugucau

SEQ ID NO: 1679781 - RNA, 19 nt, Artificial Sequence
  Description of Artificial Sequence: Synthetic oligonucleotide
  Sense strand starting at position 2673 of SEQ ID NO: 1561542
gcuccaagauauccuaaga

SEQ ID NO: 1679782 - RNA, 19 nt, Artificial Sequence
  Description of Artificial Sequence: Synthetic oligonucleotide
  Antisense strand to SEQ ID NO: 1679781
ucuuaggauaucuuggagc

SEQ ID NO: 1679783 - RNA, 19 nt, Artificial Sequence
  Description of Artificial Sequence: Synthetic oligonucleotide
  Sense strand starting at position 2865 of SEQ ID NO: 1561542
uugaaagaguuuguaucua

SEQ ID NO: 1679784 - RNA, 19 nt, Artificial Sequence
  Description of Artificial Sequence: Synthetic oligonucleotide
  Antisense strand to SEQ ID NO: 1679783
uagauacaaacucuuucaa

SEQ ID NO: 1679785 - RNA, 19 nt, Artificial Sequence
  Description of Artificial Sequence: Synthetic oligonucleotide
  Sense strand starting at position 2869 of SEQ ID NO: 1561542
aagaguuuguaucuaaaga

SEQ ID NO: 1679786 - RNA, 19 nt, Artificial Sequence
  Description of Artificial Sequence: Synthetic oligonucleotide
  Antisense strand to SEQ ID NO: 1679785
ucuuuagauacaaacucuu

SEQ ID NO: 1679787 - RNA, 19 nt, Artificial Sequence
  Description of Artificial Sequence: Synthetic oligonucleotide
  Sense strand starting at position 3235 of SEQ ID NO: 1561542
ugugaagaccaagguuaua

SEQ ID NO: 1679788 - RNA, 19 nt, Artificial Sequence
  Description of Artificial Sequence: Synthetic oligonucleotide
  Antisense strand to SEQ ID NO: 1679787
uauaaccuuggucuucaca

SEQ ID NO: 1679789 - RNA, 19 nt, Artificial Sequence
  Description of Artificial Sequence: Synthetic oligonucleotide
  Sense strand starting at position 3247 of SEQ ID NO: 1561542
gguuauaucaugcagauga

SEQ ID NO: 1679790 - RNA, 19 nt, Artificial Sequence
  Description of Artificial Sequence: Synthetic oligonucleotide
  Antisense strand to SEQ ID NO: 1679789
ucaucugcaugauauaacc

SEQ ID NO: 1679791 - RNA, 19 nt, Artificial Sequence
  Description of Artificial Sequence: Synthetic oligonucleotide
  Sense strand starting at position 3280 of SEQ ID NO: 1561542
cuuauaaggccuuaugaua

SEQ ID NO: 1679792 - RNA, 19 nt, Artificial Sequence
  Description of Artificial Sequence: Synthetic oligonucleotide
  Antisense strand to SEQ ID NO: 1679791
uaucauaaggccuuauaag

SEQ ID NO: 1679793 - RNA, 19 nt, Artificial Sequence
  Description of Artificial Sequence: Synthetic oligonucleotide
  Sense strand starting at position 3450 of SEQ ID NO: 1561542
uugaguagcagugagagaa

SEQ ID NO: 1679794 - RNA, 19 nt, Artificial Sequence
  Description of Artificial Sequence: Synthetic oligonucleotide
  Antisense strand to SEQ ID NO: 1679793
uucucucacugcuacucaa

SEQ ID NO: 1679795 - RNA, 19 nt, Artificial Sequence
  Description of Artificial Sequence: Synthetic oligonucleotide
  Sense strand starting at position 3545 of SEQ ID NO: 1561542
uggauaaugccuuaugguc

SEQ ID NO: 1679796 - RNA, 19 nt, Artificial Sequence
  Description of Artificial Sequence: Synthetic oligonucleotide
  Antisense strand to SEQ ID NO: 1679795
gaccauaaggcauuaucca

SEQ ID NO: 1679797 - RNA, 19 nt, Artificial Sequence
  Description of Artificial Sequence: Synthetic oligonucleotide
  Sense strand starting at position 3559 of SEQ ID NO: 1561542
uggucucuucugcaggauu

SEQ ID NO: 1679798 - RNA, 19 nt, Artificial Sequence
  Description of Artificial Sequence: Synthetic oligonucleotide
  Antisense strand to SEQ ID NO: 1679797
aauccugcagaagagacca

SEQ ID NO: 1679799 - RNA, 19 nt, Artificial Sequence
  Description of Artificial Sequence: Synthetic oligonucleotide
  Sense strand starting at position 3562 of SEQ ID NO: 1561542
ucucuucugcaggauuagu

SEQ ID NO: 1679800 - RNA, 19 nt, Artificial Sequence
  Description of Artificial Sequence: Synthetic oligonucleotide
  Antisense strand to SEQ ID NO: 1679799
acuaauccugcagaagaga

SEQ ID NO: 1679801 - RNA, 19 nt, Artificial Sequence
  Description of Artificial Sequence: Synthetic oligonucleotide
  Sense strand starting at position 3665 of SEQ ID NO: 1561542
guuacaauuuaguuugcca

SEQ ID NO: 1679802 - RNA, 19 nt, Artificial Sequence
  Description of Artificial Sequence: Synthetic oligonucleotide
  Antisense strand to SEQ ID NO: 1679801
uggcaaacuaaauuguaac

SEQ ID NO: 1679803 - RNA, 19 nt, Artificial Sequence
  Description of Artificial Sequence: Synthetic oligonucleotide
  Sense strand starting at position 3752 of SEQ ID NO: 1561542
cuuugaaaggguuguggga

SEQ ID NO: 1679804 - RNA, 19 nt, Artificial Sequence
  Description of Artificial Sequence: Synthetic oligonucleotide
  Antisense strand to SEQ ID NO: 1679803
ucccacaacccuuucaaag

SEQ ID NO: 1679805 - RNA, 19 nt, Artificial Sequence
  Description of Artificial Sequence: Synthetic oligonucleotide
  Sense strand starting at position 3823 of SEQ ID NO: 1561542
cccacuaacguggauaguu

SEQ ID NO: 1679806 - RNA, 19 nt, Artificial Sequence
  Description of Artificial Sequence: Synthetic oligonucleotide
  Antisense strand to SEQ ID NO: 1679805
aacuauccacguuaguggg

SEQ ID NO: 1679807 - RNA, 19 nt, Artificial Sequence
  Description of Artificial Sequence: Synthetic oligonucleotide
  Sense strand starting at position 3831 of SEQ ID NO: 1561542
cguggauaguuccuuauuu

SEQ ID NO: 1679808 - RNA, 19 nt, Artificial Sequence
  Description of Artificial Sequence: Synthetic oligonucleotide
  Antisense strand to SEQ ID NO: 1679807
aaauaaggaacuauccacg

SEQ ID NO: 1679809 - RNA, 19 nt, Artificial Sequence
  Description of Artificial Sequence: Synthetic oligonucleotide
  Sense strand starting at position 3844 of SEQ ID NO: 1561542
uuauuuaggugugagaaau

SEQ ID NO: 1679810 - RNA, 19 nt, Artificial Sequence
  Description of Artificial Sequence: Synthetic oligonucleotide
  Antisense strand to SEQ ID NO: 1679809
auuucucacaccuaaauaa

SEQ ID NO: 1679811 - RNA, 19 nt, Artificial Sequence
  Description of Artificial Sequence: Synthetic oligonucleotide
  Sense strand starting at position 3855 of SEQ ID NO: 1561542
ugagaaauuugcuauacaa

SEQ ID NO: 1679812 - RNA, 19 nt, Artificial Sequence
  Description of Artificial Sequence: Synthetic oligonucleotide
  Antisense strand to SEQ ID NO: 1679811
uuguauagcaaauuucuca

SEQ ID NO: 1679813 - RNA, 19 nt, Artificial Sequence
  Description of Artificial Sequence: Synthetic oligonucleotide
  Sense strand starting at position 3974 of SEQ ID NO: 1561542
gucagaauacuaugucuag

SEQ ID NO: 1679814 - RNA, 19 nt, Artificial Sequence
  Description of Artificial Sequence: Synthetic oligonucleotide
  Antisense strand to SEQ ID NO: 1679813
cuagacauaguauucugac

SEQ ID NO: 1679815 - RNA, 19 nt, Artificial Sequence
  Description of Artificial Sequence: Synthetic oligonucleotide
  Sense strand starting at position 31 of SEQ ID NO: 1561543
ugacaauaggaaggcuauu

SEQ ID NO: 1679816 - RNA, 19 nt, Artificial Sequence
  Description of Artificial Sequence: Synthetic oligonucleotide
  Antisense strand to SEQ ID NO: 1679815
aauagccuuccuauuguca

SEQ ID NO: 1679817 - RNA, 19 nt, Artificial Sequence
  Description of Artificial Sequence: Synthetic oligonucleotide
  Sense strand starting at position 37 of SEQ ID NO: 1561543
uaggaaggcuauuaaagaa

SEQ ID NO: 1679818 - RNA, 19 nt, Artificial Sequence
  Description of Artificial Sequence: Synthetic oligonucleotide
  Antisense strand to SEQ ID NO: 1679817
uucuuuaauagccuuccua

SEQ ID NO: 1679819 - RNA, 19 nt, Artificial Sequence
  Description of Artificial Sequence: Synthetic oligonucleotide
  Sense strand starting at position 113 of SEQ ID NO: 1561543
acucuugaguccgucuuua

SEQ ID NO: 1679820 - RNA, 19 nt, Artificial Sequence
  Description of Artificial Sequence: Synthetic oligonucleotide
  Antisense strand to SEQ ID NO: 1679819
uaaagacggacucaagagu

SEQ ID NO: 1679821 - RNA, 19 nt, Artificial Sequence
  Description of Artificial Sequence: Synthetic oligonucleotide
  Sense strand starting at position 189 of SEQ ID NO: 1561543
uacuaagaauugguuugau

SEQ ID NO: 1679822 - RNA, 19 nt, Artificial Sequence
  Description of Artificial Sequence: Synthetic oligonucleotide
  Antisense strand to SEQ ID NO: 1679821
aucaaaccaauucuuagua

SEQ ID NO: 1679823 - RNA, 19 nt, Artificial Sequence
  Description of Artificial Sequence: Synthetic oligonucleotide
  Sense strand starting at position 192 of SEQ ID NO: 1561543
uaagaauugguuugauacu

SEQ ID NO: 1679824 - RNA, 19 nt, Artificial Sequence
  Description of Artificial Sequence: Synthetic oligonucleotide
  Antisense strand to SEQ ID NO: 1679823
aguaucaaaccaauucuua

SEQ ID NO: 1679825 - RNA, 19 nt, Artificial Sequence
  Description of Artificial Sequence: Synthetic oligonucleotide
  Sense strand starting at position 193 of SEQ ID NO: 1561543
aagaauugguuugauacuc

SEQ ID NO: 1679826 - RNA, 19 nt, Artificial Sequence
  Description of Artificial Sequence: Synthetic oligonucleotide
  Antisense strand to SEQ ID NO: 1679825
gaguaucaaaccaauucuu

SEQ ID NO: 1679827 - RNA, 19 nt, Artificial Sequence
  Description of Artificial Sequence: Synthetic oligonucleotide
  Sense strand starting at position 198 of SEQ ID NO: 1561543
uugguuugauacucccuua

SEQ ID NO: 1679828 - RNA, 19 nt, Artificial Sequence
  Description of Artificial Sequence: Synthetic oligonucleotide
  Antisense strand to SEQ ID NO: 1679827
uaagggaguaucaaaccaa

SEQ ID NO: 1679829 - RNA, 19 nt, Artificial Sequence
  Description of Artificial Sequence: Synthetic oligonucleotide
  Sense strand starting at position 201 of SEQ ID NO: 1561543
guuugauacucccuuaccu

SEQ ID NO: 1679830 - RNA, 19 nt, Artificial Sequence
  Description of Artificial Sequence: Synthetic oligonucleotide
  Antisense strand to SEQ ID NO: 1679829
agguaagggaguaucaaac

SEQ ID NO: 1679831 - RNA, 19 nt, Artificial Sequence
  Description of Artificial Sequence: Synthetic oligonucleotide
  Sense strand starting at position 218 of SEQ ID NO: 1561543
cucuuaccucuccguguua

SEQ ID NO: 1679832 - RNA, 19 nt, Artificial Sequence
  Description of Artificial Sequence: Synthetic oligonucleotide
  Antisense strand to SEQ ID NO: 1679831
uaacacggagagguaagag

SEQ ID NO: 1679833 - RNA, 19 nt, Artificial Sequence
  Description of Artificial Sequence: Synthetic oligonucleotide
  Sense strand starting at position 219 of SEQ ID NO: 1561543
ucuuaccucuccguguuaa

SEQ ID NO: 1679834 - RNA, 19 nt, Artificial Sequence
  Description of Artificial Sequence: Synthetic oligonucleotide
  Antisense strand to SEQ ID NO: 1679833
uuaacacggagagguaaga

SEQ ID NO: 1679835 - RNA, 19 nt, Artificial Sequence
  Description of Artificial Sequence: Synthetic oligonucleotide
  Sense strand starting at position 220 of SEQ ID NO: 1561543
cuuaccucuccguguuaag

SEQ ID NO: 1679836 - RNA, 19 nt, Artificial Sequence
  Description of Artificial Sequence: Synthetic oligonucleotide
  Antisense strand to SEQ ID NO: 1679835
cuuaacacggagagguaag

SEQ ID NO: 1679837 - RNA, 19 nt, Artificial Sequence
  Description of Artificial Sequence: Synthetic oligonucleotide
  Sense strand starting at position 288 of SEQ ID NO: 1561543
agcuaauagcccgauauaa

SEQ ID NO: 1679838 - RNA, 19 nt, Artificial Sequence
  Description of Artificial Sequence: Synthetic oligonucleotide
  Antisense strand to SEQ ID NO: 1679837
uuauaucgggcuauuagcu

SEQ ID NO: 1679839 - RNA, 19 nt, Artificial Sequence
  Description of Artificial Sequence: Synthetic oligonucleotide
  Sense strand starting at position 335 of SEQ ID NO: 1561543
uccaguaauagugaugucu

SEQ ID NO: 1679840 - RNA, 19 nt, Artificial Sequence
  Description of Artificial Sequence: Synthetic oligonucleotide
  Antisense strand to SEQ ID NO: 1679839
agacaucacuauuacugga

SEQ ID NO: 1679841 - RNA, 19 nt, Artificial Sequence
  Description of Artificial Sequence: Synthetic oligonucleotide
  Sense strand starting at position 344 of SEQ ID NO: 1561543
agugaugucuucuaguaaa

SEQ ID NO: 1679842 - RNA, 19 nt, Artificial Sequence
  Description of Artificial Sequence: Synthetic oligonucleotide
  Antisense strand to SEQ ID NO: 1679841
uuuacuagaagacaucacu

SEQ ID NO: 1679843 - RNA, 19 nt, Artificial Sequence
  Description of Artificial Sequence: Synthetic oligonucleotide
  Sense strand starting at position 507 of SEQ ID NO: 1561543
ucgacuuggcgaagucgaa

SEQ ID NO: 1679844 - RNA, 19 nt, Artificial Sequence
  Description of Artificial Sequence: Synthetic oligonucleotide
  Antisense strand to SEQ ID NO: 1679843
uucgacuucgccaagucga

SEQ ID NO: 1679845 - RNA, 19 nt, Artificial Sequence
  Description of Artificial Sequence: Synthetic oligonucleotide
  Sense strand starting at position 748 of SEQ ID NO: 1561543
cacuccgucuuuguugaaa

SEQ ID NO: 1679846 - RNA, 19 nt, Artificial Sequence
  Description of Artificial Sequence: Synthetic oligonucleotide
  Antisense strand to SEQ ID NO: 1679845
uuucaacaaagacggagug

SEQ ID NO: 1679847 - RNA, 19 nt, Artificial Sequence
  Description of Artificial Sequence: Synthetic oligonucleotide
  Sense strand starting at position 797 of SEQ ID NO: 1561543
gccggugcguaucuuaaau

SEQ ID NO: 1679848 - RNA, 19 nt, Artificial Sequence
  Description of Artificial Sequence: Synthetic oligonucleotide
  Antisense strand to SEQ ID NO: 1679847
auuuaagauacgcaccggc

SEQ ID NO: 1679849 - RNA, 19 nt, Artificial Sequence
  Description of Artificial Sequence: Synthetic oligonucleotide
  Sense strand starting at position 835 of SEQ ID NO: 1561543
ccauaucagucugucuagu

SEQ ID NO: 1679850 - RNA, 19 nt, Artificial Sequence
  Description of Artificial Sequence: Synthetic oligonucleotide
  Antisense strand to SEQ ID NO: 1679849
acuagacagacugauaugg

SEQ ID NO: 1679851 - RNA, 19 nt, Artificial Sequence
  Description of Artificial Sequence: Synthetic oligonucleotide
  Sense strand starting at position 844 of SEQ ID NO: 1561543
ucugucuaguccucaguuu

SEQ ID NO: 1679852 - RNA, 19 nt, Artificial Sequence
  Description of Artificial Sequence: Synthetic oligonucleotide
  Antisense strand to SEQ ID NO: 1679851
aaacugaggacuagacaga

SEQ ID NO: 1679853 - RNA, 19 nt, Artificial Sequence
  Description of Artificial Sequence: Synthetic oligonucleotide
  Sense strand starting at position 1237 of SEQ ID NO: 1561543
uguuauaggucuuucucau

SEQ ID NO: 1679854 - RNA, 19 nt, Artificial Sequence
  Description of Artificial Sequence: Synthetic oligonucleotide
  Antisense strand to SEQ ID NO: 1679853
augagaaagaccuauaaca

SEQ ID NO: 1679855 - RNA, 19 nt, Artificial Sequence
  Description of Artificial Sequence: Synthetic oligonucleotide
  Sense strand starting at position 1241 of SEQ ID NO: 1561543
auaggucuuucucauucuu

SEQ ID NO: 1679856 - RNA, 19 nt, Artificial Sequence
  Description of Artificial Sequence: Synthetic oligonucleotide
  Antisense strand to SEQ ID NO: 1679855
aagaaugagaaagaccuau

SEQ ID NO: 1679857 - RNA, 19 nt, Artificial Sequence
  Description of Artificial Sequence: Synthetic oligonucleotide
  Sense strand starting at position 1456 of SEQ ID NO: 1561543
cggugauuguggaggcgaa

SEQ ID NO: 1679858 - RNA, 19 nt, Artificial Sequence
  Description of Artificial Sequence: Synthetic oligonucleotide
  Antisense strand to SEQ ID NO: 1679857
uucgccuccacaaucaccg

SEQ ID NO: 1679859 - RNA, 19 nt, Artificial Sequence
  Description of Artificial Sequence: Synthetic oligonucleotide
  Sense strand starting at position 1457 of SEQ ID NO: 1561543
ggugauuguggaggcgaaa

SEQ ID NO: 1679860 - RNA, 19 nt, Artificial Sequence
  Description of Artificial Sequence: Synthetic oligonucleotide
  Antisense strand to SEQ ID NO: 1679859
uuucgccuccacaaucacc

SEQ ID NO: 1679861 - RNA, 19 nt, Artificial Sequence
  Description of Artificial Sequence: Synthetic oligonucleotide
  Sense strand starting at position 1726 of SEQ ID NO: 1561543
uacauugcccuguagcaga

SEQ ID NO: 1679862 - RNA, 19 nt, Artificial Sequence
  Description of Artificial Sequence: Synthetic oligonucleotide
  Antisense strand to SEQ ID NO: 1679861
ucugcuacagggcaaugua

SEQ ID NO: 1679863 - RNA, 19 nt, Artificial Sequence
  Description of Artificial Sequence: Synthetic oligonucleotide
  Sense strand starting at position 2098 of SEQ ID NO: 1561543
gcgcuuuagagccggcaga

SEQ ID NO: 1679864 - RNA, 19 nt, Artificial Sequence
  Description of Artificial Sequence: Synthetic oligonucleotide
  Antisense strand to SEQ ID NO: 1679863
ucugccggcucuaaagcgc

SEQ ID NO: 1679865 - RNA, 19 nt, Artificial Sequence
  Description of Artificial Sequence: Synthetic oligonucleotide
  Sense strand starting at position 2229 of SEQ ID NO: 1561543
ggaauugucuggaacggga

SEQ ID NO: 1679866 - RNA, 19 nt, Artificial Sequence
  Description of Artificial Sequence: Synthetic oligonucleotide
  Antisense strand to SEQ ID NO: 1679865
ucccguuccagacaauucc

SEQ ID NO: 1679867 - RNA, 19 nt, Artificial Sequence
  Description of Artificial Sequence: Synthetic oligonucleotide
  Sense strand starting at position 2231 of SEQ ID NO: 1561543
aauugucuggaacgggaua

SEQ ID NO: 1679868 - RNA, 19 nt, Artificial Sequence
  Description of Artificial Sequence: Synthetic oligonucleotide
  Antisense strand to SEQ ID NO: 1679867
uaucccguuccagacaauu

SEQ ID NO: 1679869 - RNA, 19 nt, Artificial Sequence
  Description of Artificial Sequence: Synthetic oligonucleotide
  Sense strand starting at position 2712 of SEQ ID NO: 1561543
ccagcacauuuguagaaga

SEQ ID NO: 1679870 - RNA, 19 nt, Artificial Sequence
  Description of Artificial Sequence: Synthetic oligonucleotide
  Antisense strand to SEQ ID NO: 1679869
ucuucuacaaaugugcugg

SEQ ID NO: 1679871 - RNA, 19 nt, Artificial Sequence
  Description of Artificial Sequence: Synthetic oligonucleotide
  Sense strand starting at position 3078 of SEQ ID NO: 1561543
acugucuaauuguugagaa

SEQ ID NO: 1679872 - RNA, 19 nt, Artificial Sequence
  Description of Artificial Sequence: Synthetic oligonucleotide
  Antisense strand to SEQ ID NO: 1679871
uucucaacaauuagacagu

SEQ ID NO: 1679873 - RNA, 19 nt, Artificial Sequence
  Description of Artificial Sequence: Synthetic oligonucleotide
  Sense strand starting at position 3147 of SEQ ID NO: 1561543
ccacgaugaucauagagaa

SEQ ID NO: 1679874 - RNA, 19 nt, Artificial Sequence
  Description of Artificial Sequence: Synthetic oligonucleotide
  Antisense strand to SEQ ID NO: 1679873
uucucuaugaucaucgugg

SEQ ID NO: 1679875 - RNA, 19 nt, Artificial Sequence
  Description of Artificial Sequence: Synthetic oligonucleotide
  Sense strand starting at position 3446 of SEQ ID NO: 1561543
ccaugucuuucugacaagu

SEQ ID NO: 1679876 - RNA, 19 nt, Artificial Sequence
  Description of Artificial Sequence: Synthetic oligonucleotide
  Antisense strand to SEQ ID NO: 1679875
acuugucagaaagacaugg

SEQ ID NO: 1679877 - RNA, 19 nt, Artificial Sequence
  Description of Artificial Sequence: Synthetic oligonucleotide
  Sense strand starting at position 3452 of SEQ ID NO: 1561543
cuuucugacaagugugagu

SEQ ID NO: 1679878 - RNA, 19 nt, Artificial Sequence
  Description of Artificial Sequence: Synthetic oligonucleotide
  Antisense strand to SEQ ID NO: 1679877
acucacacuugucagaaag

SEQ ID NO: 1679879 - RNA, 19 nt, Artificial Sequence
  Description of Artificial Sequence: Synthetic oligonucleotide
  Sense strand starting at position 3454 of SEQ ID NO: 1561543
uucugacaagugugaguuu

SEQ ID NO: 1679880 - RNA, 19 nt, Artificial Sequence
  Description of Artificial Sequence: Synthetic oligonucleotide
  Antisense strand to SEQ ID NO: 1679879
aaacucacacuugucagaa

SEQ ID NO: 1679881 - RNA, 19 nt, Artificial Sequence
  Description of Artificial Sequence: Synthetic oligonucleotide
  Sense strand starting at position 3507 of SEQ ID NO: 1561543
cuccuacagucugacagaa

SEQ ID NO: 1679882 - RNA, 19 nt, Artificial Sequence
  Description of Artificial Sequence: Synthetic oligonucleotide
  Antisense strand to SEQ ID NO: 1679881
uucugucagacuguaggag

SEQ ID NO: 1679883 - RNA, 19 nt, Artificial Sequence
  Description of Artificial Sequence: Synthetic oligonucleotide
  Sense strand starting at position 3561 of SEQ ID NO: 1561543
uaugauuaagcacagaguu

SEQ ID NO: 1679884 - RNA, 19 nt, Artificial Sequence
  Description of Artificial Sequence: Synthetic oligonucleotide
  Antisense strand to SEQ ID NO: 1679883
aacucugugcuuaaucaua

SEQ ID NO: 1679885 - RNA, 19 nt, Artificial Sequence
  Description of Artificial Sequence: Synthetic oligonucleotide
  Sense strand starting at position 3729 of SEQ ID NO: 1561543
gcagcaaggugauugguua

SEQ ID NO: 1679886 - RNA, 19 nt, Artificial Sequence
  Description of Artificial Sequence: Synthetic oligonucleotide
  Antisense strand to SEQ ID NO: 1679885
uaaccaaucaccuugcugc

SEQ ID NO: 1679887 - RNA, 19 nt, Artificial Sequence
  Description of Artificial Sequence: Synthetic oligonucleotide
  Sense strand starting at position 3730 of SEQ ID NO: 1561543
cagcaaggugauugguuau

SEQ ID NO: 1679888 - RNA, 19 nt, Artificial Sequence
  Description of Artificial Sequence: Synthetic oligonucleotide
  Antisense strand to SEQ ID NO: 1679887
auaaccaaucaccuugcug

SEQ ID NO: 1679889 - RNA, 19 nt, Artificial Sequence
  Description of Artificial Sequence: Synthetic oligonucleotide
  Sense strand starting at position 3733 of SEQ ID NO: 1561543
caaggugauugguuaugga

SEQ ID NO: 1679890 - RNA, 19 nt, Artificial Sequence
  Description of Artificial Sequence: Synthetic oligonucleotide
  Antisense strand to SEQ ID NO: 1679889
uccauaaccaaucaccuug

SEQ ID NO: 1679891 - RNA, 19 nt, Artificial Sequence
  Description of Artificial Sequence: Synthetic oligonucleotide
  Sense strand starting at position 3737 of SEQ ID NO: 1561543
gugauugguuauggauuga

SEQ ID NO: 1679892 - RNA, 19 nt, Artificial Sequence
  Description of Artificial Sequence: Synthetic oligonucleotide
  Antisense strand to SEQ ID NO: 1679891
ucaauccauaaccaaucac

SEQ ID NO: 1679893 - RNA, 19 nt, Artificial Sequence
  Description of Artificial Sequence: Synthetic oligonucleotide
  Sense strand starting at position 3741 of SEQ ID NO: 1561543
uugguuauggauugauaua

SEQ ID NO: 1679894 - RNA, 19 nt, Artificial Sequence
  Description of Artificial Sequence: Synthetic oligonucleotide
  Antisense strand to SEQ ID NO: 1679893
uauaucaauccauaaccaa

SEQ ID NO: 1679895 - RNA, 19 nt, Artificial Sequence
  Description of Artificial Sequence: Synthetic oligonucleotide
  Sense strand starting at position 135 of SEQ ID NO: 1561544
gauagaucucuugagcuca

SEQ ID NO: 1679896 - RNA, 19 nt, Artificial Sequence
  Description of Artificial Sequence: Synthetic oligonucleotide
  Antisense strand to SEQ ID NO: 1679895
ugagcucaagagaucuauc

SEQ ID NO: 1679897 - RNA, 19 nt, Artificial Sequence
  Description of Artificial Sequence: Synthetic oligonucleotide
  Sense strand starting at position 148 of SEQ ID NO: 1561544
agcucaggaguuuggugaa

SEQ ID NO: 1679898 - RNA, 19 nt, Artificial Sequence
  Description of Artificial Sequence: Synthetic oligonucleotide
  Antisense strand to SEQ ID NO: 1679897
uucaccaaacuccugagcu

SEQ ID NO: 1679899 - RNA, 19 nt, Artificial Sequence
  Description of Artificial Sequence: Synthetic oligonucleotide
  Sense strand starting at position 151 of SEQ ID NO: 1561544
ucaggaguuuggugaaaca

SEQ ID NO: 1679900 - RNA, 19 nt, Artificial Sequence
  Description of Artificial Sequence: Synthetic oligonucleotide
  Antisense strand to SEQ ID NO: 1679899
uguuucaccaaacuccuga

SEQ ID NO: 1679901 - RNA, 19 nt, Artificial Sequence
  Description of Artificial Sequence: Synthetic oligonucleotide
  Sense strand starting at position 158 of SEQ ID NO: 1561544
uuuggugaaacauggugaa

SEQ ID NO: 1679902 - RNA, 19 nt, Artificial Sequence
  Description of Artificial Sequence: Synthetic oligonucleotide
  Antisense strand to SEQ ID NO: 1679901
uucaccauguuucaccaaa

SEQ ID NO: 1679903 - RNA, 19 nt, Artificial Sequence
  Description of Artificial Sequence: Synthetic oligonucleotide
  Sense strand starting at position 221 of SEQ ID NO: 1561544
guccaagcuacuuaggagu

SEQ ID NO: 1679904 - RNA, 19 nt, Artificial Sequence
  Description of Artificial Sequence: Synthetic oligonucleotide
  Antisense strand to SEQ ID NO: 1679903
acuccuaaguagcuuggac

SEQ ID NO: 1679905 - RNA, 19 nt, Artificial Sequence
  Description of Artificial Sequence: Synthetic oligonucleotide
  Sense strand starting at position 236 of SEQ ID NO: 1561544
gagucugaggugugaagau

SEQ ID NO: 1679906 - RNA, 19 nt, Artificial Sequence
  Description of Artificial Sequence: Synthetic oligonucleotide
  Antisense strand to SEQ ID NO: 1679905
aucuucacaccucagacuc

SEQ ID NO: 1679907 - RNA, 19 nt, Artificial Sequence
  Description of Artificial Sequence: Synthetic oligonucleotide
  Sense strand starting at position 472 of SEQ ID NO: 1561544
cuuggugguuguuuguaau

SEQ ID NO: 1679908 - RNA, 19 nt, Artificial Sequence
  Description of Artificial Sequence: Synthetic oligonucleotide
  Antisense strand to SEQ ID NO: 1679907
auuacaaacaaccaccaag

SEQ ID NO: 1679909 - RNA, 19 nt, Artificial Sequence
  Description of Artificial Sequence: Synthetic oligonucleotide
  Sense strand starting at position 799 of SEQ ID NO: 1561544
aaauucugaugugauugau

SEQ ID NO: 1679910 - RNA, 19 nt, Artificial Sequence
  Description of Artificial Sequence: Synthetic oligonucleotide
  Antisense strand to SEQ ID NO: 1679909
aucaaucacaucagaauuu

SEQ ID NO: 1679911 - RNA, 19 nt, Artificial Sequence
  Description of Artificial Sequence: Synthetic oligonucleotide
  Sense strand starting at position 802 of SEQ ID NO: 1561544
uucugaugugauugaugua

SEQ ID NO: 1679912 - RNA, 19 nt, Artificial Sequence
  Description of Artificial Sequence: Synthetic oligonucleotide
  Antisense strand to SEQ ID NO: 1679911
uacaucaaucacaucagaa

SEQ ID NO: 1679913 - RNA, 19 nt, Artificial Sequence
  Description of Artificial Sequence: Synthetic oligonucleotide
  Sense strand starting at position 805 of SEQ ID NO: 1561544
ugaugugauugauguagag

SEQ ID NO: 1679914 - RNA, 19 nt, Artificial Sequence
  Description of Artificial Sequence: Synthetic oligonucleotide
  Antisense strand to SEQ ID NO: 1679913
cucuacaucaaucacauca

SEQ ID NO: 1679915 - RNA, 19 nt, Artificial Sequence
  Description of Artificial Sequence: Synthetic oligonucleotide
  Sense strand starting at position 1551 of SEQ ID NO: 1561544
gugagaaggugugccugaa

SEQ ID NO: 1679916 - RNA, 19 nt, Artificial Sequence
  Description of Artificial Sequence: Synthetic oligonucleotide
  Antisense strand to SEQ ID NO: 1679915
uucaggcacaccuucucac

SEQ ID NO: 1679917 - RNA, 19 nt, Artificial Sequence
  Description of Artificial Sequence: Synthetic oligonucleotide
  Sense strand starting at position 1555 of SEQ ID NO: 1561544
gaaggugugccugaauucu

SEQ ID NO: 1679918 - RNA, 19 nt, Artificial Sequence
  Description of Artificial Sequence: Synthetic oligonucleotide
  Antisense strand to SEQ ID NO: 1679917
agaauucaggcacaccuuc

SEQ ID NO: 1679919 - RNA, 19 nt, Artificial Sequence
  Description of Artificial Sequence: Synthetic oligonucleotide
  Sense strand starting at position 1561 of SEQ ID NO: 1561544
gugccugaauucuuacaug

SEQ ID NO: 1679920 - RNA, 19 nt, Artificial Sequence
  Description of Artificial Sequence: Synthetic oligonucleotide
  Antisense strand to SEQ ID NO: 1679919
cauguaagaauucaggcac

SEQ ID NO: 1679921 - RNA, 19 nt, Artificial Sequence
  Description of Artificial Sequence: Synthetic oligonucleotide
  Sense strand starting at position 1597 of SEQ ID NO: 1561544
augggaaggcuuggucuuu

SEQ ID NO: 1679922 - RNA, 19 nt, Artificial Sequence
  Description of Artificial Sequence: Synthetic oligonucleotide
  Antisense strand to SEQ ID NO: 1679921
aaagaccaagccuucccau

SEQ ID NO: 1679923 - RNA, 19 nt, Artificial Sequence
  Description of Artificial Sequence: Synthetic oligonucleotide
  Sense strand starting at position 1693 of SEQ ID NO: 1561544
ugccacugauuccugacau

SEQ ID NO: 1679924 - RNA, 19 nt, Artificial Sequence
  Description of Artificial Sequence: Synthetic oligonucleotide
  Antisense strand to SEQ ID NO: 1679923
augucaggaaucaguggca

SEQ ID NO: 1679925 - RNA, 19 nt, Artificial Sequence
  Description of Artificial Sequence: Synthetic oligonucleotide
  Sense strand starting at position 1694 of SEQ ID NO: 1561544
gccacugauuccugacauu

SEQ ID NO: 1679926 - RNA, 19 nt, Artificial Sequence
  Description of Artificial Sequence: Synthetic oligonucleotide
  Antisense strand to SEQ ID NO: 1679925
aaugucaggaaucaguggc

SEQ ID NO: 1679927 - RNA, 19 nt, Artificial Sequence
  Description of Artificial Sequence: Synthetic oligonucleotide
  Sense strand starting at position 2034 of SEQ ID NO: 1561544
aaagaaucaugggugcuuu

SEQ ID NO: 1679928 - RNA, 19 nt, Artificial Sequence
  Description of Artificial Sequence: Synthetic oligonucleotide
  Antisense strand to SEQ ID NO: 1679927
aaagcacccaugauucuuu

SEQ ID NO: 1679929 - RNA, 19 nt, Artificial Sequence
  Description of Artificial Sequence: Synthetic oligonucleotide
  Sense strand starting at position 2270 of SEQ ID NO: 1561544
ggcuauuucucaucagcug

SEQ ID NO: 1679930 - RNA, 19 nt, Artificial Sequence
  Description of Artificial Sequence: Synthetic oligonucleotide
  Antisense strand to SEQ ID NO: 1679929
cagcugaugagaaauagcc

SEQ ID NO: 1679931 - RNA, 19 nt, Artificial Sequence
  Description of Artificial Sequence: Synthetic oligonucleotide
  Sense strand starting at position 2276 of SEQ ID NO: 1561544
uucucaucagcugggauaa

SEQ ID NO: 1679932 - RNA, 19 nt, Artificial Sequence
  Description of Artificial Sequence: Synthetic oligonucleotide
  Antisense strand to SEQ ID NO: 1679931
uuaucccagcugaugagaa

SEQ ID NO: 1679933 - RNA, 19 nt, Artificial Sequence
  Description of Artificial Sequence: Synthetic oligonucleotide
  Sense strand starting at position 2278 of SEQ ID NO: 1561544
cucaucagcugggauaaga

SEQ ID NO: 1679934 - RNA, 19 nt, Artificial Sequence
  Description of Artificial Sequence: Synthetic oligonucleotide
  Antisense strand to SEQ ID NO: 1679933
ucuuaucccagcugaugag

SEQ ID NO: 1679935 - RNA, 19 nt, Artificial Sequence
  Description of Artificial Sequence: Synthetic oligonucleotide
  Sense strand starting at position 26 of SEQ ID NO: 1561545
ggugauacccgucgcuaau

SEQ ID NO: 1679936 - RNA, 19 nt, Artificial Sequence
  Description of Artificial Sequence: Synthetic oligonucleotide
  Antisense strand to SEQ ID NO: 1679935
auuagcgacggguaucacc

SEQ ID NO: 1679937 - RNA, 19 nt, Artificial Sequence
  Description of Artificial Sequence: Synthetic oligonucleotide
  Sense strand starting at position 28 of SEQ ID NO: 1561545
ugauacccgucgcuaauaa

SEQ ID NO: 1679938 - RNA, 19 nt, Artificial Sequence
  Description of Artificial Sequence: Synthetic oligonucleotide
  Antisense strand to SEQ ID NO: 1679937
uuauuagcgacggguauca

SEQ ID NO: 1679939 - RNA, 19 nt, Artificial Sequence
  Description of Artificial Sequence: Synthetic oligonucleotide
  Sense strand starting at position 29 of SEQ ID NO: 1561545
gauacccgucgcuaauaaa

SEQ ID NO: 1679940 - RNA, 19 nt, Artificial Sequence
  Description of Artificial Sequence: Synthetic oligonucleotide
  Antisense strand to SEQ ID NO: 1679939
uuuauuagcgacggguauc

SEQ ID NO: 1679941 - RNA, 19 nt, Artificial Sequence
  Description of Artificial Sequence: Synthetic oligonucleotide
  Sense strand starting at position 191 of SEQ ID NO: 1561545
agagcaagacucugcauau

SEQ ID NO: 1679942 - RNA, 19 nt, Artificial Sequence
  Description of Artificial Sequence: Synthetic oligonucleotide
  Antisense strand to SEQ ID NO: 1679941
auaugcagagucuugcucu

SEQ ID NO: 1679943 - RNA, 19 nt, Artificial Sequence
  Description of Artificial Sequence: Synthetic oligonucleotide
  Sense strand starting at position 319 of SEQ ID NO: 1561545
augugcuaagaaugguuua

SEQ ID NO: 1679944 - RNA, 19 nt, Artificial Sequence
  Description of Artificial Sequence: Synthetic oligonucleotide
  Antisense strand to SEQ ID NO: 1679943
uaaaccauucuuagcacau

SEQ ID NO: 1679945 - RNA, 19 nt, Artificial Sequence
  Description of Artificial Sequence: Synthetic oligonucleotide
  Sense strand starting at position 320 of SEQ ID NO: 1561545
ugugcuaagaaugguuuaa

SEQ ID NO: 1679946 - RNA, 19 nt, Artificial Sequence
  Description of Artificial Sequence: Synthetic oligonucleotide
  Antisense strand to SEQ ID NO: 1679945
uuaaaccauucuuagcaca

SEQ ID NO: 1679947 - RNA, 19 nt, Artificial Sequence
  Description of Artificial Sequence: Synthetic oligonucleotide
  Sense strand starting at position 322 of SEQ ID NO: 1561545
ugcuaagaaugguuuaaug

SEQ ID NO: 1679948 - RNA, 19 nt, Artificial Sequence
  Description of Artificial Sequence: Synthetic oligonucleotide
  Antisense strand to SEQ ID NO: 1679947
cauuaaaccauucuuagca

SEQ ID NO: 1679949 - RNA, 19 nt, Artificial Sequence
  Description of Artificial Sequence: Synthetic oligonucleotide
  Sense strand starting at position 339 of SEQ ID NO: 1561545
ugaaucuccugcuauuguu

SEQ ID NO: 1679950 - RNA, 19 nt, Artificial Sequence
  Description of Artificial Sequence: Synthetic oligonucleotide
  Antisense strand to SEQ ID NO: 1679949
aacaauagcaggagauuca

SEQ ID NO: 1679951 - RNA, 19 nt, Artificial Sequence
  Description of Artificial Sequence: Synthetic oligonucleotide
  Sense strand starting at position 587 of SEQ ID NO: 1561545
auuggcagcugcucuaaua

SEQ ID NO: 1679952 - RNA, 19 nt, Artificial Sequence
  Description of Artificial Sequence: Synthetic oligonucleotide
  Antisense strand to SEQ ID NO: 1679951
uauuagagcagcugccaau

SEQ ID NO: 1679953 - RNA, 19 nt, Artificial Sequence
  Description of Artificial Sequence: Synthetic oligonucleotide
  Sense strand starting at position 784 of SEQ ID NO: 1561545
auggaaucuaagcgagaua

SEQ ID NO: 1679954 - RNA, 19 nt, Artificial Sequence
  Description of Artificial Sequence: Synthetic oligonucleotide
  Antisense strand to SEQ ID NO: 1679953
uaucucgcuuagauuccau

SEQ ID NO: 1679955 - RNA, 19 nt, Artificial Sequence
  Description of Artificial Sequence: Synthetic oligonucleotide
  Sense strand starting at position 890 of SEQ ID NO: 1561545
cccagcauuucugaaagga

SEQ ID NO: 1679956 - RNA, 19 nt, Artificial Sequence
  Description of Artificial Sequence: Synthetic oligonucleotide
  Antisense strand to SEQ ID NO: 1679955
uccuuucagaaaugcuggg

SEQ ID NO: 1679957 - RNA, 19 nt, Artificial Sequence
  Description of Artificial Sequence: Synthetic oligonucleotide
  Sense strand starting at position 1109 of SEQ ID NO: 1561545
gcgaccucacccugggaaa

SEQ ID NO: 1679958 - RNA, 19 nt, Artificial Sequence
  Description of Artificial Sequence: Synthetic oligonucleotide
  Antisense strand to SEQ ID NO: 1679957
uuucccagggugaggucgc

SEQ ID NO: 1679959 - RNA, 19 nt, Artificial Sequence
  Description of Artificial Sequence: Synthetic oligonucleotide
  Sense strand starting at position 1110 of SEQ ID NO: 1561545
cgaccucacccugggaaau

SEQ ID NO: 1679960 - RNA, 19 nt, Artificial Sequence
  Description of Artificial Sequence: Synthetic oligonucleotide
  Antisense strand to SEQ ID NO: 1679959
auuucccagggugaggucg

SEQ ID NO: 1679961 - RNA, 19 nt, Artificial Sequence
  Description of Artificial Sequence: Synthetic oligonucleotide
  Sense strand starting at position 1112 of SEQ ID NO: 1561545
accucacccugggaaauau

SEQ ID NO: 1679962 - RNA, 19 nt, Artificial Sequence
  Description of Artificial Sequence: Synthetic oligonucleotide
  Antisense strand to SEQ ID NO: 1679961
auauuucccagggugaggu

SEQ ID NO: 1679963 - RNA, 19 nt, Artificial Sequence
  Description of Artificial Sequence: Synthetic oligonucleotide
  Sense strand starting at position 1185 of SEQ ID NO: 1561545
gcacuucuuuccuagagga

SEQ ID NO: 1679964 - RNA, 19 nt, Artificial Sequence
  Description of Artificial Sequence: Synthetic oligonucleotide
  Antisense strand to SEQ ID NO: 1679963
uccucuaggaaagaagugc

SEQ ID NO: 1679965 - RNA, 19 nt, Artificial Sequence
  Description of Artificial Sequence: Synthetic oligonucleotide
  Sense strand starting at position 1361 of SEQ ID NO: 1561545
gauagaucucuugagcuca

SEQ ID NO: 1679966 - RNA, 19 nt, Artificial Sequence
  Description of Artificial Sequence: Synthetic oligonucleotide
  Antisense strand to SEQ ID NO: 1679965
ugagcucaagagaucuauc

SEQ ID NO: 1679967 - RNA, 19 nt, Artificial Sequence
  Description of Artificial Sequence: Synthetic oligonucleotide
  Sense strand starting at position 1374 of SEQ ID NO: 1561545
agcucaggaguuuggugaa

SEQ ID NO: 1679968 - RNA, 19 nt, Artificial Sequence
  Description of Artificial Sequence: Synthetic oligonucleotide
  Antisense strand to SEQ ID NO: 1679967
uucaccaaacuccugagcu

SEQ ID NO: 1679969 - RNA, 19 nt, Artificial Sequence
  Description of Artificial Sequence: Synthetic oligonucleotide
  Sense strand starting at position 1377 of SEQ ID NO: 1561545
ucaggaguuuggugaaaca

SEQ ID NO: 1679970 - RNA, 19 nt, Artificial Sequence
  Description of Artificial Sequence: Synthetic oligonucleotide
  Antisense strand to SEQ ID NO: 1679969
uguuucaccaaacuccuga

SEQ ID NO: 1679971 - RNA, 19 nt, Artificial Sequence
  Description of Artificial Sequence: Synthetic oligonucleotide
  Sense strand starting at position 1384 of SEQ ID NO: 1561545
uuuggugaaacauggugaa

SEQ ID NO: 1679972 - RNA, 19 nt, Artificial Sequence
  Description of Artificial Sequence: Synthetic oligonucleotide
  Antisense strand to SEQ ID NO: 1679971
uucaccauguuucaccaaa

SEQ ID NO: 1679973 - RNA, 19 nt, Artificial Sequence
  Description of Artificial Sequence: Synthetic oligonucleotide
  Sense strand starting at position 1447 of SEQ ID NO: 1561545
guccaagcuacuuaggagu

SEQ ID NO: 1679974 - RNA, 19 nt, Artificial Sequence
  Description of Artificial Sequence: Synthetic oligonucleotide
  Antisense strand to SEQ ID NO: 1679973
acuccuaaguagcuuggac

SEQ ID NO: 1679975 - RNA, 19 nt, Artificial Sequence
  Description of Artificial Sequence: Synthetic oligonucleotide
  Sense strand starting at position 1462 of SEQ ID NO: 1561545
gagucugaggugugaagau

SEQ ID NO: 1679976 - RNA, 19 nt, Artificial Sequence
  Description of Artificial Sequence: Synthetic oligonucleotide
  Antisense strand to SEQ ID NO: 1679975
aucuucacaccucagacuc

SEQ ID NO: 1679977 - RNA, 19 nt, Artificial Sequence
  Description of Artificial Sequence: Synthetic oligonucleotide
  Sense strand starting at position 1698 of SEQ ID NO: 1561545
cuuggugguuguuuguaau

SEQ ID NO: 1679978 - RNA, 19 nt, Artificial Sequence
  Description of Artificial Sequence: Synthetic oligonucleotide
  Antisense strand to SEQ ID NO: 1679977
auuacaaacaaccaccaag

SEQ ID NO: 1679979 - RNA, 19 nt, Artificial Sequence
  Description of Artificial Sequence: Synthetic oligonucleotide
  Sense strand starting at position 2025 of SEQ ID NO: 1561545
aaauucugaugugauugau

SEQ ID NO: 1679980 - RNA, 19 nt, Artificial Sequence
  Description of Artificial Sequence: Synthetic oligonucleotide
  Antisense strand to SEQ ID NO: 1679979
aucaaucacaucagaauuu

SEQ ID NO: 1679981 - RNA, 19 nt, Artificial Sequence
  Description of Artificial Sequence: Synthetic oligonucleotide
  Sense strand starting at position 2028 of SEQ ID NO: 1561545
uucugaugugauugaugua

SEQ ID NO: 1679982 - RNA, 19 nt, Artificial Sequence
  Description of Artificial Sequence: Synthetic oligonucleotide
  Antisense strand to SEQ ID NO: 1679981
uacaucaaucacaucagaa

SEQ ID NO: 1679983 - RNA, 19 nt, Artificial Sequence
  Description of Artificial Sequence: Synthetic oligonucleotide
  Sense strand starting at position 2031 of SEQ ID NO: 1561545
ugaugugauugauguagag

SEQ ID NO: 1679984 - RNA, 19 nt, Artificial Sequence
  Description of Artificial Sequence: Synthetic oligonucleotide
  Antisense strand to SEQ ID NO: 1679983
cucuacaucaaucacauca

SEQ ID NO: 1679985 - RNA, 19 nt, Artificial Sequence
  Description of Artificial Sequence: Synthetic oligonucleotide
  Sense strand starting at position 2777 of SEQ ID NO: 1561545
gugagaaggugugccugaa

SEQ ID NO: 1679986 - RNA, 19 nt, Artificial Sequence
  Description of Artificial Sequence: Synthetic oligonucleotide
  Antisense strand to SEQ ID NO: 1679985
uucaggcacaccuucucac

SEQ ID NO: 1679987 - RNA, 19 nt, Artificial Sequence
  Description of Artificial Sequence: Synthetic oligonucleotide
  Sense strand starting at position 2781 of SEQ ID NO: 1561545
gaaggugugccugaauucu

SEQ ID NO: 1679988 - RNA, 19 nt, Artificial Sequence
  Description of Artificial Sequence: Synthetic oligonucleotide
  Antisense strand to SEQ ID NO: 1679987
agaauucaggcacaccuuc

SEQ ID NO: 1679989 - RNA, 19 nt, Artificial Sequence
  Description of Artificial Sequence: Synthetic oligonucleotide
  Sense strand starting at position 2787 of SEQ ID NO: 1561545
gugccugaauucuuacaug

SEQ ID NO: 1679990 - RNA, 19 nt, Artificial Sequence
  Description of Artificial Sequence: Synthetic oligonucleotide
  Antisense strand to SEQ ID NO: 1679989
cauguaagaauucaggcac

SEQ ID NO: 1679991 - RNA, 19 nt, Artificial Sequence
  Description of Artificial Sequence: Synthetic oligonucleotide
  Sense strand starting at position 2823 of SEQ ID NO: 1561545
augggaaggcuuggucuuu

SEQ ID NO: 1679992 - RNA, 19 nt, Artificial Sequence
  Description of Artificial Sequence: Synthetic oligonucleotide
  Antisense strand to SEQ ID NO: 1679991
aaagaccaagccuucccau

SEQ ID NO: 1679993 - RNA, 19 nt, Artificial Sequence
  Description of Artificial Sequence: Synthetic oligonucleotide
  Sense strand starting at position 2919 of SEQ ID NO: 1561545
ugccacugauuccugacau

SEQ ID NO: 1679994 - RNA, 19 nt, Artificial Sequence
  Description of Artificial Sequence: Synthetic oligonucleotide
  Antisense strand to SEQ ID NO: 1679993
augucaggaaucaguggca

SEQ ID NO: 1679995 - RNA, 19 nt, Artificial Sequence
  Description of Artificial Sequence: Synthetic oligonucleotide
  Sense strand starting at position 2920 of SEQ ID NO: 1561545
gccacugauuccugacauu

SEQ ID NO: 1679996 - RNA, 19 nt, Artificial Sequence
  Description of Artificial Sequence: Synthetic oligonucleotide
  Antisense strand to SEQ ID NO: 1679995
aaugucaggaaucaguggc

SEQ ID NO: 1679997 - RNA, 19 nt, Artificial Sequence
  Description of Artificial Sequence: Synthetic oligonucleotide
  Sense strand starting at position 3260 of SEQ ID NO: 1561545
aaagaaucaugggugcuuu

SEQ ID NO: 1679998 - RNA, 19 nt, Artificial Sequence
  Description of Artificial Sequence: Synthetic oligonucleotide
  Antisense strand to SEQ ID NO: 1679997
aaagcacccaugauucuuu

SEQ ID NO: 1679999 - RNA, 19 nt, Artificial Sequence
  Description of Artificial Sequence: Synthetic oligonucleotide
  Sense strand starting at position 3496 of SEQ ID NO: 1561545
ggcuauuucucaucagcug

SEQ ID NO: 1680000 - RNA, 19 nt, Artificial Sequence
  Description of Artificial Sequence: Synthetic oligonucleotide
  Antisense strand to SEQ ID NO: 1679999
cagcugaugagaaauagcc

SEQ ID NO: 1680001 - RNA, 19 nt, Artificial Sequence
  Description of Artificial Sequence: Synthetic oligonucleotide
  Sense strand starting at position 3502 of SEQ ID NO: 1561545
uucucaucagcugggauaa

SEQ ID NO: 1680002 - RNA, 19 nt, Artificial Sequence
  Description of Artificial Sequence: Synthetic oligonucleotide
  Antisense strand to SEQ ID NO: 1680001
uuaucccagcugaugagaa

SEQ ID NO: 1680003 - RNA, 19 nt, Artificial Sequence
  Description of Artificial Sequence: Synthetic oligonucleotide
  Sense strand starting at position 3504 of SEQ ID NO: 1561545
cucaucagcugggauaaga

SEQ ID NO: 1680004 - RNA, 19 nt, Artificial Sequence
  Description of Artificial Sequence: Synthetic oligonucleotide
  Antisense strand to SEQ ID NO: 1680003
ucuuaucccagcugaugag

SEQ ID NO: 1680005 - RNA, 19 nt, Artificial Sequence
  Description of Artificial Sequence: Synthetic oligonucleotide
  Sense strand starting at position 37 of SEQ ID NO: 1561546
cauugcgacuugucuugaa

SEQ ID NO: 1680006 - RNA, 19 nt, Artificial Sequence
  Description of Artificial Sequence: Synthetic oligonucleotide
  Antisense strand to SEQ ID NO: 1680005
uucaagacaagucgcaaug

SEQ ID NO: 1680007 - RNA, 19 nt, Artificial Sequence
  Description of Artificial Sequence: Synthetic oligonucleotide
  Sense strand starting at position 237 of SEQ ID NO: 1561546
ucugaaccuuucgauuauu

SEQ ID NO: 1680008 - RNA, 19 nt, Artificial Sequence
  Description of Artificial Sequence: Synthetic oligonucleotide
  Antisense strand to SEQ ID NO: 1680007
aauaaucgaaagguucaga

SEQ ID NO: 1680009 - RNA, 19 nt, Artificial Sequence
  Description of Artificial Sequence: Synthetic oligonucleotide
  Sense strand starting at position 246 of SEQ ID NO: 1561546
uucgauuauuucggaguga

SEQ ID NO: 1680010 - RNA, 19 nt, Artificial Sequence
  Description of Artificial Sequence: Synthetic oligonucleotide
  Antisense strand to SEQ ID NO: 1680009
ucacuccgaaauaaucgaa

SEQ ID NO: 1680011 - RNA, 19 nt, Artificial Sequence
  Description of Artificial Sequence: Synthetic oligonucleotide
  Sense strand starting at position 247 of SEQ ID NO: 1561546
ucgauuauuucggagugac

SEQ ID NO: 1680012 - RNA, 19 nt, Artificial Sequence
  Description of Artificial Sequence: Synthetic oligonucleotide
  Antisense strand to SEQ ID NO: 1680011
gucacuccgaaauaaucga

SEQ ID NO: 1680013 - RNA, 19 nt, Artificial Sequence
  Description of Artificial Sequence: Synthetic oligonucleotide
  Sense strand starting at position 314 of SEQ ID NO: 1561546
ucauuugucuccucaugua

SEQ ID NO: 1680014 - RNA, 19 nt, Artificial Sequence
  Description of Artificial Sequence: Synthetic oligonucleotide
  Antisense strand to SEQ ID NO: 1680013
uacaugaggagacaaauga

SEQ ID NO: 1680015 - RNA, 19 nt, Artificial Sequence
  Description of Artificial Sequence: Synthetic oligonucleotide
  Sense strand starting at position 649 of SEQ ID NO: 1561546
aggagauucugucucaaac

SEQ ID NO: 1680016 - RNA, 19 nt, Artificial Sequence
  Description of Artificial Sequence: Synthetic oligonucleotide
  Antisense strand to SEQ ID NO: 1680015
guuugagacagaaucuccu

SEQ ID NO: 1680017 - RNA, 19 nt, Artificial Sequence
  Description of Artificial Sequence: Synthetic oligonucleotide
  Sense strand starting at position 941 of SEQ ID NO: 1561546
uaagucaugccuuggaauu

SEQ ID NO: 1680018 - RNA, 19 nt, Artificial Sequence
  Description of Artificial Sequence: Synthetic oligonucleotide
  Antisense strand to SEQ ID NO: 1680017
aauuccaaggcaugacuua

SEQ ID NO: 1680019 - RNA, 19 nt, Artificial Sequence
  Description of Artificial Sequence: Synthetic oligonucleotide
  Sense strand starting at position 942 of SEQ ID NO: 1561546
aagucaugccuuggaauuc

SEQ ID NO: 1680020 - RNA, 19 nt, Artificial Sequence
  Description of Artificial Sequence: Synthetic oligonucleotide
  Antisense strand to SEQ ID NO: 1680019
gaauuccaaggcaugacuu

SEQ ID NO: 1680021 - RNA, 19 nt, Artificial Sequence
  Description of Artificial Sequence: Synthetic oligonucleotide
  Sense strand starting at position 1281 of SEQ ID NO: 1561546
gguuguguuucccuugcca

SEQ ID NO: 1680022 - RNA, 19 nt, Artificial Sequence
  Description of Artificial Sequence: Synthetic oligonucleotide
  Antisense strand to SEQ ID NO: 1680021
uggcaagggaaacacaacc

SEQ ID NO: 1680023 - RNA, 19 nt, Artificial Sequence
  Description of Artificial Sequence: Synthetic oligonucleotide
  Sense strand starting at position 1283 of SEQ ID NO: 1561546
uuguguuucccuugccaag

SEQ ID NO: 1680024 - RNA, 19 nt, Artificial Sequence
  Description of Artificial Sequence: Synthetic oligonucleotide
  Antisense strand to SEQ ID NO: 1680023
cuuggcaagggaaacacaa

SEQ ID NO: 1680025 - RNA, 19 nt, Artificial Sequence
  Description of Artificial Sequence: Synthetic oligonucleotide
  Sense strand starting at position 1305 of SEQ ID NO: 1561546
ucuccuauuuggcuacgaa

SEQ ID NO: 1680026 - RNA, 19 nt, Artificial Sequence
  Description of Artificial Sequence: Synthetic oligonucleotide
  Antisense strand to SEQ ID NO: 1680025
uucguagccaaauaggaga

SEQ ID NO: 1680027 - RNA, 19 nt, Artificial Sequence
  Description of Artificial Sequence: Synthetic oligonucleotide
  Sense strand starting at position 1309 of SEQ ID NO: 1561546
cuauuuggcuacgaauaaa

SEQ ID NO: 1680028 - RNA, 19 nt, Artificial Sequence
  Description of Artificial Sequence: Synthetic oligonucleotide
  Antisense strand to SEQ ID NO: 1680027
uuuauucguagccaaauag

SEQ ID NO: 1680029 - RNA, 19 nt, Artificial Sequence
  Description of Artificial Sequence: Synthetic oligonucleotide
  Sense strand starting at position 1381 of SEQ ID NO: 1561546
ggugguucucauuacugaa

SEQ ID NO: 1680030 - RNA, 19 nt, Artificial Sequence
  Description of Artificial Sequence: Synthetic oligonucleotide
  Antisense strand to SEQ ID NO: 1680029
uucaguaaugagaaccacc

SEQ ID NO: 1680031 - RNA, 19 nt, Artificial Sequence
  Description of Artificial Sequence: Synthetic oligonucleotide
  Sense strand starting at position 1383 of SEQ ID NO: 1561546
ugguucucauuacugaauu

SEQ ID NO: 1680032 - RNA, 19 nt, Artificial Sequence
  Description of Artificial Sequence: Synthetic oligonucleotide
  Antisense strand to SEQ ID NO: 1680031
aauucaguaaugagaacca

SEQ ID NO: 1680033 - RNA, 19 nt, Artificial Sequence
  Description of Artificial Sequence: Synthetic oligonucleotide
  Sense strand starting at position 1384 of SEQ ID NO: 1561546
gguucucauuacugaauug

SEQ ID NO: 1680034 - RNA, 19 nt, Artificial Sequence
  Description of Artificial Sequence: Synthetic oligonucleotide
  Antisense strand to SEQ ID NO: 1680033
caauucaguaaugagaacc

SEQ ID NO: 1680035 - RNA, 19 nt, Artificial Sequence
  Description of Artificial Sequence: Synthetic oligonucleotide
  Sense strand starting at position 1395 of SEQ ID NO: 1561546
cugaauugcuguuugcuca

SEQ ID NO: 1680036 - RNA, 19 nt, Artificial Sequence
  Description of Artificial Sequence: Synthetic oligonucleotide
  Antisense strand to SEQ ID NO: 1680035
ugagcaaacagcaauucag

SEQ ID NO: 1680037 - RNA, 19 nt, Artificial Sequence
  Description of Artificial Sequence: Synthetic oligonucleotide
  Sense strand starting at position 2025 of SEQ ID NO: 1561546
ccacucugugccuggauaa

SEQ ID NO: 1680038 - RNA, 19 nt, Artificial Sequence
  Description of Artificial Sequence: Synthetic oligonucleotide
  Antisense strand to SEQ ID NO: 1680037
uuauccaggcacagagugg

SEQ ID NO: 1680039 - RNA, 19 nt, Artificial Sequence
  Description of Artificial Sequence: Synthetic oligonucleotide
  Sense strand starting at position 2026 of SEQ ID NO: 1561546
cacucugugccuggauaaa

SEQ ID NO: 1680040 - RNA, 19 nt, Artificial Sequence
  Description of Artificial Sequence: Synthetic oligonucleotide
  Antisense strand to SEQ ID NO: 1680039
uuuauccaggcacagagug

SEQ ID NO: 1680041 - RNA, 19 nt, Artificial Sequence
  Description of Artificial Sequence: Synthetic oligonucleotide
  Sense strand starting at position 2153 of SEQ ID NO: 1561546
gacugacuugacggauucu

SEQ ID NO: 1680042 - RNA, 19 nt, Artificial Sequence
  Description of Artificial Sequence: Synthetic oligonucleotide
  Antisense strand to SEQ ID NO: 1680041
agaauccgucaagucaguc

SEQ ID NO: 1680043 - RNA, 19 nt, Artificial Sequence
  Description of Artificial Sequence: Synthetic oligonucleotide
  Sense strand starting at position 2189 of SEQ ID NO: 1561546
gggcgaggugcuuccugua

SEQ ID NO: 1680044 - RNA, 19 nt, Artificial Sequence
  Description of Artificial Sequence: Synthetic oligonucleotide
  Antisense strand to SEQ ID NO: 1680043
uacaggaagcaccucgccc

SEQ ID NO: 1680045 - RNA, 19 nt, Artificial Sequence
  Description of Artificial Sequence: Synthetic oligonucleotide
  Sense strand starting at position 2199 of SEQ ID NO: 1561546
cuuccuguacucugauuau

SEQ ID NO: 1680046 - RNA, 19 nt, Artificial Sequence
  Description of Artificial Sequence: Synthetic oligonucleotide
  Antisense strand to SEQ ID NO: 1680045
auaaucagaguacaggaag

SEQ ID NO: 1680047 - RNA, 19 nt, Artificial Sequence
  Description of Artificial Sequence: Synthetic oligonucleotide
  Sense strand starting at position 2203 of SEQ ID NO: 1561546
cuguacucugauuauugga

SEQ ID NO: 1680048 - RNA, 19 nt, Artificial Sequence
  Description of Artificial Sequence: Synthetic oligonucleotide
  Antisense strand to SEQ ID NO: 1680047
uccaauaaucagaguacag

SEQ ID NO: 1680049 - RNA, 19 nt, Artificial Sequence
  Description of Artificial Sequence: Synthetic oligonucleotide
  Sense strand starting at position 2205 of SEQ ID NO: 1561546
guacucugauuauuggaua

SEQ ID NO: 1680050 - RNA, 19 nt, Artificial Sequence
  Description of Artificial Sequence: Synthetic oligonucleotide
  Antisense strand to SEQ ID NO: 1680049
uauccaauaaucagaguac

SEQ ID NO: 1680051 - RNA, 19 nt, Artificial Sequence
  Description of Artificial Sequence: Synthetic oligonucleotide
  Sense strand starting at position 2208 of SEQ ID NO: 1561546
cucugauuauuggauauuu

SEQ ID NO: 1680052 - RNA, 19 nt, Artificial Sequence
  Description of Artificial Sequence: Synthetic oligonucleotide
  Antisense strand to SEQ ID NO: 1680051
aaauauccaauaaucagag

SEQ ID NO: 1680053 - RNA, 19 nt, Artificial Sequence
  Description of Artificial Sequence: Synthetic oligonucleotide
  Sense strand starting at position 2236 of SEQ ID NO: 1561546
ccagacuugcuacagauau

SEQ ID NO: 1680054 - RNA, 19 nt, Artificial Sequence
  Description of Artificial Sequence: Synthetic oligonucleotide
  Antisense strand to SEQ ID NO: 1680053
auaucuguagcaagucugg

SEQ ID NO: 1680055 - RNA, 19 nt, Artificial Sequence
  Description of Artificial Sequence: Synthetic oligonucleotide
  Sense strand starting at position 2639 of SEQ ID NO: 1561546
uucugucucuagccugaua

SEQ ID NO: 1680056 - RNA, 19 nt, Artificial Sequence
  Description of Artificial Sequence: Synthetic oligonucleotide
  Antisense strand to SEQ ID NO: 1680055
uaucaggcuagagacagaa

SEQ ID NO: 1680057 - RNA, 19 nt, Artificial Sequence
  Description of Artificial Sequence: Synthetic oligonucleotide
  Sense strand starting at position 2641 of SEQ ID NO: 1561546
cugucucuagccugauauu

SEQ ID NO: 1680058 - RNA, 19 nt, Artificial Sequence
  Description of Artificial Sequence: Synthetic oligonucleotide
  Antisense strand to SEQ ID NO: 1680057
aauaucaggcuagagacag

SEQ ID NO: 1680059 - RNA, 19 nt, Artificial Sequence
  Description of Artificial Sequence: Synthetic oligonucleotide
  Sense strand starting at position 2916 of SEQ ID NO: 1561546
gggaaucucucuuucucuu

SEQ ID NO: 1680060 - RNA, 19 nt, Artificial Sequence
  Description of Artificial Sequence: Synthetic oligonucleotide
  Antisense strand to SEQ ID NO: 1680059
aagagaaagagagauuccc

SEQ ID NO: 1680061 - RNA, 19 nt, Artificial Sequence
  Description of Artificial Sequence: Synthetic oligonucleotide
  Sense strand starting at position 3243 of SEQ ID NO: 1561546
gggagcuacucugggaacu

SEQ ID NO: 1680062 - RNA, 19 nt, Artificial Sequence
  Description of Artificial Sequence: Synthetic oligonucleotide
  Antisense strand to SEQ ID NO: 1680061
aguucccagaguagcuccc

SEQ ID NO: 1680063 - RNA, 19 nt, Artificial Sequence
  Description of Artificial Sequence: Synthetic oligonucleotide
  Sense strand starting at position 3586 of SEQ ID NO: 1561546
agaguaucacugugaggga

SEQ ID NO: 1680064 - RNA, 19 nt, Artificial Sequence
  Description of Artificial Sequence: Synthetic oligonucleotide
  Antisense strand to SEQ ID NO: 1680063
ucccucacagugauacucu

SEQ ID NO: 1680065 - RNA, 19 nt, Artificial Sequence
  Description of Artificial Sequence: Synthetic oligonucleotide
  Sense strand starting at position 3587 of SEQ ID NO: 1561546
gaguaucacugugagggaa

SEQ ID NO: 1680066 - RNA, 19 nt, Artificial Sequence
  Description of Artificial Sequence: Synthetic oligonucleotide
  Antisense strand to SEQ ID NO: 1680065
uucccucacagugauacuc

SEQ ID NO: 1680067 - RNA, 19 nt, Artificial Sequence
  Description of Artificial Sequence: Synthetic oligonucleotide
  Sense strand starting at position 3602 of SEQ ID NO: 1561546
ggaauaaacugcugcauaa

SEQ ID NO: 1680068 - RNA, 19 nt, Artificial Sequence
  Description of Artificial Sequence: Synthetic oligonucleotide
  Antisense strand to SEQ ID NO: 1680067
uuaugcagcaguuuauucc

SEQ ID NO: 1680069 - RNA, 19 nt, Artificial Sequence
  Description of Artificial Sequence: Synthetic oligonucleotide
  Sense strand starting at position 3612 of SEQ ID NO: 1561546
gcugcauaacucugagaga

SEQ ID NO: 1680070 - RNA, 19 nt, Artificial Sequence
  Description of Artificial Sequence: Synthetic oligonucleotide
  Antisense strand to SEQ ID NO: 1680069
ucucucagaguuaugcagc

SEQ ID NO: 1680071 - RNA, 19 nt, Artificial Sequence
  Description of Artificial Sequence: Synthetic oligonucleotide
  Sense strand starting at position 3613 of SEQ ID NO: 1561546
cugcauaacucugagagau

SEQ ID NO: 1680072 - RNA, 19 nt, Artificial Sequence
  Description of Artificial Sequence: Synthetic oligonucleotide
  Antisense strand to SEQ ID NO: 1680071
aucucucagaguuaugcag

SEQ ID NO: 1680073 - RNA, 19 nt, Artificial Sequence
  Description of Artificial Sequence: Synthetic oligonucleotide
  Sense strand starting at position 3615 of SEQ ID NO: 1561546
gcauaacucugagagauug

SEQ ID NO: 1680074 - RNA, 19 nt, Artificial Sequence
  Description of Artificial Sequence: Synthetic oligonucleotide
  Antisense strand to SEQ ID NO: 1680073
caaucucucagaguuaugc

SEQ ID NO: 1680075 - RNA, 19 nt, Artificial Sequence
  Description of Artificial Sequence: Synthetic oligonucleotide
  Sense strand starting at position 3740 of SEQ ID NO: 1561546
ggagaucacccugagcagu

SEQ ID NO: 1680076 - RNA, 19 nt, Artificial Sequence
  Description of Artificial Sequence: Synthetic oligonucleotide
  Antisense strand to SEQ ID NO: 1680075
acugcucagggugaucucc

SEQ ID NO: 1680077 - RNA, 19 nt, Artificial Sequence
  Description of Artificial Sequence: Synthetic oligonucleotide
  Sense strand starting at position 3778 of SEQ ID NO: 1561546
uccauacaucuuuguuuag

SEQ ID NO: 1680078 - RNA, 19 nt, Artificial Sequence
  Description of Artificial Sequence: Synthetic oligonucleotide
  Antisense strand to SEQ ID NO: 1680077
cuaaacaaagauguaugga

SEQ ID NO: 1680079 - RNA, 19 nt, Artificial Sequence
  Description of Artificial Sequence: Synthetic oligonucleotide
  Sense strand starting at position 3793 of SEQ ID NO: 1561546
uuagaauuagccuggagag

SEQ ID NO: 1680080 - RNA, 19 nt, Artificial Sequence
  Description of Artificial Sequence: Synthetic oligonucleotide
  Antisense strand to SEQ ID NO: 1680079
cucuccaggcuaauucuaa

SEQ ID NO: 1680081 - RNA, 19 nt, Artificial Sequence
  Description of Artificial Sequence: Synthetic oligonucleotide
  Sense strand starting at position 3808 of SEQ ID NO: 1561546
agaggugguguguaccuau

SEQ ID NO: 1680082 - RNA, 19 nt, Artificial Sequence
  Description of Artificial Sequence: Synthetic oligonucleotide
  Antisense strand to SEQ ID NO: 1680081
auagguacacaccaccucu

SEQ ID NO: 1680083 - RNA, 19 nt, Artificial Sequence
  Description of Artificial Sequence: Synthetic oligonucleotide
  Sense strand starting at position 3861 of SEQ ID NO: 1561546
ucacuugagccucaaaguu

SEQ ID NO: 1680084 - RNA, 19 nt, Artificial Sequence
  Description of Artificial Sequence: Synthetic oligonucleotide
  Antisense strand to SEQ ID NO: 1680083
aacuuugaggcucaaguga

SEQ ID NO: 1680085 - RNA, 19 nt, Artificial Sequence
  Description of Artificial Sequence: Synthetic oligonucleotide
  Sense strand starting at position 193 of SEQ ID NO: 1561547
aagcaauugugacuaggca

SEQ ID NO: 1680086 - RNA, 19 nt, Artificial Sequence
  Description of Artificial Sequence: Synthetic oligonucleotide
  Antisense strand to SEQ ID NO: 1680085
ugccuagucacaauugcuu

SEQ ID NO: 1680087 - RNA, 19 nt, Artificial Sequence
  Description of Artificial Sequence: Synthetic oligonucleotide
  Sense strand starting at position 715 of SEQ ID NO: 1561547
ccacucugucuuuguugaa

SEQ ID NO: 1680088 - RNA, 19 nt, Artificial Sequence
  Description of Artificial Sequence: Synthetic oligonucleotide
  Antisense strand to SEQ ID NO: 1680087
uucaacaaagacagagugg

SEQ ID NO: 1680089 - RNA, 19 nt, Artificial Sequence
  Description of Artificial Sequence: Synthetic oligonucleotide
  Sense strand starting at position 718 of SEQ ID NO: 1561547
cucugucuuuguugaaaug

SEQ ID NO: 1680090 - RNA, 19 nt, Artificial Sequence
  Description of Artificial Sequence: Synthetic oligonucleotide
  Antisense strand to SEQ ID NO: 1680089
cauuucaacaaagacagag

SEQ ID NO: 1680091 - RNA, 19 nt, Artificial Sequence
  Description of Artificial Sequence: Synthetic oligonucleotide
  Sense strand starting at position 767 of SEQ ID NO: 1561547
cggugcguaccuuaaauaa

SEQ ID NO: 1680092 - RNA, 19 nt, Artificial Sequence
  Description of Artificial Sequence: Synthetic oligonucleotide
  Antisense strand to SEQ ID NO: 1680091
uuauuuaagguacgcaccg

SEQ ID NO: 1680093 - RNA, 19 nt, Artificial Sequence
  Description of Artificial Sequence: Synthetic oligonucleotide
  Sense strand starting at position 789 of SEQ ID NO: 1561547
ucguucugucucccgcaua

SEQ ID NO: 1680094 - RNA, 19 nt, Artificial Sequence
  Description of Artificial Sequence: Synthetic oligonucleotide
  Antisense strand to SEQ ID NO: 1680093
uaugcgggagacagaacga

SEQ ID NO: 1680095 - RNA, 19 nt, Artificial Sequence
  Description of Artificial Sequence: Synthetic oligonucleotide
  Sense strand starting at position 1154 of SEQ ID NO: 1561547
auuugcugugucuggcaaa

SEQ ID NO: 1680096 - RNA, 19 nt, Artificial Sequence
  Description of Artificial Sequence: Synthetic oligonucleotide
  Antisense strand to SEQ ID NO: 1680095
uuugccagacacagcaaau

SEQ ID NO: 1680097 - RNA, 19 nt, Artificial Sequence
  Description of Artificial Sequence: Synthetic oligonucleotide
  Sense strand starting at position 1155 of SEQ ID NO: 1561547
uuugcugugucuggcaaau

SEQ ID NO: 1680098 - RNA, 19 nt, Artificial Sequence
  Description of Artificial Sequence: Synthetic oligonucleotide
  Antisense strand to SEQ ID NO: 1680097
auuugccagacacagcaaa

SEQ ID NO: 1680099 - RNA, 19 nt, Artificial Sequence
  Description of Artificial Sequence: Synthetic oligonucleotide
  Sense strand starting at position 1714 of SEQ ID NO: 1561547
cgugauagaaaguguauac

SEQ ID NO: 1680100 - RNA, 19 nt, Artificial Sequence
  Description of Artificial Sequence: Synthetic oligonucleotide
  Antisense strand to SEQ ID NO: 1680099
guauacacuuucuaucacg

SEQ ID NO: 1680101 - RNA, 19 nt, Artificial Sequence
  Description of Artificial Sequence: Synthetic oligonucleotide
  Sense strand starting at position 1829 of SEQ ID NO: 1561547
acuugcucugggugaagga

SEQ ID NO: 1680102 - RNA, 19 nt, Artificial Sequence
  Description of Artificial Sequence: Synthetic oligonucleotide
  Antisense strand to SEQ ID NO: 1680101
uccuucacccagagcaagu

SEQ ID NO: 1680103 - RNA, 19 nt, Artificial Sequence
  Description of Artificial Sequence: Synthetic oligonucleotide
  Sense strand starting at position 2085 of SEQ ID NO: 1561547
gagagacuuuacccuuuag

SEQ ID NO: 1680104 - RNA, 19 nt, Artificial Sequence
  Description of Artificial Sequence: Synthetic oligonucleotide
  Antisense strand to SEQ ID NO: 1680103
cuaaaggguaaagucucuc

SEQ ID NO: 1680105 - RNA, 19 nt, Artificial Sequence
  Description of Artificial Sequence: Synthetic oligonucleotide
  Sense strand starting at position 2454 of SEQ ID NO: 1561547
gucaccaccuucuggauaa

SEQ ID NO: 1680106 - RNA, 19 nt, Artificial Sequence
  Description of Artificial Sequence: Synthetic oligonucleotide
  Antisense strand to SEQ ID NO: 1680105
uuauccagaagguggugac

SEQ ID NO: 1680107 - RNA, 19 nt, Artificial Sequence
  Description of Artificial Sequence: Synthetic oligonucleotide
  Sense strand starting at position 2657 of SEQ ID NO: 1561547
auaagaguuugauugugug

SEQ ID NO: 1680108 - RNA, 19 nt, Artificial Sequence
  Description of Artificial Sequence: Synthetic oligonucleotide
  Antisense strand to SEQ ID NO: 1680107
cacacaaucaaacucuuau

SEQ ID NO: 1680109 - RNA, 19 nt, Artificial Sequence
  Description of Artificial Sequence: Synthetic oligonucleotide
  Sense strand starting at position 2660 of SEQ ID NO: 1561547
agaguuugauugugugaga

SEQ ID NO: 1680110 - RNA, 19 nt, Artificial Sequence
  Description of Artificial Sequence: Synthetic oligonucleotide
  Antisense strand to SEQ ID NO: 1680109
ucucacacaaucaaacucu

SEQ ID NO: 1680111 - RNA, 19 nt, Artificial Sequence
  Description of Artificial Sequence: Synthetic oligonucleotide
  Sense strand starting at position 2661 of SEQ ID NO: 1561547
gaguuugauugugugagau

SEQ ID NO: 1680112 - RNA, 19 nt, Artificial Sequence
  Description of Artificial Sequence: Synthetic oligonucleotide
  Antisense strand to SEQ ID NO: 1680111
aucucacacaaucaaacuc

SEQ ID NO: 1680113 - RNA, 19 nt, Artificial Sequence
  Description of Artificial Sequence: Synthetic oligonucleotide
  Sense strand starting at position 2663 of SEQ ID NO: 1561547
guuugauugugugagauag

SEQ ID NO: 1680114 - RNA, 19 nt, Artificial Sequence
  Description of Artificial Sequence: Synthetic oligonucleotide
  Antisense strand to SEQ ID NO: 1680113
cuaucucacacaaucaaac

SEQ ID NO: 1680115 - RNA, 19 nt, Artificial Sequence
  Description of Artificial Sequence: Synthetic oligonucleotide
  Sense strand starting at position 2718 of SEQ ID NO: 1561547
uuaguugccucagcacauu

SEQ ID NO: 1680116 - RNA, 19 nt, Artificial Sequence
  Description of Artificial Sequence: Synthetic oligonucleotide
  Antisense strand to SEQ ID NO: 1680115
aaugugcugaggcaacuaa

SEQ ID NO: 1680117 - RNA, 19 nt, Artificial Sequence
  Description of Artificial Sequence: Synthetic oligonucleotide
  Sense strand starting at position 2886 of SEQ ID NO: 1561547
ccuccagaguaucugcaau

SEQ ID NO: 1680118 - RNA, 19 nt, Artificial Sequence
  Description of Artificial Sequence: Synthetic oligonucleotide
  Antisense strand to SEQ ID NO: 1680117
auugcagauacucuggagg

SEQ ID NO: 1680119 - RNA, 19 nt, Artificial Sequence
  Description of Artificial Sequence: Synthetic oligonucleotide
  Sense strand starting at position 2888 of SEQ ID NO: 1561547
uccagaguaucugcaauua

SEQ ID NO: 1680120 - RNA, 19 nt, Artificial Sequence
  Description of Artificial Sequence: Synthetic oligonucleotide
  Antisense strand to SEQ ID NO: 1680119
uaauugcagauacucugga

SEQ ID NO: 1680121 - RNA, 19 nt, Artificial Sequence
  Description of Artificial Sequence: Synthetic oligonucleotide
  Sense strand starting at position 3145 of SEQ ID NO: 1561547
acaucuccaugacgauaau

SEQ ID NO: 1680122 - RNA, 19 nt, Artificial Sequence
  Description of Artificial Sequence: Synthetic oligonucleotide
  Antisense strand to SEQ ID NO: 1680121
auuaucgucauggagaugu

SEQ ID NO: 1680123 - RNA, 19 nt, Artificial Sequence
  Description of Artificial Sequence: Synthetic oligonucleotide
  Sense strand starting at position 3151 of SEQ ID NO: 1561547
ccaugacgauaauagagaa

SEQ ID NO: 1680124 - RNA, 19 nt, Artificial Sequence
  Description of Artificial Sequence: Synthetic oligonucleotide
  Antisense strand to SEQ ID NO: 1680123
uucucuauuaucgucaugg

SEQ ID NO: 1680125 - RNA, 19 nt, Artificial Sequence
  Description of Artificial Sequence: Synthetic oligonucleotide
  Sense strand starting at position 3370 of SEQ ID NO: 1561547
ccuggcucuaguugguaau

SEQ ID NO: 1680126 - RNA, 19 nt, Artificial Sequence
  Description of Artificial Sequence: Synthetic oligonucleotide
  Antisense strand to SEQ ID NO: 1680125
auuaccaacuagagccagg

SEQ ID NO: 1680127 - RNA, 19 nt, Artificial Sequence
  Description of Artificial Sequence: Synthetic oligonucleotide
  Sense strand starting at position 3373 of SEQ ID NO: 1561547
ggcucuaguugguaaugga

SEQ ID NO: 1680128 - RNA, 19 nt, Artificial Sequence
  Description of Artificial Sequence: Synthetic oligonucleotide
  Antisense strand to SEQ ID NO: 1680127
uccauuaccaacuagagcc

SEQ ID NO: 1680129 - RNA, 19 nt, Artificial Sequence
  Description of Artificial Sequence: Synthetic oligonucleotide
  Sense strand starting at position 3749 of SEQ ID NO: 1561547
caaguugauuggugacgga

SEQ ID NO: 1680130 - RNA, 19 nt, Artificial Sequence
  Description of Artificial Sequence: Synthetic oligonucleotide
  Antisense strand to SEQ ID NO: 1680129
uccgucaccaaucaacuug

SEQ ID NO: 1680131 - RNA, 19 nt, Artificial Sequence
  Description of Artificial Sequence: Synthetic oligonucleotide
  Sense strand starting at position 3779 of SEQ ID NO: 1561547
caaggaagguuauguuauc

SEQ ID NO: 1680132 - RNA, 19 nt, Artificial Sequence
  Description of Artificial Sequence: Synthetic oligonucleotide
  Antisense strand to SEQ ID NO: 1680131
gauaacauaaccuuccuug

SEQ ID NO: 1680133 - RNA, 19 nt, Artificial Sequence
  Description of Artificial Sequence: Synthetic oligonucleotide
  Sense strand starting at position 3780 of SEQ ID NO: 1561547
aaggaagguuauguuauca

SEQ ID NO: 1680134 - RNA, 19 nt, Artificial Sequence
  Description of Artificial Sequence: Synthetic oligonucleotide
  Antisense strand to SEQ ID NO: 1680133
ugauaacauaaccuuccuu

SEQ ID NO: 1680135 - RNA, 19 nt, Artificial Sequence
  Description of Artificial Sequence: Synthetic oligonucleotide
  Sense strand starting at position 3785 of SEQ ID NO: 1561547
agguuauguuaucacucca

SEQ ID NO: 1680136 - RNA, 19 nt, Artificial Sequence
  Description of Artificial Sequence: Synthetic oligonucleotide
  Antisense strand to SEQ ID NO: 1680135
uggagugauaacauaaccu

SEQ ID NO: 1680137 - RNA, 19 nt, Artificial Sequence
  Description of Artificial Sequence: Synthetic oligonucleotide
  Sense strand starting at position 3843 of SEQ ID NO: 1561547
gcugcuuagucuuccuagu

SEQ ID NO: 1680138 - RNA, 19 nt, Artificial Sequence
  Description of Artificial Sequence: Synthetic oligonucleotide
  Antisense strand to SEQ ID NO: 1680137
acuaggaagacuaagcagc

SEQ ID NO: 1680139 - RNA, 19 nt, Artificial Sequence
  Description of Artificial Sequence: Synthetic oligonucleotide
  Sense strand starting at position 3845 of SEQ ID NO: 1561547
ugcuuagucuuccuaguua

SEQ ID NO: 1680140 - RNA, 19 nt, Artificial Sequence
  Description of Artificial Sequence: Synthetic oligonucleotide
  Antisense strand to SEQ ID NO: 1680139
uaacuaggaagacuaagca

SEQ ID NO: 1680141 - RNA, 19 nt, Artificial Sequence
  Description of Artificial Sequence: Synthetic oligonucleotide
  Sense strand starting at position 3856 of SEQ ID NO: 1561547
ccuaguuauuuacaggaga

SEQ ID NO: 1680142 - RNA, 19 nt, Artificial Sequence
  Description of Artificial Sequence: Synthetic oligonucleotide
  Antisense strand to SEQ ID NO: 1680141
ucuccuguaaauaacuagg

SEQ ID NO: 1680143 - RNA, 19 nt, Artificial Sequence
  Description of Artificial Sequence: Synthetic oligonucleotide
  Sense strand starting at position 83 of SEQ ID NO: 1561548
aguuacuacugaguagaga

SEQ ID NO: 1680144 - RNA, 19 nt, Artificial Sequence
  Description of Artificial Sequence: Synthetic oligonucleotide
  Antisense strand to SEQ ID NO: 1680143
ucucuacucaguaguaacu

SEQ ID NO: 1680145 - RNA, 19 nt, Artificial Sequence
  Description of Artificial Sequence: Synthetic oligonucleotide
  Sense strand starting at position 145 of SEQ ID NO: 1561548
ucccuuuacugguugagau

SEQ ID NO: 1680146 - RNA, 19 nt, Artificial Sequence
  Description of Artificial Sequence: Synthetic oligonucleotide
  Antisense strand to SEQ ID NO: 1680145
aucucaaccaguaaaggga

SEQ ID NO: 1680147 - RNA, 19 nt, Artificial Sequence
  Description of Artificial Sequence: Synthetic oligonucleotide
  Sense strand starting at position 146 of SEQ ID NO: 1561548
cccuuuacugguugagaug

SEQ ID NO: 1680148 - RNA, 19 nt, Artificial Sequence
  Description of Artificial Sequence: Synthetic oligonucleotide
  Antisense strand to SEQ ID NO: 1680147
caucucaaccaguaaaggg

SEQ ID NO: 1680149 - RNA, 19 nt, Artificial Sequence
  Description of Artificial Sequence: Synthetic oligonucleotide
  Sense strand starting at position 192 of SEQ ID NO: 1561548
ugaccaguucucuggcaca

SEQ ID NO: 1680150 - RNA, 19 nt, Artificial Sequence
  Description of Artificial Sequence: Synthetic oligonucleotide
  Antisense strand to SEQ ID NO: 1680149
ugugccagagaacugguca

SEQ ID NO: 1680151 - RNA, 19 nt, Artificial Sequence
  Description of Artificial Sequence: Synthetic oligonucleotide
  Sense strand starting at position 247 of SEQ ID NO: 1561548
gauaguaucuaccuggaga

SEQ ID NO: 1680152 - RNA, 19 nt, Artificial Sequence
  Description of Artificial Sequence: Synthetic oligonucleotide
  Antisense strand to SEQ ID NO: 1680151
ucuccagguagauacuauc

SEQ ID NO: 1680153 - RNA, 19 nt, Artificial Sequence
  Description of Artificial Sequence: Synthetic oligonucleotide
  Sense strand starting at position 249 of SEQ ID NO: 1561548
uaguaucuaccuggagaua

SEQ ID NO: 1680154 - RNA, 19 nt, Artificial Sequence
  Description of Artificial Sequence: Synthetic oligonucleotide
  Antisense strand to SEQ ID NO: 1680153
uaucuccagguagauacua

SEQ ID NO: 1680155 - RNA, 19 nt, Artificial Sequence
  Description of Artificial Sequence: Synthetic oligonucleotide
  Sense strand starting at position 267 of SEQ ID NO: 1561548
agaaucagaucccaguuaa

SEQ ID NO: 1680156 - RNA, 19 nt, Artificial Sequence
  Description of Artificial Sequence: Synthetic oligonucleotide
  Antisense strand to SEQ ID NO: 1680155
uuaacugggaucugauucu

SEQ ID NO: 1680157 - RNA, 19 nt, Artificial Sequence
  Description of Artificial Sequence: Synthetic oligonucleotide
  Sense strand starting at position 384 of SEQ ID NO: 1561548
ccaccuguauccuuuguaa

SEQ ID NO: 1680158 - RNA, 19 nt, Artificial Sequence
  Description of Artificial Sequence: Synthetic oligonucleotide
  Antisense strand to SEQ ID NO: 1680157
uuacaaaggauacaggugg

SEQ ID NO: 1680159 - RNA, 19 nt, Artificial Sequence
  Description of Artificial Sequence: Synthetic oligonucleotide
  Sense strand starting at position 387 of SEQ ID NO: 1561548
ccuguauccuuuguaauaa

SEQ ID NO: 1680160 - RNA, 19 nt, Artificial Sequence
  Description of Artificial Sequence: Synthetic oligonucleotide
  Antisense strand to SEQ ID NO: 1680159
uuauuacaaaggauacagg

SEQ ID NO: 1680161 - RNA, 19 nt, Artificial Sequence
  Description of Artificial Sequence: Synthetic oligonucleotide
  Sense strand starting at position 441 of SEQ ID NO: 1561548
cucugaguucugggaacca

SEQ ID NO: 1680162 - RNA, 19 nt, Artificial Sequence
  Description of Artificial Sequence: Synthetic oligonucleotide
  Antisense strand to SEQ ID NO: 1680161
ugguucccagaacucagag

SEQ ID NO: 1680163 - RNA, 19 nt, Artificial Sequence
  Description of Artificial Sequence: Synthetic oligonucleotide
  Sense strand starting at position 1147 of SEQ ID NO: 1561548
ucucuacauuucucgaguu

SEQ ID NO: 1680164 - RNA, 19 nt, Artificial Sequence
  Description of Artificial Sequence: Synthetic oligonucleotide
  Antisense strand to SEQ ID NO: 1680163
aacucgagaaauguagaga

SEQ ID NO: 1680165 - RNA, 19 nt, Artificial Sequence
  Description of Artificial Sequence: Synthetic oligonucleotide
  Sense strand starting at position 1229 of SEQ ID NO: 1561548
cugcguugccgucuuguua

SEQ ID NO: 1680166 - RNA, 19 nt, Artificial Sequence
  Description of Artificial Sequence: Synthetic oligonucleotide
  Antisense strand to SEQ ID NO: 1680165
uaacaagacggcaacgcag

SEQ ID NO: 1680167 - RNA, 19 nt, Artificial Sequence
  Description of Artificial Sequence: Synthetic oligonucleotide
  Sense strand starting at position 1230 of SEQ ID NO: 1561548
ugcguugccgucuuguuau

SEQ ID NO: 1680168 - RNA, 19 nt, Artificial Sequence
  Description of Artificial Sequence: Synthetic oligonucleotide
  Antisense strand to SEQ ID NO: 1680167
auaacaagacggcaacgca

SEQ ID NO: 1680169 - RNA, 19 nt, Artificial Sequence
  Description of Artificial Sequence: Synthetic oligonucleotide
  Sense strand starting at position 1243 of SEQ ID NO: 1561548
uguuauggaucuuccucau

SEQ ID NO: 1680170 - RNA, 19 nt, Artificial Sequence
  Description of Artificial Sequence: Synthetic oligonucleotide
  Antisense strand to SEQ ID NO: 1680169
augaggaagauccauaaca

SEQ ID NO: 1680171 - RNA, 19 nt, Artificial Sequence
  Description of Artificial Sequence: Synthetic oligonucleotide
  Sense strand starting at position 1382 of SEQ ID NO: 1561548
ggaggaauuugggacggaa

SEQ ID NO: 1680172 - RNA, 19 nt, Artificial Sequence
  Description of Artificial Sequence: Synthetic oligonucleotide
  Antisense strand to SEQ ID NO: 1680171
uuccgucccaaauuccucc

SEQ ID NO: 1680173 - RNA, 19 nt, Artificial Sequence
  Description of Artificial Sequence: Synthetic oligonucleotide
  Sense strand starting at position 1901 of SEQ ID NO: 1561548
ccgcuaagcgaacacuuaa

SEQ ID NO: 1680174 - RNA, 19 nt, Artificial Sequence
  Description of Artificial Sequence: Synthetic oligonucleotide
  Antisense strand to SEQ ID NO: 1680173
uuaaguguucgcuuagcgg

SEQ ID NO: 1680175 - RNA, 19 nt, Artificial Sequence
  Description of Artificial Sequence: Synthetic oligonucleotide
  Sense strand starting at position 1908 of SEQ ID NO: 1561548
gcgaacacuuaaucuaaac

SEQ ID NO: 1680176 - RNA, 19 nt, Artificial Sequence
  Description of Artificial Sequence: Synthetic oligonucleotide
  Antisense strand to SEQ ID NO: 1680175
guuuagauuaaguguucgc

SEQ ID NO: 1680177 - RNA, 19 nt, Artificial Sequence
  Description of Artificial Sequence: Synthetic oligonucleotide
  Sense strand starting at position 2160 of SEQ ID NO: 1561548
cgguuugugaccugggauc

SEQ ID NO: 1680178 - RNA, 19 nt, Artificial Sequence
  Description of Artificial Sequence: Synthetic oligonucleotide
  Antisense strand to SEQ ID NO: 1680177
gaucccaggucacaaaccg

SEQ ID NO: 1680179 - RNA, 19 nt, Artificial Sequence
  Description of Artificial Sequence: Synthetic oligonucleotide
  Sense strand starting at position 2200 of SEQ ID NO: 1561548
guuguuuggauccaggaaa

SEQ ID NO: 1680180 - RNA, 19 nt, Artificial Sequence
  Description of Artificial Sequence: Synthetic oligonucleotide
  Antisense strand to SEQ ID NO: 1680179
uuuccuggauccaaacaac

SEQ ID NO: 1680181 - RNA, 19 nt, Artificial Sequence
  Description of Artificial Sequence: Synthetic oligonucleotide
  Sense strand starting at position 2211 of SEQ ID NO: 1561548
ccaggaaaguucccacaau

SEQ ID NO: 1680182 - RNA, 19 nt, Artificial Sequence
  Description of Artificial Sequence: Synthetic oligonucleotide
  Antisense strand to SEQ ID NO: 1680181
auugugggaacuuuccugg

SEQ ID NO: 1680183 - RNA, 19 nt, Artificial Sequence
  Description of Artificial Sequence: Synthetic oligonucleotide
  Sense strand starting at position 2274 of SEQ ID NO: 1561548
ucccuuaaauugucuguga

SEQ ID NO: 1680184 - RNA, 19 nt, Artificial Sequence
  Description of Artificial Sequence: Synthetic oligonucleotide
  Antisense strand to SEQ ID NO: 1680183
ucacagacaauuuaaggga

SEQ ID NO: 1680185 - RNA, 19 nt, Artificial Sequence
  Description of Artificial Sequence: Synthetic oligonucleotide
  Sense strand starting at position 2275 of SEQ ID NO: 1561548
cccuuaaauugucugugaa

SEQ ID NO: 1680186 - RNA, 19 nt, Artificial Sequence
  Description of Artificial Sequence: Synthetic oligonucleotide
  Antisense strand to SEQ ID NO: 1680185
uucacagacaauuuaaggg

SEQ ID NO: 1680187 - RNA, 19 nt, Artificial Sequence
  Description of Artificial Sequence: Synthetic oligonucleotide
  Sense strand starting at position 2276 of SEQ ID NO: 1561548
ccuuaaauugucugugaaa

SEQ ID NO: 1680188 - RNA, 19 nt, Artificial Sequence
  Description of Artificial Sequence: Synthetic oligonucleotide
  Antisense strand to SEQ ID NO: 1680187
uuucacagacaauuuaagg

SEQ ID NO: 1680189 - RNA, 19 nt, Artificial Sequence
  Description of Artificial Sequence: Synthetic oligonucleotide
  Sense strand starting at position 2277 of SEQ ID NO: 1561548
cuuaaauugucugugaaag

SEQ ID NO: 1680190 - RNA, 19 nt, Artificial Sequence
  Description of Artificial Sequence: Synthetic oligonucleotide
  Antisense strand to SEQ ID NO: 1680189
cuuucacagacaauuuaag

SEQ ID NO: 1680191 - RNA, 19 nt, Artificial Sequence
  Description of Artificial Sequence: Synthetic oligonucleotide
  Sense strand starting at position 2330 of SEQ ID NO: 1561548
cugugcagaauguguaauu

SEQ ID NO: 1680192 - RNA, 19 nt, Artificial Sequence
  Description of Artificial Sequence: Synthetic oligonucleotide
  Antisense strand to SEQ ID NO: 1680191
aauuacacauucugcacag

SEQ ID NO: 1680193 - RNA, 19 nt, Artificial Sequence
  Description of Artificial Sequence: Synthetic oligonucleotide
  Sense strand starting at position 2331 of SEQ ID NO: 1561548
ugugcagaauguguaauuu

SEQ ID NO: 1680194 - RNA, 19 nt, Artificial Sequence
  Description of Artificial Sequence: Synthetic oligonucleotide
  Antisense strand to SEQ ID NO: 1680193
aaauuacacauucugcaca

SEQ ID NO: 1680195 - RNA, 19 nt, Artificial Sequence
  Description of Artificial Sequence: Synthetic oligonucleotide
  Sense strand starting at position 2413 of SEQ ID NO: 1561548
aguagagaguuccaaagag

SEQ ID NO: 1680196 - RNA, 19 nt, Artificial Sequence
  Description of Artificial Sequence: Synthetic oligonucleotide
  Antisense strand to SEQ ID NO: 1680195
cucuuuggaacucucuacu

SEQ ID NO: 1680197 - RNA, 19 nt, Artificial Sequence
  Description of Artificial Sequence: Synthetic oligonucleotide
  Sense strand starting at position 2427 of SEQ ID NO: 1561548
aagaguuuccugggccaca

SEQ ID NO: 1680198 - RNA, 19 nt, Artificial Sequence
  Description of Artificial Sequence: Synthetic oligonucleotide
  Antisense strand to SEQ ID NO: 1680197
uguggcccaggaaacucuu

SEQ ID NO: 1680199 - RNA, 19 nt, Artificial Sequence
  Description of Artificial Sequence: Synthetic oligonucleotide
  Sense strand starting at position 2428 of SEQ ID NO: 1561548
agaguuuccugggccacau

SEQ ID NO: 1680200 - RNA, 19 nt, Artificial Sequence
  Description of Artificial Sequence: Synthetic oligonucleotide
  Antisense strand to SEQ ID NO: 1680199
auguggcccaggaaacucu

SEQ ID NO: 1680201 - RNA, 19 nt, Artificial Sequence
  Description of Artificial Sequence: Synthetic oligonucleotide
  Sense strand starting at position 2570 of SEQ ID NO: 1561548
gucguaucacuggagguca

SEQ ID NO: 1680202 - RNA, 19 nt, Artificial Sequence
  Description of Artificial Sequence: Synthetic oligonucleotide
  Antisense strand to SEQ ID NO: 1680201
ugaccuccagugauacgac

SEQ ID NO: 1680203 - RNA, 19 nt, Artificial Sequence
  Description of Artificial Sequence: Synthetic oligonucleotide
  Sense strand starting at position 2698 of SEQ ID NO: 1561548
ugaggcuuaggucaauauu

SEQ ID NO: 1680204 - RNA, 19 nt, Artificial Sequence
  Description of Artificial Sequence: Synthetic oligonucleotide
  Antisense strand to SEQ ID NO: 1680203
aauauugaccuaagccuca

SEQ ID NO: 1680205 - RNA, 19 nt, Artificial Sequence
  Description of Artificial Sequence: Synthetic oligonucleotide
  Sense strand starting at position 2905 of SEQ ID NO: 1561548
agaauaacucugcaguaau

SEQ ID NO: 1680206 - RNA, 19 nt, Artificial Sequence
  Description of Artificial Sequence: Synthetic oligonucleotide
  Antisense strand to SEQ ID NO: 1680205
auuacugcagaguuauucu

SEQ ID NO: 1680207 - RNA, 19 nt, Artificial Sequence
  Description of Artificial Sequence: Synthetic oligonucleotide
  Sense strand starting at position 2929 of SEQ ID NO: 1561548
guguauuugguaggccgau

SEQ ID NO: 1680208 - RNA, 19 nt, Artificial Sequence
  Description of Artificial Sequence: Synthetic oligonucleotide
  Antisense strand to SEQ ID NO: 1680207
aucggccuaccaaauacac

SEQ ID NO: 1680209 - RNA, 19 nt, Artificial Sequence
  Description of Artificial Sequence: Synthetic oligonucleotide
  Sense strand starting at position 2957 of SEQ ID NO: 1561548
auagaacccugauagaagu

SEQ ID NO: 1680210 - RNA, 19 nt, Artificial Sequence
  Description of Artificial Sequence: Synthetic oligonucleotide
  Antisense strand to SEQ ID NO: 1680209
acuucuaucaggguucuau

SEQ ID NO: 1680211 - RNA, 19 nt, Artificial Sequence
  Description of Artificial Sequence: Synthetic oligonucleotide
  Sense strand starting at position 2994 of SEQ ID NO: 1561548
uuuaaauagccuuacgucu

SEQ ID NO: 1680212 - RNA, 19 nt, Artificial Sequence
  Description of Artificial Sequence: Synthetic oligonucleotide
  Antisense strand to SEQ ID NO: 1680211
agacguaaggcuauuuaaa

SEQ ID NO: 1680213 - RNA, 19 nt, Artificial Sequence
  Description of Artificial Sequence: Synthetic oligonucleotide
  Sense strand starting at position 3005 of SEQ ID NO: 1561548
uuacgucugccggcaauaa

SEQ ID NO: 1680214 - RNA, 19 nt, Artificial Sequence
  Description of Artificial Sequence: Synthetic oligonucleotide
  Antisense strand to SEQ ID NO: 1680213
uuauugccggcagacguaa

SEQ ID NO: 1680215 - RNA, 19 nt, Artificial Sequence
  Description of Artificial Sequence: Synthetic oligonucleotide
  Sense strand starting at position 3006 of SEQ ID NO: 1561548
uacgucugccggcaauaau

SEQ ID NO: 1680216 - RNA, 19 nt, Artificial Sequence
  Description of Artificial Sequence: Synthetic oligonucleotide
  Antisense strand to SEQ ID NO: 1680215
auuauugccggcagacgua

SEQ ID NO: 1680217 - RNA, 19 nt, Artificial Sequence
  Description of Artificial Sequence: Synthetic oligonucleotide
  Sense strand starting at position 3423 of SEQ ID NO: 1561548
cuugaaguaugaucauguu

SEQ ID NO: 1680218 - RNA, 19 nt, Artificial Sequence
  Description of Artificial Sequence: Synthetic oligonucleotide
  Antisense strand to SEQ ID NO: 1680217
aacaugaucauacuucaag

SEQ ID NO: 1680219 - RNA, 19 nt, Artificial Sequence
  Description of Artificial Sequence: Synthetic oligonucleotide
  Sense strand starting at position 3429 of SEQ ID NO: 1561548
guaugaucauguuuagaua

SEQ ID NO: 1680220 - RNA, 19 nt, Artificial Sequence
  Description of Artificial Sequence: Synthetic oligonucleotide
  Antisense strand to SEQ ID NO: 1680219
uaucuaaacaugaucauac

SEQ ID NO: 1680221 - RNA, 19 nt, Artificial Sequence
  Description of Artificial Sequence: Synthetic oligonucleotide
  Sense strand starting at position 3832 of SEQ ID NO: 1561548
cggcccauaucagcauauu

SEQ ID NO: 1680222 - RNA, 19 nt, Artificial Sequence
  Description of Artificial Sequence: Synthetic oligonucleotide
  Antisense strand to SEQ ID NO: 1680221
aauaugcugauaugggccg

SEQ ID NO: 1680223 - RNA, 19 nt, Artificial Sequence
  Description of Artificial Sequence: Synthetic oligonucleotide
  Sense strand starting at position 186 of SEQ ID NO: 1561549
gcauuagucccgcagcuca

SEQ ID NO: 1680224 - RNA, 19 nt, Artificial Sequence
  Description of Artificial Sequence: Synthetic oligonucleotide
  Antisense strand to SEQ ID NO: 1680223
ugagcugcgggacuaaugc

SEQ ID NO: 1680225 - RNA, 19 nt, Artificial Sequence
  Description of Artificial Sequence: Synthetic oligonucleotide
  Sense strand starting at position 384 of SEQ ID NO: 1561549
uacguuuggguuuacacaa

SEQ ID NO: 1680226 - RNA, 19 nt, Artificial Sequence
  Description of Artificial Sequence: Synthetic oligonucleotide
  Antisense strand to SEQ ID NO: 1680225
uuguguaaacccaaacgua

SEQ ID NO: 1680227 - RNA, 19 nt, Artificial Sequence
  Description of Artificial Sequence: Synthetic oligonucleotide
  Sense strand starting at position 616 of SEQ ID NO: 1561549
uuucuuguguaugaaagua

SEQ ID NO: 1680228 - RNA, 19 nt, Artificial Sequence
  Description of Artificial Sequence: Synthetic oligonucleotide
  Antisense strand to SEQ ID NO: 1680227
uacuuucauacacaagaaa

SEQ ID NO: 1680229 - RNA, 19 nt, Artificial Sequence
  Description of Artificial Sequence: Synthetic oligonucleotide
  Sense strand starting at position 1432 of SEQ ID NO: 1561549
guuccugaccgcugcuauu

SEQ ID NO: 1680230 - RNA, 19 nt, Artificial Sequence
  Description of Artificial Sequence: Synthetic oligonucleotide
  Antisense strand to SEQ ID NO: 1680229
aauagcagcggucaggaac

SEQ ID NO: 1680231 - RNA, 19 nt, Artificial Sequence
  Description of Artificial Sequence: Synthetic oligonucleotide
  Sense strand starting at position 1519 of SEQ ID NO: 1561549
ccgugucuguucccgcaaa

SEQ ID NO: 1680232 - RNA, 19 nt, Artificial Sequence
  Description of Artificial Sequence: Synthetic oligonucleotide
  Antisense strand to SEQ ID NO: 1680231
uuugcgggaacagacacgg

SEQ ID NO: 1680233 - RNA, 19 nt, Artificial Sequence
  Description of Artificial Sequence: Synthetic oligonucleotide
  Sense strand starting at position 1521 of SEQ ID NO: 1561549
gugucuguucccgcaaacu

SEQ ID NO: 1680234 - RNA, 19 nt, Artificial Sequence
  Description of Artificial Sequence: Synthetic oligonucleotide
  Antisense strand to SEQ ID NO: 1680233
aguuugcgggaacagacac

SEQ ID NO: 1680235 - RNA, 19 nt, Artificial Sequence
  Description of Artificial Sequence: Synthetic oligonucleotide
  Sense strand starting at position 1777 of SEQ ID NO: 1561549
agcuuucuccggcugcgaa

SEQ ID NO: 1680236 - RNA, 19 nt, Artificial Sequence
  Description of Artificial Sequence: Synthetic oligonucleotide
  Antisense strand to SEQ ID NO: 1680235
uucgcagccggagaaagcu

SEQ ID NO: 1680237 - RNA, 19 nt, Artificial Sequence
  Description of Artificial Sequence: Synthetic oligonucleotide
  Sense strand starting at position 2020 of SEQ ID NO: 1561549
uggacagaucucgggaagu

SEQ ID NO: 1680238 - RNA, 19 nt, Artificial Sequence
  Description of Artificial Sequence: Synthetic oligonucleotide
  Antisense strand to SEQ ID NO: 1680237
acuucccgagaucugucca

SEQ ID NO: 1680239 - RNA, 19 nt, Artificial Sequence
  Description of Artificial Sequence: Synthetic oligonucleotide
  Sense strand starting at position 2036 of SEQ ID NO: 1561549
aguggagacucugauugga

SEQ ID NO: 1680240 - RNA, 19 nt, Artificial Sequence
  Description of Artificial Sequence: Synthetic oligonucleotide
  Antisense strand to SEQ ID NO: 1680239
uccaaucagagucuccacu

SEQ ID NO: 1680241 - RNA, 19 nt, Artificial Sequence
  Description of Artificial Sequence: Synthetic oligonucleotide
  Sense strand starting at position 2138 of SEQ ID NO: 1561549
ggauuaacgucucugauug

SEQ ID NO: 1680242 - RNA, 19 nt, Artificial Sequence
  Description of Artificial Sequence: Synthetic oligonucleotide
  Antisense strand to SEQ ID NO: 1680241
caaucagagacguuaaucc

SEQ ID NO: 1680243 - RNA, 19 nt, Artificial Sequence
  Description of Artificial Sequence: Synthetic oligonucleotide
  Sense strand starting at position 2142 of SEQ ID NO: 1561549
uaacgucucugauuggaca

SEQ ID NO: 1680244 - RNA, 19 nt, Artificial Sequence
  Description of Artificial Sequence: Synthetic oligonucleotide
  Antisense strand to SEQ ID NO: 1680243
uguccaaucagagacguua

SEQ ID NO: 1680245 - RNA, 19 nt, Artificial Sequence
  Description of Artificial Sequence: Synthetic oligonucleotide
  Sense strand starting at position 2181 of SEQ ID NO: 1561549
gccuguccugauuggauaa

SEQ ID NO: 1680246 - RNA, 19 nt, Artificial Sequence
  Description of Artificial Sequence: Synthetic oligonucleotide
  Antisense strand to SEQ ID NO: 1680245
uuauccaaucaggacaggc

SEQ ID NO: 1680247 - RNA, 19 nt, Artificial Sequence
  Description of Artificial Sequence: Synthetic oligonucleotide
  Sense strand starting at position 2183 of SEQ ID NO: 1561549
cuguccugauuggauaauu

SEQ ID NO: 1680248 - RNA, 19 nt, Artificial Sequence
  Description of Artificial Sequence: Synthetic oligonucleotide
  Antisense strand to SEQ ID NO: 1680247
aauuauccaaucaggacag

SEQ ID NO: 1680249 - RNA, 19 nt, Artificial Sequence
  Description of Artificial Sequence: Synthetic oligonucleotide
  Sense strand starting at position 2194 of SEQ ID NO: 1561549
ggauaauucucuccucagu

SEQ ID NO: 1680250 - RNA, 19 nt, Artificial Sequence
  Description of Artificial Sequence: Synthetic oligonucleotide
  Antisense strand to SEQ ID NO: 1680249
acugaggagagaauuaucc

SEQ ID NO: 1680251 - RNA, 19 nt, Artificial Sequence
  Description of Artificial Sequence: Synthetic oligonucleotide
  Sense strand starting at position 2473 of SEQ ID NO: 1561549
gguccagagaccuggagau

SEQ ID NO: 1680252 - RNA, 19 nt, Artificial Sequence
  Description of Artificial Sequence: Synthetic oligonucleotide
  Antisense strand to SEQ ID NO: 1680251
aucuccaggucucuggacc

SEQ ID NO: 1680253 - RNA, 19 nt, Artificial Sequence
  Description of Artificial Sequence: Synthetic oligonucleotide
  Sense strand starting at position 2536 of SEQ ID NO: 1561549
gcgcucccuguguucuuaa

SEQ ID NO: 1680254 - RNA, 19 nt, Artificial Sequence
  Description of Artificial Sequence: Synthetic oligonucleotide
  Antisense strand to SEQ ID NO: 1680253
uuaagaacacagggagcgc

SEQ ID NO: 1680255 - RNA, 19 nt, Artificial Sequence
  Description of Artificial Sequence: Synthetic oligonucleotide
  Sense strand starting at position 2537 of SEQ ID NO: 1561549
cgcucccuguguucuuaaa

SEQ ID NO: 1680256 - RNA, 19 nt, Artificial Sequence
  Description of Artificial Sequence: Synthetic oligonucleotide
  Antisense strand to SEQ ID NO: 1680255
uuuaagaacacagggagcg

SEQ ID NO: 1680257 - RNA, 19 nt, Artificial Sequence
  Description of Artificial Sequence: Synthetic oligonucleotide
  Sense strand starting at position 2881 of SEQ ID NO: 1561549
cacguaaggucaugaagag

SEQ ID NO: 1680258 - RNA, 19 nt, Artificial Sequence
  Description of Artificial Sequence: Synthetic oligonucleotide
  Antisense strand to SEQ ID NO: 1680257
cucuucaugaccuuacgug

SEQ ID NO: 1680259 - RNA, 19 nt, Artificial Sequence
  Description of Artificial Sequence: Synthetic oligonucleotide
  Sense strand starting at position 2991 of SEQ ID NO: 1561549
uggugugacccuuguuacu

SEQ ID NO: 1680260 - RNA, 19 nt, Artificial Sequence
  Description of Artificial Sequence: Synthetic oligonucleotide
  Antisense strand to SEQ ID NO: 1680259
aguaacaagggucacacca

SEQ ID NO: 1680261 - RNA, 19 nt, Artificial Sequence
  Description of Artificial Sequence: Synthetic oligonucleotide
  Sense strand starting at position 2993 of SEQ ID NO: 1561549
gugugacccuuguuacuga

SEQ ID NO: 1680262 - RNA, 19 nt, Artificial Sequence
  Description of Artificial Sequence: Synthetic oligonucleotide
  Antisense strand to SEQ ID NO: 1680261
ucaguaacaagggucacac

SEQ ID NO: 1680263 - RNA, 19 nt, Artificial Sequence
  Description of Artificial Sequence: Synthetic oligonucleotide
  Sense strand starting at position 3003 of SEQ ID NO: 1561549
uguuacugaucuuuguaga

SEQ ID NO: 1680264 - RNA, 19 nt, Artificial Sequence
  Description of Artificial Sequence: Synthetic oligonucleotide
  Antisense strand to SEQ ID NO: 1680263
ucuacaaagaucaguaaca

SEQ ID NO: 1680265 - RNA, 19 nt, Artificial Sequence
  Description of Artificial Sequence: Synthetic oligonucleotide
  Sense strand starting at position 3004 of SEQ ID NO: 1561549
guuacugaucuuuguagac

SEQ ID NO: 1680266 - RNA, 19 nt, Artificial Sequence
  Description of Artificial Sequence: Synthetic oligonucleotide
  Antisense strand to SEQ ID NO: 1680265
gucuacaaagaucaguaac

SEQ ID NO: 1680267 - RNA, 19 nt, Artificial Sequence
  Description of Artificial Sequence: Synthetic oligonucleotide
  Sense strand starting at position 3242 of SEQ ID NO: 1561549
cugugaucucaccauugua

SEQ ID NO: 1680268 - RNA, 19 nt, Artificial Sequence
  Description of Artificial Sequence: Synthetic oligonucleotide
  Antisense strand to SEQ ID NO: 1680267
uacaauggugagaucacag

SEQ ID NO: 1680269 - RNA, 19 nt, Artificial Sequence
  Description of Artificial Sequence: Synthetic oligonucleotide
  Sense strand starting at position 3351 of SEQ ID NO: 1561549
guuugcuaugccgcgcaua

SEQ ID NO: 1680270 - RNA, 19 nt, Artificial Sequence
  Description of Artificial Sequence: Synthetic oligonucleotide
  Antisense strand to SEQ ID NO: 1680269
uaugcgcggcauagcaaac

SEQ ID NO: 1680271 - RNA, 19 nt, Artificial Sequence
  Description of Artificial Sequence: Synthetic oligonucleotide
  Sense strand starting at position 3352 of SEQ ID NO: 1561549
uuugcuaugccgcgcauau

SEQ ID NO: 1680272 - RNA, 19 nt, Artificial Sequence
  Description of Artificial Sequence: Synthetic oligonucleotide
  Antisense strand to SEQ ID NO: 1680271
auaugcgcggcauagcaaa

SEQ ID NO: 1680273 - RNA, 19 nt, Artificial Sequence
  Description of Artificial Sequence: Synthetic oligonucleotide
  Sense strand starting at position 3353 of SEQ ID NO: 1561549
uugcuaugccgcgcauauu

SEQ ID NO: 1680274 - RNA, 19 nt, Artificial Sequence
  Description of Artificial Sequence: Synthetic oligonucleotide
  Antisense strand to SEQ ID NO: 1680273
aauaugcgcggcauagcaa

SEQ ID NO: 1680275 - RNA, 19 nt, Artificial Sequence
  Description of Artificial Sequence: Synthetic oligonucleotide
  Sense strand starting at position 3409 of SEQ ID NO: 1561549
ccuguuauuuaggucgaca

SEQ ID NO: 1680276 - RNA, 19 nt, Artificial Sequence
  Description of Artificial Sequence: Synthetic oligonucleotide
  Antisense strand to SEQ ID NO: 1680275
ugucgaccuaaauaacagg

SEQ ID NO: 1680277 - RNA, 19 nt, Artificial Sequence
  Description of Artificial Sequence: Synthetic oligonucleotide
  Sense strand starting at position 3444 of SEQ ID NO: 1561549
uacgacaauuauguuugua

SEQ ID NO: 1680278 - RNA, 19 nt, Artificial Sequence
  Description of Artificial Sequence: Synthetic oligonucleotide
  Antisense strand to SEQ ID NO: 1680277
uacaaacauaauugucgua

SEQ ID NO: 1680279 - RNA, 19 nt, Artificial Sequence
  Description of Artificial Sequence: Synthetic oligonucleotide
  Sense strand starting at position 3446 of SEQ ID NO: 1561549
cgacaauuauguuuguaug

SEQ ID NO: 1680280 - RNA, 19 nt, Artificial Sequence
  Description of Artificial Sequence: Synthetic oligonucleotide
  Antisense strand to SEQ ID NO: 1680279
cauacaaacauaauugucg

SEQ ID NO: 1680281 - RNA, 19 nt, Artificial Sequence
  Description of Artificial Sequence: Synthetic oligonucleotide
  Sense strand starting at position 3447 of SEQ ID NO: 1561549
gacaauuauguuuguaugu

SEQ ID NO: 1680282 - RNA, 19 nt, Artificial Sequence
  Description of Artificial Sequence: Synthetic oligonucleotide
  Antisense strand to SEQ ID NO: 1680281
acauacaaacauaauuguc

SEQ ID NO: 1680283 - RNA, 19 nt, Artificial Sequence
  Description of Artificial Sequence: Synthetic oligonucleotide
  Sense strand starting at position 3470 of SEQ ID NO: 1561549
uggcaagcgauauagaguu

SEQ ID NO: 1680284 - RNA, 19 nt, Artificial Sequence
  Description of Artificial Sequence: Synthetic oligonucleotide
  Antisense strand to SEQ ID NO: 1680283
aacucuauaucgcuugcca

SEQ ID NO: 1680285 - RNA, 19 nt, Artificial Sequence
  Description of Artificial Sequence: Synthetic oligonucleotide
  Sense strand starting at position 3472 of SEQ ID NO: 1561549
gcaagcgauauagaguuua

SEQ ID NO: 1680286 - RNA, 19 nt, Artificial Sequence
  Description of Artificial Sequence: Synthetic oligonucleotide
  Antisense strand to SEQ ID NO: 1680285
uaaacucuauaucgcuugc

SEQ ID NO: 1680287 - RNA, 19 nt, Artificial Sequence
  Description of Artificial Sequence: Synthetic oligonucleotide
  Sense strand starting at position 3477 of SEQ ID NO: 1561549
cgauauagaguuuauacuu

SEQ ID NO: 1680288 - RNA, 19 nt, Artificial Sequence
  Description of Artificial Sequence: Synthetic oligonucleotide
  Antisense strand to SEQ ID NO: 1680287
aaguauaaacucuauaucg

SEQ ID NO: 1680289 - RNA, 19 nt, Artificial Sequence
  Description of Artificial Sequence: Synthetic oligonucleotide
  Sense strand starting at position 3541 of SEQ ID NO: 1561549
cguuccaggcuuuaggaau

SEQ ID NO: 1680290 - RNA, 19 nt, Artificial Sequence
  Description of Artificial Sequence: Synthetic oligonucleotide
  Antisense strand to SEQ ID NO: 1680289
auuccuaaagccuggaacg

SEQ ID NO: 1680291 - RNA, 19 nt, Artificial Sequence
  Description of Artificial Sequence: Synthetic oligonucleotide
  Sense strand starting at position 3555 of SEQ ID NO: 1561549
ggaauugcggcucaacuga

SEQ ID NO: 1680292 - RNA, 19 nt, Artificial Sequence
  Description of Artificial Sequence: Synthetic oligonucleotide
  Antisense strand to SEQ ID NO: 1680291
ucaguugagccgcaauucc

SEQ ID NO: 1680293 - RNA, 19 nt, Artificial Sequence
  Description of Artificial Sequence: Synthetic oligonucleotide
  Sense strand starting at position 550 of SEQ ID NO: 1561550
cccagacgucaucagucua

SEQ ID NO: 1680294 - RNA, 19 nt, Artificial Sequence
  Description of Artificial Sequence: Synthetic oligonucleotide
  Antisense strand to SEQ ID NO: 1680293
uagacugaugacgucuggg

SEQ ID NO: 1680295 - RNA, 19 nt, Artificial Sequence
  Description of Artificial Sequence: Synthetic oligonucleotide
  Sense strand starting at position 555 of SEQ ID NO: 1561550
acgucaucagucuacacuu

SEQ ID NO: 1680296 - RNA, 19 nt, Artificial Sequence
  Description of Artificial Sequence: Synthetic oligonucleotide
  Antisense strand to SEQ ID NO: 1680295
aaguguagacugaugacgu

SEQ ID NO: 1680297 - RNA, 19 nt, Artificial Sequence
  Description of Artificial Sequence: Synthetic oligonucleotide
  Sense strand starting at position 584 of SEQ ID NO: 1561550
guacaucacucuuuggauc

SEQ ID NO: 1680298 - RNA, 19 nt, Artificial Sequence
  Description of Artificial Sequence: Synthetic oligonucleotide
  Antisense strand to SEQ ID NO: 1680297
gauccaaagagugauguac

SEQ ID NO: 1680299 - RNA, 19 nt, Artificial Sequence
  Description of Artificial Sequence: Synthetic oligonucleotide
  Sense strand starting at position 598 of SEQ ID NO: 1561550
ggaucacaguuaucucaca

SEQ ID NO: 1680300 - RNA, 19 nt, Artificial Sequence
  Description of Artificial Sequence: Synthetic oligonucleotide
  Antisense strand to SEQ ID NO: 1680299
ugugagauaacugugaucc

SEQ ID NO: 1680301 - RNA, 19 nt, Artificial Sequence
  Description of Artificial Sequence: Synthetic oligonucleotide
  Sense strand starting at position 654 of SEQ ID NO: 1561550
augcacuaccacugugaaa

SEQ ID NO: 1680302 - RNA, 19 nt, Artificial Sequence
  Description of Artificial Sequence: Synthetic oligonucleotide
  Antisense strand to SEQ ID NO: 1680301
uuucacagugguagugcau

SEQ ID NO: 1680303 - RNA, 19 nt, Artificial Sequence
  Description of Artificial Sequence: Synthetic oligonucleotide
  Sense strand starting at position 656 of SEQ ID NO: 1561550
gcacuaccacugugaaaug

SEQ ID NO: 1680304 - RNA, 19 nt, Artificial Sequence
  Description of Artificial Sequence: Synthetic oligonucleotide
  Antisense strand to SEQ ID NO: 1680303
cauuucacagugguagugc

SEQ ID NO: 1680305 - RNA, 19 nt, Artificial Sequence
  Description of Artificial Sequence: Synthetic oligonucleotide
  Sense strand starting at position 747 of SEQ ID NO: 1561550
cuugguucccaccagacau

SEQ ID NO: 1680306 - RNA, 19 nt, Artificial Sequence
  Description of Artificial Sequence: Synthetic oligonucleotide
  Antisense strand to SEQ ID NO: 1680305
augucuggugggaaccaag

SEQ ID NO: 1680307 - RNA, 19 nt, Artificial Sequence
  Description of Artificial Sequence: Synthetic oligonucleotide
  Sense strand starting at position 864 of SEQ ID NO: 1561550
auuccaaugguuggcagaa

SEQ ID NO: 1680308 - RNA, 19 nt, Artificial Sequence
  Description of Artificial Sequence: Synthetic oligonucleotide
  Antisense strand to SEQ ID NO: 1680307
uucugccaaccauuggaau

SEQ ID NO: 1680309 - RNA, 19 nt, Artificial Sequence
  Description of Artificial Sequence: Synthetic oligonucleotide
  Sense strand starting at position 865 of SEQ ID NO: 1561550
uuccaaugguuggcagaaa

SEQ ID NO: 1680310 - RNA, 19 nt, Artificial Sequence
  Description of Artificial Sequence: Synthetic oligonucleotide
  Antisense strand to SEQ ID NO: 1680309
uuucugccaaccauuggaa

SEQ ID NO: 1680311 - RNA, 19 nt, Artificial Sequence
  Description of Artificial Sequence: Synthetic oligonucleotide
  Sense strand starting at position 1035 of SEQ ID NO: 1561550
cggugagagcauggacauu

SEQ ID NO: 1680312 - RNA, 19 nt, Artificial Sequence
  Description of Artificial Sequence: Synthetic oligonucleotide
  Antisense strand to SEQ ID NO: 1680311
aauguccaugcucucaccg

SEQ ID NO: 1680313 - RNA, 19 nt, Artificial Sequence
  Description of Artificial Sequence: Synthetic oligonucleotide
  Sense strand starting at position 1064 of SEQ ID NO: 1561550
cuguauaggguccacaauu

SEQ ID NO: 1680314 - RNA, 19 nt, Artificial Sequence
  Description of Artificial Sequence: Synthetic oligonucleotide
  Antisense strand to SEQ ID NO: 1680313
aauuguggacccuauacag

SEQ ID NO: 1680315 - RNA, 19 nt, Artificial Sequence
  Description of Artificial Sequence: Synthetic oligonucleotide
  Sense strand starting at position 1309 of SEQ ID NO: 1561550
ccaugagcagucuauggaa

SEQ ID NO: 1680316 - RNA, 19 nt, Artificial Sequence
  Description of Artificial Sequence: Synthetic oligonucleotide
  Antisense strand to SEQ ID NO: 1680315
uuccauagacugcucaugg

SEQ ID NO: 1680317 - RNA, 19 nt, Artificial Sequence
  Description of Artificial Sequence: Synthetic oligonucleotide
  Sense strand starting at position 1311 of SEQ ID NO: 1561550
augagcagucuauggaaua

SEQ ID NO: 1680318 - RNA, 19 nt, Artificial Sequence
  Description of Artificial Sequence: Synthetic oligonucleotide
  Antisense strand to SEQ ID NO: 1680317
uauuccauagacugcucau

SEQ ID NO: 1680319 - RNA, 19 nt, Artificial Sequence
  Description of Artificial Sequence: Synthetic oligonucleotide
  Sense strand starting at position 1405 of SEQ ID NO: 1561550
ccagcugcucaggaugaua

SEQ ID NO: 1680320 - RNA, 19 nt, Artificial Sequence
  Description of Artificial Sequence: Synthetic oligonucleotide
  Antisense strand to SEQ ID NO: 1680319
uaucauccugagcagcugg

SEQ ID NO: 1680321 - RNA, 19 nt, Artificial Sequence
  Description of Artificial Sequence: Synthetic oligonucleotide
  Sense strand starting at position 1417 of SEQ ID NO: 1561550
gaugauauuccaggugcaa

SEQ ID NO: 1680322 - RNA, 19 nt, Artificial Sequence
  Description of Artificial Sequence: Synthetic oligonucleotide
  Antisense strand to SEQ ID NO: 1680321
uugcaccuggaauaucauc

SEQ ID NO: 1680323 - RNA, 19 nt, Artificial Sequence
  Description of Artificial Sequence: Synthetic oligonucleotide
  Sense strand starting at position 1632 of SEQ ID NO: 1561550
cgaggaaucguucauucga

SEQ ID NO: 1680324 - RNA, 19 nt, Artificial Sequence
  Description of Artificial Sequence: Synthetic oligonucleotide
  Antisense strand to SEQ ID NO: 1680323
ucgaaugaacgauuccucg

SEQ ID NO: 1680325 - RNA, 19 nt, Artificial Sequence
  Description of Artificial Sequence: Synthetic oligonucleotide
  Sense strand starting at position 1634 of SEQ ID NO: 1561550
aggaaucguucauucgaag

SEQ ID NO: 1680326 - RNA, 19 nt, Artificial Sequence
  Description of Artificial Sequence: Synthetic oligonucleotide
  Antisense strand to SEQ ID NO: 1680325
cuucgaaugaacgauuccu

SEQ ID NO: 1680327 - RNA, 19 nt, Artificial Sequence
  Description of Artificial Sequence: Synthetic oligonucleotide
  Sense strand starting at position 1902 of SEQ ID NO: 1561550
ucaccucaggucugacauu

SEQ ID NO: 1680328 - RNA, 19 nt, Artificial Sequence
  Description of Artificial Sequence: Synthetic oligonucleotide
  Antisense strand to SEQ ID NO: 1680327
aaugucagaccugagguga

SEQ ID NO: 1680329 - RNA, 19 nt, Artificial Sequence
  Description of Artificial Sequence: Synthetic oligonucleotide
  Sense strand starting at position 1917 of SEQ ID NO: 1561550
cauugcguucuggaaacua

SEQ ID NO: 1680330 - RNA, 19 nt, Artificial Sequence
  Description of Artificial Sequence: Synthetic oligonucleotide
  Antisense strand to SEQ ID NO: 1680329
uaguuuccagaacgcaaug

SEQ ID NO: 1680331 - RNA, 19 nt, Artificial Sequence
  Description of Artificial Sequence: Synthetic oligonucleotide
  Sense strand starting at position 2061 of SEQ ID NO: 1561550
ccaaguuuccuggguaaug

SEQ ID NO: 1680332 - RNA, 19 nt, Artificial Sequence
  Description of Artificial Sequence: Synthetic oligonucleotide
  Antisense strand to SEQ ID NO: 1680331
cauuacccaggaaacuugg

SEQ ID NO: 1680333 - RNA, 19 nt, Artificial Sequence
  Description of Artificial Sequence: Synthetic oligonucleotide
  Sense strand starting at position 2063 of SEQ ID NO: 1561550
aaguuuccuggguaaugua

SEQ ID NO: 1680334 - RNA, 19 nt, Artificial Sequence
  Description of Artificial Sequence: Synthetic oligonucleotide
  Antisense strand to SEQ ID NO: 1680333
uacauuacccaggaaacuu

SEQ ID NO: 1680335 - RNA, 19 nt, Artificial Sequence
  Description of Artificial Sequence: Synthetic oligonucleotide
  Sense strand starting at position 2247 of SEQ ID NO: 1561550
cguguuugacaucaaagga

SEQ ID NO: 1680336 - RNA, 19 nt, Artificial Sequence
  Description of Artificial Sequence: Synthetic oligonucleotide
  Antisense strand to SEQ ID NO: 1680335
uccuuugaugucaaacacg

SEQ ID NO: 1680337 - RNA, 19 nt, Artificial Sequence
  Description of Artificial Sequence: Synthetic oligonucleotide
  Sense strand starting at position 2289 of SEQ ID NO: 1561550
cuuccuuacgcagagaaug

SEQ ID NO: 1680338 - RNA, 19 nt, Artificial Sequence
  Description of Artificial Sequence: Synthetic oligonucleotide
  Antisense strand to SEQ ID NO: 1680337
cauucucugcguaaggaag

SEQ ID NO: 1680339 - RNA, 19 nt, Artificial Sequence
  Description of Artificial Sequence: Synthetic oligonucleotide
  Sense strand starting at position 2355 of SEQ ID NO: 1561550
uuucuauggcuggaaguua

SEQ ID NO: 1680340 - RNA, 19 nt, Artificial Sequence
  Description of Artificial Sequence: Synthetic oligonucleotide
  Antisense strand to SEQ ID NO: 1680339
uaacuuccagccauagaaa

SEQ ID NO: 1680341 - RNA, 19 nt, Artificial Sequence
  Description of Artificial Sequence: Synthetic oligonucleotide
  Sense strand starting at position 2439 of SEQ ID NO: 1561550
uucugucaggcacaagaaa

SEQ ID NO: 1680342 - RNA, 19 nt, Artificial Sequence
  Description of Artificial Sequence: Synthetic oligonucleotide
  Antisense strand to SEQ ID NO: 1680341
uuucuugugccugacagaa

SEQ ID NO: 1680343 - RNA, 19 nt, Artificial Sequence
  Description of Artificial Sequence: Synthetic oligonucleotide
  Sense strand starting at position 2502 of SEQ ID NO: 1561550
uuugguggccuugaaguaa

SEQ ID NO: 1680344 - RNA, 19 nt, Artificial Sequence
  Description of Artificial Sequence: Synthetic oligonucleotide
  Antisense strand to SEQ ID NO: 1680343
uuacuucaaggccaccaaa

SEQ ID NO: 1680345 - RNA, 19 nt, Artificial Sequence
  Description of Artificial Sequence: Synthetic oligonucleotide
  Sense strand starting at position 2726 of SEQ ID NO: 1561550
ugaacacuuucuguaaaga

SEQ ID NO: 1680346 - RNA, 19 nt, Artificial Sequence
  Description of Artificial Sequence: Synthetic oligonucleotide
  Antisense strand to SEQ ID NO: 1680345
ucuuuacagaaaguguuca

SEQ ID NO: 1680347 - RNA, 19 nt, Artificial Sequence
  Description of Artificial Sequence: Synthetic oligonucleotide
  Sense strand starting at position 3106 of SEQ ID NO: 1561550
guggaaagcaaauguauua

SEQ ID NO: 1680348 - RNA, 19 nt, Artificial Sequence
  Description of Artificial Sequence: Synthetic oligonucleotide
  Antisense strand to SEQ ID NO: 1680347
uaauacauuugcuuuccac

SEQ ID NO: 1680349 - RNA, 19 nt, Artificial Sequence
  Description of Artificial Sequence: Synthetic oligonucleotide
  Sense strand starting at position 3121 of SEQ ID NO: 1561550
auuacaauccuguauggca

SEQ ID NO: 1680350 - RNA, 19 nt, Artificial Sequence
  Description of Artificial Sequence: Synthetic oligonucleotide
  Antisense strand to SEQ ID NO: 1680349
ugccauacaggauuguaau

SEQ ID NO: 1680351 - RNA, 19 nt, Artificial Sequence
  Description of Artificial Sequence: Synthetic oligonucleotide
  Sense strand starting at position 3423 of SEQ ID NO: 1561550
uaggcauauccagagagcu

SEQ ID NO: 1680352 - RNA, 19 nt, Artificial Sequence
  Description of Artificial Sequence: Synthetic oligonucleotide
  Antisense strand to SEQ ID NO: 1680351
agcucucuggauaugccua

SEQ ID NO: 1680353 - RNA, 19 nt, Artificial Sequence
  Description of Artificial Sequence: Synthetic oligonucleotide
  Sense strand starting at position 3425 of SEQ ID NO: 1561550
ggcauauccagagagcuug

SEQ ID NO: 1680354 - RNA, 19 nt, Artificial Sequence
  Description of Artificial Sequence: Synthetic oligonucleotide
  Antisense strand to SEQ ID NO: 1680353
caagcucucuggauaugcc

SEQ ID NO: 1680355 - RNA, 19 nt, Artificial Sequence
  Description of Artificial Sequence: Synthetic oligonucleotide
  Sense strand starting at position 3515 of SEQ ID NO: 1561550
gucacagauguuuauggca

SEQ ID NO: 1680356 - RNA, 19 nt, Artificial Sequence
  Description of Artificial Sequence: Synthetic oligonucleotide
  Antisense strand to SEQ ID NO: 1680355
ugccauaaacaucugugac

SEQ ID NO: 1680357 - RNA, 19 nt, Artificial Sequence
  Description of Artificial Sequence: Synthetic oligonucleotide
  Sense strand starting at position 3522 of SEQ ID NO: 1561550
auguuuauggcagagguua

SEQ ID NO: 1680358 - RNA, 19 nt, Artificial Sequence
  Description of Artificial Sequence: Synthetic oligonucleotide
  Antisense strand to SEQ ID NO: 1680357
uaaccucugccauaaacau

SEQ ID NO: 1680359 - RNA, 19 nt, Artificial Sequence
  Description of Artificial Sequence: Synthetic oligonucleotide
  Sense strand starting at position 3603 of SEQ ID NO: 1561550
uuguaacuccuguagcaag

SEQ ID NO: 1680360 - RNA, 19 nt, Artificial Sequence
  Description of Artificial Sequence: Synthetic oligonucleotide
  Antisense strand to SEQ ID NO: 1680359
cuugcuacaggaguuacaa

SEQ ID NO: 1680361 - RNA, 19 nt, Artificial Sequence
  Description of Artificial Sequence: Synthetic oligonucleotide
  Sense strand starting at position 3658 of SEQ ID NO: 1561550
acgggaauaugugcauuaa

SEQ ID NO: 1680362 - RNA, 19 nt, Artificial Sequence
  Description of Artificial Sequence: Synthetic oligonucleotide
  Antisense strand to SEQ ID NO: 1680361
uuaaugcacauauucccgu

SEQ ID NO: 1680363 - RNA, 19 nt, Artificial Sequence
  Description of Artificial Sequence: Synthetic oligonucleotide
  Sense strand starting at position 3659 of SEQ ID NO: 1561550
cgggaauaugugcauuaag

SEQ ID NO: 1680364 - RNA, 19 nt, Artificial Sequence
  Description of Artificial Sequence: Synthetic oligonucleotide
  Antisense strand to SEQ ID NO: 1680363
cuuaaugcacauauucccg

SEQ ID NO: 1680365 - RNA, 19 nt, Artificial Sequence
  Description of Artificial Sequence: Synthetic oligonucleotide
  Sense strand starting at position 3662 of SEQ ID NO: 1561550
gaauaugugcauuaagagc

SEQ ID NO: 1680366 - RNA, 19 nt, Artificial Sequence
  Description of Artificial Sequence: Synthetic oligonucleotide
  Antisense strand to SEQ ID NO: 1680365
gcucuuaaugcacauauuc

SEQ ID NO: 1680367 - RNA, 19 nt, Artificial Sequence
  Description of Artificial Sequence: Synthetic oligonucleotide
  Sense strand starting at position 3930 of SEQ ID NO: 1561550
uugaauugugauugaaagc

SEQ ID NO: 1680368 - RNA, 19 nt, Artificial Sequence
  Description of Artificial Sequence: Synthetic oligonucleotide
  Antisense strand to SEQ ID NO: 1680367
gcuuucaaucacaauucaa

SEQ ID NO: 1680369 - RNA, 19 nt, Artificial Sequence
  Description of Artificial Sequence: Synthetic oligonucleotide
  Sense strand starting at position 3970 of SEQ ID NO: 1561550
ccuacucugucaguaagaa

SEQ ID NO: 1680370 - RNA, 19 nt, Artificial Sequence
  Description of Artificial Sequence: Synthetic oligonucleotide
  Antisense strand to SEQ ID NO: 1680369
uucuuacugacagaguagg

SEQ ID NO: 1680371 - RNA, 19 nt, Artificial Sequence
  Description of Artificial Sequence: Synthetic oligonucleotide
  Sense strand starting at position 3971 of SEQ ID NO: 1561550
cuacucugucaguaagaaa

SEQ ID NO: 1680372 - RNA, 19 nt, Artificial Sequence
  Description of Artificial Sequence: Synthetic oligonucleotide
  Antisense strand to SEQ ID NO: 1680371
uuucuuacugacagaguag

SEQ ID NO: 1680373 - RNA, 19 nt, Artificial Sequence
  Description of Artificial Sequence: Synthetic oligonucleotide
  Sense strand starting at position 165 of SEQ ID NO: 1561551
uuaccuucucauggucuau

SEQ ID NO: 1680374 - RNA, 19 nt, Artificial Sequence
  Description of Artificial Sequence: Synthetic oligonucleotide
  Antisense strand to SEQ ID NO: 1680373
auagaccaugagaagguaa

SEQ ID NO: 1680375 - RNA, 19 nt, Artificial Sequence
  Description of Artificial Sequence: Synthetic oligonucleotide
  Sense strand starting at position 292 of SEQ ID NO: 1561551
gugccugacuaucugcaau

SEQ ID NO: 1680376 - RNA, 19 nt, Artificial Sequence
  Description of Artificial Sequence: Synthetic oligonucleotide
  Antisense strand to SEQ ID NO: 1680375
auugcagauagucaggcac

SEQ ID NO: 1680377 - RNA, 19 nt, Artificial Sequence
  Description of Artificial Sequence: Synthetic oligonucleotide
  Sense strand starting at position 372 of SEQ ID NO: 1561551
uucccugugccuugguauu

SEQ ID NO: 1680378 - RNA, 19 nt, Artificial Sequence
  Description of Artificial Sequence: Synthetic oligonucleotide
  Antisense strand to SEQ ID NO: 1680377
aauaccaaggcacagggaa

SEQ ID NO: 1680379 - RNA, 19 nt, Artificial Sequence
  Description of Artificial Sequence: Synthetic oligonucleotide
  Sense strand starting at position 426 of SEQ ID NO: 1561551
auaggacuauuguuuguau

SEQ ID NO: 1680380 - RNA, 19 nt, Artificial Sequence
  Description of Artificial Sequence: Synthetic oligonucleotide
  Antisense strand to SEQ ID NO: 1680379
auacaaacaauaguccuau

SEQ ID NO: 1680381 - RNA, 19 nt, Artificial Sequence
  Description of Artificial Sequence: Synthetic oligonucleotide
  Sense strand starting at position 428 of SEQ ID NO: 1561551
aggacuauuguuuguauca

SEQ ID NO: 1680382 - RNA, 19 nt, Artificial Sequence
  Description of Artificial Sequence: Synthetic oligonucleotide
  Antisense strand to SEQ ID NO: 1680381
ugauacaaacaauaguccu

SEQ ID NO: 1680383 - RNA, 19 nt, Artificial Sequence
  Description of Artificial Sequence: Synthetic oligonucleotide
  Sense strand starting at position 429 of SEQ ID NO: 1561551
ggacuauuguuuguaucaa

SEQ ID NO: 1680384 - RNA, 19 nt, Artificial Sequence
  Description of Artificial Sequence: Synthetic oligonucleotide
  Antisense strand to SEQ ID NO: 1680383
uugauacaaacaauagucc

SEQ ID NO: 1680385 - RNA, 19 nt, Artificial Sequence
  Description of Artificial Sequence: Synthetic oligonucleotide
  Sense strand starting at position 456 of SEQ ID NO: 1561551
uuaugugucuaggacuaaa

SEQ ID NO: 1680386 - RNA, 19 nt, Artificial Sequence
  Description of Artificial Sequence: Synthetic oligonucleotide
  Antisense strand to SEQ ID NO: 1680385
uuuaguccuagacacauaa

SEQ ID NO: 1680387 - RNA, 19 nt, Artificial Sequence
  Description of Artificial Sequence: Synthetic oligonucleotide
  Sense strand starting at position 459 of SEQ ID NO: 1561551
ugugucuaggacuaaauau

SEQ ID NO: 1680388 - RNA, 19 nt, Artificial Sequence
  Description of Artificial Sequence: Synthetic oligonucleotide
  Antisense strand to SEQ ID NO: 1680387
auauuuaguccuagacaca

SEQ ID NO: 1680389 - RNA, 19 nt, Artificial Sequence
  Description of Artificial Sequence: Synthetic oligonucleotide
  Sense strand starting at position 781 of SEQ ID NO: 1561551
ugugcugauagcuagggaa

SEQ ID NO: 1680390 - RNA, 19 nt, Artificial Sequence
  Description of Artificial Sequence: Synthetic oligonucleotide
  Antisense strand to SEQ ID NO: 1680389
uucccuagcuaucagcaca

SEQ ID NO: 1680391 - RNA, 19 nt, Artificial Sequence
  Description of Artificial Sequence: Synthetic oligonucleotide
  Sense strand starting at position 784 of SEQ ID NO: 1561551
gcugauagcuagggaaacu

SEQ ID NO: 1680392 - RNA, 19 nt, Artificial Sequence
  Description of Artificial Sequence: Synthetic oligonucleotide
  Antisense strand to SEQ ID NO: 1680391
aguuucccuagcuaucagc

SEQ ID NO: 1680393 - RNA, 19 nt, Artificial Sequence
  Description of Artificial Sequence: Synthetic oligonucleotide
  Sense strand starting at position 2022 of SEQ ID NO: 1561551
cugaguucucuugagggca

SEQ ID NO: 1680394 - RNA, 19 nt, Artificial Sequence
  Description of Artificial Sequence: Synthetic oligonucleotide
  Antisense strand to SEQ ID NO: 1680393
ugcccucaagagaacucag

SEQ ID NO: 1680395 - RNA, 19 nt, Artificial Sequence
  Description of Artificial Sequence: Synthetic oligonucleotide
  Sense strand starting at position 2184 of SEQ ID NO: 1561551
cgaggaagugggcauaacu

SEQ ID NO: 1680396 - RNA, 19 nt, Artificial Sequence
  Description of Artificial Sequence: Synthetic oligonucleotide
  Antisense strand to SEQ ID NO: 1680395
aguuaugcccacuuccucg

SEQ ID NO: 1680397 - RNA, 19 nt, Artificial Sequence
  Description of Artificial Sequence: Synthetic oligonucleotide
  Sense strand starting at position 2290 of SEQ ID NO: 1561551
uagagaugaugauggagau

SEQ ID NO: 1680398 - RNA, 19 nt, Artificial Sequence
  Description of Artificial Sequence: Synthetic oligonucleotide
  Antisense strand to SEQ ID NO: 1680397
aucuccaucaucaucucua

SEQ ID NO: 1680399 - RNA, 19 nt, Artificial Sequence
  Description of Artificial Sequence: Synthetic oligonucleotide
  Sense strand starting at position 2530 of SEQ ID NO: 1561551
uagagaugaugauggacau

SEQ ID NO: 1680400 - RNA, 19 nt, Artificial Sequence
  Description of Artificial Sequence: Synthetic oligonucleotide
  Antisense strand to SEQ ID NO: 1680399
auguccaucaucaucucua

SEQ ID NO: 1680401 - RNA, 19 nt, Artificial Sequence
  Description of Artificial Sequence: Synthetic oligonucleotide
  Sense strand starting at position 2632 of SEQ ID NO: 1561551
agaaaugagugucgagaac

SEQ ID NO: 1680402 - RNA, 19 nt, Artificial Sequence
  Description of Artificial Sequence: Synthetic oligonucleotide
  Antisense strand to SEQ ID NO: 1680401
guucucgacacucauuucu

SEQ ID NO: 1680403 - RNA, 19 nt, Artificial Sequence
  Description of Artificial Sequence: Synthetic oligonucleotide
  Sense strand starting at position 2643 of SEQ ID NO: 1561551
ucgagaacucucggacuca

SEQ ID NO: 1680404 - RNA, 19 nt, Artificial Sequence
  Description of Artificial Sequence: Synthetic oligonucleotide
  Antisense strand to SEQ ID NO: 1680403
ugaguccgagaguucucga

SEQ ID NO: 1680405 - RNA, 19 nt, Artificial Sequence
  Description of Artificial Sequence: Synthetic oligonucleotide
  Sense strand starting at position 2644 of SEQ ID NO: 1561551
cgagaacucucggacucau

SEQ ID NO: 1680406 - RNA, 19 nt, Artificial Sequence
  Description of Artificial Sequence: Synthetic oligonucleotide
  Antisense strand to SEQ ID NO: 1680405
augaguccgagaguucucg

SEQ ID NO: 1680407 - RNA, 19 nt, Artificial Sequence
  Description of Artificial Sequence: Synthetic oligonucleotide
  Sense strand starting at position 2662 of SEQ ID NO: 1561551
ucuggaaccuguuguaauu

SEQ ID NO: 1680408 - RNA, 19 nt, Artificial Sequence
  Description of Artificial Sequence: Synthetic oligonucleotide
  Antisense strand to SEQ ID NO: 1680407
aauuacaacagguuccaga

SEQ ID NO: 1680409 - RNA, 19 nt, Artificial Sequence
  Description of Artificial Sequence: Synthetic oligonucleotide
  Sense strand starting at position 2668 of SEQ ID NO: 1561551
accuguuguaauuggagau

SEQ ID NO: 1680410 - RNA, 19 nt, Artificial Sequence
  Description of Artificial Sequence: Synthetic oligonucleotide
  Antisense strand to SEQ ID NO: 1680409
aucuccaauuacaacaggu

SEQ ID NO: 1680411 - RNA, 19 nt, Artificial Sequence
  Description of Artificial Sequence: Synthetic oligonucleotide
  Sense strand starting at position 2836 of SEQ ID NO: 1561551
auauuaaugccugauguau

SEQ ID NO: 1680412 - RNA, 19 nt, Artificial Sequence
  Description of Artificial Sequence: Synthetic oligonucleotide
  Antisense strand to SEQ ID NO: 1680411
auacaucaggcauuaauau

SEQ ID NO: 1680413 - RNA, 19 nt, Artificial Sequence
  Description of Artificial Sequence: Synthetic oligonucleotide
  Sense strand starting at position 2838 of SEQ ID NO: 1561551
auuaaugccugauguauga

SEQ ID NO: 1680414 - RNA, 19 nt, Artificial Sequence
  Description of Artificial Sequence: Synthetic oligonucleotide
  Antisense strand to SEQ ID NO: 1680413
ucauacaucaggcauuaau

SEQ ID NO: 1680415 - RNA, 19 nt, Artificial Sequence
  Description of Artificial Sequence: Synthetic oligonucleotide
  Sense strand starting at position 2842 of SEQ ID NO: 1561551
augccugauguaugauaau

SEQ ID NO: 1680416 - RNA, 19 nt, Artificial Sequence
  Description of Artificial Sequence: Synthetic oligonucleotide
  Antisense strand to SEQ ID NO: 1680415
auuaucauacaucaggcau

SEQ ID NO: 1680417 - RNA, 19 nt, Artificial Sequence
  Description of Artificial Sequence: Synthetic oligonucleotide
  Sense strand starting at position 2845 of SEQ ID NO: 1561551
ccugauguaugauaauaag

SEQ ID NO: 1680418 - RNA, 19 nt, Artificial Sequence
  Description of Artificial Sequence: Synthetic oligonucleotide
  Antisense strand to SEQ ID NO: 1680417
cuuauuaucauacaucagg

SEQ ID NO: 1680419 - RNA, 19 nt, Artificial Sequence
  Description of Artificial Sequence: Synthetic oligonucleotide
  Sense strand starting at position 2967 of SEQ ID NO: 1561551
ggacccaacauugguguaa

SEQ ID NO: 1680420 - RNA, 19 nt, Artificial Sequence
  Description of Artificial Sequence: Synthetic oligonucleotide
  Antisense strand to SEQ ID NO: 1680419
uuacaccaauguugggucc

SEQ ID NO: 1680421 - RNA, 19 nt, Artificial Sequence
  Description of Artificial Sequence: Synthetic oligonucleotide
  Sense strand starting at position 2968 of SEQ ID NO: 1561551
gacccaacauugguguaaa

SEQ ID NO: 1680422 - RNA, 19 nt, Artificial Sequence
  Description of Artificial Sequence: Synthetic oligonucleotide
  Antisense strand to SEQ ID NO: 1680421
uuuacaccaauguuggguc

SEQ ID NO: 1680423 - RNA, 19 nt, Artificial Sequence
  Description of Artificial Sequence: Synthetic oligonucleotide
  Sense strand starting at position 2969 of SEQ ID NO: 1561551
acccaacauugguguaaag

SEQ ID NO: 1680424 - RNA, 19 nt, Artificial Sequence
  Description of Artificial Sequence: Synthetic oligonucleotide
  Antisense strand to SEQ ID NO: 1680423
cuuuacaccaauguugggu

SEQ ID NO: 1680425 - RNA, 19 nt, Artificial Sequence
  Description of Artificial Sequence: Synthetic oligonucleotide
  Sense strand starting at position 3053 of SEQ ID NO: 1561551
gcuccauauuccugucaca

SEQ ID NO: 1680426 - RNA, 19 nt, Artificial Sequence
  Description of Artificial Sequence: Synthetic oligonucleotide
  Antisense strand to SEQ ID NO: 1680425
ugugacaggaauauggagc

SEQ ID NO: 1680427 - RNA, 19 nt, Artificial Sequence
  Description of Artificial Sequence: Synthetic oligonucleotide
  Sense strand starting at position 3056 of SEQ ID NO: 1561551
ccauauuccugucacaguu

SEQ ID NO: 1680428 - RNA, 19 nt, Artificial Sequence
  Description of Artificial Sequence: Synthetic oligonucleotide
  Antisense strand to SEQ ID NO: 1680427
aacugugacaggaauaugg

SEQ ID NO: 1680429 - RNA, 19 nt, Artificial Sequence
  Description of Artificial Sequence: Synthetic oligonucleotide
  Sense strand starting at position 3160 of SEQ ID NO: 1561551
ucuugcuucuagugaggaa

SEQ ID NO: 1680430 - RNA, 19 nt, Artificial Sequence
  Description of Artificial Sequence: Synthetic oligonucleotide
  Antisense strand to SEQ ID NO: 1680429
uuccucacuagaagcaaga

SEQ ID NO: 1680431 - RNA, 19 nt, Artificial Sequence
  Description of Artificial Sequence: Synthetic oligonucleotide
  Sense strand starting at position 3489 of SEQ ID NO: 1561551
gggagagaauccgucucaa

SEQ ID NO: 1680432 - RNA, 19 nt, Artificial Sequence
  Description of Artificial Sequence: Synthetic oligonucleotide
  Antisense strand to SEQ ID NO: 1680431
uugagacggauucucuccc

SEQ ID NO: 1680433 - RNA, 19 nt, Artificial Sequence
  Description of Artificial Sequence: Synthetic oligonucleotide
  Sense strand starting at position 3584 of SEQ ID NO: 1561551
gcauucuuggcauaccuau

SEQ ID NO: 1680434 - RNA, 19 nt, Artificial Sequence
  Description of Artificial Sequence: Synthetic oligonucleotide
  Antisense strand to SEQ ID NO: 1680433
auagguaugccaagaaugc

SEQ ID NO: 1680435 - RNA, 19 nt, Artificial Sequence
  Description of Artificial Sequence: Synthetic oligonucleotide
  Sense strand starting at position 3773 of SEQ ID NO: 1561551
accauugccugauaacguu

SEQ ID NO: 1680436 - RNA, 19 nt, Artificial Sequence
  Description of Artificial Sequence: Synthetic oligonucleotide
  Antisense strand to SEQ ID NO: 1680435
aacguuaucaggcaauggu

SEQ ID NO: 1680437 - RNA, 19 nt, Artificial Sequence
  Description of Artificial Sequence: Synthetic oligonucleotide
  Sense strand starting at position 3836 of SEQ ID NO: 1561551
cucaauaaccagugaucug

SEQ ID NO: 1680438 - RNA, 19 nt, Artificial Sequence
  Description of Artificial Sequence: Synthetic oligonucleotide
  Antisense strand to SEQ ID NO: 1680437
cagaucacugguuauugag

SEQ ID NO: 1680439 - RNA, 19 nt, Artificial Sequence
  Description of Artificial Sequence: Synthetic oligonucleotide
  Sense strand starting at position 3938 of SEQ ID NO: 1561551
ccacuuggcucagggauuu

SEQ ID NO: 1680440 - RNA, 19 nt, Artificial Sequence
  Description of Artificial Sequence: Synthetic oligonucleotide
  Antisense strand to SEQ ID NO: 1680439
aaaucccugagccaagugg

SEQ ID NO: 1680441 - RNA, 19 nt, Artificial Sequence
  Description of Artificial Sequence: Synthetic oligonucleotide
  Sense strand starting at position 72 of SEQ ID NO: 1561552
cugucaaauuaugcugaca

SEQ ID NO: 1680442 - RNA, 19 nt, Artificial Sequence
  Description of Artificial Sequence: Synthetic oligonucleotide
  Antisense strand to SEQ ID NO: 1680441
ugucagcauaauuugacag

SEQ ID NO: 1680443 - RNA, 19 nt, Artificial Sequence
  Description of Artificial Sequence: Synthetic oligonucleotide
  Sense strand starting at position 75 of SEQ ID NO: 1561552
ucaaauuaugcugacaggu

SEQ ID NO: 1680444 - RNA, 19 nt, Artificial Sequence
  Description of Artificial Sequence: Synthetic oligonucleotide
  Antisense strand to SEQ ID NO: 1680443
accugucagcauaauuuga

SEQ ID NO: 1680445 - RNA, 19 nt, Artificial Sequence
  Description of Artificial Sequence: Synthetic oligonucleotide
  Sense strand starting at position 99 of SEQ ID NO: 1561552
cuaccaucauggucacuua

SEQ ID NO: 1680446 - RNA, 19 nt, Artificial Sequence
  Description of Artificial Sequence: Synthetic oligonucleotide
  Antisense strand to SEQ ID NO: 1680445
uaagugaccaugaugguag

SEQ ID NO: 1680447 - RNA, 19 nt, Artificial Sequence
  Description of Artificial Sequence: Synthetic oligonucleotide
  Sense strand starting at position 122 of SEQ ID NO: 1561552
ccucuccaguguuuaggaa

SEQ ID NO: 1680448 - RNA, 19 nt, Artificial Sequence
  Description of Artificial Sequence: Synthetic oligonucleotide
  Antisense strand to SEQ ID NO: 1680447
uuccuaaacacuggagagg

SEQ ID NO: 1680449 - RNA, 19 nt, Artificial Sequence
  Description of Artificial Sequence: Synthetic oligonucleotide
  Sense strand starting at position 135 of SEQ ID NO: 1561552
uaggaagcccaguaacauu

SEQ ID NO: 1680450 - RNA, 19 nt, Artificial Sequence
  Description of Artificial Sequence: Synthetic oligonucleotide
  Antisense strand to SEQ ID NO: 1680449
aauguuacugggcuuccua

SEQ ID NO: 1680451 - RNA, 19 nt, Artificial Sequence
  Description of Artificial Sequence: Synthetic oligonucleotide
  Sense strand starting at position 173 of SEQ ID NO: 1561552
agaugcaguccucaucauu

SEQ ID NO: 1680452 - RNA, 19 nt, Artificial Sequence
  Description of Artificial Sequence: Synthetic oligonucleotide
  Antisense strand to SEQ ID NO: 1680451
aaugaugaggacugcaucu

SEQ ID NO: 1680453 - RNA, 19 nt, Artificial Sequence
  Description of Artificial Sequence: Synthetic oligonucleotide
  Sense strand starting at position 252 of SEQ ID NO: 1561552
uaaugugacccauggcuca

SEQ ID NO: 1680454 - RNA, 19 nt, Artificial Sequence
  Description of Artificial Sequence: Synthetic oligonucleotide
  Antisense strand to SEQ ID NO: 1680453
ugagccaugggucacauua

SEQ ID NO: 1680455 - RNA, 19 nt, Artificial Sequence
  Description of Artificial Sequence: Synthetic oligonucleotide
  Sense strand starting at position 357 of SEQ ID NO: 1561552
gccauuugaugccuacacu

SEQ ID NO: 1680456 - RNA, 19 nt, Artificial Sequence
  Description of Artificial Sequence: Synthetic oligonucleotide
  Antisense strand to SEQ ID NO: 1680455
aguguaggcaucaaauggc

SEQ ID NO: 1680457 - RNA, 19 nt, Artificial Sequence
  Description of Artificial Sequence: Synthetic oligonucleotide
  Sense strand starting at position 553 of SEQ ID NO: 1561552
aggaaaccuagaugcugua

SEQ ID NO: 1680458 - RNA, 19 nt, Artificial Sequence
  Description of Artificial Sequence: Synthetic oligonucleotide
  Antisense strand to SEQ ID NO: 1680457
uacagcaucuagguuuccu

SEQ ID NO: 1680459 - RNA, 19 nt, Artificial Sequence
  Description of Artificial Sequence: Synthetic oligonucleotide
  Sense strand starting at position 613 of SEQ ID NO: 1561552
ugaaucuuagucuguuaac

SEQ ID NO: 1680460 - RNA, 19 nt, Artificial Sequence
  Description of Artificial Sequence: Synthetic oligonucleotide
  Antisense strand to SEQ ID NO: 1680459
guuaacagacuaagauuca

SEQ ID NO: 1680461 - RNA, 19 nt, Artificial Sequence
  Description of Artificial Sequence: Synthetic oligonucleotide
  Sense strand starting at position 625 of SEQ ID NO: 1561552
uguuaacccucacuuggau

SEQ ID NO: 1680462 - RNA, 19 nt, Artificial Sequence
  Description of Artificial Sequence: Synthetic oligonucleotide
  Antisense strand to SEQ ID NO: 1680461
auccaagugaggguuaaca

SEQ ID NO: 1680463 - RNA, 19 nt, Artificial Sequence
  Description of Artificial Sequence: Synthetic oligonucleotide
  Sense strand starting at position 800 of SEQ ID NO: 1561552
guacuaacuccuggguuaa

SEQ ID NO: 1680464 - RNA, 19 nt, Artificial Sequence
  Description of Artificial Sequence: Synthetic oligonucleotide
  Antisense strand to SEQ ID NO: 1680463
uuaacccaggaguuaguac

SEQ ID NO: 1680465 - RNA, 19 nt, Artificial Sequence
  Description of Artificial Sequence: Synthetic oligonucleotide
  Sense strand starting at position 819 of SEQ ID NO: 1561552
ccuuccaaguauguuuaua

SEQ ID NO: 1680466 - RNA, 19 nt, Artificial Sequence
  Description of Artificial Sequence: Synthetic oligonucleotide
  Antisense strand to SEQ ID NO: 1680465
uauaaacauacuuggaagg

SEQ ID NO: 1680467 - RNA, 19 nt, Artificial Sequence
  Description of Artificial Sequence: Synthetic oligonucleotide
  Sense strand starting at position 830 of SEQ ID NO: 1561552
uguuuauacugguugacag

SEQ ID NO: 1680468 - RNA, 19 nt, Artificial Sequence
  Description of Artificial Sequence: Synthetic oligonucleotide
  Antisense strand to SEQ ID NO: 1680467
cugucaaccaguauaaaca

SEQ ID NO: 1680469 - RNA, 19 nt, Artificial Sequence
  Description of Artificial Sequence: Synthetic oligonucleotide
  Sense strand starting at position 831 of SEQ ID NO: 1561552
guuuauacugguugacaga

SEQ ID NO: 1680470 - RNA, 19 nt, Artificial Sequence
  Description of Artificial Sequence: Synthetic oligonucleotide
  Antisense strand to SEQ ID NO: 1680469
ucugucaaccaguauaaac

SEQ ID NO: 1680471 - RNA, 19 nt, Artificial Sequence
  Description of Artificial Sequence: Synthetic oligonucleotide
  Sense strand starting at position 885 of SEQ ID NO: 1561552
uuuggauccuggguuuaag

SEQ ID NO: 1680472 - RNA, 19 nt, Artificial Sequence
  Description of Artificial Sequence: Synthetic oligonucleotide
  Antisense strand to SEQ ID NO: 1680471
cuuaaacccaggauccaaa

SEQ ID NO: 1680473 - RNA, 19 nt, Artificial Sequence
  Description of Artificial Sequence: Synthetic oligonucleotide
  Sense strand starting at position 1098 of SEQ ID NO: 1561552
acaagaauguaucccugau

SEQ ID NO: 1680474 - RNA, 19 nt, Artificial Sequence
  Description of Artificial Sequence: Synthetic oligonucleotide
  Antisense strand to SEQ ID NO: 1680473
aucagggauacauucuugu

SEQ ID NO: 1680475 - RNA, 19 nt, Artificial Sequence
  Description of Artificial Sequence: Synthetic oligonucleotide
  Sense strand starting at position 1100 of SEQ ID NO: 1561552
aagaauguaucccugauga

SEQ ID NO: 1680476 - RNA, 19 nt, Artificial Sequence
  Description of Artificial Sequence: Synthetic oligonucleotide
  Antisense strand to SEQ ID NO: 1680475
ucaucagggauacauucuu

SEQ ID NO: 1680477 - RNA, 19 nt, Artificial Sequence
  Description of Artificial Sequence: Synthetic oligonucleotide
  Sense strand starting at position 1166 of SEQ ID NO: 1561552
uagguaaacgcgaguuggu

SEQ ID NO: 1680478 - RNA, 19 nt, Artificial Sequence
  Description of Artificial Sequence: Synthetic oligonucleotide
  Antisense strand to SEQ ID NO: 1680477
accaacucgcguuuaccua

SEQ ID NO: 1680479 - RNA, 19 nt, Artificial Sequence
  Description of Artificial Sequence: Synthetic oligonucleotide
  Sense strand starting at position 1174 of SEQ ID NO: 1561552
cgcgaguugguugucugaa

SEQ ID NO: 1680480 - RNA, 19 nt, Artificial Sequence
  Description of Artificial Sequence: Synthetic oligonucleotide
  Antisense strand to SEQ ID NO: 1680479
uucagacaaccaacucgcg

SEQ ID NO: 1680481 - RNA, 19 nt, Artificial Sequence
  Description of Artificial Sequence: Synthetic oligonucleotide
  Sense strand starting at position 1229 of SEQ ID NO: 1561552
cuaucugaucuguagaggu

SEQ ID NO: 1680482 - RNA, 19 nt, Artificial Sequence
  Description of Artificial Sequence: Synthetic oligonucleotide
  Antisense strand to SEQ ID NO: 1680481
accucuacagaucagauag

SEQ ID NO: 1680483 - RNA, 19 nt, Artificial Sequence
  Description of Artificial Sequence: Synthetic oligonucleotide
  Sense strand starting at position 1233 of SEQ ID NO: 1561552
cugaucuguagagguugaa

SEQ ID NO: 1680484 - RNA, 19 nt, Artificial Sequence
  Description of Artificial Sequence: Synthetic oligonucleotide
  Antisense strand to SEQ ID NO: 1680483
uucaaccucuacagaucag

SEQ ID NO: 1680485 - RNA, 19 nt, Artificial Sequence
  Description of Artificial Sequence: Synthetic oligonucleotide
  Sense strand starting at position 1236 of SEQ ID NO: 1561552
aucuguagagguugaacaa

SEQ ID NO: 1680486 - RNA, 19 nt, Artificial Sequence
  Description of Artificial Sequence: Synthetic oligonucleotide
  Antisense strand to SEQ ID NO: 1680485
uuguucaaccucuacagau

SEQ ID NO: 1680487 - RNA, 19 nt, Artificial Sequence
  Description of Artificial Sequence: Synthetic oligonucleotide
  Sense strand starting at position 1300 of SEQ ID NO: 1561552
ucgacuggacuuugggaaa

SEQ ID NO: 1680488 - RNA, 19 nt, Artificial Sequence
  Description of Artificial Sequence: Synthetic oligonucleotide
  Antisense strand to SEQ ID NO: 1680487
uuucccaaaguccagucga

SEQ ID NO: 1680489 - RNA, 19 nt, Artificial Sequence
  Description of Artificial Sequence: Synthetic oligonucleotide
  Sense strand starting at position 1318 of SEQ ID NO: 1561552
accuuuaaagccuggacau

SEQ ID NO: 1680490 - RNA, 19 nt, Artificial Sequence
  Description of Artificial Sequence: Synthetic oligonucleotide
  Antisense strand to SEQ ID NO: 1680489
auguccaggcuuuaaaggu

SEQ ID NO: 1680491 - RNA, 19 nt, Artificial Sequence
  Description of Artificial Sequence: Synthetic oligonucleotide
  Sense strand starting at position 1319 of SEQ ID NO: 1561552
ccuuuaaagccuggacauu

SEQ ID NO: 1680492 - RNA, 19 nt, Artificial Sequence
  Description of Artificial Sequence: Synthetic oligonucleotide
  Antisense strand to SEQ ID NO: 1680491
aauguccaggcuuuaaagg

SEQ ID NO: 1680493 - RNA, 19 nt, Artificial Sequence
  Description of Artificial Sequence: Synthetic oligonucleotide
  Sense strand starting at position 1380 of SEQ ID NO: 1561552
cguucucagggugaauaca

SEQ ID NO: 1680494 - RNA, 19 nt, Artificial Sequence
  Description of Artificial Sequence: Synthetic oligonucleotide
  Antisense strand to SEQ ID NO: 1680493
uguauucacccugagaacg

SEQ ID NO: 1680495 - RNA, 19 nt, Artificial Sequence
  Description of Artificial Sequence: Synthetic oligonucleotide
  Sense strand starting at position 1424 of SEQ ID NO: 1561552
ggagcucugccucacacuu

SEQ ID NO: 1680496 - RNA, 19 nt, Artificial Sequence
  Description of Artificial Sequence: Synthetic oligonucleotide
  Antisense strand to SEQ ID NO: 1680495
aagugugaggcagagcucc

SEQ ID NO: 1680497 - RNA, 19 nt, Artificial Sequence
  Description of Artificial Sequence: Synthetic oligonucleotide
  Sense strand starting at position 2119 of SEQ ID NO: 1561552
guuccaaggcgguaaagaa

SEQ ID NO: 1680498 - RNA, 19 nt, Artificial Sequence
  Description of Artificial Sequence: Synthetic oligonucleotide
  Antisense strand to SEQ ID NO: 1680497
uucuuuaccgccuuggaac

SEQ ID NO: 1680499 - RNA, 19 nt, Artificial Sequence
  Description of Artificial Sequence: Synthetic oligonucleotide
  Sense strand starting at position 2217 of SEQ ID NO: 1561552
acuauacuucugcauguau

SEQ ID NO: 1680500 - RNA, 19 nt, Artificial Sequence
  Description of Artificial Sequence: Synthetic oligonucleotide
  Antisense strand to SEQ ID NO: 1680499
auacaugcagaaguauagu

SEQ ID NO: 1680501 - RNA, 19 nt, Artificial Sequence
  Description of Artificial Sequence: Synthetic oligonucleotide
  Sense strand starting at position 2428 of SEQ ID NO: 1561552
ggagauuagugucuguaac

SEQ ID NO: 1680502 - RNA, 19 nt, Artificial Sequence
  Description of Artificial Sequence: Synthetic oligonucleotide
  Antisense strand to SEQ ID NO: 1680501
guuacagacacuaaucucc

SEQ ID NO: 1680503 - RNA, 19 nt, Artificial Sequence
  Description of Artificial Sequence: Synthetic oligonucleotide
  Sense strand starting at position 2430 of SEQ ID NO: 1561552
agauuagugucuguaacug

SEQ ID NO: 1680504 - RNA, 19 nt, Artificial Sequence
  Description of Artificial Sequence: Synthetic oligonucleotide
  Antisense strand to SEQ ID NO: 1680503
caguuacagacacuaaucu

SEQ ID NO: 1680505 - RNA, 19 nt, Artificial Sequence
  Description of Artificial Sequence: Synthetic oligonucleotide
  Sense strand starting at position 2438 of SEQ ID NO: 1561552
gucuguaacugaucacuca

SEQ ID NO: 1680506 - RNA, 19 nt, Artificial Sequence
  Description of Artificial Sequence: Synthetic oligonucleotide
  Antisense strand to SEQ ID NO: 1680505
ugagugaucaguuacagac

SEQ ID NO: 1680507 - RNA, 19 nt, Artificial Sequence
  Description of Artificial Sequence: Synthetic oligonucleotide
  Sense strand starting at position 2441 of SEQ ID NO: 1561552
uguaacugaucacucaagu

SEQ ID NO: 1680508 - RNA, 19 nt, Artificial Sequence
  Description of Artificial Sequence: Synthetic oligonucleotide
  Antisense strand to SEQ ID NO: 1680507
acuugagugaucaguuaca

SEQ ID NO: 1680509 - RNA, 19 nt, Artificial Sequence
  Description of Artificial Sequence: Synthetic oligonucleotide
  Sense strand starting at position 2646 of SEQ ID NO: 1561552
ugcacucugaggcauuaga

SEQ ID NO: 1680510 - RNA, 19 nt, Artificial Sequence
  Description of Artificial Sequence: Synthetic oligonucleotide
  Antisense strand to SEQ ID NO: 1680509
ucuaaugccucagagugca

SEQ ID NO: 1680511 - RNA, 19 nt, Artificial Sequence
  Description of Artificial Sequence: Synthetic oligonucleotide
  Sense strand starting at position 3043 of SEQ ID NO: 1561552
gugucuuaaauccaggagu

SEQ ID NO: 1680512 - RNA, 19 nt, Artificial Sequence
  Description of Artificial Sequence: Synthetic oligonucleotide
  Antisense strand to SEQ ID NO: 1680511
acuccuggauuuaagacac

SEQ ID NO: 1680513 - RNA, 19 nt, Artificial Sequence
  Description of Artificial Sequence: Synthetic oligonucleotide
  Sense strand starting at position 3045 of SEQ ID NO: 1561552
gucuuaaauccaggaguuc

SEQ ID NO: 1680514 - RNA, 19 nt, Artificial Sequence
  Description of Artificial Sequence: Synthetic oligonucleotide
  Antisense strand to SEQ ID NO: 1680513
gaacuccuggauuuaagac

SEQ ID NO: 1680515 - RNA, 19 nt, Artificial Sequence
  Description of Artificial Sequence: Synthetic oligonucleotide
  Sense strand starting at position 3201 of SEQ ID NO: 1561552
uaauguuauggaugggauu

SEQ ID NO: 1680516 - RNA, 19 nt, Artificial Sequence
  Description of Artificial Sequence: Synthetic oligonucleotide
  Antisense strand to SEQ ID NO: 1680515
aaucccauccauaacauua

SEQ ID NO: 1680517 - RNA, 19 nt, Artificial Sequence
  Description of Artificial Sequence: Synthetic oligonucleotide
  Sense strand starting at position 3203 of SEQ ID NO: 1561552
auguuauggaugggauuac

SEQ ID NO: 1680518 - RNA, 19 nt, Artificial Sequence
  Description of Artificial Sequence: Synthetic oligonucleotide
  Antisense strand to SEQ ID NO: 1680517
guaaucccauccauaacau

SEQ ID NO: 1680519 - RNA, 19 nt, Artificial Sequence
  Description of Artificial Sequence: Synthetic oligonucleotide
  Sense strand starting at position 3405 of SEQ ID NO: 1561552
uucuauguucagggagaag

SEQ ID NO: 1680520 - RNA, 19 nt, Artificial Sequence
  Description of Artificial Sequence: Synthetic oligonucleotide
  Antisense strand to SEQ ID NO: 1680519
cuucucccugaacauagaa

SEQ ID NO: 1680521 - RNA, 19 nt, Artificial Sequence
  Description of Artificial Sequence: Synthetic oligonucleotide
  Sense strand starting at position 69 of SEQ ID NO: 1561553
agaguagaaucguauuuac

SEQ ID NO: 1680522 - RNA, 19 nt, Artificial Sequence
  Description of Artificial Sequence: Synthetic oligonucleotide
  Antisense strand to SEQ ID NO: 1680521
guaaauacgauucuacucu

SEQ ID NO: 1680523 - RNA, 19 nt, Artificial Sequence
  Description of Artificial Sequence: Synthetic oligonucleotide
  Sense strand starting at position 261 of SEQ ID NO: 1561553
gguggauauuaaguguucu

SEQ ID NO: 1680524 - RNA, 19 nt, Artificial Sequence
  Description of Artificial Sequence: Synthetic oligonucleotide
  Antisense strand to SEQ ID NO: 1680523
agaacacuuaauauccacc

SEQ ID NO: 1680525 - RNA, 19 nt, Artificial Sequence
  Description of Artificial Sequence: Synthetic oligonucleotide
  Sense strand starting at position 305 of SEQ ID NO: 1561553
gguaaugcauuguuaauua

SEQ ID NO: 1680526 - RNA, 19 nt, Artificial Sequence
  Description of Artificial Sequence: Synthetic oligonucleotide
  Antisense strand to SEQ ID NO: 1680525
uaauuaacaaugcauuacc

SEQ ID NO: 1680527 - RNA, 19 nt, Artificial Sequence
  Description of Artificial Sequence: Synthetic oligonucleotide
  Sense strand starting at position 388 of SEQ ID NO: 1561553
auacaauuauaucugucga

SEQ ID NO: 1680528 - RNA, 19 nt, Artificial Sequence
  Description of Artificial Sequence: Synthetic oligonucleotide
  Antisense strand to SEQ ID NO: 1680527
ucgacagauauaauuguau

SEQ ID NO: 1680529 - RNA, 19 nt, Artificial Sequence
  Description of Artificial Sequence: Synthetic oligonucleotide
  Sense strand starting at position 390 of SEQ ID NO: 1561553
acaauuauaucugucgauu

SEQ ID NO: 1680530 - RNA, 19 nt, Artificial Sequence
  Description of Artificial Sequence: Synthetic oligonucleotide
  Antisense strand to SEQ ID NO: 1680529
aaucgacagauauaauugu

SEQ ID NO: 1680531 - RNA, 19 nt, Artificial Sequence
  Description of Artificial Sequence: Synthetic oligonucleotide
  Sense strand starting at position 503 of SEQ ID NO: 1561553
gcuccuguucuguagagag

SEQ ID NO: 1680532 - RNA, 19 nt, Artificial Sequence
  Description of Artificial Sequence: Synthetic oligonucleotide
  Antisense strand to SEQ ID NO: 1680531
cucucuacagaacaggagc

SEQ ID NO: 1680533 - RNA, 19 nt, Artificial Sequence
  Description of Artificial Sequence: Synthetic oligonucleotide
  Sense strand starting at position 507 of SEQ ID NO: 1561553
cuguucuguagagagucaa

SEQ ID NO: 1680534 - RNA, 19 nt, Artificial Sequence
  Description of Artificial Sequence: Synthetic oligonucleotide
  Antisense strand to SEQ ID NO: 1680533
uugacucucuacagaacag

SEQ ID NO: 1680535 - RNA, 19 nt, Artificial Sequence
  Description of Artificial Sequence: Synthetic oligonucleotide
  Sense strand starting at position 781 of SEQ ID NO: 1561553
cucagagagaucuggcaag

SEQ ID NO: 1680536 - RNA, 19 nt, Artificial Sequence
  Description of Artificial Sequence: Synthetic oligonucleotide
  Antisense strand to SEQ ID NO: 1680535
cuugccagaucucucugag

SEQ ID NO: 1680537 - RNA, 19 nt, Artificial Sequence
  Description of Artificial Sequence: Synthetic oligonucleotide
  Sense strand starting at position 853 of SEQ ID NO: 1561553
accaauuucugugcgguca

SEQ ID NO: 1680538 - RNA, 19 nt, Artificial Sequence
  Description of Artificial Sequence: Synthetic oligonucleotide
  Antisense strand to SEQ ID NO: 1680537
ugaccgcacagaaauuggu

SEQ ID NO: 1680539 - RNA, 19 nt, Artificial Sequence
  Description of Artificial Sequence: Synthetic oligonucleotide
  Sense strand starting at position 1007 of SEQ ID NO: 1561553
ucccaaauaugggucuaaa

SEQ ID NO: 1680540 - RNA, 19 nt, Artificial Sequence
  Description of Artificial Sequence: Synthetic oligonucleotide
  Antisense strand to SEQ ID NO: 1680539
uuuagacccauauuuggga

SEQ ID NO: 1680541 - RNA, 19 nt, Artificial Sequence
  Description of Artificial Sequence: Synthetic oligonucleotide
  Sense strand starting at position 1121 of SEQ ID NO: 1561553
ugugacuauuaaguggaaa

SEQ ID NO: 1680542 - RNA, 19 nt, Artificial Sequence
  Description of Artificial Sequence: Synthetic oligonucleotide
  Antisense strand to SEQ ID NO: 1680541
uuuccacuuaauagucaca

SEQ ID NO: 1680543 - RNA, 19 nt, Artificial Sequence
  Description of Artificial Sequence: Synthetic oligonucleotide
  Sense strand starting at position 1122 of SEQ ID NO: 1561553
gugacuauuaaguggaaag

SEQ ID NO: 1680544 - RNA, 19 nt, Artificial Sequence
  Description of Artificial Sequence: Synthetic oligonucleotide
  Antisense strand to SEQ ID NO: 1680543
cuuuccacuuaauagucac

SEQ ID NO: 1680545 - RNA, 19 nt, Artificial Sequence
  Description of Artificial Sequence: Synthetic oligonucleotide
  Sense strand starting at position 1229 of SEQ ID NO: 1561553
gcaugucuugaacaaauac

SEQ ID NO: 1680546 - RNA, 19 nt, Artificial Sequence
  Description of Artificial Sequence: Synthetic oligonucleotide
  Antisense strand to SEQ ID NO: 1680545
guauuuguucaagacaugc

SEQ ID NO: 1680547 - RNA, 19 nt, Artificial Sequence
  Description of Artificial Sequence: Synthetic oligonucleotide
  Sense strand starting at position 1577 of SEQ ID NO: 1561553
cugcgcuuucuuguguaaa

SEQ ID NO: 1680548 - RNA, 19 nt, Artificial Sequence
  Description of Artificial Sequence: Synthetic oligonucleotide
  Antisense strand to SEQ ID NO: 1680547
uuuacacaagaaagcgcag

SEQ ID NO: 1680549 - RNA, 19 nt, Artificial Sequence
  Description of Artificial Sequence: Synthetic oligonucleotide
  Sense strand starting at position 1796 of SEQ ID NO: 1561553
cgucacucaugaucucaca

SEQ ID NO: 1680550 - RNA, 19 nt, Artificial Sequence
  Description of Artificial Sequence: Synthetic oligonucleotide
  Antisense strand to SEQ ID NO: 1680549
ugugagaucaugagugacg

SEQ ID NO: 1680551 - RNA, 19 nt, Artificial Sequence
  Description of Artificial Sequence: Synthetic oligonucleotide
  Sense strand starting at position 2113 of SEQ ID NO: 1561553
gguugaucccagcauacua

SEQ ID NO: 1680552 - RNA, 19 nt, Artificial Sequence
  Description of Artificial Sequence: Synthetic oligonucleotide
  Antisense strand to SEQ ID NO: 1680551
uaguaugcugggaucaacc

SEQ ID NO: 1680553 - RNA, 19 nt, Artificial Sequence
  Description of Artificial Sequence: Synthetic oligonucleotide
  Sense strand starting at position 2199 of SEQ ID NO: 1561553
gguuguugccaugagcaag

SEQ ID NO: 1680554 - RNA, 19 nt, Artificial Sequence
  Description of Artificial Sequence: Synthetic oligonucleotide
  Antisense strand to SEQ ID NO: 1680553
cuugcucauggcaacaacc

SEQ ID NO: 1680555 - RNA, 19 nt, Artificial Sequence
  Description of Artificial Sequence: Synthetic oligonucleotide
  Sense strand starting at position 2252 of SEQ ID NO: 1561553
gcgucaguauaauuuacuu

SEQ ID NO: 1680556 - RNA, 19 nt, Artificial Sequence
  Description of Artificial Sequence: Synthetic oligonucleotide
  Antisense strand to SEQ ID NO: 1680555
aaguaaauuauacugacgc

SEQ ID NO: 1680557 - RNA, 19 nt, Artificial Sequence
  Description of Artificial Sequence: Synthetic oligonucleotide
  Sense strand starting at position 2344 of SEQ ID NO: 1561553
acauguaggugcuuuaacu

SEQ ID NO: 1680558 - RNA, 19 nt, Artificial Sequence
  Description of Artificial Sequence: Synthetic oligonucleotide
  Antisense strand to SEQ ID NO: 1680557
aguuaaagcaccuacaugu

SEQ ID NO: 1680559 - RNA, 19 nt, Artificial Sequence
  Description of Artificial Sequence: Synthetic oligonucleotide
  Sense strand starting at position 2392 of SEQ ID NO: 1561553
ccacuucucugugcuauuu

SEQ ID NO: 1680560 - RNA, 19 nt, Artificial Sequence
  Description of Artificial Sequence: Synthetic oligonucleotide
  Antisense strand to SEQ ID NO: 1680559
aaauagcacagagaagugg

SEQ ID NO: 1680561 - RNA, 19 nt, Artificial Sequence
  Description of Artificial Sequence: Synthetic oligonucleotide
  Sense strand starting at position 2446 of SEQ ID NO: 1561553
uaaagaauugguugguuau

SEQ ID NO: 1680562 - RNA, 19 nt, Artificial Sequence
  Description of Artificial Sequence: Synthetic oligonucleotide
  Antisense strand to SEQ ID NO: 1680561
auaaccaaccaauucuuua

SEQ ID NO: 1680563 - RNA, 19 nt, Artificial Sequence
  Description of Artificial Sequence: Synthetic oligonucleotide
  Sense strand starting at position 2447 of SEQ ID NO: 1561553
aaagaauugguugguuaua

SEQ ID NO: 1680564 - RNA, 19 nt, Artificial Sequence
  Description of Artificial Sequence: Synthetic oligonucleotide
  Antisense strand to SEQ ID NO: 1680563
uauaaccaaccaauucuuu

SEQ ID NO: 1680565 - RNA, 19 nt, Artificial Sequence
  Description of Artificial Sequence: Synthetic oligonucleotide
  Sense strand starting at position 2448 of SEQ ID NO: 1561553
aagaauugguugguuauau

SEQ ID NO: 1680566 - RNA, 19 nt, Artificial Sequence
  Description of Artificial Sequence: Synthetic oligonucleotide
  Antisense strand to SEQ ID NO: 1680565
auauaaccaaccaauucuu

SEQ ID NO: 1680567 - RNA, 19 nt, Artificial Sequence
  Description of Artificial Sequence: Synthetic oligonucleotide
  Sense strand starting at position 2449 of SEQ ID NO: 1561553
agaauugguugguuauaua

SEQ ID NO: 1680568 - RNA, 19 nt, Artificial Sequence
  Description of Artificial Sequence: Synthetic oligonucleotide
  Antisense strand to SEQ ID NO: 1680567
uauauaaccaaccaauucu

SEQ ID NO: 1680569 - RNA, 19 nt, Artificial Sequence
  Description of Artificial Sequence: Synthetic oligonucleotide
  Sense strand starting at position 2474 of SEQ ID NO: 1561553
gaggaagugugguucacau

SEQ ID NO: 1680570 - RNA, 19 nt, Artificial Sequence
  Description of Artificial Sequence: Synthetic oligonucleotide
  Antisense strand to SEQ ID NO: 1680569
augugaaccacacuuccuc

SEQ ID NO: 1680571 - RNA, 19 nt, Artificial Sequence
  Description of Artificial Sequence: Synthetic oligonucleotide
  Sense strand starting at position 2476 of SEQ ID NO: 1561553
ggaagugugguucacauug

SEQ ID NO: 1680572 - RNA, 19 nt, Artificial Sequence
  Description of Artificial Sequence: Synthetic oligonucleotide
  Antisense strand to SEQ ID NO: 1680571
caaugugaaccacacuucc

SEQ ID NO: 1680573 - RNA, 19 nt, Artificial Sequence
  Description of Artificial Sequence: Synthetic oligonucleotide
  Sense strand starting at position 2481 of SEQ ID NO: 1561553
ugugguucacauuggagau

SEQ ID NO: 1680574 - RNA, 19 nt, Artificial Sequence
  Description of Artificial Sequence: Synthetic oligonucleotide
  Antisense strand to SEQ ID NO: 1680573
aucuccaaugugaaccaca

SEQ ID NO: 1680575 - RNA, 19 nt, Artificial Sequence
  Description of Artificial Sequence: Synthetic oligonucleotide
  Sense strand starting at position 2503 of SEQ ID NO: 1561553
agaaucaaauguccuggau

SEQ ID NO: 1680576 - RNA, 19 nt, Artificial Sequence
  Description of Artificial Sequence: Synthetic oligonucleotide
  Antisense strand to SEQ ID NO: 1680575
auccaggacauuugauucu

SEQ ID NO: 1680577 - RNA, 19 nt, Artificial Sequence
  Description of Artificial Sequence: Synthetic oligonucleotide
  Sense strand starting at position 2506 of SEQ ID NO: 1561553
aucaaauguccuggauucu

SEQ ID NO: 1680578 - RNA, 19 nt, Artificial Sequence
  Description of Artificial Sequence: Synthetic oligonucleotide
  Antisense strand to SEQ ID NO: 1680577
agaauccaggacauuugau

SEQ ID NO: 1680579 - RNA, 19 nt, Artificial Sequence
  Description of Artificial Sequence: Synthetic oligonucleotide
  Sense strand starting at position 2507 of SEQ ID NO: 1561553
ucaaauguccuggauucuu

SEQ ID NO: 1680580 - RNA, 19 nt, Artificial Sequence
  Description of Artificial Sequence: Synthetic oligonucleotide
  Antisense strand to SEQ ID NO: 1680579
aagaauccaggacauuuga

SEQ ID NO: 1680581 - RNA, 19 nt, Artificial Sequence
  Description of Artificial Sequence: Synthetic oligonucleotide
  Sense strand starting at position 2512 of SEQ ID NO: 1561553
uguccuggauucuucgaga

SEQ ID NO: 1680582 - RNA, 19 nt, Artificial Sequence
  Description of Artificial Sequence: Synthetic oligonucleotide
  Antisense strand to SEQ ID NO: 1680581
ucucgaagaauccaggaca

SEQ ID NO: 1680583 - RNA, 19 nt, Artificial Sequence
  Description of Artificial Sequence: Synthetic oligonucleotide
  Sense strand starting at position 2527 of SEQ ID NO: 1561553
gagacaauguuccuguuau

SEQ ID NO: 1680584 - RNA, 19 nt, Artificial Sequence
  Description of Artificial Sequence: Synthetic oligonucleotide
  Antisense strand to SEQ ID NO: 1680583
auaacaggaacauugucuc

SEQ ID NO: 1680585 - RNA, 19 nt, Artificial Sequence
  Description of Artificial Sequence: Synthetic oligonucleotide
  Sense strand starting at position 2534 of SEQ ID NO: 1561553
uguuccuguuaucuggaga

SEQ ID NO: 1680586 - RNA, 19 nt, Artificial Sequence
  Description of Artificial Sequence: Synthetic oligonucleotide
  Antisense strand to SEQ ID NO: 1680585
ucuccagauaacaggaaca

SEQ ID NO: 1680587 - RNA, 19 nt, Artificial Sequence
  Description of Artificial Sequence: Synthetic oligonucleotide
  Sense strand starting at position 2535 of SEQ ID NO: 1561553
guuccuguuaucuggagag

SEQ ID NO: 1680588 - RNA, 19 nt, Artificial Sequence
  Description of Artificial Sequence: Synthetic oligonucleotide
  Antisense strand to SEQ ID NO: 1680587
cucuccagauaacaggaac

SEQ ID NO: 1680589 - RNA, 19 nt, Artificial Sequence
  Description of Artificial Sequence: Synthetic oligonucleotide
  Sense strand starting at position 2703 of SEQ ID NO: 1561553
acuguuguagucuaacaau

SEQ ID NO: 1680590 - RNA, 19 nt, Artificial Sequence
  Description of Artificial Sequence: Synthetic oligonucleotide
  Antisense strand to SEQ ID NO: 1680589
auuguuagacuacaacagu

SEQ ID NO: 1680591 - RNA, 19 nt, Artificial Sequence
  Description of Artificial Sequence: Synthetic oligonucleotide
  Sense strand starting at position 3382 of SEQ ID NO: 1561553
gggugcuaccuacagguaa

SEQ ID NO: 1680592 - RNA, 19 nt, Artificial Sequence
  Description of Artificial Sequence: Synthetic oligonucleotide
  Antisense strand to SEQ ID NO: 1680591
uuaccuguagguagcaccc

SEQ ID NO: 1680593 - RNA, 19 nt, Artificial Sequence
  Description of Artificial Sequence: Synthetic oligonucleotide
  Sense strand starting at position 3503 of SEQ ID NO: 1561553
caaaguagacuccggacau

SEQ ID NO: 1680594 - RNA, 19 nt, Artificial Sequence
  Description of Artificial Sequence: Synthetic oligonucleotide
  Antisense strand to SEQ ID NO: 1680593
auguccggagucuacuuug

SEQ ID NO: 1680595 - RNA, 19 nt, Artificial Sequence
  Description of Artificial Sequence: Synthetic oligonucleotide
  Sense strand starting at position 3520 of SEQ ID NO: 1561553
auagacuauuaccagagau

SEQ ID NO: 1680596 - RNA, 19 nt, Artificial Sequence
  Description of Artificial Sequence: Synthetic oligonucleotide
  Antisense strand to SEQ ID NO: 1680595
aucucugguaauagucuau

SEQ ID NO: 1680597 - RNA, 19 nt, Artificial Sequence
  Description of Artificial Sequence: Synthetic oligonucleotide
  Sense strand starting at position 3563 of SEQ ID NO: 1561553
ggagauagcucaucgagua

SEQ ID NO: 1680598 - RNA, 19 nt, Artificial Sequence
  Description of Artificial Sequence: Synthetic oligonucleotide
  Antisense strand to SEQ ID NO: 1680597
uacucgaugagcuaucucc

SEQ ID NO: 1680599 - RNA, 19 nt, Artificial Sequence
  Description of Artificial Sequence: Synthetic oligonucleotide
  Sense strand starting at position 3564 of SEQ ID NO: 1561553
gagauagcucaucgaguag

SEQ ID NO: 1680600 - RNA, 19 nt, Artificial Sequence
  Description of Artificial Sequence: Synthetic oligonucleotide
  Antisense strand to SEQ ID NO: 1680599
cuacucgaugagcuaucuc

SEQ ID NO: 1680601 - RNA, 19 nt, Artificial Sequence
  Description of Artificial Sequence: Synthetic oligonucleotide
  Sense strand starting at position 34 of SEQ ID NO: 1561554
agaguagaaucguauuuac

SEQ ID NO: 1680602 - RNA, 19 nt, Artificial Sequence
  Description of Artificial Sequence: Synthetic oligonucleotide
  Antisense strand to SEQ ID NO: 1680601
guaaauacgauucuacucu

SEQ ID NO: 1680603 - RNA, 19 nt, Artificial Sequence
  Description of Artificial Sequence: Synthetic oligonucleotide
  Sense strand starting at position 226 of SEQ ID NO: 1561554
gguggauauuaaguguucu

SEQ ID NO: 1680604 - RNA, 19 nt, Artificial Sequence
  Description of Artificial Sequence: Synthetic oligonucleotide
  Antisense strand to SEQ ID NO: 1680603
agaacacuuaauauccacc

SEQ ID NO: 1680605 - RNA, 19 nt, Artificial Sequence
  Description of Artificial Sequence: Synthetic oligonucleotide
  Sense strand starting at position 270 of SEQ ID NO: 1561554
gguaaugcauuguuaauua

SEQ ID NO: 1680606 - RNA, 19 nt, Artificial Sequence
  Description of Artificial Sequence: Synthetic oligonucleotide
  Antisense strand to SEQ ID NO: 1680605
uaauuaacaaugcauuacc

SEQ ID NO: 1680607 - RNA, 19 nt, Artificial Sequence
  Description of Artificial Sequence: Synthetic oligonucleotide
  Sense strand starting at position 353 of SEQ ID NO: 1561554
auacaauuauaucugucga

SEQ ID NO: 1680608 - RNA, 19 nt, Artificial Sequence
  Description of Artificial Sequence: Synthetic oligonucleotide
  Antisense strand to SEQ ID NO: 1680607
ucgacagauauaauuguau

SEQ ID NO: 1680609 - RNA, 19 nt, Artificial Sequence
  Description of Artificial Sequence: Synthetic oligonucleotide
  Sense strand starting at position 355 of SEQ ID NO: 1561554
acaauuauaucugucgauu

SEQ ID NO: 1680610 - RNA, 19 nt, Artificial Sequence
  Description of Artificial Sequence: Synthetic oligonucleotide
  Antisense strand to SEQ ID NO: 1680609
aaucgacagauauaauugu

SEQ ID NO: 1680611 - RNA, 19 nt, Artificial Sequence
  Description of Artificial Sequence: Synthetic oligonucleotide
  Sense strand starting at position 468 of SEQ ID NO: 1561554
gcuccuguucuguagagag

SEQ ID NO: 1680612 - RNA, 19 nt, Artificial Sequence
  Description of Artificial Sequence: Synthetic oligonucleotide
  Antisense strand to SEQ ID NO: 1680611
cucucuacagaacaggagc

SEQ ID NO: 1680613 - RNA, 19 nt, Artificial Sequence
  Description of Artificial Sequence: Synthetic oligonucleotide
  Sense strand starting at position 472 of SEQ ID NO: 1561554
cuguucuguagagagucaa

SEQ ID NO: 1680614 - RNA, 19 nt, Artificial Sequence
  Description of Artificial Sequence: Synthetic oligonucleotide
  Antisense strand to SEQ ID NO: 1680613
uugacucucuacagaacag

SEQ ID NO: 1680615 - RNA, 19 nt, Artificial Sequence
  Description of Artificial Sequence: Synthetic oligonucleotide
  Sense strand starting at position 746 of SEQ ID NO: 1561554
cucagagagaucuggcaag

SEQ ID NO: 1680616 - RNA, 19 nt, Artificial Sequence
  Description of Artificial Sequence: Synthetic oligonucleotide
  Antisense strand to SEQ ID NO: 1680615
cuugccagaucucucugag

SEQ ID NO: 1680617 - RNA, 19 nt, Artificial Sequence
  Description of Artificial Sequence: Synthetic oligonucleotide
  Sense strand starting at position 818 of SEQ ID NO: 1561554
accaauuucugugcgguca

SEQ ID NO: 1680618 - RNA, 19 nt, Artificial Sequence
  Description of Artificial Sequence: Synthetic oligonucleotide
  Antisense strand to SEQ ID NO: 1680617
ugaccgcacagaaauuggu

SEQ ID NO: 1680619 - RNA, 19 nt, Artificial Sequence
  Description of Artificial Sequence: Synthetic oligonucleotide
  Sense strand starting at position 972 of SEQ ID NO: 1561554
ucccaaauaugggucuaaa

SEQ ID NO: 1680620 - RNA, 19 nt, Artificial Sequence
  Description of Artificial Sequence: Synthetic oligonucleotide
  Antisense strand to SEQ ID NO: 1680619
uuuagacccauauuuggga

SEQ ID NO: 1680621 - RNA, 19 nt, Artificial Sequence
  Description of Artificial Sequence: Synthetic oligonucleotide
  Sense strand starting at position 1086 of SEQ ID NO: 1561554
ugugacuauuaaguggaaa

SEQ ID NO: 1680622 - RNA, 19 nt, Artificial Sequence
  Description of Artificial Sequence: Synthetic oligonucleotide
  Antisense strand to SEQ ID NO: 1680621
uuuccacuuaauagucaca

SEQ ID NO: 1680623 - RNA, 19 nt, Artificial Sequence
  Description of Artificial Sequence: Synthetic oligonucleotide
  Sense strand starting at position 1087 of SEQ ID NO: 1561554
gugacuauuaaguggaaag

SEQ ID NO: 1680624 - RNA, 19 nt, Artificial Sequence
  Description of Artificial Sequence: Synthetic oligonucleotide
  Antisense strand to SEQ ID NO: 1680623
cuuuccacuuaauagucac

SEQ ID NO: 1680625 - RNA, 19 nt, Artificial Sequence
  Description of Artificial Sequence: Synthetic oligonucleotide
  Sense strand starting at position 1194 of SEQ ID NO: 1561554
gcaugucuugaacaaauac

SEQ ID NO: 1680626 - RNA, 19 nt, Artificial Sequence
  Description of Artificial Sequence: Synthetic oligonucleotide
  Antisense strand to SEQ ID NO: 1680625
guauuuguucaagacaugc

SEQ ID NO: 1680627 - RNA, 19 nt, Artificial Sequence
  Description of Artificial Sequence: Synthetic oligonucleotide
  Sense strand starting at position 1542 of SEQ ID NO: 1561554
cugcgcuuucuuguguaaa

SEQ ID NO: 1680628 - RNA, 19 nt, Artificial Sequence
  Description of Artificial Sequence: Synthetic oligonucleotide
  Antisense strand to SEQ ID NO: 1680627
uuuacacaagaaagcgcag

SEQ ID NO: 1680629 - RNA, 19 nt, Artificial Sequence
  Description of Artificial Sequence: Synthetic oligonucleotide
  Sense strand starting at position 1761 of SEQ ID NO: 1561554
cgucacucaugaucucaca

SEQ ID NO: 1680630 - RNA, 19 nt, Artificial Sequence
  Description of Artificial Sequence: Synthetic oligonucleotide
  Antisense strand to SEQ ID NO: 1680629
ugugagaucaugagugacg

SEQ ID NO: 1680631 - RNA, 19 nt, Artificial Sequence
  Description of Artificial Sequence: Synthetic oligonucleotide
  Sense strand starting at position 2078 of SEQ ID NO: 1561554
gguugaucccagcauacua

SEQ ID NO: 1680632 - RNA, 19 nt, Artificial Sequence
  Description of Artificial Sequence: Synthetic oligonucleotide
  Antisense strand to SEQ ID NO: 1680631
uaguaugcugggaucaacc

SEQ ID NO: 1680633 - RNA, 19 nt, Artificial Sequence
  Description of Artificial Sequence: Synthetic oligonucleotide
  Sense strand starting at position 2164 of SEQ ID NO: 1561554
gguuguugccaugagcaag

SEQ ID NO: 1680634 - RNA, 19 nt, Artificial Sequence
  Description of Artificial Sequence: Synthetic oligonucleotide
  Antisense strand to SEQ ID NO: 1680633
cuugcucauggcaacaacc

SEQ ID NO: 1680635 - RNA, 19 nt, Artificial Sequence
  Description of Artificial Sequence: Synthetic oligonucleotide
  Sense strand starting at position 2217 of SEQ ID NO: 1561554
gcgucaguauaauuuacuu

SEQ ID NO: 1680636 - RNA, 19 nt, Artificial Sequence
  Description of Artificial Sequence: Synthetic oligonucleotide
  Antisense strand to SEQ ID NO: 1680635
aaguaaauuauacugacgc

SEQ ID NO: 1680637 - RNA, 19 nt, Artificial Sequence
  Description of Artificial Sequence: Synthetic oligonucleotide
  Sense strand starting at position 2309 of SEQ ID NO: 1561554
acauguaggugcuuuaacu

SEQ ID NO: 1680638 - RNA, 19 nt, Artificial Sequence
  Description of Artificial Sequence: Synthetic oligonucleotide
  Antisense strand to SEQ ID NO: 1680637
aguuaaagcaccuacaugu

SEQ ID NO: 1680639 - RNA, 19 nt, Artificial Sequence
  Description of Artificial Sequence: Synthetic oligonucleotide
  Sense strand starting at position 2357 of SEQ ID NO: 1561554
ccacuucucugugcuauuu

SEQ ID NO: 1680640 - RNA, 19 nt, Artificial Sequence
  Description of Artificial Sequence: Synthetic oligonucleotide
  Antisense strand to SEQ ID NO: 1680639
aaauagcacagagaagugg

SEQ ID NO: 1680641 - RNA, 19 nt, Artificial Sequence
  Description of Artificial Sequence: Synthetic oligonucleotide
  Sense strand starting at position 2411 of SEQ ID NO: 1561554
uaaagaauugguugguuau

SEQ ID NO: 1680642 - RNA, 19 nt, Artificial Sequence
  Description of Artificial Sequence: Synthetic oligonucleotide
  Antisense strand to SEQ ID NO: 1680641
auaaccaaccaauucuuua

SEQ ID NO: 1680643 - RNA, 19 nt, Artificial Sequence
  Description of Artificial Sequence: Synthetic oligonucleotide
  Sense strand starting at position 2412 of SEQ ID NO: 1561554
aaagaauugguugguuaua

SEQ ID NO: 1680644 - RNA, 19 nt, Artificial Sequence
  Description of Artificial Sequence: Synthetic oligonucleotide
  Antisense strand to SEQ ID NO: 1680643
uauaaccaaccaauucuuu

SEQ ID NO: 1680645 - RNA, 19 nt, Artificial Sequence
  Description of Artificial Sequence: Synthetic oligonucleotide
  Sense strand starting at position 2413 of SEQ ID NO: 1561554
aagaauugguugguuauau

SEQ ID NO: 1680646 - RNA, 19 nt, Artificial Sequence
  Description of Artificial Sequence: Synthetic oligonucleotide
  Antisense strand to SEQ ID NO: 1680645
auauaaccaaccaauucuu

SEQ ID NO: 1680647 - RNA, 19 nt, Artificial Sequence
  Description of Artificial Sequence: Synthetic oligonucleotide
  Sense strand starting at position 2414 of SEQ ID NO: 1561554
agaauugguugguuauaua

SEQ ID NO: 1680648 - RNA, 19 nt, Artificial Sequence
  Description of Artificial Sequence: Synthetic oligonucleotide
  Antisense strand to SEQ ID NO: 1680647
uauauaaccaaccaauucu

SEQ ID NO: 1680649 - RNA, 19 nt, Artificial Sequence
  Description of Artificial Sequence: Synthetic oligonucleotide
  Sense strand starting at position 2439 of SEQ ID NO: 1561554
gaggaagugugguucacau

SEQ ID NO: 1680650 - RNA, 19 nt, Artificial Sequence
  Description of Artificial Sequence: Synthetic oligonucleotide
  Antisense strand to SEQ ID NO: 1680649
augugaaccacacuuccuc

SEQ ID NO: 1680651 - RNA, 19 nt, Artificial Sequence
  Description of Artificial Sequence: Synthetic oligonucleotide
  Sense strand starting at position 2441 of SEQ ID NO: 1561554
ggaagugugguucacauug

SEQ ID NO: 1680652 - RNA, 19 nt, Artificial Sequence
  Description of Artificial Sequence: Synthetic oligonucleotide
  Antisense strand to SEQ ID NO: 1680651
caaugugaaccacacuucc

SEQ ID NO: 1680653 - RNA, 19 nt, Artificial Sequence
  Description of Artificial Sequence: Synthetic oligonucleotide
  Sense strand starting at position 2446 of SEQ ID NO: 1561554
ugugguucacauuggagau

SEQ ID NO: 1680654 - RNA, 19 nt, Artificial Sequence
  Description of Artificial Sequence: Synthetic oligonucleotide
  Antisense strand to SEQ ID NO: 1680653
aucuccaaugugaaccaca

SEQ ID NO: 1680655 - RNA, 19 nt, Artificial Sequence
  Description of Artificial Sequence: Synthetic oligonucleotide
  Sense strand starting at position 2468 of SEQ ID NO: 1561554
agaaucaaauguccuggau

SEQ ID NO: 1680656 - RNA, 19 nt, Artificial Sequence
  Description of Artificial Sequence: Synthetic oligonucleotide
  Antisense strand to SEQ ID NO: 1680655
auccaggacauuugauucu

SEQ ID NO: 1680657 - RNA, 19 nt, Artificial Sequence
  Description of Artificial Sequence: Synthetic oligonucleotide
  Sense strand starting at position 2471 of SEQ ID NO: 1561554
aucaaauguccuggauucu

SEQ ID NO: 1680658 - RNA, 19 nt, Artificial Sequence
  Description of Artificial Sequence: Synthetic oligonucleotide
  Antisense strand to SEQ ID NO: 1680657
agaauccaggacauuugau

SEQ ID NO: 1680659 - RNA, 19 nt, Artificial Sequence
  Description of Artificial Sequence: Synthetic oligonucleotide
  Sense strand starting at position 2472 of SEQ ID NO: 1561554
ucaaauguccuggauucuu

SEQ ID NO: 1680660 - RNA, 19 nt, Artificial Sequence
  Description of Artificial Sequence: Synthetic oligonucleotide
  Antisense strand to SEQ ID NO: 1680659
aagaauccaggacauuuga

SEQ ID NO: 1680661 - RNA, 19 nt, Artificial Sequence
  Description of Artificial Sequence: Synthetic oligonucleotide
  Sense strand starting at position 2477 of SEQ ID NO: 1561554
uguccuggauucuucgaga

SEQ ID NO: 1680662 - RNA, 19 nt, Artificial Sequence
  Description of Artificial Sequence: Synthetic oligonucleotide
  Antisense strand to SEQ ID NO: 1680661
ucucgaagaauccaggaca

SEQ ID NO: 1680663 - RNA, 19 nt, Artificial Sequence
  Description of Artificial Sequence: Synthetic oligonucleotide
  Sense strand starting at position 2492 of SEQ ID NO: 1561554
gagacaauguuccuguuau

SEQ ID NO: 1680664 - RNA, 19 nt, Artificial Sequence
  Description of Artificial Sequence: Synthetic oligonucleotide
  Antisense strand to SEQ ID NO: 1680663
auaacaggaacauugucuc

SEQ ID NO: 1680665 - RNA, 19 nt, Artificial Sequence
  Description of Artificial Sequence: Synthetic oligonucleotide
  Sense strand starting at position 2499 of SEQ ID NO: 1561554
uguuccuguuaucuggaga

SEQ ID NO: 1680666 - RNA, 19 nt, Artificial Sequence
  Description of Artificial Sequence: Synthetic oligonucleotide
  Antisense strand to SEQ ID NO: 1680665
ucuccagauaacaggaaca

SEQ ID NO: 1680667 - RNA, 19 nt, Artificial Sequence
  Description of Artificial Sequence: Synthetic oligonucleotide
  Sense strand starting at position 2500 of SEQ ID NO: 1561554
guuccuguuaucuggagag

SEQ ID NO: 1680668 - RNA, 19 nt, Artificial Sequence
  Description of Artificial Sequence: Synthetic oligonucleotide
  Antisense strand to SEQ ID NO: 1680667
cucuccagauaacaggaac

SEQ ID NO: 1680669 - RNA, 19 nt, Artificial Sequence
  Description of Artificial Sequence: Synthetic oligonucleotide
  Sense strand starting at position 2668 of SEQ ID NO: 1561554
acuguuguagucuaacaau

SEQ ID NO: 1680670 - RNA, 19 nt, Artificial Sequence
  Description of Artificial Sequence: Synthetic oligonucleotide
  Antisense strand to SEQ ID NO: 1680669
auuguuagacuacaacagu

SEQ ID NO: 1680671 - RNA, 19 nt, Artificial Sequence
  Description of Artificial Sequence: Synthetic oligonucleotide
  Sense strand starting at position 3347 of SEQ ID NO: 1561554
gggugcuaccuacagguaa

SEQ ID NO: 1680672 - RNA, 19 nt, Artificial Sequence
  Description of Artificial Sequence: Synthetic oligonucleotide
  Antisense strand to SEQ ID NO: 1680671
uuaccuguagguagcaccc

SEQ ID NO: 1680673 - RNA, 19 nt, Artificial Sequence
  Description of Artificial Sequence: Synthetic oligonucleotide
  Sense strand starting at position 3468 of SEQ ID NO: 1561554
caaaguagacuccggacau

SEQ ID NO: 1680674 - RNA, 19 nt, Artificial Sequence
  Description of Artificial Sequence: Synthetic oligonucleotide
  Antisense strand to SEQ ID NO: 1680673
auguccggagucuacuuug

SEQ ID NO: 1680675 - RNA, 19 nt, Artificial Sequence
  Description of Artificial Sequence: Synthetic oligonucleotide
  Sense strand starting at position 3485 of SEQ ID NO: 1561554
auagacuauuaccagagau

SEQ ID NO: 1680676 - RNA, 19 nt, Artificial Sequence
  Description of Artificial Sequence: Synthetic oligonucleotide
  Antisense strand to SEQ ID NO: 1680675
aucucugguaauagucuau

SEQ ID NO: 1680677 - RNA, 19 nt, Artificial Sequence
  Description of Artificial Sequence: Synthetic oligonucleotide
  Sense strand starting at position 3528 of SEQ ID NO: 1561554
ggagauagcucaucgagua

SEQ ID NO: 1680678 - RNA, 19 nt, Artificial Sequence
  Description of Artificial Sequence: Synthetic oligonucleotide
  Antisense strand to SEQ ID NO: 1680677
uacucgaugagcuaucucc

SEQ ID NO: 1680679 - RNA, 19 nt, Artificial Sequence
  Description of Artificial Sequence: Synthetic oligonucleotide
  Sense strand starting at position 3529 of SEQ ID NO: 1561554
gagauagcucaucgaguag

SEQ ID NO: 1680680 - RNA, 19 nt, Artificial Sequence
  Description of Artificial Sequence: Synthetic oligonucleotide
  Antisense strand to SEQ ID NO: 1680679
cuacucgaugagcuaucuc

SEQ ID NO: 1680681 - RNA, 19 nt, Artificial Sequence
  Description of Artificial Sequence: Synthetic oligonucleotide
  Sense strand starting at position 160 of SEQ ID NO: 1561555
gugcuaagagaguggauau

SEQ ID NO: 1680682 - RNA, 19 nt, Artificial Sequence
  Description of Artificial Sequence: Synthetic oligonucleotide
  Antisense strand to SEQ ID NO: 1680681
auauccacucucuuagcac

SEQ ID NO: 1680683 - RNA, 19 nt, Artificial Sequence
  Description of Artificial Sequence: Synthetic oligonucleotide
  Sense strand starting at position 273 of SEQ ID NO: 1561555
caucauguugcacacgaua

SEQ ID NO: 1680684 - RNA, 19 nt, Artificial Sequence
  Description of Artificial Sequence: Synthetic oligonucleotide
  Antisense strand to SEQ ID NO: 1680683
uaucgugugcaacaugaug

SEQ ID NO: 1680685 - RNA, 19 nt, Artificial Sequence
  Description of Artificial Sequence: Synthetic oligonucleotide
  Sense strand starting at position 276 of SEQ ID NO: 1561555
cauguugcacacgauaaau

SEQ ID NO: 1680686 - RNA, 19 nt, Artificial Sequence
  Description of Artificial Sequence: Synthetic oligonucleotide
  Antisense strand to SEQ ID NO: 1680685
auuuaucgugugcaacaug

SEQ ID NO: 1680687 - RNA, 19 nt, Artificial Sequence
  Description of Artificial Sequence: Synthetic oligonucleotide
  Sense strand starting at position 326 of SEQ ID NO: 1561555
acuucuguccuagaucauu

SEQ ID NO: 1680688 - RNA, 19 nt, Artificial Sequence
  Description of Artificial Sequence: Synthetic oligonucleotide
  Antisense strand to SEQ ID NO: 1680687
aaugaucuaggacagaagu

SEQ ID NO: 1680689 - RNA, 19 nt, Artificial Sequence
  Description of Artificial Sequence: Synthetic oligonucleotide
  Sense strand starting at position 334 of SEQ ID NO: 1561555
ccuagaucauuugagcaac

SEQ ID NO: 1680690 - RNA, 19 nt, Artificial Sequence
  Description of Artificial Sequence: Synthetic oligonucleotide
  Antisense strand to SEQ ID NO: 1680689
guugcucaaaugaucuagg

SEQ ID NO: 1680691 - RNA, 19 nt, Artificial Sequence
  Description of Artificial Sequence: Synthetic oligonucleotide
  Sense strand starting at position 408 of SEQ ID NO: 1561555
gcuccuguccuauagaaag

SEQ ID NO: 1680692 - RNA, 19 nt, Artificial Sequence
  Description of Artificial Sequence: Synthetic oligonucleotide
  Antisense strand to SEQ ID NO: 1680691
cuuucuauaggacaggagc

SEQ ID NO: 1680693 - RNA, 19 nt, Artificial Sequence
  Description of Artificial Sequence: Synthetic oligonucleotide
  Sense strand starting at position 543 of SEQ ID NO: 1561555
ucauuacaagccugagaag

SEQ ID NO: 1680694 - RNA, 19 nt, Artificial Sequence
  Description of Artificial Sequence: Synthetic oligonucleotide
  Antisense strand to SEQ ID NO: 1680693
cuucucaggcuuguaauga

SEQ ID NO: 1680695 - RNA, 19 nt, Artificial Sequence
  Description of Artificial Sequence: Synthetic oligonucleotide
  Sense strand starting at position 746 of SEQ ID NO: 1561555
uccugacucugguugauac

SEQ ID NO: 1680696 - RNA, 19 nt, Artificial Sequence
  Description of Artificial Sequence: Synthetic oligonucleotide
  Antisense strand to SEQ ID NO: 1680695
guaucaaccagagucagga

SEQ ID NO: 1680697 - RNA, 19 nt, Artificial Sequence
  Description of Artificial Sequence: Synthetic oligonucleotide
  Sense strand starting at position 1011 of SEQ ID NO: 1561555
gccaaauggcucugugaau

SEQ ID NO: 1680698 - RNA, 19 nt, Artificial Sequence
  Description of Artificial Sequence: Synthetic oligonucleotide
  Antisense strand to SEQ ID NO: 1680697
auucacagagccauuuggc

SEQ ID NO: 1680699 - RNA, 19 nt, Artificial Sequence
  Description of Artificial Sequence: Synthetic oligonucleotide
  Sense strand starting at position 1012 of SEQ ID NO: 1561555
ccaaauggcucugugaaua

SEQ ID NO: 1680700 - RNA, 19 nt, Artificial Sequence
  Description of Artificial Sequence: Synthetic oligonucleotide
  Antisense strand to SEQ ID NO: 1680699
uauucacagagccauuugg

SEQ ID NO: 1680701 - RNA, 19 nt, Artificial Sequence
  Description of Artificial Sequence: Synthetic oligonucleotide
  Sense strand starting at position 1024 of SEQ ID NO: 1561555
gugaauauuaaauggcaag

SEQ ID NO: 1680702 - RNA, 19 nt, Artificial Sequence
  Description of Artificial Sequence: Synthetic oligonucleotide
  Antisense strand to SEQ ID NO: 1680701
cuugccauuuaauauucac

SEQ ID NO: 1680703 - RNA, 19 nt, Artificial Sequence
  Description of Artificial Sequence: Synthetic oligonucleotide
  Sense strand starting at position 1210 of SEQ ID NO: 1561555
uugacuuaagugugcaaca

SEQ ID NO: 1680704 - RNA, 19 nt, Artificial Sequence
  Description of Artificial Sequence: Synthetic oligonucleotide
  Antisense strand to SEQ ID NO: 1680703
uguugcacacuuaagucaa

SEQ ID NO: 1680705 - RNA, 19 nt, Artificial Sequence
  Description of Artificial Sequence: Synthetic oligonucleotide
  Sense strand starting at position 1211 of SEQ ID NO: 1561555
ugacuuaagugugcaacaa

SEQ ID NO: 1680706 - RNA, 19 nt, Artificial Sequence
  Description of Artificial Sequence: Synthetic oligonucleotide
  Antisense strand to SEQ ID NO: 1680705
uuguugcacacuuaaguca

SEQ ID NO: 1680707 - RNA, 19 nt, Artificial Sequence
  Description of Artificial Sequence: Synthetic oligonucleotide
  Sense strand starting at position 1212 of SEQ ID NO: 1561555
gacuuaagugugcaacaau

SEQ ID NO: 1680708 - RNA, 19 nt, Artificial Sequence
  Description of Artificial Sequence: Synthetic oligonucleotide
  Antisense strand to SEQ ID NO: 1680707
auuguugcacacuuaaguc

SEQ ID NO: 1680709 - RNA, 19 nt, Artificial Sequence
  Description of Artificial Sequence: Synthetic oligonucleotide
  Sense strand starting at position 1215 of SEQ ID NO: 1561555
uuaagugugcaacaauaac

SEQ ID NO: 1680710 - RNA, 19 nt, Artificial Sequence
  Description of Artificial Sequence: Synthetic oligonucleotide
  Antisense strand to SEQ ID NO: 1680709
guuauuguugcacacuuaa

SEQ ID NO: 1680711 - RNA, 19 nt, Artificial Sequence
  Description of Artificial Sequence: Synthetic oligonucleotide
  Sense strand starting at position 1364 of SEQ ID NO: 1561555
ccucacuucguacgaaaug

SEQ ID NO: 1680712 - RNA, 19 nt, Artificial Sequence
  Description of Artificial Sequence: Synthetic oligonucleotide
  Antisense strand to SEQ ID NO: 1680711
cauuucguacgaagugagg

SEQ ID NO: 1680713 - RNA, 19 nt, Artificial Sequence
  Description of Artificial Sequence: Synthetic oligonucleotide
  Sense strand starting at position 1401 of SEQ ID NO: 1561555
gaggaaucggucugaguuc

SEQ ID NO: 1680714 - RNA, 19 nt, Artificial Sequence
  Description of Artificial Sequence: Synthetic oligonucleotide
  Antisense strand to SEQ ID NO: 1680713
gaacucagaccgauuccuc

SEQ ID NO: 1680715 - RNA, 19 nt, Artificial Sequence
  Description of Artificial Sequence: Synthetic oligonucleotide
  Sense strand starting at position 1451 of SEQ ID NO: 1561555
gacgcuggguucucaacau

SEQ ID NO: 1680716 - RNA, 19 nt, Artificial Sequence
  Description of Artificial Sequence: Synthetic oligonucleotide
  Antisense strand to SEQ ID NO: 1680715
auguugagaacccagcguc

SEQ ID NO: 1680717 - RNA, 19 nt, Artificial Sequence
  Description of Artificial Sequence: Synthetic oligonucleotide
  Sense strand starting at position 1825 of SEQ ID NO: 1561555
cgccuaaggaucuggcaga

SEQ ID NO: 1680718 - RNA, 19 nt, Artificial Sequence
  Description of Artificial Sequence: Synthetic oligonucleotide
  Antisense strand to SEQ ID NO: 1680717
ucugccagauccuuaggcg

SEQ ID NO: 1680719 - RNA, 19 nt, Artificial Sequence
  Description of Artificial Sequence: Synthetic oligonucleotide
  Sense strand starting at position 2073 of SEQ ID NO: 1561555
cucagaagucuuggucuau

SEQ ID NO: 1680720 - RNA, 19 nt, Artificial Sequence
  Description of Artificial Sequence: Synthetic oligonucleotide
  Antisense strand to SEQ ID NO: 1680719
auagaccaagacuucugag

SEQ ID NO: 1680721 - RNA, 19 nt, Artificial Sequence
  Description of Artificial Sequence: Synthetic oligonucleotide
  Sense strand starting at position 2074 of SEQ ID NO: 1561555
ucagaagucuuggucuaug

SEQ ID NO: 1680722 - RNA, 19 nt, Artificial Sequence
  Description of Artificial Sequence: Synthetic oligonucleotide
  Antisense strand to SEQ ID NO: 1680721
cauagaccaagacuucuga

SEQ ID NO: 1680723 - RNA, 19 nt, Artificial Sequence
  Description of Artificial Sequence: Synthetic oligonucleotide
  Sense strand starting at position 2102 of SEQ ID NO: 1561555
gguugaucccagcauacau

SEQ ID NO: 1680724 - RNA, 19 nt, Artificial Sequence
  Description of Artificial Sequence: Synthetic oligonucleotide
  Antisense strand to SEQ ID NO: 1680723
auguaugcugggaucaacc

SEQ ID NO: 1680725 - RNA, 19 nt, Artificial Sequence
  Description of Artificial Sequence: Synthetic oligonucleotide
  Sense strand starting at position 2234 of SEQ ID NO: 1561555
cggugcgucaggguaaauu

SEQ ID NO: 1680726 - RNA, 19 nt, Artificial Sequence
  Description of Artificial Sequence: Synthetic oligonucleotide
  Antisense strand to SEQ ID NO: 1680725
aauuuacccugacgcaccg

SEQ ID NO: 1680727 - RNA, 19 nt, Artificial Sequence
  Description of Artificial Sequence: Synthetic oligonucleotide
  Sense strand starting at position 2339 of SEQ ID NO: 1561555
uugaccucuucgucucaga

SEQ ID NO: 1680728 - RNA, 19 nt, Artificial Sequence
  Description of Artificial Sequence: Synthetic oligonucleotide
  Antisense strand to SEQ ID NO: 1680727
ucugagacgaagaggucaa

SEQ ID NO: 1680729 - RNA, 19 nt, Artificial Sequence
  Description of Artificial Sequence: Synthetic oligonucleotide
  Sense strand starting at position 2510 of SEQ ID NO: 1561555
gaggaagugugguuuacau

SEQ ID NO: 1680730 - RNA, 19 nt, Artificial Sequence
  Description of Artificial Sequence: Synthetic oligonucleotide
  Antisense strand to SEQ ID NO: 1680729
auguaaaccacacuuccuc

SEQ ID NO: 1680731 - RNA, 19 nt, Artificial Sequence
  Description of Artificial Sequence: Synthetic oligonucleotide
  Sense strand starting at position 2512 of SEQ ID NO: 1561555
ggaagugugguuuacauga

SEQ ID NO: 1680732 - RNA, 19 nt, Artificial Sequence
  Description of Artificial Sequence: Synthetic oligonucleotide
  Antisense strand to SEQ ID NO: 1680731
ucauguaaaccacacuucc

SEQ ID NO: 1680733 - RNA, 19 nt, Artificial Sequence
  Description of Artificial Sequence: Synthetic oligonucleotide
  Sense strand starting at position 2517 of SEQ ID NO: 1561555
ugugguuuacaugagagau

SEQ ID NO: 1680734 - RNA, 19 nt, Artificial Sequence
  Description of Artificial Sequence: Synthetic oligonucleotide
  Antisense strand to SEQ ID NO: 1680733
aucucucauguaaaccaca

SEQ ID NO: 1680735 - RNA, 19 nt, Artificial Sequence
  Description of Artificial Sequence: Synthetic oligonucleotide
  Sense strand starting at position 2519 of SEQ ID NO: 1561555
ugguuuacaugagagauuu

SEQ ID NO: 1680736 - RNA, 19 nt, Artificial Sequence
  Description of Artificial Sequence: Synthetic oligonucleotide
  Antisense strand to SEQ ID NO: 1680735
aaaucucucauguaaacca

SEQ ID NO: 1680737 - RNA, 19 nt, Artificial Sequence
  Description of Artificial Sequence: Synthetic oligonucleotide
  Sense strand starting at position 2747 of SEQ ID NO: 1561555
guaaucuagcaacauugaa

SEQ ID NO: 1680738 - RNA, 19 nt, Artificial Sequence
  Description of Artificial Sequence: Synthetic oligonucleotide
  Antisense strand to SEQ ID NO: 1680737
uucaauguugcuagauuac

SEQ ID NO: 1680739 - RNA, 19 nt, Artificial Sequence
  Description of Artificial Sequence: Synthetic oligonucleotide
  Sense strand starting at position 2804 of SEQ ID NO: 1561555
agcggaaacguggaauaau

SEQ ID NO: 1680740 - RNA, 19 nt, Artificial Sequence
  Description of Artificial Sequence: Synthetic oligonucleotide
  Antisense strand to SEQ ID NO: 1680739
auuauuccacguuuccgcu

SEQ ID NO: 1680741 - RNA, 19 nt, Artificial Sequence
  Description of Artificial Sequence: Synthetic oligonucleotide
  Sense strand starting at position 2805 of SEQ ID NO: 1561555
gcggaaacguggaauaaug

SEQ ID NO: 1680742 - RNA, 19 nt, Artificial Sequence
  Description of Artificial Sequence: Synthetic oligonucleotide
  Antisense strand to SEQ ID NO: 1680741
cauuauuccacguuuccgc

SEQ ID NO: 1680743 - RNA, 19 nt, Artificial Sequence
  Description of Artificial Sequence: Synthetic oligonucleotide
  Sense strand starting at position 2907 of SEQ ID NO: 1561555
aaguguaacuggucuaaca

SEQ ID NO: 1680744 - RNA, 19 nt, Artificial Sequence
  Description of Artificial Sequence: Synthetic oligonucleotide
  Antisense strand to SEQ ID NO: 1680743
uguuagaccaguuacacuu

SEQ ID NO: 1680745 - RNA, 19 nt, Artificial Sequence
  Description of Artificial Sequence: Synthetic oligonucleotide
  Sense strand starting at position 2933 of SEQ ID NO: 1561555
uuaagaagguugucagguu

SEQ ID NO: 1680746 - RNA, 19 nt, Artificial Sequence
  Description of Artificial Sequence: Synthetic oligonucleotide
  Antisense strand to SEQ ID NO: 1680745
aaccugacaaccuucuuaa

SEQ ID NO: 1680747 - RNA, 19 nt, Artificial Sequence
  Description of Artificial Sequence: Synthetic oligonucleotide
  Sense strand starting at position 3343 of SEQ ID NO: 1561555
ggguauagauuaucuaaac

SEQ ID NO: 1680748 - RNA, 19 nt, Artificial Sequence
  Description of Artificial Sequence: Synthetic oligonucleotide
  Antisense strand to SEQ ID NO: 1680747
guuuagauaaucuauaccc

SEQ ID NO: 1680749 - RNA, 19 nt, Artificial Sequence
  Description of Artificial Sequence: Synthetic oligonucleotide
  Sense strand starting at position 3571 of SEQ ID NO: 1561555
acuauauauuguccaaagu

SEQ ID NO: 1680750 - RNA, 19 nt, Artificial Sequence
  Description of Artificial Sequence: Synthetic oligonucleotide
  Antisense strand to SEQ ID NO: 1680749
acuuuggacaauauauagu

SEQ ID NO: 1680751 - RNA, 19 nt, Artificial Sequence
  Description of Artificial Sequence: Synthetic oligonucleotide
  Sense strand starting at position 3572 of SEQ ID NO: 1561555
cuauauauuguccaaagua

SEQ ID NO: 1680752 - RNA, 19 nt, Artificial Sequence
  Description of Artificial Sequence: Synthetic oligonucleotide
  Antisense strand to SEQ ID NO: 1680751
uacuuuggacaauauauag

SEQ ID NO: 1680753 - RNA, 19 nt, Artificial Sequence
  Description of Artificial Sequence: Synthetic oligonucleotide
  Sense strand starting at position 3860 of SEQ ID NO: 1561555
uuugacacagucuauuauu

SEQ ID NO: 1680754 - RNA, 19 nt, Artificial Sequence
  Description of Artificial Sequence: Synthetic oligonucleotide
  Antisense strand to SEQ ID NO: 1680753
aauaauagacugugucaaa

SEQ ID NO: 1680755 - RNA, 19 nt, Artificial Sequence
  Description of Artificial Sequence: Synthetic oligonucleotide
  Sense strand starting at position 3898 of SEQ ID NO: 1561555
guauguaauccucaaugcu

SEQ ID NO: 1680756 - RNA, 19 nt, Artificial Sequence
  Description of Artificial Sequence: Synthetic oligonucleotide
  Antisense strand to SEQ ID NO: 1680755
agcauugaggauuacauac

SEQ ID NO: 1680757 - RNA, 19 nt, Artificial Sequence
  Description of Artificial Sequence: Synthetic oligonucleotide
  Sense strand starting at position 3906 of SEQ ID NO: 1561555
uccucaaugcuggacuuua

SEQ ID NO: 1680758 - RNA, 19 nt, Artificial Sequence
  Description of Artificial Sequence: Synthetic oligonucleotide
  Antisense strand to SEQ ID NO: 1680757
uaaaguccagcauugagga

SEQ ID NO: 1680759 - RNA, 19 nt, Artificial Sequence
  Description of Artificial Sequence: Synthetic oligonucleotide
  Sense strand starting at position 3916 of SEQ ID NO: 1561555
uggacuuuaugguuaauaa

SEQ ID NO: 1680760 - RNA, 19 nt, Artificial Sequence
  Description of Artificial Sequence: Synthetic oligonucleotide
  Antisense strand to SEQ ID NO: 1680759
uuauuaaccauaaagucca

SEQ ID NO: 1680761 - RNA, 19 nt, Artificial Sequence
  Description of Artificial Sequence: Synthetic oligonucleotide
  Sense strand starting at position 60 of SEQ ID NO: 1561556
aggagaaucuauuaaaccu

SEQ ID NO: 1680762 - RNA, 19 nt, Artificial Sequence
  Description of Artificial Sequence: Synthetic oligonucleotide
  Antisense strand to SEQ ID NO: 1680761
agguuuaauagauucuccu

SEQ ID NO: 1680763 - RNA, 19 nt, Artificial Sequence
  Description of Artificial Sequence: Synthetic oligonucleotide
  Sense strand starting at position 67 of SEQ ID NO: 1561556
ucuauuaaaccugggaggu

SEQ ID NO: 1680764 - RNA, 19 nt, Artificial Sequence
  Description of Artificial Sequence: Synthetic oligonucleotide
  Antisense strand to SEQ ID NO: 1680763
accucccagguuuaauaga

SEQ ID NO: 1680765 - RNA, 19 nt, Artificial Sequence
  Description of Artificial Sequence: Synthetic oligonucleotide
  Sense strand starting at position 68 of SEQ ID NO: 1561556
cuauuaaaccugggaggug

SEQ ID NO: 1680766 - RNA, 19 nt, Artificial Sequence
  Description of Artificial Sequence: Synthetic oligonucleotide
  Antisense strand to SEQ ID NO: 1680765
caccucccagguuuaauag

SEQ ID NO: 1680767 - RNA, 19 nt, Artificial Sequence
  Description of Artificial Sequence: Synthetic oligonucleotide
  Sense strand starting at position 195 of SEQ ID NO: 1561556
gugucuguuuaucuuugaa

SEQ ID NO: 1680768 - RNA, 19 nt, Artificial Sequence
  Description of Artificial Sequence: Synthetic oligonucleotide
  Antisense strand to SEQ ID NO: 1680767
uucaaagauaaacagacac

SEQ ID NO: 1680769 - RNA, 19 nt, Artificial Sequence
  Description of Artificial Sequence: Synthetic oligonucleotide
  Sense strand starting at position 197 of SEQ ID NO: 1561556
gucuguuuaucuuugaauc

SEQ ID NO: 1680770 - RNA, 19 nt, Artificial Sequence
  Description of Artificial Sequence: Synthetic oligonucleotide
  Antisense strand to SEQ ID NO: 1680769
gauucaaagauaaacagac

SEQ ID NO: 1680771 - RNA, 19 nt, Artificial Sequence
  Description of Artificial Sequence: Synthetic oligonucleotide
  Sense strand starting at position 386 of SEQ ID NO: 1561556
gugagcugggacuacauau

SEQ ID NO: 1680772 - RNA, 19 nt, Artificial Sequence
  Description of Artificial Sequence: Synthetic oligonucleotide
  Antisense strand to SEQ ID NO: 1680771
auauguagucccagcucac

SEQ ID NO: 1680773 - RNA, 19 nt, Artificial Sequence
  Description of Artificial Sequence: Synthetic oligonucleotide
  Sense strand starting at position 559 of SEQ ID NO: 1561556
accgcauccguccaaauau

SEQ ID NO: 1680774 - RNA, 19 nt, Artificial Sequence
  Description of Artificial Sequence: Synthetic oligonucleotide
  Antisense strand to SEQ ID NO: 1680773
auauuuggacggaugcggu

SEQ ID NO: 1680775 - RNA, 19 nt, Artificial Sequence
  Description of Artificial Sequence: Synthetic oligonucleotide
  Sense strand starting at position 674 of SEQ ID NO: 1561556
uuaucauugggccagguga

SEQ ID NO: 1680776 - RNA, 19 nt, Artificial Sequence
  Description of Artificial Sequence: Synthetic oligonucleotide
  Antisense strand to SEQ ID NO: 1680775
ucaccuggcccaaugauaa

SEQ ID NO: 1680777 - RNA, 19 nt, Artificial Sequence
  Description of Artificial Sequence: Synthetic oligonucleotide
  Sense strand starting at position 676 of SEQ ID NO: 1561556
aucauugggccaggugaga

SEQ ID NO: 1680778 - RNA, 19 nt, Artificial Sequence
  Description of Artificial Sequence: Synthetic oligonucleotide
  Antisense strand to SEQ ID NO: 1680777
ucucaccuggcccaaugau

SEQ ID NO: 1680779 - RNA, 19 nt, Artificial Sequence
  Description of Artificial Sequence: Synthetic oligonucleotide
  Sense strand starting at position 1009 of SEQ ID NO: 1561556
uugaaauacuuggaggauc

SEQ ID NO: 1680780 - RNA, 19 nt, Artificial Sequence
  Description of Artificial Sequence: Synthetic oligonucleotide
  Antisense strand to SEQ ID NO: 1680779
gauccuccaaguauuucaa

SEQ ID NO: 1680781 - RNA, 19 nt, Artificial Sequence
  Description of Artificial Sequence: Synthetic oligonucleotide
  Sense strand starting at position 1037 of SEQ ID NO: 1561556
agcauaggcuucuuuacau

SEQ ID NO: 1680782 - RNA, 19 nt, Artificial Sequence
  Description of Artificial Sequence: Synthetic oligonucleotide
  Antisense strand to SEQ ID NO: 1680781
auguaaagaagccuaugcu

SEQ ID NO: 1680783 - RNA, 19 nt, Artificial Sequence
  Description of Artificial Sequence: Synthetic oligonucleotide
  Sense strand starting at position 1095 of SEQ ID NO: 1561556
gccgaaugaaucugguacu

SEQ ID NO: 1680784 - RNA, 19 nt, Artificial Sequence
  Description of Artificial Sequence: Synthetic oligonucleotide
  Antisense strand to SEQ ID NO: 1680783
aguaccagauucauucggc

SEQ ID NO: 1680785 - RNA, 19 nt, Artificial Sequence
  Description of Artificial Sequence: Synthetic oligonucleotide
  Sense strand starting at position 1149 of SEQ ID NO: 1561556
ccaggacuucucugaacga

SEQ ID NO: 1680786 - RNA, 19 nt, Artificial Sequence
  Description of Artificial Sequence: Synthetic oligonucleotide
  Antisense strand to SEQ ID NO: 1680785
ucguucagagaaguccugg

SEQ ID NO: 1680787 - RNA, 19 nt, Artificial Sequence
  Description of Artificial Sequence: Synthetic oligonucleotide
  Sense strand starting at position 1153 of SEQ ID NO: 1561556
gacuucucugaacgaaggu

SEQ ID NO: 1680788 - RNA, 19 nt, Artificial Sequence
  Description of Artificial Sequence: Synthetic oligonucleotide
  Antisense strand to SEQ ID NO: 1680787
accuucguucagagaaguc

SEQ ID NO: 1680789 - RNA, 19 nt, Artificial Sequence
  Description of Artificial Sequence: Synthetic oligonucleotide
  Sense strand starting at position 1197 of SEQ ID NO: 1561556
gcgccuuaccuggaaucuu

SEQ ID NO: 1680790 - RNA, 19 nt, Artificial Sequence
  Description of Artificial Sequence: Synthetic oligonucleotide
  Antisense strand to SEQ ID NO: 1680789
aagauuccagguaaggcgc

SEQ ID NO: 1680791 - RNA, 19 nt, Artificial Sequence
  Description of Artificial Sequence: Synthetic oligonucleotide
  Sense strand starting at position 1226 of SEQ ID NO: 1561556
uuaugaucucuccacggua

SEQ ID NO: 1680792 - RNA, 19 nt, Artificial Sequence
  Description of Artificial Sequence: Synthetic oligonucleotide
  Antisense strand to SEQ ID NO: 1680791
uaccguggagagaucauaa

SEQ ID NO: 1680793 - RNA, 19 nt, Artificial Sequence
  Description of Artificial Sequence: Synthetic oligonucleotide
  Sense strand starting at position 1268 of SEQ ID NO: 1561556
uccuuaauccgaggcuucu

SEQ ID NO: 1680794 - RNA, 19 nt, Artificial Sequence
  Description of Artificial Sequence: Synthetic oligonucleotide
  Antisense strand to SEQ ID NO: 1680793
agaagccucggauuaagga

SEQ ID NO: 1680795 - RNA, 19 nt, Artificial Sequence
  Description of Artificial Sequence: Synthetic oligonucleotide
  Sense strand starting at position 1274 of SEQ ID NO: 1561556
auccgaggcuucucaaauc

SEQ ID NO: 1680796 - RNA, 19 nt, Artificial Sequence
  Description of Artificial Sequence: Synthetic oligonucleotide
  Antisense strand to SEQ ID NO: 1680795
gauuugagaagccucggau

SEQ ID NO: 1680797 - RNA, 19 nt, Artificial Sequence
  Description of Artificial Sequence: Synthetic oligonucleotide
  Sense strand starting at position 1293 of SEQ ID NO: 1561556
uguuguguucccuaaacaa

SEQ ID NO: 1680798 - RNA, 19 nt, Artificial Sequence
  Description of Artificial Sequence: Synthetic oligonucleotide
  Antisense strand to SEQ ID NO: 1680797
uuguuuagggaacacaaca

SEQ ID NO: 1680799 - RNA, 19 nt, Artificial Sequence
  Description of Artificial Sequence: Synthetic oligonucleotide
  Sense strand starting at position 1511 of SEQ ID NO: 1561556
aacugacguccuggaagaa

SEQ ID NO: 1680800 - RNA, 19 nt, Artificial Sequence
  Description of Artificial Sequence: Synthetic oligonucleotide
  Antisense strand to SEQ ID NO: 1680799
uucuuccaggacgucaguu

SEQ ID NO: 1680801 - RNA, 19 nt, Artificial Sequence
  Description of Artificial Sequence: Synthetic oligonucleotide
  Sense strand starting at position 1567 of SEQ ID NO: 1561556
aagauaagaggcggugaau

SEQ ID NO: 1680802 - RNA, 19 nt, Artificial Sequence
  Description of Artificial Sequence: Synthetic oligonucleotide
  Antisense strand to SEQ ID NO: 1680801
auucaccgccucuuaucuu

SEQ ID NO: 1680803 - RNA, 19 nt, Artificial Sequence
  Description of Artificial Sequence: Synthetic oligonucleotide
  Sense strand starting at position 1578 of SEQ ID NO: 1561556
cggugaauccgagacuuuc

SEQ ID NO: 1680804 - RNA, 19 nt, Artificial Sequence
  Description of Artificial Sequence: Synthetic oligonucleotide
  Antisense strand to SEQ ID NO: 1680803
gaaagucucggauucaccg

SEQ ID NO: 1680805 - RNA, 19 nt, Artificial Sequence
  Description of Artificial Sequence: Synthetic oligonucleotide
  Sense strand starting at position 1735 of SEQ ID NO: 1561556
gggauccgugcgucuucua

SEQ ID NO: 1680806 - RNA, 19 nt, Artificial Sequence
  Description of Artificial Sequence: Synthetic oligonucleotide
  Antisense strand to SEQ ID NO: 1680805
uagaagacgcacggauccc

SEQ ID NO: 1680807 - RNA, 19 nt, Artificial Sequence
  Description of Artificial Sequence: Synthetic oligonucleotide
  Sense strand starting at position 1802 of SEQ ID NO: 1561556
acucuaaaccguuaggaau

SEQ ID NO: 1680808 - RNA, 19 nt, Artificial Sequence
  Description of Artificial Sequence: Synthetic oligonucleotide
  Antisense strand to SEQ ID NO: 1680807
auuccuaacgguuuagagu

SEQ ID NO: 1680809 - RNA, 19 nt, Artificial Sequence
  Description of Artificial Sequence: Synthetic oligonucleotide
  Sense strand starting at position 1916 of SEQ ID NO: 1561556
cagcuugugccagcgacua

SEQ ID NO: 1680810 - RNA, 19 nt, Artificial Sequence
  Description of Artificial Sequence: Synthetic oligonucleotide
  Antisense strand to SEQ ID NO: 1680809
uagucgcuggcacaagcug

SEQ ID NO: 1680811 - RNA, 19 nt, Artificial Sequence
  Description of Artificial Sequence: Synthetic oligonucleotide
  Sense strand starting at position 2003 of SEQ ID NO: 1561556
gcugguagcccggaauaca

SEQ ID NO: 1680812 - RNA, 19 nt, Artificial Sequence
  Description of Artificial Sequence: Synthetic oligonucleotide
  Antisense strand to SEQ ID NO: 1680811
uguauuccgggcuaccagc

SEQ ID NO: 1680813 - RNA, 19 nt, Artificial Sequence
  Description of Artificial Sequence: Synthetic oligonucleotide
  Sense strand starting at position 2768 of SEQ ID NO: 1561556
uguggaacugcaugucaau

SEQ ID NO: 1680814 - RNA, 19 nt, Artificial Sequence
  Description of Artificial Sequence: Synthetic oligonucleotide
  Antisense strand to SEQ ID NO: 1680813
auugacaugcaguuccaca

SEQ ID NO: 1680815 - RNA, 19 nt, Artificial Sequence
  Description of Artificial Sequence: Synthetic oligonucleotide
  Sense strand starting at position 2814 of SEQ ID NO: 1561556
ccagcaugaccucagucau

SEQ ID NO: 1680816 - RNA, 19 nt, Artificial Sequence
  Description of Artificial Sequence: Synthetic oligonucleotide
  Antisense strand to SEQ ID NO: 1680815
augacugaggucaugcugg

SEQ ID NO: 1680817 - RNA, 19 nt, Artificial Sequence
  Description of Artificial Sequence: Synthetic oligonucleotide
  Sense strand starting at position 2820 of SEQ ID NO: 1561556
ugaccucagucaucuguga

SEQ ID NO: 1680818 - RNA, 19 nt, Artificial Sequence
  Description of Artificial Sequence: Synthetic oligonucleotide
  Antisense strand to SEQ ID NO: 1680817
ucacagaugacugagguca

SEQ ID NO: 1680819 - RNA, 19 nt, Artificial Sequence
  Description of Artificial Sequence: Synthetic oligonucleotide
  Sense strand starting at position 2824 of SEQ ID NO: 1561556
cucagucaucugugaggac

SEQ ID NO: 1680820 - RNA, 19 nt, Artificial Sequence
  Description of Artificial Sequence: Synthetic oligonucleotide
  Antisense strand to SEQ ID NO: 1680819
guccucacagaugacugag

SEQ ID NO: 1680821 - RNA, 19 nt, Artificial Sequence
  Description of Artificial Sequence: Synthetic oligonucleotide
  Sense strand starting at position 3076 of SEQ ID NO: 1561556
gaaaucagaugaguuucca

SEQ ID NO: 1680822 - RNA, 19 nt, Artificial Sequence
  Description of Artificial Sequence: Synthetic oligonucleotide
  Antisense strand to SEQ ID NO: 1680821
uggaaacucaucugauuuc

SEQ ID NO: 1680823 - RNA, 19 nt, Artificial Sequence
  Description of Artificial Sequence: Synthetic oligonucleotide
  Sense strand starting at position 3208 of SEQ ID NO: 1561556
acuccaguuguccaacacu

SEQ ID NO: 1680824 - RNA, 19 nt, Artificial Sequence
  Description of Artificial Sequence: Synthetic oligonucleotide
  Antisense strand to SEQ ID NO: 1680823
aguguuggacaacuggagu

SEQ ID NO: 1680825 - RNA, 19 nt, Artificial Sequence
  Description of Artificial Sequence: Synthetic oligonucleotide
  Sense strand starting at position 3230 of SEQ ID NO: 1561556
gcguuugagauguaaacca

SEQ ID NO: 1680826 - RNA, 19 nt, Artificial Sequence
  Description of Artificial Sequence: Synthetic oligonucleotide
  Antisense strand to SEQ ID NO: 1680825
ugguuuacaucucaaacgc

SEQ ID NO: 1680827 - RNA, 19 nt, Artificial Sequence
  Description of Artificial Sequence: Synthetic oligonucleotide
  Sense strand starting at position 3268 of SEQ ID NO: 1561556
uucggagccuuauuuauua

SEQ ID NO: 1680828 - RNA, 19 nt, Artificial Sequence
  Description of Artificial Sequence: Synthetic oligonucleotide
  Antisense strand to SEQ ID NO: 1680827
uaauaaauaaggcuccgaa

SEQ ID NO: 1680829 - RNA, 19 nt, Artificial Sequence
  Description of Artificial Sequence: Synthetic oligonucleotide
  Sense strand starting at position 3388 of SEQ ID NO: 1561556
gcauuagcuccuggcauuu

SEQ ID NO: 1680830 - RNA, 19 nt, Artificial Sequence
  Description of Artificial Sequence: Synthetic oligonucleotide
  Antisense strand to SEQ ID NO: 1680829
aaaugccaggagcuaaugc

SEQ ID NO: 1680831 - RNA, 19 nt, Artificial Sequence
  Description of Artificial Sequence: Synthetic oligonucleotide
  Sense strand starting at position 3448 of SEQ ID NO: 1561556
uuucuuuauguuggauuga

SEQ ID NO: 1680832 - RNA, 19 nt, Artificial Sequence
  Description of Artificial Sequence: Synthetic oligonucleotide
  Antisense strand to SEQ ID NO: 1680831
ucaauccaacauaaagaaa

SEQ ID NO: 1680833 - RNA, 19 nt, Artificial Sequence
  Description of Artificial Sequence: Synthetic oligonucleotide
  Sense strand starting at position 3453 of SEQ ID NO: 1561556
uuauguuggauugauguau

SEQ ID NO: 1680834 - RNA, 19 nt, Artificial Sequence
  Description of Artificial Sequence: Synthetic oligonucleotide
  Antisense strand to SEQ ID NO: 1680833
auacaucaauccaacauaa

SEQ ID NO: 1680835 - RNA, 19 nt, Artificial Sequence
  Description of Artificial Sequence: Synthetic oligonucleotide
  Sense strand starting at position 3457 of SEQ ID NO: 1561556
guuggauugauguauuacu

SEQ ID NO: 1680836 - RNA, 19 nt, Artificial Sequence
  Description of Artificial Sequence: Synthetic oligonucleotide
  Antisense strand to SEQ ID NO: 1680835
aguaauacaucaauccaac

SEQ ID NO: 1680837 - RNA, 19 nt, Artificial Sequence
  Description of Artificial Sequence: Synthetic oligonucleotide
  Sense strand starting at position 3489 of SEQ ID NO: 1561556
cuuuaauaguuuguagguu

SEQ ID NO: 1680838 - RNA, 19 nt, Artificial Sequence
  Description of Artificial Sequence: Synthetic oligonucleotide
  Antisense strand to SEQ ID NO: 1680837
aaccuacaaacuauuaaag

SEQ ID NO: 1680839 - RNA, 19 nt, Artificial Sequence
  Description of Artificial Sequence: Synthetic oligonucleotide
  Sense strand starting at position 3510 of SEQ ID NO: 1561556
uuaagucauuacuccagga

SEQ ID NO: 1680840 - RNA, 19 nt, Artificial Sequence
  Description of Artificial Sequence: Synthetic oligonucleotide
  Antisense strand to SEQ ID NO: 1680839
uccuggaguaaugacuuaa

SEQ ID NO: 1680841 - RNA, 19 nt, Artificial Sequence
  Description of Artificial Sequence: Synthetic oligonucleotide
  Sense strand starting at position 146 of SEQ ID NO: 1561557
uugggcuccucuguuauuu

SEQ ID NO: 1680842 - RNA, 19 nt, Artificial Sequence
  Description of Artificial Sequence: Synthetic oligonucleotide
  Antisense strand to SEQ ID NO: 1680841
aaauaacagaggagcccaa

SEQ ID NO: 1680843 - RNA, 19 nt, Artificial Sequence
  Description of Artificial Sequence: Synthetic oligonucleotide
  Sense strand starting at position 772 of SEQ ID NO: 1561557
ucuguuguauccucaucaa

SEQ ID NO: 1680844 - RNA, 19 nt, Artificial Sequence
  Description of Artificial Sequence: Synthetic oligonucleotide
  Antisense strand to SEQ ID NO: 1680843
uugaugaggauacaacaga

SEQ ID NO: 1680845 - RNA, 19 nt, Artificial Sequence
  Description of Artificial Sequence: Synthetic oligonucleotide
  Sense strand starting at position 775 of SEQ ID NO: 1561557
guuguauccucaucaacau

SEQ ID NO: 1680846 - RNA, 19 nt, Artificial Sequence
  Description of Artificial Sequence: Synthetic oligonucleotide
  Antisense strand to SEQ ID NO: 1680845
auguugaugaggauacaac

SEQ ID NO: 1680847 - RNA, 19 nt, Artificial Sequence
  Description of Artificial Sequence: Synthetic oligonucleotide
  Sense strand starting at position 833 of SEQ ID NO: 1561557
uguccuccacccuaguuaa

SEQ ID NO: 1680848 - RNA, 19 nt, Artificial Sequence
  Description of Artificial Sequence: Synthetic oligonucleotide
  Antisense strand to SEQ ID NO: 1680847
uuaacuaggguggaggaca

SEQ ID NO: 1680849 - RNA, 19 nt, Artificial Sequence
  Description of Artificial Sequence: Synthetic oligonucleotide
  Sense strand starting at position 906 of SEQ ID NO: 1561557
uauuucugcuggcuuguaa

SEQ ID NO: 1680850 - RNA, 19 nt, Artificial Sequence
  Description of Artificial Sequence: Synthetic oligonucleotide
  Antisense strand to SEQ ID NO: 1680849
uuacaagccagcagaaaua

SEQ ID NO: 1680851 - RNA, 19 nt, Artificial Sequence
  Description of Artificial Sequence: Synthetic oligonucleotide
  Sense strand starting at position 933 of SEQ ID NO: 1561557
ccaggaauagccugaaggu

SEQ ID NO: 1680852 - RNA, 19 nt, Artificial Sequence
  Description of Artificial Sequence: Synthetic oligonucleotide
  Antisense strand to SEQ ID NO: 1680851
accuucaggcuauuccugg

SEQ ID NO: 1680853 - RNA, 19 nt, Artificial Sequence
  Description of Artificial Sequence: Synthetic oligonucleotide
  Sense strand starting at position 1034 of SEQ ID NO: 1561557
acuauaauaucuguggcga

SEQ ID NO: 1680854 - RNA, 19 nt, Artificial Sequence
  Description of Artificial Sequence: Synthetic oligonucleotide
  Antisense strand to SEQ ID NO: 1680853
ucgccacagauauuauagu

SEQ ID NO: 1680855 - RNA, 19 nt, Artificial Sequence
  Description of Artificial Sequence: Synthetic oligonucleotide
  Sense strand starting at position 1106 of SEQ ID NO: 1561557
ugacuucucucgucuaaau

SEQ ID NO: 1680856 - RNA, 19 nt, Artificial Sequence
  Description of Artificial Sequence: Synthetic oligonucleotide
  Antisense strand to SEQ ID NO: 1680855
auuuagacgagagaaguca

SEQ ID NO: 1680857 - RNA, 19 nt, Artificial Sequence
  Description of Artificial Sequence: Synthetic oligonucleotide
  Sense strand starting at position 1147 of SEQ ID NO: 1561557
uggcucaauuuauagaaau

SEQ ID NO: 1680858 - RNA, 19 nt, Artificial Sequence
  Description of Artificial Sequence: Synthetic oligonucleotide
  Antisense strand to SEQ ID NO: 1680857
auuucuauaaauugagcca

SEQ ID NO: 1680859 - RNA, 19 nt, Artificial Sequence
  Description of Artificial Sequence: Synthetic oligonucleotide
  Sense strand starting at position 1329 of SEQ ID NO: 1561557
augaaugaauguccucaau

SEQ ID NO: 1680860 - RNA, 19 nt, Artificial Sequence
  Description of Artificial Sequence: Synthetic oligonucleotide
  Antisense strand to SEQ ID NO: 1680859
auugaggacauucauucau

SEQ ID NO: 1680861 - RNA, 19 nt, Artificial Sequence
  Description of Artificial Sequence: Synthetic oligonucleotide
  Sense strand starting at position 1338 of SEQ ID NO: 1561557
uguccucaauuagucuaau

SEQ ID NO: 1680862 - RNA, 19 nt, Artificial Sequence
  Description of Artificial Sequence: Synthetic oligonucleotide
  Antisense strand to SEQ ID NO: 1680861
auuagacuaauugaggaca

SEQ ID NO: 1680863 - RNA, 19 nt, Artificial Sequence
  Description of Artificial Sequence: Synthetic oligonucleotide
  Sense strand starting at position 1339 of SEQ ID NO: 1561557
guccucaauuagucuaauu

SEQ ID NO: 1680864 - RNA, 19 nt, Artificial Sequence
  Description of Artificial Sequence: Synthetic oligonucleotide
  Antisense strand to SEQ ID NO: 1680863
aauuagacuaauugaggac

SEQ ID NO: 1680865 - RNA, 19 nt, Artificial Sequence
  Description of Artificial Sequence: Synthetic oligonucleotide
  Sense strand starting at position 1427 of SEQ ID NO: 1561557
uugggcauucgagaagcau

SEQ ID NO: 1680866 - RNA, 19 nt, Artificial Sequence
  Description of Artificial Sequence: Synthetic oligonucleotide
  Antisense strand to SEQ ID NO: 1680865
augcuucucgaaugcccaa

SEQ ID NO: 1680867 - RNA, 19 nt, Artificial Sequence
  Description of Artificial Sequence: Synthetic oligonucleotide
  Sense strand starting at position 1436 of SEQ ID NO: 1561557
cgagaagcaucacuaagac

SEQ ID NO: 1680868 - RNA, 19 nt, Artificial Sequence
  Description of Artificial Sequence: Synthetic oligonucleotide
  Antisense strand to SEQ ID NO: 1680867
gucuuagugaugcuucucg

SEQ ID NO: 1680869 - RNA, 19 nt, Artificial Sequence
  Description of Artificial Sequence: Synthetic oligonucleotide
  Sense strand starting at position 1478 of SEQ ID NO: 1561557
cgacauaggugcuccaauc

SEQ ID NO: 1680870 - RNA, 19 nt, Artificial Sequence
  Description of Artificial Sequence: Synthetic oligonucleotide
  Antisense strand to SEQ ID NO: 1680869
gauuggagcaccuaugucg

SEQ ID NO: 1680871 - RNA, 19 nt, Artificial Sequence
  Description of Artificial Sequence: Synthetic oligonucleotide
  Sense strand starting at position 1599 of SEQ ID NO: 1561557
ugcaaauuaucccugguaa

SEQ ID NO: 1680872 - RNA, 19 nt, Artificial Sequence
  Description of Artificial Sequence: Synthetic oligonucleotide
  Antisense strand to SEQ ID NO: 1680871
uuaccagggauaauuugca

SEQ ID NO: 1680873 - RNA, 19 nt, Artificial Sequence
  Description of Artificial Sequence: Synthetic oligonucleotide
  Sense strand starting at position 1600 of SEQ ID NO: 1561557
gcaaauuaucccugguaag

SEQ ID NO: 1680874 - RNA, 19 nt, Artificial Sequence
  Description of Artificial Sequence: Synthetic oligonucleotide
  Antisense strand to SEQ ID NO: 1680873
cuuaccagggauaauuugc

SEQ ID NO: 1680875 - RNA, 19 nt, Artificial Sequence
  Description of Artificial Sequence: Synthetic oligonucleotide
  Sense strand starting at position 2014 of SEQ ID NO: 1561557
caauguucgcucugaaagg

SEQ ID NO: 1680876 - RNA, 19 nt, Artificial Sequence
  Description of Artificial Sequence: Synthetic oligonucleotide
  Antisense strand to SEQ ID NO: 1680875
ccuuucagagcgaacauug

SEQ ID NO: 1680877 - RNA, 19 nt, Artificial Sequence
  Description of Artificial Sequence: Synthetic oligonucleotide
  Sense strand starting at position 2142 of SEQ ID NO: 1561557
gggagaaugugaguuguuc

SEQ ID NO: 1680878 - RNA, 19 nt, Artificial Sequence
  Description of Artificial Sequence: Synthetic oligonucleotide
  Antisense strand to SEQ ID NO: 1680877
gaacaacucacauucuccc

SEQ ID NO: 1680879 - RNA, 19 nt, Artificial Sequence
  Description of Artificial Sequence: Synthetic oligonucleotide
  Sense strand starting at position 2722 of SEQ ID NO: 1561557
agucauucuggugguauca

SEQ ID NO: 1680880 - RNA, 19 nt, Artificial Sequence
  Description of Artificial Sequence: Synthetic oligonucleotide
  Antisense strand to SEQ ID NO: 1680879
ugauaccaccagaaugacu

SEQ ID NO: 1680881 - RNA, 19 nt, Artificial Sequence
  Description of Artificial Sequence: Synthetic oligonucleotide
  Sense strand starting at position 2732 of SEQ ID NO: 1561557
gugguaucaccuuggauaa

SEQ ID NO: 1680882 - RNA, 19 nt, Artificial Sequence
  Description of Artificial Sequence: Synthetic oligonucleotide
  Antisense strand to SEQ ID NO: 1680881
uuauccaaggugauaccac

SEQ ID NO: 1680883 - RNA, 19 nt, Artificial Sequence
  Description of Artificial Sequence: Synthetic oligonucleotide
  Sense strand starting at position 2733 of SEQ ID NO: 1561557
ugguaucaccuuggauaag

SEQ ID NO: 1680884 - RNA, 19 nt, Artificial Sequence
  Description of Artificial Sequence: Synthetic oligonucleotide
  Antisense strand to SEQ ID NO: 1680883
cuuauccaaggugauacca

SEQ ID NO: 1680885 - RNA, 19 nt, Artificial Sequence
  Description of Artificial Sequence: Synthetic oligonucleotide
  Sense strand starting at position 2743 of SEQ ID NO: 1561557
uuggauaagucacuacacu

SEQ ID NO: 1680886 - RNA, 19 nt, Artificial Sequence
  Description of Artificial Sequence: Synthetic oligonucleotide
  Antisense strand to SEQ ID NO: 1680885
aguguagugacuuauccaa

SEQ ID NO: 1680887 - RNA, 19 nt, Artificial Sequence
  Description of Artificial Sequence: Synthetic oligonucleotide
  Sense strand starting at position 2894 of SEQ ID NO: 1561557
acaugauccuaagcaugau

SEQ ID NO: 1680888 - RNA, 19 nt, Artificial Sequence
  Description of Artificial Sequence: Synthetic oligonucleotide
  Antisense strand to SEQ ID NO: 1680887
aucaugcuuaggaucaugu

SEQ ID NO: 1680889 - RNA, 19 nt, Artificial Sequence
  Description of Artificial Sequence: Synthetic oligonucleotide
  Sense strand starting at position 2897 of SEQ ID NO: 1561557
ugauccuaagcaugaucau

SEQ ID NO: 1680890 - RNA, 19 nt, Artificial Sequence
  Description of Artificial Sequence: Synthetic oligonucleotide
  Antisense strand to SEQ ID NO: 1680889
augaucaugcuuaggauca

SEQ ID NO: 1680891 - RNA, 19 nt, Artificial Sequence
  Description of Artificial Sequence: Synthetic oligonucleotide
  Sense strand starting at position 2946 of SEQ ID NO: 1561557
uugugauauguugguauaa

SEQ ID NO: 1680892 - RNA, 19 nt, Artificial Sequence
  Description of Artificial Sequence: Synthetic oligonucleotide
  Antisense strand to SEQ ID NO: 1680891
uuauaccaacauaucacaa

SEQ ID NO: 1680893 - RNA, 19 nt, Artificial Sequence
  Description of Artificial Sequence: Synthetic oligonucleotide
  Sense strand starting at position 2947 of SEQ ID NO: 1561557
ugugauauguugguauaaa

SEQ ID NO: 1680894 - RNA, 19 nt, Artificial Sequence
  Description of Artificial Sequence: Synthetic oligonucleotide
  Antisense strand to SEQ ID NO: 1680893
uuuauaccaacauaucaca

SEQ ID NO: 1680895 - RNA, 19 nt, Artificial Sequence
  Description of Artificial Sequence: Synthetic oligonucleotide
  Sense strand starting at position 2978 of SEQ ID NO: 1561557
accacuuaggcugaauuau

SEQ ID NO: 1680896 - RNA, 19 nt, Artificial Sequence
  Description of Artificial Sequence: Synthetic oligonucleotide
  Antisense strand to SEQ ID NO: 1680895
auaauucagccuaaguggu

SEQ ID NO: 1680897 - RNA, 19 nt, Artificial Sequence
  Description of Artificial Sequence: Synthetic oligonucleotide
  Sense strand starting at position 3502 of SEQ ID NO: 1561557
aucuacuacugugucuaau

SEQ ID NO: 1680898 - RNA, 19 nt, Artificial Sequence
  Description of Artificial Sequence: Synthetic oligonucleotide
  Antisense strand to SEQ ID NO: 1680897
auuagacacaguaguagau

SEQ ID NO: 1680899 - RNA, 19 nt, Artificial Sequence
  Description of Artificial Sequence: Synthetic oligonucleotide
  Sense strand starting at position 3512 of SEQ ID NO: 1561557
gugucuaaugcuuaaguca

SEQ ID NO: 1680900 - RNA, 19 nt, Artificial Sequence
  Description of Artificial Sequence: Synthetic oligonucleotide
  Antisense strand to SEQ ID NO: 1680899
ugacuuaagcauuagacac

SEQ ID NO: 1680901 - RNA, 19 nt, Artificial Sequence
  Description of Artificial Sequence: Synthetic oligonucleotide
  Sense strand starting at position 3538 of SEQ ID NO: 1561557
cuguccagguuuccuaauu

SEQ ID NO: 1680902 - RNA, 19 nt, Artificial Sequence
  Description of Artificial Sequence: Synthetic oligonucleotide
  Antisense strand to SEQ ID NO: 1680901
aauuaggaaaccuggacag

SEQ ID NO: 1680903 - RNA, 19 nt, Artificial Sequence
  Description of Artificial Sequence: Synthetic oligonucleotide
  Sense strand starting at position 3539 of SEQ ID NO: 1561557
uguccagguuuccuaauuu

SEQ ID NO: 1680904 - RNA, 19 nt, Artificial Sequence
  Description of Artificial Sequence: Synthetic oligonucleotide
  Antisense strand to SEQ ID NO: 1680903
aaauuaggaaaccuggaca

SEQ ID NO: 1680905 - RNA, 19 nt, Artificial Sequence
  Description of Artificial Sequence: Synthetic oligonucleotide
  Sense strand starting at position 3561 of SEQ ID NO: 1561557
aaaugagggugauaauaaa

SEQ ID NO: 1680906 - RNA, 19 nt, Artificial Sequence
  Description of Artificial Sequence: Synthetic oligonucleotide
  Antisense strand to SEQ ID NO: 1680905
uuuauuaucacccucauuu

SEQ ID NO: 1680907 - RNA, 19 nt, Artificial Sequence
  Description of Artificial Sequence: Synthetic oligonucleotide
  Sense strand starting at position 3595 of SEQ ID NO: 1561557
uugcuaugaugauuaaaga

SEQ ID NO: 1680908 - RNA, 19 nt, Artificial Sequence
  Description of Artificial Sequence: Synthetic oligonucleotide
  Antisense strand to SEQ ID NO: 1680907
ucuuuaaucaucauagcaa

SEQ ID NO: 1680909 - RNA, 19 nt, Artificial Sequence
  Description of Artificial Sequence: Synthetic oligonucleotide
  Sense strand starting at position 3659 of SEQ ID NO: 1561557
ggugcuaugaguuagcuau

SEQ ID NO: 1680910 - RNA, 19 nt, Artificial Sequence
  Description of Artificial Sequence: Synthetic oligonucleotide
  Antisense strand to SEQ ID NO: 1680909
auagcuaacucauagcacc

SEQ ID NO: 1680911 - RNA, 19 nt, Artificial Sequence
  Description of Artificial Sequence: Synthetic oligonucleotide
  Sense strand starting at position 3661 of SEQ ID NO: 1561557
ugcuaugaguuagcuauaa

SEQ ID NO: 1680912 - RNA, 19 nt, Artificial Sequence
  Description of Artificial Sequence: Synthetic oligonucleotide
  Antisense strand to SEQ ID NO: 1680911
uuauagcuaacucauagca

SEQ ID NO: 1680913 - RNA, 19 nt, Artificial Sequence
  Description of Artificial Sequence: Synthetic oligonucleotide
  Sense strand starting at position 3719 of SEQ ID NO: 1561557
ggaccuuuguugcuuaaca

SEQ ID NO: 1680914 - RNA, 19 nt, Artificial Sequence
  Description of Artificial Sequence: Synthetic oligonucleotide
  Antisense strand to SEQ ID NO: 1680913
uguuaagcaacaaaggucc

SEQ ID NO: 1680915 - RNA, 19 nt, Artificial Sequence
  Description of Artificial Sequence: Synthetic oligonucleotide
  Sense strand starting at position 3778 of SEQ ID NO: 1561557
uaaucucuugggugugaaa

SEQ ID NO: 1680916 - RNA, 19 nt, Artificial Sequence
  Description of Artificial Sequence: Synthetic oligonucleotide
  Antisense strand to SEQ ID NO: 1680915
uuucacacccaagagauua

SEQ ID NO: 1680917 - RNA, 19 nt, Artificial Sequence
  Description of Artificial Sequence: Synthetic oligonucleotide
  Sense strand starting at position 3780 of SEQ ID NO: 1561557
aucucuugggugugaaaua

SEQ ID NO: 1680918 - RNA, 19 nt, Artificial Sequence
  Description of Artificial Sequence: Synthetic oligonucleotide
  Antisense strand to SEQ ID NO: 1680917
uauuucacacccaagagau

SEQ ID NO: 1680919 - RNA, 19 nt, Artificial Sequence
  Description of Artificial Sequence: Synthetic oligonucleotide
  Sense strand starting at position 3957 of SEQ ID NO: 1561557
gcaaguggugcagagguaa

SEQ ID NO: 1680920 - RNA, 19 nt, Artificial Sequence
  Description of Artificial Sequence: Synthetic oligonucleotide
  Antisense strand to SEQ ID NO: 1680919
uuaccucugcaccacuugc

SEQ ID NO: 1680921 - RNA, 19 nt, Artificial Sequence
  Description of Artificial Sequence: Synthetic oligonucleotide
  Sense strand starting at position 141 of SEQ ID NO: 1561558
cgcugaggucaauacuauu

SEQ ID NO: 1680922 - RNA, 19 nt, Artificial Sequence
  Description of Artificial Sequence: Synthetic oligonucleotide
  Antisense strand to SEQ ID NO: 1680921
aauaguauugaccucagcg

SEQ ID NO: 1680923 - RNA, 19 nt, Artificial Sequence
  Description of Artificial Sequence: Synthetic oligonucleotide
  Sense strand starting at position 170 of SEQ ID NO: 1561558
ccacucuguccugguggaa

SEQ ID NO: 1680924 - RNA, 19 nt, Artificial Sequence
  Description of Artificial Sequence: Synthetic oligonucleotide
  Antisense strand to SEQ ID NO: 1680923
uuccaccaggacagagugg

SEQ ID NO: 1680925 - RNA, 19 nt, Artificial Sequence
  Description of Artificial Sequence: Synthetic oligonucleotide
  Sense strand starting at position 187 of SEQ ID NO: 1561558
aaaguaaggcacugaaguu

SEQ ID NO: 1680926 - RNA, 19 nt, Artificial Sequence
  Description of Artificial Sequence: Synthetic oligonucleotide
  Antisense strand to SEQ ID NO: 1680925
aacuucagugccuuacuuu

SEQ ID NO: 1680927 - RNA, 19 nt, Artificial Sequence
  Description of Artificial Sequence: Synthetic oligonucleotide
  Sense strand starting at position 196 of SEQ ID NO: 1561558
cacugaaguuacucgucua

SEQ ID NO: 1680928 - RNA, 19 nt, Artificial Sequence
  Description of Artificial Sequence: Synthetic oligonucleotide
  Antisense strand to SEQ ID NO: 1680927
uagacgaguaacuucagug

SEQ ID NO: 1680929 - RNA, 19 nt, Artificial Sequence
  Description of Artificial Sequence: Synthetic oligonucleotide
  Sense strand starting at position 199 of SEQ ID NO: 1561558
ugaaguuacucgucuaagg

SEQ ID NO: 1680930 - RNA, 19 nt, Artificial Sequence
  Description of Artificial Sequence: Synthetic oligonucleotide
  Antisense strand to SEQ ID NO: 1680929
ccuuagacgaguaacuuca

SEQ ID NO: 1680931 - RNA, 19 nt, Artificial Sequence
  Description of Artificial Sequence: Synthetic oligonucleotide
  Sense strand starting at position 376 of SEQ ID NO: 1561558
gcaggaaucugaucuggau

SEQ ID NO: 1680932 - RNA, 19 nt, Artificial Sequence
  Description of Artificial Sequence: Synthetic oligonucleotide
  Antisense strand to SEQ ID NO: 1680931
auccagaucagauuccugc

SEQ ID NO: 1680933 - RNA, 19 nt, Artificial Sequence
  Description of Artificial Sequence: Synthetic oligonucleotide
  Sense strand starting at position 378 of SEQ ID NO: 1561558
aggaaucugaucuggaugu

SEQ ID NO: 1680934 - RNA, 19 nt, Artificial Sequence
  Description of Artificial Sequence: Synthetic oligonucleotide
  Antisense strand to SEQ ID NO: 1680933
acauccagaucagauuccu

SEQ ID NO: 1680935 - RNA, 19 nt, Artificial Sequence
  Description of Artificial Sequence: Synthetic oligonucleotide
  Sense strand starting at position 496 of SEQ ID NO: 1561558
ggagcuaagccaggaucaa

SEQ ID NO: 1680936 - RNA, 19 nt, Artificial Sequence
  Description of Artificial Sequence: Synthetic oligonucleotide
  Antisense strand to SEQ ID NO: 1680935
uugauccuggcuuagcucc

SEQ ID NO: 1680937 - RNA, 19 nt, Artificial Sequence
  Description of Artificial Sequence: Synthetic oligonucleotide
  Sense strand starting at position 2075 of SEQ ID NO: 1561558
gagccacuuccggaagugu

SEQ ID NO: 1680938 - RNA, 19 nt, Artificial Sequence
  Description of Artificial Sequence: Synthetic oligonucleotide
  Antisense strand to SEQ ID NO: 1680937
acacuuccggaaguggcuc

SEQ ID NO: 1680939 - RNA, 19 nt, Artificial Sequence
  Description of Artificial Sequence: Synthetic oligonucleotide
  Sense strand starting at position 2197 of SEQ ID NO: 1561558
gagacuuccgggugucuag

SEQ ID NO: 1680940 - RNA, 19 nt, Artificial Sequence
  Description of Artificial Sequence: Synthetic oligonucleotide
  Antisense strand to SEQ ID NO: 1680939
cuagacacccggaagucuc

SEQ ID NO: 1680941 - RNA, 19 nt, Artificial Sequence
  Description of Artificial Sequence: Synthetic oligonucleotide
  Sense strand starting at position 2391 of SEQ ID NO: 1561558
gugccuuaguuacuggaca

SEQ ID NO: 1680942 - RNA, 19 nt, Artificial Sequence
  Description of Artificial Sequence: Synthetic oligonucleotide
  Antisense strand to SEQ ID NO: 1680941
uguccaguaacuaaggcac

SEQ ID NO: 1680943 - RNA, 19 nt, Artificial Sequence
  Description of Artificial Sequence: Synthetic oligonucleotide
  Sense strand starting at position 2393 of SEQ ID NO: 1561558
gccuuaguuacuggacaga

SEQ ID NO: 1680944 - RNA, 19 nt, Artificial Sequence
  Description of Artificial Sequence: Synthetic oligonucleotide
  Antisense strand to SEQ ID NO: 1680943
ucuguccaguaacuaaggc

SEQ ID NO: 1680945 - RNA, 19 nt, Artificial Sequence
  Description of Artificial Sequence: Synthetic oligonucleotide
  Sense strand starting at position 2420 of SEQ ID NO: 1561558
guuccuuaguuacuggaca

SEQ ID NO: 1680946 - RNA, 19 nt, Artificial Sequence
  Description of Artificial Sequence: Synthetic oligonucleotide
  Antisense strand to SEQ ID NO: 1680945
uguccaguaacuaaggaac

SEQ ID NO: 1680947 - RNA, 19 nt, Artificial Sequence
  Description of Artificial Sequence: Synthetic oligonucleotide
  Sense strand starting at position 2468 of SEQ ID NO: 1561558
ucaguuuccuccuuucuga

SEQ ID NO: 1680948 - RNA, 19 nt, Artificial Sequence
  Description of Artificial Sequence: Synthetic oligonucleotide
  Antisense strand to SEQ ID NO: 1680947
ucagaaaggaggaaacuga

SEQ ID NO: 1680949 - RNA, 19 nt, Artificial Sequence
  Description of Artificial Sequence: Synthetic oligonucleotide
  Sense strand starting at position 2638 of SEQ ID NO: 1561558
gcccgaacccauggaguuu

SEQ ID NO: 1680950 - RNA, 19 nt, Artificial Sequence
  Description of Artificial Sequence: Synthetic oligonucleotide
  Antisense strand to SEQ ID NO: 1680949
aaacuccauggguucgggc

SEQ ID NO: 1680951 - RNA, 19 nt, Artificial Sequence
  Description of Artificial Sequence: Synthetic oligonucleotide
  Sense strand starting at position 2647 of SEQ ID NO: 1561558
cauggaguuuggcucuaaa

SEQ ID NO: 1680952 - RNA, 19 nt, Artificial Sequence
  Description of Artificial Sequence: Synthetic oligonucleotide
  Antisense strand to SEQ ID NO: 1680951
uuuagagccaaacuccaug

SEQ ID NO: 1680953 - RNA, 19 nt, Artificial Sequence
  Description of Artificial Sequence: Synthetic oligonucleotide
  Sense strand starting at position 2650 of SEQ ID NO: 1561558
ggaguuuggcucuaaauuc

SEQ ID NO: 1680954 - RNA, 19 nt, Artificial Sequence
  Description of Artificial Sequence: Synthetic oligonucleotide
  Antisense strand to SEQ ID NO: 1680953
gaauuuagagccaaacucc

SEQ ID NO: 1680955 - RNA, 19 nt, Artificial Sequence
  Description of Artificial Sequence: Synthetic oligonucleotide
  Sense strand starting at position 2667 of SEQ ID NO: 1561558
ucguguauuuaacccuuga

SEQ ID NO: 1680956 - RNA, 19 nt, Artificial Sequence
  Description of Artificial Sequence: Synthetic oligonucleotide
  Antisense strand to SEQ ID NO: 1680955
ucaaggguuaaauacacga

SEQ ID NO: 1680957 - RNA, 19 nt, Artificial Sequence
  Description of Artificial Sequence: Synthetic oligonucleotide
  Sense strand starting at position 2702 of SEQ ID NO: 1561558
gugucauagcccugagaau

SEQ ID NO: 1680958 - RNA, 19 nt, Artificial Sequence
  Description of Artificial Sequence: Synthetic oligonucleotide
  Antisense strand to SEQ ID NO: 1680957
auucucagggcuaugacac

SEQ ID NO: 1680959 - RNA, 19 nt, Artificial Sequence
  Description of Artificial Sequence: Synthetic oligonucleotide
  Sense strand starting at position 2703 of SEQ ID NO: 1561558
ugucauagcccugagaauc

SEQ ID NO: 1680960 - RNA, 19 nt, Artificial Sequence
  Description of Artificial Sequence: Synthetic oligonucleotide
  Antisense strand to SEQ ID NO: 1680959
gauucucagggcuaugaca

SEQ ID NO: 1680961 - RNA, 19 nt, Artificial Sequence
  Description of Artificial Sequence: Synthetic oligonucleotide
  Sense strand starting at position 2766 of SEQ ID NO: 1561558
ggguguuagcuguuacugu

SEQ ID NO: 1680962 - RNA, 19 nt, Artificial Sequence
  Description of Artificial Sequence: Synthetic oligonucleotide
  Antisense strand to SEQ ID NO: 1680961
acaguaacagcuaacaccc

SEQ ID NO: 1680963 - RNA, 19 nt, Artificial Sequence
  Description of Artificial Sequence: Synthetic oligonucleotide
  Sense strand starting at position 2881 of SEQ ID NO: 1561558
ggcugacucucaccuaagu

SEQ ID NO: 1680964 - RNA, 19 nt, Artificial Sequence
  Description of Artificial Sequence: Synthetic oligonucleotide
  Antisense strand to SEQ ID NO: 1680963
acuuaggugagagucagcc

SEQ ID NO: 1680965 - RNA, 19 nt, Artificial Sequence
  Description of Artificial Sequence: Synthetic oligonucleotide
  Sense strand starting at position 2894 of SEQ ID NO: 1561558
cuaaguggcagaugacuua

SEQ ID NO: 1680966 - RNA, 19 nt, Artificial Sequence
  Description of Artificial Sequence: Synthetic oligonucleotide
  Antisense strand to SEQ ID NO: 1680965
uaagucaucugccacuuag

SEQ ID NO: 1680967 - RNA, 19 nt, Artificial Sequence
  Description of Artificial Sequence: Synthetic oligonucleotide
  Sense strand starting at position 2906 of SEQ ID NO: 1561558
ugacuuaucgcuuauaauu

SEQ ID NO: 1680968 - RNA, 19 nt, Artificial Sequence
  Description of Artificial Sequence: Synthetic oligonucleotide
  Antisense strand to SEQ ID NO: 1680967
aauuauaagcgauaaguca

SEQ ID NO: 1680969 - RNA, 19 nt, Artificial Sequence
  Description of Artificial Sequence: Synthetic oligonucleotide
  Sense strand starting at position 2933 of SEQ ID NO: 1561558
ccucacugguagucagaaa

SEQ ID NO: 1680970 - RNA, 19 nt, Artificial Sequence
  Description of Artificial Sequence: Synthetic oligonucleotide
  Antisense strand to SEQ ID NO: 1680969
uuucugacuaccagugagg

SEQ ID NO: 1680971 - RNA, 19 nt, Artificial Sequence
  Description of Artificial Sequence: Synthetic oligonucleotide
  Sense strand starting at position 3041 of SEQ ID NO: 1561558
aagguaauauguguaagag

SEQ ID NO: 1680972 - RNA, 19 nt, Artificial Sequence
  Description of Artificial Sequence: Synthetic oligonucleotide
  Antisense strand to SEQ ID NO: 1680971
cucuuacacauauuaccuu

SEQ ID NO: 1680973 - RNA, 19 nt, Artificial Sequence
  Description of Artificial Sequence: Synthetic oligonucleotide
  Sense strand starting at position 3098 of SEQ ID NO: 1561558
aaaugauggugguuauuau

SEQ ID NO: 1680974 - RNA, 19 nt, Artificial Sequence
  Description of Artificial Sequence: Synthetic oligonucleotide
  Antisense strand to SEQ ID NO: 1680973
auaauaaccaccaucauuu

SEQ ID NO: 1680975 - RNA, 19 nt, Artificial Sequence
  Description of Artificial Sequence: Synthetic oligonucleotide
  Sense strand starting at position 3099 of SEQ ID NO: 1561558
aaugauggugguuauuauu

SEQ ID NO: 1680976 - RNA, 19 nt, Artificial Sequence
  Description of Artificial Sequence: Synthetic oligonucleotide
  Antisense strand to SEQ ID NO: 1680975
aauaauaaccaccaucauu

SEQ ID NO: 1680977 - RNA, 19 nt, Artificial Sequence
  Description of Artificial Sequence: Synthetic oligonucleotide
  Sense strand starting at position 3108 of SEQ ID NO: 1561558
gguuauuauuaccuauuag

SEQ ID NO: 1680978 - RNA, 19 nt, Artificial Sequence
  Description of Artificial Sequence: Synthetic oligonucleotide
  Antisense strand to SEQ ID NO: 1680977
cuaauagguaauaauaacc

SEQ ID NO: 1680979 - RNA, 19 nt, Artificial Sequence
  Description of Artificial Sequence: Synthetic oligonucleotide
  Sense strand starting at position 3118 of SEQ ID NO: 1561558
accuauuagcaguguuaca

SEQ ID NO: 1680980 - RNA, 19 nt, Artificial Sequence
  Description of Artificial Sequence: Synthetic oligonucleotide
  Antisense strand to SEQ ID NO: 1680979
uguaacacugcuaauaggu

SEQ ID NO: 1680981 - RNA, 19 nt, Artificial Sequence
  Description of Artificial Sequence: Synthetic oligonucleotide
  Sense strand starting at position 3125 of SEQ ID NO: 1561558
agcaguguuacauauaagu

SEQ ID NO: 1680982 - RNA, 19 nt, Artificial Sequence
  Description of Artificial Sequence: Synthetic oligonucleotide
  Antisense strand to SEQ ID NO: 1680981
acuuauauguaacacugcu

SEQ ID NO: 1680983 - RNA, 19 nt, Artificial Sequence
  Description of Artificial Sequence: Synthetic oligonucleotide
  Sense strand starting at position 3172 of SEQ ID NO: 1561558
aagcucagugagcaucaau

SEQ ID NO: 1680984 - RNA, 19 nt, Artificial Sequence
  Description of Artificial Sequence: Synthetic oligonucleotide
  Antisense strand to SEQ ID NO: 1680983
auugaugcucacugagcuu

SEQ ID NO: 1680985 - RNA, 19 nt, Artificial Sequence
  Description of Artificial Sequence: Synthetic oligonucleotide
  Sense strand starting at position 3175 of SEQ ID NO: 1561558
cucagugagcaucaaucau

SEQ ID NO: 1680986 - RNA, 19 nt, Artificial Sequence
  Description of Artificial Sequence: Synthetic oligonucleotide
  Antisense strand to SEQ ID NO: 1680985
augauugaugcucacugag

SEQ ID NO: 1680987 - RNA, 19 nt, Artificial Sequence
  Description of Artificial Sequence: Synthetic oligonucleotide
  Sense strand starting at position 3263 of SEQ ID NO: 1561558
gugucaauaggaggauauc

SEQ ID NO: 1680988 - RNA, 19 nt, Artificial Sequence
  Description of Artificial Sequence: Synthetic oligonucleotide
  Antisense strand to SEQ ID NO: 1680987
gauauccuccuauugacac

SEQ ID NO: 1680989 - RNA, 19 nt, Artificial Sequence
  Description of Artificial Sequence: Synthetic oligonucleotide
  Sense strand starting at position 3272 of SEQ ID NO: 1561558
ggaggauaucugugucccu

SEQ ID NO: 1680990 - RNA, 19 nt, Artificial Sequence
  Description of Artificial Sequence: Synthetic oligonucleotide
  Antisense strand to SEQ ID NO: 1680989
agggacacagauauccucc

SEQ ID NO: 1680991 - RNA, 19 nt, Artificial Sequence
  Description of Artificial Sequence: Synthetic oligonucleotide
  Sense strand starting at position 3362 of SEQ ID NO: 1561558
ggcugacaccuguaaaucu

SEQ ID NO: 1680992 - RNA, 19 nt, Artificial Sequence
  Description of Artificial Sequence: Synthetic oligonucleotide
  Antisense strand to SEQ ID NO: 1680991
agauuuacaggugucagcc

SEQ ID NO: 1680993 - RNA, 19 nt, Artificial Sequence
  Description of Artificial Sequence: Synthetic oligonucleotide
  Sense strand starting at position 3677 of SEQ ID NO: 1561558
gaaacaaauuauuagggua

SEQ ID NO: 1680994 - RNA, 19 nt, Artificial Sequence
  Description of Artificial Sequence: Synthetic oligonucleotide
  Antisense strand to SEQ ID NO: 1680993
uacccuaauaauuuguuuc

SEQ ID NO: 1680995 - RNA, 19 nt, Artificial Sequence
  Description of Artificial Sequence: Synthetic oligonucleotide
  Sense strand starting at position 3736 of SEQ ID NO: 1561558
gugcuugugcuccucugaa

SEQ ID NO: 1680996 - RNA, 19 nt, Artificial Sequence
  Description of Artificial Sequence: Synthetic oligonucleotide
  Antisense strand to SEQ ID NO: 1680995
uucagaggagcacaagcac

SEQ ID NO: 1680997 - RNA, 19 nt, Artificial Sequence
  Description of Artificial Sequence: Synthetic oligonucleotide
  Sense strand starting at position 3944 of SEQ ID NO: 1561558
acuggauggcuucgugaaa

SEQ ID NO: 1680998 - RNA, 19 nt, Artificial Sequence
  Description of Artificial Sequence: Synthetic oligonucleotide
  Antisense strand to SEQ ID NO: 1680997
uuucacgaagccauccagu

SEQ ID NO: 1680999 - RNA, 19 nt, Artificial Sequence
  Description of Artificial Sequence: Synthetic oligonucleotide
  Sense strand starting at position 3945 of SEQ ID NO: 1561558
cuggauggcuucgugaaag

SEQ ID NO: 1681000 - RNA, 19 nt, Artificial Sequence
  Description of Artificial Sequence: Synthetic oligonucleotide
  Antisense strand to SEQ ID NO: 1680999
cuuucacgaagccauccag

SEQ ID NO: 1681001 - RNA, 19 nt, Artificial Sequence
  Description of Artificial Sequence: Synthetic oligonucleotide
  Sense strand starting at position 708 of SEQ ID NO: 1561559
ucuauuaugacggguuucu

SEQ ID NO: 1681002 - RNA, 19 nt, Artificial Sequence
  Description of Artificial Sequence: Synthetic oligonucleotide
  Antisense strand to SEQ ID NO: 1681001
agaaacccgucauaauaga

SEQ ID NO: 1681003 - RNA, 19 nt, Artificial Sequence
  Description of Artificial Sequence: Synthetic oligonucleotide
  Sense strand starting at position 774 of SEQ ID NO: 1561559
agaagaaaugucugaaugu

SEQ ID NO: 1681004 - RNA, 19 nt, Artificial Sequence
  Description of Artificial Sequence: Synthetic oligonucleotide
  Antisense strand to SEQ ID NO: 1681003
acauucagacauuucuucu

SEQ ID NO: 1681005 - RNA, 19 nt, Artificial Sequence
  Description of Artificial Sequence: Synthetic oligonucleotide
  Sense strand starting at position 1352 of SEQ ID NO: 1561559
cgugcuuccagcguuaagu

SEQ ID NO: 1681006 - RNA, 19 nt, Artificial Sequence
  Description of Artificial Sequence: Synthetic oligonucleotide
  Antisense strand to SEQ ID NO: 1681005
acuuaacgcuggaagcacg

SEQ ID NO: 1681007 - RNA, 19 nt, Artificial Sequence
  Description of Artificial Sequence: Synthetic oligonucleotide
  Sense strand starting at position 1358 of SEQ ID NO: 1561559
uccagcguuaaguggaauu

SEQ ID NO: 1681008 - RNA, 19 nt, Artificial Sequence
  Description of Artificial Sequence: Synthetic oligonucleotide
  Antisense strand to SEQ ID NO: 1681007
aauuccacuuaacgcugga

SEQ ID NO: 1681009 - RNA, 19 nt, Artificial Sequence
  Description of Artificial Sequence: Synthetic oligonucleotide
  Sense strand starting at position 1455 of SEQ ID NO: 1561559
uuuaguugggcccaucuau

SEQ ID NO: 1681010 - RNA, 19 nt, Artificial Sequence
  Description of Artificial Sequence: Synthetic oligonucleotide
  Antisense strand to SEQ ID NO: 1681009
auagaugggcccaacuaaa

SEQ ID NO: 1681011 - RNA, 19 nt, Artificial Sequence
  Description of Artificial Sequence: Synthetic oligonucleotide
  Sense strand starting at position 1771 of SEQ ID NO: 1561559
gcuggauucuugcugaagu

SEQ ID NO: 1681012 - RNA, 19 nt, Artificial Sequence
  Description of Artificial Sequence: Synthetic oligonucleotide
  Antisense strand to SEQ ID NO: 1681011
acuucagcaagaauccagc

SEQ ID NO: 1681013 - RNA, 19 nt, Artificial Sequence
  Description of Artificial Sequence: Synthetic oligonucleotide
  Sense strand starting at position 1844 of SEQ ID NO: 1561559
cugacuaaagcuuggucua

SEQ ID NO: 1681014 - RNA, 19 nt, Artificial Sequence
  Description of Artificial Sequence: Synthetic oligonucleotide
  Antisense strand to SEQ ID NO: 1681013
uagaccaagcuuuagucag

SEQ ID NO: 1681015 - RNA, 19 nt, Artificial Sequence
  Description of Artificial Sequence: Synthetic oligonucleotide
  Sense strand starting at position 1867 of SEQ ID NO: 1561559
cuccuugucaggugagacu

SEQ ID NO: 1681016 - RNA, 19 nt, Artificial Sequence
  Description of Artificial Sequence: Synthetic oligonucleotide
  Antisense strand to SEQ ID NO: 1681015
agucucaccugacaaggag

SEQ ID NO: 1681017 - RNA, 19 nt, Artificial Sequence
  Description of Artificial Sequence: Synthetic oligonucleotide
  Sense strand starting at position 1990 of SEQ ID NO: 1561559
ugucgcuuucuggacuaca

SEQ ID NO: 1681018 - RNA, 19 nt, Artificial Sequence
  Description of Artificial Sequence: Synthetic oligonucleotide
  Antisense strand to SEQ ID NO: 1681017
uguaguccagaaagcgaca

SEQ ID NO: 1681019 - RNA, 19 nt, Artificial Sequence
  Description of Artificial Sequence: Synthetic oligonucleotide
  Sense strand starting at position 2076 of SEQ ID NO: 1561559
gggaucuucccgcggauuu

SEQ ID NO: 1681020 - RNA, 19 nt, Artificial Sequence
  Description of Artificial Sequence: Synthetic oligonucleotide
  Antisense strand to SEQ ID NO: 1681019
aaauccgcgggaagauccc

SEQ ID NO: 1681021 - RNA, 19 nt, Artificial Sequence
  Description of Artificial Sequence: Synthetic oligonucleotide
  Sense strand starting at position 2258 of SEQ ID NO: 1561559
gcgauugugaggagugugu

SEQ ID NO: 1681022 - RNA, 19 nt, Artificial Sequence
  Description of Artificial Sequence: Synthetic oligonucleotide
  Antisense strand to SEQ ID NO: 1681021
acacacuccucacaaucgc

SEQ ID NO: 1681023 - RNA, 19 nt, Artificial Sequence
  Description of Artificial Sequence: Synthetic oligonucleotide
  Sense strand starting at position 2360 of SEQ ID NO: 1561559
gcgggugugaguagaguuu

SEQ ID NO: 1681024 - RNA, 19 nt, Artificial Sequence
  Description of Artificial Sequence: Synthetic oligonucleotide
  Antisense strand to SEQ ID NO: 1681023
aaacucuacucacacccgc

SEQ ID NO: 1681025 - RNA, 19 nt, Artificial Sequence
  Description of Artificial Sequence: Synthetic oligonucleotide
  Sense strand starting at position 2361 of SEQ ID NO: 1561559
cgggugugaguagaguuua

SEQ ID NO: 1681026 - RNA, 19 nt, Artificial Sequence
  Description of Artificial Sequence: Synthetic oligonucleotide
  Antisense strand to SEQ ID NO: 1681025
uaaacucuacucacacccg

SEQ ID NO: 1681027 - RNA, 19 nt, Artificial Sequence
  Description of Artificial Sequence: Synthetic oligonucleotide
  Sense strand starting at position 2366 of SEQ ID NO: 1561559
gugaguagaguuuaauugu

SEQ ID NO: 1681028 - RNA, 19 nt, Artificial Sequence
  Description of Artificial Sequence: Synthetic oligonucleotide
  Antisense strand to SEQ ID NO: 1681027
acaauuaaacucuacucac

SEQ ID NO: 1681029 - RNA, 19 nt, Artificial Sequence
  Description of Artificial Sequence: Synthetic oligonucleotide
  Sense strand starting at position 2369 of SEQ ID NO: 1561559
aguagaguuuaauugugac

SEQ ID NO: 1681030 - RNA, 19 nt, Artificial Sequence
  Description of Artificial Sequence: Synthetic oligonucleotide
  Antisense strand to SEQ ID NO: 1681029
gucacaauuaaacucuacu

SEQ ID NO: 1681031 - RNA, 19 nt, Artificial Sequence
  Description of Artificial Sequence: Synthetic oligonucleotide
  Sense strand starting at position 2571 of SEQ ID NO: 1561559
ggagggugcgugugaauuu

SEQ ID NO: 1681032 - RNA, 19 nt, Artificial Sequence
  Description of Artificial Sequence: Synthetic oligonucleotide
  Antisense strand to SEQ ID NO: 1681031
aaauucacacgcacccucc

SEQ ID NO: 1681033 - RNA, 19 nt, Artificial Sequence
  Description of Artificial Sequence: Synthetic oligonucleotide
  Sense strand starting at position 2578 of SEQ ID NO: 1561559
gcgugugaauuuguuguca

SEQ ID NO: 1681034 - RNA, 19 nt, Artificial Sequence
  Description of Artificial Sequence: Synthetic oligonucleotide
  Antisense strand to SEQ ID NO: 1681033
ugacaacaaauucacacgc

SEQ ID NO: 1681035 - RNA, 19 nt, Artificial Sequence
  Description of Artificial Sequence: Synthetic oligonucleotide
  Sense strand starting at position 2608 of SEQ ID NO: 1561559
agguguaugucacugggaa

SEQ ID NO: 1681036 - RNA, 19 nt, Artificial Sequence
  Description of Artificial Sequence: Synthetic oligonucleotide
  Antisense strand to SEQ ID NO: 1681035
uucccagugacauacaccu

SEQ ID NO: 1681037 - RNA, 19 nt, Artificial Sequence
  Description of Artificial Sequence: Synthetic oligonucleotide
  Sense strand starting at position 2609 of SEQ ID NO: 1561559
gguguaugucacugggaau

SEQ ID NO: 1681038 - RNA, 19 nt, Artificial Sequence
  Description of Artificial Sequence: Synthetic oligonucleotide
  Antisense strand to SEQ ID NO: 1681037
auucccagugacauacacc

SEQ ID NO: 1681039 - RNA, 19 nt, Artificial Sequence
  Description of Artificial Sequence: Synthetic oligonucleotide
  Sense strand starting at position 2610 of SEQ ID NO: 1561559
guguaugucacugggaauu

SEQ ID NO: 1681040 - RNA, 19 nt, Artificial Sequence
  Description of Artificial Sequence: Synthetic oligonucleotide
  Antisense strand to SEQ ID NO: 1681039
aauucccagugacauacac

SEQ ID NO: 1681041 - RNA, 19 nt, Artificial Sequence
  Description of Artificial Sequence: Synthetic oligonucleotide
  Sense strand starting at position 2612 of SEQ ID NO: 1561559
guaugucacugggaauuug

SEQ ID NO: 1681042 - RNA, 19 nt, Artificial Sequence
  Description of Artificial Sequence: Synthetic oligonucleotide
  Antisense strand to SEQ ID NO: 1681041
caaauucccagugacauac

SEQ ID NO: 1681043 - RNA, 19 nt, Artificial Sequence
  Description of Artificial Sequence: Synthetic oligonucleotide
  Sense strand starting at position 2690 of SEQ ID NO: 1561559
ugugauuguguguuguguu

SEQ ID NO: 1681044 - RNA, 19 nt, Artificial Sequence
  Description of Artificial Sequence: Synthetic oligonucleotide
  Antisense strand to SEQ ID NO: 1681043
aacacaacacacaaucaca

SEQ ID NO: 1681045 - RNA, 19 nt, Artificial Sequence
  Description of Artificial Sequence: Synthetic oligonucleotide
  Sense strand starting at position 2719 of SEQ ID NO: 1561559
gugccugugacguuuaugu

SEQ ID NO: 1681046 - RNA, 19 nt, Artificial Sequence
  Description of Artificial Sequence: Synthetic oligonucleotide
  Antisense strand to SEQ ID NO: 1681045
acauaaacgucacaggcac

SEQ ID NO: 1681047 - RNA, 19 nt, Artificial Sequence
  Description of Artificial Sequence: Synthetic oligonucleotide
  Sense strand starting at position 2749 of SEQ ID NO: 1561559
gagugaguuugugugacua

SEQ ID NO: 1681048 - RNA, 19 nt, Artificial Sequence
  Description of Artificial Sequence: Synthetic oligonucleotide
  Antisense strand to SEQ ID NO: 1681047
uagucacacaaacucacuc

SEQ ID NO: 1681049 - RNA, 19 nt, Artificial Sequence
  Description of Artificial Sequence: Synthetic oligonucleotide
  Sense strand starting at position 2762 of SEQ ID NO: 1561559
ugacuauguguccguauag

SEQ ID NO: 1681050 - RNA, 19 nt, Artificial Sequence
  Description of Artificial Sequence: Synthetic oligonucleotide
  Antisense strand to SEQ ID NO: 1681049
cuauacggacacauaguca

SEQ ID NO: 1681051 - RNA, 19 nt, Artificial Sequence
  Description of Artificial Sequence: Synthetic oligonucleotide
  Sense strand starting at position 2797 of SEQ ID NO: 1561559
gagucuuugucuuugugac

SEQ ID NO: 1681052 - RNA, 19 nt, Artificial Sequence
  Description of Artificial Sequence: Synthetic oligonucleotide
  Antisense strand to SEQ ID NO: 1681051
gucacaaagacaaagacuc

SEQ ID NO: 1681053 - RNA, 19 nt, Artificial Sequence
  Description of Artificial Sequence: Synthetic oligonucleotide
  Sense strand starting at position 3127 of SEQ ID NO: 1561559
ccuguccucuuguuuaaga

SEQ ID NO: 1681054 - RNA, 19 nt, Artificial Sequence
  Description of Artificial Sequence: Synthetic oligonucleotide
  Antisense strand to SEQ ID NO: 1681053
ucuuaaacaagaggacagg

SEQ ID NO: 1681055 - RNA, 19 nt, Artificial Sequence
  Description of Artificial Sequence: Synthetic oligonucleotide
  Sense strand starting at position 3128 of SEQ ID NO: 1561559
cuguccucuuguuuaagaa

SEQ ID NO: 1681056 - RNA, 19 nt, Artificial Sequence
  Description of Artificial Sequence: Synthetic oligonucleotide
  Antisense strand to SEQ ID NO: 1681055
uucuuaaacaagaggacag

SEQ ID NO: 1681057 - RNA, 19 nt, Artificial Sequence
  Description of Artificial Sequence: Synthetic oligonucleotide
  Sense strand starting at position 3129 of SEQ ID NO: 1561559
uguccucuuguuuaagaaa

SEQ ID NO: 1681058 - RNA, 19 nt, Artificial Sequence
  Description of Artificial Sequence: Synthetic oligonucleotide
  Antisense strand to SEQ ID NO: 1681057
uuucuuaaacaagaggaca

SEQ ID NO: 1681059 - RNA, 19 nt, Artificial Sequence
  Description of Artificial Sequence: Synthetic oligonucleotide
  Sense strand starting at position 3167 of SEQ ID NO: 1561559
ggacauaguugcuuuccuu

SEQ ID NO: 1681060 - RNA, 19 nt, Artificial Sequence
  Description of Artificial Sequence: Synthetic oligonucleotide
  Antisense strand to SEQ ID NO: 1681059
aaggaaagcaacuaugucc

SEQ ID NO: 1681061 - RNA, 19 nt, Artificial Sequence
  Description of Artificial Sequence: Synthetic oligonucleotide
  Sense strand starting at position 3288 of SEQ ID NO: 1561559
acugauuugucagaugguu

SEQ ID NO: 1681062 - RNA, 19 nt, Artificial Sequence
  Description of Artificial Sequence: Synthetic oligonucleotide
  Antisense strand to SEQ ID NO: 1681061
aaccaucugacaaaucagu

SEQ ID NO: 1681063 - RNA, 19 nt, Artificial Sequence
  Description of Artificial Sequence: Synthetic oligonucleotide
  Sense strand starting at position 3447 of SEQ ID NO: 1561559
caggcagugugacuaugau

SEQ ID NO: 1681064 - RNA, 19 nt, Artificial Sequence
  Description of Artificial Sequence: Synthetic oligonucleotide
  Antisense strand to SEQ ID NO: 1681063
aucauagucacacugccug

SEQ ID NO: 1681065 - RNA, 19 nt, Artificial Sequence
  Description of Artificial Sequence: Synthetic oligonucleotide
  Sense strand starting at position 3486 of SEQ ID NO: 1561559
guacacauuugcuugcauu

SEQ ID NO: 1681066 - RNA, 19 nt, Artificial Sequence
  Description of Artificial Sequence: Synthetic oligonucleotide
  Antisense strand to SEQ ID NO: 1681065
aaugcaagcaaauguguac

SEQ ID NO: 1681067 - RNA, 19 nt, Artificial Sequence
  Description of Artificial Sequence: Synthetic oligonucleotide
  Sense strand starting at position 3494 of SEQ ID NO: 1561559
uugcuugcauuucuuuaga

SEQ ID NO: 1681068 - RNA, 19 nt, Artificial Sequence
  Description of Artificial Sequence: Synthetic oligonucleotide
  Antisense strand to SEQ ID NO: 1681067
ucuaaagaaaugcaagcaa

SEQ ID NO: 1681069 - RNA, 19 nt, Artificial Sequence
  Description of Artificial Sequence: Synthetic oligonucleotide
  Sense strand starting at position 3496 of SEQ ID NO: 1561559
gcuugcauuucuuuagaau

SEQ ID NO: 1681070 - RNA, 19 nt, Artificial Sequence
  Description of Artificial Sequence: Synthetic oligonucleotide
  Antisense strand to SEQ ID NO: 1681069
auucuaaagaaaugcaagc

SEQ ID NO: 1681071 - RNA, 19 nt, Artificial Sequence
  Description of Artificial Sequence: Synthetic oligonucleotide
  Sense strand starting at position 3524 of SEQ ID NO: 1561559
gugauuaaauugcugauag

SEQ ID NO: 1681072 - RNA, 19 nt, Artificial Sequence
  Description of Artificial Sequence: Synthetic oligonucleotide
  Antisense strand to SEQ ID NO: 1681071
cuaucagcaauuuaaucac

SEQ ID NO: 1681073 - RNA, 19 nt, Artificial Sequence
  Description of Artificial Sequence: Synthetic oligonucleotide
  Sense strand starting at position 3526 of SEQ ID NO: 1561559
gauuaaauugcugauagug

SEQ ID NO: 1681074 - RNA, 19 nt, Artificial Sequence
  Description of Artificial Sequence: Synthetic oligonucleotide
  Antisense strand to SEQ ID NO: 1681073
cacuaucagcaauuuaauc

SEQ ID NO: 1681075 - RNA, 19 nt, Artificial Sequence
  Description of Artificial Sequence: Synthetic oligonucleotide
  Sense strand starting at position 3842 of SEQ ID NO: 1561559
auagguaggguuuguacau

SEQ ID NO: 1681076 - RNA, 19 nt, Artificial Sequence
  Description of Artificial Sequence: Synthetic oligonucleotide
  Antisense strand to SEQ ID NO: 1681075
auguacaaacccuaccuau

SEQ ID NO: 1681077 - RNA, 19 nt, Artificial Sequence
  Description of Artificial Sequence: Synthetic oligonucleotide
  Sense strand starting at position 3939 of SEQ ID NO: 1561559
gcuccacauccaugcuaga

SEQ ID NO: 1681078 - RNA, 19 nt, Artificial Sequence
  Description of Artificial Sequence: Synthetic oligonucleotide
  Antisense strand to SEQ ID NO: 1681077
ucuagcauggauguggagc

SEQ ID NO: 1681079 - RNA, 19 nt, Artificial Sequence
  Description of Artificial Sequence: Synthetic oligonucleotide
  Sense strand starting at position 3983 of SEQ ID NO: 1561559
caaucuggugggugucuaa

SEQ ID NO: 1681080 - RNA, 19 nt, Artificial Sequence
  Description of Artificial Sequence: Synthetic oligonucleotide
  Antisense strand to SEQ ID NO: 1681079
uuagacacccaccagauug

SEQ ID NO: 1681081 - RNA, 19 nt, Artificial Sequence
  Description of Artificial Sequence: Synthetic oligonucleotide
  Sense strand starting at position 130 of SEQ ID NO: 1561560
agcuuauuucccggacuac

SEQ ID NO: 1681082 - RNA, 19 nt, Artificial Sequence
  Description of Artificial Sequence: Synthetic oligonucleotide
  Antisense strand to SEQ ID NO: 1681081
guaguccgggaaauaagcu

SEQ ID NO: 1681083 - RNA, 19 nt, Artificial Sequence
  Description of Artificial Sequence: Synthetic oligonucleotide
  Sense strand starting at position 209 of SEQ ID NO: 1561560
augugauugccucacucaa

SEQ ID NO: 1681084 - RNA, 19 nt, Artificial Sequence
  Description of Artificial Sequence: Synthetic oligonucleotide
  Antisense strand to SEQ ID NO: 1681083
uugagugaggcaaucacau

SEQ ID NO: 1681085 - RNA, 19 nt, Artificial Sequence
  Description of Artificial Sequence: Synthetic oligonucleotide
  Sense strand starting at position 228 of SEQ ID NO: 1561560
ccaagagccuuagccauaa

SEQ ID NO: 1681086 - RNA, 19 nt, Artificial Sequence
  Description of Artificial Sequence: Synthetic oligonucleotide
  Antisense strand to SEQ ID NO: 1681085
uuauggcuaaggcucuugg

SEQ ID NO: 1681087 - RNA, 19 nt, Artificial Sequence
  Description of Artificial Sequence: Synthetic oligonucleotide
  Sense strand starting at position 305 of SEQ ID NO: 1561560
gagccacauuagguauaga

SEQ ID NO: 1681088 - RNA, 19 nt, Artificial Sequence
  Description of Artificial Sequence: Synthetic oligonucleotide
  Antisense strand to SEQ ID NO: 1681087
ucuauaccuaauguggcuc

SEQ ID NO: 1681089 - RNA, 19 nt, Artificial Sequence
  Description of Artificial Sequence: Synthetic oligonucleotide
  Sense strand starting at position 322 of SEQ ID NO: 1561560
gaucgcuugccuguauagu

SEQ ID NO: 1681090 - RNA, 19 nt, Artificial Sequence
  Description of Artificial Sequence: Synthetic oligonucleotide
  Antisense strand to SEQ ID NO: 1681089
acuauacaggcaagcgauc

SEQ ID NO: 1681091 - RNA, 19 nt, Artificial Sequence
  Description of Artificial Sequence: Synthetic oligonucleotide
  Sense strand starting at position 328 of SEQ ID NO: 1561560
uugccuguauaguccaaau

SEQ ID NO: 1681092 - RNA, 19 nt, Artificial Sequence
  Description of Artificial Sequence: Synthetic oligonucleotide
  Antisense strand to SEQ ID NO: 1681091
auuuggacuauacaggcaa

SEQ ID NO: 1681093 - RNA, 19 nt, Artificial Sequence
  Description of Artificial Sequence: Synthetic oligonucleotide
  Sense strand starting at position 1228 of SEQ ID NO: 1561560
ucuauuaugacggguuucu

SEQ ID NO: 1681094 - RNA, 19 nt, Artificial Sequence
  Description of Artificial Sequence: Synthetic oligonucleotide
  Antisense strand to SEQ ID NO: 1681093
agaaacccgucauaauaga

SEQ ID NO: 1681095 - RNA, 19 nt, Artificial Sequence
  Description of Artificial Sequence: Synthetic oligonucleotide
  Sense strand starting at position 1294 of SEQ ID NO: 1561560
agaagaaaugucugaaugu

SEQ ID NO: 1681096 - RNA, 19 nt, Artificial Sequence
  Description of Artificial Sequence: Synthetic oligonucleotide
  Antisense strand to SEQ ID NO: 1681095
acauucagacauuucuucu

SEQ ID NO: 1681097 - RNA, 19 nt, Artificial Sequence
  Description of Artificial Sequence: Synthetic oligonucleotide
  Sense strand starting at position 1872 of SEQ ID NO: 1561560
cgugcuuccagcguuaagu

SEQ ID NO: 1681098 - RNA, 19 nt, Artificial Sequence
  Description of Artificial Sequence: Synthetic oligonucleotide
  Antisense strand to SEQ ID NO: 1681097
acuuaacgcuggaagcacg

SEQ ID NO: 1681099 - RNA, 19 nt, Artificial Sequence
  Description of Artificial Sequence: Synthetic oligonucleotide
  Sense strand starting at position 1878 of SEQ ID NO: 1561560
uccagcguuaaguggaauu

SEQ ID NO: 1681100 - RNA, 19 nt, Artificial Sequence
  Description of Artificial Sequence: Synthetic oligonucleotide
  Antisense strand to SEQ ID NO: 1681099
aauuccacuuaacgcugga

SEQ ID NO: 1681101 - RNA, 19 nt, Artificial Sequence
  Description of Artificial Sequence: Synthetic oligonucleotide
  Sense strand starting at position 1975 of SEQ ID NO: 1561560
uuuaguugggcccaucuau

SEQ ID NO: 1681102 - RNA, 19 nt, Artificial Sequence
  Description of Artificial Sequence: Synthetic oligonucleotide
  Antisense strand to SEQ ID NO: 1681101
auagaugggcccaacuaaa

SEQ ID NO: 1681103 - RNA, 19 nt, Artificial Sequence
  Description of Artificial Sequence: Synthetic oligonucleotide
  Sense strand starting at position 2291 of SEQ ID NO: 1561560
gcuggauucuugcugaagu

SEQ ID NO: 1681104 - RNA, 19 nt, Artificial Sequence
  Description of Artificial Sequence: Synthetic oligonucleotide
  Antisense strand to SEQ ID NO: 1681103
acuucagcaagaauccagc

SEQ ID NO: 1681105 - RNA, 19 nt, Artificial Sequence
  Description of Artificial Sequence: Synthetic oligonucleotide
  Sense strand starting at position 2364 of SEQ ID NO: 1561560
cugacuaaagcuuggucua

SEQ ID NO: 1681106 - RNA, 19 nt, Artificial Sequence
  Description of Artificial Sequence: Synthetic oligonucleotide
  Antisense strand to SEQ ID NO: 1681105
uagaccaagcuuuagucag

SEQ ID NO: 1681107 - RNA, 19 nt, Artificial Sequence
  Description of Artificial Sequence: Synthetic oligonucleotide
  Sense strand starting at position 2387 of SEQ ID NO: 1561560
cuccuugucaggugagacu

SEQ ID NO: 1681108 - RNA, 19 nt, Artificial Sequence
  Description of Artificial Sequence: Synthetic oligonucleotide
  Antisense strand to SEQ ID NO: 1681107
agucucaccugacaaggag

SEQ ID NO: 1681109 - RNA, 19 nt, Artificial Sequence
  Description of Artificial Sequence: Synthetic oligonucleotide
  Sense strand starting at position 2510 of SEQ ID NO: 1561560
ugucgcuuucuggacuaca

SEQ ID NO: 1681110 - RNA, 19 nt, Artificial Sequence
  Description of Artificial Sequence: Synthetic oligonucleotide
  Antisense strand to SEQ ID NO: 1681109
uguaguccagaaagcgaca

SEQ ID NO: 1681111 - RNA, 19 nt, Artificial Sequence
  Description of Artificial Sequence: Synthetic oligonucleotide
  Sense strand starting at position 2596 of SEQ ID NO: 1561560
gggaucuucccgcggauuu

SEQ ID NO: 1681112 - RNA, 19 nt, Artificial Sequence
  Description of Artificial Sequence: Synthetic oligonucleotide
  Antisense strand to SEQ ID NO: 1681111
aaauccgcgggaagauccc

SEQ ID NO: 1681113 - RNA, 19 nt, Artificial Sequence
  Description of Artificial Sequence: Synthetic oligonucleotide
  Sense strand starting at position 2778 of SEQ ID NO: 1561560
gcgauugugaggagugugu

SEQ ID NO: 1681114 - RNA, 19 nt, Artificial Sequence
  Description of Artificial Sequence: Synthetic oligonucleotide
  Antisense strand to SEQ ID NO: 1681113
acacacuccucacaaucgc

SEQ ID NO: 1681115 - RNA, 19 nt, Artificial Sequence
  Description of Artificial Sequence: Synthetic oligonucleotide
  Sense strand starting at position 2880 of SEQ ID NO: 1561560
gcgggugugaguagaguuu

SEQ ID NO: 1681116 - RNA, 19 nt, Artificial Sequence
  Description of Artificial Sequence: Synthetic oligonucleotide
  Antisense strand to SEQ ID NO: 1681115
aaacucuacucacacccgc

SEQ ID NO: 1681117 - RNA, 19 nt, Artificial Sequence
  Description of Artificial Sequence: Synthetic oligonucleotide
  Sense strand starting at position 2881 of SEQ ID NO: 1561560
cgggugugaguagaguuua

SEQ ID NO: 1681118 - RNA, 19 nt, Artificial Sequence
  Description of Artificial Sequence: Synthetic oligonucleotide
  Antisense strand to SEQ ID NO: 1681117
uaaacucuacucacacccg

SEQ ID NO: 1681119 - RNA, 19 nt, Artificial Sequence
  Description of Artificial Sequence: Synthetic oligonucleotide
  Sense strand starting at position 2886 of SEQ ID NO: 1561560
gugaguagaguuuaauugu

SEQ ID NO: 1681120 - RNA, 19 nt, Artificial Sequence
  Description of Artificial Sequence: Synthetic oligonucleotide
  Antisense strand to SEQ ID NO: 1681119
acaauuaaacucuacucac

SEQ ID NO: 1681121 - RNA, 19 nt, Artificial Sequence
  Description of Artificial Sequence: Synthetic oligonucleotide
  Sense strand starting at position 2889 of SEQ ID NO: 1561560
aguagaguuuaauugugac

SEQ ID NO: 1681122 - RNA, 19 nt, Artificial Sequence
  Description of Artificial Sequence: Synthetic oligonucleotide
  Antisense strand to SEQ ID NO: 1681121
gucacaauuaaacucuacu

SEQ ID NO: 1681123 - RNA, 19 nt, Artificial Sequence
  Description of Artificial Sequence: Synthetic oligonucleotide
  Sense strand starting at position 2895 of SEQ ID NO: 1561560
guuuaauugugaccggguu

SEQ ID NO: 1681124 - RNA, 19 nt, Artificial Sequence
  Description of Artificial Sequence: Synthetic oligonucleotide
  Antisense strand to SEQ ID NO: 1681123
aacccggucacaauuaaac

SEQ ID NO: 1681125 - RNA, 19 nt, Artificial Sequence
  Description of Artificial Sequence: Synthetic oligonucleotide
  Sense strand starting at position 3089 of SEQ ID NO: 1561560
auggagggugcgugugaau

SEQ ID NO: 1681126 - RNA, 19 nt, Artificial Sequence
  Description of Artificial Sequence: Synthetic oligonucleotide
  Antisense strand to SEQ ID NO: 1681125
auucacacgcacccuccau

SEQ ID NO: 1681127 - RNA, 19 nt, Artificial Sequence
  Description of Artificial Sequence: Synthetic oligonucleotide
  Sense strand starting at position 3091 of SEQ ID NO: 1561560
ggagggugcgugugaauuu

SEQ ID NO: 1681128 - RNA, 19 nt, Artificial Sequence
  Description of Artificial Sequence: Synthetic oligonucleotide
  Antisense strand to SEQ ID NO: 1681127
aaauucacacgcacccucc

SEQ ID NO: 1681129 - RNA, 19 nt, Artificial Sequence
  Description of Artificial Sequence: Synthetic oligonucleotide
  Sense strand starting at position 3098 of SEQ ID NO: 1561560
gcgugugaauuuguuguca

SEQ ID NO: 1681130 - RNA, 19 nt, Artificial Sequence
  Description of Artificial Sequence: Synthetic oligonucleotide
  Antisense strand to SEQ ID NO: 1681129
ugacaacaaauucacacgc

SEQ ID NO: 1681131 - RNA, 19 nt, Artificial Sequence
  Description of Artificial Sequence: Synthetic oligonucleotide
  Sense strand starting at position 3128 of SEQ ID NO: 1561560
agguguaugucacugggaa

SEQ ID NO: 1681132 - RNA, 19 nt, Artificial Sequence
  Description of Artificial Sequence: Synthetic oligonucleotide
  Antisense strand to SEQ ID NO: 1681131
uucccagugacauacaccu

SEQ ID NO: 1681133 - RNA, 19 nt, Artificial Sequence
  Description of Artificial Sequence: Synthetic oligonucleotide
  Sense strand starting at position 3129 of SEQ ID NO: 1561560
gguguaugucacugggaau

SEQ ID NO: 1681134 - RNA, 19 nt, Artificial Sequence
  Description of Artificial Sequence: Synthetic oligonucleotide
  Antisense strand to SEQ ID NO: 1681133
auucccagugacauacacc

SEQ ID NO: 1681135 - RNA, 19 nt, Artificial Sequence
  Description of Artificial Sequence: Synthetic oligonucleotide
  Sense strand starting at position 3130 of SEQ ID NO: 1561560
guguaugucacugggaauu

SEQ ID NO: 1681136 - RNA, 19 nt, Artificial Sequence
  Description of Artificial Sequence: Synthetic oligonucleotide
  Antisense strand to SEQ ID NO: 1681135
aauucccagugacauacac

SEQ ID NO: 1681137 - RNA, 19 nt, Artificial Sequence
  Description of Artificial Sequence: Synthetic oligonucleotide
  Sense strand starting at position 3132 of SEQ ID NO: 1561560
guaugucacugggaauuug

SEQ ID NO: 1681138 - RNA, 19 nt, Artificial Sequence
  Description of Artificial Sequence: Synthetic oligonucleotide
  Antisense strand to SEQ ID NO: 1681137
caaauucccagugacauac

SEQ ID NO: 1681139 - RNA, 19 nt, Artificial Sequence
  Description of Artificial Sequence: Synthetic oligonucleotide
  Sense strand starting at position 3210 of SEQ ID NO: 1561560
ugugauuguguguuguguu

SEQ ID NO: 1681140 - RNA, 19 nt, Artificial Sequence
  Description of Artificial Sequence: Synthetic oligonucleotide
  Antisense strand to SEQ ID NO: 1681139
aacacaacacacaaucaca

SEQ ID NO: 1681141 - RNA, 19 nt, Artificial Sequence
  Description of Artificial Sequence: Synthetic oligonucleotide
  Sense strand starting at position 3239 of SEQ ID NO: 1561560
gugccugugacguuuaugu

SEQ ID NO: 1681142 - RNA, 19 nt, Artificial Sequence
  Description of Artificial Sequence: Synthetic oligonucleotide
  Antisense strand to SEQ ID NO: 1681141
acauaaacgucacaggcac

SEQ ID NO: 1681143 - RNA, 19 nt, Artificial Sequence
  Description of Artificial Sequence: Synthetic oligonucleotide
  Sense strand starting at position 3269 of SEQ ID NO: 1561560
gagugaguuugugugacua

SEQ ID NO: 1681144 - RNA, 19 nt, Artificial Sequence
  Description of Artificial Sequence: Synthetic oligonucleotide
  Antisense strand to SEQ ID NO: 1681143
uagucacacaaacucacuc

SEQ ID NO: 1681145 - RNA, 19 nt, Artificial Sequence
  Description of Artificial Sequence: Synthetic oligonucleotide
  Sense strand starting at position 3282 of SEQ ID NO: 1561560
ugacuauguguccguauag

SEQ ID NO: 1681146 - RNA, 19 nt, Artificial Sequence
  Description of Artificial Sequence: Synthetic oligonucleotide
  Antisense strand to SEQ ID NO: 1681145
cuauacggacacauaguca

SEQ ID NO: 1681147 - RNA, 19 nt, Artificial Sequence
  Description of Artificial Sequence: Synthetic oligonucleotide
  Sense strand starting at position 3317 of SEQ ID NO: 1561560
gagucuuugucuuugugac

SEQ ID NO: 1681148 - RNA, 19 nt, Artificial Sequence
  Description of Artificial Sequence: Synthetic oligonucleotide
  Antisense strand to SEQ ID NO: 1681147
gucacaaagacaaagacuc

SEQ ID NO: 1681149 - RNA, 19 nt, Artificial Sequence
  Description of Artificial Sequence: Synthetic oligonucleotide
  Sense strand starting at position 3647 of SEQ ID NO: 1561560
ccuguccucuuguuuaaga

SEQ ID NO: 1681150 - RNA, 19 nt, Artificial Sequence
  Description of Artificial Sequence: Synthetic oligonucleotide
  Antisense strand to SEQ ID NO: 1681149
ucuuaaacaagaggacagg

SEQ ID NO: 1681151 - RNA, 19 nt, Artificial Sequence
  Description of Artificial Sequence: Synthetic oligonucleotide
  Sense strand starting at position 3648 of SEQ ID NO: 1561560
cuguccucuuguuuaagaa

SEQ ID NO: 1681152 - RNA, 19 nt, Artificial Sequence
  Description of Artificial Sequence: Synthetic oligonucleotide
  Antisense strand to SEQ ID NO: 1681151
uucuuaaacaagaggacag

SEQ ID NO: 1681153 - RNA, 19 nt, Artificial Sequence
  Description of Artificial Sequence: Synthetic oligonucleotide
  Sense strand starting at position 3649 of SEQ ID NO: 1561560
uguccucuuguuuaagaaa

SEQ ID NO: 1681154 - RNA, 19 nt, Artificial Sequence
  Description of Artificial Sequence: Synthetic oligonucleotide
  Antisense strand to SEQ ID NO: 1681153
uuucuuaaacaagaggaca

SEQ ID NO: 1681155 - RNA, 19 nt, Artificial Sequence
  Description of Artificial Sequence: Synthetic oligonucleotide
  Sense strand starting at position 3687 of SEQ ID NO: 1561560
ggacauaguugcuuuccuu

SEQ ID NO: 1681156 - RNA, 19 nt, Artificial Sequence
  Description of Artificial Sequence: Synthetic oligonucleotide
  Antisense strand to SEQ ID NO: 1681155
aaggaaagcaacuaugucc

SEQ ID NO: 1681157 - RNA, 19 nt, Artificial Sequence
  Description of Artificial Sequence: Synthetic oligonucleotide
  Sense strand starting at position 3808 of SEQ ID NO: 1561560
acugauuugucagaugguu

SEQ ID NO: 1681158 - RNA, 19 nt, Artificial Sequence
  Description of Artificial Sequence: Synthetic oligonucleotide
  Antisense strand to SEQ ID NO: 1681157
aaccaucugacaaaucagu

SEQ ID NO: 1681159 - RNA, 19 nt, Artificial Sequence
  Description of Artificial Sequence: Synthetic oligonucleotide
  Sense strand starting at position 3967 of SEQ ID NO: 1561560
caggcagugugacuaugau

SEQ ID NO: 1681160 - RNA, 19 nt, Artificial Sequence
  Description of Artificial Sequence: Synthetic oligonucleotide
  Antisense strand to SEQ ID NO: 1681159
aucauagucacacugccug

SEQ ID NO: 1681161 - RNA, 19 nt, Artificial Sequence
  Description of Artificial Sequence: Synthetic oligonucleotide
  Sense strand starting at position 54 of SEQ ID NO: 1561561
cuuccuucuuucugagaga

SEQ ID NO: 1681162 - RNA, 19 nt, Artificial Sequence
  Description of Artificial Sequence: Synthetic oligonucleotide
  Antisense strand to SEQ ID NO: 1681161
ucucucagaaagaaggaag

SEQ ID NO: 1681163 - RNA, 19 nt, Artificial Sequence
  Description of Artificial Sequence: Synthetic oligonucleotide
  Sense strand starting at position 57 of SEQ ID NO: 1561561
ccuucuuucugagagauac

SEQ ID NO: 1681164 - RNA, 19 nt, Artificial Sequence
  Description of Artificial Sequence: Synthetic oligonucleotide
  Antisense strand to SEQ ID NO: 1681163
guaucucucagaaagaagg

SEQ ID NO: 1681165 - RNA, 19 nt, Artificial Sequence
  Description of Artificial Sequence: Synthetic oligonucleotide
  Sense strand starting at position 125 of SEQ ID NO: 1561561
cuugaauuggcuuagguaa

SEQ ID NO: 1681166 - RNA, 19 nt, Artificial Sequence
  Description of Artificial Sequence: Synthetic oligonucleotide
  Antisense strand to SEQ ID NO: 1681165
uuaccuaagccaauucaag

SEQ ID NO: 1681167 - RNA, 19 nt, Artificial Sequence
  Description of Artificial Sequence: Synthetic oligonucleotide
  Sense strand starting at position 807 of SEQ ID NO: 1561561
uaguuaucagccuaugagg

SEQ ID NO: 1681168 - RNA, 19 nt, Artificial Sequence
  Description of Artificial Sequence: Synthetic oligonucleotide
  Antisense strand to SEQ ID NO: 1681167
ccucauaggcugauaacua

SEQ ID NO: 1681169 - RNA, 19 nt, Artificial Sequence
  Description of Artificial Sequence: Synthetic oligonucleotide
  Sense strand starting at position 809 of SEQ ID NO: 1561561
guuaucagccuaugaggaa

SEQ ID NO: 1681170 - RNA, 19 nt, Artificial Sequence
  Description of Artificial Sequence: Synthetic oligonucleotide
  Antisense strand to SEQ ID NO: 1681169
uuccucauaggcugauaac

SEQ ID NO: 1681171 - RNA, 19 nt, Artificial Sequence
  Description of Artificial Sequence: Synthetic oligonucleotide
  Sense strand starting at position 891 of SEQ ID NO: 1561561
agacacugaucuugcaaga

SEQ ID NO: 1681172 - RNA, 19 nt, Artificial Sequence
  Description of Artificial Sequence: Synthetic oligonucleotide
  Antisense strand to SEQ ID NO: 1681171
ucuugcaagaucagugucu

SEQ ID NO: 1681173 - RNA, 19 nt, Artificial Sequence
  Description of Artificial Sequence: Synthetic oligonucleotide
  Sense strand starting at position 956 of SEQ ID NO: 1561561
cauucuuugggacggguaa

SEQ ID NO: 1681174 - RNA, 19 nt, Artificial Sequence
  Description of Artificial Sequence: Synthetic oligonucleotide
  Antisense strand to SEQ ID NO: 1681173
uuacccgucccaaagaaug

SEQ ID NO: 1681175 - RNA, 19 nt, Artificial Sequence
  Description of Artificial Sequence: Synthetic oligonucleotide
  Sense strand starting at position 975 of SEQ ID NO: 1561561
guuuguuucucacacucaa

SEQ ID NO: 1681176 - RNA, 19 nt, Artificial Sequence
  Description of Artificial Sequence: Synthetic oligonucleotide
  Antisense strand to SEQ ID NO: 1681175
uugagugugagaaacaaac

SEQ ID NO: 1681177 - RNA, 19 nt, Artificial Sequence
  Description of Artificial Sequence: Synthetic oligonucleotide
  Sense strand starting at position 1132 of SEQ ID NO: 1561561
auuguauaccaucaagucu

SEQ ID NO: 1681178 - RNA, 19 nt, Artificial Sequence
  Description of Artificial Sequence: Synthetic oligonucleotide
  Antisense strand to SEQ ID NO: 1681177
agacuugaugguauacaau

SEQ ID NO: 1681179 - RNA, 19 nt, Artificial Sequence
  Description of Artificial Sequence: Synthetic oligonucleotide
  Sense strand starting at position 1264 of SEQ ID NO: 1561561
uugaacacgcccuaacauu

SEQ ID NO: 1681180 - RNA, 19 nt, Artificial Sequence
  Description of Artificial Sequence: Synthetic oligonucleotide
  Antisense strand to SEQ ID NO: 1681179
aauguuagggcguguucaa

SEQ ID NO: 1681181 - RNA, 19 nt, Artificial Sequence
  Description of Artificial Sequence: Synthetic oligonucleotide
  Sense strand starting at position 1281 of SEQ ID NO: 1561561
uucugagucuaacagaaac

SEQ ID NO: 1681182 - RNA, 19 nt, Artificial Sequence
  Description of Artificial Sequence: Synthetic oligonucleotide
  Antisense strand to SEQ ID NO: 1681181
guuucuguuagacucagaa

SEQ ID NO: 1681183 - RNA, 19 nt, Artificial Sequence
  Description of Artificial Sequence: Synthetic oligonucleotide
  Sense strand starting at position 1303 of SEQ ID NO: 1561561
gcuguaucuggaggacucu

SEQ ID NO: 1681184 - RNA, 19 nt, Artificial Sequence
  Description of Artificial Sequence: Synthetic oligonucleotide
  Antisense strand to SEQ ID NO: 1681183
agaguccuccagauacagc

SEQ ID NO: 1681185 - RNA, 19 nt, Artificial Sequence
  Description of Artificial Sequence: Synthetic oligonucleotide
  Sense strand starting at position 1448 of SEQ ID NO: 1561561
ugaauuuccugccaugaga

SEQ ID NO: 1681186 - RNA, 19 nt, Artificial Sequence
  Description of Artificial Sequence: Synthetic oligonucleotide
  Antisense strand to SEQ ID NO: 1681185
ucucauggcaggaaauuca

SEQ ID NO: 1681187 - RNA, 19 nt, Artificial Sequence
  Description of Artificial Sequence: Synthetic oligonucleotide
  Sense strand starting at position 1456 of SEQ ID NO: 1561561
cugccaugagauuguauau

SEQ ID NO: 1681188 - RNA, 19 nt, Artificial Sequence
  Description of Artificial Sequence: Synthetic oligonucleotide
  Antisense strand to SEQ ID NO: 1681187
auauacaaucucauggcag

SEQ ID NO: 1681189 - RNA, 19 nt, Artificial Sequence
  Description of Artificial Sequence: Synthetic oligonucleotide
  Sense strand starting at position 1622 of SEQ ID NO: 1561561
acagaugagccuuguuuac

SEQ ID NO: 1681190 - RNA, 19 nt, Artificial Sequence
  Description of Artificial Sequence: Synthetic oligonucleotide
  Antisense strand to SEQ ID NO: 1681189
guaaacaaggcucaucugu

SEQ ID NO: 1681191 - RNA, 19 nt, Artificial Sequence
  Description of Artificial Sequence: Synthetic oligonucleotide
  Sense strand starting at position 1624 of SEQ ID NO: 1561561
agaugagccuuguuuacuu

SEQ ID NO: 1681192 - RNA, 19 nt, Artificial Sequence
  Description of Artificial Sequence: Synthetic oligonucleotide
  Antisense strand to SEQ ID NO: 1681191
aaguaaacaaggcucaucu

SEQ ID NO: 1681193 - RNA, 19 nt, Artificial Sequence
  Description of Artificial Sequence: Synthetic oligonucleotide
  Sense strand starting at position 1667 of SEQ ID NO: 1561561
ucucguggcucauuuccaa

SEQ ID NO: 1681194 - RNA, 19 nt, Artificial Sequence
  Description of Artificial Sequence: Synthetic oligonucleotide
  Antisense strand to SEQ ID NO: 1681193
uuggaaaugagccacgaga

SEQ ID NO: 1681195 - RNA, 19 nt, Artificial Sequence
  Description of Artificial Sequence: Synthetic oligonucleotide
  Sense strand starting at position 1759 of SEQ ID NO: 1561561
ugcucuaauuuacggagaa

SEQ ID NO: 1681196 - RNA, 19 nt, Artificial Sequence
  Description of Artificial Sequence: Synthetic oligonucleotide
  Antisense strand to SEQ ID NO: 1681195
uucuccguaaauuagagca

SEQ ID NO: 1681197 - RNA, 19 nt, Artificial Sequence
  Description of Artificial Sequence: Synthetic oligonucleotide
  Sense strand starting at position 1760 of SEQ ID NO: 1561561
gcucuaauuuacggagaaa

SEQ ID NO: 1681198 - RNA, 19 nt, Artificial Sequence
  Description of Artificial Sequence: Synthetic oligonucleotide
  Antisense strand to SEQ ID NO: 1681197
uuucuccguaaauuagagc

SEQ ID NO: 1681199 - RNA, 19 nt, Artificial Sequence
  Description of Artificial Sequence: Synthetic oligonucleotide
  Sense strand starting at position 1771 of SEQ ID NO: 1561561
cggagaaacucuugaacua

SEQ ID NO: 1681200 - RNA, 19 nt, Artificial Sequence
  Description of Artificial Sequence: Synthetic oligonucleotide
  Antisense strand to SEQ ID NO: 1681199
uaguucaagaguuucuccg

SEQ ID NO: 1681201 - RNA, 19 nt, Artificial Sequence
  Description of Artificial Sequence: Synthetic oligonucleotide
  Sense strand starting at position 1783 of SEQ ID NO: 1561561
ugaacuauguugucuacac

SEQ ID NO: 1681202 - RNA, 19 nt, Artificial Sequence
  Description of Artificial Sequence: Synthetic oligonucleotide
  Antisense strand to SEQ ID NO: 1681201
guguagacaacauaguuca

SEQ ID NO: 1681203 - RNA, 19 nt, Artificial Sequence
  Description of Artificial Sequence: Synthetic oligonucleotide
  Sense strand starting at position 1891 of SEQ ID NO: 1561561
aaggacuaugccugucacu

SEQ ID NO: 1681204 - RNA, 19 nt, Artificial Sequence
  Description of Artificial Sequence: Synthetic oligonucleotide
  Antisense strand to SEQ ID NO: 1681203
agugacaggcauaguccuu

SEQ ID NO: 1681205 - RNA, 19 nt, Artificial Sequence
  Description of Artificial Sequence: Synthetic oligonucleotide
  Sense strand starting at position 2264 of SEQ ID NO: 1561561
cgggcccuccggagucauu

SEQ ID NO: 1681206 - RNA, 19 nt, Artificial Sequence
  Description of Artificial Sequence: Synthetic oligonucleotide
  Antisense strand to SEQ ID NO: 1681205
aaugacuccggagggcccg

SEQ ID NO: 1681207 - RNA, 19 nt, Artificial Sequence
  Description of Artificial Sequence: Synthetic oligonucleotide
  Sense strand starting at position 2338 of SEQ ID NO: 1561561
gguuccgcgaucuuucuau

SEQ ID NO: 1681208 - RNA, 19 nt, Artificial Sequence
  Description of Artificial Sequence: Synthetic oligonucleotide
  Antisense strand to SEQ ID NO: 1681207
auagaaagaucgcggaacc

SEQ ID NO: 1681209 - RNA, 19 nt, Artificial Sequence
  Description of Artificial Sequence: Synthetic oligonucleotide
  Sense strand starting at position 2399 of SEQ ID NO: 1561561
aacggugcacucugggaaa

SEQ ID NO: 1681210 - RNA, 19 nt, Artificial Sequence
  Description of Artificial Sequence: Synthetic oligonucleotide
  Antisense strand to SEQ ID NO: 1681209
uuucccagagugcaccguu

SEQ ID NO: 1681211 - RNA, 19 nt, Artificial Sequence
  Description of Artificial Sequence: Synthetic oligonucleotide
  Sense strand starting at position 2657 of SEQ ID NO: 1561561
ccaucuuaggcuggaagua

SEQ ID NO: 1681212 - RNA, 19 nt, Artificial Sequence
  Description of Artificial Sequence: Synthetic oligonucleotide
  Antisense strand to SEQ ID NO: 1681211
uacuuccagccuaagaugg

SEQ ID NO: 1681213 - RNA, 19 nt, Artificial Sequence
  Description of Artificial Sequence: Synthetic oligonucleotide
  Sense strand starting at position 2658 of SEQ ID NO: 1561561
caucuuaggcuggaaguaa

SEQ ID NO: 1681214 - RNA, 19 nt, Artificial Sequence
  Description of Artificial Sequence: Synthetic oligonucleotide
  Antisense strand to SEQ ID NO: 1681213
uuacuuccagccuaagaug

SEQ ID NO: 1681215 - RNA, 19 nt, Artificial Sequence
  Description of Artificial Sequence: Synthetic oligonucleotide
  Sense strand starting at position 2802 of SEQ ID NO: 1561561
gcgggaaaguccuacaaga

SEQ ID NO: 1681216 - RNA, 19 nt, Artificial Sequence
  Description of Artificial Sequence: Synthetic oligonucleotide
  Antisense strand to SEQ ID NO: 1681215
ucuuguaggacuuucccgc

SEQ ID NO: 1681217 - RNA, 19 nt, Artificial Sequence
  Description of Artificial Sequence: Synthetic oligonucleotide
  Sense strand starting at position 2897 of SEQ ID NO: 1561561
caaguaccagccugggaua

SEQ ID NO: 1681218 - RNA, 19 nt, Artificial Sequence
  Description of Artificial Sequence: Synthetic oligonucleotide
  Antisense strand to SEQ ID NO: 1681217
uaucccaggcugguacuug

SEQ ID NO: 1681219 - RNA, 19 nt, Artificial Sequence
  Description of Artificial Sequence: Synthetic oligonucleotide
  Sense strand starting at position 2900 of SEQ ID NO: 1561561
guaccagccugggauagaa

SEQ ID NO: 1681220 - RNA, 19 nt, Artificial Sequence
  Description of Artificial Sequence: Synthetic oligonucleotide
  Antisense strand to SEQ ID NO: 1681219
uucuaucccaggcugguac

SEQ ID NO: 1681221 - RNA, 19 nt, Artificial Sequence
  Description of Artificial Sequence: Synthetic oligonucleotide
  Sense strand starting at position 2967 of SEQ ID NO: 1561561
ggguacccugucugggaau

SEQ ID NO: 1681222 - RNA, 19 nt, Artificial Sequence
  Description of Artificial Sequence: Synthetic oligonucleotide
  Antisense strand to SEQ ID NO: 1681221
auucccagacaggguaccc

SEQ ID NO: 1681223 - RNA, 19 nt, Artificial Sequence
  Description of Artificial Sequence: Synthetic oligonucleotide
  Sense strand starting at position 3029 of SEQ ID NO: 1561561
cccuuaaaguguuugguuu

SEQ ID NO: 1681224 - RNA, 19 nt, Artificial Sequence
  Description of Artificial Sequence: Synthetic oligonucleotide
  Antisense strand to SEQ ID NO: 1681223
aaaccaaacacuuuaaggg

SEQ ID NO: 1681225 - RNA, 19 nt, Artificial Sequence
  Description of Artificial Sequence: Synthetic oligonucleotide
  Sense strand starting at position 3180 of SEQ ID NO: 1561561
cuuucugacagaggaguaa

SEQ ID NO: 1681226 - RNA, 19 nt, Artificial Sequence
  Description of Artificial Sequence: Synthetic oligonucleotide
  Antisense strand to SEQ ID NO: 1681225
uuacuccucugucagaaag

SEQ ID NO: 1681227 - RNA, 19 nt, Artificial Sequence
  Description of Artificial Sequence: Synthetic oligonucleotide
  Sense strand starting at position 3314 of SEQ ID NO: 1561561
aaguguugguaucucaaga

SEQ ID NO: 1681228 - RNA, 19 nt, Artificial Sequence
  Description of Artificial Sequence: Synthetic oligonucleotide
  Antisense strand to SEQ ID NO: 1681227
ucuugagauaccaacacuu

SEQ ID NO: 1681229 - RNA, 19 nt, Artificial Sequence
  Description of Artificial Sequence: Synthetic oligonucleotide
  Sense strand starting at position 3338 of SEQ ID NO: 1561561
ugcccauucuaugugauca

SEQ ID NO: 1681230 - RNA, 19 nt, Artificial Sequence
  Description of Artificial Sequence: Synthetic oligonucleotide
  Antisense strand to SEQ ID NO: 1681229
ugaucacauagaaugggca

SEQ ID NO: 1681231 - RNA, 19 nt, Artificial Sequence
  Description of Artificial Sequence: Synthetic oligonucleotide
  Sense strand starting at position 3340 of SEQ ID NO: 1561561
cccauucuaugugaucauu

SEQ ID NO: 1681232 - RNA, 19 nt, Artificial Sequence
  Description of Artificial Sequence: Synthetic oligonucleotide
  Antisense strand to SEQ ID NO: 1681231
aaugaucacauagaauggg

SEQ ID NO: 1681233 - RNA, 19 nt, Artificial Sequence
  Description of Artificial Sequence: Synthetic oligonucleotide
  Sense strand starting at position 3655 of SEQ ID NO: 1561561
gcacauaaccugugugauc

SEQ ID NO: 1681234 - RNA, 19 nt, Artificial Sequence
  Description of Artificial Sequence: Synthetic oligonucleotide
  Antisense strand to SEQ ID NO: 1681233
gaucacacagguuaugugc

SEQ ID NO: 1681235 - RNA, 19 nt, Artificial Sequence
  Description of Artificial Sequence: Synthetic oligonucleotide
  Sense strand starting at position 3657 of SEQ ID NO: 1561561
acauaaccugugugaucau

SEQ ID NO: 1681236 - RNA, 19 nt, Artificial Sequence
  Description of Artificial Sequence: Synthetic oligonucleotide
  Antisense strand to SEQ ID NO: 1681235
augaucacacagguuaugu

SEQ ID NO: 1681237 - RNA, 19 nt, Artificial Sequence
  Description of Artificial Sequence: Synthetic oligonucleotide
  Sense strand starting at position 3697 of SEQ ID NO: 1561561
ccagcugaucuuuagggua

SEQ ID NO: 1681238 - RNA, 19 nt, Artificial Sequence
  Description of Artificial Sequence: Synthetic oligonucleotide
  Antisense strand to SEQ ID NO: 1681237
uacccuaaagaucagcugg

SEQ ID NO: 1681239 - RNA, 19 nt, Artificial Sequence
  Description of Artificial Sequence: Synthetic oligonucleotide
  Sense strand starting at position 3700 of SEQ ID NO: 1561561
gcugaucuuuaggguauua

SEQ ID NO: 1681240 - RNA, 19 nt, Artificial Sequence
  Description of Artificial Sequence: Synthetic oligonucleotide
  Antisense strand to SEQ ID NO: 1681239
uaauacccuaaagaucagc

SEQ ID NO: 1681241 - RNA, 19 nt, Artificial Sequence
  Description of Artificial Sequence: Synthetic oligonucleotide
  Sense strand starting at position 450 of SEQ ID NO: 1561562
uaguuaucagccuaugagg

SEQ ID NO: 1681242 - RNA, 19 nt, Artificial Sequence
  Description of Artificial Sequence: Synthetic oligonucleotide
  Antisense strand to SEQ ID NO: 1681241
ccucauaggcugauaacua

SEQ ID NO: 1681243 - RNA, 19 nt, Artificial Sequence
  Description of Artificial Sequence: Synthetic oligonucleotide
  Sense strand starting at position 452 of SEQ ID NO: 1561562
guuaucagccuaugaggaa

SEQ ID NO: 1681244 - RNA, 19 nt, Artificial Sequence
  Description of Artificial Sequence: Synthetic oligonucleotide
  Antisense strand to SEQ ID NO: 1681243
uuccucauaggcugauaac

SEQ ID NO: 1681245 - RNA, 19 nt, Artificial Sequence
  Description of Artificial Sequence: Synthetic oligonucleotide
  Sense strand starting at position 534 of SEQ ID NO: 1561562
agacacugaucuugcaaga

SEQ ID NO: 1681246 - RNA, 19 nt, Artificial Sequence
  Description of Artificial Sequence: Synthetic oligonucleotide
  Antisense strand to SEQ ID NO: 1681245
ucuugcaagaucagugucu

SEQ ID NO: 1681247 - RNA, 19 nt, Artificial Sequence
  Description of Artificial Sequence: Synthetic oligonucleotide
  Sense strand starting at position 599 of SEQ ID NO: 1561562
cauucuuugggacggguaa

SEQ ID NO: 1681248 - RNA, 19 nt, Artificial Sequence
  Description of Artificial Sequence: Synthetic oligonucleotide
  Antisense strand to SEQ ID NO: 1681247
uuacccgucccaaagaaug

SEQ ID NO: 1681249 - RNA, 19 nt, Artificial Sequence
  Description of Artificial Sequence: Synthetic oligonucleotide
  Sense strand starting at position 775 of SEQ ID NO: 1561562
auuguauaccaucaagucu

SEQ ID NO: 1681250 - RNA, 19 nt, Artificial Sequence
  Description of Artificial Sequence: Synthetic oligonucleotide
  Antisense strand to SEQ ID NO: 1681249
agacuugaugguauacaau

SEQ ID NO: 1681251 - RNA, 19 nt, Artificial Sequence
  Description of Artificial Sequence: Synthetic oligonucleotide
  Sense strand starting at position 907 of SEQ ID NO: 1561562
uugaacacgcccuaacauu

SEQ ID NO: 1681252 - RNA, 19 nt, Artificial Sequence
  Description of Artificial Sequence: Synthetic oligonucleotide
  Antisense strand to SEQ ID NO: 1681251
aauguuagggcguguucaa

SEQ ID NO: 1681253 - RNA, 19 nt, Artificial Sequence
  Description of Artificial Sequence: Synthetic oligonucleotide
  Sense strand starting at position 924 of SEQ ID NO: 1561562
uucugagucuaacagaaac

SEQ ID NO: 1681254 - RNA, 19 nt, Artificial Sequence
  Description of Artificial Sequence: Synthetic oligonucleotide
  Antisense strand to SEQ ID NO: 1681253
guuucuguuagacucagaa

SEQ ID NO: 1681255 - RNA, 19 nt, Artificial Sequence
  Description of Artificial Sequence: Synthetic oligonucleotide
  Sense strand starting at position 946 of SEQ ID NO: 1561562
gcuguaucuggaggacucu

SEQ ID NO: 1681256 - RNA, 19 nt, Artificial Sequence
  Description of Artificial Sequence: Synthetic oligonucleotide
  Antisense strand to SEQ ID NO: 1681255
agaguccuccagauacagc

SEQ ID NO: 1681257 - RNA, 19 nt, Artificial Sequence
  Description of Artificial Sequence: Synthetic oligonucleotide
  Sense strand starting at position 1091 of SEQ ID NO: 1561562
ugaauuuccugccaugaga

SEQ ID NO: 1681258 - RNA, 19 nt, Artificial Sequence
  Description of Artificial Sequence: Synthetic oligonucleotide
  Antisense strand to SEQ ID NO: 1681257
ucucauggcaggaaauuca

SEQ ID NO: 1681259 - RNA, 19 nt, Artificial Sequence
  Description of Artificial Sequence: Synthetic oligonucleotide
  Sense strand starting at position 1099 of SEQ ID NO: 1561562
cugccaugagauuguauau

SEQ ID NO: 1681260 - RNA, 19 nt, Artificial Sequence
  Description of Artificial Sequence: Synthetic oligonucleotide
  Antisense strand to SEQ ID NO: 1681259
auauacaaucucauggcag

SEQ ID NO: 1681261 - RNA, 19 nt, Artificial Sequence
  Description of Artificial Sequence: Synthetic oligonucleotide
  Sense strand starting at position 1265 of SEQ ID NO: 1561562
acagaugagccuuguuuac

SEQ ID NO: 1681262 - RNA, 19 nt, Artificial Sequence
  Description of Artificial Sequence: Synthetic oligonucleotide
  Antisense strand to SEQ ID NO: 1681261
guaaacaaggcucaucugu

SEQ ID NO: 1681263 - RNA, 19 nt, Artificial Sequence
  Description of Artificial Sequence: Synthetic oligonucleotide
  Sense strand starting at position 1267 of SEQ ID NO: 1561562
agaugagccuuguuuacuu

SEQ ID NO: 1681264 - RNA, 19 nt, Artificial Sequence
  Description of Artificial Sequence: Synthetic oligonucleotide
  Antisense strand to SEQ ID NO: 1681263
aaguaaacaaggcucaucu

SEQ ID NO: 1681265 - RNA, 19 nt, Artificial Sequence
  Description of Artificial Sequence: Synthetic oligonucleotide
  Sense strand starting at position 1310 of SEQ ID NO: 1561562
ucucguggcucauuuccaa

SEQ ID NO: 1681266 - RNA, 19 nt, Artificial Sequence
  Description of Artificial Sequence: Synthetic oligonucleotide
  Antisense strand to SEQ ID NO: 1681265
uuggaaaugagccacgaga

SEQ ID NO: 1681267 - RNA, 19 nt, Artificial Sequence
  Description of Artificial Sequence: Synthetic oligonucleotide
  Sense strand starting at position 1402 of SEQ ID NO: 1561562
ugcucuaauuuacggagaa

SEQ ID NO: 1681268 - RNA, 19 nt, Artificial Sequence
  Description of Artificial Sequence: Synthetic oligonucleotide
  Antisense strand to SEQ ID NO: 1681267
uucuccguaaauuagagca

SEQ ID NO: 1681269 - RNA, 19 nt, Artificial Sequence
  Description of Artificial Sequence: Synthetic oligonucleotide
  Sense strand starting at position 1403 of SEQ ID NO: 1561562
gcucuaauuuacggagaaa

SEQ ID NO: 1681270 - RNA, 19 nt, Artificial Sequence
  Description of Artificial Sequence: Synthetic oligonucleotide
  Antisense strand to SEQ ID NO: 1681269
uuucuccguaaauuagagc

SEQ ID NO: 1681271 - RNA, 19 nt, Artificial Sequence
  Description of Artificial Sequence: Synthetic oligonucleotide
  Sense strand starting at position 1414 of SEQ ID NO: 1561562
cggagaaacucuugaacua

SEQ ID NO: 1681272 - RNA, 19 nt, Artificial Sequence
  Description of Artificial Sequence: Synthetic oligonucleotide
  Antisense strand to SEQ ID NO: 1681271
uaguucaagaguuucuccg

SEQ ID NO: 1681273 - RNA, 19 nt, Artificial Sequence
  Description of Artificial Sequence: Synthetic oligonucleotide
  Sense strand starting at position 1426 of SEQ ID NO: 1561562
ugaacuauguugucuacac

SEQ ID NO: 1681274 - RNA, 19 nt, Artificial Sequence
  Description of Artificial Sequence: Synthetic oligonucleotide
  Antisense strand to SEQ ID NO: 1681273
guguagacaacauaguuca

SEQ ID NO: 1681275 - RNA, 19 nt, Artificial Sequence
  Description of Artificial Sequence: Synthetic oligonucleotide
  Sense strand starting at position 1534 of SEQ ID NO: 1561562
aaggacuaugccugucacu

SEQ ID NO: 1681276 - RNA, 19 nt, Artificial Sequence
  Description of Artificial Sequence: Synthetic oligonucleotide
  Antisense strand to SEQ ID NO: 1681275
agugacaggcauaguccuu

SEQ ID NO: 1681277 - RNA, 19 nt, Artificial Sequence
  Description of Artificial Sequence: Synthetic oligonucleotide
  Sense strand starting at position 1907 of SEQ ID NO: 1561562
cgggcccuccggagucauu

SEQ ID NO: 1681278 - RNA, 19 nt, Artificial Sequence
  Description of Artificial Sequence: Synthetic oligonucleotide
  Antisense strand to SEQ ID NO: 1681277
aaugacuccggagggcccg

SEQ ID NO: 1681279 - RNA, 19 nt, Artificial Sequence
  Description of Artificial Sequence: Synthetic oligonucleotide
  Sense strand starting at position 1981 of SEQ ID NO: 1561562
gguuccgcgaucuuucuau

SEQ ID NO: 1681280 - RNA, 19 nt, Artificial Sequence
  Description of Artificial Sequence: Synthetic oligonucleotide
  Antisense strand to SEQ ID NO: 1681279
auagaaagaucgcggaacc

SEQ ID NO: 1681281 - RNA, 19 nt, Artificial Sequence
  Description of Artificial Sequence: Synthetic oligonucleotide
  Sense strand starting at position 2042 of SEQ ID NO: 1561562
aacggugcacucugggaaa

SEQ ID NO: 1681282 - RNA, 19 nt, Artificial Sequence
  Description of Artificial Sequence: Synthetic oligonucleotide
  Antisense strand to SEQ ID NO: 1681281
uuucccagagugcaccguu

SEQ ID NO: 1681283 - RNA, 19 nt, Artificial Sequence
  Description of Artificial Sequence: Synthetic oligonucleotide
  Sense strand starting at position 2300 of SEQ ID NO: 1561562
ccaucuuaggcuggaagua

SEQ ID NO: 1681284 - RNA, 19 nt, Artificial Sequence
  Description of Artificial Sequence: Synthetic oligonucleotide
  Antisense strand to SEQ ID NO: 1681283
uacuuccagccuaagaugg

SEQ ID NO: 1681285 - RNA, 19 nt, Artificial Sequence
  Description of Artificial Sequence: Synthetic oligonucleotide
  Sense strand starting at position 2301 of SEQ ID NO: 1561562
caucuuaggcuggaaguaa

SEQ ID NO: 1681286 - RNA, 19 nt, Artificial Sequence
  Description of Artificial Sequence: Synthetic oligonucleotide
  Antisense strand to SEQ ID NO: 1681285
uuacuuccagccuaagaug

SEQ ID NO: 1681287 - RNA, 19 nt, Artificial Sequence
  Description of Artificial Sequence: Synthetic oligonucleotide
  Sense strand starting at position 2445 of SEQ ID NO: 1561562
gcgggaaaguccuacaaga

SEQ ID NO: 1681288 - RNA, 19 nt, Artificial Sequence
  Description of Artificial Sequence: Synthetic oligonucleotide
  Antisense strand to SEQ ID NO: 1681287
ucuuguaggacuuucccgc

SEQ ID NO: 1681289 - RNA, 19 nt, Artificial Sequence
  Description of Artificial Sequence: Synthetic oligonucleotide
  Sense strand starting at position 2540 of SEQ ID NO: 1561562
caaguaccagccugggaua

SEQ ID NO: 1681290 - RNA, 19 nt, Artificial Sequence
  Description of Artificial Sequence: Synthetic oligonucleotide
  Antisense strand to SEQ ID NO: 1681289
uaucccaggcugguacuug

SEQ ID NO: 1681291 - RNA, 19 nt, Artificial Sequence
  Description of Artificial Sequence: Synthetic oligonucleotide
  Sense strand starting at position 2543 of SEQ ID NO: 1561562
guaccagccugggauagaa

SEQ ID NO: 1681292 - RNA, 19 nt, Artificial Sequence
  Description of Artificial Sequence: Synthetic oligonucleotide
  Antisense strand to SEQ ID NO: 1681291
uucuaucccaggcugguac

SEQ ID NO: 1681293 - RNA, 19 nt, Artificial Sequence
  Description of Artificial Sequence: Synthetic oligonucleotide
  Sense strand starting at position 2610 of SEQ ID NO: 1561562
ggguacccugucugggaau

SEQ ID NO: 1681294 - RNA, 19 nt, Artificial Sequence
  Description of Artificial Sequence: Synthetic oligonucleotide
  Antisense strand to SEQ ID NO: 1681293
auucccagacaggguaccc

SEQ ID NO: 1681295 - RNA, 19 nt, Artificial Sequence
  Description of Artificial Sequence: Synthetic oligonucleotide
  Sense strand starting at position 2672 of SEQ ID NO: 1561562
cccuuaaaguguuugguuu

SEQ ID NO: 1681296 - RNA, 19 nt, Artificial Sequence
  Description of Artificial Sequence: Synthetic oligonucleotide
  Antisense strand to SEQ ID NO: 1681295
aaaccaaacacuuuaaggg

SEQ ID NO: 1681297 - RNA, 19 nt, Artificial Sequence
  Description of Artificial Sequence: Synthetic oligonucleotide
  Sense strand starting at position 2823 of SEQ ID NO: 1561562
cuuucugacagaggaguaa

SEQ ID NO: 1681298 - RNA, 19 nt, Artificial Sequence
  Description of Artificial Sequence: Synthetic oligonucleotide
  Antisense strand to SEQ ID NO: 1681297
uuacuccucugucagaaag

SEQ ID NO: 1681299 - RNA, 19 nt, Artificial Sequence
  Description of Artificial Sequence: Synthetic oligonucleotide
  Sense strand starting at position 2957 of SEQ ID NO: 1561562
aaguguugguaucucaaga

SEQ ID NO: 1681300 - RNA, 19 nt, Artificial Sequence
  Description of Artificial Sequence: Synthetic oligonucleotide
  Antisense strand to SEQ ID NO: 1681299
ucuugagauaccaacacuu

SEQ ID NO: 1681301 - RNA, 19 nt, Artificial Sequence
  Description of Artificial Sequence: Synthetic oligonucleotide
  Sense strand starting at position 2981 of SEQ ID NO: 1561562
ugcccauucuaugugauca

SEQ ID NO: 1681302 - RNA, 19 nt, Artificial Sequence
  Description of Artificial Sequence: Synthetic oligonucleotide
  Antisense strand to SEQ ID NO: 1681301
ugaucacauagaaugggca

SEQ ID NO: 1681303 - RNA, 19 nt, Artificial Sequence
  Description of Artificial Sequence: Synthetic oligonucleotide
  Sense strand starting at position 2983 of SEQ ID NO: 1561562
cccauucuaugugaucauu

SEQ ID NO: 1681304 - RNA, 19 nt, Artificial Sequence
  Description of Artificial Sequence: Synthetic oligonucleotide
  Antisense strand to SEQ ID NO: 1681303
aaugaucacauagaauggg

SEQ ID NO: 1681305 - RNA, 19 nt, Artificial Sequence
  Description of Artificial Sequence: Synthetic oligonucleotide
  Sense strand starting at position 3298 of SEQ ID NO: 1561562
gcacauaaccugugugauc

SEQ ID NO: 1681306 - RNA, 19 nt, Artificial Sequence
  Description of Artificial Sequence: Synthetic oligonucleotide
  Antisense strand to SEQ ID NO: 1681305
gaucacacagguuaugugc

SEQ ID NO: 1681307 - RNA, 19 nt, Artificial Sequence
  Description of Artificial Sequence: Synthetic oligonucleotide
  Sense strand starting at position 3300 of SEQ ID NO: 1561562
acauaaccugugugaucau

SEQ ID NO: 1681308 - RNA, 19 nt, Artificial Sequence
  Description of Artificial Sequence: Synthetic oligonucleotide
  Antisense strand to SEQ ID NO: 1681307
augaucacacagguuaugu

SEQ ID NO: 1681309 - RNA, 19 nt, Artificial Sequence
  Description of Artificial Sequence: Synthetic oligonucleotide
  Sense strand starting at position 3340 of SEQ ID NO: 1561562
ccagcugaucuuuagggua

SEQ ID NO: 1681310 - RNA, 19 nt, Artificial Sequence
  Description of Artificial Sequence: Synthetic oligonucleotide
  Antisense strand to SEQ ID NO: 1681309
uacccuaaagaucagcugg

SEQ ID NO: 1681311 - RNA, 19 nt, Artificial Sequence
  Description of Artificial Sequence: Synthetic oligonucleotide
  Sense strand starting at position 3699 of SEQ ID NO: 1561562
uuaaucuugcugugaaaug

SEQ ID NO: 1681312 - RNA, 19 nt, Artificial Sequence
  Description of Artificial Sequence: Synthetic oligonucleotide
  Antisense strand to SEQ ID NO: 1681311
cauuucacagcaagauuaa

SEQ ID NO: 1681313 - RNA, 19 nt, Artificial Sequence
  Description of Artificial Sequence: Synthetic oligonucleotide
  Sense strand starting at position 3749 of SEQ ID NO: 1561562
cugucuugauuaguuguua

SEQ ID NO: 1681314 - RNA, 19 nt, Artificial Sequence
  Description of Artificial Sequence: Synthetic oligonucleotide
  Antisense strand to SEQ ID NO: 1681313
uaacaacuaaucaagacag

SEQ ID NO: 1681315 - RNA, 19 nt, Artificial Sequence
  Description of Artificial Sequence: Synthetic oligonucleotide
  Sense strand starting at position 3750 of SEQ ID NO: 1561562
ugucuugauuaguuguuaa

SEQ ID NO: 1681316 - RNA, 19 nt, Artificial Sequence
  Description of Artificial Sequence: Synthetic oligonucleotide
  Antisense strand to SEQ ID NO: 1681315
uuaacaacuaaucaagaca

SEQ ID NO: 1681317 - RNA, 19 nt, Artificial Sequence
  Description of Artificial Sequence: Synthetic oligonucleotide
  Sense strand starting at position 3753 of SEQ ID NO: 1561562
cuugauuaguuguuaaacu

SEQ ID NO: 1681318 - RNA, 19 nt, Artificial Sequence
  Description of Artificial Sequence: Synthetic oligonucleotide
  Antisense strand to SEQ ID NO: 1681317
aguuuaacaacuaaucaag

SEQ ID NO: 1681319 - RNA, 19 nt, Artificial Sequence
  Description of Artificial Sequence: Synthetic oligonucleotide
  Sense strand starting at position 3814 of SEQ ID NO: 1561562
gaaggaaagguaugcccau

SEQ ID NO: 1681320 - RNA, 19 nt, Artificial Sequence
  Description of Artificial Sequence: Synthetic oligonucleotide
  Antisense strand to SEQ ID NO: 1681319
augggcauaccuuuccuuc

SEQ ID NO: 1681321 - RNA, 19 nt, Artificial Sequence
  Description of Artificial Sequence: Synthetic oligonucleotide
  Sense strand starting at position 128 of SEQ ID NO: 1561563
uaaacacaguguuuacgua

SEQ ID NO: 1681322 - RNA, 19 nt, Artificial Sequence
  Description of Artificial Sequence: Synthetic oligonucleotide
  Antisense strand to SEQ ID NO: 1681321
uacguaaacacuguguuua

SEQ ID NO: 1681323 - RNA, 19 nt, Artificial Sequence
  Description of Artificial Sequence: Synthetic oligonucleotide
  Sense strand starting at position 132 of SEQ ID NO: 1561563
cacaguguuuacguauaaa

SEQ ID NO: 1681324 - RNA, 19 nt, Artificial Sequence
  Description of Artificial Sequence: Synthetic oligonucleotide
  Antisense strand to SEQ ID NO: 1681323
uuuauacguaaacacugug

SEQ ID NO: 1681325 - RNA, 19 nt, Artificial Sequence
  Description of Artificial Sequence: Synthetic oligonucleotide
  Sense strand starting at position 135 of SEQ ID NO: 1561563
aguguuuacguauaaagga

SEQ ID NO: 1681326 - RNA, 19 nt, Artificial Sequence
  Description of Artificial Sequence: Synthetic oligonucleotide
  Antisense strand to SEQ ID NO: 1681325
uccuuuauacguaaacacu

SEQ ID NO: 1681327 - RNA, 19 nt, Artificial Sequence
  Description of Artificial Sequence: Synthetic oligonucleotide
  Sense strand starting at position 744 of SEQ ID NO: 1561563
ggcaauaaauaguuuacaa

SEQ ID NO: 1681328 - RNA, 19 nt, Artificial Sequence
  Description of Artificial Sequence: Synthetic oligonucleotide
  Antisense strand to SEQ ID NO: 1681327
uuguaaacuauuuauugcc

SEQ ID NO: 1681329 - RNA, 19 nt, Artificial Sequence
  Description of Artificial Sequence: Synthetic oligonucleotide
  Sense strand starting at position 774 of SEQ ID NO: 1561563
cuaucugaaugcuucuaga

SEQ ID NO: 1681330 - RNA, 19 nt, Artificial Sequence
  Description of Artificial Sequence: Synthetic oligonucleotide
  Antisense strand to SEQ ID NO: 1681329
ucuagaagcauucagauag

SEQ ID NO: 1681331 - RNA, 19 nt, Artificial Sequence
  Description of Artificial Sequence: Synthetic oligonucleotide
  Sense strand starting at position 800 of SEQ ID NO: 1561563
aguuuaaguccuggaauac

SEQ ID NO: 1681332 - RNA, 19 nt, Artificial Sequence
  Description of Artificial Sequence: Synthetic oligonucleotide
  Antisense strand to SEQ ID NO: 1681331
guauuccaggacuuaaacu

SEQ ID NO: 1681333 - RNA, 19 nt, Artificial Sequence
  Description of Artificial Sequence: Synthetic oligonucleotide
  Sense strand starting at position 801 of SEQ ID NO: 1561563
guuuaaguccuggaauacc

SEQ ID NO: 1681334 - RNA, 19 nt, Artificial Sequence
  Description of Artificial Sequence: Synthetic oligonucleotide
  Antisense strand to SEQ ID NO: 1681333
gguauuccaggacuuaaac

SEQ ID NO: 1681335 - RNA, 19 nt, Artificial Sequence
  Description of Artificial Sequence: Synthetic oligonucleotide
  Sense strand starting at position 812 of SEQ ID NO: 1561563
ggaauaccaucugaaacau

SEQ ID NO: 1681336 - RNA, 19 nt, Artificial Sequence
  Description of Artificial Sequence: Synthetic oligonucleotide
  Antisense strand to SEQ ID NO: 1681335
auguuucagaugguauucc

SEQ ID NO: 1681337 - RNA, 19 nt, Artificial Sequence
  Description of Artificial Sequence: Synthetic oligonucleotide
  Sense strand starting at position 850 of SEQ ID NO: 1561563
ugagaaacauauuccaugu

SEQ ID NO: 1681338 - RNA, 19 nt, Artificial Sequence
  Description of Artificial Sequence: Synthetic oligonucleotide
  Antisense strand to SEQ ID NO: 1681337
acauggaauauguuucuca

SEQ ID NO: 1681339 - RNA, 19 nt, Artificial Sequence
  Description of Artificial Sequence: Synthetic oligonucleotide
  Sense strand starting at position 860 of SEQ ID NO: 1561563
auuccaugugcucagggaa

SEQ ID NO: 1681340 - RNA, 19 nt, Artificial Sequence
  Description of Artificial Sequence: Synthetic oligonucleotide
  Antisense strand to SEQ ID NO: 1681339
uucccugagcacauggaau

SEQ ID NO: 1681341 - RNA, 19 nt, Artificial Sequence
  Description of Artificial Sequence: Synthetic oligonucleotide
  Sense strand starting at position 863 of SEQ ID NO: 1561563
ccaugugcucagggaaaga

SEQ ID NO: 1681342 - RNA, 19 nt, Artificial Sequence
  Description of Artificial Sequence: Synthetic oligonucleotide
  Antisense strand to SEQ ID NO: 1681341
ucuuucccugagcacaugg

SEQ ID NO: 1681343 - RNA, 19 nt, Artificial Sequence
  Description of Artificial Sequence: Synthetic oligonucleotide
  Sense strand starting at position 1017 of SEQ ID NO: 1561563
augacauucgagugaauaa

SEQ ID NO: 1681344 - RNA, 19 nt, Artificial Sequence
  Description of Artificial Sequence: Synthetic oligonucleotide
  Antisense strand to SEQ ID NO: 1681343
uuauucacucgaaugucau

SEQ ID NO: 1681345 - RNA, 19 nt, Artificial Sequence
  Description of Artificial Sequence: Synthetic oligonucleotide
  Sense strand starting at position 1075 of SEQ ID NO: 1561563
aucugaaacugugcugaaa

SEQ ID NO: 1681346 - RNA, 19 nt, Artificial Sequence
  Description of Artificial Sequence: Synthetic oligonucleotide
  Antisense strand to SEQ ID NO: 1681345
uuucagcacaguuucagau

SEQ ID NO: 1681347 - RNA, 19 nt, Artificial Sequence
  Description of Artificial Sequence: Synthetic oligonucleotide
  Sense strand starting at position 1156 of SEQ ID NO: 1561563
gucugugcccuggaaaggu

SEQ ID NO: 1681348 - RNA, 19 nt, Artificial Sequence
  Description of Artificial Sequence: Synthetic oligonucleotide
  Antisense strand to SEQ ID NO: 1681347
accuuuccagggcacagac

SEQ ID NO: 1681349 - RNA, 19 nt, Artificial Sequence
  Description of Artificial Sequence: Synthetic oligonucleotide
  Sense strand starting at position 1179 of SEQ ID NO: 1561563
ggaugagggccacagcauu

SEQ ID NO: 1681350 - RNA, 19 nt, Artificial Sequence
  Description of Artificial Sequence: Synthetic oligonucleotide
  Antisense strand to SEQ ID NO: 1681349
aaugcuguggcccucaucc

SEQ ID NO: 1681351 - RNA, 19 nt, Artificial Sequence
  Description of Artificial Sequence: Synthetic oligonucleotide
  Sense strand starting at position 1382 of SEQ ID NO: 1561563
gaaguaggcguuugggaau

SEQ ID NO: 1681352 - RNA, 19 nt, Artificial Sequence
  Description of Artificial Sequence: Synthetic oligonucleotide
  Antisense strand to SEQ ID NO: 1681351
auucccaaacgccuacuuc

SEQ ID NO: 1681353 - RNA, 19 nt, Artificial Sequence
  Description of Artificial Sequence: Synthetic oligonucleotide
  Sense strand starting at position 1412 of SEQ ID NO: 1561563
uccggaaaucuagggauua

SEQ ID NO: 1681354 - RNA, 19 nt, Artificial Sequence
  Description of Artificial Sequence: Synthetic oligonucleotide
  Antisense strand to SEQ ID NO: 1681353
uaaucccuagauuuccgga

SEQ ID NO: 1681355 - RNA, 19 nt, Artificial Sequence
  Description of Artificial Sequence: Synthetic oligonucleotide
  Sense strand starting at position 1490 of SEQ ID NO: 1561563
uuccaacaucuuuggaaga

SEQ ID NO: 1681356 - RNA, 19 nt, Artificial Sequence
  Description of Artificial Sequence: Synthetic oligonucleotide
  Antisense strand to SEQ ID NO: 1681355
ucuuccaaagauguuggaa

SEQ ID NO: 1681357 - RNA, 19 nt, Artificial Sequence
  Description of Artificial Sequence: Synthetic oligonucleotide
  Sense strand starting at position 1623 of SEQ ID NO: 1561563
cccugcacgaucugggaaa

SEQ ID NO: 1681358 - RNA, 19 nt, Artificial Sequence
  Description of Artificial Sequence: Synthetic oligonucleotide
  Antisense strand to SEQ ID NO: 1681357
uuucccagaucgugcaggg

SEQ ID NO: 1681359 - RNA, 19 nt, Artificial Sequence
  Description of Artificial Sequence: Synthetic oligonucleotide
  Sense strand starting at position 1658 of SEQ ID NO: 1561563
cgcggaguuguccagagag

SEQ ID NO: 1681360 - RNA, 19 nt, Artificial Sequence
  Description of Artificial Sequence: Synthetic oligonucleotide
  Antisense strand to SEQ ID NO: 1681359
cucucuggacaacuccgcg

SEQ ID NO: 1681361 - RNA, 19 nt, Artificial Sequence
  Description of Artificial Sequence: Synthetic oligonucleotide
  Sense strand starting at position 2167 of SEQ ID NO: 1561563
agcagaaauuguuccggau

SEQ ID NO: 1681362 - RNA, 19 nt, Artificial Sequence
  Description of Artificial Sequence: Synthetic oligonucleotide
  Antisense strand to SEQ ID NO: 1681361
auccggaacaauuucugcu

SEQ ID NO: 1681363 - RNA, 19 nt, Artificial Sequence
  Description of Artificial Sequence: Synthetic oligonucleotide
  Sense strand starting at position 2298 of SEQ ID NO: 1561563
gagcaaguggucgucuagu

SEQ ID NO: 1681364 - RNA, 19 nt, Artificial Sequence
  Description of Artificial Sequence: Synthetic oligonucleotide
  Antisense strand to SEQ ID NO: 1681363
acuagacgaccacuugcuc

SEQ ID NO: 1681365 - RNA, 19 nt, Artificial Sequence
  Description of Artificial Sequence: Synthetic oligonucleotide
  Sense strand starting at position 2300 of SEQ ID NO: 1561563
gcaaguggucgucuaguca

SEQ ID NO: 1681366 - RNA, 19 nt, Artificial Sequence
  Description of Artificial Sequence: Synthetic oligonucleotide
  Antisense strand to SEQ ID NO: 1681365
ugacuagacgaccacuugc

SEQ ID NO: 1681367 - RNA, 19 nt, Artificial Sequence
  Description of Artificial Sequence: Synthetic oligonucleotide
  Sense strand starting at position 2383 of SEQ ID NO: 1561563
aggccucucguggaauagu

SEQ ID NO: 1681368 - RNA, 19 nt, Artificial Sequence
  Description of Artificial Sequence: Synthetic oligonucleotide
  Antisense strand to SEQ ID NO: 1681367
acuauuccacgagaggccu

SEQ ID NO: 1681369 - RNA, 19 nt, Artificial Sequence
  Description of Artificial Sequence: Synthetic oligonucleotide
  Sense strand starting at position 2392 of SEQ ID NO: 1561563
guggaauagugacccuugu

SEQ ID NO: 1681370 - RNA, 19 nt, Artificial Sequence
  Description of Artificial Sequence: Synthetic oligonucleotide
  Antisense strand to SEQ ID NO: 1681369
acaagggucacuauuccac

SEQ ID NO: 1681371 - RNA, 19 nt, Artificial Sequence
  Description of Artificial Sequence: Synthetic oligonucleotide
  Sense strand starting at position 2399 of SEQ ID NO: 1561563
agugacccuuguuuauaaa

SEQ ID NO: 1681372 - RNA, 19 nt, Artificial Sequence
  Description of Artificial Sequence: Synthetic oligonucleotide
  Antisense strand to SEQ ID NO: 1681371
uuuauaaacaagggucacu

SEQ ID NO: 1681373 - RNA, 19 nt, Artificial Sequence
  Description of Artificial Sequence: Synthetic oligonucleotide
  Sense strand starting at position 2817 of SEQ ID NO: 1561563
augagacgugcucaguaaa

SEQ ID NO: 1681374 - RNA, 19 nt, Artificial Sequence
  Description of Artificial Sequence: Synthetic oligonucleotide
  Antisense strand to SEQ ID NO: 1681373
uuuacugagcacgucucau

SEQ ID NO: 1681375 - RNA, 19 nt, Artificial Sequence
  Description of Artificial Sequence: Synthetic oligonucleotide
  Sense strand starting at position 2820 of SEQ ID NO: 1561563
agacgugcucaguaaacug

SEQ ID NO: 1681376 - RNA, 19 nt, Artificial Sequence
  Description of Artificial Sequence: Synthetic oligonucleotide
  Antisense strand to SEQ ID NO: 1681375
caguuuacugagcacgucu

SEQ ID NO: 1681377 - RNA, 19 nt, Artificial Sequence
  Description of Artificial Sequence: Synthetic oligonucleotide
  Sense strand starting at position 3229 of SEQ ID NO: 1561563
auccguguugcuguaaagu

SEQ ID NO: 1681378 - RNA, 19 nt, Artificial Sequence
  Description of Artificial Sequence: Synthetic oligonucleotide
  Antisense strand to SEQ ID NO: 1681377
acuuuacagcaacacggau

SEQ ID NO: 1681379 - RNA, 19 nt, Artificial Sequence
  Description of Artificial Sequence: Synthetic oligonucleotide
  Sense strand starting at position 3273 of SEQ ID NO: 1561563
uuucuaaagugucccuaca

SEQ ID NO: 1681380 - RNA, 19 nt, Artificial Sequence
  Description of Artificial Sequence: Synthetic oligonucleotide
  Antisense strand to SEQ ID NO: 1681379
uguagggacacuuuagaaa

SEQ ID NO: 1681381 - RNA, 19 nt, Artificial Sequence
  Description of Artificial Sequence: Synthetic oligonucleotide
  Sense strand starting at position 3275 of SEQ ID NO: 1561563
ucuaaagugucccuacaga

SEQ ID NO: 1681382 - RNA, 19 nt, Artificial Sequence
  Description of Artificial Sequence: Synthetic oligonucleotide
  Antisense strand to SEQ ID NO: 1681381
ucuguagggacacuuuaga

SEQ ID NO: 1681383 - RNA, 19 nt, Artificial Sequence
  Description of Artificial Sequence: Synthetic oligonucleotide
  Sense strand starting at position 3433 of SEQ ID NO: 1561563
aggcuaagaguuugagguu

SEQ ID NO: 1681384 - RNA, 19 nt, Artificial Sequence
  Description of Artificial Sequence: Synthetic oligonucleotide
  Antisense strand to SEQ ID NO: 1681383
aaccucaaacucuuagccu

SEQ ID NO: 1681385 - RNA, 19 nt, Artificial Sequence
  Description of Artificial Sequence: Synthetic oligonucleotide
  Sense strand starting at position 3496 of SEQ ID NO: 1561563
gagagacugucucuaaauu

SEQ ID NO: 1681386 - RNA, 19 nt, Artificial Sequence
  Description of Artificial Sequence: Synthetic oligonucleotide
  Antisense strand to SEQ ID NO: 1681385
aauuuagagacagucucuc

SEQ ID NO: 1681387 - RNA, 19 nt, Artificial Sequence
  Description of Artificial Sequence: Synthetic oligonucleotide
  Sense strand starting at position 3559 of SEQ ID NO: 1561563
gagacaguguaaucuugaa

SEQ ID NO: 1681388 - RNA, 19 nt, Artificial Sequence
  Description of Artificial Sequence: Synthetic oligonucleotide
  Antisense strand to SEQ ID NO: 1681387
uucaagauuacacugucuc

SEQ ID NO: 1681389 - RNA, 19 nt, Artificial Sequence
  Description of Artificial Sequence: Synthetic oligonucleotide
  Sense strand starting at position 3648 of SEQ ID NO: 1561563
gcugucaaaggucauguuu

SEQ ID NO: 1681390 - RNA, 19 nt, Artificial Sequence
  Description of Artificial Sequence: Synthetic oligonucleotide
  Antisense strand to SEQ ID NO: 1681389
aaacaugaccuuugacagc

SEQ ID NO: 1681391 - RNA, 19 nt, Artificial Sequence
  Description of Artificial Sequence: Synthetic oligonucleotide
  Sense strand starting at position 3656 of SEQ ID NO: 1561563
aggucauguuuaguucuaa

SEQ ID NO: 1681392 - RNA, 19 nt, Artificial Sequence
  Description of Artificial Sequence: Synthetic oligonucleotide
  Antisense strand to SEQ ID NO: 1681391
uuagaacuaaacaugaccu

SEQ ID NO: 1681393 - RNA, 19 nt, Artificial Sequence
  Description of Artificial Sequence: Synthetic oligonucleotide
  Sense strand starting at position 3657 of SEQ ID NO: 1561563
ggucauguuuaguucuaaa

SEQ ID NO: 1681394 - RNA, 19 nt, Artificial Sequence
  Description of Artificial Sequence: Synthetic oligonucleotide
  Antisense strand to SEQ ID NO: 1681393
uuuagaacuaaacaugacc

SEQ ID NO: 1681395 - RNA, 19 nt, Artificial Sequence
  Description of Artificial Sequence: Synthetic oligonucleotide
  Sense strand starting at position 3701 of SEQ ID NO: 1561563
ucuuguuucuaauuagaug

SEQ ID NO: 1681396 - RNA, 19 nt, Artificial Sequence
  Description of Artificial Sequence: Synthetic oligonucleotide
  Antisense strand to SEQ ID NO: 1681395
caucuaauuagaaacaaga

SEQ ID NO: 1681397 - RNA, 19 nt, Artificial Sequence
  Description of Artificial Sequence: Synthetic oligonucleotide
  Sense strand starting at position 3754 of SEQ ID NO: 1561563
cucaaacuguaagugagau

SEQ ID NO: 1681398 - RNA, 19 nt, Artificial Sequence
  Description of Artificial Sequence: Synthetic oligonucleotide
  Antisense strand to SEQ ID NO: 1681397
aucucacuuacaguuugag

SEQ ID NO: 1681399 - RNA, 19 nt, Artificial Sequence
  Description of Artificial Sequence: Synthetic oligonucleotide
  Sense strand starting at position 3764 of SEQ ID NO: 1561563
aagugagaucgcuaccugu

SEQ ID NO: 1681400 - RNA, 19 nt, Artificial Sequence
  Description of Artificial Sequence: Synthetic oligonucleotide
  Antisense strand to SEQ ID NO: 1681399
acagguagcgaucucacuu

SEQ ID NO: 1681401 - RNA, 19 nt, Artificial Sequence
  Description of Artificial Sequence: Synthetic oligonucleotide
  Sense strand starting at position 92 of SEQ ID NO: 1561564
ucaccaugaccugaaguuu

SEQ ID NO: 1681402 - RNA, 19 nt, Artificial Sequence
  Description of Artificial Sequence: Synthetic oligonucleotide
  Antisense strand to SEQ ID NO: 1681401
aaacuucaggucaugguga

SEQ ID NO: 1681403 - RNA, 19 nt, Artificial Sequence
  Description of Artificial Sequence: Synthetic oligonucleotide
  Sense strand starting at position 166 of SEQ ID NO: 1561564
uuuggauguuucuaacugu

SEQ ID NO: 1681404 - RNA, 19 nt, Artificial Sequence
  Description of Artificial Sequence: Synthetic oligonucleotide
  Antisense strand to SEQ ID NO: 1681403
acaguuagaaacauccaaa

SEQ ID NO: 1681405 - RNA, 19 nt, Artificial Sequence
  Description of Artificial Sequence: Synthetic oligonucleotide
  Sense strand starting at position 169 of SEQ ID NO: 1561564
ggauguuucuaacuguuga

SEQ ID NO: 1681406 - RNA, 19 nt, Artificial Sequence
  Description of Artificial Sequence: Synthetic oligonucleotide
  Antisense strand to SEQ ID NO: 1681405
ucaacaguuagaaacaucc

SEQ ID NO: 1681407 - RNA, 19 nt, Artificial Sequence
  Description of Artificial Sequence: Synthetic oligonucleotide
  Sense strand starting at position 173 of SEQ ID NO: 1561564
guuucuaacuguugaaaua

SEQ ID NO: 1681408 - RNA, 19 nt, Artificial Sequence
  Description of Artificial Sequence: Synthetic oligonucleotide
  Antisense strand to SEQ ID NO: 1681407
uauuucaacaguuagaaac

SEQ ID NO: 1681409 - RNA, 19 nt, Artificial Sequence
  Description of Artificial Sequence: Synthetic oligonucleotide
  Sense strand starting at position 352 of SEQ ID NO: 1561564
acuagaagugggcauccua

SEQ ID NO: 1681410 - RNA, 19 nt, Artificial Sequence
  Description of Artificial Sequence: Synthetic oligonucleotide
  Antisense strand to SEQ ID NO: 1681409
uaggaugcccacuucuagu

SEQ ID NO: 1681411 - RNA, 19 nt, Artificial Sequence
  Description of Artificial Sequence: Synthetic oligonucleotide
  Sense strand starting at position 359 of SEQ ID NO: 1561564
gugggcauccuaugugauu

SEQ ID NO: 1681412 - RNA, 19 nt, Artificial Sequence
  Description of Artificial Sequence: Synthetic oligonucleotide
  Antisense strand to SEQ ID NO: 1681411
aaucacauaggaugcccac

SEQ ID NO: 1681413 - RNA, 19 nt, Artificial Sequence
  Description of Artificial Sequence: Synthetic oligonucleotide
  Sense strand starting at position 399 of SEQ ID NO: 1561564
uucucugguuguucuuaaa

SEQ ID NO: 1681414 - RNA, 19 nt, Artificial Sequence
  Description of Artificial Sequence: Synthetic oligonucleotide
  Antisense strand to SEQ ID NO: 1681413
uuuaagaacaaccagagaa

SEQ ID NO: 1681415 - RNA, 19 nt, Artificial Sequence
  Description of Artificial Sequence: Synthetic oligonucleotide
  Sense strand starting at position 402 of SEQ ID NO: 1561564
ucugguuguucuuaaauca

SEQ ID NO: 1681416 - RNA, 19 nt, Artificial Sequence
  Description of Artificial Sequence: Synthetic oligonucleotide
  Antisense strand to SEQ ID NO: 1681415
ugauuuaagaacaaccaga

SEQ ID NO: 1681417 - RNA, 19 nt, Artificial Sequence
  Description of Artificial Sequence: Synthetic oligonucleotide
  Sense strand starting at position 444 of SEQ ID NO: 1561564
agcugucuguuauuaauca

SEQ ID NO: 1681418 - RNA, 19 nt, Artificial Sequence
  Description of Artificial Sequence: Synthetic oligonucleotide
  Antisense strand to SEQ ID NO: 1681417
ugauuaauaacagacagcu

SEQ ID NO: 1681419 - RNA, 19 nt, Artificial Sequence
  Description of Artificial Sequence: Synthetic oligonucleotide
  Sense strand starting at position 445 of SEQ ID NO: 1561564
gcugucuguuauuaaucaa

SEQ ID NO: 1681420 - RNA, 19 nt, Artificial Sequence
  Description of Artificial Sequence: Synthetic oligonucleotide
  Antisense strand to SEQ ID NO: 1681419
uugauuaauaacagacagc

SEQ ID NO: 1681421 - RNA, 19 nt, Artificial Sequence
  Description of Artificial Sequence: Synthetic oligonucleotide
  Sense strand starting at position 448 of SEQ ID NO: 1561564
gucuguuauuaaucaaacc

SEQ ID NO: 1681422 - RNA, 19 nt, Artificial Sequence
  Description of Artificial Sequence: Synthetic oligonucleotide
  Antisense strand to SEQ ID NO: 1681421
gguuugauuaauaacagac

SEQ ID NO: 1681423 - RNA, 19 nt, Artificial Sequence
  Description of Artificial Sequence: Synthetic oligonucleotide
  Sense strand starting at position 470 of SEQ ID NO: 1561564
gccauuugggacugcucau

SEQ ID NO: 1681424 - RNA, 19 nt, Artificial Sequence
  Description of Artificial Sequence: Synthetic oligonucleotide
  Antisense strand to SEQ ID NO: 1681423
augagcagucccaaauggc

SEQ ID NO: 1681425 - RNA, 19 nt, Artificial Sequence
  Description of Artificial Sequence: Synthetic oligonucleotide
  Sense strand starting at position 476 of SEQ ID NO: 1561564
ugggacugcucauuacaga

SEQ ID NO: 1681426 - RNA, 19 nt, Artificial Sequence
  Description of Artificial Sequence: Synthetic oligonucleotide
  Antisense strand to SEQ ID NO: 1681425
ucuguaaugagcaguccca

SEQ ID NO: 1681427 - RNA, 19 nt, Artificial Sequence
  Description of Artificial Sequence: Synthetic oligonucleotide
  Sense strand starting at position 479 of SEQ ID NO: 1561564
gacugcucauuacagaagu

SEQ ID NO: 1681428 - RNA, 19 nt, Artificial Sequence
  Description of Artificial Sequence: Synthetic oligonucleotide
  Antisense strand to SEQ ID NO: 1681427
acuucuguaaugagcaguc

SEQ ID NO: 1681429 - RNA, 19 nt, Artificial Sequence
  Description of Artificial Sequence: Synthetic oligonucleotide
  Sense strand starting at position 512 of SEQ ID NO: 1561564
ccuggauugucaguccaga

SEQ ID NO: 1681430 - RNA, 19 nt, Artificial Sequence
  Description of Artificial Sequence: Synthetic oligonucleotide
  Antisense strand to SEQ ID NO: 1681429
ucuggacugacaauccagg

SEQ ID NO: 1681431 - RNA, 19 nt, Artificial Sequence
  Description of Artificial Sequence: Synthetic oligonucleotide
  Sense strand starting at position 584 of SEQ ID NO: 1561564
auggguuguuuauuguaga

SEQ ID NO: 1681432 - RNA, 19 nt, Artificial Sequence
  Description of Artificial Sequence: Synthetic oligonucleotide
  Antisense strand to SEQ ID NO: 1681431
ucuacaauaaacaacccau

SEQ ID NO: 1681433 - RNA, 19 nt, Artificial Sequence
  Description of Artificial Sequence: Synthetic oligonucleotide
  Sense strand starting at position 653 of SEQ ID NO: 1561564
acaugaucuggccauuguu

SEQ ID NO: 1681434 - RNA, 19 nt, Artificial Sequence
  Description of Artificial Sequence: Synthetic oligonucleotide
  Antisense strand to SEQ ID NO: 1681433
aacaauggccagaucaugu

SEQ ID NO: 1681435 - RNA, 19 nt, Artificial Sequence
  Description of Artificial Sequence: Synthetic oligonucleotide
  Sense strand starting at position 660 of SEQ ID NO: 1561564
cuggccauuguucgaauga

SEQ ID NO: 1681436 - RNA, 19 nt, Artificial Sequence
  Description of Artificial Sequence: Synthetic oligonucleotide
  Antisense strand to SEQ ID NO: 1681435
ucauucgaacaauggccag

SEQ ID NO: 1681437 - RNA, 19 nt, Artificial Sequence
  Description of Artificial Sequence: Synthetic oligonucleotide
  Sense strand starting at position 661 of SEQ ID NO: 1561564
uggccauuguucgaaugaa

SEQ ID NO: 1681438 - RNA, 19 nt, Artificial Sequence
  Description of Artificial Sequence: Synthetic oligonucleotide
  Antisense strand to SEQ ID NO: 1681437
uucauucgaacaauggcca

SEQ ID NO: 1681439 - RNA, 19 nt, Artificial Sequence
  Description of Artificial Sequence: Synthetic oligonucleotide
  Sense strand starting at position 924 of SEQ ID NO: 1561564
uuuggucagcuugacuuaa

SEQ ID NO: 1681440 - RNA, 19 nt, Artificial Sequence
  Description of Artificial Sequence: Synthetic oligonucleotide
  Antisense strand to SEQ ID NO: 1681439
uuaagucaagcugaccaaa

SEQ ID NO: 1681441 - RNA, 19 nt, Artificial Sequence
  Description of Artificial Sequence: Synthetic oligonucleotide
  Sense strand starting at position 1016 of SEQ ID NO: 1561564
gggcuauuccauuaggcua

SEQ ID NO: 1681442 - RNA, 19 nt, Artificial Sequence
  Description of Artificial Sequence: Synthetic oligonucleotide
  Antisense strand to SEQ ID NO: 1681441
uagccuaauggaauagccc

SEQ ID NO: 1681443 - RNA, 19 nt, Artificial Sequence
  Description of Artificial Sequence: Synthetic oligonucleotide
  Sense strand starting at position 1070 of SEQ ID NO: 1561564
ucaguucuccacugugcau

SEQ ID NO: 1681444 - RNA, 19 nt, Artificial Sequence
  Description of Artificial Sequence: Synthetic oligonucleotide
  Antisense strand to SEQ ID NO: 1681443
augcacaguggagaacuga

SEQ ID NO: 1681445 - RNA, 19 nt, Artificial Sequence
  Description of Artificial Sequence: Synthetic oligonucleotide
  Sense strand starting at position 1219 of SEQ ID NO: 1561564
cugguuccagcagacauaa

SEQ ID NO: 1681446 - RNA, 19 nt, Artificial Sequence
  Description of Artificial Sequence: Synthetic oligonucleotide
  Antisense strand to SEQ ID NO: 1681445
uuaugucugcuggaaccag

SEQ ID NO: 1681447 - RNA, 19 nt, Artificial Sequence
  Description of Artificial Sequence: Synthetic oligonucleotide
  Sense strand starting at position 1331 of SEQ ID NO: 1561564
ugguuccugugccuacaaa

SEQ ID NO: 1681448 - RNA, 19 nt, Artificial Sequence
  Description of Artificial Sequence: Synthetic oligonucleotide
  Antisense strand to SEQ ID NO: 1681447
uuuguaggcacaggaacca

SEQ ID NO: 1681449 - RNA, 19 nt, Artificial Sequence
  Description of Artificial Sequence: Synthetic oligonucleotide
  Sense strand starting at position 1612 of SEQ ID NO: 1561564
aucggagucuguggucaga

SEQ ID NO: 1681450 - RNA, 19 nt, Artificial Sequence
  Description of Artificial Sequence: Synthetic oligonucleotide
  Antisense strand to SEQ ID NO: 1681449
ucugaccacagacuccgau

SEQ ID NO: 1681451 - RNA, 19 nt, Artificial Sequence
  Description of Artificial Sequence: Synthetic oligonucleotide
  Sense strand starting at position 2409 of SEQ ID NO: 1561564
gggucuuugcguuguaaua

SEQ ID NO: 1681452 - RNA, 19 nt, Artificial Sequence
  Description of Artificial Sequence: Synthetic oligonucleotide
  Antisense strand to SEQ ID NO: 1681451
uauuacaacgcaaagaccc

SEQ ID NO: 1681453 - RNA, 19 nt, Artificial Sequence
  Description of Artificial Sequence: Synthetic oligonucleotide
  Sense strand starting at position 2410 of SEQ ID NO: 1561564
ggucuuugcguuguaauau

SEQ ID NO: 1681454 - RNA, 19 nt, Artificial Sequence
  Description of Artificial Sequence: Synthetic oligonucleotide
  Antisense strand to SEQ ID NO: 1681453
auauuacaacgcaaagacc

SEQ ID NO: 1681455 - RNA, 19 nt, Artificial Sequence
  Description of Artificial Sequence: Synthetic oligonucleotide
  Sense strand starting at position 2411 of SEQ ID NO: 1561564
gucuuugcguuguaauauu

SEQ ID NO: 1681456 - RNA, 19 nt, Artificial Sequence
  Description of Artificial Sequence: Synthetic oligonucleotide
  Antisense strand to SEQ ID NO: 1681455
aauauuacaacgcaaagac

SEQ ID NO: 1681457 - RNA, 19 nt, Artificial Sequence
  Description of Artificial Sequence: Synthetic oligonucleotide
  Sense strand starting at position 2426 of SEQ ID NO: 1561564
uauuaaaugucgcucugau

SEQ ID NO: 1681458 - RNA, 19 nt, Artificial Sequence
  Description of Artificial Sequence: Synthetic oligonucleotide
  Antisense strand to SEQ ID NO: 1681457
aucagagcgacauuuaaua

SEQ ID NO: 1681459 - RNA, 19 nt, Artificial Sequence
  Description of Artificial Sequence: Synthetic oligonucleotide
  Sense strand starting at position 2753 of SEQ ID NO: 1561564
acuggaucucccugugaug

SEQ ID NO: 1681460 - RNA, 19 nt, Artificial Sequence
  Description of Artificial Sequence: Synthetic oligonucleotide
  Antisense strand to SEQ ID NO: 1681459
caucacagggagauccagu

SEQ ID NO: 1681461 - RNA, 19 nt, Artificial Sequence
  Description of Artificial Sequence: Synthetic oligonucleotide
  Sense strand starting at position 2832 of SEQ ID NO: 1561564
uugggaauugcaggaguga

SEQ ID NO: 1681462 - RNA, 19 nt, Artificial Sequence
  Description of Artificial Sequence: Synthetic oligonucleotide
  Antisense strand to SEQ ID NO: 1681461
ucacuccugcaauucccaa

SEQ ID NO: 1681463 - RNA, 19 nt, Artificial Sequence
  Description of Artificial Sequence: Synthetic oligonucleotide
  Sense strand starting at position 3509 of SEQ ID NO: 1561564
aaugcauucccagggcagu

SEQ ID NO: 1681464 - RNA, 19 nt, Artificial Sequence
  Description of Artificial Sequence: Synthetic oligonucleotide
  Antisense strand to SEQ ID NO: 1681463
acugcccugggaaugcauu

SEQ ID NO: 1681465 - RNA, 19 nt, Artificial Sequence
  Description of Artificial Sequence: Synthetic oligonucleotide
  Sense strand starting at position 3552 of SEQ ID NO: 1561564
gugucugccuuaugcacau

SEQ ID NO: 1681466 - RNA, 19 nt, Artificial Sequence
  Description of Artificial Sequence: Synthetic oligonucleotide
  Antisense strand to SEQ ID NO: 1681465
augugcauaaggcagacac

SEQ ID NO: 1681467 - RNA, 19 nt, Artificial Sequence
  Description of Artificial Sequence: Synthetic oligonucleotide
  Sense strand starting at position 3567 of SEQ ID NO: 1561564
acauguagauagggaugaa

SEQ ID NO: 1681468 - RNA, 19 nt, Artificial Sequence
  Description of Artificial Sequence: Synthetic oligonucleotide
  Antisense strand to SEQ ID NO: 1681467
uucaucccuaucuacaugu

SEQ ID NO: 1681469 - RNA, 19 nt, Artificial Sequence
  Description of Artificial Sequence: Synthetic oligonucleotide
  Sense strand starting at position 3647 of SEQ ID NO: 1561564
gaacucuagucagaccagu

SEQ ID NO: 1681470 - RNA, 19 nt, Artificial Sequence
  Description of Artificial Sequence: Synthetic oligonucleotide
  Antisense strand to SEQ ID NO: 1681469
acuggucugacuagaguuc

SEQ ID NO: 1681471 - RNA, 19 nt, Artificial Sequence
  Description of Artificial Sequence: Synthetic oligonucleotide
  Sense strand starting at position 3723 of SEQ ID NO: 1561564
cauggaagcucaugaguga

SEQ ID NO: 1681472 - RNA, 19 nt, Artificial Sequence
  Description of Artificial Sequence: Synthetic oligonucleotide
  Antisense strand to SEQ ID NO: 1681471
ucacucaugagcuuccaug

SEQ ID NO: 1681473 - RNA, 19 nt, Artificial Sequence
  Description of Artificial Sequence: Synthetic oligonucleotide
  Sense strand starting at position 3730 of SEQ ID NO: 1561564
gcucaugagugauucuagu

SEQ ID NO: 1681474 - RNA, 19 nt, Artificial Sequence
  Description of Artificial Sequence: Synthetic oligonucleotide
  Antisense strand to SEQ ID NO: 1681473
acuagaaucacucaugagc

SEQ ID NO: 1681475 - RNA, 19 nt, Artificial Sequence
  Description of Artificial Sequence: Synthetic oligonucleotide
  Sense strand starting at position 14 of SEQ ID NO: 1561565
uugauuaguggagguuaaa

SEQ ID NO: 1681476 - RNA, 19 nt, Artificial Sequence
  Description of Artificial Sequence: Synthetic oligonucleotide
  Antisense strand to SEQ ID NO: 1681475
uuuaaccuccacuaaucaa

SEQ ID NO: 1681477 - RNA, 19 nt, Artificial Sequence
  Description of Artificial Sequence: Synthetic oligonucleotide
  Sense strand starting at position 121 of SEQ ID NO: 1561565
uuaaguugagccuagauaa

SEQ ID NO: 1681478 - RNA, 19 nt, Artificial Sequence
  Description of Artificial Sequence: Synthetic oligonucleotide
  Antisense strand to SEQ ID NO: 1681477
uuaucuaggcucaacuuaa

SEQ ID NO: 1681479 - RNA, 19 nt, Artificial Sequence
  Description of Artificial Sequence: Synthetic oligonucleotide
  Sense strand starting at position 418 of SEQ ID NO: 1561565
uguugaccaggcuaguaau

SEQ ID NO: 1681480 - RNA, 19 nt, Artificial Sequence
  Description of Artificial Sequence: Synthetic oligonucleotide
  Antisense strand to SEQ ID NO: 1681479
auuacuagccuggucaaca

SEQ ID NO: 1681481 - RNA, 19 nt, Artificial Sequence
  Description of Artificial Sequence: Synthetic oligonucleotide
  Sense strand starting at position 524 of SEQ ID NO: 1561565
uuuagauacuuacucagua

SEQ ID NO: 1681482 - RNA, 19 nt, Artificial Sequence
  Description of Artificial Sequence: Synthetic oligonucleotide
  Antisense strand to SEQ ID NO: 1681481
uacugaguaaguaucuaaa

SEQ ID NO: 1681483 - RNA, 19 nt, Artificial Sequence
  Description of Artificial Sequence: Synthetic oligonucleotide
  Sense strand starting at position 740 of SEQ ID NO: 1561565
aguaacauguuacuuuaga

SEQ ID NO: 1681484 - RNA, 19 nt, Artificial Sequence
  Description of Artificial Sequence: Synthetic oligonucleotide
  Antisense strand to SEQ ID NO: 1681483
ucuaaaguaacauguuacu

SEQ ID NO: 1681485 - RNA, 19 nt, Artificial Sequence
  Description of Artificial Sequence: Synthetic oligonucleotide
  Sense strand starting at position 741 of SEQ ID NO: 1561565
guaacauguuacuuuagau

SEQ ID NO: 1681486 - RNA, 19 nt, Artificial Sequence
  Description of Artificial Sequence: Synthetic oligonucleotide
  Antisense strand to SEQ ID NO: 1681485
aucuaaaguaacauguuac

SEQ ID NO: 1681487 - RNA, 19 nt, Artificial Sequence
  Description of Artificial Sequence: Synthetic oligonucleotide
  Sense strand starting at position 858 of SEQ ID NO: 1561565
agaggaacuggcugcuauu

SEQ ID NO: 1681488 - RNA, 19 nt, Artificial Sequence
  Description of Artificial Sequence: Synthetic oligonucleotide
  Antisense strand to SEQ ID NO: 1681487
aauagcagccaguuccucu

SEQ ID NO: 1681489 - RNA, 19 nt, Artificial Sequence
  Description of Artificial Sequence: Synthetic oligonucleotide
  Sense strand starting at position 881 of SEQ ID NO: 1561565
uagggagugucaccugagu

SEQ ID NO: 1681490 - RNA, 19 nt, Artificial Sequence
  Description of Artificial Sequence: Synthetic oligonucleotide
  Antisense strand to SEQ ID NO: 1681489
acucaggugacacucccua

SEQ ID NO: 1681491 - RNA, 19 nt, Artificial Sequence
  Description of Artificial Sequence: Synthetic oligonucleotide
  Sense strand starting at position 883 of SEQ ID NO: 1561565
gggagugucaccugaguga

SEQ ID NO: 1681492 - RNA, 19 nt, Artificial Sequence
  Description of Artificial Sequence: Synthetic oligonucleotide
  Antisense strand to SEQ ID NO: 1681491
ucacucaggugacacuccc

SEQ ID NO: 1681493 - RNA, 19 nt, Artificial Sequence
  Description of Artificial Sequence: Synthetic oligonucleotide
  Sense strand starting at position 886 of SEQ ID NO: 1561565
agugucaccugagugaaau

SEQ ID NO: 1681494 - RNA, 19 nt, Artificial Sequence
  Description of Artificial Sequence: Synthetic oligonucleotide
  Antisense strand to SEQ ID NO: 1681493
auuucacucaggugacacu

SEQ ID NO: 1681495 - RNA, 19 nt, Artificial Sequence
  Description of Artificial Sequence: Synthetic oligonucleotide
  Sense strand starting at position 887 of SEQ ID NO: 1561565
gugucaccugagugaaaug

SEQ ID NO: 1681496 - RNA, 19 nt, Artificial Sequence
  Description of Artificial Sequence: Synthetic oligonucleotide
  Antisense strand to SEQ ID NO: 1681495
cauuucacucaggugacac

SEQ ID NO: 1681497 - RNA, 19 nt, Artificial Sequence
  Description of Artificial Sequence: Synthetic oligonucleotide
  Sense strand starting at position 1107 of SEQ ID NO: 1561565
gacuacaggucaguaacua

SEQ ID NO: 1681498 - RNA, 19 nt, Artificial Sequence
  Description of Artificial Sequence: Synthetic oligonucleotide
  Antisense strand to SEQ ID NO: 1681497
uaguuacugaccuguaguc

SEQ ID NO: 1681499 - RNA, 19 nt, Artificial Sequence
  Description of Artificial Sequence: Synthetic oligonucleotide
  Sense strand starting at position 1188 of SEQ ID NO: 1561565
acugauugccaaugauauc

SEQ ID NO: 1681500 - RNA, 19 nt, Artificial Sequence
  Description of Artificial Sequence: Synthetic oligonucleotide
  Antisense strand to SEQ ID NO: 1681499
gauaucauuggcaaucagu

SEQ ID NO: 1681501 - RNA, 19 nt, Artificial Sequence
  Description of Artificial Sequence: Synthetic oligonucleotide
  Sense strand starting at position 1199 of SEQ ID NO: 1561565
augauaucccaacgacuga

SEQ ID NO: 1681502 - RNA, 19 nt, Artificial Sequence
  Description of Artificial Sequence: Synthetic oligonucleotide
  Antisense strand to SEQ ID NO: 1681501
ucagucguugggauaucau

SEQ ID NO: 1681503 - RNA, 19 nt, Artificial Sequence
  Description of Artificial Sequence: Synthetic oligonucleotide
  Sense strand starting at position 1366 of SEQ ID NO: 1561565
cgauccuccaccgaugaua

SEQ ID NO: 1681504 - RNA, 19 nt, Artificial Sequence
  Description of Artificial Sequence: Synthetic oligonucleotide
  Antisense strand to SEQ ID NO: 1681503
uaucaucgguggaggaucg

SEQ ID NO: 1681505 - RNA, 19 nt, Artificial Sequence
  Description of Artificial Sequence: Synthetic oligonucleotide
  Sense strand starting at position 1569 of SEQ ID NO: 1561565
ucucuaaaccagugucuga

SEQ ID NO: 1681506 - RNA, 19 nt, Artificial Sequence
  Description of Artificial Sequence: Synthetic oligonucleotide
  Antisense strand to SEQ ID NO: 1681505
ucagacacugguuuagaga

SEQ ID NO: 1681507 - RNA, 19 nt, Artificial Sequence
  Description of Artificial Sequence: Synthetic oligonucleotide
  Sense strand starting at position 2052 of SEQ ID NO: 1561565
gcaaccuuccagugaacag

SEQ ID NO: 1681508 - RNA, 19 nt, Artificial Sequence
  Description of Artificial Sequence: Synthetic oligonucleotide
  Antisense strand to SEQ ID NO: 1681507
cuguucacuggaagguugc

SEQ ID NO: 1681509 - RNA, 19 nt, Artificial Sequence
  Description of Artificial Sequence: Synthetic oligonucleotide
  Sense strand starting at position 2089 of SEQ ID NO: 1561565
gcuguaauuggagguauga

SEQ ID NO: 1681510 - RNA, 19 nt, Artificial Sequence
  Description of Artificial Sequence: Synthetic oligonucleotide
  Antisense strand to SEQ ID NO: 1681509
ucauaccuccaauuacagc

SEQ ID NO: 1681511 - RNA, 19 nt, Artificial Sequence
  Description of Artificial Sequence: Synthetic oligonucleotide
  Sense strand starting at position 2176 of SEQ ID NO: 1561565
agcccuuugcuagaccaaa

SEQ ID NO: 1681512 - RNA, 19 nt, Artificial Sequence
  Description of Artificial Sequence: Synthetic oligonucleotide
  Antisense strand to SEQ ID NO: 1681511
uuuggucuagcaaagggcu

SEQ ID NO: 1681513 - RNA, 19 nt, Artificial Sequence
  Description of Artificial Sequence: Synthetic oligonucleotide
  Sense strand starting at position 2221 of SEQ ID NO: 1561565
aaggaagugucccuggauc

SEQ ID NO: 1681514 - RNA, 19 nt, Artificial Sequence
  Description of Artificial Sequence: Synthetic oligonucleotide
  Antisense strand to SEQ ID NO: 1681513
gauccagggacacuuccuu

SEQ ID NO: 1681515 - RNA, 19 nt, Artificial Sequence
  Description of Artificial Sequence: Synthetic oligonucleotide
  Sense strand starting at position 2434 of SEQ ID NO: 1561565
augugaaacucuuucugag

SEQ ID NO: 1681516 - RNA, 19 nt, Artificial Sequence
  Description of Artificial Sequence: Synthetic oligonucleotide
  Antisense strand to SEQ ID NO: 1681515
cucagaaagaguuucacau

SEQ ID NO: 1681517 - RNA, 19 nt, Artificial Sequence
  Description of Artificial Sequence: Synthetic oligonucleotide
  Sense strand starting at position 2573 of SEQ ID NO: 1561565
gcgggaagagaucagaguu

SEQ ID NO: 1681518 - RNA, 19 nt, Artificial Sequence
  Description of Artificial Sequence: Synthetic oligonucleotide
  Antisense strand to SEQ ID NO: 1681517
aacucugaucucuucccgc

SEQ ID NO: 1681519 - RNA, 19 nt, Artificial Sequence
  Description of Artificial Sequence: Synthetic oligonucleotide
  Sense strand starting at position 2680 of SEQ ID NO: 1561565
gcaagcaguuuauuuggua

SEQ ID NO: 1681520 - RNA, 19 nt, Artificial Sequence
  Description of Artificial Sequence: Synthetic oligonucleotide
  Antisense strand to SEQ ID NO: 1681519
uaccaaauaaacugcuugc

SEQ ID NO: 1681521 - RNA, 19 nt, Artificial Sequence
  Description of Artificial Sequence: Synthetic oligonucleotide
  Sense strand starting at position 2724 of SEQ ID NO: 1561565
gagcgaugggaacgaauau

SEQ ID NO: 1681522 - RNA, 19 nt, Artificial Sequence
  Description of Artificial Sequence: Synthetic oligonucleotide
  Antisense strand to SEQ ID NO: 1681521
auauucguucccaucgcuc

SEQ ID NO: 1681523 - RNA, 19 nt, Artificial Sequence
  Description of Artificial Sequence: Synthetic oligonucleotide
  Sense strand starting at position 2747 of SEQ ID NO: 1561565
ugcauaggugagcagauua

SEQ ID NO: 1681524 - RNA, 19 nt, Artificial Sequence
  Description of Artificial Sequence: Synthetic oligonucleotide
  Antisense strand to SEQ ID NO: 1681523
uaaucugcucaccuaugca

SEQ ID NO: 1681525 - RNA, 19 nt, Artificial Sequence
  Description of Artificial Sequence: Synthetic oligonucleotide
  Sense strand starting at position 2849 of SEQ ID NO: 1561565
gccgaugaagcuuacauau

SEQ ID NO: 1681526 - RNA, 19 nt, Artificial Sequence
  Description of Artificial Sequence: Synthetic oligonucleotide
  Antisense strand to SEQ ID NO: 1681525
auauguaagcuucaucggc

SEQ ID NO: 1681527 - RNA, 19 nt, Artificial Sequence
  Description of Artificial Sequence: Synthetic oligonucleotide
  Sense strand starting at position 2972 of SEQ ID NO: 1561565
ggugucugcaguuaagaag

SEQ ID NO: 1681528 - RNA, 19 nt, Artificial Sequence
  Description of Artificial Sequence: Synthetic oligonucleotide
  Antisense strand to SEQ ID NO: 1681527
cuucuuaacugcagacacc

SEQ ID NO: 1681529 - RNA, 19 nt, Artificial Sequence
  Description of Artificial Sequence: Synthetic oligonucleotide
  Sense strand starting at position 3084 of SEQ ID NO: 1561565
gcauaucacagguauugga

SEQ ID NO: 1681530 - RNA, 19 nt, Artificial Sequence
  Description of Artificial Sequence: Synthetic oligonucleotide
  Antisense strand to SEQ ID NO: 1681529
uccaauaccugugauaugc

SEQ ID NO: 1681531 - RNA, 19 nt, Artificial Sequence
  Description of Artificial Sequence: Synthetic oligonucleotide
  Sense strand starting at position 3285 of SEQ ID NO: 1561565
agacuaauagaaugcagua

SEQ ID NO: 1681532 - RNA, 19 nt, Artificial Sequence
  Description of Artificial Sequence: Synthetic oligonucleotide
  Antisense strand to SEQ ID NO: 1681531
uacugcauucuauuagucu

SEQ ID NO: 1681533 - RNA, 19 nt, Artificial Sequence
  Description of Artificial Sequence: Synthetic oligonucleotide
  Sense strand starting at position 3297 of SEQ ID NO: 1561565
ugcaguagcagugauagau

SEQ ID NO: 1681534 - RNA, 19 nt, Artificial Sequence
  Description of Artificial Sequence: Synthetic oligonucleotide
  Antisense strand to SEQ ID NO: 1681533
aucuaucacugcuacugca

SEQ ID NO: 1681535 - RNA, 19 nt, Artificial Sequence
  Description of Artificial Sequence: Synthetic oligonucleotide
  Sense strand starting at position 3301 of SEQ ID NO: 1561565
guagcagugauagauguca

SEQ ID NO: 1681536 - RNA, 19 nt, Artificial Sequence
  Description of Artificial Sequence: Synthetic oligonucleotide
  Antisense strand to SEQ ID NO: 1681535
ugacaucuaucacugcuac

SEQ ID NO: 1681537 - RNA, 19 nt, Artificial Sequence
  Description of Artificial Sequence: Synthetic oligonucleotide
  Sense strand starting at position 3309 of SEQ ID NO: 1561565
gauagaugucacugcugag

SEQ ID NO: 1681538 - RNA, 19 nt, Artificial Sequence
  Description of Artificial Sequence: Synthetic oligonucleotide
  Antisense strand to SEQ ID NO: 1681537
cucagcagugacaucuauc

SEQ ID NO: 1681539 - RNA, 19 nt, Artificial Sequence
  Description of Artificial Sequence: Synthetic oligonucleotide
  Sense strand starting at position 3313 of SEQ ID NO: 1561565
gaugucacugcugagauua

SEQ ID NO: 1681540 - RNA, 19 nt, Artificial Sequence
  Description of Artificial Sequence: Synthetic oligonucleotide
  Antisense strand to SEQ ID NO: 1681539
uaaucucagcagugacauc

SEQ ID NO: 1681541 - RNA, 19 nt, Artificial Sequence
  Description of Artificial Sequence: Synthetic oligonucleotide
  Sense strand starting at position 3385 of SEQ ID NO: 1561565
gagagaaguuaguugccau

SEQ ID NO: 1681542 - RNA, 19 nt, Artificial Sequence
  Description of Artificial Sequence: Synthetic oligonucleotide
  Antisense strand to SEQ ID NO: 1681541
auggcaacuaacuucucuc

SEQ ID NO: 1681543 - RNA, 19 nt, Artificial Sequence
  Description of Artificial Sequence: Synthetic oligonucleotide
  Sense strand starting at position 3386 of SEQ ID NO: 1561565
agagaaguuaguugccaug

SEQ ID NO: 1681544 - RNA, 19 nt, Artificial Sequence
  Description of Artificial Sequence: Synthetic oligonucleotide
  Antisense strand to SEQ ID NO: 1681543
cauggcaacuaacuucucu

SEQ ID NO: 1681545 - RNA, 19 nt, Artificial Sequence
  Description of Artificial Sequence: Synthetic oligonucleotide
  Sense strand starting at position 3464 of SEQ ID NO: 1561565
acccaauagccugggagua

SEQ ID NO: 1681546 - RNA, 19 nt, Artificial Sequence
  Description of Artificial Sequence: Synthetic oligonucleotide
  Antisense strand to SEQ ID NO: 1681545
uacucccaggcuauugggu

SEQ ID NO: 1681547 - RNA, 19 nt, Artificial Sequence
  Description of Artificial Sequence: Synthetic oligonucleotide
  Sense strand starting at position 3569 of SEQ ID NO: 1561565
ccaauaguuugacugcaac

SEQ ID NO: 1681548 - RNA, 19 nt, Artificial Sequence
  Description of Artificial Sequence: Synthetic oligonucleotide
  Antisense strand to SEQ ID NO: 1681547
guugcagucaaacuauugg

SEQ ID NO: 1681549 - RNA, 19 nt, Artificial Sequence
  Description of Artificial Sequence: Synthetic oligonucleotide
  Sense strand starting at position 3644 of SEQ ID NO: 1561565
cucagaaaguguguaagau

SEQ ID NO: 1681550 - RNA, 19 nt, Artificial Sequence
  Description of Artificial Sequence: Synthetic oligonucleotide
  Antisense strand to SEQ ID NO: 1681549
aucuuacacacuuucugag

SEQ ID NO: 1681551 - RNA, 19 nt, Artificial Sequence
  Description of Artificial Sequence: Synthetic oligonucleotide
  Sense strand starting at position 3695 of SEQ ID NO: 1561565
uaggguaauuugcuaugca

SEQ ID NO: 1681552 - RNA, 19 nt, Artificial Sequence
  Description of Artificial Sequence: Synthetic oligonucleotide
  Antisense strand to SEQ ID NO: 1681551
ugcauagcaaauuacccua

SEQ ID NO: 1681553 - RNA, 19 nt, Artificial Sequence
  Description of Artificial Sequence: Synthetic oligonucleotide
  Sense strand starting at position 3698 of SEQ ID NO: 1561565
gguaauuugcuaugcauca

SEQ ID NO: 1681554 - RNA, 19 nt, Artificial Sequence
  Description of Artificial Sequence: Synthetic oligonucleotide
  Antisense strand to SEQ ID NO: 1681553
ugaugcauagcaaauuacc

SEQ ID NO: 1681555 - RNA, 19 nt, Artificial Sequence
  Description of Artificial Sequence: Synthetic oligonucleotide
  Sense strand starting at position 767 of SEQ ID NO: 1561566
ucauaccguugcugugaau

SEQ ID NO: 1681556 - RNA, 19 nt, Artificial Sequence
  Description of Artificial Sequence: Synthetic oligonucleotide
  Antisense strand to SEQ ID NO: 1681555
auucacagcaacgguauga

SEQ ID NO: 1681557 - RNA, 19 nt, Artificial Sequence
  Description of Artificial Sequence: Synthetic oligonucleotide
  Sense strand starting at position 770 of SEQ ID NO: 1561566
uaccguugcugugaauuaa

SEQ ID NO: 1681558 - RNA, 19 nt, Artificial Sequence
  Description of Artificial Sequence: Synthetic oligonucleotide
  Antisense strand to SEQ ID NO: 1681557
uuaauucacagcaacggua

SEQ ID NO: 1681559 - RNA, 19 nt, Artificial Sequence
  Description of Artificial Sequence: Synthetic oligonucleotide
  Sense strand starting at position 895 of SEQ ID NO: 1561566
accacaucuuuggaagacu

SEQ ID NO: 1681560 - RNA, 19 nt, Artificial Sequence
  Description of Artificial Sequence: Synthetic oligonucleotide
  Antisense strand to SEQ ID NO: 1681559
agucuuccaaagauguggu

SEQ ID NO: 1681561 - RNA, 19 nt, Artificial Sequence
  Description of Artificial Sequence: Synthetic oligonucleotide
  Sense strand starting at position 1209 of SEQ ID NO: 1561566
cugagaacugcucaagagu

SEQ ID NO: 1681562 - RNA, 19 nt, Artificial Sequence
  Description of Artificial Sequence: Synthetic oligonucleotide
  Antisense strand to SEQ ID NO: 1681561
acucuugagcaguucucag

SEQ ID NO: 1681563 - RNA, 19 nt, Artificial Sequence
  Description of Artificial Sequence: Synthetic oligonucleotide
  Sense strand starting at position 1498 of SEQ ID NO: 1561566
cgcgaaccuguguugcuua

SEQ ID NO: 1681564 - RNA, 19 nt, Artificial Sequence
  Description of Artificial Sequence: Synthetic oligonucleotide
  Antisense strand to SEQ ID NO: 1681563
uaagcaacacagguucgcg

SEQ ID NO: 1681565 - RNA, 19 nt, Artificial Sequence
  Description of Artificial Sequence: Synthetic oligonucleotide
  Sense strand starting at position 1682 of SEQ ID NO: 1561566
guccguagaucccggagua

SEQ ID NO: 1681566 - RNA, 19 nt, Artificial Sequence
  Description of Artificial Sequence: Synthetic oligonucleotide
  Antisense strand to SEQ ID NO: 1681565
uacuccgggaucuacggac

SEQ ID NO: 1681567 - RNA, 19 nt, Artificial Sequence
  Description of Artificial Sequence: Synthetic oligonucleotide
  Sense strand starting at position 1888 of SEQ ID NO: 1561566
gucgucucuuagcuacaga

SEQ ID NO: 1681568 - RNA, 19 nt, Artificial Sequence
  Description of Artificial Sequence: Synthetic oligonucleotide
  Antisense strand to SEQ ID NO: 1681567
ucuguagcuaagagacgac

SEQ ID NO: 1681569 - RNA, 19 nt, Artificial Sequence
  Description of Artificial Sequence: Synthetic oligonucleotide
  Sense strand starting at position 1976 of SEQ ID NO: 1561566
cugggaagcgcgccugauu

SEQ ID NO: 1681570 - RNA, 19 nt, Artificial Sequence
  Description of Artificial Sequence: Synthetic oligonucleotide
  Antisense strand to SEQ ID NO: 1681569
aaucaggcgcgcuucccag

SEQ ID NO: 1681571 - RNA, 19 nt, Artificial Sequence
  Description of Artificial Sequence: Synthetic oligonucleotide
  Sense strand starting at position 2057 of SEQ ID NO: 1561566
uggacugauugacagaaga

SEQ ID NO: 1681572 - RNA, 19 nt, Artificial Sequence
  Description of Artificial Sequence: Synthetic oligonucleotide
  Antisense strand to SEQ ID NO: 1681571
ucuucugucaaucagucca

SEQ ID NO: 1681573 - RNA, 19 nt, Artificial Sequence
  Description of Artificial Sequence: Synthetic oligonucleotide
  Sense strand starting at position 2161 of SEQ ID NO: 1561566
ucugaauccucccgaggga

SEQ ID NO: 1681574 - RNA, 19 nt, Artificial Sequence
  Description of Artificial Sequence: Synthetic oligonucleotide
  Antisense strand to SEQ ID NO: 1681573
ucccucgggaggauucaga

SEQ ID NO: 1681575 - RNA, 19 nt, Artificial Sequence
  Description of Artificial Sequence: Synthetic oligonucleotide
  Sense strand starting at position 2164 of SEQ ID NO: 1561566
gaauccucccgagggauau

SEQ ID NO: 1681576 - RNA, 19 nt, Artificial Sequence
  Description of Artificial Sequence: Synthetic oligonucleotide
  Antisense strand to SEQ ID NO: 1681575
auaucccucgggaggauuc

SEQ ID NO: 1681577 - RNA, 19 nt, Artificial Sequence
  Description of Artificial Sequence: Synthetic oligonucleotide
  Sense strand starting at position 2165 of SEQ ID NO: 1561566
aauccucccgagggauauu

SEQ ID NO: 1681578 - RNA, 19 nt, Artificial Sequence
  Description of Artificial Sequence: Synthetic oligonucleotide
  Antisense strand to SEQ ID NO: 1681577
aauaucccucgggaggauu

SEQ ID NO: 1681579 - RNA, 19 nt, Artificial Sequence
  Description of Artificial Sequence: Synthetic oligonucleotide
  Sense strand starting at position 2174 of SEQ ID NO: 1561566
gagggauauuugcacuuaa

SEQ ID NO: 1681580 - RNA, 19 nt, Artificial Sequence
  Description of Artificial Sequence: Synthetic oligonucleotide
  Antisense strand to SEQ ID NO: 1681579
uuaagugcaaauaucccuc

SEQ ID NO: 1681581 - RNA, 19 nt, Artificial Sequence
  Description of Artificial Sequence: Synthetic oligonucleotide
  Sense strand starting at position 2239 of SEQ ID NO: 1561566
cuguacacugacugacaaa

SEQ ID NO: 1681582 - RNA, 19 nt, Artificial Sequence
  Description of Artificial Sequence: Synthetic oligonucleotide
  Antisense strand to SEQ ID NO: 1681581
uuugucagucaguguacag

SEQ ID NO: 1681583 - RNA, 19 nt, Artificial Sequence
  Description of Artificial Sequence: Synthetic oligonucleotide
  Sense strand starting at position 3182 of SEQ ID NO: 1561566
cuucgaguacugugcugaa

SEQ ID NO: 1681584 - RNA, 19 nt, Artificial Sequence
  Description of Artificial Sequence: Synthetic oligonucleotide
  Antisense strand to SEQ ID NO: 1681583
uucagcacaguacucgaag

SEQ ID NO: 1681585 - RNA, 19 nt, Artificial Sequence
  Description of Artificial Sequence: Synthetic oligonucleotide
  Sense strand starting at position 3185 of SEQ ID NO: 1561566
cgaguacugugcugaacaa

SEQ ID NO: 1681586 - RNA, 19 nt, Artificial Sequence
  Description of Artificial Sequence: Synthetic oligonucleotide
  Antisense strand to SEQ ID NO: 1681585
uuguucagcacaguacucg

SEQ ID NO: 1681587 - RNA, 19 nt, Artificial Sequence
  Description of Artificial Sequence: Synthetic oligonucleotide
  Sense strand starting at position 3195 of SEQ ID NO: 1561566
gcugaacaacagugguaaa

SEQ ID NO: 1681588 - RNA, 19 nt, Artificial Sequence
  Description of Artificial Sequence: Synthetic oligonucleotide
  Antisense strand to SEQ ID NO: 1681587
uuuaccacuguuguucagc

SEQ ID NO: 1681589 - RNA, 19 nt, Artificial Sequence
  Description of Artificial Sequence: Synthetic oligonucleotide
  Sense strand starting at position 3320 of SEQ ID NO: 1561566
uaagguagcugcuucuaua

SEQ ID NO: 1681590 - RNA, 19 nt, Artificial Sequence
  Description of Artificial Sequence: Synthetic oligonucleotide
  Antisense strand to SEQ ID NO: 1681589
uauagaagcagcuaccuua

SEQ ID NO: 1681591 - RNA, 19 nt, Artificial Sequence
  Description of Artificial Sequence: Synthetic oligonucleotide
  Sense strand starting at position 3793 of SEQ ID NO: 1561566
uuucuuugcuagcagacuu

SEQ ID NO: 1681592 - RNA, 19 nt, Artificial Sequence
  Description of Artificial Sequence: Synthetic oligonucleotide
  Antisense strand to SEQ ID NO: 1681591
aagucugcuagcaaagaaa

SEQ ID NO: 1681593 - RNA, 19 nt, Artificial Sequence
  Description of Artificial Sequence: Synthetic oligonucleotide
  Sense strand starting at position 10 of SEQ ID NO: 1561567
gucuuuauaagagguagac

SEQ ID NO: 1681594 - RNA, 19 nt, Artificial Sequence
  Description of Artificial Sequence: Synthetic oligonucleotide
  Antisense strand to SEQ ID NO: 1681593
gucuaccucuuauaaagac

SEQ ID NO: 1681595 - RNA, 19 nt, Artificial Sequence
  Description of Artificial Sequence: Synthetic oligonucleotide
  Sense strand starting at position 378 of SEQ ID NO: 1561567
gauggacagucuccaagau

SEQ ID NO: 1681596 - RNA, 19 nt, Artificial Sequence
  Description of Artificial Sequence: Synthetic oligonucleotide
  Antisense strand to SEQ ID NO: 1681595
aucuuggagacuguccauc

SEQ ID NO: 1681597 - RNA, 19 nt, Artificial Sequence
  Description of Artificial Sequence: Synthetic oligonucleotide
  Sense strand starting at position 458 of SEQ ID NO: 1561567
aagguugacuuuguaacca

SEQ ID NO: 1681598 - RNA, 19 nt, Artificial Sequence
  Description of Artificial Sequence: Synthetic oligonucleotide
  Antisense strand to SEQ ID NO: 1681597
ugguuacaaagucaaccuu

SEQ ID NO: 1681599 - RNA, 19 nt, Artificial Sequence
  Description of Artificial Sequence: Synthetic oligonucleotide
  Sense strand starting at position 462 of SEQ ID NO: 1561567
uugacuuuguaaccaguaa

SEQ ID NO: 1681600 - RNA, 19 nt, Artificial Sequence
  Description of Artificial Sequence: Synthetic oligonucleotide
  Antisense strand to SEQ ID NO: 1681599
uuacugguuacaaagucaa

SEQ ID NO: 1681601 - RNA, 19 nt, Artificial Sequence
  Description of Artificial Sequence: Synthetic oligonucleotide
  Sense strand starting at position 466 of SEQ ID NO: 1561567
cuuuguaaccaguaagaca

SEQ ID NO: 1681602 - RNA, 19 nt, Artificial Sequence
  Description of Artificial Sequence: Synthetic oligonucleotide
  Antisense strand to SEQ ID NO: 1681601
ugucuuacugguuacaaag

SEQ ID NO: 1681603 - RNA, 19 nt, Artificial Sequence
  Description of Artificial Sequence: Synthetic oligonucleotide
  Sense strand starting at position 491 of SEQ ID NO: 1561567
aagugacaagagugugaau

SEQ ID NO: 1681604 - RNA, 19 nt, Artificial Sequence
  Description of Artificial Sequence: Synthetic oligonucleotide
  Antisense strand to SEQ ID NO: 1681603
auucacacucuugucacuu

SEQ ID NO: 1681605 - RNA, 19 nt, Artificial Sequence
  Description of Artificial Sequence: Synthetic oligonucleotide
  Sense strand starting at position 493 of SEQ ID NO: 1561567
gugacaagagugugaauuc

SEQ ID NO: 1681606 - RNA, 19 nt, Artificial Sequence
  Description of Artificial Sequence: Synthetic oligonucleotide
  Antisense strand to SEQ ID NO: 1681605
gaauucacacucuugucac

SEQ ID NO: 1681607 - RNA, 19 nt, Artificial Sequence
  Description of Artificial Sequence: Synthetic oligonucleotide
  Sense strand starting at position 520 of SEQ ID NO: 1561567
ggucauggaagguguuaca

SEQ ID NO: 1681608 - RNA, 19 nt, Artificial Sequence
  Description of Artificial Sequence: Synthetic oligonucleotide
  Antisense strand to SEQ ID NO: 1681607
uguaacaccuuccaugacc

SEQ ID NO: 1681609 - RNA, 19 nt, Artificial Sequence
  Description of Artificial Sequence: Synthetic oligonucleotide
  Sense strand starting at position 563 of SEQ ID NO: 1561567
ucacuuguucugugggaag

SEQ ID NO: 1681610 - RNA, 19 nt, Artificial Sequence
  Description of Artificial Sequence: Synthetic oligonucleotide
  Antisense strand to SEQ ID NO: 1681609
cuucccacagaacaaguga

SEQ ID NO: 1681611 - RNA, 19 nt, Artificial Sequence
  Description of Artificial Sequence: Synthetic oligonucleotide
  Sense strand starting at position 655 of SEQ ID NO: 1561567
ucaacagacaugugaguga

SEQ ID NO: 1681612 - RNA, 19 nt, Artificial Sequence
  Description of Artificial Sequence: Synthetic oligonucleotide
  Antisense strand to SEQ ID NO: 1681611
ucacucacaugucuguuga

SEQ ID NO: 1681613 - RNA, 19 nt, Artificial Sequence
  Description of Artificial Sequence: Synthetic oligonucleotide
  Sense strand starting at position 791 of SEQ ID NO: 1561567
ccugucagaacucgugaga

SEQ ID NO: 1681614 - RNA, 19 nt, Artificial Sequence
  Description of Artificial Sequence: Synthetic oligonucleotide
  Antisense strand to SEQ ID NO: 1681613
ucucacgaguucugacagg

SEQ ID NO: 1681615 - RNA, 19 nt, Artificial Sequence
  Description of Artificial Sequence: Synthetic oligonucleotide
  Sense strand starting at position 794 of SEQ ID NO: 1561567
gucagaacucgugagauau

SEQ ID NO: 1681616 - RNA, 19 nt, Artificial Sequence
  Description of Artificial Sequence: Synthetic oligonucleotide
  Antisense strand to SEQ ID NO: 1681615
auaucucacgaguucugac

SEQ ID NO: 1681617 - RNA, 19 nt, Artificial Sequence
  Description of Artificial Sequence: Synthetic oligonucleotide
  Sense strand starting at position 796 of SEQ ID NO: 1561567
cagaacucgugagauauuu

SEQ ID NO: 1681618 - RNA, 19 nt, Artificial Sequence
  Description of Artificial Sequence: Synthetic oligonucleotide
  Antisense strand to SEQ ID NO: 1681617
aaauaucucacgaguucug

SEQ ID NO: 1681619 - RNA, 19 nt, Artificial Sequence
  Description of Artificial Sequence: Synthetic oligonucleotide
  Sense strand starting at position 1002 of SEQ ID NO: 1561567
ucucacuuuguguaccaaa

SEQ ID NO: 1681620 - RNA, 19 nt, Artificial Sequence
  Description of Artificial Sequence: Synthetic oligonucleotide
  Antisense strand to SEQ ID NO: 1681619
uuugguacacaaagugaga

SEQ ID NO: 1681621 - RNA, 19 nt, Artificial Sequence
  Description of Artificial Sequence: Synthetic oligonucleotide
  Sense strand starting at position 1102 of SEQ ID NO: 1561567
gaaggauaauuauuguugu

SEQ ID NO: 1681622 - RNA, 19 nt, Artificial Sequence
  Description of Artificial Sequence: Synthetic oligonucleotide
  Antisense strand to SEQ ID NO: 1681621
acaacaauaauuauccuuc

SEQ ID NO: 1681623 - RNA, 19 nt, Artificial Sequence
  Description of Artificial Sequence: Synthetic oligonucleotide
  Sense strand starting at position 1105 of SEQ ID NO: 1561567
ggauaauuauuguuguuuc

SEQ ID NO: 1681624 - RNA, 19 nt, Artificial Sequence
  Description of Artificial Sequence: Synthetic oligonucleotide
  Antisense strand to SEQ ID NO: 1681623
gaaacaacaauaauuaucc

SEQ ID NO: 1681625 - RNA, 19 nt, Artificial Sequence
  Description of Artificial Sequence: Synthetic oligonucleotide
  Sense strand starting at position 1135 of SEQ ID NO: 1561567
ggcagcuuuauggagaaca

SEQ ID NO: 1681626 - RNA, 19 nt, Artificial Sequence
  Description of Artificial Sequence: Synthetic oligonucleotide
  Antisense strand to SEQ ID NO: 1681625
uguucuccauaaagcugcc

SEQ ID NO: 1681627 - RNA, 19 nt, Artificial Sequence
  Description of Artificial Sequence: Synthetic oligonucleotide
  Sense strand starting at position 1160 of SEQ ID NO: 1561567
gcaaccacuuugucuagaa

SEQ ID NO: 1681628 - RNA, 19 nt, Artificial Sequence
  Description of Artificial Sequence: Synthetic oligonucleotide
  Antisense strand to SEQ ID NO: 1681627
uucuagacaaagugguugc

SEQ ID NO: 1681629 - RNA, 19 nt, Artificial Sequence
  Description of Artificial Sequence: Synthetic oligonucleotide
  Sense strand starting at position 1164 of SEQ ID NO: 1561567
ccacuuugucuagaaagug

SEQ ID NO: 1681630 - RNA, 19 nt, Artificial Sequence
  Description of Artificial Sequence: Synthetic oligonucleotide
  Antisense strand to SEQ ID NO: 1681629
cacuuucuagacaaagugg

SEQ ID NO: 1681631 - RNA, 19 nt, Artificial Sequence
  Description of Artificial Sequence: Synthetic oligonucleotide
  Sense strand starting at position 1374 of SEQ ID NO: 1561567
cgcugacuccacgcguuaa

SEQ ID NO: 1681632 - RNA, 19 nt, Artificial Sequence
  Description of Artificial Sequence: Synthetic oligonucleotide
  Antisense strand to SEQ ID NO: 1681631
uuaacgcguggagucagcg

SEQ ID NO: 1681633 - RNA, 19 nt, Artificial Sequence
  Description of Artificial Sequence: Synthetic oligonucleotide
  Sense strand starting at position 1385 of SEQ ID NO: 1561567
cgcguuaaagcaucucuau

SEQ ID NO: 1681634 - RNA, 19 nt, Artificial Sequence
  Description of Artificial Sequence: Synthetic oligonucleotide
  Antisense strand to SEQ ID NO: 1681633
auagagaugcuuuaacgcg

SEQ ID NO: 1681635 - RNA, 19 nt, Artificial Sequence
  Description of Artificial Sequence: Synthetic oligonucleotide
  Sense strand starting at position 1396 of SEQ ID NO: 1561567
aucucuauucgaugauucu

SEQ ID NO: 1681636 - RNA, 19 nt, Artificial Sequence
  Description of Artificial Sequence: Synthetic oligonucleotide
  Antisense strand to SEQ ID NO: 1681635
agaaucaucgaauagagau

SEQ ID NO: 1681637 - RNA, 19 nt, Artificial Sequence
  Description of Artificial Sequence: Synthetic oligonucleotide
  Sense strand starting at position 1397 of SEQ ID NO: 1561567
ucucuauucgaugauucuu

SEQ ID NO: 1681638 - RNA, 19 nt, Artificial Sequence
  Description of Artificial Sequence: Synthetic oligonucleotide
  Antisense strand to SEQ ID NO: 1681637
aagaaucaucgaauagaga

SEQ ID NO: 1681639 - RNA, 19 nt, Artificial Sequence
  Description of Artificial Sequence: Synthetic oligonucleotide
  Sense strand starting at position 1533 of SEQ ID NO: 1561567
cucgauucucucgggaaug

SEQ ID NO: 1681640 - RNA, 19 nt, Artificial Sequence
  Description of Artificial Sequence: Synthetic oligonucleotide
  Antisense strand to SEQ ID NO: 1681639
cauucccgagagaaucgag

SEQ ID NO: 1681641 - RNA, 19 nt, Artificial Sequence
  Description of Artificial Sequence: Synthetic oligonucleotide
  Sense strand starting at position 1793 of SEQ ID NO: 1561567
uuguuauuguuaccugaag

SEQ ID NO: 1681642 - RNA, 19 nt, Artificial Sequence
  Description of Artificial Sequence: Synthetic oligonucleotide
  Antisense strand to SEQ ID NO: 1681641
cuucagguaacaauaacaa

SEQ ID NO: 1681643 - RNA, 19 nt, Artificial Sequence
  Description of Artificial Sequence: Synthetic oligonucleotide
  Sense strand starting at position 2239 of SEQ ID NO: 1561567
ccgagagaugacugauugu

SEQ ID NO: 1681644 - RNA, 19 nt, Artificial Sequence
  Description of Artificial Sequence: Synthetic oligonucleotide
  Antisense strand to SEQ ID NO: 1681643
acaaucagucaucucucgg

SEQ ID NO: 1681645 - RNA, 19 nt, Artificial Sequence
  Description of Artificial Sequence: Synthetic oligonucleotide
  Sense strand starting at position 2733 of SEQ ID NO: 1561567
gcuacaaggguuugugaaa

SEQ ID NO: 1681646 - RNA, 19 nt, Artificial Sequence
  Description of Artificial Sequence: Synthetic oligonucleotide
  Antisense strand to SEQ ID NO: 1681645
uuucacaaacccuuguagc

SEQ ID NO: 1681647 - RNA, 19 nt, Artificial Sequence
  Description of Artificial Sequence: Synthetic oligonucleotide
  Sense strand starting at position 2816 of SEQ ID NO: 1561567
gccuuuguucucuagauac

SEQ ID NO: 1681648 - RNA, 19 nt, Artificial Sequence
  Description of Artificial Sequence: Synthetic oligonucleotide
  Antisense strand to SEQ ID NO: 1681647
guaucuagagaacaaaggc

SEQ ID NO: 1681649 - RNA, 19 nt, Artificial Sequence
  Description of Artificial Sequence: Synthetic oligonucleotide
  Sense strand starting at position 2824 of SEQ ID NO: 1561567
ucucuagauaccgggauau

SEQ ID NO: 1681650 - RNA, 19 nt, Artificial Sequence
  Description of Artificial Sequence: Synthetic oligonucleotide
  Antisense strand to SEQ ID NO: 1681649
auaucccgguaucuagaga

SEQ ID NO: 1681651 - RNA, 19 nt, Artificial Sequence
  Description of Artificial Sequence: Synthetic oligonucleotide
  Sense strand starting at position 2899 of SEQ ID NO: 1561567
accguaaacaucuagaggu

SEQ ID NO: 1681652 - RNA, 19 nt, Artificial Sequence
  Description of Artificial Sequence: Synthetic oligonucleotide
  Antisense strand to SEQ ID NO: 1681651
accucuagauguuuacggu

SEQ ID NO: 1681653 - RNA, 19 nt, Artificial Sequence
  Description of Artificial Sequence: Synthetic oligonucleotide
  Sense strand starting at position 3065 of SEQ ID NO: 1561567
ucuguuguaguccauuaaa

SEQ ID NO: 1681654 - RNA, 19 nt, Artificial Sequence
  Description of Artificial Sequence: Synthetic oligonucleotide
  Antisense strand to SEQ ID NO: 1681653
uuuaauggacuacaacaga

SEQ ID NO: 1681655 - RNA, 19 nt, Artificial Sequence
  Description of Artificial Sequence: Synthetic oligonucleotide
  Sense strand starting at position 3513 of SEQ ID NO: 1561567
guuacuuguuauuugcuca

SEQ ID NO: 1681656 - RNA, 19 nt, Artificial Sequence
  Description of Artificial Sequence: Synthetic oligonucleotide
  Antisense strand to SEQ ID NO: 1681655
ugagcaaauaacaaguaac

SEQ ID NO: 1681657 - RNA, 19 nt, Artificial Sequence
  Description of Artificial Sequence: Synthetic oligonucleotide
  Sense strand starting at position 3545 of SEQ ID NO: 1561567
gaugguguagucugaggga

SEQ ID NO: 1681658 - RNA, 19 nt, Artificial Sequence
  Description of Artificial Sequence: Synthetic oligonucleotide
  Antisense strand to SEQ ID NO: 1681657
ucccucagacuacaccauc

SEQ ID NO: 1681659 - RNA, 19 nt, Artificial Sequence
  Description of Artificial Sequence: Synthetic oligonucleotide
  Sense strand starting at position 3606 of SEQ ID NO: 1561567
gggugaagacguuaccagu

SEQ ID NO: 1681660 - RNA, 19 nt, Artificial Sequence
  Description of Artificial Sequence: Synthetic oligonucleotide
  Antisense strand to SEQ ID NO: 1681659
acugguaacgucuucaccc

SEQ ID NO: 1681661 - RNA, 19 nt, Artificial Sequence
  Description of Artificial Sequence: Synthetic oligonucleotide
  Sense strand starting at position 3839 of SEQ ID NO: 1561567
ugcucuaggccucaugaga

SEQ ID NO: 1681662 - RNA, 19 nt, Artificial Sequence
  Description of Artificial Sequence: Synthetic oligonucleotide
  Antisense strand to SEQ ID NO: 1681661
ucucaugaggccuagagca

SEQ ID NO: 1681663 - RNA, 19 nt, Artificial Sequence
  Description of Artificial Sequence: Synthetic oligonucleotide
  Sense strand starting at position 3875 of SEQ ID NO: 1561567
agagucacuuaggcuaaau

SEQ ID NO: 1681664 - RNA, 19 nt, Artificial Sequence
  Description of Artificial Sequence: Synthetic oligonucleotide
  Antisense strand to SEQ ID NO: 1681663
auuuagccuaagugacucu

SEQ ID NO: 1681665 - RNA, 19 nt, Artificial Sequence
  Description of Artificial Sequence: Synthetic oligonucleotide
  Sense strand starting at position 3886 of SEQ ID NO: 1561567
ggcuaaaugccacauaauc

SEQ ID NO: 1681666 - RNA, 19 nt, Artificial Sequence
  Description of Artificial Sequence: Synthetic oligonucleotide
  Antisense strand to SEQ ID NO: 1681665
gauuauguggcauuuagcc

SEQ ID NO: 1681667 - RNA, 19 nt, Artificial Sequence
  Description of Artificial Sequence: Synthetic oligonucleotide
  Sense strand starting at position 3911 of SEQ ID NO: 1561567
auacuuuaagcagguagau

SEQ ID NO: 1681668 - RNA, 19 nt, Artificial Sequence
  Description of Artificial Sequence: Synthetic oligonucleotide
  Antisense strand to SEQ ID NO: 1681667
aucuaccugcuuaaaguau

SEQ ID NO: 1681669 - RNA, 19 nt, Artificial Sequence
  Description of Artificial Sequence: Synthetic oligonucleotide
  Sense strand starting at position 3920 of SEQ ID NO: 1561567
gcagguagaucccuaaaca

SEQ ID NO: 1681670 - RNA, 19 nt, Artificial Sequence
  Description of Artificial Sequence: Synthetic oligonucleotide
  Antisense strand to SEQ ID NO: 1681669
uguuuagggaucuaccugc

SEQ ID NO: 1681671 - RNA, 19 nt, Artificial Sequence
  Description of Artificial Sequence: Synthetic oligonucleotide
  Sense strand starting at position 3954 of SEQ ID NO: 1561567
cuaccugagcagcauaaua

SEQ ID NO: 1681672 - RNA, 19 nt, Artificial Sequence
  Description of Artificial Sequence: Synthetic oligonucleotide
  Antisense strand to SEQ ID NO: 1681671
uauuaugcugcucagguag

SEQ ID NO: 1681673 - RNA, 19 nt, Artificial Sequence
  Description of Artificial Sequence: Synthetic oligonucleotide
  Sense strand starting at position 125 of SEQ ID NO: 1561568
aacucaaguggcugaagau

SEQ ID NO: 1681674 - RNA, 19 nt, Artificial Sequence
  Description of Artificial Sequence: Synthetic oligonucleotide
  Antisense strand to SEQ ID NO: 1681673
aucuucagccacuugaguu

SEQ ID NO: 1681675 - RNA, 19 nt, Artificial Sequence
  Description of Artificial Sequence: Synthetic oligonucleotide
  Sense strand starting at position 170 of SEQ ID NO: 1561568
aggcuuaugacuggccaaa

SEQ ID NO: 1681676 - RNA, 19 nt, Artificial Sequence
  Description of Artificial Sequence: Synthetic oligonucleotide
  Antisense strand to SEQ ID NO: 1681675
uuuggccagucauaagccu

SEQ ID NO: 1681677 - RNA, 19 nt, Artificial Sequence
  Description of Artificial Sequence: Synthetic oligonucleotide
  Sense strand starting at position 293 of SEQ ID NO: 1561568
ccucauaaguccucuugga

SEQ ID NO: 1681678 - RNA, 19 nt, Artificial Sequence
  Description of Artificial Sequence: Synthetic oligonucleotide
  Antisense strand to SEQ ID NO: 1681677
uccaagaggacuuaugagg

SEQ ID NO: 1681679 - RNA, 19 nt, Artificial Sequence
  Description of Artificial Sequence: Synthetic oligonucleotide
  Sense strand starting at position 392 of SEQ ID NO: 1561568
cacugugacuugcuggaaa

SEQ ID NO: 1681680 - RNA, 19 nt, Artificial Sequence
  Description of Artificial Sequence: Synthetic oligonucleotide
  Antisense strand to SEQ ID NO: 1681679
uuuccagcaagucacagug

SEQ ID NO: 1681681 - RNA, 19 nt, Artificial Sequence
  Description of Artificial Sequence: Synthetic oligonucleotide
  Sense strand starting at position 470 of SEQ ID NO: 1561568
ugguccacacgcuaaauau

SEQ ID NO: 1681682 - RNA, 19 nt, Artificial Sequence
  Description of Artificial Sequence: Synthetic oligonucleotide
  Antisense strand to SEQ ID NO: 1681681
auauuuagcguguggacca

SEQ ID NO: 1681683 - RNA, 19 nt, Artificial Sequence
  Description of Artificial Sequence: Synthetic oligonucleotide
  Sense strand starting at position 799 of SEQ ID NO: 1561568
gggacuacuuuagucugaa

SEQ ID NO: 1681684 - RNA, 19 nt, Artificial Sequence
  Description of Artificial Sequence: Synthetic oligonucleotide
  Antisense strand to SEQ ID NO: 1681683
uucagacuaaaguaguccc

SEQ ID NO: 1681685 - RNA, 19 nt, Artificial Sequence
  Description of Artificial Sequence: Synthetic oligonucleotide
  Sense strand starting at position 800 of SEQ ID NO: 1561568
ggacuacuuuagucugaac

SEQ ID NO: 1681686 - RNA, 19 nt, Artificial Sequence
  Description of Artificial Sequence: Synthetic oligonucleotide
  Antisense strand to SEQ ID NO: 1681685
guucagacuaaaguagucc

SEQ ID NO: 1681687 - RNA, 19 nt, Artificial Sequence
  Description of Artificial Sequence: Synthetic oligonucleotide
  Sense strand starting at position 829 of SEQ ID NO: 1561568
ggccgcuuuaaagaaguga

SEQ ID NO: 1681688 - RNA, 19 nt, Artificial Sequence
  Description of Artificial Sequence: Synthetic oligonucleotide
  Antisense strand to SEQ ID NO: 1681687
ucacuucuuuaaagcggcc

SEQ ID NO: 1681689 - RNA, 19 nt, Artificial Sequence
  Description of Artificial Sequence: Synthetic oligonucleotide
  Sense strand starting at position 875 of SEQ ID NO: 1561568
aagggucuugcagagaucu

SEQ ID NO: 1681690 - RNA, 19 nt, Artificial Sequence
  Description of Artificial Sequence: Synthetic oligonucleotide
  Antisense strand to SEQ ID NO: 1681689
agaucucugcaagacccuu

SEQ ID NO: 1681691 - RNA, 19 nt, Artificial Sequence
  Description of Artificial Sequence: Synthetic oligonucleotide
  Sense strand starting at position 877 of SEQ ID NO: 1561568
gggucuugcagagaucuga

SEQ ID NO: 1681692 - RNA, 19 nt, Artificial Sequence
  Description of Artificial Sequence: Synthetic oligonucleotide
  Antisense strand to SEQ ID NO: 1681691
ucagaucucugcaagaccc

SEQ ID NO: 1681693 - RNA, 19 nt, Artificial Sequence
  Description of Artificial Sequence: Synthetic oligonucleotide
  Sense strand starting at position 881 of SEQ ID NO: 1561568
cuugcagagaucugaggau

SEQ ID NO: 1681694 - RNA, 19 nt, Artificial Sequence
  Description of Artificial Sequence: Synthetic oligonucleotide
  Antisense strand to SEQ ID NO: 1681693
auccucagaucucugcaag

SEQ ID NO: 1681695 - RNA, 19 nt, Artificial Sequence
  Description of Artificial Sequence: Synthetic oligonucleotide
  Sense strand starting at position 901 of SEQ ID NO: 1561568
gugucugaggcugaaugaa

SEQ ID NO: 1681696 - RNA, 19 nt, Artificial Sequence
  Description of Artificial Sequence: Synthetic oligonucleotide
  Antisense strand to SEQ ID NO: 1681695
uucauucagccucagacac

SEQ ID NO: 1681697 - RNA, 19 nt, Artificial Sequence
  Description of Artificial Sequence: Synthetic oligonucleotide
  Sense strand starting at position 909 of SEQ ID NO: 1561568
ggcugaaugaacuguaaag

SEQ ID NO: 1681698 - RNA, 19 nt, Artificial Sequence
  Description of Artificial Sequence: Synthetic oligonucleotide
  Antisense strand to SEQ ID NO: 1681697
cuuuacaguucauucagcc

SEQ ID NO: 1681699 - RNA, 19 nt, Artificial Sequence
  Description of Artificial Sequence: Synthetic oligonucleotide
  Sense strand starting at position 944 of SEQ ID NO: 1561568
aggaaagaacucugcguga

SEQ ID NO: 1681700 - RNA, 19 nt, Artificial Sequence
  Description of Artificial Sequence: Synthetic oligonucleotide
  Antisense strand to SEQ ID NO: 1681699
ucacgcagaguucuuuccu

SEQ ID NO: 1681701 - RNA, 19 nt, Artificial Sequence
  Description of Artificial Sequence: Synthetic oligonucleotide
  Sense strand starting at position 947 of SEQ ID NO: 1561568
aaagaacucugcgugauca

SEQ ID NO: 1681702 - RNA, 19 nt, Artificial Sequence
  Description of Artificial Sequence: Synthetic oligonucleotide
  Antisense strand to SEQ ID NO: 1681701
ugaucacgcagaguucuuu

SEQ ID NO: 1681703 - RNA, 19 nt, Artificial Sequence
  Description of Artificial Sequence: Synthetic oligonucleotide
  Sense strand starting at position 949 of SEQ ID NO: 1561568
agaacucugcgugaucaga

SEQ ID NO: 1681704 - RNA, 19 nt, Artificial Sequence
  Description of Artificial Sequence: Synthetic oligonucleotide
  Antisense strand to SEQ ID NO: 1681703
ucugaucacgcagaguucu

SEQ ID NO: 1681705 - RNA, 19 nt, Artificial Sequence
  Description of Artificial Sequence: Synthetic oligonucleotide
  Sense strand starting at position 958 of SEQ ID NO: 1561568
cgugaucagauugauaugu

SEQ ID NO: 1681706 - RNA, 19 nt, Artificial Sequence
  Description of Artificial Sequence: Synthetic oligonucleotide
  Antisense strand to SEQ ID NO: 1681705
acauaucaaucugaucacg

SEQ ID NO: 1681707 - RNA, 19 nt, Artificial Sequence
  Description of Artificial Sequence: Synthetic oligonucleotide
  Sense strand starting at position 963 of SEQ ID NO: 1561568
ucagauugauaugucugaa

SEQ ID NO: 1681708 - RNA, 19 nt, Artificial Sequence
  Description of Artificial Sequence: Synthetic oligonucleotide
  Antisense strand to SEQ ID NO: 1681707
uucagacauaucaaucuga

SEQ ID NO: 1681709 - RNA, 19 nt, Artificial Sequence
  Description of Artificial Sequence: Synthetic oligonucleotide
  Sense strand starting at position 966 of SEQ ID NO: 1561568
gauugauaugucugaaggg

SEQ ID NO: 1681710 - RNA, 19 nt, Artificial Sequence
  Description of Artificial Sequence: Synthetic oligonucleotide
  Antisense strand to SEQ ID NO: 1681709
cccuucagacauaucaauc

SEQ ID NO: 1681711 - RNA, 19 nt, Artificial Sequence
  Description of Artificial Sequence: Synthetic oligonucleotide
  Sense strand starting at position 1091 of SEQ ID NO: 1561568
gguggucagccauagugga

SEQ ID NO: 1681712 - RNA, 19 nt, Artificial Sequence
  Description of Artificial Sequence: Synthetic oligonucleotide
  Antisense strand to SEQ ID NO: 1681711
uccacuauggcugaccacc

SEQ ID NO: 1681713 - RNA, 19 nt, Artificial Sequence
  Description of Artificial Sequence: Synthetic oligonucleotide
  Sense strand starting at position 1224 of SEQ ID NO: 1561568
acacuuuagcaguggaaag

SEQ ID NO: 1681714 - RNA, 19 nt, Artificial Sequence
  Description of Artificial Sequence: Synthetic oligonucleotide
  Antisense strand to SEQ ID NO: 1681713
cuuuccacugcuaaagugu

SEQ ID NO: 1681715 - RNA, 19 nt, Artificial Sequence
  Description of Artificial Sequence: Synthetic oligonucleotide
  Sense strand starting at position 1345 of SEQ ID NO: 1561568
uuagaacagucaguuacaa

SEQ ID NO: 1681716 - RNA, 19 nt, Artificial Sequence
  Description of Artificial Sequence: Synthetic oligonucleotide
  Antisense strand to SEQ ID NO: 1681715
uuguaacugacuguucuaa

SEQ ID NO: 1681717 - RNA, 19 nt, Artificial Sequence
  Description of Artificial Sequence: Synthetic oligonucleotide
  Sense strand starting at position 1412 of SEQ ID NO: 1561568
ccugaaaugucaccagaga

SEQ ID NO: 1681718 - RNA, 19 nt, Artificial Sequence
  Description of Artificial Sequence: Synthetic oligonucleotide
  Antisense strand to SEQ ID NO: 1681717
ucucuggugacauuucagg

SEQ ID NO: 1681719 - RNA, 19 nt, Artificial Sequence
  Description of Artificial Sequence: Synthetic oligonucleotide
  Sense strand starting at position 1423 of SEQ ID NO: 1561568
accagagaguaaucuagcu

SEQ ID NO: 1681720 - RNA, 19 nt, Artificial Sequence
  Description of Artificial Sequence: Synthetic oligonucleotide
  Antisense strand to SEQ ID NO: 1681719
agcuagauuacucucuggu

SEQ ID NO: 1681721 - RNA, 19 nt, Artificial Sequence
  Description of Artificial Sequence: Synthetic oligonucleotide
  Sense strand starting at position 1428 of SEQ ID NO: 1561568
agaguaaucuagcuccuug

SEQ ID NO: 1681722 - RNA, 19 nt, Artificial Sequence
  Description of Artificial Sequence: Synthetic oligonucleotide
  Antisense strand to SEQ ID NO: 1681721
caaggagcuagauuacucu

SEQ ID NO: 1681723 - RNA, 19 nt, Artificial Sequence
  Description of Artificial Sequence: Synthetic oligonucleotide
  Sense strand starting at position 1468 of SEQ ID NO: 1561568
uggcuuccagaguaguuua

SEQ ID NO: 1681724 - RNA, 19 nt, Artificial Sequence
  Description of Artificial Sequence: Synthetic oligonucleotide
  Antisense strand to SEQ ID NO: 1681723
uaaacuacucuggaagcca

SEQ ID NO: 1681725 - RNA, 19 nt, Artificial Sequence
  Description of Artificial Sequence: Synthetic oligonucleotide
  Sense strand starting at position 1473 of SEQ ID NO: 1561568
uccagaguaguuuauugca

SEQ ID NO: 1681726 - RNA, 19 nt, Artificial Sequence
  Description of Artificial Sequence: Synthetic oligonucleotide
  Antisense strand to SEQ ID NO: 1681725
ugcaauaaacuacucugga

SEQ ID NO: 1681727 - RNA, 19 nt, Artificial Sequence
  Description of Artificial Sequence: Synthetic oligonucleotide
  Sense strand starting at position 1537 of SEQ ID NO: 1561568
acgucacagcccuauaauc

SEQ ID NO: 1681728 - RNA, 19 nt, Artificial Sequence
  Description of Artificial Sequence: Synthetic oligonucleotide
  Antisense strand to SEQ ID NO: 1681727
gauuauagggcugugacgu

SEQ ID NO: 1681729 - RNA, 19 nt, Artificial Sequence
  Description of Artificial Sequence: Synthetic oligonucleotide
  Sense strand starting at position 1539 of SEQ ID NO: 1561568
gucacagcccuauaaucga

SEQ ID NO: 1681730 - RNA, 19 nt, Artificial Sequence
  Description of Artificial Sequence: Synthetic oligonucleotide
  Antisense strand to SEQ ID NO: 1681729
ucgauuauagggcugugac

SEQ ID NO: 1681731 - RNA, 19 nt, Artificial Sequence
  Description of Artificial Sequence: Synthetic oligonucleotide
  Sense strand starting at position 1546 of SEQ ID NO: 1561568
cccuauaaucgauguauag

SEQ ID NO: 1681732 - RNA, 19 nt, Artificial Sequence
  Description of Artificial Sequence: Synthetic oligonucleotide
  Antisense strand to SEQ ID NO: 1681731
cuauacaucgauuauaggg

SEQ ID NO: 1681733 - RNA, 19 nt, Artificial Sequence
  Description of Artificial Sequence: Synthetic oligonucleotide
  Sense strand starting at position 1637 of SEQ ID NO: 1561568
cugcuccacguuucguaaa

SEQ ID NO: 1681734 - RNA, 19 nt, Artificial Sequence
  Description of Artificial Sequence: Synthetic oligonucleotide
  Antisense strand to SEQ ID NO: 1681733
uuuacgaaacguggagcag

SEQ ID NO: 1681735 - RNA, 19 nt, Artificial Sequence
  Description of Artificial Sequence: Synthetic oligonucleotide
  Sense strand starting at position 2341 of SEQ ID NO: 1561568
ccauucuuggccggaggaa

SEQ ID NO: 1681736 - RNA, 19 nt, Artificial Sequence
  Description of Artificial Sequence: Synthetic oligonucleotide
  Antisense strand to SEQ ID NO: 1681735
uuccuccggccaagaaugg

SEQ ID NO: 1681737 - RNA, 19 nt, Artificial Sequence
  Description of Artificial Sequence: Synthetic oligonucleotide
  Sense strand starting at position 2342 of SEQ ID NO: 1561568
cauucuuggccggaggaaa

SEQ ID NO: 1681738 - RNA, 19 nt, Artificial Sequence
  Description of Artificial Sequence: Synthetic oligonucleotide
  Antisense strand to SEQ ID NO: 1681737
uuuccuccggccaagaaug

SEQ ID NO: 1681739 - RNA, 19 nt, Artificial Sequence
  Description of Artificial Sequence: Synthetic oligonucleotide
  Sense strand starting at position 3820 of SEQ ID NO: 1561568
ggagucuuggacuggguga

SEQ ID NO: 1681740 - RNA, 19 nt, Artificial Sequence
  Description of Artificial Sequence: Synthetic oligonucleotide
  Antisense strand to SEQ ID NO: 1681739
ucacccaguccaagacucc

SEQ ID NO: 1681741 - RNA, 19 nt, Artificial Sequence
  Description of Artificial Sequence: Synthetic oligonucleotide
  Sense strand starting at position 3856 of SEQ ID NO: 1561568
uaagcaugaucaguuugaa

SEQ ID NO: 1681742 - RNA, 19 nt, Artificial Sequence
  Description of Artificial Sequence: Synthetic oligonucleotide
  Antisense strand to SEQ ID NO: 1681741
uucaaacugaucaugcuua

SEQ ID NO: 1681743 - RNA, 19 nt, Artificial Sequence
  Description of Artificial Sequence: Synthetic oligonucleotide
  Sense strand starting at position 3859 of SEQ ID NO: 1561568
gcaugaucaguuugaaaug

SEQ ID NO: 1681744 - RNA, 19 nt, Artificial Sequence
  Description of Artificial Sequence: Synthetic oligonucleotide
  Antisense strand to SEQ ID NO: 1681743
cauuucaaacugaucaugc

SEQ ID NO: 1681745 - RNA, 19 nt, Artificial Sequence
  Description of Artificial Sequence: Synthetic oligonucleotide
  Sense strand starting at position 3869 of SEQ ID NO: 1561568
uuugaaaugucuguaugac

SEQ ID NO: 1681746 - RNA, 19 nt, Artificial Sequence
  Description of Artificial Sequence: Synthetic oligonucleotide
  Antisense strand to SEQ ID NO: 1681745
gucauacagacauuucaaa

SEQ ID NO: 1681747 - RNA, 19 nt, Artificial Sequence
  Description of Artificial Sequence: Synthetic oligonucleotide
  Sense strand starting at position 3870 of SEQ ID NO: 1561568
uugaaaugucuguaugacc

SEQ ID NO: 1681748 - RNA, 19 nt, Artificial Sequence
  Description of Artificial Sequence: Synthetic oligonucleotide
  Antisense strand to SEQ ID NO: 1681747
ggucauacagacauuucaa

SEQ ID NO: 1681749 - RNA, 19 nt, Artificial Sequence
  Description of Artificial Sequence: Synthetic oligonucleotide
  Sense strand starting at position 3923 of SEQ ID NO: 1561568
acugaauauugggagagaa

SEQ ID NO: 1681750 - RNA, 19 nt, Artificial Sequence
  Description of Artificial Sequence: Synthetic oligonucleotide
  Antisense strand to SEQ ID NO: 1681749
uucucucccaauauucagu

SEQ ID NO: 1681751 - RNA, 19 nt, Artificial Sequence
  Description of Artificial Sequence: Synthetic oligonucleotide
  Sense strand starting at position 3935 of SEQ ID NO: 1561568
gagagaaguugugccugga

SEQ ID NO: 1681752 - RNA, 19 nt, Artificial Sequence
  Description of Artificial Sequence: Synthetic oligonucleotide
  Antisense strand to SEQ ID NO: 1681751
uccaggcacaacuucucuc

SEQ ID NO: 1681753 - RNA, 19 nt, Artificial Sequence
  Description of Artificial Sequence: Synthetic oligonucleotide
  Sense strand starting at position 44 of SEQ ID NO: 1561569
gucacuucccucugguuga

SEQ ID NO: 1681754 - RNA, 19 nt, Artificial Sequence
  Description of Artificial Sequence: Synthetic oligonucleotide
  Antisense strand to SEQ ID NO: 1681753
ucaaccagagggaagugac

SEQ ID NO: 1681755 - RNA, 19 nt, Artificial Sequence
  Description of Artificial Sequence: Synthetic oligonucleotide
  Sense strand starting at position 45 of SEQ ID NO: 1561569
ucacuucccucugguugaa

SEQ ID NO: 1681756 - RNA, 19 nt, Artificial Sequence
  Description of Artificial Sequence: Synthetic oligonucleotide
  Antisense strand to SEQ ID NO: 1681755
uucaaccagagggaaguga

SEQ ID NO: 1681757 - RNA, 19 nt, Artificial Sequence
  Description of Artificial Sequence: Synthetic oligonucleotide
  Sense strand starting at position 47 of SEQ ID NO: 1561569
acuucccucugguugaaua

SEQ ID NO: 1681758 - RNA, 19 nt, Artificial Sequence
  Description of Artificial Sequence: Synthetic oligonucleotide
  Antisense strand to SEQ ID NO: 1681757
uauucaaccagagggaagu

SEQ ID NO: 1681759 - RNA, 19 nt, Artificial Sequence
  Description of Artificial Sequence: Synthetic oligonucleotide
  Sense strand starting at position 648 of SEQ ID NO: 1561569
uuucuuucucccugggauu

SEQ ID NO: 1681760 - RNA, 19 nt, Artificial Sequence
  Description of Artificial Sequence: Synthetic oligonucleotide
  Antisense strand to SEQ ID NO: 1681759
aaucccagggagaaagaaa

SEQ ID NO: 1681761 - RNA, 19 nt, Artificial Sequence
  Description of Artificial Sequence: Synthetic oligonucleotide
  Sense strand starting at position 747 of SEQ ID NO: 1561569
gcuccauccucgcaacuua

SEQ ID NO: 1681762 - RNA, 19 nt, Artificial Sequence
  Description of Artificial Sequence: Synthetic oligonucleotide
  Antisense strand to SEQ ID NO: 1681761
uaaguugcgaggauggagc

SEQ ID NO: 1681763 - RNA, 19 nt, Artificial Sequence
  Description of Artificial Sequence: Synthetic oligonucleotide
  Sense strand starting at position 1295 of SEQ ID NO: 1561569
gcaggaggguuuggaguaa

SEQ ID NO: 1681764 - RNA, 19 nt, Artificial Sequence
  Description of Artificial Sequence: Synthetic oligonucleotide
  Antisense strand to SEQ ID NO: 1681763
uuacuccaaacccuccugc

SEQ ID NO: 1681765 - RNA, 19 nt, Artificial Sequence
  Description of Artificial Sequence: Synthetic oligonucleotide
  Sense strand starting at position 1990 of SEQ ID NO: 1561569
gcguuaaucuccgcgcgca

SEQ ID NO: 1681766 - RNA, 19 nt, Artificial Sequence
  Description of Artificial Sequence: Synthetic oligonucleotide
  Antisense strand to SEQ ID NO: 1681765
ugcgcgcggagauuaacgc

SEQ ID NO: 1681767 - RNA, 19 nt, Artificial Sequence
  Description of Artificial Sequence: Synthetic oligonucleotide
  Sense strand starting at position 2141 of SEQ ID NO: 1561569
gggacuugcgcgucuuuca

SEQ ID NO: 1681768 - RNA, 19 nt, Artificial Sequence
  Description of Artificial Sequence: Synthetic oligonucleotide
  Antisense strand to SEQ ID NO: 1681767
ugaaagacgcgcaaguccc

SEQ ID NO: 1681769 - RNA, 19 nt, Artificial Sequence
  Description of Artificial Sequence: Synthetic oligonucleotide
  Sense strand starting at position 2205 of SEQ ID NO: 1561569
gccagaaagucugaggcau

SEQ ID NO: 1681770 - RNA, 19 nt, Artificial Sequence
  Description of Artificial Sequence: Synthetic oligonucleotide
  Antisense strand to SEQ ID NO: 1681769
augccucagacuuucuggc

SEQ ID NO: 1681771 - RNA, 19 nt, Artificial Sequence
  Description of Artificial Sequence: Synthetic oligonucleotide
  Sense strand starting at position 2207 of SEQ ID NO: 1561569
cagaaagucugaggcauga

SEQ ID NO: 1681772 - RNA, 19 nt, Artificial Sequence
  Description of Artificial Sequence: Synthetic oligonucleotide
  Antisense strand to SEQ ID NO: 1681771
ucaugccucagacuuucug

SEQ ID NO: 1681773 - RNA, 19 nt, Artificial Sequence
  Description of Artificial Sequence: Synthetic oligonucleotide
  Sense strand starting at position 2225 of SEQ ID NO: 1561569
auuccaaagcccuggaauu

SEQ ID NO: 1681774 - RNA, 19 nt, Artificial Sequence
  Description of Artificial Sequence: Synthetic oligonucleotide
  Antisense strand to SEQ ID NO: 1681773
aauuccagggcuuuggaau

SEQ ID NO: 1681775 - RNA, 19 nt, Artificial Sequence
  Description of Artificial Sequence: Synthetic oligonucleotide
  Sense strand starting at position 3312 of SEQ ID NO: 1561569
aaguuauuugccuguguca

SEQ ID NO: 1681776 - RNA, 19 nt, Artificial Sequence
  Description of Artificial Sequence: Synthetic oligonucleotide
  Antisense strand to SEQ ID NO: 1681775
ugacacaggcaaauaacuu

SEQ ID NO: 1681777 - RNA, 19 nt, Artificial Sequence
  Description of Artificial Sequence: Synthetic oligonucleotide
  Sense strand starting at position 3348 of SEQ ID NO: 1561569
gauuacaugcgucagccaa

SEQ ID NO: 1681778 - RNA, 19 nt, Artificial Sequence
  Description of Artificial Sequence: Synthetic oligonucleotide
  Antisense strand to SEQ ID NO: 1681777
uuggcugacgcauguaauc

SEQ ID NO: 1681779 - RNA, 19 nt, Artificial Sequence
  Description of Artificial Sequence: Synthetic oligonucleotide
  Sense strand starting at position 3954 of SEQ ID NO: 1561569
agaagagauuccgucucua

SEQ ID NO: 1681780 - RNA, 19 nt, Artificial Sequence
  Description of Artificial Sequence: Synthetic oligonucleotide
  Antisense strand to SEQ ID NO: 1681779
uagagacggaaucucuucu

SEQ ID NO: 1681781 - RNA, 19 nt, Artificial Sequence
  Description of Artificial Sequence: Synthetic oligonucleotide
  Sense strand starting at position 48 of SEQ ID NO: 1561570
acacuucccucgcuaagau

SEQ ID NO: 1681782 - RNA, 19 nt, Artificial Sequence
  Description of Artificial Sequence: Synthetic oligonucleotide
  Antisense strand to SEQ ID NO: 1681781
aucuuagcgagggaagugu

SEQ ID NO: 1681783 - RNA, 19 nt, Artificial Sequence
  Description of Artificial Sequence: Synthetic oligonucleotide
  Sense strand starting at position 224 of SEQ ID NO: 1561570
gagaaauacccacgggugu

SEQ ID NO: 1681784 - RNA, 19 nt, Artificial Sequence
  Description of Artificial Sequence: Synthetic oligonucleotide
  Antisense strand to SEQ ID NO: 1681783
acacccguggguauuucuc

SEQ ID NO: 1681785 - RNA, 19 nt, Artificial Sequence
  Description of Artificial Sequence: Synthetic oligonucleotide
  Sense strand starting at position 569 of SEQ ID NO: 1561570
ccacguguguuauugcuaa

SEQ ID NO: 1681786 - RNA, 19 nt, Artificial Sequence
  Description of Artificial Sequence: Synthetic oligonucleotide
  Antisense strand to SEQ ID NO: 1681785
uuagcaauaacacacgugg

SEQ ID NO: 1681787 - RNA, 19 nt, Artificial Sequence
  Description of Artificial Sequence: Synthetic oligonucleotide
  Sense strand starting at position 571 of SEQ ID NO: 1561570
acguguguuauugcuaacu

SEQ ID NO: 1681788 - RNA, 19 nt, Artificial Sequence
  Description of Artificial Sequence: Synthetic oligonucleotide
  Antisense strand to SEQ ID NO: 1681787
aguuagcaauaacacacgu

SEQ ID NO: 1681789 - RNA, 19 nt, Artificial Sequence
  Description of Artificial Sequence: Synthetic oligonucleotide
  Sense strand starting at position 593 of SEQ ID NO: 1561570
cuauguaccuaagaugacu

SEQ ID NO: 1681790 - RNA, 19 nt, Artificial Sequence
  Description of Artificial Sequence: Synthetic oligonucleotide
  Antisense strand to SEQ ID NO: 1681789
agucaucuuagguacauag

SEQ ID NO: 1681791 - RNA, 19 nt, Artificial Sequence
  Description of Artificial Sequence: Synthetic oligonucleotide
  Sense strand starting at position 749 of SEQ ID NO: 1561570
augccaucucuauggcaaa

SEQ ID NO: 1681792 - RNA, 19 nt, Artificial Sequence
  Description of Artificial Sequence: Synthetic oligonucleotide
  Antisense strand to SEQ ID NO: 1681791
uuugccauagagauggcau

SEQ ID NO: 1681793 - RNA, 19 nt, Artificial Sequence
  Description of Artificial Sequence: Synthetic oligonucleotide
  Sense strand starting at position 768 of SEQ ID NO: 1561570
acgccaucucuauggcaaa

SEQ ID NO: 1681794 - RNA, 19 nt, Artificial Sequence
  Description of Artificial Sequence: Synthetic oligonucleotide
  Antisense strand to SEQ ID NO: 1681793
uuugccauagagauggcgu

SEQ ID NO: 1681795 - RNA, 19 nt, Artificial Sequence
  Description of Artificial Sequence: Synthetic oligonucleotide
  Sense strand starting at position 900 of SEQ ID NO: 1561570
ugcccuucuuaaguagaaa

SEQ ID NO: 1681796 - RNA, 19 nt, Artificial Sequence
  Description of Artificial Sequence: Synthetic oligonucleotide
  Antisense strand to SEQ ID NO: 1681795
uuucuacuuaagaagggca

SEQ ID NO: 1681797 - RNA, 19 nt, Artificial Sequence
  Description of Artificial Sequence: Synthetic oligonucleotide
  Sense strand starting at position 911 of SEQ ID NO: 1561570
aguagaaaggcuuguagcu

SEQ ID NO: 1681798 - RNA, 19 nt, Artificial Sequence
  Description of Artificial Sequence: Synthetic oligonucleotide
  Antisense strand to SEQ ID NO: 1681797
agcuacaagccuuucuacu

SEQ ID NO: 1681799 - RNA, 19 nt, Artificial Sequence
  Description of Artificial Sequence: Synthetic oligonucleotide
  Sense strand starting at position 991 of SEQ ID NO: 1561570
acagucuacacguguucuu

SEQ ID NO: 1681800 - RNA, 19 nt, Artificial Sequence
  Description of Artificial Sequence: Synthetic oligonucleotide
  Antisense strand to SEQ ID NO: 1681799
aagaacacguguagacugu

SEQ ID NO: 1681801 - RNA, 19 nt, Artificial Sequence
  Description of Artificial Sequence: Synthetic oligonucleotide
  Sense strand starting at position 994 of SEQ ID NO: 1561570
gucuacacguguucuuauu

SEQ ID NO: 1681802 - RNA, 19 nt, Artificial Sequence
  Description of Artificial Sequence: Synthetic oligonucleotide
  Antisense strand to SEQ ID NO: 1681801
aauaagaacacguguagac

SEQ ID NO: 1681803 - RNA, 19 nt, Artificial Sequence
  Description of Artificial Sequence: Synthetic oligonucleotide
  Sense strand starting at position 996 of SEQ ID NO: 1561570
cuacacguguucuuauuua

SEQ ID NO: 1681804 - RNA, 19 nt, Artificial Sequence
  Description of Artificial Sequence: Synthetic oligonucleotide
  Antisense strand to SEQ ID NO: 1681803
uaaauaagaacacguguag

SEQ ID NO: 1681805 - RNA, 19 nt, Artificial Sequence
  Description of Artificial Sequence: Synthetic oligonucleotide
  Sense strand starting at position 1000 of SEQ ID NO: 1561570
acguguucuuauuuacaua

SEQ ID NO: 1681806 - RNA, 19 nt, Artificial Sequence
  Description of Artificial Sequence: Synthetic oligonucleotide
  Antisense strand to SEQ ID NO: 1681805
uauguaaauaagaacacgu

SEQ ID NO: 1681807 - RNA, 19 nt, Artificial Sequence
  Description of Artificial Sequence: Synthetic oligonucleotide
  Sense strand starting at position 1100 of SEQ ID NO: 1561570
augccagauucucagauga

SEQ ID NO: 1681808 - RNA, 19 nt, Artificial Sequence
  Description of Artificial Sequence: Synthetic oligonucleotide
  Antisense strand to SEQ ID NO: 1681807
ucaucugagaaucuggcau

SEQ ID NO: 1681809 - RNA, 19 nt, Artificial Sequence
  Description of Artificial Sequence: Synthetic oligonucleotide
  Sense strand starting at position 1244 of SEQ ID NO: 1561570
uuaccagaauggcagaaau

SEQ ID NO: 1681810 - RNA, 19 nt, Artificial Sequence
  Description of Artificial Sequence: Synthetic oligonucleotide
  Antisense strand to SEQ ID NO: 1681809
auuucugccauucugguaa

SEQ ID NO: 1681811 - RNA, 19 nt, Artificial Sequence
  Description of Artificial Sequence: Synthetic oligonucleotide
  Sense strand starting at position 1289 of SEQ ID NO: 1561570
ucaccaagguugcuuuaga

SEQ ID NO: 1681812 - RNA, 19 nt, Artificial Sequence
  Description of Artificial Sequence: Synthetic oligonucleotide
  Antisense strand to SEQ ID NO: 1681811
ucuaaagcaaccuugguga

SEQ ID NO: 1681813 - RNA, 19 nt, Artificial Sequence
  Description of Artificial Sequence: Synthetic oligonucleotide
  Sense strand starting at position 1290 of SEQ ID NO: 1561570
caccaagguugcuuuagaa

SEQ ID NO: 1681814 - RNA, 19 nt, Artificial Sequence
  Description of Artificial Sequence: Synthetic oligonucleotide
  Antisense strand to SEQ ID NO: 1681813
uucuaaagcaaccuuggug

SEQ ID NO: 1681815 - RNA, 19 nt, Artificial Sequence
  Description of Artificial Sequence: Synthetic oligonucleotide
  Sense strand starting at position 1580 of SEQ ID NO: 1561570
ggucgacuccaccaagaua

SEQ ID NO: 1681816 - RNA, 19 nt, Artificial Sequence
  Description of Artificial Sequence: Synthetic oligonucleotide
  Antisense strand to SEQ ID NO: 1681815
uaucuugguggagucgacc

SEQ ID NO: 1681817 - RNA, 19 nt, Artificial Sequence
  Description of Artificial Sequence: Synthetic oligonucleotide
  Sense strand starting at position 1655 of SEQ ID NO: 1561570
gcugaugucacuuccgcua

SEQ ID NO: 1681818 - RNA, 19 nt, Artificial Sequence
  Description of Artificial Sequence: Synthetic oligonucleotide
  Antisense strand to SEQ ID NO: 1681817
uagcggaagugacaucagc

SEQ ID NO: 1681819 - RNA, 19 nt, Artificial Sequence
  Description of Artificial Sequence: Synthetic oligonucleotide
  Sense strand starting at position 1721 of SEQ ID NO: 1561570
aggaccagguuguuagaaa

SEQ ID NO: 1681820 - RNA, 19 nt, Artificial Sequence
  Description of Artificial Sequence: Synthetic oligonucleotide
  Antisense strand to SEQ ID NO: 1681819
uuucuaacaaccugguccu

SEQ ID NO: 1681821 - RNA, 19 nt, Artificial Sequence
  Description of Artificial Sequence: Synthetic oligonucleotide
  Sense strand starting at position 1722 of SEQ ID NO: 1561570
ggaccagguuguuagaaau

SEQ ID NO: 1681822 - RNA, 19 nt, Artificial Sequence
  Description of Artificial Sequence: Synthetic oligonucleotide
  Antisense strand to SEQ ID NO: 1681821
auuucuaacaaccuggucc

SEQ ID NO: 1681823 - RNA, 19 nt, Artificial Sequence
  Description of Artificial Sequence: Synthetic oligonucleotide
  Sense strand starting at position 1728 of SEQ ID NO: 1561570
gguuguuagaaaugcuugu

SEQ ID NO: 1681824 - RNA, 19 nt, Artificial Sequence
  Description of Artificial Sequence: Synthetic oligonucleotide
  Antisense strand to SEQ ID NO: 1681823
acaagcauuucuaacaacc

SEQ ID NO: 1681825 - RNA, 19 nt, Artificial Sequence
  Description of Artificial Sequence: Synthetic oligonucleotide
  Sense strand starting at position 1967 of SEQ ID NO: 1561570
gcuaccaagucagaacuuu

SEQ ID NO: 1681826 - RNA, 19 nt, Artificial Sequence
  Description of Artificial Sequence: Synthetic oligonucleotide
  Antisense strand to SEQ ID NO: 1681825
aaaguucugacuugguagc

SEQ ID NO: 1681827 - RNA, 19 nt, Artificial Sequence
  Description of Artificial Sequence: Synthetic oligonucleotide
  Sense strand starting at position 2193 of SEQ ID NO: 1561570
acagauacuuaagaauguu

SEQ ID NO: 1681828 - RNA, 19 nt, Artificial Sequence
  Description of Artificial Sequence: Synthetic oligonucleotide
  Antisense strand to SEQ ID NO: 1681827
aacauucuuaaguaucugu

SEQ ID NO: 1681829 - RNA, 19 nt, Artificial Sequence
  Description of Artificial Sequence: Synthetic oligonucleotide
  Sense strand starting at position 2229 of SEQ ID NO: 1561570
gcauuucgcuccuaagaag

SEQ ID NO: 1681830 - RNA, 19 nt, Artificial Sequence
  Description of Artificial Sequence: Synthetic oligonucleotide
  Antisense strand to SEQ ID NO: 1681829
cuucuuaggagcgaaaugc

SEQ ID NO: 1681831 - RNA, 19 nt, Artificial Sequence
  Description of Artificial Sequence: Synthetic oligonucleotide
  Sense strand starting at position 2261 of SEQ ID NO: 1561570
uucuaauuagauggagagu

SEQ ID NO: 1681832 - RNA, 19 nt, Artificial Sequence
  Description of Artificial Sequence: Synthetic oligonucleotide
  Antisense strand to SEQ ID NO: 1681831
acucuccaucuaauuagaa

SEQ ID NO: 1681833 - RNA, 19 nt, Artificial Sequence
  Description of Artificial Sequence: Synthetic oligonucleotide
  Sense strand starting at position 2275 of SEQ ID NO: 1561570
agaguaaagucucuuugaa

SEQ ID NO: 1681834 - RNA, 19 nt, Artificial Sequence
  Description of Artificial Sequence: Synthetic oligonucleotide
  Antisense strand to SEQ ID NO: 1681833
uucaaagagacuuuacucu

SEQ ID NO: 1681835 - RNA, 19 nt, Artificial Sequence
  Description of Artificial Sequence: Synthetic oligonucleotide
  Sense strand starting at position 2277 of SEQ ID NO: 1561570
aguaaagucucuuugaaga

SEQ ID NO: 1681836 - RNA, 19 nt, Artificial Sequence
  Description of Artificial Sequence: Synthetic oligonucleotide
  Antisense strand to SEQ ID NO: 1681835
ucuucaaagagacuuuacu

SEQ ID NO: 1681837 - RNA, 19 nt, Artificial Sequence
  Description of Artificial Sequence: Synthetic oligonucleotide
  Sense strand starting at position 2560 of SEQ ID NO: 1561570
agggaaugcuccuccaaag

SEQ ID NO: 1681838 - RNA, 19 nt, Artificial Sequence
  Description of Artificial Sequence: Synthetic oligonucleotide
  Antisense strand to SEQ ID NO: 1681837
cuuuggaggagcauucccu

SEQ ID NO: 1681839 - RNA, 19 nt, Artificial Sequence
  Description of Artificial Sequence: Synthetic oligonucleotide
  Sense strand starting at position 2853 of SEQ ID NO: 1561570
acguauauacguguacgua

SEQ ID NO: 1681840 - RNA, 19 nt, Artificial Sequence
  Description of Artificial Sequence: Synthetic oligonucleotide
  Antisense strand to SEQ ID NO: 1681839
uacguacacguauauacgu

SEQ ID NO: 1681841 - RNA, 19 nt, Artificial Sequence
  Description of Artificial Sequence: Synthetic oligonucleotide
  Sense strand starting at position 2854 of SEQ ID NO: 1561570
cguauauacguguacguau

SEQ ID NO: 1681842 - RNA, 19 nt, Artificial Sequence
  Description of Artificial Sequence: Synthetic oligonucleotide
  Antisense strand to SEQ ID NO: 1681841
auacguacacguauauacg

SEQ ID NO: 1681843 - RNA, 19 nt, Artificial Sequence
  Description of Artificial Sequence: Synthetic oligonucleotide
  Sense strand starting at position 3119 of SEQ ID NO: 1561570
ugacaaagaugccagugaa

SEQ ID NO: 1681844 - RNA, 19 nt, Artificial Sequence
  Description of Artificial Sequence: Synthetic oligonucleotide
  Antisense strand to SEQ ID NO: 1681843
uucacuggcaucuuuguca

SEQ ID NO: 1681845 - RNA, 19 nt, Artificial Sequence
  Description of Artificial Sequence: Synthetic oligonucleotide
  Sense strand starting at position 3213 of SEQ ID NO: 1561570
ugcugauuccauugcauuu

SEQ ID NO: 1681846 - RNA, 19 nt, Artificial Sequence
  Description of Artificial Sequence: Synthetic oligonucleotide
  Antisense strand to SEQ ID NO: 1681845
aaaugcaauggaaucagca

SEQ ID NO: 1681847 - RNA, 19 nt, Artificial Sequence
  Description of Artificial Sequence: Synthetic oligonucleotide
  Sense strand starting at position 3264 of SEQ ID NO: 1561570
cucugucacuuagagaaga

SEQ ID NO: 1681848 - RNA, 19 nt, Artificial Sequence
  Description of Artificial Sequence: Synthetic oligonucleotide
  Antisense strand to SEQ ID NO: 1681847
ucuucucuaagugacagag

SEQ ID NO: 1681849 - RNA, 19 nt, Artificial Sequence
  Description of Artificial Sequence: Synthetic oligonucleotide
  Sense strand starting at position 3670 of SEQ ID NO: 1561570
gccaaugcucccgguugaa

SEQ ID NO: 1681850 - RNA, 19 nt, Artificial Sequence
  Description of Artificial Sequence: Synthetic oligonucleotide
  Antisense strand to SEQ ID NO: 1681849
uucaaccgggagcauuggc

SEQ ID NO: 1681851 - RNA, 19 nt, Artificial Sequence
  Description of Artificial Sequence: Synthetic oligonucleotide
  Sense strand starting at position 3673 of SEQ ID NO: 1561570
aaugcucccgguugaauaa

SEQ ID NO: 1681852 - RNA, 19 nt, Artificial Sequence
  Description of Artificial Sequence: Synthetic oligonucleotide
  Antisense strand to SEQ ID NO: 1681851
uuauucaaccgggagcauu

SEQ ID NO: 1681853 - RNA, 19 nt, Artificial Sequence
  Description of Artificial Sequence: Synthetic oligonucleotide
  Sense strand starting at position 3733 of SEQ ID NO: 1561570
gcgccuuguccugcuacau

SEQ ID NO: 1681854 - RNA, 19 nt, Artificial Sequence
  Description of Artificial Sequence: Synthetic oligonucleotide
  Antisense strand to SEQ ID NO: 1681853
auguagcaggacaaggcgc

SEQ ID NO: 1681855 - RNA, 19 nt, Artificial Sequence
  Description of Artificial Sequence: Synthetic oligonucleotide
  Sense strand starting at position 3734 of SEQ ID NO: 1561570
cgccuuguccugcuacauu

SEQ ID NO: 1681856 - RNA, 19 nt, Artificial Sequence
  Description of Artificial Sequence: Synthetic oligonucleotide
  Antisense strand to SEQ ID NO: 1681855
aauguagcaggacaaggcg

SEQ ID NO: 1681857 - RNA, 19 nt, Artificial Sequence
  Description of Artificial Sequence: Synthetic oligonucleotide
  Sense strand starting at position 3777 of SEQ ID NO: 1561570
aggugauugguggaugguu

SEQ ID NO: 1681858 - RNA, 19 nt, Artificial Sequence
  Description of Artificial Sequence: Synthetic oligonucleotide
  Antisense strand to SEQ ID NO: 1681857
aaccauccaccaaucaccu

SEQ ID NO: 1681859 - RNA, 19 nt, Artificial Sequence
  Description of Artificial Sequence: Synthetic oligonucleotide
  Sense strand starting at position 3779 of SEQ ID NO: 1561570
gugauugguggaugguuga

SEQ ID NO: 1681860 - RNA, 19 nt, Artificial Sequence
  Description of Artificial Sequence: Synthetic oligonucleotide
  Antisense strand to SEQ ID NO: 1681859
ucaaccauccaccaaucac

SEQ ID NO: 1681861 - RNA, 19 nt, Artificial Sequence
  Description of Artificial Sequence: Synthetic oligonucleotide
  Sense strand starting at position 137 of SEQ ID NO: 1561571
gcaugucuccaguugcuuu

SEQ ID NO: 1681862 - RNA, 19 nt, Artificial Sequence
  Description of Artificial Sequence: Synthetic oligonucleotide
  Antisense strand to SEQ ID NO: 1681861
aaagcaacuggagacaugc

SEQ ID NO: 1681863 - RNA, 19 nt, Artificial Sequence
  Description of Artificial Sequence: Synthetic oligonucleotide
  Sense strand starting at position 190 of SEQ ID NO: 1561571
uuucguugucucuuggcaa

SEQ ID NO: 1681864 - RNA, 19 nt, Artificial Sequence
  Description of Artificial Sequence: Synthetic oligonucleotide
  Antisense strand to SEQ ID NO: 1681863
uugccaagagacaacgaaa

SEQ ID NO: 1681865 - RNA, 19 nt, Artificial Sequence
  Description of Artificial Sequence: Synthetic oligonucleotide
  Sense strand starting at position 191 of SEQ ID NO: 1561571
uucguugucucuuggcaaa

SEQ ID NO: 1681866 - RNA, 19 nt, Artificial Sequence
  Description of Artificial Sequence: Synthetic oligonucleotide
  Antisense strand to SEQ ID NO: 1681865
uuugccaagagacaacgaa

SEQ ID NO: 1681867 - RNA, 19 nt, Artificial Sequence
  Description of Artificial Sequence: Synthetic oligonucleotide
  Sense strand starting at position 193 of SEQ ID NO: 1561571
cguugucucuuggcaaauc

SEQ ID NO: 1681868 - RNA, 19 nt, Artificial Sequence
  Description of Artificial Sequence: Synthetic oligonucleotide
  Antisense strand to SEQ ID NO: 1681867
gauuugccaagagacaacg

SEQ ID NO: 1681869 - RNA, 19 nt, Artificial Sequence
  Description of Artificial Sequence: Synthetic oligonucleotide
  Sense strand starting at position 240 of SEQ ID NO: 1561571
uuaugagucuuucucauuc

SEQ ID NO: 1681870 - RNA, 19 nt, Artificial Sequence
  Description of Artificial Sequence: Synthetic oligonucleotide
  Antisense strand to SEQ ID NO: 1681869
gaaugagaaagacucauaa

SEQ ID NO: 1681871 - RNA, 19 nt, Artificial Sequence
  Description of Artificial Sequence: Synthetic oligonucleotide
  Sense strand starting at position 242 of SEQ ID NO: 1561571
augagucuuucucauucuu

SEQ ID NO: 1681872 - RNA, 19 nt, Artificial Sequence
  Description of Artificial Sequence: Synthetic oligonucleotide
  Antisense strand to SEQ ID NO: 1681871
aagaaugagaaagacucau

SEQ ID NO: 1681873 - RNA, 19 nt, Artificial Sequence
  Description of Artificial Sequence: Synthetic oligonucleotide
  Sense strand starting at position 317 of SEQ ID NO: 1561571
acaugacgguuuggaguaa

SEQ ID NO: 1681874 - RNA, 19 nt, Artificial Sequence
  Description of Artificial Sequence: Synthetic oligonucleotide
  Antisense strand to SEQ ID NO: 1681873
uuacuccaaaccgucaugu

SEQ ID NO: 1681875 - RNA, 19 nt, Artificial Sequence
  Description of Artificial Sequence: Synthetic oligonucleotide
  Sense strand starting at position 321 of SEQ ID NO: 1561571
gacgguuuggaguaagaug

SEQ ID NO: 1681876 - RNA, 19 nt, Artificial Sequence
  Description of Artificial Sequence: Synthetic oligonucleotide
  Antisense strand to SEQ ID NO: 1681875
caucuuacuccaaaccguc

SEQ ID NO: 1681877 - RNA, 19 nt, Artificial Sequence
  Description of Artificial Sequence: Synthetic oligonucleotide
  Sense strand starting at position 329 of SEQ ID NO: 1561571
ggaguaagauggcuacaua

SEQ ID NO: 1681878 - RNA, 19 nt, Artificial Sequence
  Description of Artificial Sequence: Synthetic oligonucleotide
  Antisense strand to SEQ ID NO: 1681877
uauguagccaucuuacucc

SEQ ID NO: 1681879 - RNA, 19 nt, Artificial Sequence
  Description of Artificial Sequence: Synthetic oligonucleotide
  Sense strand starting at position 332 of SEQ ID NO: 1561571
guaagauggcuacauacca

SEQ ID NO: 1681880 - RNA, 19 nt, Artificial Sequence
  Description of Artificial Sequence: Synthetic oligonucleotide
  Antisense strand to SEQ ID NO: 1681879
ugguauguagccaucuuac

SEQ ID NO: 1681881 - RNA, 19 nt, Artificial Sequence
  Description of Artificial Sequence: Synthetic oligonucleotide
  Sense strand starting at position 434 of SEQ ID NO: 1561571
gacuguuacuuuguggaug

SEQ ID NO: 1681882 - RNA, 19 nt, Artificial Sequence
  Description of Artificial Sequence: Synthetic oligonucleotide
  Antisense strand to SEQ ID NO: 1681881
cauccacaaaguaacaguc

SEQ ID NO: 1681883 - RNA, 19 nt, Artificial Sequence
  Description of Artificial Sequence: Synthetic oligonucleotide
  Sense strand starting at position 439 of SEQ ID NO: 1561571
uuacuuuguggaugcagaa

SEQ ID NO: 1681884 - RNA, 19 nt, Artificial Sequence
  Description of Artificial Sequence: Synthetic oligonucleotide
  Antisense strand to SEQ ID NO: 1681883
uucugcauccacaaaguaa

SEQ ID NO: 1681885 - RNA, 19 nt, Artificial Sequence
  Description of Artificial Sequence: Synthetic oligonucleotide
  Sense strand starting at position 677 of SEQ ID NO: 1561571
ucaguuaaccagggacaca

SEQ ID NO: 1681886 - RNA, 19 nt, Artificial Sequence
  Description of Artificial Sequence: Synthetic oligonucleotide
  Antisense strand to SEQ ID NO: 1681885
ugugucccugguuaacuga

SEQ ID NO: 1681887 - RNA, 19 nt, Artificial Sequence
  Description of Artificial Sequence: Synthetic oligonucleotide
  Sense strand starting at position 936 of SEQ ID NO: 1561571
guguaaagcugaccauuuc

SEQ ID NO: 1681888 - RNA, 19 nt, Artificial Sequence
  Description of Artificial Sequence: Synthetic oligonucleotide
  Antisense strand to SEQ ID NO: 1681887
gaaauggucagcuuuacac

SEQ ID NO: 1681889 - RNA, 19 nt, Artificial Sequence
  Description of Artificial Sequence: Synthetic oligonucleotide
  Sense strand starting at position 1318 of SEQ ID NO: 1561571
gucuuugugucuuauuucu

SEQ ID NO: 1681890 - RNA, 19 nt, Artificial Sequence
  Description of Artificial Sequence: Synthetic oligonucleotide
  Antisense strand to SEQ ID NO: 1681889
agaaauaagacacaaagac

SEQ ID NO: 1681891 - RNA, 19 nt, Artificial Sequence
  Description of Artificial Sequence: Synthetic oligonucleotide
  Sense strand starting at position 1617 of SEQ ID NO: 1561571
ggccgaagugggcgagaau

SEQ ID NO: 1681892 - RNA, 19 nt, Artificial Sequence
  Description of Artificial Sequence: Synthetic oligonucleotide
  Antisense strand to SEQ ID NO: 1681891
auucucgcccacuucggcc

SEQ ID NO: 1681893 - RNA, 19 nt, Artificial Sequence
  Description of Artificial Sequence: Synthetic oligonucleotide
  Sense strand starting at position 2710 of SEQ ID NO: 1561571
ucaguuaguugucucagca

SEQ ID NO: 1681894 - RNA, 19 nt, Artificial Sequence
  Description of Artificial Sequence: Synthetic oligonucleotide
  Antisense strand to SEQ ID NO: 1681893
ugcugagacaacuaacuga

SEQ ID NO: 1681895 - RNA, 19 nt, Artificial Sequence
  Description of Artificial Sequence: Synthetic oligonucleotide
  Sense strand starting at position 2714 of SEQ ID NO: 1561571
uuaguugucucagcacguu

SEQ ID NO: 1681896 - RNA, 19 nt, Artificial Sequence
  Description of Artificial Sequence: Synthetic oligonucleotide
  Antisense strand to SEQ ID NO: 1681895
aacgugcugagacaacuaa

SEQ ID NO: 1681897 - RNA, 19 nt, Artificial Sequence
  Description of Artificial Sequence: Synthetic oligonucleotide
  Sense strand starting at position 2726 of SEQ ID NO: 1561571
gcacguuuguggaagagau

SEQ ID NO: 1681898 - RNA, 19 nt, Artificial Sequence
  Description of Artificial Sequence: Synthetic oligonucleotide
  Antisense strand to SEQ ID NO: 1681897
aucucuuccacaaacgugc

SEQ ID NO: 1681899 - RNA, 19 nt, Artificial Sequence
  Description of Artificial Sequence: Synthetic oligonucleotide
  Sense strand starting at position 3075 of SEQ ID NO: 1561571
acuuuccaauuguugagaa

SEQ ID NO: 1681900 - RNA, 19 nt, Artificial Sequence
  Description of Artificial Sequence: Synthetic oligonucleotide
  Antisense strand to SEQ ID NO: 1681899
uucucaacaauuggaaagu

SEQ ID NO: 1681901 - RNA, 19 nt, Artificial Sequence
  Description of Artificial Sequence: Synthetic oligonucleotide
  Sense strand starting at position 3076 of SEQ ID NO: 1561571
cuuuccaauuguugagaaa

SEQ ID NO: 1681902 - RNA, 19 nt, Artificial Sequence
  Description of Artificial Sequence: Synthetic oligonucleotide
  Antisense strand to SEQ ID NO: 1681901
uuucucaacaauuggaaag

SEQ ID NO: 1681903 - RNA, 19 nt, Artificial Sequence
  Description of Artificial Sequence: Synthetic oligonucleotide
  Sense strand starting at position 3192 of SEQ ID NO: 1561571
agccuuaggccagauuaug

SEQ ID NO: 1681904 - RNA, 19 nt, Artificial Sequence
  Description of Artificial Sequence: Synthetic oligonucleotide
  Antisense strand to SEQ ID NO: 1681903
cauaaucuggccuaaggcu

SEQ ID NO: 1681905 - RNA, 19 nt, Artificial Sequence
  Description of Artificial Sequence: Synthetic oligonucleotide
  Sense strand starting at position 3200 of SEQ ID NO: 1561571
gccagauuaugaugcgaaa

SEQ ID NO: 1681906 - RNA, 19 nt, Artificial Sequence
  Description of Artificial Sequence: Synthetic oligonucleotide
  Antisense strand to SEQ ID NO: 1681905
uuucgcaucauaaucuggc

SEQ ID NO: 1681907 - RNA, 19 nt, Artificial Sequence
  Description of Artificial Sequence: Synthetic oligonucleotide
  Sense strand starting at position 3203 of SEQ ID NO: 1561571
agauuaugaugcgaaauag

SEQ ID NO: 1681908 - RNA, 19 nt, Artificial Sequence
  Description of Artificial Sequence: Synthetic oligonucleotide
  Antisense strand to SEQ ID NO: 1681907
cuauuucgcaucauaaucu

SEQ ID NO: 1681909 - RNA, 19 nt, Artificial Sequence
  Description of Artificial Sequence: Synthetic oligonucleotide
  Sense strand starting at position 3592 of SEQ ID NO: 1561571
gaggauagccacuggcaaa

SEQ ID NO: 1681910 - RNA, 19 nt, Artificial Sequence
  Description of Artificial Sequence: Synthetic oligonucleotide
  Antisense strand to SEQ ID NO: 1681909
uuugccaguggcuauccuc

SEQ ID NO: 1681911 - RNA, 19 nt, Artificial Sequence
  Description of Artificial Sequence: Synthetic oligonucleotide
  Sense strand starting at position 3630 of SEQ ID NO: 1561571
ggaucagcguuccauagua

SEQ ID NO: 1681912 - RNA, 19 nt, Artificial Sequence
  Description of Artificial Sequence: Synthetic oligonucleotide
  Antisense strand to SEQ ID NO: 1681911
uacuauggaacgcugaucc

SEQ ID NO: 1681913 - RNA, 19 nt, Artificial Sequence
  Description of Artificial Sequence: Synthetic oligonucleotide
  Sense strand starting at position 3632 of SEQ ID NO: 1561571
aucagcguuccauaguaga

SEQ ID NO: 1681914 - RNA, 19 nt, Artificial Sequence
  Description of Artificial Sequence: Synthetic oligonucleotide
  Antisense strand to SEQ ID NO: 1681913
ucuacuauggaacgcugau

SEQ ID NO: 1681915 - RNA, 19 nt, Artificial Sequence
  Description of Artificial Sequence: Synthetic oligonucleotide
  Sense strand starting at position 3645 of SEQ ID NO: 1561571
aguagagacguuuagguuu

SEQ ID NO: 1681916 - RNA, 19 nt, Artificial Sequence
  Description of Artificial Sequence: Synthetic oligonucleotide
  Antisense strand to SEQ ID NO: 1681915
aaaccuaaacgucucuacu

SEQ ID NO: 1681917 - RNA, 19 nt, Artificial Sequence
  Description of Artificial Sequence: Synthetic oligonucleotide
  Sense strand starting at position 3679 of SEQ ID NO: 1561571
acagaagcuuuaggacaau

SEQ ID NO: 1681918 - RNA, 19 nt, Artificial Sequence
  Description of Artificial Sequence: Synthetic oligonucleotide
  Antisense strand to SEQ ID NO: 1681917
auuguccuaaagcuucugu

SEQ ID NO: 1681919 - RNA, 19 nt, Artificial Sequence
  Description of Artificial Sequence: Synthetic oligonucleotide
  Sense strand starting at position 3734 of SEQ ID NO: 1561571
caaguugauuggugacaga

SEQ ID NO: 1681920 - RNA, 19 nt, Artificial Sequence
  Description of Artificial Sequence: Synthetic oligonucleotide
  Antisense strand to SEQ ID NO: 1681919
ucugucaccaaucaacuug

SEQ ID NO: 1681921 - RNA, 19 nt, Artificial Sequence
  Description of Artificial Sequence: Synthetic oligonucleotide
  Sense strand starting at position 3745 of SEQ ID NO: 1561571
gugacagagugauacacuu

SEQ ID NO: 1681922 - RNA, 19 nt, Artificial Sequence
  Description of Artificial Sequence: Synthetic oligonucleotide
  Antisense strand to SEQ ID NO: 1681921
aaguguaucacucugucac

SEQ ID NO: 1681923 - RNA, 19 nt, Artificial Sequence
  Description of Artificial Sequence: Synthetic oligonucleotide
  Sense strand starting at position 3801 of SEQ ID NO: 1561571
augaucucaggaggucuua

SEQ ID NO: 1681924 - RNA, 19 nt, Artificial Sequence
  Description of Artificial Sequence: Synthetic oligonucleotide
  Antisense strand to SEQ ID NO: 1681923
uaagaccuccugagaucau

SEQ ID NO: 1681925 - RNA, 19 nt, Artificial Sequence
  Description of Artificial Sequence: Synthetic oligonucleotide
  Sense strand starting at position 3828 of SEQ ID NO: 1561571
guugcuuagucuuucuaau

SEQ ID NO: 1681926 - RNA, 19 nt, Artificial Sequence
  Description of Artificial Sequence: Synthetic oligonucleotide
  Antisense strand to SEQ ID NO: 1681925
auuagaaagacuaagcaac

SEQ ID NO: 1681927 - RNA, 19 nt, Artificial Sequence
  Description of Artificial Sequence: Synthetic oligonucleotide
  Sense strand starting at position 190 of SEQ ID NO: 1561572
aucaguucucaccagagua

SEQ ID NO: 1681928 - RNA, 19 nt, Artificial Sequence
  Description of Artificial Sequence: Synthetic oligonucleotide
  Antisense strand to SEQ ID NO: 1681927
uacucuggugagaacugau

SEQ ID NO: 1681929 - RNA, 19 nt, Artificial Sequence
  Description of Artificial Sequence: Synthetic oligonucleotide
  Sense strand starting at position 198 of SEQ ID NO: 1561572
ucaccagaguauucuguaa

SEQ ID NO: 1681930 - RNA, 19 nt, Artificial Sequence
  Description of Artificial Sequence: Synthetic oligonucleotide
  Antisense strand to SEQ ID NO: 1681929
uuacagaauacucugguga

SEQ ID NO: 1681931 - RNA, 19 nt, Artificial Sequence
  Description of Artificial Sequence: Synthetic oligonucleotide
  Sense strand starting at position 202 of SEQ ID NO: 1561572
cagaguauucuguaacugu

SEQ ID NO: 1681932 - RNA, 19 nt, Artificial Sequence
  Description of Artificial Sequence: Synthetic oligonucleotide
  Antisense strand to SEQ ID NO: 1681931
acaguuacagaauacucug

SEQ ID NO: 1681933 - RNA, 19 nt, Artificial Sequence
  Description of Artificial Sequence: Synthetic oligonucleotide
  Sense strand starting at position 205 of SEQ ID NO: 1561572
aguauucuguaacuguaaa

SEQ ID NO: 1681934 - RNA, 19 nt, Artificial Sequence
  Description of Artificial Sequence: Synthetic oligonucleotide
  Antisense strand to SEQ ID NO: 1681933
uuuacaguuacagaauacu

SEQ ID NO: 1681935 - RNA, 19 nt, Artificial Sequence
  Description of Artificial Sequence: Synthetic oligonucleotide
  Sense strand starting at position 404 of SEQ ID NO: 1561572
ucuugaugcuaagcauuau

SEQ ID NO: 1681936 - RNA, 19 nt, Artificial Sequence
  Description of Artificial Sequence: Synthetic oligonucleotide
  Antisense strand to SEQ ID NO: 1681935
auaaugcuuagcaucaaga

SEQ ID NO: 1681937 - RNA, 19 nt, Artificial Sequence
  Description of Artificial Sequence: Synthetic oligonucleotide
  Sense strand starting at position 434 of SEQ ID NO: 1561572
uguuguaaugcccaaccuu

SEQ ID NO: 1681938 - RNA, 19 nt, Artificial Sequence
  Description of Artificial Sequence: Synthetic oligonucleotide
  Antisense strand to SEQ ID NO: 1681937
aagguugggcauuacaaca

SEQ ID NO: 1681939 - RNA, 19 nt, Artificial Sequence
  Description of Artificial Sequence: Synthetic oligonucleotide
  Sense strand starting at position 508 of SEQ ID NO: 1561572
ucguuuccacaugaauaga

SEQ ID NO: 1681940 - RNA, 19 nt, Artificial Sequence
  Description of Artificial Sequence: Synthetic oligonucleotide
  Antisense strand to SEQ ID NO: 1681939
ucuauucauguggaaacga

SEQ ID NO: 1681941 - RNA, 19 nt, Artificial Sequence
  Description of Artificial Sequence: Synthetic oligonucleotide
  Sense strand starting at position 624 of SEQ ID NO: 1561572
uaacuuguguaagcagauu

SEQ ID NO: 1681942 - RNA, 19 nt, Artificial Sequence
  Description of Artificial Sequence: Synthetic oligonucleotide
  Antisense strand to SEQ ID NO: 1681941
aaucugcuuacacaaguua

SEQ ID NO: 1681943 - RNA, 19 nt, Artificial Sequence
  Description of Artificial Sequence: Synthetic oligonucleotide
  Sense strand starting at position 632 of SEQ ID NO: 1561572
guaagcagauucucaacau

SEQ ID NO: 1681944 - RNA, 19 nt, Artificial Sequence
  Description of Artificial Sequence: Synthetic oligonucleotide
  Antisense strand to SEQ ID NO: 1681943
auguugagaaucugcuuac

SEQ ID NO: 1681945 - RNA, 19 nt, Artificial Sequence
  Description of Artificial Sequence: Synthetic oligonucleotide
  Sense strand starting at position 662 of SEQ ID NO: 1561572
ccaauuaacugauaaggga

SEQ ID NO: 1681946 - RNA, 19 nt, Artificial Sequence
  Description of Artificial Sequence: Synthetic oligonucleotide
  Antisense strand to SEQ ID NO: 1681945
ucccuuaucaguuaauugg

SEQ ID NO: 1681947 - RNA, 19 nt, Artificial Sequence
  Description of Artificial Sequence: Synthetic oligonucleotide
  Sense strand starting at position 845 of SEQ ID NO: 1561572
uuuguuucucuguaaccau

SEQ ID NO: 1681948 - RNA, 19 nt, Artificial Sequence
  Description of Artificial Sequence: Synthetic oligonucleotide
  Antisense strand to SEQ ID NO: 1681947
augguuacagagaaacaaa

SEQ ID NO: 1681949 - RNA, 19 nt, Artificial Sequence
  Description of Artificial Sequence: Synthetic oligonucleotide
  Sense strand starting at position 1132 of SEQ ID NO: 1561572
uugcuauauugacugacuu

SEQ ID NO: 1681950 - RNA, 19 nt, Artificial Sequence
  Description of Artificial Sequence: Synthetic oligonucleotide
  Antisense strand to SEQ ID NO: 1681949
aagucagucaauauagcaa

SEQ ID NO: 1681951 - RNA, 19 nt, Artificial Sequence
  Description of Artificial Sequence: Synthetic oligonucleotide
  Sense strand starting at position 1205 of SEQ ID NO: 1561572
acaagagaauugccuccuu

SEQ ID NO: 1681952 - RNA, 19 nt, Artificial Sequence
  Description of Artificial Sequence: Synthetic oligonucleotide
  Antisense strand to SEQ ID NO: 1681951
aaggaggcaauucucuugu

SEQ ID NO: 1681953 - RNA, 19 nt, Artificial Sequence
  Description of Artificial Sequence: Synthetic oligonucleotide
  Sense strand starting at position 1210 of SEQ ID NO: 1561572
agaauugccuccuucgaac

SEQ ID NO: 1681954 - RNA, 19 nt, Artificial Sequence
  Description of Artificial Sequence: Synthetic oligonucleotide
  Antisense strand to SEQ ID NO: 1681953
guucgaaggaggcaauucu

SEQ ID NO: 1681955 - RNA, 19 nt, Artificial Sequence
  Description of Artificial Sequence: Synthetic oligonucleotide
  Sense strand starting at position 1416 of SEQ ID NO: 1561572
ggagcuccgccucauaauu

SEQ ID NO: 1681956 - RNA, 19 nt, Artificial Sequence
  Description of Artificial Sequence: Synthetic oligonucleotide
  Antisense strand to SEQ ID NO: 1681955
aauuaugaggcggagcucc

SEQ ID NO: 1681957 - RNA, 19 nt, Artificial Sequence
  Description of Artificial Sequence: Synthetic oligonucleotide
  Sense strand starting at position 1685 of SEQ ID NO: 1561572
acaauuaccugagcggaga

SEQ ID NO: 1681958 - RNA, 19 nt, Artificial Sequence
  Description of Artificial Sequence: Synthetic oligonucleotide
  Antisense strand to SEQ ID NO: 1681957
ucuccgcucagguaauugu

SEQ ID NO: 1681959 - RNA, 19 nt, Artificial Sequence
  Description of Artificial Sequence: Synthetic oligonucleotide
  Sense strand starting at position 1834 of SEQ ID NO: 1561572
gucacagagcuccagagua

SEQ ID NO: 1681960 - RNA, 19 nt, Artificial Sequence
  Description of Artificial Sequence: Synthetic oligonucleotide
  Antisense strand to SEQ ID NO: 1681959
uacucuggagcucugugac

SEQ ID NO: 1681961 - RNA, 19 nt, Artificial Sequence
  Description of Artificial Sequence: Synthetic oligonucleotide
  Sense strand starting at position 1881 of SEQ ID NO: 1561572
cccgacuucuggguucagu

SEQ ID NO: 1681962 - RNA, 19 nt, Artificial Sequence
  Description of Artificial Sequence: Synthetic oligonucleotide
  Antisense strand to SEQ ID NO: 1681961
acugaacccagaagucggg

SEQ ID NO: 1681963 - RNA, 19 nt, Artificial Sequence
  Description of Artificial Sequence: Synthetic oligonucleotide
  Sense strand starting at position 2041 of SEQ ID NO: 1561572
gaggucuucuacgcuauca

SEQ ID NO: 1681964 - RNA, 19 nt, Artificial Sequence
  Description of Artificial Sequence: Synthetic oligonucleotide
  Antisense strand to SEQ ID NO: 1681963
ugauagcguagaagaccuc

SEQ ID NO: 1681965 - RNA, 19 nt, Artificial Sequence
  Description of Artificial Sequence: Synthetic oligonucleotide
  Sense strand starting at position 2043 of SEQ ID NO: 1561572
ggucuucuacgcuaucauu

SEQ ID NO: 1681966 - RNA, 19 nt, Artificial Sequence
  Description of Artificial Sequence: Synthetic oligonucleotide
  Antisense strand to SEQ ID NO: 1681965
aaugauagcguagaagacc

SEQ ID NO: 1681967 - RNA, 19 nt, Artificial Sequence
  Description of Artificial Sequence: Synthetic oligonucleotide
  Sense strand starting at position 2056 of SEQ ID NO: 1561572
aucauucgaggcugaguuu

SEQ ID NO: 1681968 - RNA, 19 nt, Artificial Sequence
  Description of Artificial Sequence: Synthetic oligonucleotide
  Antisense strand to SEQ ID NO: 1681967
aaacucagccucgaaugau

SEQ ID NO: 1681969 - RNA, 19 nt, Artificial Sequence
  Description of Artificial Sequence: Synthetic oligonucleotide
  Sense strand starting at position 2077 of SEQ ID NO: 1561572
uggguaauguaguucccua

SEQ ID NO: 1681970 - RNA, 19 nt, Artificial Sequence
  Description of Artificial Sequence: Synthetic oligonucleotide
  Antisense strand to SEQ ID NO: 1681969
uagggaacuacauuaccca

SEQ ID NO: 1681971 - RNA, 19 nt, Artificial Sequence
  Description of Artificial Sequence: Synthetic oligonucleotide
  Sense strand starting at position 2081 of SEQ ID NO: 1561572
uaauguaguucccuaggca

SEQ ID NO: 1681972 - RNA, 19 nt, Artificial Sequence
  Description of Artificial Sequence: Synthetic oligonucleotide
  Antisense strand to SEQ ID NO: 1681971
ugccuagggaacuacauua

SEQ ID NO: 1681973 - RNA, 19 nt, Artificial Sequence
  Description of Artificial Sequence: Synthetic oligonucleotide
  Sense strand starting at position 2082 of SEQ ID NO: 1561572
aauguaguucccuaggcaa

SEQ ID NO: 1681974 - RNA, 19 nt, Artificial Sequence
  Description of Artificial Sequence: Synthetic oligonucleotide
  Antisense strand to SEQ ID NO: 1681973
uugccuagggaacuacauu

SEQ ID NO: 1681975 - RNA, 19 nt, Artificial Sequence
  Description of Artificial Sequence: Synthetic oligonucleotide
  Sense strand starting at position 2084 of SEQ ID NO: 1561572
uguaguucccuaggcaaca

SEQ ID NO: 1681976 - RNA, 19 nt, Artificial Sequence
  Description of Artificial Sequence: Synthetic oligonucleotide
  Antisense strand to SEQ ID NO: 1681975
uguugccuagggaacuaca

SEQ ID NO: 1681977 - RNA, 19 nt, Artificial Sequence
  Description of Artificial Sequence: Synthetic oligonucleotide
  Sense strand starting at position 2085 of SEQ ID NO: 1561572
guaguucccuaggcaacaa

SEQ ID NO: 1681978 - RNA, 19 nt, Artificial Sequence
  Description of Artificial Sequence: Synthetic oligonucleotide
  Antisense strand to SEQ ID NO: 1681977
uuguugccuagggaacuac

SEQ ID NO: 1681979 - RNA, 19 nt, Artificial Sequence
  Description of Artificial Sequence: Synthetic oligonucleotide
  Sense strand starting at position 2161 of SEQ ID NO: 1561572
ucgggaguauccuuaagau

SEQ ID NO: 1681980 - RNA, 19 nt, Artificial Sequence
  Description of Artificial Sequence: Synthetic oligonucleotide
  Antisense strand to SEQ ID NO: 1681979
aucuuaaggauacucccga

SEQ ID NO: 1681981 - RNA, 19 nt, Artificial Sequence
  Description of Artificial Sequence: Synthetic oligonucleotide
  Sense strand starting at position 2267 of SEQ ID NO: 1561572
agaaauuagccugagcaac

SEQ ID NO: 1681982 - RNA, 19 nt, Artificial Sequence
  Description of Artificial Sequence: Synthetic oligonucleotide
  Antisense strand to SEQ ID NO: 1681981
guugcucaggcuaauuucu

SEQ ID NO: 1681983 - RNA, 19 nt, Artificial Sequence
  Description of Artificial Sequence: Synthetic oligonucleotide
  Sense strand starting at position 2702 of SEQ ID NO: 1561572
aucucuuguacaugggagu

SEQ ID NO: 1681984 - RNA, 19 nt, Artificial Sequence
  Description of Artificial Sequence: Synthetic oligonucleotide
  Antisense strand to SEQ ID NO: 1681983
acucccauguacaagagau

SEQ ID NO: 1681985 - RNA, 19 nt, Artificial Sequence
  Description of Artificial Sequence: Synthetic oligonucleotide
  Sense strand starting at position 2899 of SEQ ID NO: 1561572
gguuauuggcuguaacuga

SEQ ID NO: 1681986 - RNA, 19 nt, Artificial Sequence
  Description of Artificial Sequence: Synthetic oligonucleotide
  Antisense strand to SEQ ID NO: 1681985
ucaguuacagccaauaacc

SEQ ID NO: 1681987 - RNA, 19 nt, Artificial Sequence
  Description of Artificial Sequence: Synthetic oligonucleotide
  Sense strand starting at position 2906 of SEQ ID NO: 1561572
ggcuguaacugauuacccu

SEQ ID NO: 1681988 - RNA, 19 nt, Artificial Sequence
  Description of Artificial Sequence: Synthetic oligonucleotide
  Antisense strand to SEQ ID NO: 1681987
aggguaaucaguuacagcc

SEQ ID NO: 1681989 - RNA, 19 nt, Artificial Sequence
  Description of Artificial Sequence: Synthetic oligonucleotide
  Sense strand starting at position 2907 of SEQ ID NO: 1561572
gcuguaacugauuacccua

SEQ ID NO: 1681990 - RNA, 19 nt, Artificial Sequence
  Description of Artificial Sequence: Synthetic oligonucleotide
  Antisense strand to SEQ ID NO: 1681989
uaggguaaucaguuacagc

SEQ ID NO: 1681991 - RNA, 19 nt, Artificial Sequence
  Description of Artificial Sequence: Synthetic oligonucleotide
  Sense strand starting at position 2953 of SEQ ID NO: 1561572
uaguguagauguucccaaa

SEQ ID NO: 1681992 - RNA, 19 nt, Artificial Sequence
  Description of Artificial Sequence: Synthetic oligonucleotide
  Antisense strand to SEQ ID NO: 1681991
uuugggaacaucuacacua

SEQ ID NO: 1681993 - RNA, 19 nt, Artificial Sequence
  Description of Artificial Sequence: Synthetic oligonucleotide
  Sense strand starting at position 3204 of SEQ ID NO: 1561572
acuggagucuuacuaguau

SEQ ID NO: 1681994 - RNA, 19 nt, Artificial Sequence
  Description of Artificial Sequence: Synthetic oligonucleotide
  Antisense strand to SEQ ID NO: 1681993
auacuaguaagacuccagu

SEQ ID NO: 1681995 - RNA, 19 nt, Artificial Sequence
  Description of Artificial Sequence: Synthetic oligonucleotide
  Sense strand starting at position 3467 of SEQ ID NO: 1561572
gagucaaaguuguucucuu

SEQ ID NO: 1681996 - RNA, 19 nt, Artificial Sequence
  Description of Artificial Sequence: Synthetic oligonucleotide
  Antisense strand to SEQ ID NO: 1681995
aagagaacaacuuugacuc

SEQ ID NO: 1681997 - RNA, 19 nt, Artificial Sequence
  Description of Artificial Sequence: Synthetic oligonucleotide
  Sense strand starting at position 3620 of SEQ ID NO: 1561572
gugauaccaucccuaggaa

SEQ ID NO: 1681998 - RNA, 19 nt, Artificial Sequence
  Description of Artificial Sequence: Synthetic oligonucleotide
  Antisense strand to SEQ ID NO: 1681997
uuccuagggaugguaucac

SEQ ID NO: 1681999 - RNA, 19 nt, Artificial Sequence
  Description of Artificial Sequence: Synthetic oligonucleotide
  Sense strand starting at position 3785 of SEQ ID NO: 1561572
aaccucuuugugggaagaa

SEQ ID NO: 1682000 - RNA, 19 nt, Artificial Sequence
  Description of Artificial Sequence: Synthetic oligonucleotide
  Antisense strand to SEQ ID NO: 1681999
uucuucccacaaagagguu

SEQ ID NO: 1682001 - RNA, 19 nt, Artificial Sequence
  Description of Artificial Sequence: Synthetic oligonucleotide
  Sense strand starting at position 3809 of SEQ ID NO: 1561572
agcugucagaaguguuuaa

SEQ ID NO: 1682002 - RNA, 19 nt, Artificial Sequence
  Description of Artificial Sequence: Synthetic oligonucleotide
  Antisense strand to SEQ ID NO: 1682001
uuaaacacuucugacagcu

SEQ ID NO: 1682003 - RNA, 19 nt, Artificial Sequence
  Description of Artificial Sequence: Synthetic oligonucleotide
  Sense strand starting at position 3813 of SEQ ID NO: 1561572
gucagaaguguuuaacaga

SEQ ID NO: 1682004 - RNA, 19 nt, Artificial Sequence
  Description of Artificial Sequence: Synthetic oligonucleotide
  Antisense strand to SEQ ID NO: 1682003
ucuguuaaacacuucugac

SEQ ID NO: 1682005 - RNA, 19 nt, Artificial Sequence
  Description of Artificial Sequence: Synthetic oligonucleotide
  Sense strand starting at position 3942 of SEQ ID NO: 1561572
ccauaaagacguugcugau

SEQ ID NO: 1682006 - RNA, 19 nt, Artificial Sequence
  Description of Artificial Sequence: Synthetic oligonucleotide
  Antisense strand to SEQ ID NO: 1682005
aucagcaacgucuuuaugg

SEQ ID NO: 1682007 - RNA, 19 nt, Artificial Sequence
  Description of Artificial Sequence: Synthetic oligonucleotide
  Sense strand starting at position 35 of SEQ ID NO: 1561573
ugggacucauucuucuuaa

SEQ ID NO: 1682008 - RNA, 19 nt, Artificial Sequence
  Description of Artificial Sequence: Synthetic oligonucleotide
  Antisense strand to SEQ ID NO: 1682007
uuaagaagaaugaguccca

SEQ ID NO: 1682009 - RNA, 19 nt, Artificial Sequence
  Description of Artificial Sequence: Synthetic oligonucleotide
  Sense strand starting at position 36 of SEQ ID NO: 1561573
gggacucauucuucuuaaa

SEQ ID NO: 1682010 - RNA, 19 nt, Artificial Sequence
  Description of Artificial Sequence: Synthetic oligonucleotide
  Antisense strand to SEQ ID NO: 1682009
uuuaagaagaaugaguccc

SEQ ID NO: 1682011 - RNA, 19 nt, Artificial Sequence
  Description of Artificial Sequence: Synthetic oligonucleotide
  Sense strand starting at position 120 of SEQ ID NO: 1561573
ucaucaggucacugagaua

SEQ ID NO: 1682012 - RNA, 19 nt, Artificial Sequence
  Description of Artificial Sequence: Synthetic oligonucleotide
  Antisense strand to SEQ ID NO: 1682011
uaucucagugaccugauga

SEQ ID NO: 1682013 - RNA, 19 nt, Artificial Sequence
  Description of Artificial Sequence: Synthetic oligonucleotide
  Sense strand starting at position 172 of SEQ ID NO: 1561573
aguuauuaugaauguacag

SEQ ID NO: 1682014 - RNA, 19 nt, Artificial Sequence
  Description of Artificial Sequence: Synthetic oligonucleotide
  Antisense strand to SEQ ID NO: 1682013
cuguacauucauaauaacu

SEQ ID NO: 1682015 - RNA, 19 nt, Artificial Sequence
  Description of Artificial Sequence: Synthetic oligonucleotide
  Sense strand starting at position 325 of SEQ ID NO: 1561573
gguccuuuccuaggugaca

SEQ ID NO: 1682016 - RNA, 19 nt, Artificial Sequence
  Description of Artificial Sequence: Synthetic oligonucleotide
  Antisense strand to SEQ ID NO: 1682015
ugucaccuaggaaaggacc

SEQ ID NO: 1682017 - RNA, 19 nt, Artificial Sequence
  Description of Artificial Sequence: Synthetic oligonucleotide
  Sense strand starting at position 398 of SEQ ID NO: 1561573
uaaauuugaugcuugugca

SEQ ID NO: 1682018 - RNA, 19 nt, Artificial Sequence
  Description of Artificial Sequence: Synthetic oligonucleotide
  Antisense strand to SEQ ID NO: 1682017
ugcacaagcaucaaauuua

SEQ ID NO: 1682019 - RNA, 19 nt, Artificial Sequence
  Description of Artificial Sequence: Synthetic oligonucleotide
  Sense strand starting at position 444 of SEQ ID NO: 1561573
agauguggcucucuuaacu

SEQ ID NO: 1682020 - RNA, 19 nt, Artificial Sequence
  Description of Artificial Sequence: Synthetic oligonucleotide
  Antisense strand to SEQ ID NO: 1682019
aguuaagagagccacaucu

SEQ ID NO: 1682021 - RNA, 19 nt, Artificial Sequence
  Description of Artificial Sequence: Synthetic oligonucleotide
  Sense strand starting at position 449 of SEQ ID NO: 1561573
uggcucucuuaacuaagaa

SEQ ID NO: 1682022 - RNA, 19 nt, Artificial Sequence
  Description of Artificial Sequence: Synthetic oligonucleotide
  Antisense strand to SEQ ID NO: 1682021
uucuuaguuaagagagcca

SEQ ID NO: 1682023 - RNA, 19 nt, Artificial Sequence
  Description of Artificial Sequence: Synthetic oligonucleotide
  Sense strand starting at position 486 of SEQ ID NO: 1561573
aauaaauguuugucaugag

SEQ ID NO: 1682024 - RNA, 19 nt, Artificial Sequence
  Description of Artificial Sequence: Synthetic oligonucleotide
  Antisense strand to SEQ ID NO: 1682023
cucaugacaaacauuuauu

SEQ ID NO: 1682025 - RNA, 19 nt, Artificial Sequence
  Description of Artificial Sequence: Synthetic oligonucleotide
  Sense strand starting at position 502 of SEQ ID NO: 1561573
gaggcagaggucugugaaa

SEQ ID NO: 1682026 - RNA, 19 nt, Artificial Sequence
  Description of Artificial Sequence: Synthetic oligonucleotide
  Antisense strand to SEQ ID NO: 1682025
uuucacagaccucugccuc

SEQ ID NO: 1682027 - RNA, 19 nt, Artificial Sequence
  Description of Artificial Sequence: Synthetic oligonucleotide
  Sense strand starting at position 526 of SEQ ID NO: 1561573
ccuguugcccauguguuau

SEQ ID NO: 1682028 - RNA, 19 nt, Artificial Sequence
  Description of Artificial Sequence: Synthetic oligonucleotide
  Antisense strand to SEQ ID NO: 1682027
auaacacaugggcaacagg

SEQ ID NO: 1682029 - RNA, 19 nt, Artificial Sequence
  Description of Artificial Sequence: Synthetic oligonucleotide
  Sense strand starting at position 686 of SEQ ID NO: 1561573
agguguaauccugacgguc

SEQ ID NO: 1682030 - RNA, 19 nt, Artificial Sequence
  Description of Artificial Sequence: Synthetic oligonucleotide
  Antisense strand to SEQ ID NO: 1682029
gaccgucaggauuacaccu

SEQ ID NO: 1682031 - RNA, 19 nt, Artificial Sequence
  Description of Artificial Sequence: Synthetic oligonucleotide
  Sense strand starting at position 844 of SEQ ID NO: 1561573
uguuucuccaguuaacgga

SEQ ID NO: 1682032 - RNA, 19 nt, Artificial Sequence
  Description of Artificial Sequence: Synthetic oligonucleotide
  Antisense strand to SEQ ID NO: 1682031
uccguuaacuggagaaaca

SEQ ID NO: 1682033 - RNA, 19 nt, Artificial Sequence
  Description of Artificial Sequence: Synthetic oligonucleotide
  Sense strand starting at position 1038 of SEQ ID NO: 1561573
agacaauacuauguagcua

SEQ ID NO: 1682034 - RNA, 19 nt, Artificial Sequence
  Description of Artificial Sequence: Synthetic oligonucleotide
  Antisense strand to SEQ ID NO: 1682033
uagcuacauaguauugucu

SEQ ID NO: 1682035 - RNA, 19 nt, Artificial Sequence
  Description of Artificial Sequence: Synthetic oligonucleotide
  Sense strand starting at position 1090 of SEQ ID NO: 1561573
agcucaauugucuaggaca

SEQ ID NO: 1682036 - RNA, 19 nt, Artificial Sequence
  Description of Artificial Sequence: Synthetic oligonucleotide
  Antisense strand to SEQ ID NO: 1682035
uguccuagacaauugagcu

SEQ ID NO: 1682037 - RNA, 19 nt, Artificial Sequence
  Description of Artificial Sequence: Synthetic oligonucleotide
  Sense strand starting at position 1143 of SEQ ID NO: 1561573
cuuggugaggcuuaaacca

SEQ ID NO: 1682038 - RNA, 19 nt, Artificial Sequence
  Description of Artificial Sequence: Synthetic oligonucleotide
  Antisense strand to SEQ ID NO: 1682037
ugguuuaagccucaccaag

SEQ ID NO: 1682039 - RNA, 19 nt, Artificial Sequence
  Description of Artificial Sequence: Synthetic oligonucleotide
  Sense strand starting at position 1170 of SEQ ID NO: 1561573
agaacucauuacguaaauu

SEQ ID NO: 1682040 - RNA, 19 nt, Artificial Sequence
  Description of Artificial Sequence: Synthetic oligonucleotide
  Antisense strand to SEQ ID NO: 1682039
aauuuacguaaugaguucu

SEQ ID NO: 1682041 - RNA, 19 nt, Artificial Sequence
  Description of Artificial Sequence: Synthetic oligonucleotide
  Sense strand starting at position 1204 of SEQ ID NO: 1561573
ugccuaggcucauccagaa

SEQ ID NO: 1682042 - RNA, 19 nt, Artificial Sequence
  Description of Artificial Sequence: Synthetic oligonucleotide
  Antisense strand to SEQ ID NO: 1682041
uucuggaugagccuaggca

SEQ ID NO: 1682043 - RNA, 19 nt, Artificial Sequence
  Description of Artificial Sequence: Synthetic oligonucleotide
  Sense strand starting at position 1368 of SEQ ID NO: 1561573
ggguccuggcucugggaau

SEQ ID NO: 1682044 - RNA, 19 nt, Artificial Sequence
  Description of Artificial Sequence: Synthetic oligonucleotide
  Antisense strand to SEQ ID NO: 1682043
auucccagagccaggaccc

SEQ ID NO: 1682045 - RNA, 19 nt, Artificial Sequence
  Description of Artificial Sequence: Synthetic oligonucleotide
  Sense strand starting at position 1450 of SEQ ID NO: 1561573
cguaguaacaaaggaucaa

SEQ ID NO: 1682046 - RNA, 19 nt, Artificial Sequence
  Description of Artificial Sequence: Synthetic oligonucleotide
  Antisense strand to SEQ ID NO: 1682045
uugauccuuuguuacuacg

SEQ ID NO: 1682047 - RNA, 19 nt, Artificial Sequence
  Description of Artificial Sequence: Synthetic oligonucleotide
  Sense strand starting at position 2211 of SEQ ID NO: 1561573
cucagcagucagggaaaua

SEQ ID NO: 1682048 - RNA, 19 nt, Artificial Sequence
  Description of Artificial Sequence: Synthetic oligonucleotide
  Antisense strand to SEQ ID NO: 1682047
uauuucccugacugcugag

SEQ ID NO: 1682049 - RNA, 19 nt, Artificial Sequence
  Description of Artificial Sequence: Synthetic oligonucleotide
  Sense strand starting at position 2258 of SEQ ID NO: 1561573
gguaauuggauccgggaaa

SEQ ID NO: 1682050 - RNA, 19 nt, Artificial Sequence
  Description of Artificial Sequence: Synthetic oligonucleotide
  Antisense strand to SEQ ID NO: 1682049
uuucccggauccaauuacc

SEQ ID NO: 1682051 - RNA, 19 nt, Artificial Sequence
  Description of Artificial Sequence: Synthetic oligonucleotide
  Sense strand starting at position 2271 of SEQ ID NO: 1561573
gggaaaguuccuugcuauu

SEQ ID NO: 1682052 - RNA, 19 nt, Artificial Sequence
  Description of Artificial Sequence: Synthetic oligonucleotide
  Antisense strand to SEQ ID NO: 1682051
aauagcaaggaacuuuccc

SEQ ID NO: 1682053 - RNA, 19 nt, Artificial Sequence
  Description of Artificial Sequence: Synthetic oligonucleotide
  Sense strand starting at position 2326 of SEQ ID NO: 1561573
aguugucuacggcaggaau

SEQ ID NO: 1682054 - RNA, 19 nt, Artificial Sequence
  Description of Artificial Sequence: Synthetic oligonucleotide
  Antisense strand to SEQ ID NO: 1682053
auuccugccguagacaacu

SEQ ID NO: 1682055 - RNA, 19 nt, Artificial Sequence
  Description of Artificial Sequence: Synthetic oligonucleotide
  Sense strand starting at position 2476 of SEQ ID NO: 1561573
ugcucagcuccugagacuu

SEQ ID NO: 1682056 - RNA, 19 nt, Artificial Sequence
  Description of Artificial Sequence: Synthetic oligonucleotide
  Antisense strand to SEQ ID NO: 1682055
aagucucaggagcugagca

SEQ ID NO: 1682057 - RNA, 19 nt, Artificial Sequence
  Description of Artificial Sequence: Synthetic oligonucleotide
  Sense strand starting at position 2524 of SEQ ID NO: 1561573
agaggagugugcuuaaaca

SEQ ID NO: 1682058 - RNA, 19 nt, Artificial Sequence
  Description of Artificial Sequence: Synthetic oligonucleotide
  Antisense strand to SEQ ID NO: 1682057
uguuuaagcacacuccucu

SEQ ID NO: 1682059 - RNA, 19 nt, Artificial Sequence
  Description of Artificial Sequence: Synthetic oligonucleotide
  Sense strand starting at position 2722 of SEQ ID NO: 1561573
auuguaacagugcauauaa

SEQ ID NO: 1682060 - RNA, 19 nt, Artificial Sequence
  Description of Artificial Sequence: Synthetic oligonucleotide
  Antisense strand to SEQ ID NO: 1682059
uuauaugcacuguuacaau

SEQ ID NO: 1682061 - RNA, 19 nt, Artificial Sequence
  Description of Artificial Sequence: Synthetic oligonucleotide
  Sense strand starting at position 2724 of SEQ ID NO: 1561573
uguaacagugcauauaagu

SEQ ID NO: 1682062 - RNA, 19 nt, Artificial Sequence
  Description of Artificial Sequence: Synthetic oligonucleotide
  Antisense strand to SEQ ID NO: 1682061
acuuauaugcacuguuaca

SEQ ID NO: 1682063 - RNA, 19 nt, Artificial Sequence
  Description of Artificial Sequence: Synthetic oligonucleotide
  Sense strand starting at position 2834 of SEQ ID NO: 1561573
agagauuuauucuaagcua

SEQ ID NO: 1682064 - RNA, 19 nt, Artificial Sequence
  Description of Artificial Sequence: Synthetic oligonucleotide
  Antisense strand to SEQ ID NO: 1682063
uagcuuagaauaaaucucu

SEQ ID NO: 1682065 - RNA, 19 nt, Artificial Sequence
  Description of Artificial Sequence: Synthetic oligonucleotide
  Sense strand starting at position 2883 of SEQ ID NO: 1561573
acauguguccaaggugaug

SEQ ID NO: 1682066 - RNA, 19 nt, Artificial Sequence
  Description of Artificial Sequence: Synthetic oligonucleotide
  Antisense strand to SEQ ID NO: 1682065
caucaccuuggacacaugu

SEQ ID NO: 1682067 - RNA, 19 nt, Artificial Sequence
  Description of Artificial Sequence: Synthetic oligonucleotide
  Sense strand starting at position 2903 of SEQ ID NO: 1561573
ggaacagcuuguucuuaga

SEQ ID NO: 1682068 - RNA, 19 nt, Artificial Sequence
  Description of Artificial Sequence: Synthetic oligonucleotide
  Antisense strand to SEQ ID NO: 1682067
ucuaagaacaagcuguucc

SEQ ID NO: 1682069 - RNA, 19 nt, Artificial Sequence
  Description of Artificial Sequence: Synthetic oligonucleotide
  Sense strand starting at position 2969 of SEQ ID NO: 1561573
gcugcuuugguucagaaag

SEQ ID NO: 1682070 - RNA, 19 nt, Artificial Sequence
  Description of Artificial Sequence: Synthetic oligonucleotide
  Antisense strand to SEQ ID NO: 1682069
cuuucugaaccaaagcagc

SEQ ID NO: 1682071 - RNA, 19 nt, Artificial Sequence
  Description of Artificial Sequence: Synthetic oligonucleotide
  Sense strand starting at position 3087 of SEQ ID NO: 1561573
agaggaaauguucacguua

SEQ ID NO: 1682072 - RNA, 19 nt, Artificial Sequence
  Description of Artificial Sequence: Synthetic oligonucleotide
  Antisense strand to SEQ ID NO: 1682071
uaacgugaacauuuccucu

SEQ ID NO: 1682073 - RNA, 19 nt, Artificial Sequence
  Description of Artificial Sequence: Synthetic oligonucleotide
  Sense strand starting at position 3117 of SEQ ID NO: 1561573
uguggagaccaauguuguu

SEQ ID NO: 1682074 - RNA, 19 nt, Artificial Sequence
  Description of Artificial Sequence: Synthetic oligonucleotide
  Antisense strand to SEQ ID NO: 1682073
aacaacauuggucuccaca

SEQ ID NO: 1682075 - RNA, 19 nt, Artificial Sequence
  Description of Artificial Sequence: Synthetic oligonucleotide
  Sense strand starting at position 3148 of SEQ ID NO: 1561573
auuggcugcccuuagagau

SEQ ID NO: 1682076 - RNA, 19 nt, Artificial Sequence
  Description of Artificial Sequence: Synthetic oligonucleotide
  Antisense strand to SEQ ID NO: 1682075
aucucuaagggcagccaau

SEQ ID NO: 1682077 - RNA, 19 nt, Artificial Sequence
  Description of Artificial Sequence: Synthetic oligonucleotide
  Sense strand starting at position 3194 of SEQ ID NO: 1561573
accuuuaaacagugcgaga

SEQ ID NO: 1682078 - RNA, 19 nt, Artificial Sequence
  Description of Artificial Sequence: Synthetic oligonucleotide
  Antisense strand to SEQ ID NO: 1682077
ucucgcacuguuuaaaggu

SEQ ID NO: 1682079 - RNA, 19 nt, Artificial Sequence
  Description of Artificial Sequence: Synthetic oligonucleotide
  Sense strand starting at position 3199 of SEQ ID NO: 1561573
uaaacagugcgagauucuu

SEQ ID NO: 1682080 - RNA, 19 nt, Artificial Sequence
  Description of Artificial Sequence: Synthetic oligonucleotide
  Antisense strand to SEQ ID NO: 1682079
aagaaucucgcacuguuua

SEQ ID NO: 1682081 - RNA, 19 nt, Artificial Sequence
  Description of Artificial Sequence: Synthetic oligonucleotide
  Sense strand starting at position 3207 of SEQ ID NO: 1561573
gcgagauucuuacuuaauc

SEQ ID NO: 1682082 - RNA, 19 nt, Artificial Sequence
  Description of Artificial Sequence: Synthetic oligonucleotide
  Antisense strand to SEQ ID NO: 1682081
gauuaaguaagaaucucgc

SEQ ID NO: 1682083 - RNA, 19 nt, Artificial Sequence
  Description of Artificial Sequence: Synthetic oligonucleotide
  Sense strand starting at position 3208 of SEQ ID NO: 1561573
cgagauucuuacuuaaucu

SEQ ID NO: 1682084 - RNA, 19 nt, Artificial Sequence
  Description of Artificial Sequence: Synthetic oligonucleotide
  Antisense strand to SEQ ID NO: 1682083
agauuaaguaagaaucucg

SEQ ID NO: 1682085 - RNA, 19 nt, Artificial Sequence
  Description of Artificial Sequence: Synthetic oligonucleotide
  Sense strand starting at position 3389 of SEQ ID NO: 1561573
cacguuauuccagagucag

SEQ ID NO: 1682086 - RNA, 19 nt, Artificial Sequence
  Description of Artificial Sequence: Synthetic oligonucleotide
  Antisense strand to SEQ ID NO: 1682085
cugacucuggaauaacgug

SEQ ID NO: 1682087 - RNA, 19 nt, Artificial Sequence
  Description of Artificial Sequence: Synthetic oligonucleotide
  Sense strand starting at position 35 of SEQ ID NO: 1561574
ugggacucauucuucuuaa

SEQ ID NO: 1682088 - RNA, 19 nt, Artificial Sequence
  Description of Artificial Sequence: Synthetic oligonucleotide
  Antisense strand to SEQ ID NO: 1682087
uuaagaagaaugaguccca

SEQ ID NO: 1682089 - RNA, 19 nt, Artificial Sequence
  Description of Artificial Sequence: Synthetic oligonucleotide
  Sense strand starting at position 36 of SEQ ID NO: 1561574
gggacucauucuucuuaaa

SEQ ID NO: 1682090 - RNA, 19 nt, Artificial Sequence
  Description of Artificial Sequence: Synthetic oligonucleotide
  Antisense strand to SEQ ID NO: 1682089
uuuaagaagaaugaguccc

SEQ ID NO: 1682091 - RNA, 19 nt, Artificial Sequence
  Description of Artificial Sequence: Synthetic oligonucleotide
  Sense strand starting at position 120 of SEQ ID NO: 1561574
ucaucaggucacugagaua

SEQ ID NO: 1682092 - RNA, 19 nt, Artificial Sequence
  Description of Artificial Sequence: Synthetic oligonucleotide
  Antisense strand to SEQ ID NO: 1682091
uaucucagugaccugauga

SEQ ID NO: 1682093 - RNA, 19 nt, Artificial Sequence
  Description of Artificial Sequence: Synthetic oligonucleotide
  Sense strand starting at position 172 of SEQ ID NO: 1561574
aguuauuaugaauguacag

SEQ ID NO: 1682094 - RNA, 19 nt, Artificial Sequence
  Description of Artificial Sequence: Synthetic oligonucleotide
  Antisense strand to SEQ ID NO: 1682093
cuguacauucauaauaacu

SEQ ID NO: 1682095 - RNA, 19 nt, Artificial Sequence
  Description of Artificial Sequence: Synthetic oligonucleotide
  Sense strand starting at position 325 of SEQ ID NO: 1561574
gguccuuuccuaggugaca

SEQ ID NO: 1682096 - RNA, 19 nt, Artificial Sequence
  Description of Artificial Sequence: Synthetic oligonucleotide
  Antisense strand to SEQ ID NO: 1682095
ugucaccuaggaaaggacc

SEQ ID NO: 1682097 - RNA, 19 nt, Artificial Sequence
  Description of Artificial Sequence: Synthetic oligonucleotide
  Sense strand starting at position 398 of SEQ ID NO: 1561574
uaaauuugaugcuugugca

SEQ ID NO: 1682098 - RNA, 19 nt, Artificial Sequence
  Description of Artificial Sequence: Synthetic oligonucleotide
  Antisense strand to SEQ ID NO: 1682097
ugcacaagcaucaaauuua

SEQ ID NO: 1682099 - RNA, 19 nt, Artificial Sequence
  Description of Artificial Sequence: Synthetic oligonucleotide
  Sense strand starting at position 444 of SEQ ID NO: 1561574
agauguggcucucuuaacu

SEQ ID NO: 1682100 - RNA, 19 nt, Artificial Sequence
  Description of Artificial Sequence: Synthetic oligonucleotide
  Antisense strand to SEQ ID NO: 1682099
aguuaagagagccacaucu

SEQ ID NO: 1682101 - RNA, 19 nt, Artificial Sequence
  Description of Artificial Sequence: Synthetic oligonucleotide
  Sense strand starting at position 449 of SEQ ID NO: 1561574
uggcucucuuaacuaagaa

SEQ ID NO: 1682102 - RNA, 19 nt, Artificial Sequence
  Description of Artificial Sequence: Synthetic oligonucleotide
  Antisense strand to SEQ ID NO: 1682101
uucuuaguuaagagagcca

SEQ ID NO: 1682103 - RNA, 19 nt, Artificial Sequence
  Description of Artificial Sequence: Synthetic oligonucleotide
  Sense strand starting at position 486 of SEQ ID NO: 1561574
aauaaauguuugucaugag

SEQ ID NO: 1682104 - RNA, 19 nt, Artificial Sequence
  Description of Artificial Sequence: Synthetic oligonucleotide
  Antisense strand to SEQ ID NO: 1682103
cucaugacaaacauuuauu

SEQ ID NO: 1682105 - RNA, 19 nt, Artificial Sequence
  Description of Artificial Sequence: Synthetic oligonucleotide
  Sense strand starting at position 502 of SEQ ID NO: 1561574
gaggcagaggucugugaaa

SEQ ID NO: 1682106 - RNA, 19 nt, Artificial Sequence
  Description of Artificial Sequence: Synthetic oligonucleotide
  Antisense strand to SEQ ID NO: 1682105
uuucacagaccucugccuc

SEQ ID NO: 1682107 - RNA, 19 nt, Artificial Sequence
  Description of Artificial Sequence: Synthetic oligonucleotide
  Sense strand starting at position 526 of SEQ ID NO: 1561574
ccuguugcccauguguuau

SEQ ID NO: 1682108 - RNA, 19 nt, Artificial Sequence
  Description of Artificial Sequence: Synthetic oligonucleotide
  Antisense strand to SEQ ID NO: 1682107
auaacacaugggcaacagg

SEQ ID NO: 1682109 - RNA, 19 nt, Artificial Sequence
  Description of Artificial Sequence: Synthetic oligonucleotide
  Sense strand starting at position 686 of SEQ ID NO: 1561574
agguguaauccugacgguc

SEQ ID NO: 1682110 - RNA, 19 nt, Artificial Sequence
  Description of Artificial Sequence: Synthetic oligonucleotide
  Antisense strand to SEQ ID NO: 1682109
gaccgucaggauuacaccu

SEQ ID NO: 1682111 - RNA, 19 nt, Artificial Sequence
  Description of Artificial Sequence: Synthetic oligonucleotide
  Sense strand starting at position 844 of SEQ ID NO: 1561574
uguuucuccaguuaacgga

SEQ ID NO: 1682112 - RNA, 19 nt, Artificial Sequence
  Description of Artificial Sequence: Synthetic oligonucleotide
  Antisense strand to SEQ ID NO: 1682111
uccguuaacuggagaaaca

SEQ ID NO: 1682113 - RNA, 19 nt, Artificial Sequence
  Description of Artificial Sequence: Synthetic oligonucleotide
  Sense strand starting at position 1038 of SEQ ID NO: 1561574
agacaauacuauguagcua

SEQ ID NO: 1682114 - RNA, 19 nt, Artificial Sequence
  Description of Artificial Sequence: Synthetic oligonucleotide
  Antisense strand to SEQ ID NO: 1682113
uagcuacauaguauugucu

SEQ ID NO: 1682115 - RNA, 19 nt, Artificial Sequence
  Description of Artificial Sequence: Synthetic oligonucleotide
  Sense strand starting at position 1090 of SEQ ID NO: 1561574
agcucaauugucuaggaca

SEQ ID NO: 1682116 - RNA, 19 nt, Artificial Sequence
  Description of Artificial Sequence: Synthetic oligonucleotide
  Antisense strand to SEQ ID NO: 1682115
uguccuagacaauugagcu

SEQ ID NO: 1682117 - RNA, 19 nt, Artificial Sequence
  Description of Artificial Sequence: Synthetic oligonucleotide
  Sense strand starting at position 1143 of SEQ ID NO: 1561574
cuuggugaggcuuaaacca

SEQ ID NO: 1682118 - RNA, 19 nt, Artificial Sequence
  Description of Artificial Sequence: Synthetic oligonucleotide
  Antisense strand to SEQ ID NO: 1682117
ugguuuaagccucaccaag

SEQ ID NO: 1682119 - RNA, 19 nt, Artificial Sequence
  Description of Artificial Sequence: Synthetic oligonucleotide
  Sense strand starting at position 1170 of SEQ ID NO: 1561574
agaacucauuacguaaauu

SEQ ID NO: 1682120 - RNA, 19 nt, Artificial Sequence
  Description of Artificial Sequence: Synthetic oligonucleotide
  Antisense strand to SEQ ID NO: 1682119
aauuuacguaaugaguucu

SEQ ID NO: 1682121 - RNA, 19 nt, Artificial Sequence
  Description of Artificial Sequence: Synthetic oligonucleotide
  Sense strand starting at position 1204 of SEQ ID NO: 1561574
ugccuaggcucauccagaa

SEQ ID NO: 1682122 - RNA, 19 nt, Artificial Sequence
  Description of Artificial Sequence: Synthetic oligonucleotide
  Antisense strand to SEQ ID NO: 1682121
uucuggaugagccuaggca

SEQ ID NO: 1682123 - RNA, 19 nt, Artificial Sequence
  Description of Artificial Sequence: Synthetic oligonucleotide
  Sense strand starting at position 1368 of SEQ ID NO: 1561574
ggguccuggcucugggaau

SEQ ID NO: 1682124 - RNA, 19 nt, Artificial Sequence
  Description of Artificial Sequence: Synthetic oligonucleotide
  Antisense strand to SEQ ID NO: 1682123
auucccagagccaggaccc

SEQ ID NO: 1682125 - RNA, 19 nt, Artificial Sequence
  Description of Artificial Sequence: Synthetic oligonucleotide
  Sense strand starting at position 1450 of SEQ ID NO: 1561574
cguaguaacaaaggaucaa

SEQ ID NO: 1682126 - RNA, 19 nt, Artificial Sequence
  Description of Artificial Sequence: Synthetic oligonucleotide
  Antisense strand to SEQ ID NO: 1682125
uugauccuuuguuacuacg

SEQ ID NO: 1682127 - RNA, 19 nt, Artificial Sequence
  Description of Artificial Sequence: Synthetic oligonucleotide
  Sense strand starting at position 2211 of SEQ ID NO: 1561574
cucagcagucagggaaaua

SEQ ID NO: 1682128 - RNA, 19 nt, Artificial Sequence
  Description of Artificial Sequence: Synthetic oligonucleotide
  Antisense strand to SEQ ID NO: 1682127
uauuucccugacugcugag

SEQ ID NO: 1682129 - RNA, 19 nt, Artificial Sequence
  Description of Artificial Sequence: Synthetic oligonucleotide
  Sense strand starting at position 2258 of SEQ ID NO: 1561574
gguaauuggauccgggaaa

SEQ ID NO: 1682130 - RNA, 19 nt, Artificial Sequence
  Description of Artificial Sequence: Synthetic oligonucleotide
  Antisense strand to SEQ ID NO: 1682129
uuucccggauccaauuacc

SEQ ID NO: 1682131 - RNA, 19 nt, Artificial Sequence
  Description of Artificial Sequence: Synthetic oligonucleotide
  Sense strand starting at position 2271 of SEQ ID NO: 1561574
gggaaaguuccuugcuauu

SEQ ID NO: 1682132 - RNA, 19 nt, Artificial Sequence
  Description of Artificial Sequence: Synthetic oligonucleotide
  Antisense strand to SEQ ID NO: 1682131
aauagcaaggaacuuuccc

SEQ ID NO: 1682133 - RNA, 19 nt, Artificial Sequence
  Description of Artificial Sequence: Synthetic oligonucleotide
  Sense strand starting at position 2326 of SEQ ID NO: 1561574
aguugucuacggcaggaau

SEQ ID NO: 1682134 - RNA, 19 nt, Artificial Sequence
  Description of Artificial Sequence: Synthetic oligonucleotide
  Antisense strand to SEQ ID NO: 1682133
auuccugccguagacaacu

SEQ ID NO: 1682135 - RNA, 19 nt, Artificial Sequence
  Description of Artificial Sequence: Synthetic oligonucleotide
  Sense strand starting at position 2476 of SEQ ID NO: 1561574
ugcucagcuccugagacuu

SEQ ID NO: 1682136 - RNA, 19 nt, Artificial Sequence
  Description of Artificial Sequence: Synthetic oligonucleotide
  Antisense strand to SEQ ID NO: 1682135
aagucucaggagcugagca

SEQ ID NO: 1682137 - RNA, 19 nt, Artificial Sequence
  Description of Artificial Sequence: Synthetic oligonucleotide
  Sense strand starting at position 2524 of SEQ ID NO: 1561574
agaggagugugcuuaaaca

SEQ ID NO: 1682138 - RNA, 19 nt, Artificial Sequence
  Description of Artificial Sequence: Synthetic oligonucleotide
  Antisense strand to SEQ ID NO: 1682137
uguuuaagcacacuccucu

SEQ ID NO: 1682139 - RNA, 19 nt, Artificial Sequence
  Description of Artificial Sequence: Synthetic oligonucleotide
  Sense strand starting at position 2722 of SEQ ID NO: 1561574
auuguaacagugcauauaa

SEQ ID NO: 1682140 - RNA, 19 nt, Artificial Sequence
  Description of Artificial Sequence: Synthetic oligonucleotide
  Antisense strand to SEQ ID NO: 1682139
uuauaugcacuguuacaau

SEQ ID NO: 1682141 - RNA, 19 nt, Artificial Sequence
  Description of Artificial Sequence: Synthetic oligonucleotide
  Sense strand starting at position 2724 of SEQ ID NO: 1561574
uguaacagugcauauaagu

SEQ ID NO: 1682142 - RNA, 19 nt, Artificial Sequence
  Description of Artificial Sequence: Synthetic oligonucleotide
  Antisense strand to SEQ ID NO: 1682141
acuuauaugcacuguuaca

SEQ ID NO: 1682143 - RNA, 19 nt, Artificial Sequence
  Description of Artificial Sequence: Synthetic oligonucleotide
  Sense strand starting at position 2834 of SEQ ID NO: 1561574
agagauuuauucuaagcua

SEQ ID NO: 1682144 - RNA, 19 nt, Artificial Sequence
  Description of Artificial Sequence: Synthetic oligonucleotide
  Antisense strand to SEQ ID NO: 1682143
uagcuuagaauaaaucucu

SEQ ID NO: 1682145 - RNA, 19 nt, Artificial Sequence
  Description of Artificial Sequence: Synthetic oligonucleotide
  Sense strand starting at position 2883 of SEQ ID NO: 1561574
acauguguccaaggugaug

SEQ ID NO: 1682146 - RNA, 19 nt, Artificial Sequence
  Description of Artificial Sequence: Synthetic oligonucleotide
  Antisense strand to SEQ ID NO: 1682145
caucaccuuggacacaugu

SEQ ID NO: 1682147 - RNA, 19 nt, Artificial Sequence
  Description of Artificial Sequence: Synthetic oligonucleotide
  Sense strand starting at position 2903 of SEQ ID NO: 1561574
ggaacagcuuguucuuaga

SEQ ID NO: 1682148 - RNA, 19 nt, Artificial Sequence
  Description of Artificial Sequence: Synthetic oligonucleotide
  Antisense strand to SEQ ID NO: 1682147
ucuaagaacaagcuguucc

SEQ ID NO: 1682149 - RNA, 19 nt, Artificial Sequence
  Description of Artificial Sequence: Synthetic oligonucleotide
  Sense strand starting at position 2969 of SEQ ID NO: 1561574
gcugcuuugguucagaaag

SEQ ID NO: 1682150 - RNA, 19 nt, Artificial Sequence
  Description of Artificial Sequence: Synthetic oligonucleotide
  Antisense strand to SEQ ID NO: 1682149
cuuucugaaccaaagcagc

SEQ ID NO: 1682151 - RNA, 19 nt, Artificial Sequence
  Description of Artificial Sequence: Synthetic oligonucleotide
  Sense strand starting at position 3087 of SEQ ID NO: 1561574
agaggaaauguucacguua

SEQ ID NO: 1682152 - RNA, 19 nt, Artificial Sequence
  Description of Artificial Sequence: Synthetic oligonucleotide
  Antisense strand to SEQ ID NO: 1682151
uaacgugaacauuuccucu

SEQ ID NO: 1682153 - RNA, 19 nt, Artificial Sequence
  Description of Artificial Sequence: Synthetic oligonucleotide
  Sense strand starting at position 3117 of SEQ ID NO: 1561574
uguggagaccaauguuguu

SEQ ID NO: 1682154 - RNA, 19 nt, Artificial Sequence
  Description of Artificial Sequence: Synthetic oligonucleotide
  Antisense strand to SEQ ID NO: 1682153
aacaacauuggucuccaca

SEQ ID NO: 1682155 - RNA, 19 nt, Artificial Sequence
  Description of Artificial Sequence: Synthetic oligonucleotide
  Sense strand starting at position 3148 of SEQ ID NO: 1561574
auuggcugcccuuagagau

SEQ ID NO: 1682156 - RNA, 19 nt, Artificial Sequence
  Description of Artificial Sequence: Synthetic oligonucleotide
  Antisense strand to SEQ ID NO: 1682155
aucucuaagggcagccaau

SEQ ID NO: 1682157 - RNA, 19 nt, Artificial Sequence
  Description of Artificial Sequence: Synthetic oligonucleotide
  Sense strand starting at position 3194 of SEQ ID NO: 1561574
accuuuaaacagugcgaga

SEQ ID NO: 1682158 - RNA, 19 nt, Artificial Sequence
  Description of Artificial Sequence: Synthetic oligonucleotide
  Antisense strand to SEQ ID NO: 1682157
ucucgcacuguuuaaaggu

SEQ ID NO: 1682159 - RNA, 19 nt, Artificial Sequence
  Description of Artificial Sequence: Synthetic oligonucleotide
  Sense strand starting at position 3199 of SEQ ID NO: 1561574
uaaacagugcgagauucuu

SEQ ID NO: 1682160 - RNA, 19 nt, Artificial Sequence
  Description of Artificial Sequence: Synthetic oligonucleotide
  Antisense strand to SEQ ID NO: 1682159
aagaaucucgcacuguuua

SEQ ID NO: 1682161 - RNA, 19 nt, Artificial Sequence
  Description of Artificial Sequence: Synthetic oligonucleotide
  Sense strand starting at position 3207 of SEQ ID NO: 1561574
gcgagauucuuacuuaauc

SEQ ID NO: 1682162 - RNA, 19 nt, Artificial Sequence
  Description of Artificial Sequence: Synthetic oligonucleotide
  Antisense strand to SEQ ID NO: 1682161
gauuaaguaagaaucucgc

SEQ ID NO: 1682163 - RNA, 19 nt, Artificial Sequence
  Description of Artificial Sequence: Synthetic oligonucleotide
  Sense strand starting at position 3208 of SEQ ID NO: 1561574
cgagauucuuacuuaaucu

SEQ ID NO: 1682164 - RNA, 19 nt, Artificial Sequence
  Description of Artificial Sequence: Synthetic oligonucleotide
  Antisense strand to SEQ ID NO: 1682163
agauuaaguaagaaucucg

SEQ ID NO: 1682165 - RNA, 19 nt, Artificial Sequence
  Description of Artificial Sequence: Synthetic oligonucleotide
  Sense strand starting at position 3389 of SEQ ID NO: 1561574
cacguuauuccagagucag

SEQ ID NO: 1682166 - RNA, 19 nt, Artificial Sequence
  Description of Artificial Sequence: Synthetic oligonucleotide
  Antisense strand to SEQ ID NO: 1682165
cugacucuggaauaacgug

SEQ ID NO: 1682167 - RNA, 19 nt, Artificial Sequence
  Description of Artificial Sequence: Synthetic oligonucleotide
  Sense strand starting at position 150 of SEQ ID NO: 1561575
gacagaucacccugugcca

SEQ ID NO: 1682168 - RNA, 19 nt, Artificial Sequence
  Description of Artificial Sequence: Synthetic oligonucleotide
  Antisense strand to SEQ ID NO: 1682167
uggcacagggugaucuguc

SEQ ID NO: 1682169 - RNA, 19 nt, Artificial Sequence
  Description of Artificial Sequence: Synthetic oligonucleotide
  Sense strand starting at position 199 of SEQ ID NO: 1561575
ucggguaucucuguguaga

SEQ ID NO: 1682170 - RNA, 19 nt, Artificial Sequence
  Description of Artificial Sequence: Synthetic oligonucleotide
  Antisense strand to SEQ ID NO: 1682169
ucuacacagagauacccga

SEQ ID NO: 1682171 - RNA, 19 nt, Artificial Sequence
  Description of Artificial Sequence: Synthetic oligonucleotide
  Sense strand starting at position 200 of SEQ ID NO: 1561575
cggguaucucuguguagac

SEQ ID NO: 1682172 - RNA, 19 nt, Artificial Sequence
  Description of Artificial Sequence: Synthetic oligonucleotide
  Antisense strand to SEQ ID NO: 1682171
gucuacacagagauacccg

SEQ ID NO: 1682173 - RNA, 19 nt, Artificial Sequence
  Description of Artificial Sequence: Synthetic oligonucleotide
  Sense strand starting at position 201 of SEQ ID NO: 1561575
ggguaucucuguguagaca

SEQ ID NO: 1682174 - RNA, 19 nt, Artificial Sequence
  Description of Artificial Sequence: Synthetic oligonucleotide
  Antisense strand to SEQ ID NO: 1682173
ugucuacacagagauaccc

SEQ ID NO: 1682175 - RNA, 19 nt, Artificial Sequence
  Description of Artificial Sequence: Synthetic oligonucleotide
  Sense strand starting at position 202 of SEQ ID NO: 1561575
gguaucucuguguagacaa

SEQ ID NO: 1682176 - RNA, 19 nt, Artificial Sequence
  Description of Artificial Sequence: Synthetic oligonucleotide
  Antisense strand to SEQ ID NO: 1682175
uugucuacacagagauacc

SEQ ID NO: 1682177 - RNA, 19 nt, Artificial Sequence
  Description of Artificial Sequence: Synthetic oligonucleotide
  Sense strand starting at position 578 of SEQ ID NO: 1561575
acuggagucaagugguuau

SEQ ID NO: 1682178 - RNA, 19 nt, Artificial Sequence
  Description of Artificial Sequence: Synthetic oligonucleotide
  Antisense strand to SEQ ID NO: 1682177
auaaccacuugacuccagu

SEQ ID NO: 1682179 - RNA, 19 nt, Artificial Sequence
  Description of Artificial Sequence: Synthetic oligonucleotide
  Sense strand starting at position 581 of SEQ ID NO: 1561575
ggagucaagugguuauucu

SEQ ID NO: 1682180 - RNA, 19 nt, Artificial Sequence
  Description of Artificial Sequence: Synthetic oligonucleotide
  Antisense strand to SEQ ID NO: 1682179
agaauaaccacuugacucc

SEQ ID NO: 1682181 - RNA, 19 nt, Artificial Sequence
  Description of Artificial Sequence: Synthetic oligonucleotide
  Sense strand starting at position 582 of SEQ ID NO: 1561575
gagucaagugguuauucuu

SEQ ID NO: 1682182 - RNA, 19 nt, Artificial Sequence
  Description of Artificial Sequence: Synthetic oligonucleotide
  Antisense strand to SEQ ID NO: 1682181
aagaauaaccacuugacuc

SEQ ID NO: 1682183 - RNA, 19 nt, Artificial Sequence
  Description of Artificial Sequence: Synthetic oligonucleotide
  Sense strand starting at position 735 of SEQ ID NO: 1561575
cauaaaguugcugggaauu

SEQ ID NO: 1682184 - RNA, 19 nt, Artificial Sequence
  Description of Artificial Sequence: Synthetic oligonucleotide
  Antisense strand to SEQ ID NO: 1682183
aauucccagcaacuuuaug

SEQ ID NO: 1682185 - RNA, 19 nt, Artificial Sequence
  Description of Artificial Sequence: Synthetic oligonucleotide
  Sense strand starting at position 860 of SEQ ID NO: 1561575
ugcccacaucuuuggaaga

SEQ ID NO: 1682186 - RNA, 19 nt, Artificial Sequence
  Description of Artificial Sequence: Synthetic oligonucleotide
  Antisense strand to SEQ ID NO: 1682185
ucuuccaaagaugugggca

SEQ ID NO: 1682187 - RNA, 19 nt, Artificial Sequence
  Description of Artificial Sequence: Synthetic oligonucleotide
  Sense strand starting at position 976 of SEQ ID NO: 1561575
ucuggauucugccugguga

SEQ ID NO: 1682188 - RNA, 19 nt, Artificial Sequence
  Description of Artificial Sequence: Synthetic oligonucleotide
  Antisense strand to SEQ ID NO: 1682187
ucaccaggcagaauccaga

SEQ ID NO: 1682189 - RNA, 19 nt, Artificial Sequence
  Description of Artificial Sequence: Synthetic oligonucleotide
  Sense strand starting at position 1507 of SEQ ID NO: 1561575
gccgguuacaacugcacaa

SEQ ID NO: 1682190 - RNA, 19 nt, Artificial Sequence
  Description of Artificial Sequence: Synthetic oligonucleotide
  Antisense strand to SEQ ID NO: 1682189
uugugcaguuguaaccggc

SEQ ID NO: 1682191 - RNA, 19 nt, Artificial Sequence
  Description of Artificial Sequence: Synthetic oligonucleotide
  Sense strand starting at position 2024 of SEQ ID NO: 1561575
ccucaucccugauuggaua

SEQ ID NO: 1682192 - RNA, 19 nt, Artificial Sequence
  Description of Artificial Sequence: Synthetic oligonucleotide
  Antisense strand to SEQ ID NO: 1682191
uauccaaucagggaugagg

SEQ ID NO: 1682193 - RNA, 19 nt, Artificial Sequence
  Description of Artificial Sequence: Synthetic oligonucleotide
  Sense strand starting at position 2181 of SEQ ID NO: 1561575
cgaagugacguuugcauuu

SEQ ID NO: 1682194 - RNA, 19 nt, Artificial Sequence
  Description of Artificial Sequence: Synthetic oligonucleotide
  Antisense strand to SEQ ID NO: 1682193
aaaugcaaacgucacuucg

SEQ ID NO: 1682195 - RNA, 19 nt, Artificial Sequence
  Description of Artificial Sequence: Synthetic oligonucleotide
  Sense strand starting at position 2370 of SEQ ID NO: 1561575
ccugauguccuccagggau

SEQ ID NO: 1682196 - RNA, 19 nt, Artificial Sequence
  Description of Artificial Sequence: Synthetic oligonucleotide
  Antisense strand to SEQ ID NO: 1682195
aucccuggaggacaucagg

SEQ ID NO: 1682197 - RNA, 19 nt, Artificial Sequence
  Description of Artificial Sequence: Synthetic oligonucleotide
  Sense strand starting at position 2372 of SEQ ID NO: 1561575
ugauguccuccagggauca

SEQ ID NO: 1682198 - RNA, 19 nt, Artificial Sequence
  Description of Artificial Sequence: Synthetic oligonucleotide
  Antisense strand to SEQ ID NO: 1682197
ugaucccuggaggacauca

SEQ ID NO: 1682199 - RNA, 19 nt, Artificial Sequence
  Description of Artificial Sequence: Synthetic oligonucleotide
  Sense strand starting at position 2497 of SEQ ID NO: 1561575
aauaguugaguauguggaa

SEQ ID NO: 1682200 - RNA, 19 nt, Artificial Sequence
  Description of Artificial Sequence: Synthetic oligonucleotide
  Antisense strand to SEQ ID NO: 1682199
uuccacauacucaacuauu

SEQ ID NO: 1682201 - RNA, 19 nt, Artificial Sequence
  Description of Artificial Sequence: Synthetic oligonucleotide
  Sense strand starting at position 2498 of SEQ ID NO: 1561575
auaguugaguauguggaaa

SEQ ID NO: 1682202 - RNA, 19 nt, Artificial Sequence
  Description of Artificial Sequence: Synthetic oligonucleotide
  Antisense strand to SEQ ID NO: 1682201
uuuccacauacucaacuau

SEQ ID NO: 1682203 - RNA, 19 nt, Artificial Sequence
  Description of Artificial Sequence: Synthetic oligonucleotide
  Sense strand starting at position 2701 of SEQ ID NO: 1561575
ggaucagaagcuggugaua

SEQ ID NO: 1682204 - RNA, 19 nt, Artificial Sequence
  Description of Artificial Sequence: Synthetic oligonucleotide
  Antisense strand to SEQ ID NO: 1682203
uaucaccagcuucugaucc

SEQ ID NO: 1682205 - RNA, 19 nt, Artificial Sequence
  Description of Artificial Sequence: Synthetic oligonucleotide
  Sense strand starting at position 2782 of SEQ ID NO: 1561575
uggaaaugcucccuccuua

SEQ ID NO: 1682206 - RNA, 19 nt, Artificial Sequence
  Description of Artificial Sequence: Synthetic oligonucleotide
  Antisense strand to SEQ ID NO: 1682205
uaaggagggagcauuucca

SEQ ID NO: 1682207 - RNA, 19 nt, Artificial Sequence
  Description of Artificial Sequence: Synthetic oligonucleotide
  Sense strand starting at position 2871 of SEQ ID NO: 1561575
uuagccuuucuccauaugu

SEQ ID NO: 1682208 - RNA, 19 nt, Artificial Sequence
  Description of Artificial Sequence: Synthetic oligonucleotide
  Antisense strand to SEQ ID NO: 1682207
acauauggagaaaggcuaa

SEQ ID NO: 1682209 - RNA, 19 nt, Artificial Sequence
  Description of Artificial Sequence: Synthetic oligonucleotide
  Sense strand starting at position 2873 of SEQ ID NO: 1561575
agccuuucuccauauguuu

SEQ ID NO: 1682210 - RNA, 19 nt, Artificial Sequence
  Description of Artificial Sequence: Synthetic oligonucleotide
  Antisense strand to SEQ ID NO: 1682209
aaacauauggagaaaggcu

SEQ ID NO: 1682211 - RNA, 19 nt, Artificial Sequence
  Description of Artificial Sequence: Synthetic oligonucleotide
  Sense strand starting at position 2879 of SEQ ID NO: 1561575
ucuccauauguuuaugaag

SEQ ID NO: 1682212 - RNA, 19 nt, Artificial Sequence
  Description of Artificial Sequence: Synthetic oligonucleotide
  Antisense strand to SEQ ID NO: 1682211
cuucauaaacauauggaga

SEQ ID NO: 1682213 - RNA, 19 nt, Artificial Sequence
  Description of Artificial Sequence: Synthetic oligonucleotide
  Sense strand starting at position 3386 of SEQ ID NO: 1561575
aaugacgucugaguauaac

SEQ ID NO: 1682214 - RNA, 19 nt, Artificial Sequence
  Description of Artificial Sequence: Synthetic oligonucleotide
  Antisense strand to SEQ ID NO: 1682213
guuauacucagacgucauu

SEQ ID NO: 1682215 - RNA, 19 nt, Artificial Sequence
  Description of Artificial Sequence: Synthetic oligonucleotide
  Sense strand starting at position 3389 of SEQ ID NO: 1561575
gacgucugaguauaaccua

SEQ ID NO: 1682216 - RNA, 19 nt, Artificial Sequence
  Description of Artificial Sequence: Synthetic oligonucleotide
  Antisense strand to SEQ ID NO: 1682215
uagguuauacucagacguc

SEQ ID NO: 1682217 - RNA, 19 nt, Artificial Sequence
  Description of Artificial Sequence: Synthetic oligonucleotide
  Sense strand starting at position 3479 of SEQ ID NO: 1561575
acagucuauuaugcuagaa

SEQ ID NO: 1682218 - RNA, 19 nt, Artificial Sequence
  Description of Artificial Sequence: Synthetic oligonucleotide
  Antisense strand to SEQ ID NO: 1682217
uucuagcauaauagacugu

SEQ ID NO: 1682219 - RNA, 19 nt, Artificial Sequence
  Description of Artificial Sequence: Synthetic oligonucleotide
  Sense strand starting at position 3483 of SEQ ID NO: 1561575
ucuauuaugcuagaaacug

SEQ ID NO: 1682220 - RNA, 19 nt, Artificial Sequence
  Description of Artificial Sequence: Synthetic oligonucleotide
  Antisense strand to SEQ ID NO: 1682219
caguuucuagcauaauaga

SEQ ID NO: 1682221 - RNA, 19 nt, Artificial Sequence
  Description of Artificial Sequence: Synthetic oligonucleotide
  Sense strand starting at position 3491 of SEQ ID NO: 1561575
gcuagaaacugcucucuga

SEQ ID NO: 1682222 - RNA, 19 nt, Artificial Sequence
  Description of Artificial Sequence: Synthetic oligonucleotide
  Antisense strand to SEQ ID NO: 1682221
ucagagagcaguuucuagc

SEQ ID NO: 1682223 - RNA, 19 nt, Artificial Sequence
  Description of Artificial Sequence: Synthetic oligonucleotide
  Sense strand starting at position 3499 of SEQ ID NO: 1561575
cugcucucugaaggauaaa

SEQ ID NO: 1682224 - RNA, 19 nt, Artificial Sequence
  Description of Artificial Sequence: Synthetic oligonucleotide
  Antisense strand to SEQ ID NO: 1682223
uuuauccuucagagagcag

SEQ ID NO: 1682225 - RNA, 19 nt, Artificial Sequence
  Description of Artificial Sequence: Synthetic oligonucleotide
  Sense strand starting at position 3557 of SEQ ID NO: 1561575
uuaacugcuccuggaacaa

SEQ ID NO: 1682226 - RNA, 19 nt, Artificial Sequence
  Description of Artificial Sequence: Synthetic oligonucleotide
  Antisense strand to SEQ ID NO: 1682225
uuguuccaggagcaguuaa

SEQ ID NO: 1682227 - RNA, 19 nt, Artificial Sequence
  Description of Artificial Sequence: Synthetic oligonucleotide
  Sense strand starting at position 3569 of SEQ ID NO: 1561575
ggaacaauguucuauuuau

SEQ ID NO: 1682228 - RNA, 19 nt, Artificial Sequence
  Description of Artificial Sequence: Synthetic oligonucleotide
  Antisense strand to SEQ ID NO: 1682227
auaaauagaacauuguucc

SEQ ID NO: 1682229 - RNA, 19 nt, Artificial Sequence
  Description of Artificial Sequence: Synthetic oligonucleotide
  Sense strand starting at position 3689 of SEQ ID NO: 1561575
aguaguugauuucugcaau

SEQ ID NO: 1682230 - RNA, 19 nt, Artificial Sequence
  Description of Artificial Sequence: Synthetic oligonucleotide
  Antisense strand to SEQ ID NO: 1682229
auugcagaaaucaacuacu

SEQ ID NO: 1682231 - RNA, 19 nt, Artificial Sequence
  Description of Artificial Sequence: Synthetic oligonucleotide
  Sense strand starting at position 3748 of SEQ ID NO: 1561575
uucgcauuaccaugaugaa

SEQ ID NO: 1682232 - RNA, 19 nt, Artificial Sequence
  Description of Artificial Sequence: Synthetic oligonucleotide
  Antisense strand to SEQ ID NO: 1682231
uucaucaugguaaugcgaa

SEQ ID NO: 1682233 - RNA, 19 nt, Artificial Sequence
  Description of Artificial Sequence: Synthetic oligonucleotide
  Sense strand starting at position 3749 of SEQ ID NO: 1561575
ucgcauuaccaugaugaag

SEQ ID NO: 1682234 - RNA, 19 nt, Artificial Sequence
  Description of Artificial Sequence: Synthetic oligonucleotide
  Antisense strand to SEQ ID NO: 1682233
cuucaucaugguaaugcga

SEQ ID NO: 1682235 - RNA, 19 nt, Artificial Sequence
  Description of Artificial Sequence: Synthetic oligonucleotide
  Sense strand starting at position 3849 of SEQ ID NO: 1561575
aaauuuguaugugcaaguu

SEQ ID NO: 1682236 - RNA, 19 nt, Artificial Sequence
  Description of Artificial Sequence: Synthetic oligonucleotide
  Antisense strand to SEQ ID NO: 1682235
aacuugcacauacaaauuu

SEQ ID NO: 1682237 - RNA, 19 nt, Artificial Sequence
  Description of Artificial Sequence: Synthetic oligonucleotide
  Sense strand starting at position 3891 of SEQ ID NO: 1561575
cuguuaguuuccucacagu

SEQ ID NO: 1682238 - RNA, 19 nt, Artificial Sequence
  Description of Artificial Sequence: Synthetic oligonucleotide
  Antisense strand to SEQ ID NO: 1682237
acugugaggaaacuaacag

SEQ ID NO: 1682239 - RNA, 19 nt, Artificial Sequence
  Description of Artificial Sequence: Synthetic oligonucleotide
  Sense strand starting at position 3900 of SEQ ID NO: 1561575
uccucacagucaguucuau

SEQ ID NO: 1682240 - RNA, 19 nt, Artificial Sequence
  Description of Artificial Sequence: Synthetic oligonucleotide
  Antisense strand to SEQ ID NO: 1682239
auagaacugacugugagga

SEQ ID NO: 1682241 - RNA, 19 nt, Artificial Sequence
  Description of Artificial Sequence: Synthetic oligonucleotide
  Sense strand starting at position 3906 of SEQ ID NO: 1561575
cagucaguucuauggcaac

SEQ ID NO: 1682242 - RNA, 19 nt, Artificial Sequence
  Description of Artificial Sequence: Synthetic oligonucleotide
  Antisense strand to SEQ ID NO: 1682241
guugccauagaacugacug

SEQ ID NO: 1682243 - RNA, 19 nt, Artificial Sequence
  Description of Artificial Sequence: Synthetic oligonucleotide
  Sense strand starting at position 3946 of SEQ ID NO: 1561575
auguuuauuucugaguuug

SEQ ID NO: 1682244 - RNA, 19 nt, Artificial Sequence
  Description of Artificial Sequence: Synthetic oligonucleotide
  Antisense strand to SEQ ID NO: 1682243
caaacucagaaauaaacau

SEQ ID NO: 1682245 - RNA, 19 nt, Artificial Sequence
  Description of Artificial Sequence: Synthetic oligonucleotide
  Sense strand starting at position 3948 of SEQ ID NO: 1561575
guuuauuucugaguuuguc

SEQ ID NO: 1682246 - RNA, 19 nt, Artificial Sequence
  Description of Artificial Sequence: Synthetic oligonucleotide
  Antisense strand to SEQ ID NO: 1682245
gacaaacucagaaauaaac

SEQ ID NO: 1682247 - RNA, 19 nt, Artificial Sequence
  Description of Artificial Sequence: Synthetic oligonucleotide
  Sense strand starting at position 99 of SEQ ID NO: 1561576
gaguaaagauuugaacuga

SEQ ID NO: 1682248 - RNA, 19 nt, Artificial Sequence
  Description of Artificial Sequence: Synthetic oligonucleotide
  Antisense strand to SEQ ID NO: 1682247
ucaguucaaaucuuuacuc

SEQ ID NO: 1682249 - RNA, 19 nt, Artificial Sequence
  Description of Artificial Sequence: Synthetic oligonucleotide
  Sense strand starting at position 259 of SEQ ID NO: 1561576
uggcaugucugauuuguau

SEQ ID NO: 1682250 - RNA, 19 nt, Artificial Sequence
  Description of Artificial Sequence: Synthetic oligonucleotide
  Antisense strand to SEQ ID NO: 1682249
auacaaaucagacaugcca

SEQ ID NO: 1682251 - RNA, 19 nt, Artificial Sequence
  Description of Artificial Sequence: Synthetic oligonucleotide
  Sense strand starting at position 312 of SEQ ID NO: 1561576
ccaagaccauuugaugaca

SEQ ID NO: 1682252 - RNA, 19 nt, Artificial Sequence
  Description of Artificial Sequence: Synthetic oligonucleotide
  Antisense strand to SEQ ID NO: 1682251
ugucaucaaauggucuugg

SEQ ID NO: 1682253 - RNA, 19 nt, Artificial Sequence
  Description of Artificial Sequence: Synthetic oligonucleotide
  Sense strand starting at position 333 of SEQ ID NO: 1561576
ggagaauauuucugacacu

SEQ ID NO: 1682254 - RNA, 19 nt, Artificial Sequence
  Description of Artificial Sequence: Synthetic oligonucleotide
  Antisense strand to SEQ ID NO: 1682253
agugucagaaauauucucc

SEQ ID NO: 1682255 - RNA, 19 nt, Artificial Sequence
  Description of Artificial Sequence: Synthetic oligonucleotide
  Sense strand starting at position 441 of SEQ ID NO: 1561576
uaguuaucugaguggcuaa

SEQ ID NO: 1682256 - RNA, 19 nt, Artificial Sequence
  Description of Artificial Sequence: Synthetic oligonucleotide
  Antisense strand to SEQ ID NO: 1682255
uuagccacucagauaacua

SEQ ID NO: 1682257 - RNA, 19 nt, Artificial Sequence
  Description of Artificial Sequence: Synthetic oligonucleotide
  Sense strand starting at position 442 of SEQ ID NO: 1561576
aguuaucugaguggcuaaa

SEQ ID NO: 1682258 - RNA, 19 nt, Artificial Sequence
  Description of Artificial Sequence: Synthetic oligonucleotide
  Antisense strand to SEQ ID NO: 1682257
uuuagccacucagauaacu

SEQ ID NO: 1682259 - RNA, 19 nt, Artificial Sequence
  Description of Artificial Sequence: Synthetic oligonucleotide
  Sense strand starting at position 444 of SEQ ID NO: 1561576
uuaucugaguggcuaaauu

SEQ ID NO: 1682260 - RNA, 19 nt, Artificial Sequence
  Description of Artificial Sequence: Synthetic oligonucleotide
  Antisense strand to SEQ ID NO: 1682259
aauuuagccacucagauaa

SEQ ID NO: 1682261 - RNA, 19 nt, Artificial Sequence
  Description of Artificial Sequence: Synthetic oligonucleotide
  Sense strand starting at position 674 of SEQ ID NO: 1561576
cuuggauacugcuuguaga

SEQ ID NO: 1682262 - RNA, 19 nt, Artificial Sequence
  Description of Artificial Sequence: Synthetic oligonucleotide
  Antisense strand to SEQ ID NO: 1682261
ucuacaagcaguauccaag

SEQ ID NO: 1682263 - RNA, 19 nt, Artificial Sequence
  Description of Artificial Sequence: Synthetic oligonucleotide
  Sense strand starting at position 675 of SEQ ID NO: 1561576
uuggauacugcuuguagaa

SEQ ID NO: 1682264 - RNA, 19 nt, Artificial Sequence
  Description of Artificial Sequence: Synthetic oligonucleotide
  Antisense strand to SEQ ID NO: 1682263
uucuacaagcaguauccaa

SEQ ID NO: 1682265 - RNA, 19 nt, Artificial Sequence
  Description of Artificial Sequence: Synthetic oligonucleotide
  Sense strand starting at position 712 of SEQ ID NO: 1561576
ccuccucuucugggugaca

SEQ ID NO: 1682266 - RNA, 19 nt, Artificial Sequence
  Description of Artificial Sequence: Synthetic oligonucleotide
  Antisense strand to SEQ ID NO: 1682265
ugucacccagaagaggagg

SEQ ID NO: 1682267 - RNA, 19 nt, Artificial Sequence
  Description of Artificial Sequence: Synthetic oligonucleotide
  Sense strand starting at position 721 of SEQ ID NO: 1561576
cugggugacaccuggagaa

SEQ ID NO: 1682268 - RNA, 19 nt, Artificial Sequence
  Description of Artificial Sequence: Synthetic oligonucleotide
  Antisense strand to SEQ ID NO: 1682267
uucuccaggugucacccag

SEQ ID NO: 1682269 - RNA, 19 nt, Artificial Sequence
  Description of Artificial Sequence: Synthetic oligonucleotide
  Sense strand starting at position 900 of SEQ ID NO: 1561576
gggaaagguuguguucacu

SEQ ID NO: 1682270 - RNA, 19 nt, Artificial Sequence
  Description of Artificial Sequence: Synthetic oligonucleotide
  Antisense strand to SEQ ID NO: 1682269
agugaacacaaccuuuccc

SEQ ID NO: 1682271 - RNA, 19 nt, Artificial Sequence
  Description of Artificial Sequence: Synthetic oligonucleotide
  Sense strand starting at position 956 of SEQ ID NO: 1561576
guuuccuagagacagaguu

SEQ ID NO: 1682272 - RNA, 19 nt, Artificial Sequence
  Description of Artificial Sequence: Synthetic oligonucleotide
  Antisense strand to SEQ ID NO: 1682271
aacucugucucuaggaaac

SEQ ID NO: 1682273 - RNA, 19 nt, Artificial Sequence
  Description of Artificial Sequence: Synthetic oligonucleotide
  Sense strand starting at position 966 of SEQ ID NO: 1561576
gacagaguucuggagucac

SEQ ID NO: 1682274 - RNA, 19 nt, Artificial Sequence
  Description of Artificial Sequence: Synthetic oligonucleotide
  Antisense strand to SEQ ID NO: 1682273
gugacuccagaacucuguc

SEQ ID NO: 1682275 - RNA, 19 nt, Artificial Sequence
  Description of Artificial Sequence: Synthetic oligonucleotide
  Sense strand starting at position 980 of SEQ ID NO: 1561576
gucacaaucgcauaguuga

SEQ ID NO: 1682276 - RNA, 19 nt, Artificial Sequence
  Description of Artificial Sequence: Synthetic oligonucleotide
  Antisense strand to SEQ ID NO: 1682275
ucaacuaugcgauugugac

SEQ ID NO: 1682277 - RNA, 19 nt, Artificial Sequence
  Description of Artificial Sequence: Synthetic oligonucleotide
  Sense strand starting at position 1227 of SEQ ID NO: 1561576
agugacagguaucccauau

SEQ ID NO: 1682278 - RNA, 19 nt, Artificial Sequence
  Description of Artificial Sequence: Synthetic oligonucleotide
  Antisense strand to SEQ ID NO: 1682277
auaugggauaccugucacu

SEQ ID NO: 1682279 - RNA, 19 nt, Artificial Sequence
  Description of Artificial Sequence: Synthetic oligonucleotide
  Sense strand starting at position 1262 of SEQ ID NO: 1561576
guguuauuaucucccagac

SEQ ID NO: 1682280 - RNA, 19 nt, Artificial Sequence
  Description of Artificial Sequence: Synthetic oligonucleotide
  Antisense strand to SEQ ID NO: 1682279
gucugggagauaauaacac

SEQ ID NO: 1682281 - RNA, 19 nt, Artificial Sequence
  Description of Artificial Sequence: Synthetic oligonucleotide
  Sense strand starting at position 1656 of SEQ ID NO: 1561576
ccagucaucccggauggga

SEQ ID NO: 1682282 - RNA, 19 nt, Artificial Sequence
  Description of Artificial Sequence: Synthetic oligonucleotide
  Antisense strand to SEQ ID NO: 1682281
ucccauccgggaugacugg

SEQ ID NO: 1682283 - RNA, 19 nt, Artificial Sequence
  Description of Artificial Sequence: Synthetic oligonucleotide
  Sense strand starting at position 1758 of SEQ ID NO: 1561576
uucgaauuccugcgagaaa

SEQ ID NO: 1682284 - RNA, 19 nt, Artificial Sequence
  Description of Artificial Sequence: Synthetic oligonucleotide
  Antisense strand to SEQ ID NO: 1682283
uuucucgcaggaauucgaa

SEQ ID NO: 1682285 - RNA, 19 nt, Artificial Sequence
  Description of Artificial Sequence: Synthetic oligonucleotide
  Sense strand starting at position 1827 of SEQ ID NO: 1561576
cgccgauuccugucagcuc

SEQ ID NO: 1682286 - RNA, 19 nt, Artificial Sequence
  Description of Artificial Sequence: Synthetic oligonucleotide
  Antisense strand to SEQ ID NO: 1682285
gagcugacaggaaucggcg

SEQ ID NO: 1682287 - RNA, 19 nt, Artificial Sequence
  Description of Artificial Sequence: Synthetic oligonucleotide
  Sense strand starting at position 2292 of SEQ ID NO: 1561576
acgcuaauggugagugguu

SEQ ID NO: 1682288 - RNA, 19 nt, Artificial Sequence
  Description of Artificial Sequence: Synthetic oligonucleotide
  Antisense strand to SEQ ID NO: 1682287
aaccacucaccauuagcgu

SEQ ID NO: 1682289 - RNA, 19 nt, Artificial Sequence
  Description of Artificial Sequence: Synthetic oligonucleotide
  Sense strand starting at position 2369 of SEQ ID NO: 1561576
ugagugugacggcacgaau

SEQ ID NO: 1682290 - RNA, 19 nt, Artificial Sequence
  Description of Artificial Sequence: Synthetic oligonucleotide
  Antisense strand to SEQ ID NO: 1682289
auucgugccgucacacuca

SEQ ID NO: 1682291 - RNA, 19 nt, Artificial Sequence
  Description of Artificial Sequence: Synthetic oligonucleotide
  Sense strand starting at position 2372 of SEQ ID NO: 1561576
gugugacggcacgaauaau

SEQ ID NO: 1682292 - RNA, 19 nt, Artificial Sequence
  Description of Artificial Sequence: Synthetic oligonucleotide
  Antisense strand to SEQ ID NO: 1682291
auuauucgugccgucacac

SEQ ID NO: 1682293 - RNA, 19 nt, Artificial Sequence
  Description of Artificial Sequence: Synthetic oligonucleotide
  Sense strand starting at position 2429 of SEQ ID NO: 1561576
ugaugaaaugugugauaug

SEQ ID NO: 1682294 - RNA, 19 nt, Artificial Sequence
  Description of Artificial Sequence: Synthetic oligonucleotide
  Antisense strand to SEQ ID NO: 1682293
cauaucacacauuucauca

SEQ ID NO: 1682295 - RNA, 19 nt, Artificial Sequence
  Description of Artificial Sequence: Synthetic oligonucleotide
  Sense strand starting at position 2450 of SEQ ID NO: 1561576
ugugauuaugauuaaggcu

SEQ ID NO: 1682296 - RNA, 19 nt, Artificial Sequence
  Description of Artificial Sequence: Synthetic oligonucleotide
  Antisense strand to SEQ ID NO: 1682295
agccuuaaucauaaucaca

SEQ ID NO: 1682297 - RNA, 19 nt, Artificial Sequence
  Description of Artificial Sequence: Synthetic oligonucleotide
  Sense strand starting at position 2492 of SEQ ID NO: 1561576
gugugcgugauuguaauau

SEQ ID NO: 1682298 - RNA, 19 nt, Artificial Sequence
  Description of Artificial Sequence: Synthetic oligonucleotide
  Antisense strand to SEQ ID NO: 1682297
auauuacaaucacgcacac

SEQ ID NO: 1682299 - RNA, 19 nt, Artificial Sequence
  Description of Artificial Sequence: Synthetic oligonucleotide
  Sense strand starting at position 2498 of SEQ ID NO: 1561576
gugauuguaauaugucuag

SEQ ID NO: 1682300 - RNA, 19 nt, Artificial Sequence
  Description of Artificial Sequence: Synthetic oligonucleotide
  Antisense strand to SEQ ID NO: 1682299
cuagacauauuacaaucac

SEQ ID NO: 1682301 - RNA, 19 nt, Artificial Sequence
  Description of Artificial Sequence: Synthetic oligonucleotide
  Sense strand starting at position 2501 of SEQ ID NO: 1561576
auuguaauaugucuaguag

SEQ ID NO: 1682302 - RNA, 19 nt, Artificial Sequence
  Description of Artificial Sequence: Synthetic oligonucleotide
  Antisense strand to SEQ ID NO: 1682301
cuacuagacauauuacaau

SEQ ID NO: 1682303 - RNA, 19 nt, Artificial Sequence
  Description of Artificial Sequence: Synthetic oligonucleotide
  Sense strand starting at position 2502 of SEQ ID NO: 1561576
uuguaauaugucuaguagu

SEQ ID NO: 1682304 - RNA, 19 nt, Artificial Sequence
  Description of Artificial Sequence: Synthetic oligonucleotide
  Antisense strand to SEQ ID NO: 1682303
acuacuagacauauuacaa

SEQ ID NO: 1682305 - RNA, 19 nt, Artificial Sequence
  Description of Artificial Sequence: Synthetic oligonucleotide
  Sense strand starting at position 2681 of SEQ ID NO: 1561576
uccacuauuccuuggcgaa

SEQ ID NO: 1682306 - RNA, 19 nt, Artificial Sequence
  Description of Artificial Sequence: Synthetic oligonucleotide
  Antisense strand to SEQ ID NO: 1682305
uucgccaaggaauagugga

SEQ ID NO: 1682307 - RNA, 19 nt, Artificial Sequence
  Description of Artificial Sequence: Synthetic oligonucleotide
  Sense strand starting at position 2739 of SEQ ID NO: 1561576
auguauguuaguuagcuau

SEQ ID NO: 1682308 - RNA, 19 nt, Artificial Sequence
  Description of Artificial Sequence: Synthetic oligonucleotide
  Antisense strand to SEQ ID NO: 1682307
auagcuaacuaacauacau

SEQ ID NO: 1682309 - RNA, 19 nt, Artificial Sequence
  Description of Artificial Sequence: Synthetic oligonucleotide
  Sense strand starting at position 2752 of SEQ ID NO: 1561576
agcuauugccaugauaaua

SEQ ID NO: 1682310 - RNA, 19 nt, Artificial Sequence
  Description of Artificial Sequence: Synthetic oligonucleotide
  Antisense strand to SEQ ID NO: 1682309
uauuaucauggcaauagcu

SEQ ID NO: 1682311 - RNA, 19 nt, Artificial Sequence
  Description of Artificial Sequence: Synthetic oligonucleotide
  Sense strand starting at position 2874 of SEQ ID NO: 1561576
gggcuuggcugaguggaua

SEQ ID NO: 1682312 - RNA, 19 nt, Artificial Sequence
  Description of Artificial Sequence: Synthetic oligonucleotide
  Antisense strand to SEQ ID NO: 1682311
uauccacucagccaagccc

SEQ ID NO: 1682313 - RNA, 19 nt, Artificial Sequence
  Description of Artificial Sequence: Synthetic oligonucleotide
  Sense strand starting at position 3081 of SEQ ID NO: 1561576
ccucgcaaagaguaugaau

SEQ ID NO: 1682314 - RNA, 19 nt, Artificial Sequence
  Description of Artificial Sequence: Synthetic oligonucleotide
  Antisense strand to SEQ ID NO: 1682313
auucauacucuuugcgagg

SEQ ID NO: 1682315 - RNA, 19 nt, Artificial Sequence
  Description of Artificial Sequence: Synthetic oligonucleotide
  Sense strand starting at position 3083 of SEQ ID NO: 1561576
ucgcaaagaguaugaauaa

SEQ ID NO: 1682316 - RNA, 19 nt, Artificial Sequence
  Description of Artificial Sequence: Synthetic oligonucleotide
  Antisense strand to SEQ ID NO: 1682315
uuauucauacucuuugcga

SEQ ID NO: 1682317 - RNA, 19 nt, Artificial Sequence
  Description of Artificial Sequence: Synthetic oligonucleotide
  Sense strand starting at position 3103 of SEQ ID NO: 1561576
aaucuauuagaggguguga

SEQ ID NO: 1682318 - RNA, 19 nt, Artificial Sequence
  Description of Artificial Sequence: Synthetic oligonucleotide
  Antisense strand to SEQ ID NO: 1682317
ucacacccucuaauagauu

SEQ ID NO: 1682319 - RNA, 19 nt, Artificial Sequence
  Description of Artificial Sequence: Synthetic oligonucleotide
  Sense strand starting at position 3116 of SEQ ID NO: 1561576
gugugaggaauuggacuaa

SEQ ID NO: 1682320 - RNA, 19 nt, Artificial Sequence
  Description of Artificial Sequence: Synthetic oligonucleotide
  Antisense strand to SEQ ID NO: 1682319
uuaguccaauuccucacac

SEQ ID NO: 1682321 - RNA, 19 nt, Artificial Sequence
  Description of Artificial Sequence: Synthetic oligonucleotide
  Sense strand starting at position 3164 of SEQ ID NO: 1561576
ccucuuuauccuggugaau

SEQ ID NO: 1682322 - RNA, 19 nt, Artificial Sequence
  Description of Artificial Sequence: Synthetic oligonucleotide
  Antisense strand to SEQ ID NO: 1682321
auucaccaggauaaagagg

SEQ ID NO: 1682323 - RNA, 19 nt, Artificial Sequence
  Description of Artificial Sequence: Synthetic oligonucleotide
  Sense strand starting at position 3350 of SEQ ID NO: 1561576
uuuaauaggugaguauagu

SEQ ID NO: 1682324 - RNA, 19 nt, Artificial Sequence
  Description of Artificial Sequence: Synthetic oligonucleotide
  Antisense strand to SEQ ID NO: 1682323
acuauacucaccuauuaaa

SEQ ID NO: 1682325 - RNA, 19 nt, Artificial Sequence
  Description of Artificial Sequence: Synthetic oligonucleotide
  Sense strand starting at position 3351 of SEQ ID NO: 1561576
uuaauaggugaguauaguu

SEQ ID NO: 1682326 - RNA, 19 nt, Artificial Sequence
  Description of Artificial Sequence: Synthetic oligonucleotide
  Antisense strand to SEQ ID NO: 1682325
aacuauacucaccuauuaa

SEQ ID NO: 1682327 - RNA, 19 nt, Artificial Sequence
  Description of Artificial Sequence: Synthetic oligonucleotide
  Sense strand starting at position 108 of SEQ ID NO: 1561577
uggcuuuaagcauaaauau

SEQ ID NO: 1682328 - RNA, 19 nt, Artificial Sequence
  Description of Artificial Sequence: Synthetic oligonucleotide
  Antisense strand to SEQ ID NO: 1682327
auauuuaugcuuaaagcca

SEQ ID NO: 1682329 - RNA, 19 nt, Artificial Sequence
  Description of Artificial Sequence: Synthetic oligonucleotide
  Sense strand starting at position 116 of SEQ ID NO: 1561577
agcauaaauauaggagagu

SEQ ID NO: 1682330 - RNA, 19 nt, Artificial Sequence
  Description of Artificial Sequence: Synthetic oligonucleotide
  Antisense strand to SEQ ID NO: 1682329
acucuccuauauuuaugcu

SEQ ID NO: 1682331 - RNA, 19 nt, Artificial Sequence
  Description of Artificial Sequence: Synthetic oligonucleotide
  Sense strand starting at position 130 of SEQ ID NO: 1561577
agaguaucugcaugaccuu

SEQ ID NO: 1682332 - RNA, 19 nt, Artificial Sequence
  Description of Artificial Sequence: Synthetic oligonucleotide
  Antisense strand to SEQ ID NO: 1682331
aaggucaugcagauacucu

SEQ ID NO: 1682333 - RNA, 19 nt, Artificial Sequence
  Description of Artificial Sequence: Synthetic oligonucleotide
  Sense strand starting at position 369 of SEQ ID NO: 1561577
gaguaaagauuugaacuga

SEQ ID NO: 1682334 - RNA, 19 nt, Artificial Sequence
  Description of Artificial Sequence: Synthetic oligonucleotide
  Antisense strand to SEQ ID NO: 1682333
ucaguucaaaucuuuacuc

SEQ ID NO: 1682335 - RNA, 19 nt, Artificial Sequence
  Description of Artificial Sequence: Synthetic oligonucleotide
  Sense strand starting at position 529 of SEQ ID NO: 1561577
uggcaugucugauuuguau

SEQ ID NO: 1682336 - RNA, 19 nt, Artificial Sequence
  Description of Artificial Sequence: Synthetic oligonucleotide
  Antisense strand to SEQ ID NO: 1682335
auacaaaucagacaugcca

SEQ ID NO: 1682337 - RNA, 19 nt, Artificial Sequence
  Description of Artificial Sequence: Synthetic oligonucleotide
  Sense strand starting at position 582 of SEQ ID NO: 1561577
ccaagaccauuugaugaca

SEQ ID NO: 1682338 - RNA, 19 nt, Artificial Sequence
  Description of Artificial Sequence: Synthetic oligonucleotide
  Antisense strand to SEQ ID NO: 1682337
ugucaucaaauggucuugg

SEQ ID NO: 1682339 - RNA, 19 nt, Artificial Sequence
  Description of Artificial Sequence: Synthetic oligonucleotide
  Sense strand starting at position 603 of SEQ ID NO: 1561577
ggagaauauuucugacacu

SEQ ID NO: 1682340 - RNA, 19 nt, Artificial Sequence
  Description of Artificial Sequence: Synthetic oligonucleotide
  Antisense strand to SEQ ID NO: 1682339
agugucagaaauauucucc

SEQ ID NO: 1682341 - RNA, 19 nt, Artificial Sequence
  Description of Artificial Sequence: Synthetic oligonucleotide
  Sense strand starting at position 712 of SEQ ID NO: 1561577
aguuaucugaguggcuaaa

SEQ ID NO: 1682342 - RNA, 19 nt, Artificial Sequence
  Description of Artificial Sequence: Synthetic oligonucleotide
  Antisense strand to SEQ ID NO: 1682341
uuuagccacucagauaacu

SEQ ID NO: 1682343 - RNA, 19 nt, Artificial Sequence
  Description of Artificial Sequence: Synthetic oligonucleotide
  Sense strand starting at position 714 of SEQ ID NO: 1561577
uuaucugaguggcuaaauu

SEQ ID NO: 1682344 - RNA, 19 nt, Artificial Sequence
  Description of Artificial Sequence: Synthetic oligonucleotide
  Antisense strand to SEQ ID NO: 1682343
aauuuagccacucagauaa

SEQ ID NO: 1682345 - RNA, 19 nt, Artificial Sequence
  Description of Artificial Sequence: Synthetic oligonucleotide
  Sense strand starting at position 944 of SEQ ID NO: 1561577
cuuggauacugcuuguaga

SEQ ID NO: 1682346 - RNA, 19 nt, Artificial Sequence
  Description of Artificial Sequence: Synthetic oligonucleotide
  Antisense strand to SEQ ID NO: 1682345
ucuacaagcaguauccaag

SEQ ID NO: 1682347 - RNA, 19 nt, Artificial Sequence
  Description of Artificial Sequence: Synthetic oligonucleotide
  Sense strand starting at position 945 of SEQ ID NO: 1561577
uuggauacugcuuguagaa

SEQ ID NO: 1682348 - RNA, 19 nt, Artificial Sequence
  Description of Artificial Sequence: Synthetic oligonucleotide
  Antisense strand to SEQ ID NO: 1682347
uucuacaagcaguauccaa

SEQ ID NO: 1682349 - RNA, 19 nt, Artificial Sequence
  Description of Artificial Sequence: Synthetic oligonucleotide
  Sense strand starting at position 982 of SEQ ID NO: 1561577
ccuccucuucugggugaca

SEQ ID NO: 1682350 - RNA, 19 nt, Artificial Sequence
  Description of Artificial Sequence: Synthetic oligonucleotide
  Antisense strand to SEQ ID NO: 1682349
ugucacccagaagaggagg

SEQ ID NO: 1682351 - RNA, 19 nt, Artificial Sequence
  Description of Artificial Sequence: Synthetic oligonucleotide
  Sense strand starting at position 991 of SEQ ID NO: 1561577
cugggugacaccuggagaa

SEQ ID NO: 1682352 - RNA, 19 nt, Artificial Sequence
  Description of Artificial Sequence: Synthetic oligonucleotide
  Antisense strand to SEQ ID NO: 1682351
uucuccaggugucacccag

SEQ ID NO: 1682353 - RNA, 19 nt, Artificial Sequence
  Description of Artificial Sequence: Synthetic oligonucleotide
  Sense strand starting at position 1170 of SEQ ID NO: 1561577
gggaaagguuguguucacu

SEQ ID NO: 1682354 - RNA, 19 nt, Artificial Sequence
  Description of Artificial Sequence: Synthetic oligonucleotide
  Antisense strand to SEQ ID NO: 1682353
agugaacacaaccuuuccc

SEQ ID NO: 1682355 - RNA, 19 nt, Artificial Sequence
  Description of Artificial Sequence: Synthetic oligonucleotide
  Sense strand starting at position 1226 of SEQ ID NO: 1561577
guuuccuagagacagaguu

SEQ ID NO: 1682356 - RNA, 19 nt, Artificial Sequence
  Description of Artificial Sequence: Synthetic oligonucleotide
  Antisense strand to SEQ ID NO: 1682355
aacucugucucuaggaaac

SEQ ID NO: 1682357 - RNA, 19 nt, Artificial Sequence
  Description of Artificial Sequence: Synthetic oligonucleotide
  Sense strand starting at position 1236 of SEQ ID NO: 1561577
gacagaguucuggagucac

SEQ ID NO: 1682358 - RNA, 19 nt, Artificial Sequence
  Description of Artificial Sequence: Synthetic oligonucleotide
  Antisense strand to SEQ ID NO: 1682357
gugacuccagaacucuguc

SEQ ID NO: 1682359 - RNA, 19 nt, Artificial Sequence
  Description of Artificial Sequence: Synthetic oligonucleotide
  Sense strand starting at position 1250 of SEQ ID NO: 1561577
gucacaaucgcauaguuga

SEQ ID NO: 1682360 - RNA, 19 nt, Artificial Sequence
  Description of Artificial Sequence: Synthetic oligonucleotide
  Antisense strand to SEQ ID NO: 1682359
ucaacuaugcgauugugac

SEQ ID NO: 1682361 - RNA, 19 nt, Artificial Sequence
  Description of Artificial Sequence: Synthetic oligonucleotide
  Sense strand starting at position 1497 of SEQ ID NO: 1561577
agugacagguaucccauau

SEQ ID NO: 1682362 - RNA, 19 nt, Artificial Sequence
  Description of Artificial Sequence: Synthetic oligonucleotide
  Antisense strand to SEQ ID NO: 1682361
auaugggauaccugucacu

SEQ ID NO: 1682363 - RNA, 19 nt, Artificial Sequence
  Description of Artificial Sequence: Synthetic oligonucleotide
  Sense strand starting at position 1532 of SEQ ID NO: 1561577
guguuauuaucucccagac

SEQ ID NO: 1682364 - RNA, 19 nt, Artificial Sequence
  Description of Artificial Sequence: Synthetic oligonucleotide
  Antisense strand to SEQ ID NO: 1682363
gucugggagauaauaacac

SEQ ID NO: 1682365 - RNA, 19 nt, Artificial Sequence
  Description of Artificial Sequence: Synthetic oligonucleotide
  Sense strand starting at position 1926 of SEQ ID NO: 1561577
ccagucaucccggauggga

SEQ ID NO: 1682366 - RNA, 19 nt, Artificial Sequence
  Description of Artificial Sequence: Synthetic oligonucleotide
  Antisense strand to SEQ ID NO: 1682365
ucccauccgggaugacugg

SEQ ID NO: 1682367 - RNA, 19 nt, Artificial Sequence
  Description of Artificial Sequence: Synthetic oligonucleotide
  Sense strand starting at position 2028 of SEQ ID NO: 1561577
uucgaauuccugcgagaaa

SEQ ID NO: 1682368 - RNA, 19 nt, Artificial Sequence
  Description of Artificial Sequence: Synthetic oligonucleotide
  Antisense strand to SEQ ID NO: 1682367
uuucucgcaggaauucgaa

SEQ ID NO: 1682369 - RNA, 19 nt, Artificial Sequence
  Description of Artificial Sequence: Synthetic oligonucleotide
  Sense strand starting at position 2097 of SEQ ID NO: 1561577
cgccgauuccugucagcuc

SEQ ID NO: 1682370 - RNA, 19 nt, Artificial Sequence
  Description of Artificial Sequence: Synthetic oligonucleotide
  Antisense strand to SEQ ID NO: 1682369
gagcugacaggaaucggcg

SEQ ID NO: 1682371 - RNA, 19 nt, Artificial Sequence
  Description of Artificial Sequence: Synthetic oligonucleotide
  Sense strand starting at position 2562 of SEQ ID NO: 1561577
acgcuaauggugagugguu

SEQ ID NO: 1682372 - RNA, 19 nt, Artificial Sequence
  Description of Artificial Sequence: Synthetic oligonucleotide
  Antisense strand to SEQ ID NO: 1682371
aaccacucaccauuagcgu

SEQ ID NO: 1682373 - RNA, 19 nt, Artificial Sequence
  Description of Artificial Sequence: Synthetic oligonucleotide
  Sense strand starting at position 2639 of SEQ ID NO: 1561577
ugagugugacggcacgaau

SEQ ID NO: 1682374 - RNA, 19 nt, Artificial Sequence
  Description of Artificial Sequence: Synthetic oligonucleotide
  Antisense strand to SEQ ID NO: 1682373
auucgugccgucacacuca

SEQ ID NO: 1682375 - RNA, 19 nt, Artificial Sequence
  Description of Artificial Sequence: Synthetic oligonucleotide
  Sense strand starting at position 2642 of SEQ ID NO: 1561577
gugugacggcacgaauaau

SEQ ID NO: 1682376 - RNA, 19 nt, Artificial Sequence
  Description of Artificial Sequence: Synthetic oligonucleotide
  Antisense strand to SEQ ID NO: 1682375
auuauucgugccgucacac

SEQ ID NO: 1682377 - RNA, 19 nt, Artificial Sequence
  Description of Artificial Sequence: Synthetic oligonucleotide
  Sense strand starting at position 2699 of SEQ ID NO: 1561577
ugaugaaaugugugauaug

SEQ ID NO: 1682378 - RNA, 19 nt, Artificial Sequence
  Description of Artificial Sequence: Synthetic oligonucleotide
  Antisense strand to SEQ ID NO: 1682377
cauaucacacauuucauca

SEQ ID NO: 1682379 - RNA, 19 nt, Artificial Sequence
  Description of Artificial Sequence: Synthetic oligonucleotide
  Sense strand starting at position 2720 of SEQ ID NO: 1561577
ugugauuaugauuaaggcu

SEQ ID NO: 1682380 - RNA, 19 nt, Artificial Sequence
  Description of Artificial Sequence: Synthetic oligonucleotide
  Antisense strand to SEQ ID NO: 1682379
agccuuaaucauaaucaca

SEQ ID NO: 1682381 - RNA, 19 nt, Artificial Sequence
  Description of Artificial Sequence: Synthetic oligonucleotide
  Sense strand starting at position 2762 of SEQ ID NO: 1561577
gugugcgugauuguaauau

SEQ ID NO: 1682382 - RNA, 19 nt, Artificial Sequence
  Description of Artificial Sequence: Synthetic oligonucleotide
  Antisense strand to SEQ ID NO: 1682381
auauuacaaucacgcacac

SEQ ID NO: 1682383 - RNA, 19 nt, Artificial Sequence
  Description of Artificial Sequence: Synthetic oligonucleotide
  Sense strand starting at position 2768 of SEQ ID NO: 1561577
gugauuguaauaugucuag

SEQ ID NO: 1682384 - RNA, 19 nt, Artificial Sequence
  Description of Artificial Sequence: Synthetic oligonucleotide
  Antisense strand to SEQ ID NO: 1682383
cuagacauauuacaaucac

SEQ ID NO: 1682385 - RNA, 19 nt, Artificial Sequence
  Description of Artificial Sequence: Synthetic oligonucleotide
  Sense strand starting at position 2771 of SEQ ID NO: 1561577
auuguaauaugucuaguag

SEQ ID NO: 1682386 - RNA, 19 nt, Artificial Sequence
  Description of Artificial Sequence: Synthetic oligonucleotide
  Antisense strand to SEQ ID NO: 1682385
cuacuagacauauuacaau

SEQ ID NO: 1682387 - RNA, 19 nt, Artificial Sequence
  Description of Artificial Sequence: Synthetic oligonucleotide
  Sense strand starting at position 2772 of SEQ ID NO: 1561577
uuguaauaugucuaguagu

SEQ ID NO: 1682388 - RNA, 19 nt, Artificial Sequence
  Description of Artificial Sequence: Synthetic oligonucleotide
  Antisense strand to SEQ ID NO: 1682387
acuacuagacauauuacaa

SEQ ID NO: 1682389 - RNA, 19 nt, Artificial Sequence
  Description of Artificial Sequence: Synthetic oligonucleotide
  Sense strand starting at position 3022 of SEQ ID NO: 1561577
agcuauugccaugauaaua

SEQ ID NO: 1682390 - RNA, 19 nt, Artificial Sequence
  Description of Artificial Sequence: Synthetic oligonucleotide
  Antisense strand to SEQ ID NO: 1682389
uauuaucauggcaauagcu

SEQ ID NO: 1682391 - RNA, 19 nt, Artificial Sequence
  Description of Artificial Sequence: Synthetic oligonucleotide
  Sense strand starting at position 3144 of SEQ ID NO: 1561577
gggcuuggcugaguggaua

SEQ ID NO: 1682392 - RNA, 19 nt, Artificial Sequence
  Description of Artificial Sequence: Synthetic oligonucleotide
  Antisense strand to SEQ ID NO: 1682391
uauccacucagccaagccc

SEQ ID NO: 1682393 - RNA, 19 nt, Artificial Sequence
  Description of Artificial Sequence: Synthetic oligonucleotide
  Sense strand starting at position 3351 of SEQ ID NO: 1561577
ccucgcaaagaguaugaau

SEQ ID NO: 1682394 - RNA, 19 nt, Artificial Sequence
  Description of Artificial Sequence: Synthetic oligonucleotide
  Antisense strand to SEQ ID NO: 1682393
auucauacucuuugcgagg

SEQ ID NO: 1682395 - RNA, 19 nt, Artificial Sequence
  Description of Artificial Sequence: Synthetic oligonucleotide
  Sense strand starting at position 3353 of SEQ ID NO: 1561577
ucgcaaagaguaugaauaa

SEQ ID NO: 1682396 - RNA, 19 nt, Artificial Sequence
  Description of Artificial Sequence: Synthetic oligonucleotide
  Antisense strand to SEQ ID NO: 1682395
uuauucauacucuuugcga

SEQ ID NO: 1682397 - RNA, 19 nt, Artificial Sequence
  Description of Artificial Sequence: Synthetic oligonucleotide
  Sense strand starting at position 3373 of SEQ ID NO: 1561577
aaucuauuagaggguguga

SEQ ID NO: 1682398 - RNA, 19 nt, Artificial Sequence
  Description of Artificial Sequence: Synthetic oligonucleotide
  Antisense strand to SEQ ID NO: 1682397
ucacacccucuaauagauu

SEQ ID NO: 1682399 - RNA, 19 nt, Artificial Sequence
  Description of Artificial Sequence: Synthetic oligonucleotide
  Sense strand starting at position 3386 of SEQ ID NO: 1561577
gugugaggaauuggacuaa

SEQ ID NO: 1682400 - RNA, 19 nt, Artificial Sequence
  Description of Artificial Sequence: Synthetic oligonucleotide
  Antisense strand to SEQ ID NO: 1682399
uuaguccaauuccucacac

SEQ ID NO: 1682401 - RNA, 19 nt, Artificial Sequence
  Description of Artificial Sequence: Synthetic oligonucleotide
  Sense strand starting at position 3434 of SEQ ID NO: 1561577
ccucuuuauccuggugaau

SEQ ID NO: 1682402 - RNA, 19 nt, Artificial Sequence
  Description of Artificial Sequence: Synthetic oligonucleotide
  Antisense strand to SEQ ID NO: 1682401
auucaccaggauaaagagg

SEQ ID NO: 1682403 - RNA, 19 nt, Artificial Sequence
  Description of Artificial Sequence: Synthetic oligonucleotide
  Sense strand starting at position 3620 of SEQ ID NO: 1561577
uuuaauaggugaguauagu

SEQ ID NO: 1682404 - RNA, 19 nt, Artificial Sequence
  Description of Artificial Sequence: Synthetic oligonucleotide
  Antisense strand to SEQ ID NO: 1682403
acuauacucaccuauuaaa

SEQ ID NO: 1682405 - RNA, 19 nt, Artificial Sequence
  Description of Artificial Sequence: Synthetic oligonucleotide
  Sense strand starting at position 3621 of SEQ ID NO: 1561577
uuaauaggugaguauaguu

SEQ ID NO: 1682406 - RNA, 19 nt, Artificial Sequence
  Description of Artificial Sequence: Synthetic oligonucleotide
  Antisense strand to SEQ ID NO: 1682405
aacuauacucaccuauuaa

SEQ ID NO: 1682407 - RNA, 19 nt, Artificial Sequence
  Description of Artificial Sequence: Synthetic oligonucleotide
  Sense strand starting at position 23 of SEQ ID NO: 1561578
cagagugacucacaaguga

SEQ ID NO: 1682408 - RNA, 19 nt, Artificial Sequence
  Description of Artificial Sequence: Synthetic oligonucleotide
  Antisense strand to SEQ ID NO: 1682407
ucacuugugagucacucug

SEQ ID NO: 1682409 - RNA, 19 nt, Artificial Sequence
  Description of Artificial Sequence: Synthetic oligonucleotide
  Sense strand starting at position 38 of SEQ ID NO: 1561578
gugaauaagucacuccacu

SEQ ID NO: 1682410 - RNA, 19 nt, Artificial Sequence
  Description of Artificial Sequence: Synthetic oligonucleotide
  Antisense strand to SEQ ID NO: 1682409
aguggagugacuuauucac

SEQ ID NO: 1682411 - RNA, 19 nt, Artificial Sequence
  Description of Artificial Sequence: Synthetic oligonucleotide
  Sense strand starting at position 121 of SEQ ID NO: 1561578
ucuuauagauaggauucuu

SEQ ID NO: 1682412 - RNA, 19 nt, Artificial Sequence
  Description of Artificial Sequence: Synthetic oligonucleotide
  Antisense strand to SEQ ID NO: 1682411
aagaauccuaucuauaaga

SEQ ID NO: 1682413 - RNA, 19 nt, Artificial Sequence
  Description of Artificial Sequence: Synthetic oligonucleotide
  Sense strand starting at position 415 of SEQ ID NO: 1561578
cuaucaugcccgguuguuu

SEQ ID NO: 1682414 - RNA, 19 nt, Artificial Sequence
  Description of Artificial Sequence: Synthetic oligonucleotide
  Antisense strand to SEQ ID NO: 1682413
aaacaaccgggcaugauag

SEQ ID NO: 1682415 - RNA, 19 nt, Artificial Sequence
  Description of Artificial Sequence: Synthetic oligonucleotide
  Sense strand starting at position 592 of SEQ ID NO: 1561578
cucccuaauuguguacaua

SEQ ID NO: 1682416 - RNA, 19 nt, Artificial Sequence
  Description of Artificial Sequence: Synthetic oligonucleotide
  Antisense strand to SEQ ID NO: 1682415
uauguacacaauuagggag

SEQ ID NO: 1682417 - RNA, 19 nt, Artificial Sequence
  Description of Artificial Sequence: Synthetic oligonucleotide
  Sense strand starting at position 593 of SEQ ID NO: 1561578
ucccuaauuguguacauau

SEQ ID NO: 1682418 - RNA, 19 nt, Artificial Sequence
  Description of Artificial Sequence: Synthetic oligonucleotide
  Antisense strand to SEQ ID NO: 1682417
auauguacacaauuaggga

SEQ ID NO: 1682419 - RNA, 19 nt, Artificial Sequence
  Description of Artificial Sequence: Synthetic oligonucleotide
  Sense strand starting at position 595 of SEQ ID NO: 1561578
ccuaauuguguacauaucu

SEQ ID NO: 1682420 - RNA, 19 nt, Artificial Sequence
  Description of Artificial Sequence: Synthetic oligonucleotide
  Antisense strand to SEQ ID NO: 1682419
agauauguacacaauuagg

SEQ ID NO: 1682421 - RNA, 19 nt, Artificial Sequence
  Description of Artificial Sequence: Synthetic oligonucleotide
  Sense strand starting at position 661 of SEQ ID NO: 1561578
cuggcauucugcuccucau

SEQ ID NO: 1682422 - RNA, 19 nt, Artificial Sequence
  Description of Artificial Sequence: Synthetic oligonucleotide
  Antisense strand to SEQ ID NO: 1682421
augaggagcagaaugccag

SEQ ID NO: 1682423 - RNA, 19 nt, Artificial Sequence
  Description of Artificial Sequence: Synthetic oligonucleotide
  Sense strand starting at position 795 of SEQ ID NO: 1561578
aucguucuaucguccucaa

SEQ ID NO: 1682424 - RNA, 19 nt, Artificial Sequence
  Description of Artificial Sequence: Synthetic oligonucleotide
  Antisense strand to SEQ ID NO: 1682423
uugaggacgauagaacgau

SEQ ID NO: 1682425 - RNA, 19 nt, Artificial Sequence
  Description of Artificial Sequence: Synthetic oligonucleotide
  Sense strand starting at position 798 of SEQ ID NO: 1561578
guucuaucguccucaaucu

SEQ ID NO: 1682426 - RNA, 19 nt, Artificial Sequence
  Description of Artificial Sequence: Synthetic oligonucleotide
  Antisense strand to SEQ ID NO: 1682425
agauugaggacgauagaac

SEQ ID NO: 1682427 - RNA, 19 nt, Artificial Sequence
  Description of Artificial Sequence: Synthetic oligonucleotide
  Sense strand starting at position 817 of SEQ ID NO: 1561578
ugauauauuuccgccucuu

SEQ ID NO: 1682428 - RNA, 19 nt, Artificial Sequence
  Description of Artificial Sequence: Synthetic oligonucleotide
  Antisense strand to SEQ ID NO: 1682427
aagaggcggaaauauauca

SEQ ID NO: 1682429 - RNA, 19 nt, Artificial Sequence
  Description of Artificial Sequence: Synthetic oligonucleotide
  Sense strand starting at position 873 of SEQ ID NO: 1561578
uuccgucuucccuguuaua

SEQ ID NO: 1682430 - RNA, 19 nt, Artificial Sequence
  Description of Artificial Sequence: Synthetic oligonucleotide
  Antisense strand to SEQ ID NO: 1682429
uauaacagggaagacggaa

SEQ ID NO: 1682431 - RNA, 19 nt, Artificial Sequence
  Description of Artificial Sequence: Synthetic oligonucleotide
  Sense strand starting at position 1028 of SEQ ID NO: 1561578
ugaugagauucccucuuug

SEQ ID NO: 1682432 - RNA, 19 nt, Artificial Sequence
  Description of Artificial Sequence: Synthetic oligonucleotide
  Antisense strand to SEQ ID NO: 1682431
caaagagggaaucucauca

SEQ ID NO: 1682433 - RNA, 19 nt, Artificial Sequence
  Description of Artificial Sequence: Synthetic oligonucleotide
  Sense strand starting at position 1098 of SEQ ID NO: 1561578
cucuacguuucuccaguua

SEQ ID NO: 1682434 - RNA, 19 nt, Artificial Sequence
  Description of Artificial Sequence: Synthetic oligonucleotide
  Antisense strand to SEQ ID NO: 1682433
uaacuggagaaacguagag

SEQ ID NO: 1682435 - RNA, 19 nt, Artificial Sequence
  Description of Artificial Sequence: Synthetic oligonucleotide
  Sense strand starting at position 1260 of SEQ ID NO: 1561578
augccuuuggccgacacaa

SEQ ID NO: 1682436 - RNA, 19 nt, Artificial Sequence
  Description of Artificial Sequence: Synthetic oligonucleotide
  Antisense strand to SEQ ID NO: 1682435
uugugucggccaaaggcau

SEQ ID NO: 1682437 - RNA, 19 nt, Artificial Sequence
  Description of Artificial Sequence: Synthetic oligonucleotide
  Sense strand starting at position 1697 of SEQ ID NO: 1561578
aaguguauacaucgcccua

SEQ ID NO: 1682438 - RNA, 19 nt, Artificial Sequence
  Description of Artificial Sequence: Synthetic oligonucleotide
  Antisense strand to SEQ ID NO: 1682437
uagggcgauguauacacuu

SEQ ID NO: 1682439 - RNA, 19 nt, Artificial Sequence
  Description of Artificial Sequence: Synthetic oligonucleotide
  Sense strand starting at position 1699 of SEQ ID NO: 1561578
guguauacaucgcccuaca

SEQ ID NO: 1682440 - RNA, 19 nt, Artificial Sequence
  Description of Artificial Sequence: Synthetic oligonucleotide
  Antisense strand to SEQ ID NO: 1682439
uguagggcgauguauacac

SEQ ID NO: 1682441 - RNA, 19 nt, Artificial Sequence
  Description of Artificial Sequence: Synthetic oligonucleotide
  Sense strand starting at position 1798 of SEQ ID NO: 1561578
cucaauuuguccuggguga

SEQ ID NO: 1682442 - RNA, 19 nt, Artificial Sequence
  Description of Artificial Sequence: Synthetic oligonucleotide
  Antisense strand to SEQ ID NO: 1682441
ucacccaggacaaauugag

SEQ ID NO: 1682443 - RNA, 19 nt, Artificial Sequence
  Description of Artificial Sequence: Synthetic oligonucleotide
  Sense strand starting at position 1884 of SEQ ID NO: 1561578
cugguaagcgcagacuuaa

SEQ ID NO: 1682444 - RNA, 19 nt, Artificial Sequence
  Description of Artificial Sequence: Synthetic oligonucleotide
  Antisense strand to SEQ ID NO: 1682443
uuaagucugcgcuuaccag

SEQ ID NO: 1682445 - RNA, 19 nt, Artificial Sequence
  Description of Artificial Sequence: Synthetic oligonucleotide
  Sense strand starting at position 2048 of SEQ ID NO: 1561578
gugggaagccgagagacuu

SEQ ID NO: 1682446 - RNA, 19 nt, Artificial Sequence
  Description of Artificial Sequence: Synthetic oligonucleotide
  Antisense strand to SEQ ID NO: 1682445
aagucucucggcuucccac

SEQ ID NO: 1682447 - RNA, 19 nt, Artificial Sequence
  Description of Artificial Sequence: Synthetic oligonucleotide
  Sense strand starting at position 2348 of SEQ ID NO: 1561578
cgcugugcucagcuuuaga

SEQ ID NO: 1682448 - RNA, 19 nt, Artificial Sequence
  Description of Artificial Sequence: Synthetic oligonucleotide
  Antisense strand to SEQ ID NO: 1682447
ucuaaagcugagcacagcg

SEQ ID NO: 1682449 - RNA, 19 nt, Artificial Sequence
  Description of Artificial Sequence: Synthetic oligonucleotide
  Sense strand starting at position 2397 of SEQ ID NO: 1561578
gagugcucaggccaaggau

SEQ ID NO: 1682450 - RNA, 19 nt, Artificial Sequence
  Description of Artificial Sequence: Synthetic oligonucleotide
  Antisense strand to SEQ ID NO: 1682449
auccuuggccugagcacuc

SEQ ID NO: 1682451 - RNA, 19 nt, Artificial Sequence
  Description of Artificial Sequence: Synthetic oligonucleotide
  Sense strand starting at position 2625 of SEQ ID NO: 1561578
gauguuacauagggaucca

SEQ ID NO: 1682452 - RNA, 19 nt, Artificial Sequence
  Description of Artificial Sequence: Synthetic oligonucleotide
  Antisense strand to SEQ ID NO: 1682451
uggaucccuauguaacauc

SEQ ID NO: 1682453 - RNA, 19 nt, Artificial Sequence
  Description of Artificial Sequence: Synthetic oligonucleotide
  Sense strand starting at position 2670 of SEQ ID NO: 1561578
caguuaguugucccagcgu

SEQ ID NO: 1682454 - RNA, 19 nt, Artificial Sequence
  Description of Artificial Sequence: Synthetic oligonucleotide
  Antisense strand to SEQ ID NO: 1682453
acgcugggacaacuaacug

SEQ ID NO: 1682455 - RNA, 19 nt, Artificial Sequence
  Description of Artificial Sequence: Synthetic oligonucleotide
  Sense strand starting at position 2673 of SEQ ID NO: 1561578
uuaguugucccagcguauu

SEQ ID NO: 1682456 - RNA, 19 nt, Artificial Sequence
  Description of Artificial Sequence: Synthetic oligonucleotide
  Antisense strand to SEQ ID NO: 1682455
aauacgcugggacaacuaa

SEQ ID NO: 1682457 - RNA, 19 nt, Artificial Sequence
  Description of Artificial Sequence: Synthetic oligonucleotide
  Sense strand starting at position 2679 of SEQ ID NO: 1561578
gucccagcguauuugugua

SEQ ID NO: 1682458 - RNA, 19 nt, Artificial Sequence
  Description of Artificial Sequence: Synthetic oligonucleotide
  Antisense strand to SEQ ID NO: 1682457
uacacaaauacgcugggac

SEQ ID NO: 1682459 - RNA, 19 nt, Artificial Sequence
  Description of Artificial Sequence: Synthetic oligonucleotide
  Sense strand starting at position 2683 of SEQ ID NO: 1561578
cagcguauuuguguaagag

SEQ ID NO: 1682460 - RNA, 19 nt, Artificial Sequence
  Description of Artificial Sequence: Synthetic oligonucleotide
  Antisense strand to SEQ ID NO: 1682459
cucuuacacaaauacgcug

SEQ ID NO: 1682461 - RNA, 19 nt, Artificial Sequence
  Description of Artificial Sequence: Synthetic oligonucleotide
  Sense strand starting at position 2687 of SEQ ID NO: 1561578
guauuuguguaagagaucu

SEQ ID NO: 1682462 - RNA, 19 nt, Artificial Sequence
  Description of Artificial Sequence: Synthetic oligonucleotide
  Antisense strand to SEQ ID NO: 1682461
agaucucuuacacaaauac

SEQ ID NO: 1682463 - RNA, 19 nt, Artificial Sequence
  Description of Artificial Sequence: Synthetic oligonucleotide
  Sense strand starting at position 2693 of SEQ ID NO: 1561578
guguaagagaucuaucagu

SEQ ID NO: 1682464 - RNA, 19 nt, Artificial Sequence
  Description of Artificial Sequence: Synthetic oligonucleotide
  Antisense strand to SEQ ID NO: 1682463
acugauagaucucuuacac

SEQ ID NO: 1682465 - RNA, 19 nt, Artificial Sequence
  Description of Artificial Sequence: Synthetic oligonucleotide
  Sense strand starting at position 2771 of SEQ ID NO: 1561578
gcgcgaucucugucuccca

SEQ ID NO: 1682466 - RNA, 19 nt, Artificial Sequence
  Description of Artificial Sequence: Synthetic oligonucleotide
  Antisense strand to SEQ ID NO: 1682465
ugggagacagagaucgcgc

SEQ ID NO: 1682467 - RNA, 19 nt, Artificial Sequence
  Description of Artificial Sequence: Synthetic oligonucleotide
  Sense strand starting at position 3148 of SEQ ID NO: 1561578
uccggaguaguugacauua

SEQ ID NO: 1682468 - RNA, 19 nt, Artificial Sequence
  Description of Artificial Sequence: Synthetic oligonucleotide
  Antisense strand to SEQ ID NO: 1682467
uaaugucaacuacuccgga

SEQ ID NO: 1682469 - RNA, 19 nt, Artificial Sequence
  Description of Artificial Sequence: Synthetic oligonucleotide
  Sense strand starting at position 3414 of SEQ ID NO: 1561578
ucacgaugauaauagugaa

SEQ ID NO: 1682470 - RNA, 19 nt, Artificial Sequence
  Description of Artificial Sequence: Synthetic oligonucleotide
  Antisense strand to SEQ ID NO: 1682469
uucacuauuaucaucguga

SEQ ID NO: 1682471 - RNA, 19 nt, Artificial Sequence
  Description of Artificial Sequence: Synthetic oligonucleotide
  Sense strand starting at position 3417 of SEQ ID NO: 1561578
cgaugauaauagugaaaga

SEQ ID NO: 1682472 - RNA, 19 nt, Artificial Sequence
  Description of Artificial Sequence: Synthetic oligonucleotide
  Antisense strand to SEQ ID NO: 1682471
ucuuucacuauuaucaucg

SEQ ID NO: 1682473 - RNA, 19 nt, Artificial Sequence
  Description of Artificial Sequence: Synthetic oligonucleotide
  Sense strand starting at position 3636 of SEQ ID NO: 1561578
ggcucuauuugguaaugga

SEQ ID NO: 1682474 - RNA, 19 nt, Artificial Sequence
  Description of Artificial Sequence: Synthetic oligonucleotide
  Antisense strand to SEQ ID NO: 1682473
uccauuaccaaauagagcc

SEQ ID NO: 1682475 - RNA, 19 nt, Artificial Sequence
  Description of Artificial Sequence: Synthetic oligonucleotide
  Sense strand starting at position 3824 of SEQ ID NO: 1561578
auguaagauuaaguacuga

SEQ ID NO: 1682476 - RNA, 19 nt, Artificial Sequence
  Description of Artificial Sequence: Synthetic oligonucleotide
  Antisense strand to SEQ ID NO: 1682475
ucaguacuuaaucuuacau

SEQ ID NO: 1682477 - RNA, 19 nt, Artificial Sequence
  Description of Artificial Sequence: Synthetic oligonucleotide
  Sense strand starting at position 3834 of SEQ ID NO: 1561578
aaguacugaguuuauguga

SEQ ID NO: 1682478 - RNA, 19 nt, Artificial Sequence
  Description of Artificial Sequence: Synthetic oligonucleotide
  Antisense strand to SEQ ID NO: 1682477
ucacauaaacucaguacuu

SEQ ID NO: 1682479 - RNA, 19 nt, Artificial Sequence
  Description of Artificial Sequence: Synthetic oligonucleotide
  Sense strand starting at position 3837 of SEQ ID NO: 1561578
uacugaguuuaugugaaca

SEQ ID NO: 1682480 - RNA, 19 nt, Artificial Sequence
  Description of Artificial Sequence: Synthetic oligonucleotide
  Antisense strand to SEQ ID NO: 1682479
uguucacauaaacucagua

SEQ ID NO: 1682481 - RNA, 19 nt, Artificial Sequence
  Description of Artificial Sequence: Synthetic oligonucleotide
  Sense strand starting at position 3839 of SEQ ID NO: 1561578
cugaguuuaugugaacaca

SEQ ID NO: 1682482 - RNA, 19 nt, Artificial Sequence
  Description of Artificial Sequence: Synthetic oligonucleotide
  Antisense strand to SEQ ID NO: 1682481
uguguucacauaaacucag

SEQ ID NO: 1682483 - RNA, 19 nt, Artificial Sequence
  Description of Artificial Sequence: Synthetic oligonucleotide
  Sense strand starting at position 3897 of SEQ ID NO: 1561578
aaaugagaucggcguucca

SEQ ID NO: 1682484 - RNA, 19 nt, Artificial Sequence
  Description of Artificial Sequence: Synthetic oligonucleotide
  Antisense strand to SEQ ID NO: 1682483
uggaacgccgaucucauuu

SEQ ID NO: 1682485 - RNA, 19 nt, Artificial Sequence
  Description of Artificial Sequence: Synthetic oligonucleotide
  Sense strand starting at position 3950 of SEQ ID NO: 1561578
gacagagaaucuuuagcag

SEQ ID NO: 1682486 - RNA, 19 nt, Artificial Sequence
  Description of Artificial Sequence: Synthetic oligonucleotide
  Antisense strand to SEQ ID NO: 1682485
cugcuaaagauucucuguc

SEQ ID NO: 1682487 - RNA, 19 nt, Artificial Sequence
  Description of Artificial Sequence: Synthetic oligonucleotide
  Sense strand starting at position 294 of SEQ ID NO: 1561579
ggauaacgcuguccgaaua

SEQ ID NO: 1682488 - RNA, 19 nt, Artificial Sequence
  Description of Artificial Sequence: Synthetic oligonucleotide
  Antisense strand to SEQ ID NO: 1682487
uauucggacagcguuaucc

SEQ ID NO: 1682489 - RNA, 19 nt, Artificial Sequence
  Description of Artificial Sequence: Synthetic oligonucleotide
  Sense strand starting at position 456 of SEQ ID NO: 1561579
gucuguauuuagucaguuc

SEQ ID NO: 1682490 - RNA, 19 nt, Artificial Sequence
  Description of Artificial Sequence: Synthetic oligonucleotide
  Antisense strand to SEQ ID NO: 1682489
gaacugacuaaauacagac

SEQ ID NO: 1682491 - RNA, 19 nt, Artificial Sequence
  Description of Artificial Sequence: Synthetic oligonucleotide
  Sense strand starting at position 518 of SEQ ID NO: 1561579
ggucacaagauauguuaug

SEQ ID NO: 1682492 - RNA, 19 nt, Artificial Sequence
  Description of Artificial Sequence: Synthetic oligonucleotide
  Antisense strand to SEQ ID NO: 1682491
cauaacauaucuugugacc

SEQ ID NO: 1682493 - RNA, 19 nt, Artificial Sequence
  Description of Artificial Sequence: Synthetic oligonucleotide
  Sense strand starting at position 524 of SEQ ID NO: 1561579
aagauauguuaugcuauag

SEQ ID NO: 1682494 - RNA, 19 nt, Artificial Sequence
  Description of Artificial Sequence: Synthetic oligonucleotide
  Antisense strand to SEQ ID NO: 1682493
cuauagcauaacauaucuu

SEQ ID NO: 1682495 - RNA, 19 nt, Artificial Sequence
  Description of Artificial Sequence: Synthetic oligonucleotide
  Sense strand starting at position 548 of SEQ ID NO: 1561579
acaaccugucacuguauaa

SEQ ID NO: 1682496 - RNA, 19 nt, Artificial Sequence
  Description of Artificial Sequence: Synthetic oligonucleotide
  Antisense strand to SEQ ID NO: 1682495
uuauacagugacagguugu

SEQ ID NO: 1682497 - RNA, 19 nt, Artificial Sequence
  Description of Artificial Sequence: Synthetic oligonucleotide
  Sense strand starting at position 769 of SEQ ID NO: 1561579
cucugcucucccuguuaca

SEQ ID NO: 1682498 - RNA, 19 nt, Artificial Sequence
  Description of Artificial Sequence: Synthetic oligonucleotide
  Antisense strand to SEQ ID NO: 1682497
uguaacagggagagcagag

SEQ ID NO: 1682499 - RNA, 19 nt, Artificial Sequence
  Description of Artificial Sequence: Synthetic oligonucleotide
  Sense strand starting at position 1641 of SEQ ID NO: 1561579
guguauacauugcccuaga

SEQ ID NO: 1682500 - RNA, 19 nt, Artificial Sequence
  Description of Artificial Sequence: Synthetic oligonucleotide
  Antisense strand to SEQ ID NO: 1682499
ucuagggcaauguauacac

SEQ ID NO: 1682501 - RNA, 19 nt, Artificial Sequence
  Description of Artificial Sequence: Synthetic oligonucleotide
  Sense strand starting at position 1741 of SEQ ID NO: 1561579
cucuauuugcucuggguga

SEQ ID NO: 1682502 - RNA, 19 nt, Artificial Sequence
  Description of Artificial Sequence: Synthetic oligonucleotide
  Antisense strand to SEQ ID NO: 1682501
ucacccagagcaaauagag

SEQ ID NO: 1682503 - RNA, 19 nt, Artificial Sequence
  Description of Artificial Sequence: Synthetic oligonucleotide
  Sense strand starting at position 1742 of SEQ ID NO: 1561579
ucuauuugcucugggugaa

SEQ ID NO: 1682504 - RNA, 19 nt, Artificial Sequence
  Description of Artificial Sequence: Synthetic oligonucleotide
  Antisense strand to SEQ ID NO: 1682503
uucacccagagcaaauaga

SEQ ID NO: 1682505 - RNA, 19 nt, Artificial Sequence
  Description of Artificial Sequence: Synthetic oligonucleotide
  Sense strand starting at position 1813 of SEQ ID NO: 1561579
cgcugaggaccugggaaau

SEQ ID NO: 1682506 - RNA, 19 nt, Artificial Sequence
  Description of Artificial Sequence: Synthetic oligonucleotide
  Antisense strand to SEQ ID NO: 1682505
auuucccagguccucagcg

SEQ ID NO: 1682507 - RNA, 19 nt, Artificial Sequence
  Description of Artificial Sequence: Synthetic oligonucleotide
  Sense strand starting at position 1885 of SEQ ID NO: 1561579
acgcgauccgcuuccagau

SEQ ID NO: 1682508 - RNA, 19 nt, Artificial Sequence
  Description of Artificial Sequence: Synthetic oligonucleotide
  Antisense strand to SEQ ID NO: 1682507
aucuggaagcggaucgcgu

SEQ ID NO: 1682509 - RNA, 19 nt, Artificial Sequence
  Description of Artificial Sequence: Synthetic oligonucleotide
  Sense strand starting at position 1886 of SEQ ID NO: 1561579
cgcgauccgcuuccagauu

SEQ ID NO: 1682510 - RNA, 19 nt, Artificial Sequence
  Description of Artificial Sequence: Synthetic oligonucleotide
  Antisense strand to SEQ ID NO: 1682509
aaucuggaagcggaucgcg

SEQ ID NO: 1682511 - RNA, 19 nt, Artificial Sequence
  Description of Artificial Sequence: Synthetic oligonucleotide
  Sense strand starting at position 1895 of SEQ ID NO: 1561579
cuuccagauuugcgagaau

SEQ ID NO: 1682512 - RNA, 19 nt, Artificial Sequence
  Description of Artificial Sequence: Synthetic oligonucleotide
  Antisense strand to SEQ ID NO: 1682511
auucucgcaaaucuggaag

SEQ ID NO: 1682513 - RNA, 19 nt, Artificial Sequence
  Description of Artificial Sequence: Synthetic oligonucleotide
  Sense strand starting at position 2000 of SEQ ID NO: 1561579
cagagagacuuugcgguuu

SEQ ID NO: 1682514 - RNA, 19 nt, Artificial Sequence
  Description of Artificial Sequence: Synthetic oligonucleotide
  Antisense strand to SEQ ID NO: 1682513
aaaccgcaaagucucucug

SEQ ID NO: 1682515 - RNA, 19 nt, Artificial Sequence
  Description of Artificial Sequence: Synthetic oligonucleotide
  Sense strand starting at position 2012 of SEQ ID NO: 1561579
gcgguuuagaaccggcaga

SEQ ID NO: 1682516 - RNA, 19 nt, Artificial Sequence
  Description of Artificial Sequence: Synthetic oligonucleotide
  Antisense strand to SEQ ID NO: 1682515
ucugccgguucuaaaccgc

SEQ ID NO: 1682517 - RNA, 19 nt, Artificial Sequence
  Description of Artificial Sequence: Synthetic oligonucleotide
  Sense strand starting at position 2626 of SEQ ID NO: 1561579
acauuauucuguuccgugu

SEQ ID NO: 1682518 - RNA, 19 nt, Artificial Sequence
  Description of Artificial Sequence: Synthetic oligonucleotide
  Antisense strand to SEQ ID NO: 1682517
acacggaacagaauaaugu

SEQ ID NO: 1682519 - RNA, 19 nt, Artificial Sequence
  Description of Artificial Sequence: Synthetic oligonucleotide
  Sense strand starting at position 2630 of SEQ ID NO: 1561579
uauucuguuccguguggau

SEQ ID NO: 1682520 - RNA, 19 nt, Artificial Sequence
  Description of Artificial Sequence: Synthetic oligonucleotide
  Antisense strand to SEQ ID NO: 1682519
auccacacggaacagaaua

SEQ ID NO: 1682521 - RNA, 19 nt, Artificial Sequence
  Description of Artificial Sequence: Synthetic oligonucleotide
  Sense strand starting at position 2632 of SEQ ID NO: 1561579
uucuguuccguguggauau

SEQ ID NO: 1682522 - RNA, 19 nt, Artificial Sequence
  Description of Artificial Sequence: Synthetic oligonucleotide
  Antisense strand to SEQ ID NO: 1682521
auauccacacggaacagaa

SEQ ID NO: 1682523 - RNA, 19 nt, Artificial Sequence
  Description of Artificial Sequence: Synthetic oligonucleotide
  Sense strand starting at position 2651 of SEQ ID NO: 1561579
ccaguuaguuguuccagca

SEQ ID NO: 1682524 - RNA, 19 nt, Artificial Sequence
  Description of Artificial Sequence: Synthetic oligonucleotide
  Antisense strand to SEQ ID NO: 1682523
ugcuggaacaacuaacugg

SEQ ID NO: 1682525 - RNA, 19 nt, Artificial Sequence
  Description of Artificial Sequence: Synthetic oligonucleotide
  Sense strand starting at position 2665 of SEQ ID NO: 1561579
cagcacauuuguggaagaa

SEQ ID NO: 1682526 - RNA, 19 nt, Artificial Sequence
  Description of Artificial Sequence: Synthetic oligonucleotide
  Antisense strand to SEQ ID NO: 1682525
uucuuccacaaaugugcug

SEQ ID NO: 1682527 - RNA, 19 nt, Artificial Sequence
  Description of Artificial Sequence: Synthetic oligonucleotide
  Sense strand starting at position 2829 of SEQ ID NO: 1561579
ggaguauuacaguauuacu

SEQ ID NO: 1682528 - RNA, 19 nt, Artificial Sequence
  Description of Artificial Sequence: Synthetic oligonucleotide
  Antisense strand to SEQ ID NO: 1682527
aguaauacuguaauacucc

SEQ ID NO: 1682529 - RNA, 19 nt, Artificial Sequence
  Description of Artificial Sequence: Synthetic oligonucleotide
  Sense strand starting at position 2834 of SEQ ID NO: 1561579
auuacaguauuacugguau

SEQ ID NO: 1682530 - RNA, 19 nt, Artificial Sequence
  Description of Artificial Sequence: Synthetic oligonucleotide
  Antisense strand to SEQ ID NO: 1682529
auaccaguaauacuguaau

SEQ ID NO: 1682531 - RNA, 19 nt, Artificial Sequence
  Description of Artificial Sequence: Synthetic oligonucleotide
  Sense strand starting at position 2838 of SEQ ID NO: 1561579
caguauuacugguauuaga

SEQ ID NO: 1682532 - RNA, 19 nt, Artificial Sequence
  Description of Artificial Sequence: Synthetic oligonucleotide
  Antisense strand to SEQ ID NO: 1682531
ucuaauaccaguaauacug

SEQ ID NO: 1682533 - RNA, 19 nt, Artificial Sequence
  Description of Artificial Sequence: Synthetic oligonucleotide
  Sense strand starting at position 3016 of SEQ ID NO: 1561579
aaggaaugcucuuuacugu

SEQ ID NO: 1682534 - RNA, 19 nt, Artificial Sequence
  Description of Artificial Sequence: Synthetic oligonucleotide
  Antisense strand to SEQ ID NO: 1682533
acaguaaagagcauuccuu

SEQ ID NO: 1682535 - RNA, 19 nt, Artificial Sequence
  Description of Artificial Sequence: Synthetic oligonucleotide
  Sense strand starting at position 3017 of SEQ ID NO: 1561579
aggaaugcucuuuacuguu

SEQ ID NO: 1682536 - RNA, 19 nt, Artificial Sequence
  Description of Artificial Sequence: Synthetic oligonucleotide
  Antisense strand to SEQ ID NO: 1682535
aacaguaaagagcauuccu

SEQ ID NO: 1682537 - RNA, 19 nt, Artificial Sequence
  Description of Artificial Sequence: Synthetic oligonucleotide
  Sense strand starting at position 3023 of SEQ ID NO: 1561579
gcucuuuacuguuuaaacg

SEQ ID NO: 1682538 - RNA, 19 nt, Artificial Sequence
  Description of Artificial Sequence: Synthetic oligonucleotide
  Antisense strand to SEQ ID NO: 1682537
cguuuaaacaguaaagagc

SEQ ID NO: 1682539 - RNA, 19 nt, Artificial Sequence
  Description of Artificial Sequence: Synthetic oligonucleotide
  Sense strand starting at position 3024 of SEQ ID NO: 1561579
cucuuuacuguuuaaacgu

SEQ ID NO: 1682540 - RNA, 19 nt, Artificial Sequence
  Description of Artificial Sequence: Synthetic oligonucleotide
  Antisense strand to SEQ ID NO: 1682539
acguuuaaacaguaaagag

SEQ ID NO: 1682541 - RNA, 19 nt, Artificial Sequence
  Description of Artificial Sequence: Synthetic oligonucleotide
  Sense strand starting at position 3031 of SEQ ID NO: 1561579
cuguuuaaacguugagaaa

SEQ ID NO: 1682542 - RNA, 19 nt, Artificial Sequence
  Description of Artificial Sequence: Synthetic oligonucleotide
  Antisense strand to SEQ ID NO: 1682541
uuucucaacguuuaaacag

SEQ ID NO: 1682543 - RNA, 19 nt, Artificial Sequence
  Description of Artificial Sequence: Synthetic oligonucleotide
  Sense strand starting at position 3085 of SEQ ID NO: 1561579
ggguaauuaucuccacgac

SEQ ID NO: 1682544 - RNA, 19 nt, Artificial Sequence
  Description of Artificial Sequence: Synthetic oligonucleotide
  Antisense strand to SEQ ID NO: 1682543
gucguggagauaauuaccc

SEQ ID NO: 1682545 - RNA, 19 nt, Artificial Sequence
  Description of Artificial Sequence: Synthetic oligonucleotide
  Sense strand starting at position 3086 of SEQ ID NO: 1561579
gguaauuaucuccacgaca

SEQ ID NO: 1682546 - RNA, 19 nt, Artificial Sequence
  Description of Artificial Sequence: Synthetic oligonucleotide
  Antisense strand to SEQ ID NO: 1682545
ugucguggagauaauuacc

SEQ ID NO: 1682547 - RNA, 19 nt, Artificial Sequence
  Description of Artificial Sequence: Synthetic oligonucleotide
  Sense strand starting at position 3169 of SEQ ID NO: 1561579
ggcaaacagcuaugagguu

SEQ ID NO: 1682548 - RNA, 19 nt, Artificial Sequence
  Description of Artificial Sequence: Synthetic oligonucleotide
  Antisense strand to SEQ ID NO: 1682547
aaccucauagcuguuugcc

SEQ ID NO: 1682549 - RNA, 19 nt, Artificial Sequence
  Description of Artificial Sequence: Synthetic oligonucleotide
  Sense strand starting at position 3442 of SEQ ID NO: 1561579
uggugagacuccuacaaua

SEQ ID NO: 1682550 - RNA, 19 nt, Artificial Sequence
  Description of Artificial Sequence: Synthetic oligonucleotide
  Antisense strand to SEQ ID NO: 1682549
uauuguaggagucucacca

SEQ ID NO: 1682551 - RNA, 19 nt, Artificial Sequence
  Description of Artificial Sequence: Synthetic oligonucleotide
  Sense strand starting at position 3462 of SEQ ID NO: 1561579
gacagacacugaugucaga

SEQ ID NO: 1682552 - RNA, 19 nt, Artificial Sequence
  Description of Artificial Sequence: Synthetic oligonucleotide
  Antisense strand to SEQ ID NO: 1682551
ucugacaucagugucuguc

SEQ ID NO: 1682553 - RNA, 19 nt, Artificial Sequence
  Description of Artificial Sequence: Synthetic oligonucleotide
  Sense strand starting at position 3469 of SEQ ID NO: 1561579
acugaugucagagguaaau

SEQ ID NO: 1682554 - RNA, 19 nt, Artificial Sequence
  Description of Artificial Sequence: Synthetic oligonucleotide
  Antisense strand to SEQ ID NO: 1682553
auuuaccucugacaucagu

SEQ ID NO: 1682555 - RNA, 19 nt, Artificial Sequence
  Description of Artificial Sequence: Synthetic oligonucleotide
  Sense strand starting at position 3501 of SEQ ID NO: 1561579
auauaugauuaagugcaga

SEQ ID NO: 1682556 - RNA, 19 nt, Artificial Sequence
  Description of Artificial Sequence: Synthetic oligonucleotide
  Antisense strand to SEQ ID NO: 1682555
ucugcacuuaaucauauau

SEQ ID NO: 1682557 - RNA, 19 nt, Artificial Sequence
  Description of Artificial Sequence: Synthetic oligonucleotide
  Sense strand starting at position 3504 of SEQ ID NO: 1561579
uaugauuaagugcagaguu

SEQ ID NO: 1682558 - RNA, 19 nt, Artificial Sequence
  Description of Artificial Sequence: Synthetic oligonucleotide
  Antisense strand to SEQ ID NO: 1682557
aacucugcacuuaaucaua

SEQ ID NO: 1682559 - RNA, 19 nt, Artificial Sequence
  Description of Artificial Sequence: Synthetic oligonucleotide
  Sense strand starting at position 3511 of SEQ ID NO: 1561579
aagugcagaguuuguuuga

SEQ ID NO: 1682560 - RNA, 19 nt, Artificial Sequence
  Description of Artificial Sequence: Synthetic oligonucleotide
  Antisense strand to SEQ ID NO: 1682559
ucaaacaaacucugcacuu

SEQ ID NO: 1682561 - RNA, 19 nt, Artificial Sequence
  Description of Artificial Sequence: Synthetic oligonucleotide
  Sense strand starting at position 3512 of SEQ ID NO: 1561579
agugcagaguuuguuugaa

SEQ ID NO: 1682562 - RNA, 19 nt, Artificial Sequence
  Description of Artificial Sequence: Synthetic oligonucleotide
  Antisense strand to SEQ ID NO: 1682561
uucaaacaaacucugcacu

SEQ ID NO: 1682563 - RNA, 19 nt, Artificial Sequence
  Description of Artificial Sequence: Synthetic oligonucleotide
  Sense strand starting at position 3514 of SEQ ID NO: 1561579
ugcagaguuuguuugaaca

SEQ ID NO: 1682564 - RNA, 19 nt, Artificial Sequence
  Description of Artificial Sequence: Synthetic oligonucleotide
  Antisense strand to SEQ ID NO: 1682563
uguucaaacaaacucugca

SEQ ID NO: 1682565 - RNA, 19 nt, Artificial Sequence
  Description of Artificial Sequence: Synthetic oligonucleotide
  Sense strand starting at position 3781 of SEQ ID NO: 1561579
gcugcuuagucuuccuaau

SEQ ID NO: 1682566 - RNA, 19 nt, Artificial Sequence
  Description of Artificial Sequence: Synthetic oligonucleotide
  Antisense strand to SEQ ID NO: 1682565
auuaggaagacuaagcagc

SEQ ID NO: 1682567 - RNA, 19 nt, Artificial Sequence
  Description of Artificial Sequence: Synthetic oligonucleotide
  Sense strand starting at position 394 of SEQ ID NO: 1561580
ggaguccuccauuagcaua

SEQ ID NO: 1682568 - RNA, 19 nt, Artificial Sequence
  Description of Artificial Sequence: Synthetic oligonucleotide
  Antisense strand to SEQ ID NO: 1682567
uaugcuaauggaggacucc

SEQ ID NO: 1682569 - RNA, 19 nt, Artificial Sequence
  Description of Artificial Sequence: Synthetic oligonucleotide
  Sense strand starting at position 438 of SEQ ID NO: 1561580
uauuaagaguugcagaaga

SEQ ID NO: 1682570 - RNA, 19 nt, Artificial Sequence
  Description of Artificial Sequence: Synthetic oligonucleotide
  Antisense strand to SEQ ID NO: 1682569
ucuucugcaacucuuaaua

SEQ ID NO: 1682571 - RNA, 19 nt, Artificial Sequence
  Description of Artificial Sequence: Synthetic oligonucleotide
  Sense strand starting at position 799 of SEQ ID NO: 1561580
guagcucccugugugaaga

SEQ ID NO: 1682572 - RNA, 19 nt, Artificial Sequence
  Description of Artificial Sequence: Synthetic oligonucleotide
  Antisense strand to SEQ ID NO: 1682571
ucuucacacagggagcuac

SEQ ID NO: 1682573 - RNA, 19 nt, Artificial Sequence
  Description of Artificial Sequence: Synthetic oligonucleotide
  Sense strand starting at position 867 of SEQ ID NO: 1561580
cggccauuacugggacaca

SEQ ID NO: 1682574 - RNA, 19 nt, Artificial Sequence
  Description of Artificial Sequence: Synthetic oligonucleotide
  Antisense strand to SEQ ID NO: 1682573
ugugucccaguaauggccg

SEQ ID NO: 1682575 - RNA, 19 nt, Artificial Sequence
  Description of Artificial Sequence: Synthetic oligonucleotide
  Sense strand starting at position 913 of SEQ ID NO: 1561580
cagucacacucgguggaua

SEQ ID NO: 1682576 - RNA, 19 nt, Artificial Sequence
  Description of Artificial Sequence: Synthetic oligonucleotide
  Antisense strand to SEQ ID NO: 1682575
uauccaccgagugugacug

SEQ ID NO: 1682577 - RNA, 19 nt, Artificial Sequence
  Description of Artificial Sequence: Synthetic oligonucleotide
  Sense strand starting at position 926 of SEQ ID NO: 1561580
uggauagagcuccagcaua

SEQ ID NO: 1682578 - RNA, 19 nt, Artificial Sequence
  Description of Artificial Sequence: Synthetic oligonucleotide
  Antisense strand to SEQ ID NO: 1682577
uaugcuggagcucuaucca

SEQ ID NO: 1682579 - RNA, 19 nt, Artificial Sequence
  Description of Artificial Sequence: Synthetic oligonucleotide
  Sense strand starting at position 1167 of SEQ ID NO: 1561580
ugugacaugcugugauaug

SEQ ID NO: 1682580 - RNA, 19 nt, Artificial Sequence
  Description of Artificial Sequence: Synthetic oligonucleotide
  Antisense strand to SEQ ID NO: 1682579
cauaucacagcaugucaca

SEQ ID NO: 1682581 - RNA, 19 nt, Artificial Sequence
  Description of Artificial Sequence: Synthetic oligonucleotide
  Sense strand starting at position 1589 of SEQ ID NO: 1561580
cgaguaagcaggugcagau

SEQ ID NO: 1682582 - RNA, 19 nt, Artificial Sequence
  Description of Artificial Sequence: Synthetic oligonucleotide
  Antisense strand to SEQ ID NO: 1682581
aucugcaccugcuuacucg

SEQ ID NO: 1682583 - RNA, 19 nt, Artificial Sequence
  Description of Artificial Sequence: Synthetic oligonucleotide
  Sense strand starting at position 2099 of SEQ ID NO: 1561580
cuugcaaagccugggucau

SEQ ID NO: 1682584 - RNA, 19 nt, Artificial Sequence
  Description of Artificial Sequence: Synthetic oligonucleotide
  Antisense strand to SEQ ID NO: 1682583
augacccaggcuuugcaag

SEQ ID NO: 1682585 - RNA, 19 nt, Artificial Sequence
  Description of Artificial Sequence: Synthetic oligonucleotide
  Sense strand starting at position 2248 of SEQ ID NO: 1561580
gggcgcuuccaguaacuca

SEQ ID NO: 1682586 - RNA, 19 nt, Artificial Sequence
  Description of Artificial Sequence: Synthetic oligonucleotide
  Antisense strand to SEQ ID NO: 1682585
ugaguuacuggaagcgccc

SEQ ID NO: 1682587 - RNA, 19 nt, Artificial Sequence
  Description of Artificial Sequence: Synthetic oligonucleotide
  Sense strand starting at position 2717 of SEQ ID NO: 1561580
ucagguagcugaugucauu

SEQ ID NO: 1682588 - RNA, 19 nt, Artificial Sequence
  Description of Artificial Sequence: Synthetic oligonucleotide
  Antisense strand to SEQ ID NO: 1682587
aaugacaucagcuaccuga

SEQ ID NO: 1682589 - RNA, 19 nt, Artificial Sequence
  Description of Artificial Sequence: Synthetic oligonucleotide
  Sense strand starting at position 2735 of SEQ ID NO: 1561580
uccagucuauggcaaagaa

SEQ ID NO: 1682590 - RNA, 19 nt, Artificial Sequence
  Description of Artificial Sequence: Synthetic oligonucleotide
  Antisense strand to SEQ ID NO: 1682589
uucuuugccauagacugga

SEQ ID NO: 1682591 - RNA, 19 nt, Artificial Sequence
  Description of Artificial Sequence: Synthetic oligonucleotide
  Sense strand starting at position 3039 of SEQ ID NO: 1561580
ucuccaggcuugcgucaau

SEQ ID NO: 1682592 - RNA, 19 nt, Artificial Sequence
  Description of Artificial Sequence: Synthetic oligonucleotide
  Antisense strand to SEQ ID NO: 1682591
auugacgcaagccuggaga

SEQ ID NO: 1682593 - RNA, 19 nt, Artificial Sequence
  Description of Artificial Sequence: Synthetic oligonucleotide
  Sense strand starting at position 3172 of SEQ ID NO: 1561580
auuuguuccugggaaacag

SEQ ID NO: 1682594 - RNA, 19 nt, Artificial Sequence
  Description of Artificial Sequence: Synthetic oligonucleotide
  Antisense strand to SEQ ID NO: 1682593
cuguuucccaggaacaaau

SEQ ID NO: 1682595 - RNA, 19 nt, Artificial Sequence
  Description of Artificial Sequence: Synthetic oligonucleotide
  Sense strand starting at position 3503 of SEQ ID NO: 1561580
gugccuagauuugagacaa

SEQ ID NO: 1682596 - RNA, 19 nt, Artificial Sequence
  Description of Artificial Sequence: Synthetic oligonucleotide
  Antisense strand to SEQ ID NO: 1682595
uugucucaaaucuaggcac

SEQ ID NO: 1682597 - RNA, 19 nt, Artificial Sequence
  Description of Artificial Sequence: Synthetic oligonucleotide
  Sense strand starting at position 110 of SEQ ID NO: 1561581
acuguacucuagucugaca

SEQ ID NO: 1682598 - RNA, 19 nt, Artificial Sequence
  Description of Artificial Sequence: Synthetic oligonucleotide
  Antisense strand to SEQ ID NO: 1682597
ugucagacuagaguacagu

SEQ ID NO: 1682599 - RNA, 19 nt, Artificial Sequence
  Description of Artificial Sequence: Synthetic oligonucleotide
  Sense strand starting at position 112 of SEQ ID NO: 1561581
uguacucuagucugacaga

SEQ ID NO: 1682600 - RNA, 19 nt, Artificial Sequence
  Description of Artificial Sequence: Synthetic oligonucleotide
  Antisense strand to SEQ ID NO: 1682599
ucugucagacuagaguaca

SEQ ID NO: 1682601 - RNA, 19 nt, Artificial Sequence
  Description of Artificial Sequence: Synthetic oligonucleotide
  Sense strand starting at position 274 of SEQ ID NO: 1561581
uuuaaaugcucucuggcua

SEQ ID NO: 1682602 - RNA, 19 nt, Artificial Sequence
  Description of Artificial Sequence: Synthetic oligonucleotide
  Antisense strand to SEQ ID NO: 1682601
uagccagagagcauuuaaa

SEQ ID NO: 1682603 - RNA, 19 nt, Artificial Sequence
  Description of Artificial Sequence: Synthetic oligonucleotide
  Sense strand starting at position 275 of SEQ ID NO: 1561581
uuaaaugcucucuggcuaa

SEQ ID NO: 1682604 - RNA, 19 nt, Artificial Sequence
  Description of Artificial Sequence: Synthetic oligonucleotide
  Antisense strand to SEQ ID NO: 1682603
uuagccagagagcauuuaa

SEQ ID NO: 1682605 - RNA, 19 nt, Artificial Sequence
  Description of Artificial Sequence: Synthetic oligonucleotide
  Sense strand starting at position 577 of SEQ ID NO: 1561581
cccgaugcucugcaacuua

SEQ ID NO: 1682606 - RNA, 19 nt, Artificial Sequence
  Description of Artificial Sequence: Synthetic oligonucleotide
  Antisense strand to SEQ ID NO: 1682605
uaaguugcagagcaucggg

SEQ ID NO: 1682607 - RNA, 19 nt, Artificial Sequence
  Description of Artificial Sequence: Synthetic oligonucleotide
  Sense strand starting at position 1639 of SEQ ID NO: 1561581
ggaacagccucagagagau

SEQ ID NO: 1682608 - RNA, 19 nt, Artificial Sequence
  Description of Artificial Sequence: Synthetic oligonucleotide
  Antisense strand to SEQ ID NO: 1682607
aucucucugaggcuguucc

SEQ ID NO: 1682609 - RNA, 19 nt, Artificial Sequence
  Description of Artificial Sequence: Synthetic oligonucleotide
  Sense strand starting at position 1672 of SEQ ID NO: 1561581
ggaagcaauuaucagacuu

SEQ ID NO: 1682610 - RNA, 19 nt, Artificial Sequence
  Description of Artificial Sequence: Synthetic oligonucleotide
  Antisense strand to SEQ ID NO: 1682609
aagucugauaauugcuucc

SEQ ID NO: 1682611 - RNA, 19 nt, Artificial Sequence
  Description of Artificial Sequence: Synthetic oligonucleotide
  Sense strand starting at position 1806 of SEQ ID NO: 1561581
gcaaauguuuaguccaggu

SEQ ID NO: 1682612 - RNA, 19 nt, Artificial Sequence
  Description of Artificial Sequence: Synthetic oligonucleotide
  Antisense strand to SEQ ID NO: 1682611
accuggacuaaacauuugc

SEQ ID NO: 1682613 - RNA, 19 nt, Artificial Sequence
  Description of Artificial Sequence: Synthetic oligonucleotide
  Sense strand starting at position 1810 of SEQ ID NO: 1561581
auguuuaguccagguagac

SEQ ID NO: 1682614 - RNA, 19 nt, Artificial Sequence
  Description of Artificial Sequence: Synthetic oligonucleotide
  Antisense strand to SEQ ID NO: 1682613
gucuaccuggacuaaacau

SEQ ID NO: 1682615 - RNA, 19 nt, Artificial Sequence
  Description of Artificial Sequence: Synthetic oligonucleotide
  Sense strand starting at position 1890 of SEQ ID NO: 1561581
agcuacacgcccugagaaa

SEQ ID NO: 1682616 - RNA, 19 nt, Artificial Sequence
  Description of Artificial Sequence: Synthetic oligonucleotide
  Antisense strand to SEQ ID NO: 1682615
uuucucagggcguguagcu

SEQ ID NO: 1682617 - RNA, 19 nt, Artificial Sequence
  Description of Artificial Sequence: Synthetic oligonucleotide
  Sense strand starting at position 1972 of SEQ ID NO: 1561581
cagaaagacuggccagauu

SEQ ID NO: 1682618 - RNA, 19 nt, Artificial Sequence
  Description of Artificial Sequence: Synthetic oligonucleotide
  Antisense strand to SEQ ID NO: 1682617
aaucuggccagucuuucug

SEQ ID NO: 1682619 - RNA, 19 nt, Artificial Sequence
  Description of Artificial Sequence: Synthetic oligonucleotide
  Sense strand starting at position 2095 of SEQ ID NO: 1561581
cuguuauucgcucugccuu

SEQ ID NO: 1682620 - RNA, 19 nt, Artificial Sequence
  Description of Artificial Sequence: Synthetic oligonucleotide
  Antisense strand to SEQ ID NO: 1682619
aaggcagagcgaauaacag

SEQ ID NO: 1682621 - RNA, 19 nt, Artificial Sequence
  Description of Artificial Sequence: Synthetic oligonucleotide
  Sense strand starting at position 2123 of SEQ ID NO: 1561581
aagucuuuguucucccgau

SEQ ID NO: 1682622 - RNA, 19 nt, Artificial Sequence
  Description of Artificial Sequence: Synthetic oligonucleotide
  Antisense strand to SEQ ID NO: 1682621
aucgggagaacaaagacuu

SEQ ID NO: 1682623 - RNA, 19 nt, Artificial Sequence
  Description of Artificial Sequence: Synthetic oligonucleotide
  Sense strand starting at position 2124 of SEQ ID NO: 1561581
agucuuuguucucccgauu

SEQ ID NO: 1682624 - RNA, 19 nt, Artificial Sequence
  Description of Artificial Sequence: Synthetic oligonucleotide
  Antisense strand to SEQ ID NO: 1682623
aaucgggagaacaaagacu

SEQ ID NO: 1682625 - RNA, 19 nt, Artificial Sequence
  Description of Artificial Sequence: Synthetic oligonucleotide
  Sense strand starting at position 2144 of SEQ ID NO: 1561581
aggaguauuugugacuauu

SEQ ID NO: 1682626 - RNA, 19 nt, Artificial Sequence
  Description of Artificial Sequence: Synthetic oligonucleotide
  Antisense strand to SEQ ID NO: 1682625
aauagucacaaauacuccu

SEQ ID NO: 1682627 - RNA, 19 nt, Artificial Sequence
  Description of Artificial Sequence: Synthetic oligonucleotide
  Sense strand starting at position 2214 of SEQ ID NO: 1561581
agacuuuaaggucaaagcu

SEQ ID NO: 1682628 - RNA, 19 nt, Artificial Sequence
  Description of Artificial Sequence: Synthetic oligonucleotide
  Antisense strand to SEQ ID NO: 1682627
agcuuugaccuuaaagucu

SEQ ID NO: 1682629 - RNA, 19 nt, Artificial Sequence
  Description of Artificial Sequence: Synthetic oligonucleotide
  Sense strand starting at position 2221 of SEQ ID NO: 1561581
aaggucaaagcuuaaaguu

SEQ ID NO: 1682630 - RNA, 19 nt, Artificial Sequence
  Description of Artificial Sequence: Synthetic oligonucleotide
  Antisense strand to SEQ ID NO: 1682629
aacuuuaagcuuugaccuu

SEQ ID NO: 1682631 - RNA, 19 nt, Artificial Sequence
  Description of Artificial Sequence: Synthetic oligonucleotide
  Sense strand starting at position 2241 of SEQ ID NO: 1561581
ugguccacuucuguuggaa

SEQ ID NO: 1682632 - RNA, 19 nt, Artificial Sequence
  Description of Artificial Sequence: Synthetic oligonucleotide
  Antisense strand to SEQ ID NO: 1682631
uuccaacagaaguggacca

SEQ ID NO: 1682633 - RNA, 19 nt, Artificial Sequence
  Description of Artificial Sequence: Synthetic oligonucleotide
  Sense strand starting at position 2244 of SEQ ID NO: 1561581
uccacuucuguuggaaacu

SEQ ID NO: 1682634 - RNA, 19 nt, Artificial Sequence
  Description of Artificial Sequence: Synthetic oligonucleotide
  Antisense strand to SEQ ID NO: 1682633
aguuuccaacagaagugga

SEQ ID NO: 1682635 - RNA, 19 nt, Artificial Sequence
  Description of Artificial Sequence: Synthetic oligonucleotide
  Sense strand starting at position 2358 of SEQ ID NO: 1561581
gccaguuaaggcugaaguu

SEQ ID NO: 1682636 - RNA, 19 nt, Artificial Sequence
  Description of Artificial Sequence: Synthetic oligonucleotide
  Antisense strand to SEQ ID NO: 1682635
aacuucagccuuaacuggc

SEQ ID NO: 1682637 - RNA, 19 nt, Artificial Sequence
  Description of Artificial Sequence: Synthetic oligonucleotide
  Sense strand starting at position 2359 of SEQ ID NO: 1561581
ccaguuaaggcugaaguua

SEQ ID NO: 1682638 - RNA, 19 nt, Artificial Sequence
  Description of Artificial Sequence: Synthetic oligonucleotide
  Antisense strand to SEQ ID NO: 1682637
uaacuucagccuuaacugg

SEQ ID NO: 1682639 - RNA, 19 nt, Artificial Sequence
  Description of Artificial Sequence: Synthetic oligonucleotide
  Sense strand starting at position 2367 of SEQ ID NO: 1561581
ggcugaaguuacucaguag

SEQ ID NO: 1682640 - RNA, 19 nt, Artificial Sequence
  Description of Artificial Sequence: Synthetic oligonucleotide
  Antisense strand to SEQ ID NO: 1682639
cuacugaguaacuucagcc

SEQ ID NO: 1682641 - RNA, 19 nt, Artificial Sequence
  Description of Artificial Sequence: Synthetic oligonucleotide
  Sense strand starting at position 2368 of SEQ ID NO: 1561581
gcugaaguuacucaguagu

SEQ ID NO: 1682642 - RNA, 19 nt, Artificial Sequence
  Description of Artificial Sequence: Synthetic oligonucleotide
  Antisense strand to SEQ ID NO: 1682641
acuacugaguaacuucagc

SEQ ID NO: 1682643 - RNA, 19 nt, Artificial Sequence
  Description of Artificial Sequence: Synthetic oligonucleotide
  Sense strand starting at position 2378 of SEQ ID NO: 1561581
cucaguagucagggaacua

SEQ ID NO: 1682644 - RNA, 19 nt, Artificial Sequence
  Description of Artificial Sequence: Synthetic oligonucleotide
  Antisense strand to SEQ ID NO: 1682643
uaguucccugacuacugag

SEQ ID NO: 1682645 - RNA, 19 nt, Artificial Sequence
  Description of Artificial Sequence: Synthetic oligonucleotide
  Sense strand starting at position 2391 of SEQ ID NO: 1561581
gaacuaggaucuccgugaa

SEQ ID NO: 1682646 - RNA, 19 nt, Artificial Sequence
  Description of Artificial Sequence: Synthetic oligonucleotide
  Antisense strand to SEQ ID NO: 1682645
uucacggagauccuaguuc

SEQ ID NO: 1682647 - RNA, 19 nt, Artificial Sequence
  Description of Artificial Sequence: Synthetic oligonucleotide
  Sense strand starting at position 2394 of SEQ ID NO: 1561581
cuaggaucuccgugaagau

SEQ ID NO: 1682648 - RNA, 19 nt, Artificial Sequence
  Description of Artificial Sequence: Synthetic oligonucleotide
  Antisense strand to SEQ ID NO: 1682647
aucuucacggagauccuag

SEQ ID NO: 1682649 - RNA, 19 nt, Artificial Sequence
  Description of Artificial Sequence: Synthetic oligonucleotide
  Sense strand starting at position 2395 of SEQ ID NO: 1561581
uaggaucuccgugaagauc

SEQ ID NO: 1682650 - RNA, 19 nt, Artificial Sequence
  Description of Artificial Sequence: Synthetic oligonucleotide
  Antisense strand to SEQ ID NO: 1682649
gaucuucacggagauccua

SEQ ID NO: 1682651 - RNA, 19 nt, Artificial Sequence
  Description of Artificial Sequence: Synthetic oligonucleotide
  Sense strand starting at position 2496 of SEQ ID NO: 1561581
gcaugugcuuacuuacaug

SEQ ID NO: 1682652 - RNA, 19 nt, Artificial Sequence
  Description of Artificial Sequence: Synthetic oligonucleotide
  Antisense strand to SEQ ID NO: 1682651
cauguaaguaagcacaugc

SEQ ID NO: 1682653 - RNA, 19 nt, Artificial Sequence
  Description of Artificial Sequence: Synthetic oligonucleotide
  Sense strand starting at position 2704 of SEQ ID NO: 1561581
cagauaauauuuggguaau

SEQ ID NO: 1682654 - RNA, 19 nt, Artificial Sequence
  Description of Artificial Sequence: Synthetic oligonucleotide
  Antisense strand to SEQ ID NO: 1682653
auuacccaaauauuaucug

SEQ ID NO: 1682655 - RNA, 19 nt, Artificial Sequence
  Description of Artificial Sequence: Synthetic oligonucleotide
  Sense strand starting at position 2716 of SEQ ID NO: 1561581
ggguaauauuugggccuua

SEQ ID NO: 1682656 - RNA, 19 nt, Artificial Sequence
  Description of Artificial Sequence: Synthetic oligonucleotide
  Antisense strand to SEQ ID NO: 1682655
uaaggcccaaauauuaccc

SEQ ID NO: 1682657 - RNA, 19 nt, Artificial Sequence
  Description of Artificial Sequence: Synthetic oligonucleotide
  Sense strand starting at position 2728 of SEQ ID NO: 1561581
ggccuuagaguuugauacu

SEQ ID NO: 1682658 - RNA, 19 nt, Artificial Sequence
  Description of Artificial Sequence: Synthetic oligonucleotide
  Antisense strand to SEQ ID NO: 1682657
aguaucaaacucuaaggcc

SEQ ID NO: 1682659 - RNA, 19 nt, Artificial Sequence
  Description of Artificial Sequence: Synthetic oligonucleotide
  Sense strand starting at position 2998 of SEQ ID NO: 1561581
augaguugucuuugcacca

SEQ ID NO: 1682660 - RNA, 19 nt, Artificial Sequence
  Description of Artificial Sequence: Synthetic oligonucleotide
  Antisense strand to SEQ ID NO: 1682659
uggugcaaagacaacucau

SEQ ID NO: 1682661 - RNA, 19 nt, Artificial Sequence
  Description of Artificial Sequence: Synthetic oligonucleotide
  Sense strand starting at position 3003 of SEQ ID NO: 1561581
uugucuuugcaccacugaa

SEQ ID NO: 1682662 - RNA, 19 nt, Artificial Sequence
  Description of Artificial Sequence: Synthetic oligonucleotide
  Antisense strand to SEQ ID NO: 1682661
uucaguggugcaaagacaa

SEQ ID NO: 1682663 - RNA, 19 nt, Artificial Sequence
  Description of Artificial Sequence: Synthetic oligonucleotide
  Sense strand starting at position 3102 of SEQ ID NO: 1561581
agggaucuugcaugugaga

SEQ ID NO: 1682664 - RNA, 19 nt, Artificial Sequence
  Description of Artificial Sequence: Synthetic oligonucleotide
  Antisense strand to SEQ ID NO: 1682663
ucucacaugcaagaucccu

SEQ ID NO: 1682665 - RNA, 19 nt, Artificial Sequence
  Description of Artificial Sequence: Synthetic oligonucleotide
  Sense strand starting at position 3104 of SEQ ID NO: 1561581
ggaucuugcaugugagaag

SEQ ID NO: 1682666 - RNA, 19 nt, Artificial Sequence
  Description of Artificial Sequence: Synthetic oligonucleotide
  Antisense strand to SEQ ID NO: 1682665
cuucucacaugcaagaucc

SEQ ID NO: 1682667 - RNA, 19 nt, Artificial Sequence
  Description of Artificial Sequence: Synthetic oligonucleotide
  Sense strand starting at position 3153 of SEQ ID NO: 1561581
auguuaugagcugaaucac

SEQ ID NO: 1682668 - RNA, 19 nt, Artificial Sequence
  Description of Artificial Sequence: Synthetic oligonucleotide
  Antisense strand to SEQ ID NO: 1682667
gugauucagcucauaacau

SEQ ID NO: 1682669 - RNA, 19 nt, Artificial Sequence
  Description of Artificial Sequence: Synthetic oligonucleotide
  Sense strand starting at position 3583 of SEQ ID NO: 1561581
uuaaacuaagcuuguuaga

SEQ ID NO: 1682670 - RNA, 19 nt, Artificial Sequence
  Description of Artificial Sequence: Synthetic oligonucleotide
  Antisense strand to SEQ ID NO: 1682669
ucuaacaagcuuaguuuaa

SEQ ID NO: 1682671 - RNA, 19 nt, Artificial Sequence
  Description of Artificial Sequence: Synthetic oligonucleotide
  Sense strand starting at position 3598 of SEQ ID NO: 1561581
uagaaugggcucugaugca

SEQ ID NO: 1682672 - RNA, 19 nt, Artificial Sequence
  Description of Artificial Sequence: Synthetic oligonucleotide
  Antisense strand to SEQ ID NO: 1682671
ugcaucagagcccauucua

SEQ ID NO: 1682673 - RNA, 19 nt, Artificial Sequence
  Description of Artificial Sequence: Synthetic oligonucleotide
  Sense strand starting at position 3611 of SEQ ID NO: 1561581
gaugcaaucugacugaugu

SEQ ID NO: 1682674 - RNA, 19 nt, Artificial Sequence
  Description of Artificial Sequence: Synthetic oligonucleotide
  Antisense strand to SEQ ID NO: 1682673
acaucagucagauugcauc

SEQ ID NO: 1682675 - RNA, 19 nt, Artificial Sequence
  Description of Artificial Sequence: Synthetic oligonucleotide
  Sense strand starting at position 3612 of SEQ ID NO: 1561581
augcaaucugacugauguu

SEQ ID NO: 1682676 - RNA, 19 nt, Artificial Sequence
  Description of Artificial Sequence: Synthetic oligonucleotide
  Antisense strand to SEQ ID NO: 1682675
aacaucagucagauugcau

SEQ ID NO: 1682677 - RNA, 19 nt, Artificial Sequence
  Description of Artificial Sequence: Synthetic oligonucleotide
  Sense strand starting at position 8 of SEQ ID NO: 1561582
guuugugguaguguguuau

SEQ ID NO: 1682678 - RNA, 19 nt, Artificial Sequence
  Description of Artificial Sequence: Synthetic oligonucleotide
  Antisense strand to SEQ ID NO: 1682677
auaacacacuaccacaaac

SEQ ID NO: 1682679 - RNA, 19 nt, Artificial Sequence
  Description of Artificial Sequence: Synthetic oligonucleotide
  Sense strand starting at position 40 of SEQ ID NO: 1561582
acuaauagagacuggucua

SEQ ID NO: 1682680 - RNA, 19 nt, Artificial Sequence
  Description of Artificial Sequence: Synthetic oligonucleotide
  Antisense strand to SEQ ID NO: 1682679
uagaccagucucuauuagu

SEQ ID NO: 1682681 - RNA, 19 nt, Artificial Sequence
  Description of Artificial Sequence: Synthetic oligonucleotide
  Sense strand starting at position 43 of SEQ ID NO: 1561582
aauagagacuggucuagca

SEQ ID NO: 1682682 - RNA, 19 nt, Artificial Sequence
  Description of Artificial Sequence: Synthetic oligonucleotide
  Antisense strand to SEQ ID NO: 1682681
ugcuagaccagucucuauu

SEQ ID NO: 1682683 - RNA, 19 nt, Artificial Sequence
  Description of Artificial Sequence: Synthetic oligonucleotide
  Sense strand starting at position 125 of SEQ ID NO: 1561582
acugcuuagugucugaaca

SEQ ID NO: 1682684 - RNA, 19 nt, Artificial Sequence
  Description of Artificial Sequence: Synthetic oligonucleotide
  Antisense strand to SEQ ID NO: 1682683
uguucagacacuaagcagu

SEQ ID NO: 1682685 - RNA, 19 nt, Artificial Sequence
  Description of Artificial Sequence: Synthetic oligonucleotide
  Sense strand starting at position 127 of SEQ ID NO: 1561582
ugcuuagugucugaacaga

SEQ ID NO: 1682686 - RNA, 19 nt, Artificial Sequence
  Description of Artificial Sequence: Synthetic oligonucleotide
  Antisense strand to SEQ ID NO: 1682685
ucuguucagacacuaagca

SEQ ID NO: 1682687 - RNA, 19 nt, Artificial Sequence
  Description of Artificial Sequence: Synthetic oligonucleotide
  Sense strand starting at position 158 of SEQ ID NO: 1561582
cuggguuguccugaagaac

SEQ ID NO: 1682688 - RNA, 19 nt, Artificial Sequence
  Description of Artificial Sequence: Synthetic oligonucleotide
  Antisense strand to SEQ ID NO: 1682687
guucuucaggacaacccag

SEQ ID NO: 1682689 - RNA, 19 nt, Artificial Sequence
  Description of Artificial Sequence: Synthetic oligonucleotide
  Sense strand starting at position 253 of SEQ ID NO: 1561582
cuaacagcaucuucggauu

SEQ ID NO: 1682690 - RNA, 19 nt, Artificial Sequence
  Description of Artificial Sequence: Synthetic oligonucleotide
  Antisense strand to SEQ ID NO: 1682689
aauccgaagaugcuguuag

SEQ ID NO: 1682691 - RNA, 19 nt, Artificial Sequence
  Description of Artificial Sequence: Synthetic oligonucleotide
  Sense strand starting at position 373 of SEQ ID NO: 1561582
gucucuucgucuccuugau

SEQ ID NO: 1682692 - RNA, 19 nt, Artificial Sequence
  Description of Artificial Sequence: Synthetic oligonucleotide
  Antisense strand to SEQ ID NO: 1682691
aucaaggagacgaagagac

SEQ ID NO: 1682693 - RNA, 19 nt, Artificial Sequence
  Description of Artificial Sequence: Synthetic oligonucleotide
  Sense strand starting at position 401 of SEQ ID NO: 1561582
ggaugcacuguccaacuau

SEQ ID NO: 1682694 - RNA, 19 nt, Artificial Sequence
  Description of Artificial Sequence: Synthetic oligonucleotide
  Antisense strand to SEQ ID NO: 1682693
auaguuggacagugcaucc

SEQ ID NO: 1682695 - RNA, 19 nt, Artificial Sequence
  Description of Artificial Sequence: Synthetic oligonucleotide
  Sense strand starting at position 807 of SEQ ID NO: 1561582
agagaaugugcagggaagu

SEQ ID NO: 1682696 - RNA, 19 nt, Artificial Sequence
  Description of Artificial Sequence: Synthetic oligonucleotide
  Antisense strand to SEQ ID NO: 1682695
acuucccugcacauucucu

SEQ ID NO: 1682697 - RNA, 19 nt, Artificial Sequence
  Description of Artificial Sequence: Synthetic oligonucleotide
  Sense strand starting at position 1004 of SEQ ID NO: 1561582
acagaaugugcagggaagu

SEQ ID NO: 1682698 - RNA, 19 nt, Artificial Sequence
  Description of Artificial Sequence: Synthetic oligonucleotide
  Antisense strand to SEQ ID NO: 1682697
acuucccugcacauucugu

SEQ ID NO: 1682699 - RNA, 19 nt, Artificial Sequence
  Description of Artificial Sequence: Synthetic oligonucleotide
  Sense strand starting at position 1210 of SEQ ID NO: 1561582
gaagaaauguccucugagu

SEQ ID NO: 1682700 - RNA, 19 nt, Artificial Sequence
  Description of Artificial Sequence: Synthetic oligonucleotide
  Antisense strand to SEQ ID NO: 1682699
acucagaggacauuucuuc

SEQ ID NO: 1682701 - RNA, 19 nt, Artificial Sequence
  Description of Artificial Sequence: Synthetic oligonucleotide
  Sense strand starting at position 1212 of SEQ ID NO: 1561582
agaaauguccucugagugc

SEQ ID NO: 1682702 - RNA, 19 nt, Artificial Sequence
  Description of Artificial Sequence: Synthetic oligonucleotide
  Antisense strand to SEQ ID NO: 1682701
gcacucagaggacauuucu

SEQ ID NO: 1682703 - RNA, 19 nt, Artificial Sequence
  Description of Artificial Sequence: Synthetic oligonucleotide
  Sense strand starting at position 1336 of SEQ ID NO: 1561582
gcugcauccugcucuaaua

SEQ ID NO: 1682704 - RNA, 19 nt, Artificial Sequence
  Description of Artificial Sequence: Synthetic oligonucleotide
  Antisense strand to SEQ ID NO: 1682703
uauuagagcaggaugcagc

SEQ ID NO: 1682705 - RNA, 19 nt, Artificial Sequence
  Description of Artificial Sequence: Synthetic oligonucleotide
  Sense strand starting at position 1338 of SEQ ID NO: 1561582
ugcauccugcucuaauagu

SEQ ID NO: 1682706 - RNA, 19 nt, Artificial Sequence
  Description of Artificial Sequence: Synthetic oligonucleotide
  Antisense strand to SEQ ID NO: 1682705
acuauuagagcaggaugca

SEQ ID NO: 1682707 - RNA, 19 nt, Artificial Sequence
  Description of Artificial Sequence: Synthetic oligonucleotide
  Sense strand starting at position 1345 of SEQ ID NO: 1561582
ugcucuaauagugagugaa

SEQ ID NO: 1682708 - RNA, 19 nt, Artificial Sequence
  Description of Artificial Sequence: Synthetic oligonucleotide
  Antisense strand to SEQ ID NO: 1682707
uucacucacuauuagagca

SEQ ID NO: 1682709 - RNA, 19 nt, Artificial Sequence
  Description of Artificial Sequence: Synthetic oligonucleotide
  Sense strand starting at position 1348 of SEQ ID NO: 1561582
ucuaauagugagugaagga

SEQ ID NO: 1682710 - RNA, 19 nt, Artificial Sequence
  Description of Artificial Sequence: Synthetic oligonucleotide
  Antisense strand to SEQ ID NO: 1682709
uccuucacucacuauuaga

SEQ ID NO: 1682711 - RNA, 19 nt, Artificial Sequence
  Description of Artificial Sequence: Synthetic oligonucleotide
  Sense strand starting at position 1389 of SEQ ID NO: 1561582
ugaacaagagaccguuuaa

SEQ ID NO: 1682712 - RNA, 19 nt, Artificial Sequence
  Description of Artificial Sequence: Synthetic oligonucleotide
  Antisense strand to SEQ ID NO: 1682711
uuaaacggucucuuguuca

SEQ ID NO: 1682713 - RNA, 19 nt, Artificial Sequence
  Description of Artificial Sequence: Synthetic oligonucleotide
  Sense strand starting at position 2063 of SEQ ID NO: 1561582
aaacguagucccgucaugu

SEQ ID NO: 1682714 - RNA, 19 nt, Artificial Sequence
  Description of Artificial Sequence: Synthetic oligonucleotide
  Antisense strand to SEQ ID NO: 1682713
acaugacgggacuacguuu

SEQ ID NO: 1682715 - RNA, 19 nt, Artificial Sequence
  Description of Artificial Sequence: Synthetic oligonucleotide
  Sense strand starting at position 2073 of SEQ ID NO: 1561582
ccgucaugucccgcuuuga

SEQ ID NO: 1682716 - RNA, 19 nt, Artificial Sequence
  Description of Artificial Sequence: Synthetic oligonucleotide
  Antisense strand to SEQ ID NO: 1682715
ucaaagcgggacaugacgg

SEQ ID NO: 1682717 - RNA, 19 nt, Artificial Sequence
  Description of Artificial Sequence: Synthetic oligonucleotide
  Sense strand starting at position 2122 of SEQ ID NO: 1561582
uugggcuucgguuaucaua

SEQ ID NO: 1682718 - RNA, 19 nt, Artificial Sequence
  Description of Artificial Sequence: Synthetic oligonucleotide
  Antisense strand to SEQ ID NO: 1682717
uaugauaaccgaagcccaa

SEQ ID NO: 1682719 - RNA, 19 nt, Artificial Sequence
  Description of Artificial Sequence: Synthetic oligonucleotide
  Sense strand starting at position 2124 of SEQ ID NO: 1561582
gggcuucgguuaucauaga

SEQ ID NO: 1682720 - RNA, 19 nt, Artificial Sequence
  Description of Artificial Sequence: Synthetic oligonucleotide
  Antisense strand to SEQ ID NO: 1682719
ucuaugauaaccgaagccc

SEQ ID NO: 1682721 - RNA, 19 nt, Artificial Sequence
  Description of Artificial Sequence: Synthetic oligonucleotide
  Sense strand starting at position 2177 of SEQ ID NO: 1561582
ggaccuaagucgucgccaa

SEQ ID NO: 1682722 - RNA, 19 nt, Artificial Sequence
  Description of Artificial Sequence: Synthetic oligonucleotide
  Antisense strand to SEQ ID NO: 1682721
uuggcgacgacuuaggucc

SEQ ID NO: 1682723 - RNA, 19 nt, Artificial Sequence
  Description of Artificial Sequence: Synthetic oligonucleotide
  Sense strand starting at position 2178 of SEQ ID NO: 1561582
gaccuaagucgucgccaaa

SEQ ID NO: 1682724 - RNA, 19 nt, Artificial Sequence
  Description of Artificial Sequence: Synthetic oligonucleotide
  Antisense strand to SEQ ID NO: 1682723
uuuggcgacgacuuagguc

SEQ ID NO: 1682725 - RNA, 19 nt, Artificial Sequence
  Description of Artificial Sequence: Synthetic oligonucleotide
  Sense strand starting at position 2181 of SEQ ID NO: 1561582
cuaagucgucgccaaagaa

SEQ ID NO: 1682726 - RNA, 19 nt, Artificial Sequence
  Description of Artificial Sequence: Synthetic oligonucleotide
  Antisense strand to SEQ ID NO: 1682725
uucuuuggcgacgacuuag

SEQ ID NO: 1682727 - RNA, 19 nt, Artificial Sequence
  Description of Artificial Sequence: Synthetic oligonucleotide
  Sense strand starting at position 2230 of SEQ ID NO: 1561582
gcccauuccuucucgugaa

SEQ ID NO: 1682728 - RNA, 19 nt, Artificial Sequence
  Description of Artificial Sequence: Synthetic oligonucleotide
  Antisense strand to SEQ ID NO: 1682727
uucacgagaaggaaugggc

SEQ ID NO: 1682729 - RNA, 19 nt, Artificial Sequence
  Description of Artificial Sequence: Synthetic oligonucleotide
  Sense strand starting at position 2250 of SEQ ID NO: 1561582
gcgggugacuggucaugau

SEQ ID NO: 1682730 - RNA, 19 nt, Artificial Sequence
  Description of Artificial Sequence: Synthetic oligonucleotide
  Antisense strand to SEQ ID NO: 1682729
aucaugaccagucacccgc

SEQ ID NO: 1682731 - RNA, 19 nt, Artificial Sequence
  Description of Artificial Sequence: Synthetic oligonucleotide
  Sense strand starting at position 2254 of SEQ ID NO: 1561582
gugacuggucaugauuaug

SEQ ID NO: 1682732 - RNA, 19 nt, Artificial Sequence
  Description of Artificial Sequence: Synthetic oligonucleotide
  Antisense strand to SEQ ID NO: 1682731
cauaaucaugaccagucac

SEQ ID NO: 1682733 - RNA, 19 nt, Artificial Sequence
  Description of Artificial Sequence: Synthetic oligonucleotide
  Sense strand starting at position 2259 of SEQ ID NO: 1561582
uggucaugauuaugauuga

SEQ ID NO: 1682734 - RNA, 19 nt, Artificial Sequence
  Description of Artificial Sequence: Synthetic oligonucleotide
  Antisense strand to SEQ ID NO: 1682733
ucaaucauaaucaugacca

SEQ ID NO: 1682735 - RNA, 19 nt, Artificial Sequence
  Description of Artificial Sequence: Synthetic oligonucleotide
  Sense strand starting at position 2260 of SEQ ID NO: 1561582
ggucaugauuaugauugau

SEQ ID NO: 1682736 - RNA, 19 nt, Artificial Sequence
  Description of Artificial Sequence: Synthetic oligonucleotide
  Antisense strand to SEQ ID NO: 1682735
aucaaucauaaucaugacc

SEQ ID NO: 1682737 - RNA, 19 nt, Artificial Sequence
  Description of Artificial Sequence: Synthetic oligonucleotide
  Sense strand starting at position 2411 of SEQ ID NO: 1561582
gcgagucagaccgauaaca

SEQ ID NO: 1682738 - RNA, 19 nt, Artificial Sequence
  Description of Artificial Sequence: Synthetic oligonucleotide
  Antisense strand to SEQ ID NO: 1682737
uguuaucggucugacucgc

SEQ ID NO: 1682739 - RNA, 19 nt, Artificial Sequence
  Description of Artificial Sequence: Synthetic oligonucleotide
  Sense strand starting at position 2450 of SEQ ID NO: 1561582
cgagcauaugcgcgucaaa

SEQ ID NO: 1682740 - RNA, 19 nt, Artificial Sequence
  Description of Artificial Sequence: Synthetic oligonucleotide
  Antisense strand to SEQ ID NO: 1682739
uuugacgcgcauaugcucg

SEQ ID NO: 1682741 - RNA, 19 nt, Artificial Sequence
  Description of Artificial Sequence: Synthetic oligonucleotide
  Sense strand starting at position 2852 of SEQ ID NO: 1561582
gagauagggucuccauaug

SEQ ID NO: 1682742 - RNA, 19 nt, Artificial Sequence
  Description of Artificial Sequence: Synthetic oligonucleotide
  Antisense strand to SEQ ID NO: 1682741
cauauggagacccuaucuc

SEQ ID NO: 1682743 - RNA, 19 nt, Artificial Sequence
  Description of Artificial Sequence: Synthetic oligonucleotide
  Sense strand starting at position 3314 of SEQ ID NO: 1561582
ggucuaucucccugcccaa

SEQ ID NO: 1682744 - RNA, 19 nt, Artificial Sequence
  Description of Artificial Sequence: Synthetic oligonucleotide
  Antisense strand to SEQ ID NO: 1682743
uugggcagggagauagacc

SEQ ID NO: 1682745 - RNA, 19 nt, Artificial Sequence
  Description of Artificial Sequence: Synthetic oligonucleotide
  Sense strand starting at position 3439 of SEQ ID NO: 1561582
acaggaaggccuugacaau

SEQ ID NO: 1682746 - RNA, 19 nt, Artificial Sequence
  Description of Artificial Sequence: Synthetic oligonucleotide
  Antisense strand to SEQ ID NO: 1682745
auugucaaggccuuccugu

SEQ ID NO: 1682747 - RNA, 19 nt, Artificial Sequence
  Description of Artificial Sequence: Synthetic oligonucleotide
  Sense strand starting at position 3448 of SEQ ID NO: 1561582
ccuugacaauugucacaga

SEQ ID NO: 1682748 - RNA, 19 nt, Artificial Sequence
  Description of Artificial Sequence: Synthetic oligonucleotide
  Antisense strand to SEQ ID NO: 1682747
ucugugacaauugucaagg

SEQ ID NO: 1682749 - RNA, 19 nt, Artificial Sequence
  Description of Artificial Sequence: Synthetic oligonucleotide
  Sense strand starting at position 3451 of SEQ ID NO: 1561582
ugacaauugucacagagaa

SEQ ID NO: 1682750 - RNA, 19 nt, Artificial Sequence
  Description of Artificial Sequence: Synthetic oligonucleotide
  Antisense strand to SEQ ID NO: 1682749
uucucugugacaauuguca

SEQ ID NO: 1682751 - RNA, 19 nt, Artificial Sequence
  Description of Artificial Sequence: Synthetic oligonucleotide
  Sense strand starting at position 3848 of SEQ ID NO: 1561582
gccugacacaaguaggauu

SEQ ID NO: 1682752 - RNA, 19 nt, Artificial Sequence
  Description of Artificial Sequence: Synthetic oligonucleotide
  Antisense strand to SEQ ID NO: 1682751
aauccuacuugugucaggc

SEQ ID NO: 1682753 - RNA, 19 nt, Artificial Sequence
  Description of Artificial Sequence: Synthetic oligonucleotide
  Sense strand starting at position 3949 of SEQ ID NO: 1561582
cucccucuggagugaagau

SEQ ID NO: 1682754 - RNA, 19 nt, Artificial Sequence
  Description of Artificial Sequence: Synthetic oligonucleotide
  Antisense strand to SEQ ID NO: 1682753
aucuucacuccagagggag

SEQ ID NO: 1682755 - RNA, 19 nt, Artificial Sequence
  Description of Artificial Sequence: Synthetic oligonucleotide
  Sense strand starting at position 3962 of SEQ ID NO: 1561582
gaagauucuggugguacca

SEQ ID NO: 1682756 - RNA, 19 nt, Artificial Sequence
  Description of Artificial Sequence: Synthetic oligonucleotide
  Antisense strand to SEQ ID NO: 1682755
ugguaccaccagaaucuuc

SEQ ID NO: 1682757 - RNA, 19 nt, Artificial Sequence
  Description of Artificial Sequence: Synthetic oligonucleotide
  Sense strand starting at position 59 of SEQ ID NO: 1561583
caaugcuucugcgaagaca

SEQ ID NO: 1682758 - RNA, 19 nt, Artificial Sequence
  Description of Artificial Sequence: Synthetic oligonucleotide
  Antisense strand to SEQ ID NO: 1682757
ugucuucgcagaagcauug

SEQ ID NO: 1682759 - RNA, 19 nt, Artificial Sequence
  Description of Artificial Sequence: Synthetic oligonucleotide
  Sense strand starting at position 108 of SEQ ID NO: 1561583
ucuguaauuccagugcguu

SEQ ID NO: 1682760 - RNA, 19 nt, Artificial Sequence
  Description of Artificial Sequence: Synthetic oligonucleotide
  Antisense strand to SEQ ID NO: 1682759
aacgcacuggaauuacaga

SEQ ID NO: 1682761 - RNA, 19 nt, Artificial Sequence
  Description of Artificial Sequence: Synthetic oligonucleotide
  Sense strand starting at position 109 of SEQ ID NO: 1561583
cuguaauuccagugcguug

SEQ ID NO: 1682762 - RNA, 19 nt, Artificial Sequence
  Description of Artificial Sequence: Synthetic oligonucleotide
  Antisense strand to SEQ ID NO: 1682761
caacgcacuggaauuacag

SEQ ID NO: 1682763 - RNA, 19 nt, Artificial Sequence
  Description of Artificial Sequence: Synthetic oligonucleotide
  Sense strand starting at position 272 of SEQ ID NO: 1561583
aaagacauaucuuguagug

SEQ ID NO: 1682764 - RNA, 19 nt, Artificial Sequence
  Description of Artificial Sequence: Synthetic oligonucleotide
  Antisense strand to SEQ ID NO: 1682763
cacuacaagauaugucuuu

SEQ ID NO: 1682765 - RNA, 19 nt, Artificial Sequence
  Description of Artificial Sequence: Synthetic oligonucleotide
  Sense strand starting at position 274 of SEQ ID NO: 1561583
agacauaucuuguagugac

SEQ ID NO: 1682766 - RNA, 19 nt, Artificial Sequence
  Description of Artificial Sequence: Synthetic oligonucleotide
  Antisense strand to SEQ ID NO: 1682765
gucacuacaagauaugucu

SEQ ID NO: 1682767 - RNA, 19 nt, Artificial Sequence
  Description of Artificial Sequence: Synthetic oligonucleotide
  Sense strand starting at position 333 of SEQ ID NO: 1561583
ucuacuccaucauugggaa

SEQ ID NO: 1682768 - RNA, 19 nt, Artificial Sequence
  Description of Artificial Sequence: Synthetic oligonucleotide
  Antisense strand to SEQ ID NO: 1682767
uucccaaugauggaguaga

SEQ ID NO: 1682769 - RNA, 19 nt, Artificial Sequence
  Description of Artificial Sequence: Synthetic oligonucleotide
  Sense strand starting at position 336 of SEQ ID NO: 1561583
acuccaucauugggaagaa

SEQ ID NO: 1682770 - RNA, 19 nt, Artificial Sequence
  Description of Artificial Sequence: Synthetic oligonucleotide
  Antisense strand to SEQ ID NO: 1682769
uucuucccaaugauggagu

SEQ ID NO: 1682771 - RNA, 19 nt, Artificial Sequence
  Description of Artificial Sequence: Synthetic oligonucleotide
  Sense strand starting at position 385 of SEQ ID NO: 1561583
acugcccucuggcuaaaua

SEQ ID NO: 1682772 - RNA, 19 nt, Artificial Sequence
  Description of Artificial Sequence: Synthetic oligonucleotide
  Antisense strand to SEQ ID NO: 1682771
uauuuagccagagggcagu

SEQ ID NO: 1682773 - RNA, 19 nt, Artificial Sequence
  Description of Artificial Sequence: Synthetic oligonucleotide
  Sense strand starting at position 441 of SEQ ID NO: 1561583
augcacaaggcuuauagaa

SEQ ID NO: 1682774 - RNA, 19 nt, Artificial Sequence
  Description of Artificial Sequence: Synthetic oligonucleotide
  Antisense strand to SEQ ID NO: 1682773
uucuauaagccuugugcau

SEQ ID NO: 1682775 - RNA, 19 nt, Artificial Sequence
  Description of Artificial Sequence: Synthetic oligonucleotide
  Sense strand starting at position 699 of SEQ ID NO: 1561583
ugcccaaugcucugcaacu

SEQ ID NO: 1682776 - RNA, 19 nt, Artificial Sequence
  Description of Artificial Sequence: Synthetic oligonucleotide
  Antisense strand to SEQ ID NO: 1682775
aguugcagagcauugggca

SEQ ID NO: 1682777 - RNA, 19 nt, Artificial Sequence
  Description of Artificial Sequence: Synthetic oligonucleotide
  Sense strand starting at position 700 of SEQ ID NO: 1561583
gcccaaugcucugcaacuu

SEQ ID NO: 1682778 - RNA, 19 nt, Artificial Sequence
  Description of Artificial Sequence: Synthetic oligonucleotide
  Antisense strand to SEQ ID NO: 1682777
aaguugcagagcauugggc

SEQ ID NO: 1682779 - RNA, 19 nt, Artificial Sequence
  Description of Artificial Sequence: Synthetic oligonucleotide
  Sense strand starting at position 1165 of SEQ ID NO: 1561583
uuugcaagucccuaaagua

SEQ ID NO: 1682780 - RNA, 19 nt, Artificial Sequence
  Description of Artificial Sequence: Synthetic oligonucleotide
  Antisense strand to SEQ ID NO: 1682779
uacuuuagggacuugcaaa

SEQ ID NO: 1682781 - RNA, 19 nt, Artificial Sequence
  Description of Artificial Sequence: Synthetic oligonucleotide
  Sense strand starting at position 1722 of SEQ ID NO: 1561583
ucuacaugguccuaaggaa

SEQ ID NO: 1682782 - RNA, 19 nt, Artificial Sequence
  Description of Artificial Sequence: Synthetic oligonucleotide
  Antisense strand to SEQ ID NO: 1682781
uuccuuaggaccauguaga

SEQ ID NO: 1682783 - RNA, 19 nt, Artificial Sequence
  Description of Artificial Sequence: Synthetic oligonucleotide
  Sense strand starting at position 1789 of SEQ ID NO: 1561583
ggaagcaauucuccuacuu

SEQ ID NO: 1682784 - RNA, 19 nt, Artificial Sequence
  Description of Artificial Sequence: Synthetic oligonucleotide
  Antisense strand to SEQ ID NO: 1682783
aaguaggagaauugcuucc

SEQ ID NO: 1682785 - RNA, 19 nt, Artificial Sequence
  Description of Artificial Sequence: Synthetic oligonucleotide
  Sense strand starting at position 1801 of SEQ ID NO: 1561583
ccuacuuacuugggacgaa

SEQ ID NO: 1682786 - RNA, 19 nt, Artificial Sequence
  Description of Artificial Sequence: Synthetic oligonucleotide
  Antisense strand to SEQ ID NO: 1682785
uucgucccaaguaaguagg

SEQ ID NO: 1682787 - RNA, 19 nt, Artificial Sequence
  Description of Artificial Sequence: Synthetic oligonucleotide
  Sense strand starting at position 1885 of SEQ ID NO: 1561583
cugcgaagugcacguuuaa

SEQ ID NO: 1682788 - RNA, 19 nt, Artificial Sequence
  Description of Artificial Sequence: Synthetic oligonucleotide
  Antisense strand to SEQ ID NO: 1682787
uuaaacgugcacuucgcag

SEQ ID NO: 1682789 - RNA, 19 nt, Artificial Sequence
  Description of Artificial Sequence: Synthetic oligonucleotide
  Sense strand starting at position 1886 of SEQ ID NO: 1561583
ugcgaagugcacguuuaau

SEQ ID NO: 1682790 - RNA, 19 nt, Artificial Sequence
  Description of Artificial Sequence: Synthetic oligonucleotide
  Antisense strand to SEQ ID NO: 1682789
auuaaacgugcacuucgca

SEQ ID NO: 1682791 - RNA, 19 nt, Artificial Sequence
  Description of Artificial Sequence: Synthetic oligonucleotide
  Sense strand starting at position 1896 of SEQ ID NO: 1561583
acguuuaaucaagguagac

SEQ ID NO: 1682792 - RNA, 19 nt, Artificial Sequence
  Description of Artificial Sequence: Synthetic oligonucleotide
  Antisense strand to SEQ ID NO: 1682791
gucuaccuugauuaaacgu

SEQ ID NO: 1682793 - RNA, 19 nt, Artificial Sequence
  Description of Artificial Sequence: Synthetic oligonucleotide
  Sense strand starting at position 1898 of SEQ ID NO: 1561583
guuuaaucaagguagacga

SEQ ID NO: 1682794 - RNA, 19 nt, Artificial Sequence
  Description of Artificial Sequence: Synthetic oligonucleotide
  Antisense strand to SEQ ID NO: 1682793
ucgucuaccuugauuaaac

SEQ ID NO: 1682795 - RNA, 19 nt, Artificial Sequence
  Description of Artificial Sequence: Synthetic oligonucleotide
  Sense strand starting at position 1927 of SEQ ID NO: 1561583
acguuuaauccagguagac

SEQ ID NO: 1682796 - RNA, 19 nt, Artificial Sequence
  Description of Artificial Sequence: Synthetic oligonucleotide
  Antisense strand to SEQ ID NO: 1682795
gucuaccuggauuaaacgu

SEQ ID NO: 1682797 - RNA, 19 nt, Artificial Sequence
  Description of Artificial Sequence: Synthetic oligonucleotide
  Sense strand starting at position 1929 of SEQ ID NO: 1561583
guuuaauccagguagacug

SEQ ID NO: 1682798 - RNA, 19 nt, Artificial Sequence
  Description of Artificial Sequence: Synthetic oligonucleotide
  Antisense strand to SEQ ID NO: 1682797
cagucuaccuggauuaaac

SEQ ID NO: 1682799 - RNA, 19 nt, Artificial Sequence
  Description of Artificial Sequence: Synthetic oligonucleotide
  Sense strand starting at position 2083 of SEQ ID NO: 1561583
gaaagacuggccugacuug

SEQ ID NO: 1682800 - RNA, 19 nt, Artificial Sequence
  Description of Artificial Sequence: Synthetic oligonucleotide
  Antisense strand to SEQ ID NO: 1682799
caagucaggccagucuuuc

SEQ ID NO: 1682801 - RNA, 19 nt, Artificial Sequence
  Description of Artificial Sequence: Synthetic oligonucleotide
  Sense strand starting at position 2263 of SEQ ID NO: 1561583
uuuccagguuugggaguau

SEQ ID NO: 1682802 - RNA, 19 nt, Artificial Sequence
  Description of Artificial Sequence: Synthetic oligonucleotide
  Antisense strand to SEQ ID NO: 1682801
auacucccaaaccuggaaa

SEQ ID NO: 1682803 - RNA, 19 nt, Artificial Sequence
  Description of Artificial Sequence: Synthetic oligonucleotide
  Sense strand starting at position 2274 of SEQ ID NO: 1561583
gggaguauuugugacuauu

SEQ ID NO: 1682804 - RNA, 19 nt, Artificial Sequence
  Description of Artificial Sequence: Synthetic oligonucleotide
  Antisense strand to SEQ ID NO: 1682803
aauagucacaaauacuccc

SEQ ID NO: 1682805 - RNA, 19 nt, Artificial Sequence
  Description of Artificial Sequence: Synthetic oligonucleotide
  Sense strand starting at position 2351 of SEQ ID NO: 1561583
aagguugaaucuuaaaguu

SEQ ID NO: 1682806 - RNA, 19 nt, Artificial Sequence
  Description of Artificial Sequence: Synthetic oligonucleotide
  Antisense strand to SEQ ID NO: 1682805
aacuuuaagauucaaccuu

SEQ ID NO: 1682807 - RNA, 19 nt, Artificial Sequence
  Description of Artificial Sequence: Synthetic oligonucleotide
  Sense strand starting at position 2383 of SEQ ID NO: 1561583
acuggaaacuaagaugauu

SEQ ID NO: 1682808 - RNA, 19 nt, Artificial Sequence
  Description of Artificial Sequence: Synthetic oligonucleotide
  Antisense strand to SEQ ID NO: 1682807
aaucaucuuaguuuccagu

SEQ ID NO: 1682809 - RNA, 19 nt, Artificial Sequence
  Description of Artificial Sequence: Synthetic oligonucleotide
  Sense strand starting at position 2482 of SEQ ID NO: 1561583
gcugaagcuacucaguagu

SEQ ID NO: 1682810 - RNA, 19 nt, Artificial Sequence
  Description of Artificial Sequence: Synthetic oligonucleotide
  Antisense strand to SEQ ID NO: 1682809
acuacugaguagcuucagc

SEQ ID NO: 1682811 - RNA, 19 nt, Artificial Sequence
  Description of Artificial Sequence: Synthetic oligonucleotide
  Sense strand starting at position 2484 of SEQ ID NO: 1561583
ugaagcuacucaguaguca

SEQ ID NO: 1682812 - RNA, 19 nt, Artificial Sequence
  Description of Artificial Sequence: Synthetic oligonucleotide
  Antisense strand to SEQ ID NO: 1682811
ugacuacugaguagcuuca

SEQ ID NO: 1682813 - RNA, 19 nt, Artificial Sequence
  Description of Artificial Sequence: Synthetic oligonucleotide
  Sense strand starting at position 2646 of SEQ ID NO: 1561583
cagucuaauugagaauaga

SEQ ID NO: 1682814 - RNA, 19 nt, Artificial Sequence
  Description of Artificial Sequence: Synthetic oligonucleotide
  Antisense strand to SEQ ID NO: 1682813
ucuauucucaauuagacug

SEQ ID NO: 1682815 - RNA, 19 nt, Artificial Sequence
  Description of Artificial Sequence: Synthetic oligonucleotide
  Sense strand starting at position 2803 of SEQ ID NO: 1561583
ccugaauuguuccaagcaa

SEQ ID NO: 1682816 - RNA, 19 nt, Artificial Sequence
  Description of Artificial Sequence: Synthetic oligonucleotide
  Antisense strand to SEQ ID NO: 1682815
uugcuuggaacaauucagg

SEQ ID NO: 1682817 - RNA, 19 nt, Artificial Sequence
  Description of Artificial Sequence: Synthetic oligonucleotide
  Sense strand starting at position 2958 of SEQ ID NO: 1561583
ucaggucaagcacagaauu

SEQ ID NO: 1682818 - RNA, 19 nt, Artificial Sequence
  Description of Artificial Sequence: Synthetic oligonucleotide
  Antisense strand to SEQ ID NO: 1682817
aauucugugcuugaccuga

SEQ ID NO: 1682819 - RNA, 19 nt, Artificial Sequence
  Description of Artificial Sequence: Synthetic oligonucleotide
  Sense strand starting at position 2971 of SEQ ID NO: 1561583
agaauuggguccgauucca

SEQ ID NO: 1682820 - RNA, 19 nt, Artificial Sequence
  Description of Artificial Sequence: Synthetic oligonucleotide
  Antisense strand to SEQ ID NO: 1682819
uggaaucggacccaauucu

SEQ ID NO: 1682821 - RNA, 19 nt, Artificial Sequence
  Description of Artificial Sequence: Synthetic oligonucleotide
  Sense strand starting at position 3023 of SEQ ID NO: 1561583
cgcgucagguuauuauuau

SEQ ID NO: 1682822 - RNA, 19 nt, Artificial Sequence
  Description of Artificial Sequence: Synthetic oligonucleotide
  Antisense strand to SEQ ID NO: 1682821
auaauaauaaccugacgcg

SEQ ID NO: 1682823 - RNA, 19 nt, Artificial Sequence
  Description of Artificial Sequence: Synthetic oligonucleotide
  Sense strand starting at position 3331 of SEQ ID NO: 1561583
cggccagaugcgucagguu

SEQ ID NO: 1682824 - RNA, 19 nt, Artificial Sequence
  Description of Artificial Sequence: Synthetic oligonucleotide
  Antisense strand to SEQ ID NO: 1682823
aaccugacgcaucuggccg

SEQ ID NO: 1682825 - RNA, 19 nt, Artificial Sequence
  Description of Artificial Sequence: Synthetic oligonucleotide
  Sense strand starting at position 3588 of SEQ ID NO: 1561583
ggcugaggguguuuccuau

SEQ ID NO: 1682826 - RNA, 19 nt, Artificial Sequence
  Description of Artificial Sequence: Synthetic oligonucleotide
  Antisense strand to SEQ ID NO: 1682825
auaggaaacacccucagcc

SEQ ID NO: 1682827 - RNA, 19 nt, Artificial Sequence
  Description of Artificial Sequence: Synthetic oligonucleotide
  Sense strand starting at position 3594 of SEQ ID NO: 1561583
ggguguuuccuaugccugu

SEQ ID NO: 1682828 - RNA, 19 nt, Artificial Sequence
  Description of Artificial Sequence: Synthetic oligonucleotide
  Antisense strand to SEQ ID NO: 1682827
acaggcauaggaaacaccc

SEQ ID NO: 1682829 - RNA, 19 nt, Artificial Sequence
  Description of Artificial Sequence: Synthetic oligonucleotide
  Sense strand starting at position 3633 of SEQ ID NO: 1561583
gcagauaacuucucuggcu

SEQ ID NO: 1682830 - RNA, 19 nt, Artificial Sequence
  Description of Artificial Sequence: Synthetic oligonucleotide
  Antisense strand to SEQ ID NO: 1682829
agccagagaaguuaucugc

SEQ ID NO: 1682831 - RNA, 19 nt, Artificial Sequence
  Description of Artificial Sequence: Synthetic oligonucleotide
  Sense strand starting at position 3703 of SEQ ID NO: 1561583
gugucucacccauauguga

SEQ ID NO: 1682832 - RNA, 19 nt, Artificial Sequence
  Description of Artificial Sequence: Synthetic oligonucleotide
  Antisense strand to SEQ ID NO: 1682831
ucacauaugggugagacac

SEQ ID NO: 1682833 - RNA, 19 nt, Artificial Sequence
  Description of Artificial Sequence: Synthetic oligonucleotide
  Sense strand starting at position 3736 of SEQ ID NO: 1561583
aggugauauuugggccuua

SEQ ID NO: 1682834 - RNA, 19 nt, Artificial Sequence
  Description of Artificial Sequence: Synthetic oligonucleotide
  Antisense strand to SEQ ID NO: 1682833
uaaggcccaaauaucaccu

SEQ ID NO: 1682835 - RNA, 19 nt, Artificial Sequence
  Description of Artificial Sequence: Synthetic oligonucleotide
  Sense strand starting at position 3837 of SEQ ID NO: 1561583
ccgagucuggcagauuacu

SEQ ID NO: 1682836 - RNA, 19 nt, Artificial Sequence
  Description of Artificial Sequence: Synthetic oligonucleotide
  Antisense strand to SEQ ID NO: 1682835
aguaaucugccagacucgg

SEQ ID NO: 1682837 - RNA, 19 nt, Artificial Sequence
  Description of Artificial Sequence: Synthetic oligonucleotide
  Sense strand starting at position 334 of SEQ ID NO: 1561584
gguauagacuggucccaag

SEQ ID NO: 1682838 - RNA, 19 nt, Artificial Sequence
  Description of Artificial Sequence: Synthetic oligonucleotide
  Antisense strand to SEQ ID NO: 1682837
cuugggaccagucuauacc

SEQ ID NO: 1682839 - RNA, 19 nt, Artificial Sequence
  Description of Artificial Sequence: Synthetic oligonucleotide
  Sense strand starting at position 337 of SEQ ID NO: 1561584
auagacuggucccaagaua

SEQ ID NO: 1682840 - RNA, 19 nt, Artificial Sequence
  Description of Artificial Sequence: Synthetic oligonucleotide
  Antisense strand to SEQ ID NO: 1682839
uaucuugggaccagucuau

SEQ ID NO: 1682841 - RNA, 19 nt, Artificial Sequence
  Description of Artificial Sequence: Synthetic oligonucleotide
  Sense strand starting at position 348 of SEQ ID NO: 1561584
ccaagauacuucugcagau

SEQ ID NO: 1682842 - RNA, 19 nt, Artificial Sequence
  Description of Artificial Sequence: Synthetic oligonucleotide
  Antisense strand to SEQ ID NO: 1682841
aucugcagaaguaucuugg

SEQ ID NO: 1682843 - RNA, 19 nt, Artificial Sequence
  Description of Artificial Sequence: Synthetic oligonucleotide
  Sense strand starting at position 352 of SEQ ID NO: 1561584
gauacuucugcagauaagu

SEQ ID NO: 1682844 - RNA, 19 nt, Artificial Sequence
  Description of Artificial Sequence: Synthetic oligonucleotide
  Antisense strand to SEQ ID NO: 1682843
acuuaucugcagaaguauc

SEQ ID NO: 1682845 - RNA, 19 nt, Artificial Sequence
  Description of Artificial Sequence: Synthetic oligonucleotide
  Sense strand starting at position 1150 of SEQ ID NO: 1561584
ugauuugagugcuaacucu

SEQ ID NO: 1682846 - RNA, 19 nt, Artificial Sequence
  Description of Artificial Sequence: Synthetic oligonucleotide
  Antisense strand to SEQ ID NO: 1682845
agaguuagcacucaaauca

SEQ ID NO: 1682847 - RNA, 19 nt, Artificial Sequence
  Description of Artificial Sequence: Synthetic oligonucleotide
  Sense strand starting at position 1292 of SEQ ID NO: 1561584
ucuaguacacauugaucau

SEQ ID NO: 1682848 - RNA, 19 nt, Artificial Sequence
  Description of Artificial Sequence: Synthetic oligonucleotide
  Antisense strand to SEQ ID NO: 1682847
augaucaauguguacuaga

SEQ ID NO: 1682849 - RNA, 19 nt, Artificial Sequence
  Description of Artificial Sequence: Synthetic oligonucleotide
  Sense strand starting at position 1295 of SEQ ID NO: 1561584
aguacacauugaucaugau

SEQ ID NO: 1682850 - RNA, 19 nt, Artificial Sequence
  Description of Artificial Sequence: Synthetic oligonucleotide
  Antisense strand to SEQ ID NO: 1682849
aucaugaucaauguguacu

SEQ ID NO: 1682851 - RNA, 19 nt, Artificial Sequence
  Description of Artificial Sequence: Synthetic oligonucleotide
  Sense strand starting at position 1301 of SEQ ID NO: 1561584
cauugaucaugaugugaac

SEQ ID NO: 1682852 - RNA, 19 nt, Artificial Sequence
  Description of Artificial Sequence: Synthetic oligonucleotide
  Antisense strand to SEQ ID NO: 1682851
guucacaucaugaucaaug

SEQ ID NO: 1682853 - RNA, 19 nt, Artificial Sequence
  Description of Artificial Sequence: Synthetic oligonucleotide
  Sense strand starting at position 1304 of SEQ ID NO: 1561584
ugaucaugaugugaacaaa

SEQ ID NO: 1682854 - RNA, 19 nt, Artificial Sequence
  Description of Artificial Sequence: Synthetic oligonucleotide
  Antisense strand to SEQ ID NO: 1682853
uuuguucacaucaugauca

SEQ ID NO: 1682855 - RNA, 19 nt, Artificial Sequence
  Description of Artificial Sequence: Synthetic oligonucleotide
  Sense strand starting at position 1369 of SEQ ID NO: 1561584
acauuuauccgcugucaca

SEQ ID NO: 1682856 - RNA, 19 nt, Artificial Sequence
  Description of Artificial Sequence: Synthetic oligonucleotide
  Antisense strand to SEQ ID NO: 1682855
ugugacagcggauaaaugu

SEQ ID NO: 1682857 - RNA, 19 nt, Artificial Sequence
  Description of Artificial Sequence: Synthetic oligonucleotide
  Sense strand starting at position 1383 of SEQ ID NO: 1561584
ucacaaguucuccacgcua

SEQ ID NO: 1682858 - RNA, 19 nt, Artificial Sequence
  Description of Artificial Sequence: Synthetic oligonucleotide
  Antisense strand to SEQ ID NO: 1682857
uagcguggagaacuuguga

SEQ ID NO: 1682859 - RNA, 19 nt, Artificial Sequence
  Description of Artificial Sequence: Synthetic oligonucleotide
  Sense strand starting at position 1585 of SEQ ID NO: 1561584
gcgcggagcuguccagaga

SEQ ID NO: 1682860 - RNA, 19 nt, Artificial Sequence
  Description of Artificial Sequence: Synthetic oligonucleotide
  Antisense strand to SEQ ID NO: 1682859
ucucuggacagcuccgcgc

SEQ ID NO: 1682861 - RNA, 19 nt, Artificial Sequence
  Description of Artificial Sequence: Synthetic oligonucleotide
  Sense strand starting at position 2013 of SEQ ID NO: 1561584
caaugugacccgcggauaa

SEQ ID NO: 1682862 - RNA, 19 nt, Artificial Sequence
  Description of Artificial Sequence: Synthetic oligonucleotide
  Antisense strand to SEQ ID NO: 1682861
uuauccgcgggucacauug

SEQ ID NO: 1682863 - RNA, 19 nt, Artificial Sequence
  Description of Artificial Sequence: Synthetic oligonucleotide
  Sense strand starting at position 2107 of SEQ ID NO: 1561584
agcagaaguccuggguaac

SEQ ID NO: 1682864 - RNA, 19 nt, Artificial Sequence
  Description of Artificial Sequence: Synthetic oligonucleotide
  Antisense strand to SEQ ID NO: 1682863
guuacccaggacuucugcu

SEQ ID NO: 1682865 - RNA, 19 nt, Artificial Sequence
  Description of Artificial Sequence: Synthetic oligonucleotide
  Sense strand starting at position 2108 of SEQ ID NO: 1561584
gcagaaguccuggguaaca

SEQ ID NO: 1682866 - RNA, 19 nt, Artificial Sequence
  Description of Artificial Sequence: Synthetic oligonucleotide
  Antisense strand to SEQ ID NO: 1682865
uguuacccaggacuucugc

SEQ ID NO: 1682867 - RNA, 19 nt, Artificial Sequence
  Description of Artificial Sequence: Synthetic oligonucleotide
  Sense strand starting at position 2169 of SEQ ID NO: 1561584
aggucaaguucccucucua

SEQ ID NO: 1682868 - RNA, 19 nt, Artificial Sequence
  Description of Artificial Sequence: Synthetic oligonucleotide
  Antisense strand to SEQ ID NO: 1682867
uagagagggaacuugaccu

SEQ ID NO: 1682869 - RNA, 19 nt, Artificial Sequence
  Description of Artificial Sequence: Synthetic oligonucleotide
  Sense strand starting at position 2207 of SEQ ID NO: 1561584
uugcauuucggccaaacuu

SEQ ID NO: 1682870 - RNA, 19 nt, Artificial Sequence
  Description of Artificial Sequence: Synthetic oligonucleotide
  Antisense strand to SEQ ID NO: 1682869
aaguuuggccgaaaugcaa

SEQ ID NO: 1682871 - RNA, 19 nt, Artificial Sequence
  Description of Artificial Sequence: Synthetic oligonucleotide
  Sense strand starting at position 2216 of SEQ ID NO: 1561584
ggccaaacuugcucgucuu

SEQ ID NO: 1682872 - RNA, 19 nt, Artificial Sequence
  Description of Artificial Sequence: Synthetic oligonucleotide
  Antisense strand to SEQ ID NO: 1682871
aagacgagcaaguuuggcc

SEQ ID NO: 1682873 - RNA, 19 nt, Artificial Sequence
  Description of Artificial Sequence: Synthetic oligonucleotide
  Sense strand starting at position 2217 of SEQ ID NO: 1561584
gccaaacuugcucgucuua

SEQ ID NO: 1682874 - RNA, 19 nt, Artificial Sequence
  Description of Artificial Sequence: Synthetic oligonucleotide
  Antisense strand to SEQ ID NO: 1682873
uaagacgagcaaguuuggc

SEQ ID NO: 1682875 - RNA, 19 nt, Artificial Sequence
  Description of Artificial Sequence: Synthetic oligonucleotide
  Sense strand starting at position 2228 of SEQ ID NO: 1561584
ucgucuuaauuacuagaag

SEQ ID NO: 1682876 - RNA, 19 nt, Artificial Sequence
  Description of Artificial Sequence: Synthetic oligonucleotide
  Antisense strand to SEQ ID NO: 1682875
cuucuaguaauuaagacga

SEQ ID NO: 1682877 - RNA, 19 nt, Artificial Sequence
  Description of Artificial Sequence: Synthetic oligonucleotide
  Sense strand starting at position 2229 of SEQ ID NO: 1561584
cgucuuaauuacuagaagu

SEQ ID NO: 1682878 - RNA, 19 nt, Artificial Sequence
  Description of Artificial Sequence: Synthetic oligonucleotide
  Antisense strand to SEQ ID NO: 1682877
acuucuaguaauuaagacg

SEQ ID NO: 1682879 - RNA, 19 nt, Artificial Sequence
  Description of Artificial Sequence: Synthetic oligonucleotide
  Sense strand starting at position 2242 of SEQ ID NO: 1561584
agaaguggcucugucaaug

SEQ ID NO: 1682880 - RNA, 19 nt, Artificial Sequence
  Description of Artificial Sequence: Synthetic oligonucleotide
  Antisense strand to SEQ ID NO: 1682879
cauugacagagccacuucu

SEQ ID NO: 1682881 - RNA, 19 nt, Artificial Sequence
  Description of Artificial Sequence: Synthetic oligonucleotide
  Sense strand starting at position 2278 of SEQ ID NO: 1561584
cguccugcacagugucaua

SEQ ID NO: 1682882 - RNA, 19 nt, Artificial Sequence
  Description of Artificial Sequence: Synthetic oligonucleotide
  Antisense strand to SEQ ID NO: 1682881
uaugacacugugcaggacg

SEQ ID NO: 1682883 - RNA, 19 nt, Artificial Sequence
  Description of Artificial Sequence: Synthetic oligonucleotide
  Sense strand starting at position 2319 of SEQ ID NO: 1561584
cucuauguuuaauagaggu

SEQ ID NO: 1682884 - RNA, 19 nt, Artificial Sequence
  Description of Artificial Sequence: Synthetic oligonucleotide
  Antisense strand to SEQ ID NO: 1682883
accucuauuaaacauagag

SEQ ID NO: 1682885 - RNA, 19 nt, Artificial Sequence
  Description of Artificial Sequence: Synthetic oligonucleotide
  Sense strand starting at position 2323 of SEQ ID NO: 1561584
auguuuaauagaggugaaa

SEQ ID NO: 1682886 - RNA, 19 nt, Artificial Sequence
  Description of Artificial Sequence: Synthetic oligonucleotide
  Antisense strand to SEQ ID NO: 1682885
uuucaccucuauuaaacau

SEQ ID NO: 1682887 - RNA, 19 nt, Artificial Sequence
  Description of Artificial Sequence: Synthetic oligonucleotide
  Sense strand starting at position 2325 of SEQ ID NO: 1561584
guuuaauagaggugaaagc

SEQ ID NO: 1682888 - RNA, 19 nt, Artificial Sequence
  Description of Artificial Sequence: Synthetic oligonucleotide
  Antisense strand to SEQ ID NO: 1682887
gcuuucaccucuauuaaac

SEQ ID NO: 1682889 - RNA, 19 nt, Artificial Sequence
  Description of Artificial Sequence: Synthetic oligonucleotide
  Sense strand starting at position 2395 of SEQ ID NO: 1561584
gcagcuuugcccuugcaca

SEQ ID NO: 1682890 - RNA, 19 nt, Artificial Sequence
  Description of Artificial Sequence: Synthetic oligonucleotide
  Antisense strand to SEQ ID NO: 1682889
ugugcaagggcaaagcugc

SEQ ID NO: 1682891 - RNA, 19 nt, Artificial Sequence
  Description of Artificial Sequence: Synthetic oligonucleotide
  Sense strand starting at position 2427 of SEQ ID NO: 1561584
gggugaaauuugcgucuau

SEQ ID NO: 1682892 - RNA, 19 nt, Artificial Sequence
  Description of Artificial Sequence: Synthetic oligonucleotide
  Antisense strand to SEQ ID NO: 1682891
auagacgcaaauuucaccc

SEQ ID NO: 1682893 - RNA, 19 nt, Artificial Sequence
  Description of Artificial Sequence: Synthetic oligonucleotide
  Sense strand starting at position 2428 of SEQ ID NO: 1561584
ggugaaauuugcgucuaug

SEQ ID NO: 1682894 - RNA, 19 nt, Artificial Sequence
  Description of Artificial Sequence: Synthetic oligonucleotide
  Antisense strand to SEQ ID NO: 1682893
cauagacgcaaauuucacc

SEQ ID NO: 1682895 - RNA, 19 nt, Artificial Sequence
  Description of Artificial Sequence: Synthetic oligonucleotide
  Sense strand starting at position 2492 of SEQ ID NO: 1561584
uucccugauccgggagaaa

SEQ ID NO: 1682896 - RNA, 19 nt, Artificial Sequence
  Description of Artificial Sequence: Synthetic oligonucleotide
  Antisense strand to SEQ ID NO: 1682895
uuucucccggaucagggaa

SEQ ID NO: 1682897 - RNA, 19 nt, Artificial Sequence
  Description of Artificial Sequence: Synthetic oligonucleotide
  Sense strand starting at position 2952 of SEQ ID NO: 1561584
cugugauugcaccaguaca

SEQ ID NO: 1682898 - RNA, 19 nt, Artificial Sequence
  Description of Artificial Sequence: Synthetic oligonucleotide
  Antisense strand to SEQ ID NO: 1682897
uguacuggugcaaucacag

SEQ ID NO: 1682899 - RNA, 19 nt, Artificial Sequence
  Description of Artificial Sequence: Synthetic oligonucleotide
  Sense strand starting at position 3358 of SEQ ID NO: 1561584
auccauucucucuguggga

SEQ ID NO: 1682900 - RNA, 19 nt, Artificial Sequence
  Description of Artificial Sequence: Synthetic oligonucleotide
  Antisense strand to SEQ ID NO: 1682899
ucccacagagagaauggau

SEQ ID NO: 1682901 - RNA, 19 nt, Artificial Sequence
  Description of Artificial Sequence: Synthetic oligonucleotide
  Sense strand starting at position 3360 of SEQ ID NO: 1561584
ccauucucucugugggagu

SEQ ID NO: 1682902 - RNA, 19 nt, Artificial Sequence
  Description of Artificial Sequence: Synthetic oligonucleotide
  Antisense strand to SEQ ID NO: 1682901
acucccacagagagaaugg

SEQ ID NO: 1682903 - RNA, 19 nt, Artificial Sequence
  Description of Artificial Sequence: Synthetic oligonucleotide
  Sense strand starting at position 3383 of SEQ ID NO: 1561584
aucuauguugugggugagu

SEQ ID NO: 1682904 - RNA, 19 nt, Artificial Sequence
  Description of Artificial Sequence: Synthetic oligonucleotide
  Antisense strand to SEQ ID NO: 1682903
acucacccacaacauagau

SEQ ID NO: 1682905 - RNA, 19 nt, Artificial Sequence
  Description of Artificial Sequence: Synthetic oligonucleotide
  Sense strand starting at position 3639 of SEQ ID NO: 1561584
aggagaaucgcuggagaau

SEQ ID NO: 1682906 - RNA, 19 nt, Artificial Sequence
  Description of Artificial Sequence: Synthetic oligonucleotide
  Antisense strand to SEQ ID NO: 1682905
auucuccagcgauucuccu

SEQ ID NO: 1682907 - RNA, 19 nt, Artificial Sequence
  Description of Artificial Sequence: Synthetic oligonucleotide
  Sense strand starting at position 3828 of SEQ ID NO: 1561584
auaugaaaguaccuugcaa

SEQ ID NO: 1682908 - RNA, 19 nt, Artificial Sequence
  Description of Artificial Sequence: Synthetic oligonucleotide
  Antisense strand to SEQ ID NO: 1682907
uugcaagguacuuucauau

SEQ ID NO: 1682909 - RNA, 19 nt, Artificial Sequence
  Description of Artificial Sequence: Synthetic oligonucleotide
  Sense strand starting at position 3830 of SEQ ID NO: 1561584
augaaaguaccuugcaaga

SEQ ID NO: 1682910 - RNA, 19 nt, Artificial Sequence
  Description of Artificial Sequence: Synthetic oligonucleotide
  Antisense strand to SEQ ID NO: 1682909
ucuugcaagguacuuucau

SEQ ID NO: 1682911 - RNA, 19 nt, Artificial Sequence
  Description of Artificial Sequence: Synthetic oligonucleotide
  Sense strand starting at position 3832 of SEQ ID NO: 1561584
gaaaguaccuugcaagaag

SEQ ID NO: 1682912 - RNA, 19 nt, Artificial Sequence
  Description of Artificial Sequence: Synthetic oligonucleotide
  Antisense strand to SEQ ID NO: 1682911
cuucuugcaagguacuuuc

SEQ ID NO: 1682913 - RNA, 19 nt, Artificial Sequence
  Description of Artificial Sequence: Synthetic oligonucleotide
  Sense strand starting at position 3889 of SEQ ID NO: 1561584
gaaacaaagguuugcuaga

SEQ ID NO: 1682914 - RNA, 19 nt, Artificial Sequence
  Description of Artificial Sequence: Synthetic oligonucleotide
  Antisense strand to SEQ ID NO: 1682913
ucuagcaaaccuuuguuuc

SEQ ID NO: 1682915 - RNA, 19 nt, Artificial Sequence
  Description of Artificial Sequence: Synthetic oligonucleotide
  Sense strand starting at position 3950 of SEQ ID NO: 1561584
ccugaaauguuugauaaau

SEQ ID NO: 1682916 - RNA, 19 nt, Artificial Sequence
  Description of Artificial Sequence: Synthetic oligonucleotide
  Antisense strand to SEQ ID NO: 1682915
auuuaucaaacauuucagg

SEQ ID NO: 1682917 - RNA, 19 nt, Artificial Sequence
  Description of Artificial Sequence: Synthetic oligonucleotide
  Sense strand starting at position 34 of SEQ ID NO: 1561585
gcaguagaaucagucugaa

SEQ ID NO: 1682918 - RNA, 19 nt, Artificial Sequence
  Description of Artificial Sequence: Synthetic oligonucleotide
  Antisense strand to SEQ ID NO: 1682917
uucagacugauucuacugc

SEQ ID NO: 1682919 - RNA, 19 nt, Artificial Sequence
  Description of Artificial Sequence: Synthetic oligonucleotide
  Sense strand starting at position 37 of SEQ ID NO: 1561585
guagaaucagucugaaccu

SEQ ID NO: 1682920 - RNA, 19 nt, Artificial Sequence
  Description of Artificial Sequence: Synthetic oligonucleotide
  Antisense strand to SEQ ID NO: 1682919
agguucagacugauucuac

SEQ ID NO: 1682921 - RNA, 19 nt, Artificial Sequence
  Description of Artificial Sequence: Synthetic oligonucleotide
  Sense strand starting at position 189 of SEQ ID NO: 1561585
guggcuccucucuguaauu

SEQ ID NO: 1682922 - RNA, 19 nt, Artificial Sequence
  Description of Artificial Sequence: Synthetic oligonucleotide
  Antisense strand to SEQ ID NO: 1682921
aauuacagagaggagccac

SEQ ID NO: 1682923 - RNA, 19 nt, Artificial Sequence
  Description of Artificial Sequence: Synthetic oligonucleotide
  Sense strand starting at position 249 of SEQ ID NO: 1561585
auccuuugaggccagaauu

SEQ ID NO: 1682924 - RNA, 19 nt, Artificial Sequence
  Description of Artificial Sequence: Synthetic oligonucleotide
  Antisense strand to SEQ ID NO: 1682923
aauucuggccucaaaggau

SEQ ID NO: 1682925 - RNA, 19 nt, Artificial Sequence
  Description of Artificial Sequence: Synthetic oligonucleotide
  Sense strand starting at position 664 of SEQ ID NO: 1561585
acagaauguaugugucuua

SEQ ID NO: 1682926 - RNA, 19 nt, Artificial Sequence
  Description of Artificial Sequence: Synthetic oligonucleotide
  Antisense strand to SEQ ID NO: 1682925
uaagacacauacauucugu

SEQ ID NO: 1682927 - RNA, 19 nt, Artificial Sequence
  Description of Artificial Sequence: Synthetic oligonucleotide
  Sense strand starting at position 665 of SEQ ID NO: 1561585
cagaauguaugugucuuau

SEQ ID NO: 1682928 - RNA, 19 nt, Artificial Sequence
  Description of Artificial Sequence: Synthetic oligonucleotide
  Antisense strand to SEQ ID NO: 1682927
auaagacacauacauucug

SEQ ID NO: 1682929 - RNA, 19 nt, Artificial Sequence
  Description of Artificial Sequence: Synthetic oligonucleotide
  Sense strand starting at position 667 of SEQ ID NO: 1561585
gaauguaugugucuuauag

SEQ ID NO: 1682930 - RNA, 19 nt, Artificial Sequence
  Description of Artificial Sequence: Synthetic oligonucleotide
  Antisense strand to SEQ ID NO: 1682929
cuauaagacacauacauuc

SEQ ID NO: 1682931 - RNA, 19 nt, Artificial Sequence
  Description of Artificial Sequence: Synthetic oligonucleotide
  Sense strand starting at position 669 of SEQ ID NO: 1561585
auguaugugucuuauagau

SEQ ID NO: 1682932 - RNA, 19 nt, Artificial Sequence
  Description of Artificial Sequence: Synthetic oligonucleotide
  Antisense strand to SEQ ID NO: 1682931
aucuauaagacacauacau

SEQ ID NO: 1682933 - RNA, 19 nt, Artificial Sequence
  Description of Artificial Sequence: Synthetic oligonucleotide
  Sense strand starting at position 671 of SEQ ID NO: 1561585
guaugugucuuauagauag

SEQ ID NO: 1682934 - RNA, 19 nt, Artificial Sequence
  Description of Artificial Sequence: Synthetic oligonucleotide
  Antisense strand to SEQ ID NO: 1682933
cuaucuauaagacacauac

SEQ ID NO: 1682935 - RNA, 19 nt, Artificial Sequence
  Description of Artificial Sequence: Synthetic oligonucleotide
  Sense strand starting at position 1317 of SEQ ID NO: 1561585
cuguuauggucuuucucau

SEQ ID NO: 1682936 - RNA, 19 nt, Artificial Sequence
  Description of Artificial Sequence: Synthetic oligonucleotide
  Antisense strand to SEQ ID NO: 1682935
augagaaagaccauaacag

SEQ ID NO: 1682937 - RNA, 19 nt, Artificial Sequence
  Description of Artificial Sequence: Synthetic oligonucleotide
  Sense strand starting at position 1382 of SEQ ID NO: 1561585
uccugaucccuuuggccaa

SEQ ID NO: 1682938 - RNA, 19 nt, Artificial Sequence
  Description of Artificial Sequence: Synthetic oligonucleotide
  Antisense strand to SEQ ID NO: 1682937
uuggccaaagggaucagga

SEQ ID NO: 1682939 - RNA, 19 nt, Artificial Sequence
  Description of Artificial Sequence: Synthetic oligonucleotide
  Sense strand starting at position 1408 of SEQ ID NO: 1561585
acaggagggcuuuggagua

SEQ ID NO: 1682940 - RNA, 19 nt, Artificial Sequence
  Description of Artificial Sequence: Synthetic oligonucleotide
  Antisense strand to SEQ ID NO: 1682939
uacuccaaagcccuccugu

SEQ ID NO: 1682941 - RNA, 19 nt, Artificial Sequence
  Description of Artificial Sequence: Synthetic oligonucleotide
  Sense strand starting at position 1480 of SEQ ID NO: 1561585
aagaacacccggugucaua

SEQ ID NO: 1682942 - RNA, 19 nt, Artificial Sequence
  Description of Artificial Sequence: Synthetic oligonucleotide
  Antisense strand to SEQ ID NO: 1682941
uaugacaccggguguucuu

SEQ ID NO: 1682943 - RNA, 19 nt, Artificial Sequence
  Description of Artificial Sequence: Synthetic oligonucleotide
  Sense strand starting at position 1829 of SEQ ID NO: 1561585
gucuaaauuugcucuaggu

SEQ ID NO: 1682944 - RNA, 19 nt, Artificial Sequence
  Description of Artificial Sequence: Synthetic oligonucleotide
  Antisense strand to SEQ ID NO: 1682943
accuagagcaaauuuagac

SEQ ID NO: 1682945 - RNA, 19 nt, Artificial Sequence
  Description of Artificial Sequence: Synthetic oligonucleotide
  Sense strand starting at position 2110 of SEQ ID NO: 1561585
ccuuuagaauuggcagaag

SEQ ID NO: 1682946 - RNA, 19 nt, Artificial Sequence
  Description of Artificial Sequence: Synthetic oligonucleotide
  Antisense strand to SEQ ID NO: 1682945
cuucugccaauucuaaagg

SEQ ID NO: 1682947 - RNA, 19 nt, Artificial Sequence
  Description of Artificial Sequence: Synthetic oligonucleotide
  Sense strand starting at position 2296 of SEQ ID NO: 1561585
gguggaacauacgauuuca

SEQ ID NO: 1682948 - RNA, 19 nt, Artificial Sequence
  Description of Artificial Sequence: Synthetic oligonucleotide
  Antisense strand to SEQ ID NO: 1682947
ugaaaucguauguuccacc

SEQ ID NO: 1682949 - RNA, 19 nt, Artificial Sequence
  Description of Artificial Sequence: Synthetic oligonucleotide
  Sense strand starting at position 2682 of SEQ ID NO: 1561585
uugugaguuagggauccaa

SEQ ID NO: 1682950 - RNA, 19 nt, Artificial Sequence
  Description of Artificial Sequence: Synthetic oligonucleotide
  Antisense strand to SEQ ID NO: 1682949
uuggaucccuaacucacaa

SEQ ID NO: 1682951 - RNA, 19 nt, Artificial Sequence
  Description of Artificial Sequence: Synthetic oligonucleotide
  Sense strand starting at position 2888 of SEQ ID NO: 1561585
ggguuaaaguaguucucuu

SEQ ID NO: 1682952 - RNA, 19 nt, Artificial Sequence
  Description of Artificial Sequence: Synthetic oligonucleotide
  Antisense strand to SEQ ID NO: 1682951
aagagaacuacuuuaaccc

SEQ ID NO: 1682953 - RNA, 19 nt, Artificial Sequence
  Description of Artificial Sequence: Synthetic oligonucleotide
  Sense strand starting at position 3329 of SEQ ID NO: 1561585
aaaggauuacgugguuucu

SEQ ID NO: 1682954 - RNA, 19 nt, Artificial Sequence
  Description of Artificial Sequence: Synthetic oligonucleotide
  Antisense strand to SEQ ID NO: 1682953
agaaaccacguaauccuuu

SEQ ID NO: 1682955 - RNA, 19 nt, Artificial Sequence
  Description of Artificial Sequence: Synthetic oligonucleotide
  Sense strand starting at position 3331 of SEQ ID NO: 1561585
aggauuacgugguuucuaa

SEQ ID NO: 1682956 - RNA, 19 nt, Artificial Sequence
  Description of Artificial Sequence: Synthetic oligonucleotide
  Antisense strand to SEQ ID NO: 1682955
uuagaaaccacguaauccu

SEQ ID NO: 1682957 - RNA, 19 nt, Artificial Sequence
  Description of Artificial Sequence: Synthetic oligonucleotide
  Sense strand starting at position 3468 of SEQ ID NO: 1561585
auacgcugucaugggauau

SEQ ID NO: 1682958 - RNA, 19 nt, Artificial Sequence
  Description of Artificial Sequence: Synthetic oligonucleotide
  Antisense strand to SEQ ID NO: 1682957
auaucccaugacagcguau

SEQ ID NO: 1682959 - RNA, 19 nt, Artificial Sequence
  Description of Artificial Sequence: Synthetic oligonucleotide
  Sense strand starting at position 3503 of SEQ ID NO: 1561585
uguguuucuguaggaguuu

SEQ ID NO: 1682960 - RNA, 19 nt, Artificial Sequence
  Description of Artificial Sequence: Synthetic oligonucleotide
  Antisense strand to SEQ ID NO: 1682959
aaacuccuacagaaacaca

SEQ ID NO: 1682961 - RNA, 19 nt, Artificial Sequence
  Description of Artificial Sequence: Synthetic oligonucleotide
  Sense strand starting at position 3544 of SEQ ID NO: 1561585
ugcuuuccuuaaccguaaa

SEQ ID NO: 1682962 - RNA, 19 nt, Artificial Sequence
  Description of Artificial Sequence: Synthetic oligonucleotide
  Antisense strand to SEQ ID NO: 1682961
uuuacgguuaaggaaagca

SEQ ID NO: 1682963 - RNA, 19 nt, Artificial Sequence
  Description of Artificial Sequence: Synthetic oligonucleotide
  Sense strand starting at position 3558 of SEQ ID NO: 1561585
guaaacaucuuauaaccgu

SEQ ID NO: 1682964 - RNA, 19 nt, Artificial Sequence
  Description of Artificial Sequence: Synthetic oligonucleotide
  Antisense strand to SEQ ID NO: 1682963
acgguuauaagauguuuac

SEQ ID NO: 1682965 - RNA, 19 nt, Artificial Sequence
  Description of Artificial Sequence: Synthetic oligonucleotide
  Sense strand starting at position 3571 of SEQ ID NO: 1561585
aaccgugacucgugaguga

SEQ ID NO: 1682966 - RNA, 19 nt, Artificial Sequence
  Description of Artificial Sequence: Synthetic oligonucleotide
  Antisense strand to SEQ ID NO: 1682965
ucacucacgagucacgguu

SEQ ID NO: 1682967 - RNA, 19 nt, Artificial Sequence
  Description of Artificial Sequence: Synthetic oligonucleotide
  Sense strand starting at position 3578 of SEQ ID NO: 1561585
acucgugagugagcaguaa

SEQ ID NO: 1682968 - RNA, 19 nt, Artificial Sequence
  Description of Artificial Sequence: Synthetic oligonucleotide
  Antisense strand to SEQ ID NO: 1682967
uuacugcucacucacgagu

SEQ ID NO: 1682969 - RNA, 19 nt, Artificial Sequence
  Description of Artificial Sequence: Synthetic oligonucleotide
  Sense strand starting at position 3582 of SEQ ID NO: 1561585
gugagugagcaguaaggaa

SEQ ID NO: 1682970 - RNA, 19 nt, Artificial Sequence
  Description of Artificial Sequence: Synthetic oligonucleotide
  Antisense strand to SEQ ID NO: 1682969
uuccuuacugcucacucac

SEQ ID NO: 1682971 - RNA, 19 nt, Artificial Sequence
  Description of Artificial Sequence: Synthetic oligonucleotide
  Sense strand starting at position 3596 of SEQ ID NO: 1561585
aggaauacaucuugcuauu

SEQ ID NO: 1682972 - RNA, 19 nt, Artificial Sequence
  Description of Artificial Sequence: Synthetic oligonucleotide
  Antisense strand to SEQ ID NO: 1682971
aauagcaagauguauuccu

SEQ ID NO: 1682973 - RNA, 19 nt, Artificial Sequence
  Description of Artificial Sequence: Synthetic oligonucleotide
  Sense strand starting at position 3919 of SEQ ID NO: 1561585
ggccuacgucuugcuaguu

SEQ ID NO: 1682974 - RNA, 19 nt, Artificial Sequence
  Description of Artificial Sequence: Synthetic oligonucleotide
  Antisense strand to SEQ ID NO: 1682973
aacuagcaagacguaggcc

SEQ ID NO: 1682975 - RNA, 19 nt, Artificial Sequence
  Description of Artificial Sequence: Synthetic oligonucleotide
  Sense strand starting at position 222 of SEQ ID NO: 1561586
uugauauugucacugacuu

SEQ ID NO: 1682976 - RNA, 19 nt, Artificial Sequence
  Description of Artificial Sequence: Synthetic oligonucleotide
  Antisense strand to SEQ ID NO: 1682975
aagucagugacaauaucaa

SEQ ID NO: 1682977 - RNA, 19 nt, Artificial Sequence
  Description of Artificial Sequence: Synthetic oligonucleotide
  Sense strand starting at position 223 of SEQ ID NO: 1561586
ugauauugucacugacuuu

SEQ ID NO: 1682978 - RNA, 19 nt, Artificial Sequence
  Description of Artificial Sequence: Synthetic oligonucleotide
  Antisense strand to SEQ ID NO: 1682977
aaagucagugacaauauca

SEQ ID NO: 1682979 - RNA, 19 nt, Artificial Sequence
  Description of Artificial Sequence: Synthetic oligonucleotide
  Sense strand starting at position 229 of SEQ ID NO: 1561586
ugucacugacuuuaguuau

SEQ ID NO: 1682980 - RNA, 19 nt, Artificial Sequence
  Description of Artificial Sequence: Synthetic oligonucleotide
  Antisense strand to SEQ ID NO: 1682979
auaacuaaagucagugaca

SEQ ID NO: 1682981 - RNA, 19 nt, Artificial Sequence
  Description of Artificial Sequence: Synthetic oligonucleotide
  Sense strand starting at position 671 of SEQ ID NO: 1561586
gauuacagguguuuaaguu

SEQ ID NO: 1682982 - RNA, 19 nt, Artificial Sequence
  Description of Artificial Sequence: Synthetic oligonucleotide
  Antisense strand to SEQ ID NO: 1682981
aacuuaaacaccuguaauc

SEQ ID NO: 1682983 - RNA, 19 nt, Artificial Sequence
  Description of Artificial Sequence: Synthetic oligonucleotide
  Sense strand starting at position 672 of SEQ ID NO: 1561586
auuacagguguuuaaguua

SEQ ID NO: 1682984 - RNA, 19 nt, Artificial Sequence
  Description of Artificial Sequence: Synthetic oligonucleotide
  Antisense strand to SEQ ID NO: 1682983
uaacuuaaacaccuguaau

SEQ ID NO: 1682985 - RNA, 19 nt, Artificial Sequence
  Description of Artificial Sequence: Synthetic oligonucleotide
  Sense strand starting at position 1265 of SEQ ID NO: 1561586
acuguaauuucugauacug

SEQ ID NO: 1682986 - RNA, 19 nt, Artificial Sequence
  Description of Artificial Sequence: Synthetic oligonucleotide
  Antisense strand to SEQ ID NO: 1682985
caguaucagaaauuacagu

SEQ ID NO: 1682987 - RNA, 19 nt, Artificial Sequence
  Description of Artificial Sequence: Synthetic oligonucleotide
  Sense strand starting at position 1267 of SEQ ID NO: 1561586
uguaauuucugauacuggu

SEQ ID NO: 1682988 - RNA, 19 nt, Artificial Sequence
  Description of Artificial Sequence: Synthetic oligonucleotide
  Antisense strand to SEQ ID NO: 1682987
accaguaucagaaauuaca

SEQ ID NO: 1682989 - RNA, 19 nt, Artificial Sequence
  Description of Artificial Sequence: Synthetic oligonucleotide
  Sense strand starting at position 1343 of SEQ ID NO: 1561586
gguacugaccuaggaaguu

SEQ ID NO: 1682990 - RNA, 19 nt, Artificial Sequence
  Description of Artificial Sequence: Synthetic oligonucleotide
  Antisense strand to SEQ ID NO: 1682989
aacuuccuaggucaguacc

SEQ ID NO: 1682991 - RNA, 19 nt, Artificial Sequence
  Description of Artificial Sequence: Synthetic oligonucleotide
  Sense strand starting at position 1391 of SEQ ID NO: 1561586
gaguauugcuacuuugcuu

SEQ ID NO: 1682992 - RNA, 19 nt, Artificial Sequence
  Description of Artificial Sequence: Synthetic oligonucleotide
  Antisense strand to SEQ ID NO: 1682991
aagcaaaguagcaauacuc

SEQ ID NO: 1682993 - RNA, 19 nt, Artificial Sequence
  Description of Artificial Sequence: Synthetic oligonucleotide
  Sense strand starting at position 1406 of SEQ ID NO: 1561586
gcuuuauaacuguggcaau

SEQ ID NO: 1682994 - RNA, 19 nt, Artificial Sequence
  Description of Artificial Sequence: Synthetic oligonucleotide
  Antisense strand to SEQ ID NO: 1682993
auugccacaguuauaaagc

SEQ ID NO: 1682995 - RNA, 19 nt, Artificial Sequence
  Description of Artificial Sequence: Synthetic oligonucleotide
  Sense strand starting at position 1483 of SEQ ID NO: 1561586
cugagcaauuucgcaaacu

SEQ ID NO: 1682996 - RNA, 19 nt, Artificial Sequence
  Description of Artificial Sequence: Synthetic oligonucleotide
  Antisense strand to SEQ ID NO: 1682995
aguuugcgaaauugcucag

SEQ ID NO: 1682997 - RNA, 19 nt, Artificial Sequence
  Description of Artificial Sequence: Synthetic oligonucleotide
  Sense strand starting at position 1571 of SEQ ID NO: 1561586
cgcccugucggugacaaga

SEQ ID NO: 1682998 - RNA, 19 nt, Artificial Sequence
  Description of Artificial Sequence: Synthetic oligonucleotide
  Antisense strand to SEQ ID NO: 1682997
ucuugucaccgacagggcg

SEQ ID NO: 1682999 - RNA, 19 nt, Artificial Sequence
  Description of Artificial Sequence: Synthetic oligonucleotide
  Sense strand starting at position 1850 of SEQ ID NO: 1561586
gcgucucagaccuagcaga

SEQ ID NO: 1683000 - RNA, 19 nt, Artificial Sequence
  Description of Artificial Sequence: Synthetic oligonucleotide
  Antisense strand to SEQ ID NO: 1682999
ucugcuaggucugagacgc

SEQ ID NO: 1683001 - RNA, 19 nt, Artificial Sequence
  Description of Artificial Sequence: Synthetic oligonucleotide
  Sense strand starting at position 2081 of SEQ ID NO: 1561586
gaaugaggaugaugugaag

SEQ ID NO: 1683002 - RNA, 19 nt, Artificial Sequence
  Description of Artificial Sequence: Synthetic oligonucleotide
  Antisense strand to SEQ ID NO: 1683001
cuucacaucauccucauuc

SEQ ID NO: 1683003 - RNA, 19 nt, Artificial Sequence
  Description of Artificial Sequence: Synthetic oligonucleotide
  Sense strand starting at position 2179 of SEQ ID NO: 1561586
ccagaucaaucugucgaua

SEQ ID NO: 1683004 - RNA, 19 nt, Artificial Sequence
  Description of Artificial Sequence: Synthetic oligonucleotide
  Antisense strand to SEQ ID NO: 1683003
uaucgacagauugaucugg

SEQ ID NO: 1683005 - RNA, 19 nt, Artificial Sequence
  Description of Artificial Sequence: Synthetic oligonucleotide
  Sense strand starting at position 2182 of SEQ ID NO: 1561586
gaucaaucugucgauauug

SEQ ID NO: 1683006 - RNA, 19 nt, Artificial Sequence
  Description of Artificial Sequence: Synthetic oligonucleotide
  Antisense strand to SEQ ID NO: 1683005
caauaucgacagauugauc

SEQ ID NO: 1683007 - RNA, 19 nt, Artificial Sequence
  Description of Artificial Sequence: Synthetic oligonucleotide
  Sense strand starting at position 2422 of SEQ ID NO: 1561586
aucauugcagccuggaauu

SEQ ID NO: 1683008 - RNA, 19 nt, Artificial Sequence
  Description of Artificial Sequence: Synthetic oligonucleotide
  Antisense strand to SEQ ID NO: 1683007
aauuccaggcugcaaugau

SEQ ID NO: 1683009 - RNA, 19 nt, Artificial Sequence
  Description of Artificial Sequence: Synthetic oligonucleotide
  Sense strand starting at position 2433 of SEQ ID NO: 1561586
cuggaauuccugcgcugaa

SEQ ID NO: 1683010 - RNA, 19 nt, Artificial Sequence
  Description of Artificial Sequence: Synthetic oligonucleotide
  Antisense strand to SEQ ID NO: 1683009
uucagcgcaggaauuccag

SEQ ID NO: 1683011 - RNA, 19 nt, Artificial Sequence
  Description of Artificial Sequence: Synthetic oligonucleotide
  Sense strand starting at position 2434 of SEQ ID NO: 1561586
uggaauuccugcgcugaag

SEQ ID NO: 1683012 - RNA, 19 nt, Artificial Sequence
  Description of Artificial Sequence: Synthetic oligonucleotide
  Antisense strand to SEQ ID NO: 1683011
cuucagcgcaggaauucca

SEQ ID NO: 1683013 - RNA, 19 nt, Artificial Sequence
  Description of Artificial Sequence: Synthetic oligonucleotide
  Sense strand starting at position 2566 of SEQ ID NO: 1561586
ucgaacuccugagccuaaa

SEQ ID NO: 1683014 - RNA, 19 nt, Artificial Sequence
  Description of Artificial Sequence: Synthetic oligonucleotide
  Antisense strand to SEQ ID NO: 1683013
uuuaggcucaggaguucga

SEQ ID NO: 1683015 - RNA, 19 nt, Artificial Sequence
  Description of Artificial Sequence: Synthetic oligonucleotide
  Sense strand starting at position 2864 of SEQ ID NO: 1561586
agauaaucccgcuguaguc

SEQ ID NO: 1683016 - RNA, 19 nt, Artificial Sequence
  Description of Artificial Sequence: Synthetic oligonucleotide
  Antisense strand to SEQ ID NO: 1683015
gacuacagcgggauuaucu

SEQ ID NO: 1683017 - RNA, 19 nt, Artificial Sequence
  Description of Artificial Sequence: Synthetic oligonucleotide
  Sense strand starting at position 2883 of SEQ ID NO: 1561586
cuagcuacugcgggagaau

SEQ ID NO: 1683018 - RNA, 19 nt, Artificial Sequence
  Description of Artificial Sequence: Synthetic oligonucleotide
  Antisense strand to SEQ ID NO: 1683017
auucucccgcaguagcuag

SEQ ID NO: 1683019 - RNA, 19 nt, Artificial Sequence
  Description of Artificial Sequence: Synthetic oligonucleotide
  Sense strand starting at position 2928 of SEQ ID NO: 1561586
gcgacacccuguuugaaag

SEQ ID NO: 1683020 - RNA, 19 nt, Artificial Sequence
  Description of Artificial Sequence: Synthetic oligonucleotide
  Antisense strand to SEQ ID NO: 1683019
cuuucaaacagggugucgc

SEQ ID NO: 1683021 - RNA, 19 nt, Artificial Sequence
  Description of Artificial Sequence: Synthetic oligonucleotide
  Sense strand starting at position 2929 of SEQ ID NO: 1561586
cgacacccuguuugaaaga

SEQ ID NO: 1683022 - RNA, 19 nt, Artificial Sequence
  Description of Artificial Sequence: Synthetic oligonucleotide
  Antisense strand to SEQ ID NO: 1683021
ucuuucaaacagggugucg

SEQ ID NO: 1683023 - RNA, 19 nt, Artificial Sequence
  Description of Artificial Sequence: Synthetic oligonucleotide
  Sense strand starting at position 3014 of SEQ ID NO: 1561586
gguggaacacgugaguuca

SEQ ID NO: 1683024 - RNA, 19 nt, Artificial Sequence
  Description of Artificial Sequence: Synthetic oligonucleotide
  Antisense strand to SEQ ID NO: 1683023
ugaacucacguguuccacc

SEQ ID NO: 1683025 - RNA, 19 nt, Artificial Sequence
  Description of Artificial Sequence: Synthetic oligonucleotide
  Sense strand starting at position 3406 of SEQ ID NO: 1561586
ucauauauuugugcaucga

SEQ ID NO: 1683026 - RNA, 19 nt, Artificial Sequence
  Description of Artificial Sequence: Synthetic oligonucleotide
  Antisense strand to SEQ ID NO: 1683025
ucgaugcacaaauauauga

SEQ ID NO: 1683027 - RNA, 19 nt, Artificial Sequence
  Description of Artificial Sequence: Synthetic oligonucleotide
  Sense strand starting at position 3410 of SEQ ID NO: 1561586
auauuugugcaucgaucau

SEQ ID NO: 1683028 - RNA, 19 nt, Artificial Sequence
  Description of Artificial Sequence: Synthetic oligonucleotide
  Antisense strand to SEQ ID NO: 1683027
augaucgaugcacaaauau

SEQ ID NO: 1683029 - RNA, 19 nt, Artificial Sequence
  Description of Artificial Sequence: Synthetic oligonucleotide
  Sense strand starting at position 3414 of SEQ ID NO: 1561586
uugugcaucgaucaucaca

SEQ ID NO: 1683030 - RNA, 19 nt, Artificial Sequence
  Description of Artificial Sequence: Synthetic oligonucleotide
  Antisense strand to SEQ ID NO: 1683029
ugugaugaucgaugcacaa

SEQ ID NO: 1683031 - RNA, 19 nt, Artificial Sequence
  Description of Artificial Sequence: Synthetic oligonucleotide
  Sense strand starting at position 3416 of SEQ ID NO: 1561586
gugcaucgaucaucacaau

SEQ ID NO: 1683032 - RNA, 19 nt, Artificial Sequence
  Description of Artificial Sequence: Synthetic oligonucleotide
  Antisense strand to SEQ ID NO: 1683031
auugugaugaucgaugcac

SEQ ID NO: 1683033 - RNA, 19 nt, Artificial Sequence
  Description of Artificial Sequence: Synthetic oligonucleotide
  Sense strand starting at position 3542 of SEQ ID NO: 1561586
gcuaaucuuucugucugua

SEQ ID NO: 1683034 - RNA, 19 nt, Artificial Sequence
  Description of Artificial Sequence: Synthetic oligonucleotide
  Antisense strand to SEQ ID NO: 1683033
uacagacagaaagauuagc

SEQ ID NO: 1683035 - RNA, 19 nt, Artificial Sequence
  Description of Artificial Sequence: Synthetic oligonucleotide
  Sense strand starting at position 3557 of SEQ ID NO: 1561586
uguauagauugccuacugu

SEQ ID NO: 1683036 - RNA, 19 nt, Artificial Sequence
  Description of Artificial Sequence: Synthetic oligonucleotide
  Antisense strand to SEQ ID NO: 1683035
acaguaggcaaucuauaca

SEQ ID NO: 1683037 - RNA, 19 nt, Artificial Sequence
  Description of Artificial Sequence: Synthetic oligonucleotide
  Sense strand starting at position 3563 of SEQ ID NO: 1561586
gauugccuacuguagauau

SEQ ID NO: 1683038 - RNA, 19 nt, Artificial Sequence
  Description of Artificial Sequence: Synthetic oligonucleotide
  Antisense strand to SEQ ID NO: 1683037
auaucuacaguaggcaauc

SEQ ID NO: 1683039 - RNA, 19 nt, Artificial Sequence
  Description of Artificial Sequence: Synthetic oligonucleotide
  Sense strand starting at position 3573 of SEQ ID NO: 1561586
uguagauauugccuguaga

SEQ ID NO: 1683040 - RNA, 19 nt, Artificial Sequence
  Description of Artificial Sequence: Synthetic oligonucleotide
  Antisense strand to SEQ ID NO: 1683039
ucuacaggcaauaucuaca

SEQ ID NO: 1683041 - RNA, 19 nt, Artificial Sequence
  Description of Artificial Sequence: Synthetic oligonucleotide
  Sense strand starting at position 3574 of SEQ ID NO: 1561586
guagauauugccuguagaa

SEQ ID NO: 1683042 - RNA, 19 nt, Artificial Sequence
  Description of Artificial Sequence: Synthetic oligonucleotide
  Antisense strand to SEQ ID NO: 1683041
uucuacaggcaauaucuac

SEQ ID NO: 1683043 - RNA, 19 nt, Artificial Sequence
  Description of Artificial Sequence: Synthetic oligonucleotide
  Sense strand starting at position 3576 of SEQ ID NO: 1561586
agauauugccuguagaauu

SEQ ID NO: 1683044 - RNA, 19 nt, Artificial Sequence
  Description of Artificial Sequence: Synthetic oligonucleotide
  Antisense strand to SEQ ID NO: 1683043
aauucuacaggcaauaucu

SEQ ID NO: 1683045 - RNA, 19 nt, Artificial Sequence
  Description of Artificial Sequence: Synthetic oligonucleotide
  Sense strand starting at position 3584 of SEQ ID NO: 1561586
ccuguagaauuagaauaua

SEQ ID NO: 1683046 - RNA, 19 nt, Artificial Sequence
  Description of Artificial Sequence: Synthetic oligonucleotide
  Antisense strand to SEQ ID NO: 1683045
uauauucuaauucuacagg

SEQ ID NO: 1683047 - RNA, 19 nt, Artificial Sequence
  Description of Artificial Sequence: Synthetic oligonucleotide
  Sense strand starting at position 3699 of SEQ ID NO: 1561586
auuguauggcuguaucaua

SEQ ID NO: 1683048 - RNA, 19 nt, Artificial Sequence
  Description of Artificial Sequence: Synthetic oligonucleotide
  Antisense strand to SEQ ID NO: 1683047
uaugauacagccauacaau

SEQ ID NO: 1683049 - RNA, 19 nt, Artificial Sequence
  Description of Artificial Sequence: Synthetic oligonucleotide
  Sense strand starting at position 3710 of SEQ ID NO: 1561586
guaucauaacaucaguugu

SEQ ID NO: 1683050 - RNA, 19 nt, Artificial Sequence
  Description of Artificial Sequence: Synthetic oligonucleotide
  Antisense strand to SEQ ID NO: 1683049
acaacugauguuaugauac

SEQ ID NO: 1683051 - RNA, 19 nt, Artificial Sequence
  Description of Artificial Sequence: Synthetic oligonucleotide
  Sense strand starting at position 3716 of SEQ ID NO: 1561586
uaacaucaguuguuggaua

SEQ ID NO: 1683052 - RNA, 19 nt, Artificial Sequence
  Description of Artificial Sequence: Synthetic oligonucleotide
  Antisense strand to SEQ ID NO: 1683051
uauccaacaacugauguua

SEQ ID NO: 1683053 - RNA, 19 nt, Artificial Sequence
  Description of Artificial Sequence: Synthetic oligonucleotide
  Sense strand starting at position 3718 of SEQ ID NO: 1561586
acaucaguuguuggauauu

SEQ ID NO: 1683054 - RNA, 19 nt, Artificial Sequence
  Description of Artificial Sequence: Synthetic oligonucleotide
  Antisense strand to SEQ ID NO: 1683053
aauauccaacaacugaugu

SEQ ID NO: 1683055 - RNA, 19 nt, Artificial Sequence
  Description of Artificial Sequence: Synthetic oligonucleotide
  Sense strand starting at position 97 of SEQ ID NO: 1561587
gucucaaggaguuagcuuu

SEQ ID NO: 1683056 - RNA, 19 nt, Artificial Sequence
  Description of Artificial Sequence: Synthetic oligonucleotide
  Antisense strand to SEQ ID NO: 1683055
aaagcuaacuccuugagac

SEQ ID NO: 1683057 - RNA, 19 nt, Artificial Sequence
  Description of Artificial Sequence: Synthetic oligonucleotide
  Sense strand starting at position 392 of SEQ ID NO: 1561587
ugauaagaacucugugccu

SEQ ID NO: 1683058 - RNA, 19 nt, Artificial Sequence
  Description of Artificial Sequence: Synthetic oligonucleotide
  Antisense strand to SEQ ID NO: 1683057
aggcacagaguucuuauca

SEQ ID NO: 1683059 - RNA, 19 nt, Artificial Sequence
  Description of Artificial Sequence: Synthetic oligonucleotide
  Sense strand starting at position 398 of SEQ ID NO: 1561587
gaacucugugccuagggaa

SEQ ID NO: 1683060 - RNA, 19 nt, Artificial Sequence
  Description of Artificial Sequence: Synthetic oligonucleotide
  Antisense strand to SEQ ID NO: 1683059
uucccuaggcacagaguuc

SEQ ID NO: 1683061 - RNA, 19 nt, Artificial Sequence
  Description of Artificial Sequence: Synthetic oligonucleotide
  Sense strand starting at position 453 of SEQ ID NO: 1561587
uauggugucagggauuauu

SEQ ID NO: 1683062 - RNA, 19 nt, Artificial Sequence
  Description of Artificial Sequence: Synthetic oligonucleotide
  Antisense strand to SEQ ID NO: 1683061
aauaaucccugacaccaua

SEQ ID NO: 1683063 - RNA, 19 nt, Artificial Sequence
  Description of Artificial Sequence: Synthetic oligonucleotide
  Sense strand starting at position 456 of SEQ ID NO: 1561587
ggugucagggauuauuauu

SEQ ID NO: 1683064 - RNA, 19 nt, Artificial Sequence
  Description of Artificial Sequence: Synthetic oligonucleotide
  Antisense strand to SEQ ID NO: 1683063
aauaauaaucccugacacc

SEQ ID NO: 1683065 - RNA, 19 nt, Artificial Sequence
  Description of Artificial Sequence: Synthetic oligonucleotide
  Sense strand starting at position 595 of SEQ ID NO: 1561587
gauaauguguaucagagag

SEQ ID NO: 1683066 - RNA, 19 nt, Artificial Sequence
  Description of Artificial Sequence: Synthetic oligonucleotide
  Antisense strand to SEQ ID NO: 1683065
cucucugauacacauuauc

SEQ ID NO: 1683067 - RNA, 19 nt, Artificial Sequence
  Description of Artificial Sequence: Synthetic oligonucleotide
  Sense strand starting at position 628 of SEQ ID NO: 1561587
ugggaaugucaaugacacu

SEQ ID NO: 1683068 - RNA, 19 nt, Artificial Sequence
  Description of Artificial Sequence: Synthetic oligonucleotide
  Antisense strand to SEQ ID NO: 1683067
agugucauugacauuccca

SEQ ID NO: 1683069 - RNA, 19 nt, Artificial Sequence
  Description of Artificial Sequence: Synthetic oligonucleotide
  Sense strand starting at position 634 of SEQ ID NO: 1561587
ugucaaugacacuggaaau

SEQ ID NO: 1683070 - RNA, 19 nt, Artificial Sequence
  Description of Artificial Sequence: Synthetic oligonucleotide
  Antisense strand to SEQ ID NO: 1683069
auuuccagugucauugaca

SEQ ID NO: 1683071 - RNA, 19 nt, Artificial Sequence
  Description of Artificial Sequence: Synthetic oligonucleotide
  Sense strand starting at position 672 of SEQ ID NO: 1561587
cagaguuaaucuggaagaa

SEQ ID NO: 1683072 - RNA, 19 nt, Artificial Sequence
  Description of Artificial Sequence: Synthetic oligonucleotide
  Antisense strand to SEQ ID NO: 1683071
uucuuccagauuaacucug

SEQ ID NO: 1683073 - RNA, 19 nt, Artificial Sequence
  Description of Artificial Sequence: Synthetic oligonucleotide
  Sense strand starting at position 718 of SEQ ID NO: 1561587
cugcuugagacauauguga

SEQ ID NO: 1683074 - RNA, 19 nt, Artificial Sequence
  Description of Artificial Sequence: Synthetic oligonucleotide
  Antisense strand to SEQ ID NO: 1683073
ucacauaugucucaagcag

SEQ ID NO: 1683075 - RNA, 19 nt, Artificial Sequence
  Description of Artificial Sequence: Synthetic oligonucleotide
  Sense strand starting at position 720 of SEQ ID NO: 1561587
gcuugagacauaugugaaa

SEQ ID NO: 1683076 - RNA, 19 nt, Artificial Sequence
  Description of Artificial Sequence: Synthetic oligonucleotide
  Antisense strand to SEQ ID NO: 1683075
uuucacauaugucucaagc

SEQ ID NO: 1683077 - RNA, 19 nt, Artificial Sequence
  Description of Artificial Sequence: Synthetic oligonucleotide
  Sense strand starting at position 962 of SEQ ID NO: 1561587
cguacaaauuaagagacua

SEQ ID NO: 1683078 - RNA, 19 nt, Artificial Sequence
  Description of Artificial Sequence: Synthetic oligonucleotide
  Antisense strand to SEQ ID NO: 1683077
uagucucuuaauuuguacg

SEQ ID NO: 1683079 - RNA, 19 nt, Artificial Sequence
  Description of Artificial Sequence: Synthetic oligonucleotide
  Sense strand starting at position 1077 of SEQ ID NO: 1561587
accauagcugagugcucua

SEQ ID NO: 1683080 - RNA, 19 nt, Artificial Sequence
  Description of Artificial Sequence: Synthetic oligonucleotide
  Antisense strand to SEQ ID NO: 1683079
uagagcacucagcuauggu

SEQ ID NO: 1683081 - RNA, 19 nt, Artificial Sequence
  Description of Artificial Sequence: Synthetic oligonucleotide
  Sense strand starting at position 1080 of SEQ ID NO: 1561587
auagcugagugcucuacaa

SEQ ID NO: 1683082 - RNA, 19 nt, Artificial Sequence
  Description of Artificial Sequence: Synthetic oligonucleotide
  Antisense strand to SEQ ID NO: 1683081
uuguagagcacucagcuau

SEQ ID NO: 1683083 - RNA, 19 nt, Artificial Sequence
  Description of Artificial Sequence: Synthetic oligonucleotide
  Sense strand starting at position 1082 of SEQ ID NO: 1561587
agcugagugcucuacaaua

SEQ ID NO: 1683084 - RNA, 19 nt, Artificial Sequence
  Description of Artificial Sequence: Synthetic oligonucleotide
  Antisense strand to SEQ ID NO: 1683083
uauuguagagcacucagcu

SEQ ID NO: 1683085 - RNA, 19 nt, Artificial Sequence
  Description of Artificial Sequence: Synthetic oligonucleotide
  Sense strand starting at position 1084 of SEQ ID NO: 1561587
cugagugcucuacaauacu

SEQ ID NO: 1683086 - RNA, 19 nt, Artificial Sequence
  Description of Artificial Sequence: Synthetic oligonucleotide
  Antisense strand to SEQ ID NO: 1683085
aguauuguagagcacucag

SEQ ID NO: 1683087 - RNA, 19 nt, Artificial Sequence
  Description of Artificial Sequence: Synthetic oligonucleotide
  Sense strand starting at position 1135 of SEQ ID NO: 1561587
cggugacuccuauacaucu

SEQ ID NO: 1683088 - RNA, 19 nt, Artificial Sequence
  Description of Artificial Sequence: Synthetic oligonucleotide
  Antisense strand to SEQ ID NO: 1683087
agauguauaggagucaccg

SEQ ID NO: 1683089 - RNA, 19 nt, Artificial Sequence
  Description of Artificial Sequence: Synthetic oligonucleotide
  Sense strand starting at position 1568 of SEQ ID NO: 1561587
cugcucaaucugggagaga

SEQ ID NO: 1683090 - RNA, 19 nt, Artificial Sequence
  Description of Artificial Sequence: Synthetic oligonucleotide
  Antisense strand to SEQ ID NO: 1683089
ucucucccagauugagcag

SEQ ID NO: 1683091 - RNA, 19 nt, Artificial Sequence
  Description of Artificial Sequence: Synthetic oligonucleotide
  Sense strand starting at position 1691 of SEQ ID NO: 1561587
ccaucuuauggcuggagga

SEQ ID NO: 1683092 - RNA, 19 nt, Artificial Sequence
  Description of Artificial Sequence: Synthetic oligonucleotide
  Antisense strand to SEQ ID NO: 1683091
uccuccagccauaagaugg

SEQ ID NO: 1683093 - RNA, 19 nt, Artificial Sequence
  Description of Artificial Sequence: Synthetic oligonucleotide
  Sense strand starting at position 1692 of SEQ ID NO: 1561587
caucuuauggcuggaggaa

SEQ ID NO: 1683094 - RNA, 19 nt, Artificial Sequence
  Description of Artificial Sequence: Synthetic oligonucleotide
  Antisense strand to SEQ ID NO: 1683093
uuccuccagccauaagaug

SEQ ID NO: 1683095 - RNA, 19 nt, Artificial Sequence
  Description of Artificial Sequence: Synthetic oligonucleotide
  Sense strand starting at position 2070 of SEQ ID NO: 1561587
agcgucucugauuggauga

SEQ ID NO: 1683096 - RNA, 19 nt, Artificial Sequence
  Description of Artificial Sequence: Synthetic oligonucleotide
  Antisense strand to SEQ ID NO: 1683095
ucauccaaucagagacgcu

SEQ ID NO: 1683097 - RNA, 19 nt, Artificial Sequence
  Description of Artificial Sequence: Synthetic oligonucleotide
  Sense strand starting at position 2071 of SEQ ID NO: 1561587
gcgucucugauuggaugau

SEQ ID NO: 1683098 - RNA, 19 nt, Artificial Sequence
  Description of Artificial Sequence: Synthetic oligonucleotide
  Antisense strand to SEQ ID NO: 1683097
aucauccaaucagagacgc

SEQ ID NO: 1683099 - RNA, 19 nt, Artificial Sequence
  Description of Artificial Sequence: Synthetic oligonucleotide
  Sense strand starting at position 2077 of SEQ ID NO: 1561587
cugauuggaugauauuuaa

SEQ ID NO: 1683100 - RNA, 19 nt, Artificial Sequence
  Description of Artificial Sequence: Synthetic oligonucleotide
  Antisense strand to SEQ ID NO: 1683099
uuaaauaucauccaaucag

SEQ ID NO: 1683101 - RNA, 19 nt, Artificial Sequence
  Description of Artificial Sequence: Synthetic oligonucleotide
  Sense strand starting at position 2134 of SEQ ID NO: 1561587
aucagaugcugggcugaaa

SEQ ID NO: 1683102 - RNA, 19 nt, Artificial Sequence
  Description of Artificial Sequence: Synthetic oligonucleotide
  Antisense strand to SEQ ID NO: 1683101
uuucagcccagcaucugau

SEQ ID NO: 1683103 - RNA, 19 nt, Artificial Sequence
  Description of Artificial Sequence: Synthetic oligonucleotide
  Sense strand starting at position 2239 of SEQ ID NO: 1561587
cccuuaccuuguguaucaa

SEQ ID NO: 1683104 - RNA, 19 nt, Artificial Sequence
  Description of Artificial Sequence: Synthetic oligonucleotide
  Antisense strand to SEQ ID NO: 1683103
uugauacacaagguaaggg

SEQ ID NO: 1683105 - RNA, 19 nt, Artificial Sequence
  Description of Artificial Sequence: Synthetic oligonucleotide
  Sense strand starting at position 2240 of SEQ ID NO: 1561587
ccuuaccuuguguaucaau

SEQ ID NO: 1683106 - RNA, 19 nt, Artificial Sequence
  Description of Artificial Sequence: Synthetic oligonucleotide
  Antisense strand to SEQ ID NO: 1683105
auugauacacaagguaagg

SEQ ID NO: 1683107 - RNA, 19 nt, Artificial Sequence
  Description of Artificial Sequence: Synthetic oligonucleotide
  Sense strand starting at position 2355 of SEQ ID NO: 1561587
guauucugguccuuugaac

SEQ ID NO: 1683108 - RNA, 19 nt, Artificial Sequence
  Description of Artificial Sequence: Synthetic oligonucleotide
  Antisense strand to SEQ ID NO: 1683107
guucaaaggaccagaauac

SEQ ID NO: 1683109 - RNA, 19 nt, Artificial Sequence
  Description of Artificial Sequence: Synthetic oligonucleotide
  Sense strand starting at position 2394 of SEQ ID NO: 1561587
augugagucacaggugaau

SEQ ID NO: 1683110 - RNA, 19 nt, Artificial Sequence
  Description of Artificial Sequence: Synthetic oligonucleotide
  Antisense strand to SEQ ID NO: 1683109
auucaccugugacucacau

SEQ ID NO: 1683111 - RNA, 19 nt, Artificial Sequence
  Description of Artificial Sequence: Synthetic oligonucleotide
  Sense strand starting at position 2457 of SEQ ID NO: 1561587
aguggaauugauuguagca

SEQ ID NO: 1683112 - RNA, 19 nt, Artificial Sequence
  Description of Artificial Sequence: Synthetic oligonucleotide
  Antisense strand to SEQ ID NO: 1683111
ugcuacaaucaauuccacu

SEQ ID NO: 1683113 - RNA, 19 nt, Artificial Sequence
  Description of Artificial Sequence: Synthetic oligonucleotide
  Sense strand starting at position 2764 of SEQ ID NO: 1561587
uucaguuccgagggugaaa

SEQ ID NO: 1683114 - RNA, 19 nt, Artificial Sequence
  Description of Artificial Sequence: Synthetic oligonucleotide
  Antisense strand to SEQ ID NO: 1683113
uuucacccucggaacugaa

SEQ ID NO: 1683115 - RNA, 19 nt, Artificial Sequence
  Description of Artificial Sequence: Synthetic oligonucleotide
  Sense strand starting at position 2781 of SEQ ID NO: 1561587
aacaaauaguggcuauaga

SEQ ID NO: 1683116 - RNA, 19 nt, Artificial Sequence
  Description of Artificial Sequence: Synthetic oligonucleotide
  Antisense strand to SEQ ID NO: 1683115
ucuauagccacuauuuguu

SEQ ID NO: 1683117 - RNA, 19 nt, Artificial Sequence
  Description of Artificial Sequence: Synthetic oligonucleotide
  Sense strand starting at position 2816 of SEQ ID NO: 1561587
aggaauaaaucacagguaa

SEQ ID NO: 1683118 - RNA, 19 nt, Artificial Sequence
  Description of Artificial Sequence: Synthetic oligonucleotide
  Antisense strand to SEQ ID NO: 1683117
uuaccugugauuuauuccu

SEQ ID NO: 1683119 - RNA, 19 nt, Artificial Sequence
  Description of Artificial Sequence: Synthetic oligonucleotide
  Sense strand starting at position 2940 of SEQ ID NO: 1561587
agucuugaccuuuaauguu

SEQ ID NO: 1683120 - RNA, 19 nt, Artificial Sequence
  Description of Artificial Sequence: Synthetic oligonucleotide
  Antisense strand to SEQ ID NO: 1683119
aacauuaaaggucaagacu

SEQ ID NO: 1683121 - RNA, 19 nt, Artificial Sequence
  Description of Artificial Sequence: Synthetic oligonucleotide
  Sense strand starting at position 2954 of SEQ ID NO: 1561587
auguuuacauaggaagaaa

SEQ ID NO: 1683122 - RNA, 19 nt, Artificial Sequence
  Description of Artificial Sequence: Synthetic oligonucleotide
  Antisense strand to SEQ ID NO: 1683121
uuucuuccuauguaaacau

SEQ ID NO: 1683123 - RNA, 19 nt, Artificial Sequence
  Description of Artificial Sequence: Synthetic oligonucleotide
  Sense strand starting at position 2997 of SEQ ID NO: 1561587
gcuauuugaccucgacucu

SEQ ID NO: 1683124 - RNA, 19 nt, Artificial Sequence
  Description of Artificial Sequence: Synthetic oligonucleotide
  Antisense strand to SEQ ID NO: 1683123
agagucgaggucaaauagc

SEQ ID NO: 1683125 - RNA, 19 nt, Artificial Sequence
  Description of Artificial Sequence: Synthetic oligonucleotide
  Sense strand starting at position 3003 of SEQ ID NO: 1561587
ugaccucgacucuaauguu

SEQ ID NO: 1683126 - RNA, 19 nt, Artificial Sequence
  Description of Artificial Sequence: Synthetic oligonucleotide
  Antisense strand to SEQ ID NO: 1683125
aacauuagagucgagguca

SEQ ID NO: 1683127 - RNA, 19 nt, Artificial Sequence
  Description of Artificial Sequence: Synthetic oligonucleotide
  Sense strand starting at position 3042 of SEQ ID NO: 1561587
ucuucuguggugugggaaa

SEQ ID NO: 1683128 - RNA, 19 nt, Artificial Sequence
  Description of Artificial Sequence: Synthetic oligonucleotide
  Antisense strand to SEQ ID NO: 1683127
uuucccacaccacagaaga

SEQ ID NO: 1683129 - RNA, 19 nt, Artificial Sequence
  Description of Artificial Sequence: Synthetic oligonucleotide
  Sense strand starting at position 3405 of SEQ ID NO: 1561587
uggccauauuucugcauuu

SEQ ID NO: 1683130 - RNA, 19 nt, Artificial Sequence
  Description of Artificial Sequence: Synthetic oligonucleotide
  Antisense strand to SEQ ID NO: 1683129
aaaugcagaaauauggcca

SEQ ID NO: 1683131 - RNA, 19 nt, Artificial Sequence
  Description of Artificial Sequence: Synthetic oligonucleotide
  Sense strand starting at position 3480 of SEQ ID NO: 1561587
uauggugcccaauguuaga

SEQ ID NO: 1683132 - RNA, 19 nt, Artificial Sequence
  Description of Artificial Sequence: Synthetic oligonucleotide
  Antisense strand to SEQ ID NO: 1683131
ucuaacauugggcaccaua

SEQ ID NO: 1683133 - RNA, 19 nt, Artificial Sequence
  Description of Artificial Sequence: Synthetic oligonucleotide
  Sense strand starting at position 3596 of SEQ ID NO: 1561587
cugauuugcucauaauuga

SEQ ID NO: 1683134 - RNA, 19 nt, Artificial Sequence
  Description of Artificial Sequence: Synthetic oligonucleotide
  Antisense strand to SEQ ID NO: 1683133
ucaauuaugagcaaaucag

SEQ ID NO: 1683135 - RNA, 19 nt, Artificial Sequence
  Description of Artificial Sequence: Synthetic oligonucleotide
  Sense strand starting at position 88 of SEQ ID NO: 1561588
ccugguguuauugguacaa

SEQ ID NO: 1683136 - RNA, 19 nt, Artificial Sequence
  Description of Artificial Sequence: Synthetic oligonucleotide
  Antisense strand to SEQ ID NO: 1683135
uuguaccaauaacaccagg

SEQ ID NO: 1683137 - RNA, 19 nt, Artificial Sequence
  Description of Artificial Sequence: Synthetic oligonucleotide
  Sense strand starting at position 92 of SEQ ID NO: 1561588
guguuauugguacaaacua

SEQ ID NO: 1683138 - RNA, 19 nt, Artificial Sequence
  Description of Artificial Sequence: Synthetic oligonucleotide
  Antisense strand to SEQ ID NO: 1683137
uaguuuguaccaauaacac

SEQ ID NO: 1683139 - RNA, 19 nt, Artificial Sequence
  Description of Artificial Sequence: Synthetic oligonucleotide
  Sense strand starting at position 314 of SEQ ID NO: 1561588
uucucucacggccaagaaa

SEQ ID NO: 1683140 - RNA, 19 nt, Artificial Sequence
  Description of Artificial Sequence: Synthetic oligonucleotide
  Antisense strand to SEQ ID NO: 1683139
uuucuuggccgugagagaa

SEQ ID NO: 1683141 - RNA, 19 nt, Artificial Sequence
  Description of Artificial Sequence: Synthetic oligonucleotide
  Sense strand starting at position 453 of SEQ ID NO: 1561588
ggguuuauuaacugggaag

SEQ ID NO: 1683142 - RNA, 19 nt, Artificial Sequence
  Description of Artificial Sequence: Synthetic oligonucleotide
  Antisense strand to SEQ ID NO: 1683141
cuucccaguuaauaaaccc

SEQ ID NO: 1683143 - RNA, 19 nt, Artificial Sequence
  Description of Artificial Sequence: Synthetic oligonucleotide
  Sense strand starting at position 481 of SEQ ID NO: 1561588
gugggcugucuugaagaaa

SEQ ID NO: 1683144 - RNA, 19 nt, Artificial Sequence
  Description of Artificial Sequence: Synthetic oligonucleotide
  Antisense strand to SEQ ID NO: 1683143
uuucuucaagacagcccac

SEQ ID NO: 1683145 - RNA, 19 nt, Artificial Sequence
  Description of Artificial Sequence: Synthetic oligonucleotide
  Sense strand starting at position 484 of SEQ ID NO: 1561588
ggcugucuugaagaaagca

SEQ ID NO: 1683146 - RNA, 19 nt, Artificial Sequence
  Description of Artificial Sequence: Synthetic oligonucleotide
  Antisense strand to SEQ ID NO: 1683145
ugcuuucuucaagacagcc

SEQ ID NO: 1683147 - RNA, 19 nt, Artificial Sequence
  Description of Artificial Sequence: Synthetic oligonucleotide
  Sense strand starting at position 534 of SEQ ID NO: 1561588
ggaccaaucccaggcugaa

SEQ ID NO: 1683148 - RNA, 19 nt, Artificial Sequence
  Description of Artificial Sequence: Synthetic oligonucleotide
  Antisense strand to SEQ ID NO: 1683147
uucagccugggauuggucc

SEQ ID NO: 1683149 - RNA, 19 nt, Artificial Sequence
  Description of Artificial Sequence: Synthetic oligonucleotide
  Sense strand starting at position 988 of SEQ ID NO: 1561588
ugcgaaacauccuucccaa

SEQ ID NO: 1683150 - RNA, 19 nt, Artificial Sequence
  Description of Artificial Sequence: Synthetic oligonucleotide
  Antisense strand to SEQ ID NO: 1683149
uugggaaggauguuucgca

SEQ ID NO: 1683151 - RNA, 19 nt, Artificial Sequence
  Description of Artificial Sequence: Synthetic oligonucleotide
  Sense strand starting at position 1342 of SEQ ID NO: 1561588
ugaggaaugucuucaggac

SEQ ID NO: 1683152 - RNA, 19 nt, Artificial Sequence
  Description of Artificial Sequence: Synthetic oligonucleotide
  Antisense strand to SEQ ID NO: 1683151
guccugaagacauuccuca

SEQ ID NO: 1683153 - RNA, 19 nt, Artificial Sequence
  Description of Artificial Sequence: Synthetic oligonucleotide
  Sense strand starting at position 1981 of SEQ ID NO: 1561588
gcuaaaucggcacagcaaa

SEQ ID NO: 1683154 - RNA, 19 nt, Artificial Sequence
  Description of Artificial Sequence: Synthetic oligonucleotide
  Antisense strand to SEQ ID NO: 1683153
uuugcugugccgauuuagc

SEQ ID NO: 1683155 - RNA, 19 nt, Artificial Sequence
  Description of Artificial Sequence: Synthetic oligonucleotide
  Sense strand starting at position 2058 of SEQ ID NO: 1561588
cgggauccucugggaaaug

SEQ ID NO: 1683156 - RNA, 19 nt, Artificial Sequence
  Description of Artificial Sequence: Synthetic oligonucleotide
  Antisense strand to SEQ ID NO: 1683155
cauuucccagaggaucccg

SEQ ID NO: 1683157 - RNA, 19 nt, Artificial Sequence
  Description of Artificial Sequence: Synthetic oligonucleotide
  Sense strand starting at position 2568 of SEQ ID NO: 1561588
cccggauaggguugaagaa

SEQ ID NO: 1683158 - RNA, 19 nt, Artificial Sequence
  Description of Artificial Sequence: Synthetic oligonucleotide
  Antisense strand to SEQ ID NO: 1683157
uucuucaacccuauccggg

SEQ ID NO: 1683159 - RNA, 19 nt, Artificial Sequence
  Description of Artificial Sequence: Synthetic oligonucleotide
  Sense strand starting at position 2570 of SEQ ID NO: 1561588
cggauaggguugaagaagu

SEQ ID NO: 1683160 - RNA, 19 nt, Artificial Sequence
  Description of Artificial Sequence: Synthetic oligonucleotide
  Antisense strand to SEQ ID NO: 1683159
acuucuucaacccuauccg

SEQ ID NO: 1683161 - RNA, 19 nt, Artificial Sequence
  Description of Artificial Sequence: Synthetic oligonucleotide
  Sense strand starting at position 2629 of SEQ ID NO: 1561588
gcgcgaaugcucucuggga

SEQ ID NO: 1683162 - RNA, 19 nt, Artificial Sequence
  Description of Artificial Sequence: Synthetic oligonucleotide
  Antisense strand to SEQ ID NO: 1683161
ucccagagagcauucgcgc

SEQ ID NO: 1683163 - RNA, 19 nt, Artificial Sequence
  Description of Artificial Sequence: Synthetic oligonucleotide
  Sense strand starting at position 2711 of SEQ ID NO: 1561588
gugugagugucaaugugag

SEQ ID NO: 1683164 - RNA, 19 nt, Artificial Sequence
  Description of Artificial Sequence: Synthetic oligonucleotide
  Antisense strand to SEQ ID NO: 1683163
cucacauugacacucacac

SEQ ID NO: 1683165 - RNA, 19 nt, Artificial Sequence
  Description of Artificial Sequence: Synthetic oligonucleotide
  Sense strand starting at position 2738 of SEQ ID NO: 1561588
uugggagaccagcauugua

SEQ ID NO: 1683166 - RNA, 19 nt, Artificial Sequence
  Description of Artificial Sequence: Synthetic oligonucleotide
  Antisense strand to SEQ ID NO: 1683165
uacaaugcuggucucccaa

SEQ ID NO: 1683167 - RNA, 19 nt, Artificial Sequence
  Description of Artificial Sequence: Synthetic oligonucleotide
  Sense strand starting at position 2768 of SEQ ID NO: 1561588
gguaguaaccuuggagcca

SEQ ID NO: 1683168 - RNA, 19 nt, Artificial Sequence
  Description of Artificial Sequence: Synthetic oligonucleotide
  Antisense strand to SEQ ID NO: 1683167
uggcuccaagguuacuacc

SEQ ID NO: 1683169 - RNA, 19 nt, Artificial Sequence
  Description of Artificial Sequence: Synthetic oligonucleotide
  Sense strand starting at position 2920 of SEQ ID NO: 1561588
uuuauuacggucuagaaug

SEQ ID NO: 1683170 - RNA, 19 nt, Artificial Sequence
  Description of Artificial Sequence: Synthetic oligonucleotide
  Antisense strand to SEQ ID NO: 1683169
cauucuagaccguaauaaa

SEQ ID NO: 1683171 - RNA, 19 nt, Artificial Sequence
  Description of Artificial Sequence: Synthetic oligonucleotide
  Sense strand starting at position 2925 of SEQ ID NO: 1561588
uacggucuagaaugcaaau

SEQ ID NO: 1683172 - RNA, 19 nt, Artificial Sequence
  Description of Artificial Sequence: Synthetic oligonucleotide
  Antisense strand to SEQ ID NO: 1683171
auuugcauucuagaccgua

SEQ ID NO: 1683173 - RNA, 19 nt, Artificial Sequence
  Description of Artificial Sequence: Synthetic oligonucleotide
  Sense strand starting at position 3031 of SEQ ID NO: 1561588
guauaccaagccuaagaau

SEQ ID NO: 1683174 - RNA, 19 nt, Artificial Sequence
  Description of Artificial Sequence: Synthetic oligonucleotide
  Antisense strand to SEQ ID NO: 1683173
auucuuaggcuugguauac

SEQ ID NO: 1683175 - RNA, 19 nt, Artificial Sequence
  Description of Artificial Sequence: Synthetic oligonucleotide
  Sense strand starting at position 3048 of SEQ ID NO: 1561588
auauaaagagucuagcuuu

SEQ ID NO: 1683176 - RNA, 19 nt, Artificial Sequence
  Description of Artificial Sequence: Synthetic oligonucleotide
  Antisense strand to SEQ ID NO: 1683175
aaagcuagacucuuuauau

SEQ ID NO: 1683177 - RNA, 19 nt, Artificial Sequence
  Description of Artificial Sequence: Synthetic oligonucleotide
  Sense strand starting at position 3054 of SEQ ID NO: 1561588
agagucuagcuuuaauuaa

SEQ ID NO: 1683178 - RNA, 19 nt, Artificial Sequence
  Description of Artificial Sequence: Synthetic oligonucleotide
  Antisense strand to SEQ ID NO: 1683177
uuaauuaaagcuagacucu

SEQ ID NO: 1683179 - RNA, 19 nt, Artificial Sequence
  Description of Artificial Sequence: Synthetic oligonucleotide
  Sense strand starting at position 3174 of SEQ ID NO: 1561588
aauaucuggugucuuagua

SEQ ID NO: 1683180 - RNA, 19 nt, Artificial Sequence
  Description of Artificial Sequence: Synthetic oligonucleotide
  Antisense strand to SEQ ID NO: 1683179
uacuaagacaccagauauu

SEQ ID NO: 1683181 - RNA, 19 nt, Artificial Sequence
  Description of Artificial Sequence: Synthetic oligonucleotide
  Sense strand starting at position 3182 of SEQ ID NO: 1561588
gugucuuaguaacuugaag

SEQ ID NO: 1683182 - RNA, 19 nt, Artificial Sequence
  Description of Artificial Sequence: Synthetic oligonucleotide
  Antisense strand to SEQ ID NO: 1683181
cuucaaguuacuaagacac

SEQ ID NO: 1683183 - RNA, 19 nt, Artificial Sequence
  Description of Artificial Sequence: Synthetic oligonucleotide
  Sense strand starting at position 3418 of SEQ ID NO: 1561588
uguuuaaaccauggguaga

SEQ ID NO: 1683184 - RNA, 19 nt, Artificial Sequence
  Description of Artificial Sequence: Synthetic oligonucleotide
  Antisense strand to SEQ ID NO: 1683183
ucuacccaugguuuaaaca

SEQ ID NO: 1683185 - RNA, 19 nt, Artificial Sequence
  Description of Artificial Sequence: Synthetic oligonucleotide
  Sense strand starting at position 3419 of SEQ ID NO: 1561588
guuuaaaccauggguagau

SEQ ID NO: 1683186 - RNA, 19 nt, Artificial Sequence
  Description of Artificial Sequence: Synthetic oligonucleotide
  Antisense strand to SEQ ID NO: 1683185
aucuacccaugguuuaaac

SEQ ID NO: 1683187 - RNA, 19 nt, Artificial Sequence
  Description of Artificial Sequence: Synthetic oligonucleotide
  Sense strand starting at position 3524 of SEQ ID NO: 1561588
accaaugucuacuuuggaa

SEQ ID NO: 1683188 - RNA, 19 nt, Artificial Sequence
  Description of Artificial Sequence: Synthetic oligonucleotide
  Antisense strand to SEQ ID NO: 1683187
uuccaaaguagacauuggu

SEQ ID NO: 1683189 - RNA, 19 nt, Artificial Sequence
  Description of Artificial Sequence: Synthetic oligonucleotide
  Sense strand starting at position 3545 of SEQ ID NO: 1561588
agaaauuauuccuuguuug

SEQ ID NO: 1683190 - RNA, 19 nt, Artificial Sequence
  Description of Artificial Sequence: Synthetic oligonucleotide
  Antisense strand to SEQ ID NO: 1683189
caaacaaggaauaauuucu

SEQ ID NO: 1683191 - RNA, 19 nt, Artificial Sequence
  Description of Artificial Sequence: Synthetic oligonucleotide
  Sense strand starting at position 3549 of SEQ ID NO: 1561588
auuauuccuuguuugagca

SEQ ID NO: 1683192 - RNA, 19 nt, Artificial Sequence
  Description of Artificial Sequence: Synthetic oligonucleotide
  Antisense strand to SEQ ID NO: 1683191
ugcucaaacaaggaauaau

SEQ ID NO: 1683193 - RNA, 19 nt, Artificial Sequence
  Description of Artificial Sequence: Synthetic oligonucleotide
  Sense strand starting at position 3553 of SEQ ID NO: 1561588
uuccuuguuugagcaagga

SEQ ID NO: 1683194 - RNA, 19 nt, Artificial Sequence
  Description of Artificial Sequence: Synthetic oligonucleotide
  Antisense strand to SEQ ID NO: 1683193
uccuugcucaaacaaggaa

SEQ ID NO: 1683195 - RNA, 19 nt, Artificial Sequence
  Description of Artificial Sequence: Synthetic oligonucleotide
  Sense strand starting at position 3557 of SEQ ID NO: 1561588
uuguuugagcaaggauuaa

SEQ ID NO: 1683196 - RNA, 19 nt, Artificial Sequence
  Description of Artificial Sequence: Synthetic oligonucleotide
  Antisense strand to SEQ ID NO: 1683195
uuaauccuugcucaaacaa

SEQ ID NO: 1683197 - RNA, 19 nt, Artificial Sequence
  Description of Artificial Sequence: Synthetic oligonucleotide
  Sense strand starting at position 3583 of SEQ ID NO: 1561588
cugaaagaaguguaguuua

SEQ ID NO: 1683198 - RNA, 19 nt, Artificial Sequence
  Description of Artificial Sequence: Synthetic oligonucleotide
  Antisense strand to SEQ ID NO: 1683197
uaaacuacacuucuuucag

SEQ ID NO: 1683199 - RNA, 19 nt, Artificial Sequence
  Description of Artificial Sequence: Synthetic oligonucleotide
  Sense strand starting at position 3586 of SEQ ID NO: 1561588
aaagaaguguaguuuauag

SEQ ID NO: 1683200 - RNA, 19 nt, Artificial Sequence
  Description of Artificial Sequence: Synthetic oligonucleotide
  Antisense strand to SEQ ID NO: 1683199
cuauaaacuacacuucuuu

SEQ ID NO: 1683201 - RNA, 19 nt, Artificial Sequence
  Description of Artificial Sequence: Synthetic oligonucleotide
  Sense strand starting at position 3588 of SEQ ID NO: 1561588
agaaguguaguuuauagcu

SEQ ID NO: 1683202 - RNA, 19 nt, Artificial Sequence
  Description of Artificial Sequence: Synthetic oligonucleotide
  Antisense strand to SEQ ID NO: 1683201
agcuauaaacuacacuucu

SEQ ID NO: 1683203 - RNA, 19 nt, Artificial Sequence
  Description of Artificial Sequence: Synthetic oligonucleotide
  Sense strand starting at position 3597 of SEQ ID NO: 1561588
guuuauagcuucuuacaua

SEQ ID NO: 1683204 - RNA, 19 nt, Artificial Sequence
  Description of Artificial Sequence: Synthetic oligonucleotide
  Antisense strand to SEQ ID NO: 1683203
uauguaagaagcuauaaac

SEQ ID NO: 1683205 - RNA, 19 nt, Artificial Sequence
  Description of Artificial Sequence: Synthetic oligonucleotide
  Sense strand starting at position 3923 of SEQ ID NO: 1561588
cucucaggaugguuucuaa

SEQ ID NO: 1683206 - RNA, 19 nt, Artificial Sequence
  Description of Artificial Sequence: Synthetic oligonucleotide
  Antisense strand to SEQ ID NO: 1683205
uuagaaaccauccugagag

SEQ ID NO: 1683207 - RNA, 19 nt, Artificial Sequence
  Description of Artificial Sequence: Synthetic oligonucleotide
  Sense strand starting at position 3926 of SEQ ID NO: 1561588
ucaggaugguuucuaacaa

SEQ ID NO: 1683208 - RNA, 19 nt, Artificial Sequence
  Description of Artificial Sequence: Synthetic oligonucleotide
  Antisense strand to SEQ ID NO: 1683207
uuguuagaaaccauccuga

SEQ ID NO: 1683209 - RNA, 19 nt, Artificial Sequence
  Description of Artificial Sequence: Synthetic oligonucleotide
  Sense strand starting at position 3948 of SEQ ID NO: 1561588
gauagauaccugggucuuu

SEQ ID NO: 1683210 - RNA, 19 nt, Artificial Sequence
  Description of Artificial Sequence: Synthetic oligonucleotide
  Antisense strand to SEQ ID NO: 1683209
aaagacccagguaucuauc

SEQ ID NO: 1683211 - RNA, 19 nt, Artificial Sequence
  Description of Artificial Sequence: Synthetic oligonucleotide
  Sense strand starting at position 3960 of SEQ ID NO: 1561588
ggucuuugcggccugugau

SEQ ID NO: 1683212 - RNA, 19 nt, Artificial Sequence
  Description of Artificial Sequence: Synthetic oligonucleotide
  Antisense strand to SEQ ID NO: 1683211
aucacaggccgcaaagacc

SEQ ID NO: 1683213 - RNA, 19 nt, Artificial Sequence
  Description of Artificial Sequence: Synthetic oligonucleotide
  Sense strand starting at position 3973 of SEQ ID NO: 1561588
ugugaugcagccuaacaau

SEQ ID NO: 1683214 - RNA, 19 nt, Artificial Sequence
  Description of Artificial Sequence: Synthetic oligonucleotide
  Antisense strand to SEQ ID NO: 1683213
auuguuaggcugcaucaca

SEQ ID NO: 1683215 - RNA, 19 nt, Artificial Sequence
  Description of Artificial Sequence: Synthetic oligonucleotide
  Sense strand starting at position 2081 of SEQ ID NO: 1561589
cauccauccuugugcggau

SEQ ID NO: 1683216 - RNA, 19 nt, Artificial Sequence
  Description of Artificial Sequence: Synthetic oligonucleotide
  Antisense strand to SEQ ID NO: 1683215
auccgcacaaggauggaug

SEQ ID NO: 1683217 - RNA, 19 nt, Artificial Sequence
  Description of Artificial Sequence: Synthetic oligonucleotide
  Sense strand starting at position 2345 of SEQ ID NO: 1561589
gcccucuauuauuuguaga

SEQ ID NO: 1683218 - RNA, 19 nt, Artificial Sequence
  Description of Artificial Sequence: Synthetic oligonucleotide
  Antisense strand to SEQ ID NO: 1683217
ucuacaaauaauagagggc

SEQ ID NO: 1683219 - RNA, 19 nt, Artificial Sequence
  Description of Artificial Sequence: Synthetic oligonucleotide
  Sense strand starting at position 2440 of SEQ ID NO: 1561589
agugcugggugauuacaga

SEQ ID NO: 1683220 - RNA, 19 nt, Artificial Sequence
  Description of Artificial Sequence: Synthetic oligonucleotide
  Antisense strand to SEQ ID NO: 1683219
ucuguaaucacccagcacu

SEQ ID NO: 1683221 - RNA, 19 nt, Artificial Sequence
  Description of Artificial Sequence: Synthetic oligonucleotide
  Sense strand starting at position 2447 of SEQ ID NO: 1561589
ggugauuacagaugugagc

SEQ ID NO: 1683222 - RNA, 19 nt, Artificial Sequence
  Description of Artificial Sequence: Synthetic oligonucleotide
  Antisense strand to SEQ ID NO: 1683221
gcucacaucuguaaucacc

SEQ ID NO: 1683223 - RNA, 19 nt, Artificial Sequence
  Description of Artificial Sequence: Synthetic oligonucleotide
  Sense strand starting at position 2675 of SEQ ID NO: 1561589
cacaguuucuaucagcgua

SEQ ID NO: 1683224 - RNA, 19 nt, Artificial Sequence
  Description of Artificial Sequence: Synthetic oligonucleotide
  Antisense strand to SEQ ID NO: 1683223
uacgcugauagaaacugug

SEQ ID NO: 1683225 - RNA, 19 nt, Artificial Sequence
  Description of Artificial Sequence: Synthetic oligonucleotide
  Sense strand starting at position 2677 of SEQ ID NO: 1561589
caguuucuaucagcguaau

SEQ ID NO: 1683226 - RNA, 19 nt, Artificial Sequence
  Description of Artificial Sequence: Synthetic oligonucleotide
  Antisense strand to SEQ ID NO: 1683225
auuacgcugauagaaacug

SEQ ID NO: 1683227 - RNA, 19 nt, Artificial Sequence
  Description of Artificial Sequence: Synthetic oligonucleotide
  Sense strand starting at position 2678 of SEQ ID NO: 1561589
aguuucuaucagcguaauu

SEQ ID NO: 1683228 - RNA, 19 nt, Artificial Sequence
  Description of Artificial Sequence: Synthetic oligonucleotide
  Antisense strand to SEQ ID NO: 1683227
aauuacgcugauagaaacu

SEQ ID NO: 1683229 - RNA, 19 nt, Artificial Sequence
  Description of Artificial Sequence: Synthetic oligonucleotide
  Sense strand starting at position 2680 of SEQ ID NO: 1561589
uuucuaucagcguaauuag

SEQ ID NO: 1683230 - RNA, 19 nt, Artificial Sequence
  Description of Artificial Sequence: Synthetic oligonucleotide
  Antisense strand to SEQ ID NO: 1683229
cuaauuacgcugauagaaa

SEQ ID NO: 1683231 - RNA, 19 nt, Artificial Sequence
  Description of Artificial Sequence: Synthetic oligonucleotide
  Sense strand starting at position 2899 of SEQ ID NO: 1561589
cuguaagcacuccguacau

SEQ ID NO: 1683232 - RNA, 19 nt, Artificial Sequence
  Description of Artificial Sequence: Synthetic oligonucleotide
  Antisense strand to SEQ ID NO: 1683231
auguacggagugcuuacag

SEQ ID NO: 1683233 - RNA, 19 nt, Artificial Sequence
  Description of Artificial Sequence: Synthetic oligonucleotide
  Sense strand starting at position 3101 of SEQ ID NO: 1561589
auacgauacuguuaucacu

SEQ ID NO: 1683234 - RNA, 19 nt, Artificial Sequence
  Description of Artificial Sequence: Synthetic oligonucleotide
  Antisense strand to SEQ ID NO: 1683233
agugauaacaguaucguau

SEQ ID NO: 1683235 - RNA, 19 nt, Artificial Sequence
  Description of Artificial Sequence: Synthetic oligonucleotide
  Sense strand starting at position 3103 of SEQ ID NO: 1561589
acgauacuguuaucacugu

SEQ ID NO: 1683236 - RNA, 19 nt, Artificial Sequence
  Description of Artificial Sequence: Synthetic oligonucleotide
  Antisense strand to SEQ ID NO: 1683235
acagugauaacaguaucgu

SEQ ID NO: 1683237 - RNA, 19 nt, Artificial Sequence
  Description of Artificial Sequence: Synthetic oligonucleotide
  Sense strand starting at position 3110 of SEQ ID NO: 1561589
uguuaucacuguuacuacu

SEQ ID NO: 1683238 - RNA, 19 nt, Artificial Sequence
  Description of Artificial Sequence: Synthetic oligonucleotide
  Antisense strand to SEQ ID NO: 1683237
aguaguaacagugauaaca

SEQ ID NO: 1683239 - RNA, 19 nt, Artificial Sequence
  Description of Artificial Sequence: Synthetic oligonucleotide
  Sense strand starting at position 3116 of SEQ ID NO: 1561589
cacuguuacuacuaguagu

SEQ ID NO: 1683240 - RNA, 19 nt, Artificial Sequence
  Description of Artificial Sequence: Synthetic oligonucleotide
  Antisense strand to SEQ ID NO: 1683239
acuacuaguaguaacagug

SEQ ID NO: 1683241 - RNA, 19 nt, Artificial Sequence
  Description of Artificial Sequence: Synthetic oligonucleotide
  Sense strand starting at position 3119 of SEQ ID NO: 1561589
uguuacuacuaguaguaga

SEQ ID NO: 1683242 - RNA, 19 nt, Artificial Sequence
  Description of Artificial Sequence: Synthetic oligonucleotide
  Antisense strand to SEQ ID NO: 1683241
ucuacuacuaguaguaaca

SEQ ID NO: 1683243 - RNA, 19 nt, Artificial Sequence
  Description of Artificial Sequence: Synthetic oligonucleotide
  Sense strand starting at position 3228 of SEQ ID NO: 1561589
uuugcuugccugggagaaa

SEQ ID NO: 1683244 - RNA, 19 nt, Artificial Sequence
  Description of Artificial Sequence: Synthetic oligonucleotide
  Antisense strand to SEQ ID NO: 1683243
uuucucccaggcaagcaaa

SEQ ID NO: 1683245 - RNA, 19 nt, Artificial Sequence
  Description of Artificial Sequence: Synthetic oligonucleotide
  Sense strand starting at position 3267 of SEQ ID NO: 1561589
ggcauauagucagaaggug

SEQ ID NO: 1683246 - RNA, 19 nt, Artificial Sequence
  Description of Artificial Sequence: Synthetic oligonucleotide
  Antisense strand to SEQ ID NO: 1683245
caccuucugacuauaugcc

SEQ ID NO: 1683247 - RNA, 19 nt, Artificial Sequence
  Description of Artificial Sequence: Synthetic oligonucleotide
  Sense strand starting at position 3275 of SEQ ID NO: 1561589
gucagaagguggucugaua

SEQ ID NO: 1683248 - RNA, 19 nt, Artificial Sequence
  Description of Artificial Sequence: Synthetic oligonucleotide
  Antisense strand to SEQ ID NO: 1683247
uaucagaccaccuucugac

SEQ ID NO: 1683249 - RNA, 19 nt, Artificial Sequence
  Description of Artificial Sequence: Synthetic oligonucleotide
  Sense strand starting at position 3318 of SEQ ID NO: 1561589
uggacagaccuggguucaa

SEQ ID NO: 1683250 - RNA, 19 nt, Artificial Sequence
  Description of Artificial Sequence: Synthetic oligonucleotide
  Antisense strand to SEQ ID NO: 1683249
uugaacccaggucugucca

SEQ ID NO: 1683251 - RNA, 19 nt, Artificial Sequence
  Description of Artificial Sequence: Synthetic oligonucleotide
  Sense strand starting at position 3436 of SEQ ID NO: 1561589
acacaugcaucagcagaau

SEQ ID NO: 1683252 - RNA, 19 nt, Artificial Sequence
  Description of Artificial Sequence: Synthetic oligonucleotide
  Antisense strand to SEQ ID NO: 1683251
auucugcugaugcaugugu

SEQ ID NO: 1683253 - RNA, 19 nt, Artificial Sequence
  Description of Artificial Sequence: Synthetic oligonucleotide
  Sense strand starting at position 3470 of SEQ ID NO: 1561589
agcuauuuguaccauccau

SEQ ID NO: 1683254 - RNA, 19 nt, Artificial Sequence
  Description of Artificial Sequence: Synthetic oligonucleotide
  Antisense strand to SEQ ID NO: 1683253
auggaugguacaaauagcu

SEQ ID NO: 1683255 - RNA, 19 nt, Artificial Sequence
  Description of Artificial Sequence: Synthetic oligonucleotide
  Sense strand starting at position 3529 of SEQ ID NO: 1561589
gagcuugaguuccauccuu

SEQ ID NO: 1683256 - RNA, 19 nt, Artificial Sequence
  Description of Artificial Sequence: Synthetic oligonucleotide
  Antisense strand to SEQ ID NO: 1683255
aaggauggaacucaagcuc

SEQ ID NO: 1683257 - RNA, 19 nt, Artificial Sequence
  Description of Artificial Sequence: Synthetic oligonucleotide
  Sense strand starting at position 3661 of SEQ ID NO: 1561589
ccagauggcagguauccau

SEQ ID NO: 1683258 - RNA, 19 nt, Artificial Sequence
  Description of Artificial Sequence: Synthetic oligonucleotide
  Antisense strand to SEQ ID NO: 1683257
auggauaccugccaucugg

SEQ ID NO: 1683259 - RNA, 19 nt, Artificial Sequence
  Description of Artificial Sequence: Synthetic oligonucleotide
  Sense strand starting at position 3712 of SEQ ID NO: 1561589
acccguaacugaucuccga

SEQ ID NO: 1683260 - RNA, 19 nt, Artificial Sequence
  Description of Artificial Sequence: Synthetic oligonucleotide
  Antisense strand to SEQ ID NO: 1683259
ucggagaucaguuacgggu

SEQ ID NO: 1683261 - RNA, 19 nt, Artificial Sequence
  Description of Artificial Sequence: Synthetic oligonucleotide
  Sense strand starting at position 3715 of SEQ ID NO: 1561589
cguaacugaucuccgaguu

SEQ ID NO: 1683262 - RNA, 19 nt, Artificial Sequence
  Description of Artificial Sequence: Synthetic oligonucleotide
  Antisense strand to SEQ ID NO: 1683261
aacucggagaucaguuacg

SEQ ID NO: 1683263 - RNA, 19 nt, Artificial Sequence
  Description of Artificial Sequence: Synthetic oligonucleotide
  Sense strand starting at position 3716 of SEQ ID NO: 1561589
guaacugaucuccgaguuc

SEQ ID NO: 1683264 - RNA, 19 nt, Artificial Sequence
  Description of Artificial Sequence: Synthetic oligonucleotide
  Antisense strand to SEQ ID NO: 1683263
gaacucggagaucaguuac

SEQ ID NO: 1683265 - RNA, 19 nt, Artificial Sequence
  Description of Artificial Sequence: Synthetic oligonucleotide
  Sense strand starting at position 3725 of SEQ ID NO: 1561589
cuccgaguucuuggucuac

SEQ ID NO: 1683266 - RNA, 19 nt, Artificial Sequence
  Description of Artificial Sequence: Synthetic oligonucleotide
  Antisense strand to SEQ ID NO: 1683265
guagaccaagaacucggag

SEQ ID NO: 1683267 - RNA, 19 nt, Artificial Sequence
  Description of Artificial Sequence: Synthetic oligonucleotide
  Sense strand starting at position 3727 of SEQ ID NO: 1561589
ccgaguucuuggucuacuu

SEQ ID NO: 1683268 - RNA, 19 nt, Artificial Sequence
  Description of Artificial Sequence: Synthetic oligonucleotide
  Antisense strand to SEQ ID NO: 1683267
aaguagaccaagaacucgg

SEQ ID NO: 1683269 - RNA, 19 nt, Artificial Sequence
  Description of Artificial Sequence: Synthetic oligonucleotide
  Sense strand starting at position 3953 of SEQ ID NO: 1561589
gggugagugucucuuccac

SEQ ID NO: 1683270 - RNA, 19 nt, Artificial Sequence
  Description of Artificial Sequence: Synthetic oligonucleotide
  Antisense strand to SEQ ID NO: 1683269
guggaagagacacucaccc

SEQ ID NO: 1683271 - RNA, 19 nt, Artificial Sequence
  Description of Artificial Sequence: Synthetic oligonucleotide
  Sense strand starting at position 217 of SEQ ID NO: 1561590
ucacgccuguaaucugaua

SEQ ID NO: 1683272 - RNA, 19 nt, Artificial Sequence
  Description of Artificial Sequence: Synthetic oligonucleotide
  Antisense strand to SEQ ID NO: 1683271
uaucagauuacaggcguga

SEQ ID NO: 1683273 - RNA, 19 nt, Artificial Sequence
  Description of Artificial Sequence: Synthetic oligonucleotide
  Sense strand starting at position 222 of SEQ ID NO: 1561590
ccuguaaucugauacagga

SEQ ID NO: 1683274 - RNA, 19 nt, Artificial Sequence
  Description of Artificial Sequence: Synthetic oligonucleotide
  Antisense strand to SEQ ID NO: 1683273
uccuguaucagauuacagg

SEQ ID NO: 1683275 - RNA, 19 nt, Artificial Sequence
  Description of Artificial Sequence: Synthetic oligonucleotide
  Sense strand starting at position 425 of SEQ ID NO: 1561590
uguacuaauuguugcgaua

SEQ ID NO: 1683276 - RNA, 19 nt, Artificial Sequence
  Description of Artificial Sequence: Synthetic oligonucleotide
  Antisense strand to SEQ ID NO: 1683275
uaucgcaacaauuaguaca

SEQ ID NO: 1683277 - RNA, 19 nt, Artificial Sequence
  Description of Artificial Sequence: Synthetic oligonucleotide
  Sense strand starting at position 427 of SEQ ID NO: 1561590
uacuaauuguugcgauaau

SEQ ID NO: 1683278 - RNA, 19 nt, Artificial Sequence
  Description of Artificial Sequence: Synthetic oligonucleotide
  Antisense strand to SEQ ID NO: 1683277
auuaucgcaacaauuagua

SEQ ID NO: 1683279 - RNA, 19 nt, Artificial Sequence
  Description of Artificial Sequence: Synthetic oligonucleotide
  Sense strand starting at position 428 of SEQ ID NO: 1561590
acuaauuguugcgauaauu

SEQ ID NO: 1683280 - RNA, 19 nt, Artificial Sequence
  Description of Artificial Sequence: Synthetic oligonucleotide
  Antisense strand to SEQ ID NO: 1683279
aauuaucgcaacaauuagu

SEQ ID NO: 1683281 - RNA, 19 nt, Artificial Sequence
  Description of Artificial Sequence: Synthetic oligonucleotide
  Sense strand starting at position 1001 of SEQ ID NO: 1561590
gauggaauaacguggcaga

SEQ ID NO: 1683282 - RNA, 19 nt, Artificial Sequence
  Description of Artificial Sequence: Synthetic oligonucleotide
  Antisense strand to SEQ ID NO: 1683281
ucugccacguuauuccauc

SEQ ID NO: 1683283 - RNA, 19 nt, Artificial Sequence
  Description of Artificial Sequence: Synthetic oligonucleotide
  Sense strand starting at position 1002 of SEQ ID NO: 1561590
auggaauaacguggcagau

SEQ ID NO: 1683284 - RNA, 19 nt, Artificial Sequence
  Description of Artificial Sequence: Synthetic oligonucleotide
  Antisense strand to SEQ ID NO: 1683283
aucugccacguuauuccau

SEQ ID NO: 1683285 - RNA, 19 nt, Artificial Sequence
  Description of Artificial Sequence: Synthetic oligonucleotide
  Sense strand starting at position 1004 of SEQ ID NO: 1561590
ggaauaacguggcagauaa

SEQ ID NO: 1683286 - RNA, 19 nt, Artificial Sequence
  Description of Artificial Sequence: Synthetic oligonucleotide
  Antisense strand to SEQ ID NO: 1683285
uuaucugccacguuauucc

SEQ ID NO: 1683287 - RNA, 19 nt, Artificial Sequence
  Description of Artificial Sequence: Synthetic oligonucleotide
  Sense strand starting at position 1138 of SEQ ID NO: 1561590
ccgccuuucggccaaagga

SEQ ID NO: 1683288 - RNA, 19 nt, Artificial Sequence
  Description of Artificial Sequence: Synthetic oligonucleotide
  Antisense strand to SEQ ID NO: 1683287
uccuuuggccgaaaggcgg

SEQ ID NO: 1683289 - RNA, 19 nt, Artificial Sequence
  Description of Artificial Sequence: Synthetic oligonucleotide
  Sense strand starting at position 1244 of SEQ ID NO: 1561590
cgggauugcuuacuccaga

SEQ ID NO: 1683290 - RNA, 19 nt, Artificial Sequence
  Description of Artificial Sequence: Synthetic oligonucleotide
  Antisense strand to SEQ ID NO: 1683289
ucuggaguaagcaaucccg

SEQ ID NO: 1683291 - RNA, 19 nt, Artificial Sequence
  Description of Artificial Sequence: Synthetic oligonucleotide
  Sense strand starting at position 1245 of SEQ ID NO: 1561590
gggauugcuuacuccagac

SEQ ID NO: 1683292 - RNA, 19 nt, Artificial Sequence
  Description of Artificial Sequence: Synthetic oligonucleotide
  Antisense strand to SEQ ID NO: 1683291
gucuggaguaagcaauccc

SEQ ID NO: 1683293 - RNA, 19 nt, Artificial Sequence
  Description of Artificial Sequence: Synthetic oligonucleotide
  Sense strand starting at position 1273 of SEQ ID NO: 1561590
uuguguuucccucagccga

SEQ ID NO: 1683294 - RNA, 19 nt, Artificial Sequence
  Description of Artificial Sequence: Synthetic oligonucleotide
  Antisense strand to SEQ ID NO: 1683293
ucggcugagggaaacacaa

SEQ ID NO: 1683295 - RNA, 19 nt, Artificial Sequence
  Description of Artificial Sequence: Synthetic oligonucleotide
  Sense strand starting at position 1298 of SEQ ID NO: 1561590
uccuauucggcucagaaua

SEQ ID NO: 1683296 - RNA, 19 nt, Artificial Sequence
  Description of Artificial Sequence: Synthetic oligonucleotide
  Antisense strand to SEQ ID NO: 1683295
uauucugagccgaauagga

SEQ ID NO: 1683297 - RNA, 19 nt, Artificial Sequence
  Description of Artificial Sequence: Synthetic oligonucleotide
  Sense strand starting at position 1300 of SEQ ID NO: 1561590
cuauucggcucagaauaaa

SEQ ID NO: 1683298 - RNA, 19 nt, Artificial Sequence
  Description of Artificial Sequence: Synthetic oligonucleotide
  Antisense strand to SEQ ID NO: 1683297
uuuauucugagccgaauag

SEQ ID NO: 1683299 - RNA, 19 nt, Artificial Sequence
  Description of Artificial Sequence: Synthetic oligonucleotide
  Sense strand starting at position 1383 of SEQ ID NO: 1561590
ucauuaaucgcuguuugcu

SEQ ID NO: 1683300 - RNA, 19 nt, Artificial Sequence
  Description of Artificial Sequence: Synthetic oligonucleotide
  Antisense strand to SEQ ID NO: 1683299
agcaaacagcgauuaauga

SEQ ID NO: 1683301 - RNA, 19 nt, Artificial Sequence
  Description of Artificial Sequence: Synthetic oligonucleotide
  Sense strand starting at position 1385 of SEQ ID NO: 1561590
auuaaucgcuguuugcuaa

SEQ ID NO: 1683302 - RNA, 19 nt, Artificial Sequence
  Description of Artificial Sequence: Synthetic oligonucleotide
  Antisense strand to SEQ ID NO: 1683301
uuagcaaacagcgauuaau

SEQ ID NO: 1683303 - RNA, 19 nt, Artificial Sequence
  Description of Artificial Sequence: Synthetic oligonucleotide
  Sense strand starting at position 1386 of SEQ ID NO: 1561590
uuaaucgcuguuugcuaaa

SEQ ID NO: 1683304 - RNA, 19 nt, Artificial Sequence
  Description of Artificial Sequence: Synthetic oligonucleotide
  Antisense strand to SEQ ID NO: 1683303
uuuagcaaacagcgauuaa

SEQ ID NO: 1683305 - RNA, 19 nt, Artificial Sequence
  Description of Artificial Sequence: Synthetic oligonucleotide
  Sense strand starting at position 1420 of SEQ ID NO: 1561590
uuaacagugccucaguuua

SEQ ID NO: 1683306 - RNA, 19 nt, Artificial Sequence
  Description of Artificial Sequence: Synthetic oligonucleotide
  Antisense strand to SEQ ID NO: 1683305
uaaacugaggcacuguuaa

SEQ ID NO: 1683307 - RNA, 19 nt, Artificial Sequence
  Description of Artificial Sequence: Synthetic oligonucleotide
  Sense strand starting at position 1855 of SEQ ID NO: 1561590
uggcguccucucuaaaggu

SEQ ID NO: 1683308 - RNA, 19 nt, Artificial Sequence
  Description of Artificial Sequence: Synthetic oligonucleotide
  Antisense strand to SEQ ID NO: 1683307
accuuuagagaggacgcca

SEQ ID NO: 1683309 - RNA, 19 nt, Artificial Sequence
  Description of Artificial Sequence: Synthetic oligonucleotide
  Sense strand starting at position 1864 of SEQ ID NO: 1561590
cucuaaaggucccgugaac

SEQ ID NO: 1683310 - RNA, 19 nt, Artificial Sequence
  Description of Artificial Sequence: Synthetic oligonucleotide
  Antisense strand to SEQ ID NO: 1683309
guucacgggaccuuuagag

SEQ ID NO: 1683311 - RNA, 19 nt, Artificial Sequence
  Description of Artificial Sequence: Synthetic oligonucleotide
  Sense strand starting at position 2205 of SEQ ID NO: 1561590
auauuugccuucggccaaa

SEQ ID NO: 1683312 - RNA, 19 nt, Artificial Sequence
  Description of Artificial Sequence: Synthetic oligonucleotide
  Antisense strand to SEQ ID NO: 1683311
uuuggccgaaggcaaauau

SEQ ID NO: 1683313 - RNA, 19 nt, Artificial Sequence
  Description of Artificial Sequence: Synthetic oligonucleotide
  Sense strand starting at position 2369 of SEQ ID NO: 1561590
ccaagauauugcccugcca

SEQ ID NO: 1683314 - RNA, 19 nt, Artificial Sequence
  Description of Artificial Sequence: Synthetic oligonucleotide
  Antisense strand to SEQ ID NO: 1683313
uggcagggcaauaucuugg

SEQ ID NO: 1683315 - RNA, 19 nt, Artificial Sequence
  Description of Artificial Sequence: Synthetic oligonucleotide
  Sense strand starting at position 2638 of SEQ ID NO: 1561590
gcggaaggaucccuugaag

SEQ ID NO: 1683316 - RNA, 19 nt, Artificial Sequence
  Description of Artificial Sequence: Synthetic oligonucleotide
  Antisense strand to SEQ ID NO: 1683315
cuucaagggauccuuccgc

SEQ ID NO: 1683317 - RNA, 19 nt, Artificial Sequence
  Description of Artificial Sequence: Synthetic oligonucleotide
  Sense strand starting at position 2686 of SEQ ID NO: 1561590
cagcgagaucccugucuuu

SEQ ID NO: 1683318 - RNA, 19 nt, Artificial Sequence
  Description of Artificial Sequence: Synthetic oligonucleotide
  Antisense strand to SEQ ID NO: 1683317
aaagacagggaucucgcug

SEQ ID NO: 1683319 - RNA, 19 nt, Artificial Sequence
  Description of Artificial Sequence: Synthetic oligonucleotide
  Sense strand starting at position 2689 of SEQ ID NO: 1561590
cgagaucccugucuuucuu

SEQ ID NO: 1683320 - RNA, 19 nt, Artificial Sequence
  Description of Artificial Sequence: Synthetic oligonucleotide
  Antisense strand to SEQ ID NO: 1683319
aagaaagacagggaucucg

SEQ ID NO: 1683321 - RNA, 19 nt, Artificial Sequence
  Description of Artificial Sequence: Synthetic oligonucleotide
  Sense strand starting at position 3003 of SEQ ID NO: 1561590
cgccgaucccugucuuuau

SEQ ID NO: 1683322 - RNA, 19 nt, Artificial Sequence
  Description of Artificial Sequence: Synthetic oligonucleotide
  Antisense strand to SEQ ID NO: 1683321
auaaagacagggaucggcg

SEQ ID NO: 1683323 - RNA, 19 nt, Artificial Sequence
  Description of Artificial Sequence: Synthetic oligonucleotide
  Sense strand starting at position 3004 of SEQ ID NO: 1561590
gccgaucccugucuuuauu

SEQ ID NO: 1683324 - RNA, 19 nt, Artificial Sequence
  Description of Artificial Sequence: Synthetic oligonucleotide
  Antisense strand to SEQ ID NO: 1683323
aauaaagacagggaucggc

SEQ ID NO: 1683325 - RNA, 19 nt, Artificial Sequence
  Description of Artificial Sequence: Synthetic oligonucleotide
  Sense strand starting at position 3006 of SEQ ID NO: 1561590
cgaucccugucuuuauuau

SEQ ID NO: 1683326 - RNA, 19 nt, Artificial Sequence
  Description of Artificial Sequence: Synthetic oligonucleotide
  Antisense strand to SEQ ID NO: 1683325
auaauaaagacagggaucg

SEQ ID NO: 1683327 - RNA, 19 nt, Artificial Sequence
  Description of Artificial Sequence: Synthetic oligonucleotide
  Sense strand starting at position 3738 of SEQ ID NO: 1561590
agacaucaucuacguaaca

SEQ ID NO: 1683328 - RNA, 19 nt, Artificial Sequence
  Description of Artificial Sequence: Synthetic oligonucleotide
  Antisense strand to SEQ ID NO: 1683327
uguuacguagaugaugucu

SEQ ID NO: 1683329 - RNA, 19 nt, Artificial Sequence
  Description of Artificial Sequence: Synthetic oligonucleotide
  Sense strand starting at position 3791 of SEQ ID NO: 1561590
cuacuaagcugucuugcua

SEQ ID NO: 1683330 - RNA, 19 nt, Artificial Sequence
  Description of Artificial Sequence: Synthetic oligonucleotide
  Antisense strand to SEQ ID NO: 1683329
uagcaagacagcuuaguag

SEQ ID NO: 1683331 - RNA, 19 nt, Artificial Sequence
  Description of Artificial Sequence: Synthetic oligonucleotide
  Sense strand starting at position 3826 of SEQ ID NO: 1561590
gaccucaggucgcuauaua

SEQ ID NO: 1683332 - RNA, 19 nt, Artificial Sequence
  Description of Artificial Sequence: Synthetic oligonucleotide
  Antisense strand to SEQ ID NO: 1683331
uauauagcgaccugagguc

SEQ ID NO: 1683333 - RNA, 19 nt, Artificial Sequence
  Description of Artificial Sequence: Synthetic oligonucleotide
  Sense strand starting at position 3827 of SEQ ID NO: 1561590
accucaggucgcuauauaa

SEQ ID NO: 1683334 - RNA, 19 nt, Artificial Sequence
  Description of Artificial Sequence: Synthetic oligonucleotide
  Antisense strand to SEQ ID NO: 1683333
uuauauagcgaccugaggu

SEQ ID NO: 1683335 - RNA, 19 nt, Artificial Sequence
  Description of Artificial Sequence: Synthetic oligonucleotide
  Sense strand starting at position 3854 of SEQ ID NO: 1561590
gucuuauagcugggugugu

SEQ ID NO: 1683336 - RNA, 19 nt, Artificial Sequence
  Description of Artificial Sequence: Synthetic oligonucleotide
  Antisense strand to SEQ ID NO: 1683335
acacacccagcuauaagac

SEQ ID NO: 1683337 - RNA, 19 nt, Artificial Sequence
  Description of Artificial Sequence: Synthetic oligonucleotide
  Sense strand starting at position 3879 of SEQ ID NO: 1561590
ucugaagguucccauguau

SEQ ID NO: 1683338 - RNA, 19 nt, Artificial Sequence
  Description of Artificial Sequence: Synthetic oligonucleotide
  Antisense strand to SEQ ID NO: 1683337
auacaugggaaccuucaga

SEQ ID NO: 1683339 - RNA, 19 nt, Artificial Sequence
  Description of Artificial Sequence: Synthetic oligonucleotide
  Sense strand starting at position 66 of SEQ ID NO: 1561591
uguacuaacggcuauaaca

SEQ ID NO: 1683340 - RNA, 19 nt, Artificial Sequence
  Description of Artificial Sequence: Synthetic oligonucleotide
  Antisense strand to SEQ ID NO: 1683339
uguuauagccguuaguaca

SEQ ID NO: 1683341 - RNA, 19 nt, Artificial Sequence
  Description of Artificial Sequence: Synthetic oligonucleotide
  Sense strand starting at position 205 of SEQ ID NO: 1561591
ccaggagucugggcauuag

SEQ ID NO: 1683342 - RNA, 19 nt, Artificial Sequence
  Description of Artificial Sequence: Synthetic oligonucleotide
  Antisense strand to SEQ ID NO: 1683341
cuaaugcccagacuccugg

SEQ ID NO: 1683343 - RNA, 19 nt, Artificial Sequence
  Description of Artificial Sequence: Synthetic oligonucleotide
  Sense strand starting at position 209 of SEQ ID NO: 1561591
gagucugggcauuagaauc

SEQ ID NO: 1683344 - RNA, 19 nt, Artificial Sequence
  Description of Artificial Sequence: Synthetic oligonucleotide
  Antisense strand to SEQ ID NO: 1683343
gauucuaaugcccagacuc

SEQ ID NO: 1683345 - RNA, 19 nt, Artificial Sequence
  Description of Artificial Sequence: Synthetic oligonucleotide
  Sense strand starting at position 461 of SEQ ID NO: 1561591
uuugcagugaccugagaug

SEQ ID NO: 1683346 - RNA, 19 nt, Artificial Sequence
  Description of Artificial Sequence: Synthetic oligonucleotide
  Antisense strand to SEQ ID NO: 1683345
caucucaggucacugcaaa

SEQ ID NO: 1683347 - RNA, 19 nt, Artificial Sequence
  Description of Artificial Sequence: Synthetic oligonucleotide
  Sense strand starting at position 614 of SEQ ID NO: 1561591
ugaccuaacugaguauagu

SEQ ID NO: 1683348 - RNA, 19 nt, Artificial Sequence
  Description of Artificial Sequence: Synthetic oligonucleotide
  Antisense strand to SEQ ID NO: 1683347
acuauacucaguuagguca

SEQ ID NO: 1683349 - RNA, 19 nt, Artificial Sequence
  Description of Artificial Sequence: Synthetic oligonucleotide
  Sense strand starting at position 615 of SEQ ID NO: 1561591
gaccuaacugaguauaguu

SEQ ID NO: 1683350 - RNA, 19 nt, Artificial Sequence
  Description of Artificial Sequence: Synthetic oligonucleotide
  Antisense strand to SEQ ID NO: 1683349
aacuauacucaguuagguc

SEQ ID NO: 1683351 - RNA, 19 nt, Artificial Sequence
  Description of Artificial Sequence: Synthetic oligonucleotide
  Sense strand starting at position 617 of SEQ ID NO: 1561591
ccuaacugaguauaguuaa

SEQ ID NO: 1683352 - RNA, 19 nt, Artificial Sequence
  Description of Artificial Sequence: Synthetic oligonucleotide
  Antisense strand to SEQ ID NO: 1683351
uuaacuauacucaguuagg

SEQ ID NO: 1683353 - RNA, 19 nt, Artificial Sequence
  Description of Artificial Sequence: Synthetic oligonucleotide
  Sense strand starting at position 635 of SEQ ID NO: 1561591
aaauaaguuccgggauuaa

SEQ ID NO: 1683354 - RNA, 19 nt, Artificial Sequence
  Description of Artificial Sequence: Synthetic oligonucleotide
  Antisense strand to SEQ ID NO: 1683353
uuaaucccggaacuuauuu

SEQ ID NO: 1683355 - RNA, 19 nt, Artificial Sequence
  Description of Artificial Sequence: Synthetic oligonucleotide
  Sense strand starting at position 660 of SEQ ID NO: 1561591
gaaacugucgcacauguau

SEQ ID NO: 1683356 - RNA, 19 nt, Artificial Sequence
  Description of Artificial Sequence: Synthetic oligonucleotide
  Antisense strand to SEQ ID NO: 1683355
auacaugugcgacaguuuc

SEQ ID NO: 1683357 - RNA, 19 nt, Artificial Sequence
  Description of Artificial Sequence: Synthetic oligonucleotide
  Sense strand starting at position 686 of SEQ ID NO: 1561591
acagguuacuauccuuaca

SEQ ID NO: 1683358 - RNA, 19 nt, Artificial Sequence
  Description of Artificial Sequence: Synthetic oligonucleotide
  Antisense strand to SEQ ID NO: 1683357
uguaaggauaguaaccugu

SEQ ID NO: 1683359 - RNA, 19 nt, Artificial Sequence
  Description of Artificial Sequence: Synthetic oligonucleotide
  Sense strand starting at position 717 of SEQ ID NO: 1561591
cuaucauaacaguguagaa

SEQ ID NO: 1683360 - RNA, 19 nt, Artificial Sequence
  Description of Artificial Sequence: Synthetic oligonucleotide
  Antisense strand to SEQ ID NO: 1683359
uucuacacuguuaugauag

SEQ ID NO: 1683361 - RNA, 19 nt, Artificial Sequence
  Description of Artificial Sequence: Synthetic oligonucleotide
  Sense strand starting at position 919 of SEQ ID NO: 1561591
guaaacauauaugugacaa

SEQ ID NO: 1683362 - RNA, 19 nt, Artificial Sequence
  Description of Artificial Sequence: Synthetic oligonucleotide
  Antisense strand to SEQ ID NO: 1683361
uugucacauauauguuuac

SEQ ID NO: 1683363 - RNA, 19 nt, Artificial Sequence
  Description of Artificial Sequence: Synthetic oligonucleotide
  Sense strand starting at position 938 of SEQ ID NO: 1561591
cugaaagaguugucuguca

SEQ ID NO: 1683364 - RNA, 19 nt, Artificial Sequence
  Description of Artificial Sequence: Synthetic oligonucleotide
  Antisense strand to SEQ ID NO: 1683363
ugacagacaacucuuucag

SEQ ID NO: 1683365 - RNA, 19 nt, Artificial Sequence
  Description of Artificial Sequence: Synthetic oligonucleotide
  Sense strand starting at position 940 of SEQ ID NO: 1561591
gaaagaguugucugucaau

SEQ ID NO: 1683366 - RNA, 19 nt, Artificial Sequence
  Description of Artificial Sequence: Synthetic oligonucleotide
  Antisense strand to SEQ ID NO: 1683365
auugacagacaacucuuuc

SEQ ID NO: 1683367 - RNA, 19 nt, Artificial Sequence
  Description of Artificial Sequence: Synthetic oligonucleotide
  Sense strand starting at position 972 of SEQ ID NO: 1561591
gauauuugucuuuguucgu

SEQ ID NO: 1683368 - RNA, 19 nt, Artificial Sequence
  Description of Artificial Sequence: Synthetic oligonucleotide
  Antisense strand to SEQ ID NO: 1683367
acgaacaaagacaaauauc

SEQ ID NO: 1683369 - RNA, 19 nt, Artificial Sequence
  Description of Artificial Sequence: Synthetic oligonucleotide
  Sense strand starting at position 1073 of SEQ ID NO: 1561591
cuccgaguaacucgaauga

SEQ ID NO: 1683370 - RNA, 19 nt, Artificial Sequence
  Description of Artificial Sequence: Synthetic oligonucleotide
  Antisense strand to SEQ ID NO: 1683369
ucauucgaguuacucggag

SEQ ID NO: 1683371 - RNA, 19 nt, Artificial Sequence
  Description of Artificial Sequence: Synthetic oligonucleotide
  Sense strand starting at position 1077 of SEQ ID NO: 1561591
gaguaacucgaaugacaag

SEQ ID NO: 1683372 - RNA, 19 nt, Artificial Sequence
  Description of Artificial Sequence: Synthetic oligonucleotide
  Antisense strand to SEQ ID NO: 1683371
cuugucauucgaguuacuc

SEQ ID NO: 1683373 - RNA, 19 nt, Artificial Sequence
  Description of Artificial Sequence: Synthetic oligonucleotide
  Sense strand starting at position 1145 of SEQ ID NO: 1561591
gcauguuugcaacaauaaa

SEQ ID NO: 1683374 - RNA, 19 nt, Artificial Sequence
  Description of Artificial Sequence: Synthetic oligonucleotide
  Antisense strand to SEQ ID NO: 1683373
uuuauuguugcaaacaugc

SEQ ID NO: 1683375 - RNA, 19 nt, Artificial Sequence
  Description of Artificial Sequence: Synthetic oligonucleotide
  Sense strand starting at position 1165 of SEQ ID NO: 1561591
auguauaaacugugcucaa

SEQ ID NO: 1683376 - RNA, 19 nt, Artificial Sequence
  Description of Artificial Sequence: Synthetic oligonucleotide
  Antisense strand to SEQ ID NO: 1683375
uugagcacaguuuauacau

SEQ ID NO: 1683377 - RNA, 19 nt, Artificial Sequence
  Description of Artificial Sequence: Synthetic oligonucleotide
  Sense strand starting at position 1166 of SEQ ID NO: 1561591
uguauaaacugugcucaau

SEQ ID NO: 1683378 - RNA, 19 nt, Artificial Sequence
  Description of Artificial Sequence: Synthetic oligonucleotide
  Antisense strand to SEQ ID NO: 1683377
auugagcacaguuuauaca

SEQ ID NO: 1683379 - RNA, 19 nt, Artificial Sequence
  Description of Artificial Sequence: Synthetic oligonucleotide
  Sense strand starting at position 1425 of SEQ ID NO: 1561591
aagugaucgcgguuugcca

SEQ ID NO: 1683380 - RNA, 19 nt, Artificial Sequence
  Description of Artificial Sequence: Synthetic oligonucleotide
  Antisense strand to SEQ ID NO: 1683379
uggcaaaccgcgaucacuu

SEQ ID NO: 1683381 - RNA, 19 nt, Artificial Sequence
  Description of Artificial Sequence: Synthetic oligonucleotide
  Sense strand starting at position 1432 of SEQ ID NO: 1561591
cgcgguuugccauuacuuu

SEQ ID NO: 1683382 - RNA, 19 nt, Artificial Sequence
  Description of Artificial Sequence: Synthetic oligonucleotide
  Antisense strand to SEQ ID NO: 1683381
aaaguaauggcaaaccgcg

SEQ ID NO: 1683383 - RNA, 19 nt, Artificial Sequence
  Description of Artificial Sequence: Synthetic oligonucleotide
  Sense strand starting at position 1793 of SEQ ID NO: 1561591
gccagacucucauuagaac

SEQ ID NO: 1683384 - RNA, 19 nt, Artificial Sequence
  Description of Artificial Sequence: Synthetic oligonucleotide
  Antisense strand to SEQ ID NO: 1683383
guucuaaugagagucuggc

SEQ ID NO: 1683385 - RNA, 19 nt, Artificial Sequence
  Description of Artificial Sequence: Synthetic oligonucleotide
  Sense strand starting at position 1871 of SEQ ID NO: 1561591
ugagaugccggguacagaa

SEQ ID NO: 1683386 - RNA, 19 nt, Artificial Sequence
  Description of Artificial Sequence: Synthetic oligonucleotide
  Antisense strand to SEQ ID NO: 1683385
uucuguacccggcaucuca

SEQ ID NO: 1683387 - RNA, 19 nt, Artificial Sequence
  Description of Artificial Sequence: Synthetic oligonucleotide
  Sense strand starting at position 2156 of SEQ ID NO: 1561591
gagggaaaguuuguugaug

SEQ ID NO: 1683388 - RNA, 19 nt, Artificial Sequence
  Description of Artificial Sequence: Synthetic oligonucleotide
  Antisense strand to SEQ ID NO: 1683387
caucaacaaacuuucccuc

SEQ ID NO: 1683389 - RNA, 19 nt, Artificial Sequence
  Description of Artificial Sequence: Synthetic oligonucleotide
  Sense strand starting at position 2157 of SEQ ID NO: 1561591
agggaaaguuuguugauga

SEQ ID NO: 1683390 - RNA, 19 nt, Artificial Sequence
  Description of Artificial Sequence: Synthetic oligonucleotide
  Antisense strand to SEQ ID NO: 1683389
ucaucaacaaacuuucccu

SEQ ID NO: 1683391 - RNA, 19 nt, Artificial Sequence
  Description of Artificial Sequence: Synthetic oligonucleotide
  Sense strand starting at position 2164 of SEQ ID NO: 1561591
guuuguugaugauuagauc

SEQ ID NO: 1683392 - RNA, 19 nt, Artificial Sequence
  Description of Artificial Sequence: Synthetic oligonucleotide
  Antisense strand to SEQ ID NO: 1683391
gaucuaaucaucaacaaac

SEQ ID NO: 1683393 - RNA, 19 nt, Artificial Sequence
  Description of Artificial Sequence: Synthetic oligonucleotide
  Sense strand starting at position 2345 of SEQ ID NO: 1561591
gagaaaccuugcgccuaau

SEQ ID NO: 1683394 - RNA, 19 nt, Artificial Sequence
  Description of Artificial Sequence: Synthetic oligonucleotide
  Antisense strand to SEQ ID NO: 1683393
auuaggcgcaagguuucuc

SEQ ID NO: 1683395 - RNA, 19 nt, Artificial Sequence
  Description of Artificial Sequence: Synthetic oligonucleotide
  Sense strand starting at position 2430 of SEQ ID NO: 1561591
aaacacuaguuuccggaau

SEQ ID NO: 1683396 - RNA, 19 nt, Artificial Sequence
  Description of Artificial Sequence: Synthetic oligonucleotide
  Antisense strand to SEQ ID NO: 1683395
auuccggaaacuaguguuu

SEQ ID NO: 1683397 - RNA, 19 nt, Artificial Sequence
  Description of Artificial Sequence: Synthetic oligonucleotide
  Sense strand starting at position 2449 of SEQ ID NO: 1561591
uuuaaaguccuugaauugu

SEQ ID NO: 1683398 - RNA, 19 nt, Artificial Sequence
  Description of Artificial Sequence: Synthetic oligonucleotide
  Antisense strand to SEQ ID NO: 1683397
acaauucaaggacuuuaaa

SEQ ID NO: 1683399 - RNA, 19 nt, Artificial Sequence
  Description of Artificial Sequence: Synthetic oligonucleotide
  Sense strand starting at position 2455 of SEQ ID NO: 1561591
guccuugaauuguuuauga

SEQ ID NO: 1683400 - RNA, 19 nt, Artificial Sequence
  Description of Artificial Sequence: Synthetic oligonucleotide
  Antisense strand to SEQ ID NO: 1683399
ucauaaacaauucaaggac

SEQ ID NO: 1683401 - RNA, 19 nt, Artificial Sequence
  Description of Artificial Sequence: Synthetic oligonucleotide
  Sense strand starting at position 3240 of SEQ ID NO: 1561591
uauacaugcuaggugugaa

SEQ ID NO: 1683402 - RNA, 19 nt, Artificial Sequence
  Description of Artificial Sequence: Synthetic oligonucleotide
  Antisense strand to SEQ ID NO: 1683401
uucacaccuagcauguaua

SEQ ID NO: 1683403 - RNA, 19 nt, Artificial Sequence
  Description of Artificial Sequence: Synthetic oligonucleotide
  Sense strand starting at position 3241 of SEQ ID NO: 1561591
auacaugcuaggugugaau

SEQ ID NO: 1683404 - RNA, 19 nt, Artificial Sequence
  Description of Artificial Sequence: Synthetic oligonucleotide
  Antisense strand to SEQ ID NO: 1683403
auucacaccuagcauguau

SEQ ID NO: 1683405 - RNA, 19 nt, Artificial Sequence
  Description of Artificial Sequence: Synthetic oligonucleotide
  Sense strand starting at position 3253 of SEQ ID NO: 1561591
ugugaauuguaacuaaguu

SEQ ID NO: 1683406 - RNA, 19 nt, Artificial Sequence
  Description of Artificial Sequence: Synthetic oligonucleotide
  Antisense strand to SEQ ID NO: 1683405
aacuuaguuacaauucaca

SEQ ID NO: 1683407 - RNA, 19 nt, Artificial Sequence
  Description of Artificial Sequence: Synthetic oligonucleotide
  Sense strand starting at position 3261 of SEQ ID NO: 1561591
guaacuaaguuuccaguau

SEQ ID NO: 1683408 - RNA, 19 nt, Artificial Sequence
  Description of Artificial Sequence: Synthetic oligonucleotide
  Antisense strand to SEQ ID NO: 1683407
auacuggaaacuuaguuac

SEQ ID NO: 1683409 - RNA, 19 nt, Artificial Sequence
  Description of Artificial Sequence: Synthetic oligonucleotide
  Sense strand starting at position 3265 of SEQ ID NO: 1561591
cuaaguuuccaguaugggu

SEQ ID NO: 1683410 - RNA, 19 nt, Artificial Sequence
  Description of Artificial Sequence: Synthetic oligonucleotide
  Antisense strand to SEQ ID NO: 1683409
acccauacuggaaacuuag

SEQ ID NO: 1683411 - RNA, 19 nt, Artificial Sequence
  Description of Artificial Sequence: Synthetic oligonucleotide
  Sense strand starting at position 3444 of SEQ ID NO: 1561591
aguguaugggaucaucauu

SEQ ID NO: 1683412 - RNA, 19 nt, Artificial Sequence
  Description of Artificial Sequence: Synthetic oligonucleotide
  Antisense strand to SEQ ID NO: 1683411
aaugaugaucccauacacu

SEQ ID NO: 1683413 - RNA, 19 nt, Artificial Sequence
  Description of Artificial Sequence: Synthetic oligonucleotide
  Sense strand starting at position 3502 of SEQ ID NO: 1561591
guuccagaagaguggucaa

SEQ ID NO: 1683414 - RNA, 19 nt, Artificial Sequence
  Description of Artificial Sequence: Synthetic oligonucleotide
  Antisense strand to SEQ ID NO: 1683413
uugaccacucuucuggaac

SEQ ID NO: 1683415 - RNA, 19 nt, Artificial Sequence
  Description of Artificial Sequence: Synthetic oligonucleotide
  Sense strand starting at position 3537 of SEQ ID NO: 1561591
aagaguugugagggugacu

SEQ ID NO: 1683416 - RNA, 19 nt, Artificial Sequence
  Description of Artificial Sequence: Synthetic oligonucleotide
  Antisense strand to SEQ ID NO: 1683415
agucacccucacaacucuu

SEQ ID NO: 1683417 - RNA, 19 nt, Artificial Sequence
  Description of Artificial Sequence: Synthetic oligonucleotide
  Sense strand starting at position 3540 of SEQ ID NO: 1561591
aguugugagggugacuaua

SEQ ID NO: 1683418 - RNA, 19 nt, Artificial Sequence
  Description of Artificial Sequence: Synthetic oligonucleotide
  Antisense strand to SEQ ID NO: 1683417
uauagucacccucacaacu

SEQ ID NO: 1683419 - RNA, 19 nt, Artificial Sequence
  Description of Artificial Sequence: Synthetic oligonucleotide
  Sense strand starting at position 125 of SEQ ID NO: 1561592
ggcagcuucuugcuuacau

SEQ ID NO: 1683420 - RNA, 19 nt, Artificial Sequence
  Description of Artificial Sequence: Synthetic oligonucleotide
  Antisense strand to SEQ ID NO: 1683419
auguaagcaagaagcugcc

SEQ ID NO: 1683421 - RNA, 19 nt, Artificial Sequence
  Description of Artificial Sequence: Synthetic oligonucleotide
  Sense strand starting at position 347 of SEQ ID NO: 1561592
guaagacauucucugauau

SEQ ID NO: 1683422 - RNA, 19 nt, Artificial Sequence
  Description of Artificial Sequence: Synthetic oligonucleotide
  Antisense strand to SEQ ID NO: 1683421
auaucagagaaugucuuac

SEQ ID NO: 1683423 - RNA, 19 nt, Artificial Sequence
  Description of Artificial Sequence: Synthetic oligonucleotide
  Sense strand starting at position 475 of SEQ ID NO: 1561592
ccauaaagacguuauacuu

SEQ ID NO: 1683424 - RNA, 19 nt, Artificial Sequence
  Description of Artificial Sequence: Synthetic oligonucleotide
  Antisense strand to SEQ ID NO: 1683423
aaguauaacgucuuuaugg

SEQ ID NO: 1683425 - RNA, 19 nt, Artificial Sequence
  Description of Artificial Sequence: Synthetic oligonucleotide
  Sense strand starting at position 483 of SEQ ID NO: 1561592
acguuauacuuuguuggua

SEQ ID NO: 1683426 - RNA, 19 nt, Artificial Sequence
  Description of Artificial Sequence: Synthetic oligonucleotide
  Antisense strand to SEQ ID NO: 1683425
uaccaacaaaguauaacgu

SEQ ID NO: 1683427 - RNA, 19 nt, Artificial Sequence
  Description of Artificial Sequence: Synthetic oligonucleotide
  Sense strand starting at position 644 of SEQ ID NO: 1561592
acugcaucugccuggacaa

SEQ ID NO: 1683428 - RNA, 19 nt, Artificial Sequence
  Description of Artificial Sequence: Synthetic oligonucleotide
  Antisense strand to SEQ ID NO: 1683427
uuguccaggcagaugcagu

SEQ ID NO: 1683429 - RNA, 19 nt, Artificial Sequence
  Description of Artificial Sequence: Synthetic oligonucleotide
  Sense strand starting at position 645 of SEQ ID NO: 1561592
cugcaucugccuggacaaa

SEQ ID NO: 1683430 - RNA, 19 nt, Artificial Sequence
  Description of Artificial Sequence: Synthetic oligonucleotide
  Antisense strand to SEQ ID NO: 1683429
uuuguccaggcagaugcag

SEQ ID NO: 1683431 - RNA, 19 nt, Artificial Sequence
  Description of Artificial Sequence: Synthetic oligonucleotide
  Sense strand starting at position 712 of SEQ ID NO: 1561592
uagccuuagcucggaauca

SEQ ID NO: 1683432 - RNA, 19 nt, Artificial Sequence
  Description of Artificial Sequence: Synthetic oligonucleotide
  Antisense strand to SEQ ID NO: 1683431
ugauuccgagcuaaggcua

SEQ ID NO: 1683433 - RNA, 19 nt, Artificial Sequence
  Description of Artificial Sequence: Synthetic oligonucleotide
  Sense strand starting at position 776 of SEQ ID NO: 1561592
uuugaaacuaaguguugga

SEQ ID NO: 1683434 - RNA, 19 nt, Artificial Sequence
  Description of Artificial Sequence: Synthetic oligonucleotide
  Antisense strand to SEQ ID NO: 1683433
uccaacacuuaguuucaaa

SEQ ID NO: 1683435 - RNA, 19 nt, Artificial Sequence
  Description of Artificial Sequence: Synthetic oligonucleotide
  Sense strand starting at position 1062 of SEQ ID NO: 1561592
uggauaggcuggucuagaa

SEQ ID NO: 1683436 - RNA, 19 nt, Artificial Sequence
  Description of Artificial Sequence: Synthetic oligonucleotide
  Antisense strand to SEQ ID NO: 1683435
uucuagaccagccuaucca

SEQ ID NO: 1683437 - RNA, 19 nt, Artificial Sequence
  Description of Artificial Sequence: Synthetic oligonucleotide
  Sense strand starting at position 1162 of SEQ ID NO: 1561592
gguuauuagcccuaaugca

SEQ ID NO: 1683438 - RNA, 19 nt, Artificial Sequence
  Description of Artificial Sequence: Synthetic oligonucleotide
  Antisense strand to SEQ ID NO: 1683437
ugcauuagggcuaauaacc

SEQ ID NO: 1683439 - RNA, 19 nt, Artificial Sequence
  Description of Artificial Sequence: Synthetic oligonucleotide
  Sense strand starting at position 1170 of SEQ ID NO: 1561592
gcccuaaugcaguucuguu

SEQ ID NO: 1683440 - RNA, 19 nt, Artificial Sequence
  Description of Artificial Sequence: Synthetic oligonucleotide
  Antisense strand to SEQ ID NO: 1683439
aacagaacugcauuagggc

SEQ ID NO: 1683441 - RNA, 19 nt, Artificial Sequence
  Description of Artificial Sequence: Synthetic oligonucleotide
  Sense strand starting at position 1271 of SEQ ID NO: 1561592
cggguaaugcgcgauuugu

SEQ ID NO: 1683442 - RNA, 19 nt, Artificial Sequence
  Description of Artificial Sequence: Synthetic oligonucleotide
  Antisense strand to SEQ ID NO: 1683441
acaaaucgcgcauuacccg

SEQ ID NO: 1683443 - RNA, 19 nt, Artificial Sequence
  Description of Artificial Sequence: Synthetic oligonucleotide
  Sense strand starting at position 1275 of SEQ ID NO: 1561592
uaaugcgcgauuugugaga

SEQ ID NO: 1683444 - RNA, 19 nt, Artificial Sequence
  Description of Artificial Sequence: Synthetic oligonucleotide
  Antisense strand to SEQ ID NO: 1683443
ucucacaaaucgcgcauua

SEQ ID NO: 1683445 - RNA, 19 nt, Artificial Sequence
  Description of Artificial Sequence: Synthetic oligonucleotide
  Sense strand starting at position 1277 of SEQ ID NO: 1561592
augcgcgauuugugagaaa

SEQ ID NO: 1683446 - RNA, 19 nt, Artificial Sequence
  Description of Artificial Sequence: Synthetic oligonucleotide
  Antisense strand to SEQ ID NO: 1683445
uuucucacaaaucgcgcau

SEQ ID NO: 1683447 - RNA, 19 nt, Artificial Sequence
  Description of Artificial Sequence: Synthetic oligonucleotide
  Sense strand starting at position 1353 of SEQ ID NO: 1561592
gaaguugcgucuuugaaga

SEQ ID NO: 1683448 - RNA, 19 nt, Artificial Sequence
  Description of Artificial Sequence: Synthetic oligonucleotide
  Antisense strand to SEQ ID NO: 1683447
ucuucaaagacgcaacuuc

SEQ ID NO: 1683449 - RNA, 19 nt, Artificial Sequence
  Description of Artificial Sequence: Synthetic oligonucleotide
  Sense strand starting at position 1355 of SEQ ID NO: 1561592
aguugcgucuuugaagaag

SEQ ID NO: 1683450 - RNA, 19 nt, Artificial Sequence
  Description of Artificial Sequence: Synthetic oligonucleotide
  Antisense strand to SEQ ID NO: 1683449
cuucuucaaagacgcaacu

SEQ ID NO: 1683451 - RNA, 19 nt, Artificial Sequence
  Description of Artificial Sequence: Synthetic oligonucleotide
  Sense strand starting at position 1367 of SEQ ID NO: 1561592
gaagaagaacuacguugua

SEQ ID NO: 1683452 - RNA, 19 nt, Artificial Sequence
  Description of Artificial Sequence: Synthetic oligonucleotide
  Antisense strand to SEQ ID NO: 1683451
uacaacguaguucuucuuc

SEQ ID NO: 1683453 - RNA, 19 nt, Artificial Sequence
  Description of Artificial Sequence: Synthetic oligonucleotide
  Sense strand starting at position 1370 of SEQ ID NO: 1561592
gaagaacuacguuguacua

SEQ ID NO: 1683454 - RNA, 19 nt, Artificial Sequence
  Description of Artificial Sequence: Synthetic oligonucleotide
  Antisense strand to SEQ ID NO: 1683453
uaguacaacguaguucuuc

SEQ ID NO: 1683455 - RNA, 19 nt, Artificial Sequence
  Description of Artificial Sequence: Synthetic oligonucleotide
  Sense strand starting at position 1739 of SEQ ID NO: 1561592
ggagaagucggucgcagau

SEQ ID NO: 1683456 - RNA, 19 nt, Artificial Sequence
  Description of Artificial Sequence: Synthetic oligonucleotide
  Antisense strand to SEQ ID NO: 1683455
aucugcgaccgacuucucc

SEQ ID NO: 1683457 - RNA, 19 nt, Artificial Sequence
  Description of Artificial Sequence: Synthetic oligonucleotide
  Sense strand starting at position 1988 of SEQ ID NO: 1561592
gacaaauggccgcgccaaa

SEQ ID NO: 1683458 - RNA, 19 nt, Artificial Sequence
  Description of Artificial Sequence: Synthetic oligonucleotide
  Antisense strand to SEQ ID NO: 1683457
uuuggcgcggccauuuguc

SEQ ID NO: 1683459 - RNA, 19 nt, Artificial Sequence
  Description of Artificial Sequence: Synthetic oligonucleotide
  Sense strand starting at position 2028 of SEQ ID NO: 1561592
uccagcugccugcaugauu

SEQ ID NO: 1683460 - RNA, 19 nt, Artificial Sequence
  Description of Artificial Sequence: Synthetic oligonucleotide
  Antisense strand to SEQ ID NO: 1683459
aaucaugcaggcagcugga

SEQ ID NO: 1683461 - RNA, 19 nt, Artificial Sequence
  Description of Artificial Sequence: Synthetic oligonucleotide
  Sense strand starting at position 2097 of SEQ ID NO: 1561592
cuccucagucccugaguga

SEQ ID NO: 1683462 - RNA, 19 nt, Artificial Sequence
  Description of Artificial Sequence: Synthetic oligonucleotide
  Antisense strand to SEQ ID NO: 1683461
ucacucagggacugaggag

SEQ ID NO: 1683463 - RNA, 19 nt, Artificial Sequence
  Description of Artificial Sequence: Synthetic oligonucleotide
  Sense strand starting at position 2283 of SEQ ID NO: 1561592
guauuuggcugucauauua

SEQ ID NO: 1683464 - RNA, 19 nt, Artificial Sequence
  Description of Artificial Sequence: Synthetic oligonucleotide
  Antisense strand to SEQ ID NO: 1683463
uaauaugacagccaaauac

SEQ ID NO: 1683465 - RNA, 19 nt, Artificial Sequence
  Description of Artificial Sequence: Synthetic oligonucleotide
  Sense strand starting at position 2350 of SEQ ID NO: 1561592
guguauuaucaauacgaaa

SEQ ID NO: 1683466 - RNA, 19 nt, Artificial Sequence
  Description of Artificial Sequence: Synthetic oligonucleotide
  Antisense strand to SEQ ID NO: 1683465
uuucguauugauaauacac

SEQ ID NO: 1683467 - RNA, 19 nt, Artificial Sequence
  Description of Artificial Sequence: Synthetic oligonucleotide
  Sense strand starting at position 2419 of SEQ ID NO: 1561592
ucucgagacuuacauauac

SEQ ID NO: 1683468 - RNA, 19 nt, Artificial Sequence
  Description of Artificial Sequence: Synthetic oligonucleotide
  Antisense strand to SEQ ID NO: 1683467
guauauguaagucucgaga

SEQ ID NO: 1683469 - RNA, 19 nt, Artificial Sequence
  Description of Artificial Sequence: Synthetic oligonucleotide
  Sense strand starting at position 2814 of SEQ ID NO: 1561592
aggaguuuaccuugcccuu

SEQ ID NO: 1683470 - RNA, 19 nt, Artificial Sequence
  Description of Artificial Sequence: Synthetic oligonucleotide
  Antisense strand to SEQ ID NO: 1683469
aagggcaagguaaacuccu

SEQ ID NO: 1683471 - RNA, 19 nt, Artificial Sequence
  Description of Artificial Sequence: Synthetic oligonucleotide
  Sense strand starting at position 2928 of SEQ ID NO: 1561592
gucaccaaguccuggaaga

SEQ ID NO: 1683472 - RNA, 19 nt, Artificial Sequence
  Description of Artificial Sequence: Synthetic oligonucleotide
  Antisense strand to SEQ ID NO: 1683471
ucuuccaggacuuggugac

SEQ ID NO: 1683473 - RNA, 19 nt, Artificial Sequence
  Description of Artificial Sequence: Synthetic oligonucleotide
  Sense strand starting at position 2938 of SEQ ID NO: 1561592
ccuggaagagguuguguga

SEQ ID NO: 1683474 - RNA, 19 nt, Artificial Sequence
  Description of Artificial Sequence: Synthetic oligonucleotide
  Antisense strand to SEQ ID NO: 1683473
ucacacaaccucuuccagg

SEQ ID NO: 1683475 - RNA, 19 nt, Artificial Sequence
  Description of Artificial Sequence: Synthetic oligonucleotide
  Sense strand starting at position 3022 of SEQ ID NO: 1561592
ccuauacauucguuauuga

SEQ ID NO: 1683476 - RNA, 19 nt, Artificial Sequence
  Description of Artificial Sequence: Synthetic oligonucleotide
  Antisense strand to SEQ ID NO: 1683475
ucaauaacgaauguauagg

SEQ ID NO: 1683477 - RNA, 19 nt, Artificial Sequence
  Description of Artificial Sequence: Synthetic oligonucleotide
  Sense strand starting at position 3023 of SEQ ID NO: 1561592
cuauacauucguuauugaa

SEQ ID NO: 1683478 - RNA, 19 nt, Artificial Sequence
  Description of Artificial Sequence: Synthetic oligonucleotide
  Antisense strand to SEQ ID NO: 1683477
uucaauaacgaauguauag

SEQ ID NO: 1683479 - RNA, 19 nt, Artificial Sequence
  Description of Artificial Sequence: Synthetic oligonucleotide
  Sense strand starting at position 3402 of SEQ ID NO: 1561592
cuuucuguguuccuugaga

SEQ ID NO: 1683480 - RNA, 19 nt, Artificial Sequence
  Description of Artificial Sequence: Synthetic oligonucleotide
  Antisense strand to SEQ ID NO: 1683479
ucucaaggaacacagaaag

SEQ ID NO: 1683481 - RNA, 19 nt, Artificial Sequence
  Description of Artificial Sequence: Synthetic oligonucleotide
  Sense strand starting at position 3410 of SEQ ID NO: 1561592
guuccuugagaccagucau

SEQ ID NO: 1683482 - RNA, 19 nt, Artificial Sequence
  Description of Artificial Sequence: Synthetic oligonucleotide
  Antisense strand to SEQ ID NO: 1683481
augacuggucucaaggaac

SEQ ID NO: 1683483 - RNA, 19 nt, Artificial Sequence
  Description of Artificial Sequence: Synthetic oligonucleotide
  Sense strand starting at position 3456 of SEQ ID NO: 1561592
cugaacaacucguuacaaa

SEQ ID NO: 1683484 - RNA, 19 nt, Artificial Sequence
  Description of Artificial Sequence: Synthetic oligonucleotide
  Antisense strand to SEQ ID NO: 1683483
uuuguaacgaguuguucag

SEQ ID NO: 1683485 - RNA, 19 nt, Artificial Sequence
  Description of Artificial Sequence: Synthetic oligonucleotide
  Sense strand starting at position 3494 of SEQ ID NO: 1561592
cgcgcagaagcgucauuau

SEQ ID NO: 1683486 - RNA, 19 nt, Artificial Sequence
  Description of Artificial Sequence: Synthetic oligonucleotide
  Antisense strand to SEQ ID NO: 1683485
auaaugacgcuucugcgcg

SEQ ID NO: 1683487 - RNA, 19 nt, Artificial Sequence
  Description of Artificial Sequence: Synthetic oligonucleotide
  Sense strand starting at position 3497 of SEQ ID NO: 1561592
gcagaagcgucauuauacc

SEQ ID NO: 1683488 - RNA, 19 nt, Artificial Sequence
  Description of Artificial Sequence: Synthetic oligonucleotide
  Antisense strand to SEQ ID NO: 1683487
gguauaaugacgcuucugc

SEQ ID NO: 1683489 - RNA, 19 nt, Artificial Sequence
  Description of Artificial Sequence: Synthetic oligonucleotide
  Sense strand starting at position 3744 of SEQ ID NO: 1561592
ccuauacauucguucuuga

SEQ ID NO: 1683490 - RNA, 19 nt, Artificial Sequence
  Description of Artificial Sequence: Synthetic oligonucleotide
  Antisense strand to SEQ ID NO: 1683489
ucaagaacgaauguauagg

SEQ ID NO: 1683491 - RNA, 19 nt, Artificial Sequence
  Description of Artificial Sequence: Synthetic oligonucleotide
  Sense strand starting at position 3886 of SEQ ID NO: 1561592
gcgccaaagcuucgugaca

SEQ ID NO: 1683492 - RNA, 19 nt, Artificial Sequence
  Description of Artificial Sequence: Synthetic oligonucleotide
  Antisense strand to SEQ ID NO: 1683491
ugucacgaagcuuuggcgc

SEQ ID NO: 1683493 - RNA, 19 nt, Artificial Sequence
  Description of Artificial Sequence: Synthetic oligonucleotide
  Sense strand starting at position 3939 of SEQ ID NO: 1561592
auuggacuuuacuggaaac

SEQ ID NO: 1683494 - RNA, 19 nt, Artificial Sequence
  Description of Artificial Sequence: Synthetic oligonucleotide
  Antisense strand to SEQ ID NO: 1683493
guuuccaguaaaguccaau

SEQ ID NO: 1683495 - RNA, 19 nt, Artificial Sequence
  Description of Artificial Sequence: Synthetic oligonucleotide
  Sense strand starting at position 3967 of SEQ ID NO: 1561592
cugcuuuaaccaugauguc

SEQ ID NO: 1683496 - RNA, 19 nt, Artificial Sequence
  Description of Artificial Sequence: Synthetic oligonucleotide
  Antisense strand to SEQ ID NO: 1683495
gacaucaugguuaaagcag

SEQ ID NO: 1683497 - RNA, 19 nt, Artificial Sequence
  Description of Artificial Sequence: Synthetic oligonucleotide
  Sense strand starting at position 3968 of SEQ ID NO: 1561592
ugcuuuaaccaugaugucu

SEQ ID NO: 1683498 - RNA, 19 nt, Artificial Sequence
  Description of Artificial Sequence: Synthetic oligonucleotide
  Antisense strand to SEQ ID NO: 1683497
agacaucaugguuaaagca

SEQ ID NO: 1683499 - RNA, 19 nt, Artificial Sequence
  Description of Artificial Sequence: Synthetic oligonucleotide
  Sense strand starting at position 46 of SEQ ID NO: 1561593
cauacagugucaggagauu

SEQ ID NO: 1683500 - RNA, 19 nt, Artificial Sequence
  Description of Artificial Sequence: Synthetic oligonucleotide
  Antisense strand to SEQ ID NO: 1683499
aaucuccugacacuguaug

SEQ ID NO: 1683501 - RNA, 19 nt, Artificial Sequence
  Description of Artificial Sequence: Synthetic oligonucleotide
  Sense strand starting at position 52 of SEQ ID NO: 1561593
gugucaggagauuauucuu

SEQ ID NO: 1683502 - RNA, 19 nt, Artificial Sequence
  Description of Artificial Sequence: Synthetic oligonucleotide
  Antisense strand to SEQ ID NO: 1683501
aagaauaaucuccugacac

SEQ ID NO: 1683503 - RNA, 19 nt, Artificial Sequence
  Description of Artificial Sequence: Synthetic oligonucleotide
  Sense strand starting at position 57 of SEQ ID NO: 1561593
aggagauuauucuuugcuu

SEQ ID NO: 1683504 - RNA, 19 nt, Artificial Sequence
  Description of Artificial Sequence: Synthetic oligonucleotide
  Antisense strand to SEQ ID NO: 1683503
aagcaaagaauaaucuccu

SEQ ID NO: 1683505 - RNA, 19 nt, Artificial Sequence
  Description of Artificial Sequence: Synthetic oligonucleotide
  Sense strand starting at position 58 of SEQ ID NO: 1561593
ggagauuauucuuugcuuu

SEQ ID NO: 1683506 - RNA, 19 nt, Artificial Sequence
  Description of Artificial Sequence: Synthetic oligonucleotide
  Antisense strand to SEQ ID NO: 1683505
aaagcaaagaauaaucucc

SEQ ID NO: 1683507 - RNA, 19 nt, Artificial Sequence
  Description of Artificial Sequence: Synthetic oligonucleotide
  Sense strand starting at position 75 of SEQ ID NO: 1561593
uucuucucacagggaguau

SEQ ID NO: 1683508 - RNA, 19 nt, Artificial Sequence
  Description of Artificial Sequence: Synthetic oligonucleotide
  Antisense strand to SEQ ID NO: 1683507
auacucccugugagaagaa

SEQ ID NO: 1683509 - RNA, 19 nt, Artificial Sequence
  Description of Artificial Sequence: Synthetic oligonucleotide
  Sense strand starting at position 620 of SEQ ID NO: 1561593
ggcccugcuugagacacau

SEQ ID NO: 1683510 - RNA, 19 nt, Artificial Sequence
  Description of Artificial Sequence: Synthetic oligonucleotide
  Antisense strand to SEQ ID NO: 1683509
augugucucaagcagggcc

SEQ ID NO: 1683511 - RNA, 19 nt, Artificial Sequence
  Description of Artificial Sequence: Synthetic oligonucleotide
  Sense strand starting at position 711 of SEQ ID NO: 1561593
uggcucuaguccucggauu

SEQ ID NO: 1683512 - RNA, 19 nt, Artificial Sequence
  Description of Artificial Sequence: Synthetic oligonucleotide
  Antisense strand to SEQ ID NO: 1683511
aauccgaggacuagagcca

SEQ ID NO: 1683513 - RNA, 19 nt, Artificial Sequence
  Description of Artificial Sequence: Synthetic oligonucleotide
  Sense strand starting at position 712 of SEQ ID NO: 1561593
ggcucuaguccucggauuu

SEQ ID NO: 1683514 - RNA, 19 nt, Artificial Sequence
  Description of Artificial Sequence: Synthetic oligonucleotide
  Antisense strand to SEQ ID NO: 1683513
aaauccgaggacuagagcc

SEQ ID NO: 1683515 - RNA, 19 nt, Artificial Sequence
  Description of Artificial Sequence: Synthetic oligonucleotide
  Sense strand starting at position 713 of SEQ ID NO: 1561593
gcucuaguccucggauuuc

SEQ ID NO: 1683516 - RNA, 19 nt, Artificial Sequence
  Description of Artificial Sequence: Synthetic oligonucleotide
  Antisense strand to SEQ ID NO: 1683515
gaaauccgaggacuagagc

SEQ ID NO: 1683517 - RNA, 19 nt, Artificial Sequence
  Description of Artificial Sequence: Synthetic oligonucleotide
  Sense strand starting at position 837 of SEQ ID NO: 1561593
cugauuacauaagaaggau

SEQ ID NO: 1683518 - RNA, 19 nt, Artificial Sequence
  Description of Artificial Sequence: Synthetic oligonucleotide
  Antisense strand to SEQ ID NO: 1683517
auccuucuuauguaaucag

SEQ ID NO: 1683519 - RNA, 19 nt, Artificial Sequence
  Description of Artificial Sequence: Synthetic oligonucleotide
  Sense strand starting at position 1297 of SEQ ID NO: 1561593
cugggugcucuacaauguu

SEQ ID NO: 1683520 - RNA, 19 nt, Artificial Sequence
  Description of Artificial Sequence: Synthetic oligonucleotide
  Antisense strand to SEQ ID NO: 1683519
aacauuguagagcacccag

SEQ ID NO: 1683521 - RNA, 19 nt, Artificial Sequence
  Description of Artificial Sequence: Synthetic oligonucleotide
  Sense strand starting at position 1300 of SEQ ID NO: 1561593
ggugcucuacaauguuuga

SEQ ID NO: 1683522 - RNA, 19 nt, Artificial Sequence
  Description of Artificial Sequence: Synthetic oligonucleotide
  Antisense strand to SEQ ID NO: 1683521
ucaaacauuguagagcacc

SEQ ID NO: 1683523 - RNA, 19 nt, Artificial Sequence
  Description of Artificial Sequence: Synthetic oligonucleotide
  Sense strand starting at position 1303 of SEQ ID NO: 1561593
gcucuacaauguuugaauc

SEQ ID NO: 1683524 - RNA, 19 nt, Artificial Sequence
  Description of Artificial Sequence: Synthetic oligonucleotide
  Antisense strand to SEQ ID NO: 1683523
gauucaaacauuguagagc

SEQ ID NO: 1683525 - RNA, 19 nt, Artificial Sequence
  Description of Artificial Sequence: Synthetic oligonucleotide
  Sense strand starting at position 1350 of SEQ ID NO: 1561593
cgcggugacgcccauaaau

SEQ ID NO: 1683526 - RNA, 19 nt, Artificial Sequence
  Description of Artificial Sequence: Synthetic oligonucleotide
  Antisense strand to SEQ ID NO: 1683525
auuuaugggcgucaccgcg

SEQ ID NO: 1683527 - RNA, 19 nt, Artificial Sequence
  Description of Artificial Sequence: Synthetic oligonucleotide
  Sense strand starting at position 1404 of SEQ ID NO: 1561593
ggacuaaagugcuuccuau

SEQ ID NO: 1683528 - RNA, 19 nt, Artificial Sequence
  Description of Artificial Sequence: Synthetic oligonucleotide
  Antisense strand to SEQ ID NO: 1683527
auaggaagcacuuuagucc

SEQ ID NO: 1683529 - RNA, 19 nt, Artificial Sequence
  Description of Artificial Sequence: Synthetic oligonucleotide
  Sense strand starting at position 1466 of SEQ ID NO: 1561593
ucccgugaucccugcacaa

SEQ ID NO: 1683530 - RNA, 19 nt, Artificial Sequence
  Description of Artificial Sequence: Synthetic oligonucleotide
  Antisense strand to SEQ ID NO: 1683529
uugugcagggaucacggga

SEQ ID NO: 1683531 - RNA, 19 nt, Artificial Sequence
  Description of Artificial Sequence: Synthetic oligonucleotide
  Sense strand starting at position 1468 of SEQ ID NO: 1561593
ccgugaucccugcacaauc

SEQ ID NO: 1683532 - RNA, 19 nt, Artificial Sequence
  Description of Artificial Sequence: Synthetic oligonucleotide
  Antisense strand to SEQ ID NO: 1683531
gauugugcagggaucacgg

SEQ ID NO: 1683533 - RNA, 19 nt, Artificial Sequence
  Description of Artificial Sequence: Synthetic oligonucleotide
  Sense strand starting at position 1952 of SEQ ID NO: 1561593
agcuuugugccugauugga

SEQ ID NO: 1683534 - RNA, 19 nt, Artificial Sequence
  Description of Artificial Sequence: Synthetic oligonucleotide
  Antisense strand to SEQ ID NO: 1683533
uccaaucaggcacaaagcu

SEQ ID NO: 1683535 - RNA, 19 nt, Artificial Sequence
  Description of Artificial Sequence: Synthetic oligonucleotide
  Sense strand starting at position 1981 of SEQ ID NO: 1561593
cccagcgucccugauuaga

SEQ ID NO: 1683536 - RNA, 19 nt, Artificial Sequence
  Description of Artificial Sequence: Synthetic oligonucleotide
  Antisense strand to SEQ ID NO: 1683535
ucuaaucagggacgcuggg

SEQ ID NO: 1683537 - RNA, 19 nt, Artificial Sequence
  Description of Artificial Sequence: Synthetic oligonucleotide
  Sense strand starting at position 1983 of SEQ ID NO: 1561593
cagcgucccugauuagaua

SEQ ID NO: 1683538 - RNA, 19 nt, Artificial Sequence
  Description of Artificial Sequence: Synthetic oligonucleotide
  Antisense strand to SEQ ID NO: 1683537
uaucuaaucagggacgcug

SEQ ID NO: 1683539 - RNA, 19 nt, Artificial Sequence
  Description of Artificial Sequence: Synthetic oligonucleotide
  Sense strand starting at position 1984 of SEQ ID NO: 1561593
agcgucccugauuagauaa

SEQ ID NO: 1683540 - RNA, 19 nt, Artificial Sequence
  Description of Artificial Sequence: Synthetic oligonucleotide
  Antisense strand to SEQ ID NO: 1683539
uuaucuaaucagggacgcu

SEQ ID NO: 1683541 - RNA, 19 nt, Artificial Sequence
  Description of Artificial Sequence: Synthetic oligonucleotide
  Sense strand starting at position 1991 of SEQ ID NO: 1561593
cugauuagauaacguuuaa

SEQ ID NO: 1683542 - RNA, 19 nt, Artificial Sequence
  Description of Artificial Sequence: Synthetic oligonucleotide
  Antisense strand to SEQ ID NO: 1683541
uuaaacguuaucuaaucag

SEQ ID NO: 1683543 - RNA, 19 nt, Artificial Sequence
  Description of Artificial Sequence: Synthetic oligonucleotide
  Sense strand starting at position 2541 of SEQ ID NO: 1561593
ccuagaucgcgccaauaca

SEQ ID NO: 1683544 - RNA, 19 nt, Artificial Sequence
  Description of Artificial Sequence: Synthetic oligonucleotide
  Antisense strand to SEQ ID NO: 1683543
uguauuggcgcgaucuagg

SEQ ID NO: 1683545 - RNA, 19 nt, Artificial Sequence
  Description of Artificial Sequence: Synthetic oligonucleotide
  Sense strand starting at position 3088 of SEQ ID NO: 1561593
gugggauuacauggguaag

SEQ ID NO: 1683546 - RNA, 19 nt, Artificial Sequence
  Description of Artificial Sequence: Synthetic oligonucleotide
  Antisense strand to SEQ ID NO: 1683545
cuuacccauguaaucccac

SEQ ID NO: 1683547 - RNA, 19 nt, Artificial Sequence
  Description of Artificial Sequence: Synthetic oligonucleotide
  Sense strand starting at position 3203 of SEQ ID NO: 1561593
gcagacaaauguuucuaac

SEQ ID NO: 1683548 - RNA, 19 nt, Artificial Sequence
  Description of Artificial Sequence: Synthetic oligonucleotide
  Antisense strand to SEQ ID NO: 1683547
guuagaaacauuugucugc

SEQ ID NO: 1683549 - RNA, 19 nt, Artificial Sequence
  Description of Artificial Sequence: Synthetic oligonucleotide
  Sense strand starting at position 3285 of SEQ ID NO: 1561593
gagagaagcuuguucuguc

SEQ ID NO: 1683550 - RNA, 19 nt, Artificial Sequence
  Description of Artificial Sequence: Synthetic oligonucleotide
  Antisense strand to SEQ ID NO: 1683549
gacagaacaagcuucucuc

SEQ ID NO: 1683551 - RNA, 19 nt, Artificial Sequence
  Description of Artificial Sequence: Synthetic oligonucleotide
  Sense strand starting at position 3286 of SEQ ID NO: 1561593
agagaagcuuguucuguca

SEQ ID NO: 1683552 - RNA, 19 nt, Artificial Sequence
  Description of Artificial Sequence: Synthetic oligonucleotide
  Antisense strand to SEQ ID NO: 1683551
ugacagaacaagcuucucu

SEQ ID NO: 1683553 - RNA, 19 nt, Artificial Sequence
  Description of Artificial Sequence: Synthetic oligonucleotide
  Sense strand starting at position 3413 of SEQ ID NO: 1561593
cgcgaucaugcccgguuua

SEQ ID NO: 1683554 - RNA, 19 nt, Artificial Sequence
  Description of Artificial Sequence: Synthetic oligonucleotide
  Antisense strand to SEQ ID NO: 1683553
uaaaccgggcaugaucgcg

SEQ ID NO: 1683555 - RNA, 19 nt, Artificial Sequence
  Description of Artificial Sequence: Synthetic oligonucleotide
  Sense strand starting at position 3414 of SEQ ID NO: 1561593
gcgaucaugcccgguuuau

SEQ ID NO: 1683556 - RNA, 19 nt, Artificial Sequence
  Description of Artificial Sequence: Synthetic oligonucleotide
  Antisense strand to SEQ ID NO: 1683555
auaaaccgggcaugaucgc

SEQ ID NO: 1683557 - RNA, 19 nt, Artificial Sequence
  Description of Artificial Sequence: Synthetic oligonucleotide
  Sense strand starting at position 3423 of SEQ ID NO: 1561593
cccgguuuauuuccuuauu

SEQ ID NO: 1683558 - RNA, 19 nt, Artificial Sequence
  Description of Artificial Sequence: Synthetic oligonucleotide
  Antisense strand to SEQ ID NO: 1683557
aauaaggaaauaaaccggg

SEQ ID NO: 1683559 - RNA, 19 nt, Artificial Sequence
  Description of Artificial Sequence: Synthetic oligonucleotide
  Sense strand starting at position 3442 of SEQ ID NO: 1561593
ugaaguagugacuggaauu

SEQ ID NO: 1683560 - RNA, 19 nt, Artificial Sequence
  Description of Artificial Sequence: Synthetic oligonucleotide
  Antisense strand to SEQ ID NO: 1683559
aauuccagucacuacuuca

SEQ ID NO: 1683561 - RNA, 19 nt, Artificial Sequence
  Description of Artificial Sequence: Synthetic oligonucleotide
  Sense strand starting at position 3454 of SEQ ID NO: 1561593
uggaauuugccauguugcu

SEQ ID NO: 1683562 - RNA, 19 nt, Artificial Sequence
  Description of Artificial Sequence: Synthetic oligonucleotide
  Antisense strand to SEQ ID NO: 1683561
agcaacauggcaaauucca

SEQ ID NO: 1683563 - RNA, 19 nt, Artificial Sequence
  Description of Artificial Sequence: Synthetic oligonucleotide
  Sense strand starting at position 3483 of SEQ ID NO: 1561593
ucgaucuccuaagcucaaa

SEQ ID NO: 1683564 - RNA, 19 nt, Artificial Sequence
  Description of Artificial Sequence: Synthetic oligonucleotide
  Antisense strand to SEQ ID NO: 1683563
uuugagcuuaggagaucga

SEQ ID NO: 1683565 - RNA, 19 nt, Artificial Sequence
  Description of Artificial Sequence: Synthetic oligonucleotide
  Sense strand starting at position 3732 of SEQ ID NO: 1561593
uacagugaguucuaaauug

SEQ ID NO: 1683566 - RNA, 19 nt, Artificial Sequence
  Description of Artificial Sequence: Synthetic oligonucleotide
  Antisense strand to SEQ ID NO: 1683565
caauuuagaacucacugua

SEQ ID NO: 1683567 - RNA, 19 nt, Artificial Sequence
  Description of Artificial Sequence: Synthetic oligonucleotide
  Sense strand starting at position 3811 of SEQ ID NO: 1561593
aguuuaacuucuuuguugu

SEQ ID NO: 1683568 - RNA, 19 nt, Artificial Sequence
  Description of Artificial Sequence: Synthetic oligonucleotide
  Antisense strand to SEQ ID NO: 1683567
acaacaaagaaguuaaacu

SEQ ID NO: 1683569 - RNA, 19 nt, Artificial Sequence
  Description of Artificial Sequence: Synthetic oligonucleotide
  Sense strand starting at position 3812 of SEQ ID NO: 1561593
guuuaacuucuuuguuguu

SEQ ID NO: 1683570 - RNA, 19 nt, Artificial Sequence
  Description of Artificial Sequence: Synthetic oligonucleotide
  Antisense strand to SEQ ID NO: 1683569
aacaacaaagaaguuaaac

SEQ ID NO: 1683571 - RNA, 19 nt, Artificial Sequence
  Description of Artificial Sequence: Synthetic oligonucleotide
  Sense strand starting at position 3952 of SEQ ID NO: 1561593
uuggucaccuguuccauaa

SEQ ID NO: 1683572 - RNA, 19 nt, Artificial Sequence
  Description of Artificial Sequence: Synthetic oligonucleotide
  Antisense strand to SEQ ID NO: 1683571
uuauggaacaggugaccaa

SEQ ID NO: 1683573 - RNA, 19 nt, Artificial Sequence
  Description of Artificial Sequence: Synthetic oligonucleotide
  Sense strand starting at position 3954 of SEQ ID NO: 1561593
ggucaccuguuccauaaca

SEQ ID NO: 1683574 - RNA, 19 nt, Artificial Sequence
  Description of Artificial Sequence: Synthetic oligonucleotide
  Antisense strand to SEQ ID NO: 1683573
uguuauggaacaggugacc

SEQ ID NO: 1683575 - RNA, 19 nt, Artificial Sequence
  Description of Artificial Sequence: Synthetic oligonucleotide
  Sense strand starting at position 3956 of SEQ ID NO: 1561593
ucaccuguuccauaacagu

SEQ ID NO: 1683576 - RNA, 19 nt, Artificial Sequence
  Description of Artificial Sequence: Synthetic oligonucleotide
  Antisense strand to SEQ ID NO: 1683575
acuguuauggaacagguga

SEQ ID NO: 1683577 - RNA, 19 nt, Artificial Sequence
  Description of Artificial Sequence: Synthetic oligonucleotide
  Sense strand starting at position 243 of SEQ ID NO: 1561594
cucuguaccuucucucaga

SEQ ID NO: 1683578 - RNA, 19 nt, Artificial Sequence
  Description of Artificial Sequence: Synthetic oligonucleotide
  Antisense strand to SEQ ID NO: 1683577
ucugagagaagguacagag

SEQ ID NO: 1683579 - RNA, 19 nt, Artificial Sequence
  Description of Artificial Sequence: Synthetic oligonucleotide
  Sense strand starting at position 285 of SEQ ID NO: 1561594
ggugaauaggcugggacau

SEQ ID NO: 1683580 - RNA, 19 nt, Artificial Sequence
  Description of Artificial Sequence: Synthetic oligonucleotide
  Antisense strand to SEQ ID NO: 1683579
augucccagccuauucacc

SEQ ID NO: 1683581 - RNA, 19 nt, Artificial Sequence
  Description of Artificial Sequence: Synthetic oligonucleotide
  Sense strand starting at position 736 of SEQ ID NO: 1561594
uuugaaacucaguguuuga

SEQ ID NO: 1683582 - RNA, 19 nt, Artificial Sequence
  Description of Artificial Sequence: Synthetic oligonucleotide
  Antisense strand to SEQ ID NO: 1683581
ucaaacacugaguuucaaa

SEQ ID NO: 1683583 - RNA, 19 nt, Artificial Sequence
  Description of Artificial Sequence: Synthetic oligonucleotide
  Sense strand starting at position 760 of SEQ ID NO: 1561594
ccgugaaauuacucaaaca

SEQ ID NO: 1683584 - RNA, 19 nt, Artificial Sequence
  Description of Artificial Sequence: Synthetic oligonucleotide
  Antisense strand to SEQ ID NO: 1683583
uguuugaguaauuucacgg

SEQ ID NO: 1683585 - RNA, 19 nt, Artificial Sequence
  Description of Artificial Sequence: Synthetic oligonucleotide
  Sense strand starting at position 1310 of SEQ ID NO: 1561594
gaaguugagucucugaaga

SEQ ID NO: 1683586 - RNA, 19 nt, Artificial Sequence
  Description of Artificial Sequence: Synthetic oligonucleotide
  Antisense strand to SEQ ID NO: 1683585
ucuucagagacucaacuuc

SEQ ID NO: 1683587 - RNA, 19 nt, Artificial Sequence
  Description of Artificial Sequence: Synthetic oligonucleotide
  Sense strand starting at position 1539 of SEQ ID NO: 1561594
ugcacaaucugggagagaa

SEQ ID NO: 1683588 - RNA, 19 nt, Artificial Sequence
  Description of Artificial Sequence: Synthetic oligonucleotide
  Antisense strand to SEQ ID NO: 1683587
uucucucccagauugugca

SEQ ID NO: 1683589 - RNA, 19 nt, Artificial Sequence
  Description of Artificial Sequence: Synthetic oligonucleotide
  Sense strand starting at position 2007 of SEQ ID NO: 1561594
ggcugcuugccugauugga

SEQ ID NO: 1683590 - RNA, 19 nt, Artificial Sequence
  Description of Artificial Sequence: Synthetic oligonucleotide
  Antisense strand to SEQ ID NO: 1683589
uccaaucaggcaagcagcc

SEQ ID NO: 1683591 - RNA, 19 nt, Artificial Sequence
  Description of Artificial Sequence: Synthetic oligonucleotide
  Sense strand starting at position 2048 of SEQ ID NO: 1561594
auuggauaauucuuaaggu

SEQ ID NO: 1683592 - RNA, 19 nt, Artificial Sequence
  Description of Artificial Sequence: Synthetic oligonucleotide
  Antisense strand to SEQ ID NO: 1683591
accuuaagaauuauccaau

SEQ ID NO: 1683593 - RNA, 19 nt, Artificial Sequence
  Description of Artificial Sequence: Synthetic oligonucleotide
  Sense strand starting at position 2253 of SEQ ID NO: 1561594
agaaguauuucguugucau

SEQ ID NO: 1683594 - RNA, 19 nt, Artificial Sequence
  Description of Artificial Sequence: Synthetic oligonucleotide
  Antisense strand to SEQ ID NO: 1683593
augacaacgaaauacuucu

SEQ ID NO: 1683595 - RNA, 19 nt, Artificial Sequence
  Description of Artificial Sequence: Synthetic oligonucleotide
  Sense strand starting at position 2254 of SEQ ID NO: 1561594
gaaguauuucguugucaua

SEQ ID NO: 1683596 - RNA, 19 nt, Artificial Sequence
  Description of Artificial Sequence: Synthetic oligonucleotide
  Antisense strand to SEQ ID NO: 1683595
uaugacaacgaaauacuuc

SEQ ID NO: 1683597 - RNA, 19 nt, Artificial Sequence
  Description of Artificial Sequence: Synthetic oligonucleotide
  Sense strand starting at position 2256 of SEQ ID NO: 1561594
aguauuucguugucauauu

SEQ ID NO: 1683598 - RNA, 19 nt, Artificial Sequence
  Description of Artificial Sequence: Synthetic oligonucleotide
  Antisense strand to SEQ ID NO: 1683597
aauaugacaacgaaauacu

SEQ ID NO: 1683599 - RNA, 19 nt, Artificial Sequence
  Description of Artificial Sequence: Synthetic oligonucleotide
  Sense strand starting at position 2274 of SEQ ID NO: 1561594
uaauaauaccguuggaagu

SEQ ID NO: 1683600 - RNA, 19 nt, Artificial Sequence
  Description of Artificial Sequence: Synthetic oligonucleotide
  Antisense strand to SEQ ID NO: 1683599
acuuccaacgguauuauua

SEQ ID NO: 1683601 - RNA, 19 nt, Artificial Sequence
  Description of Artificial Sequence: Synthetic oligonucleotide
  Sense strand starting at position 2275 of SEQ ID NO: 1561594
aauaauaccguuggaagua

SEQ ID NO: 1683602 - RNA, 19 nt, Artificial Sequence
  Description of Artificial Sequence: Synthetic oligonucleotide
  Antisense strand to SEQ ID NO: 1683601
uacuuccaacgguauuauu

SEQ ID NO: 1683603 - RNA, 19 nt, Artificial Sequence
  Description of Artificial Sequence: Synthetic oligonucleotide
  Sense strand starting at position 2288 of SEQ ID NO: 1561594
gaaguaaaguguuuggugu

SEQ ID NO: 1683604 - RNA, 19 nt, Artificial Sequence
  Description of Artificial Sequence: Synthetic oligonucleotide
  Antisense strand to SEQ ID NO: 1683603
acaccaaacacuuuacuuc

SEQ ID NO: 1683605 - RNA, 19 nt, Artificial Sequence
  Description of Artificial Sequence: Synthetic oligonucleotide
  Sense strand starting at position 2296 of SEQ ID NO: 1561594
guguuuggugucgcaaagu

SEQ ID NO: 1683606 - RNA, 19 nt, Artificial Sequence
  Description of Artificial Sequence: Synthetic oligonucleotide
  Antisense strand to SEQ ID NO: 1683605
acuuugcgacaccaaacac

SEQ ID NO: 1683607 - RNA, 19 nt, Artificial Sequence
  Description of Artificial Sequence: Synthetic oligonucleotide
  Sense strand starting at position 2379 of SEQ ID NO: 1561594
ugcauuaaucacgaucgca

SEQ ID NO: 1683608 - RNA, 19 nt, Artificial Sequence
  Description of Artificial Sequence: Synthetic oligonucleotide
  Antisense strand to SEQ ID NO: 1683607
ugcgaucgugauuaaugca

SEQ ID NO: 1683609 - RNA, 19 nt, Artificial Sequence
  Description of Artificial Sequence: Synthetic oligonucleotide
  Sense strand starting at position 2382 of SEQ ID NO: 1561594
auuaaucacgaucgcaaga

SEQ ID NO: 1683610 - RNA, 19 nt, Artificial Sequence
  Description of Artificial Sequence: Synthetic oligonucleotide
  Antisense strand to SEQ ID NO: 1683609
ucuugcgaucgugauuaau

SEQ ID NO: 1683611 - RNA, 19 nt, Artificial Sequence
  Description of Artificial Sequence: Synthetic oligonucleotide
  Sense strand starting at position 2395 of SEQ ID NO: 1561594
gcaagagcacccugaacaa

SEQ ID NO: 1683612 - RNA, 19 nt, Artificial Sequence
  Description of Artificial Sequence: Synthetic oligonucleotide
  Antisense strand to SEQ ID NO: 1683611
uuguucagggugcucuugc

SEQ ID NO: 1683613 - RNA, 19 nt, Artificial Sequence
  Description of Artificial Sequence: Synthetic oligonucleotide
  Sense strand starting at position 2506 of SEQ ID NO: 1561594
ccgauuggcuauuuguaaa

SEQ ID NO: 1683614 - RNA, 19 nt, Artificial Sequence
  Description of Artificial Sequence: Synthetic oligonucleotide
  Antisense strand to SEQ ID NO: 1683613
uuuacaaauagccaaucgg

SEQ ID NO: 1683615 - RNA, 19 nt, Artificial Sequence
  Description of Artificial Sequence: Synthetic oligonucleotide
  Sense strand starting at position 2601 of SEQ ID NO: 1561594
gcugcagagugaguaauca

SEQ ID NO: 1683616 - RNA, 19 nt, Artificial Sequence
  Description of Artificial Sequence: Synthetic oligonucleotide
  Antisense strand to SEQ ID NO: 1683615
ugauuacucacucugcagc

SEQ ID NO: 1683617 - RNA, 19 nt, Artificial Sequence
  Description of Artificial Sequence: Synthetic oligonucleotide
  Sense strand starting at position 2656 of SEQ ID NO: 1561594
gaaggaagguuguuacagu

SEQ ID NO: 1683618 - RNA, 19 nt, Artificial Sequence
  Description of Artificial Sequence: Synthetic oligonucleotide
  Antisense strand to SEQ ID NO: 1683617
acuguaacaaccuuccuuc

SEQ ID NO: 1683619 - RNA, 19 nt, Artificial Sequence
  Description of Artificial Sequence: Synthetic oligonucleotide
  Sense strand starting at position 2704 of SEQ ID NO: 1561594
gcaaguugaguuugagaac

SEQ ID NO: 1683620 - RNA, 19 nt, Artificial Sequence
  Description of Artificial Sequence: Synthetic oligonucleotide
  Antisense strand to SEQ ID NO: 1683619
guucucaaacucaacuugc

SEQ ID NO: 1683621 - RNA, 19 nt, Artificial Sequence
  Description of Artificial Sequence: Synthetic oligonucleotide
  Sense strand starting at position 3142 of SEQ ID NO: 1561594
guuguuugacuugaucuuu

SEQ ID NO: 1683622 - RNA, 19 nt, Artificial Sequence
  Description of Artificial Sequence: Synthetic oligonucleotide
  Antisense strand to SEQ ID NO: 1683621
aaagaucaagucaaacaac

SEQ ID NO: 1683623 - RNA, 19 nt, Artificial Sequence
  Description of Artificial Sequence: Synthetic oligonucleotide
  Sense strand starting at position 3235 of SEQ ID NO: 1561594
uuuguacuagcccacagau

SEQ ID NO: 1683624 - RNA, 19 nt, Artificial Sequence
  Description of Artificial Sequence: Synthetic oligonucleotide
  Antisense strand to SEQ ID NO: 1683623
aucugugggcuaguacaaa

SEQ ID NO: 1683625 - RNA, 19 nt, Artificial Sequence
  Description of Artificial Sequence: Synthetic oligonucleotide
  Sense strand starting at position 3530 of SEQ ID NO: 1561594
auauuauguccagggccau

SEQ ID NO: 1683626 - RNA, 19 nt, Artificial Sequence
  Description of Artificial Sequence: Synthetic oligonucleotide
  Antisense strand to SEQ ID NO: 1683625
auggcccuggacauaauau

SEQ ID NO: 1683627 - RNA, 19 nt, Artificial Sequence
  Description of Artificial Sequence: Synthetic oligonucleotide
  Sense strand starting at position 3531 of SEQ ID NO: 1561594
uauuauguccagggccauu

SEQ ID NO: 1683628 - RNA, 19 nt, Artificial Sequence
  Description of Artificial Sequence: Synthetic oligonucleotide
  Antisense strand to SEQ ID NO: 1683627
aauggcccuggacauaaua

SEQ ID NO: 1683629 - RNA, 19 nt, Artificial Sequence
  Description of Artificial Sequence: Synthetic oligonucleotide
  Sense strand starting at position 3555 of SEQ ID NO: 1561594
uuucuaaguuaucuggcua

SEQ ID NO: 1683630 - RNA, 19 nt, Artificial Sequence
  Description of Artificial Sequence: Synthetic oligonucleotide
  Antisense strand to SEQ ID NO: 1683629
uagccagauaacuuagaaa

SEQ ID NO: 1683631 - RNA, 19 nt, Artificial Sequence
  Description of Artificial Sequence: Synthetic oligonucleotide
  Sense strand starting at position 3559 of SEQ ID NO: 1561594
uaaguuaucuggcuaguag

SEQ ID NO: 1683632 - RNA, 19 nt, Artificial Sequence
  Description of Artificial Sequence: Synthetic oligonucleotide
  Antisense strand to SEQ ID NO: 1683631
cuacuagccagauaacuua

SEQ ID NO: 1683633 - RNA, 19 nt, Artificial Sequence
  Description of Artificial Sequence: Synthetic oligonucleotide
  Sense strand starting at position 3577 of SEQ ID NO: 1561594
ggccuuaauugguuggcua

SEQ ID NO: 1683634 - RNA, 19 nt, Artificial Sequence
  Description of Artificial Sequence: Synthetic oligonucleotide
  Antisense strand to SEQ ID NO: 1683633
uagccaaccaauuaaggcc

SEQ ID NO: 1683635 - RNA, 19 nt, Artificial Sequence
  Description of Artificial Sequence: Synthetic oligonucleotide
  Sense strand starting at position 3579 of SEQ ID NO: 1561594
ccuuaauugguuggcuauu

SEQ ID NO: 1683636 - RNA, 19 nt, Artificial Sequence
  Description of Artificial Sequence: Synthetic oligonucleotide
  Antisense strand to SEQ ID NO: 1683635
aauagccaaccaauuaagg

SEQ ID NO: 1683637 - RNA, 19 nt, Artificial Sequence
  Description of Artificial Sequence: Synthetic oligonucleotide
  Sense strand starting at position 3588 of SEQ ID NO: 1561594
guuggcuauuucuuugaca

SEQ ID NO: 1683638 - RNA, 19 nt, Artificial Sequence
  Description of Artificial Sequence: Synthetic oligonucleotide
  Antisense strand to SEQ ID NO: 1683637
ugucaaagaaauagccaac

SEQ ID NO: 1683639 - RNA, 19 nt, Artificial Sequence
  Description of Artificial Sequence: Synthetic oligonucleotide
  Sense strand starting at position 3590 of SEQ ID NO: 1561594
uggcuauuucuuugacagc

SEQ ID NO: 1683640 - RNA, 19 nt, Artificial Sequence
  Description of Artificial Sequence: Synthetic oligonucleotide
  Antisense strand to SEQ ID NO: 1683639
gcugucaaagaaauagcca

SEQ ID NO: 1683641 - RNA, 19 nt, Artificial Sequence
  Description of Artificial Sequence: Synthetic oligonucleotide
  Sense strand starting at position 3680 of SEQ ID NO: 1561594
uuaauaguuacccguggaa

SEQ ID NO: 1683642 - RNA, 19 nt, Artificial Sequence
  Description of Artificial Sequence: Synthetic oligonucleotide
  Antisense strand to SEQ ID NO: 1683641
uuccacggguaacuauuaa

SEQ ID NO: 1683643 - RNA, 19 nt, Artificial Sequence
  Description of Artificial Sequence: Synthetic oligonucleotide
  Sense strand starting at position 3682 of SEQ ID NO: 1561594
aauaguuacccguggaaau

SEQ ID NO: 1683644 - RNA, 19 nt, Artificial Sequence
  Description of Artificial Sequence: Synthetic oligonucleotide
  Antisense strand to SEQ ID NO: 1683643
auuuccacggguaacuauu

SEQ ID NO: 1683645 - RNA, 19 nt, Artificial Sequence
  Description of Artificial Sequence: Synthetic oligonucleotide
  Sense strand starting at position 3683 of SEQ ID NO: 1561594
auaguuacccguggaaaua

SEQ ID NO: 1683646 - RNA, 19 nt, Artificial Sequence
  Description of Artificial Sequence: Synthetic oligonucleotide
  Antisense strand to SEQ ID NO: 1683645
uauuuccacggguaacuau

SEQ ID NO: 1683647 - RNA, 19 nt, Artificial Sequence
  Description of Artificial Sequence: Synthetic oligonucleotide
  Sense strand starting at position 3684 of SEQ ID NO: 1561594
uaguuacccguggaaauau

SEQ ID NO: 1683648 - RNA, 19 nt, Artificial Sequence
  Description of Artificial Sequence: Synthetic oligonucleotide
  Antisense strand to SEQ ID NO: 1683647
auauuuccacggguaacua

SEQ ID NO: 1683649 - RNA, 19 nt, Artificial Sequence
  Description of Artificial Sequence: Synthetic oligonucleotide
  Sense strand starting at position 3726 of SEQ ID NO: 1561594
gaucuugggcuuugaauuc

SEQ ID NO: 1683650 - RNA, 19 nt, Artificial Sequence
  Description of Artificial Sequence: Synthetic oligonucleotide
  Antisense strand to SEQ ID NO: 1683649
gaauucaaagcccaagauc

SEQ ID NO: 1683651 - RNA, 19 nt, Artificial Sequence
  Description of Artificial Sequence: Synthetic oligonucleotide
  Sense strand starting at position 3766 of SEQ ID NO: 1561594
uccaguugugucuaaauaa

SEQ ID NO: 1683652 - RNA, 19 nt, Artificial Sequence
  Description of Artificial Sequence: Synthetic oligonucleotide
  Antisense strand to SEQ ID NO: 1683651
uuauuuagacacaacugga

SEQ ID NO: 1683653 - RNA, 19 nt, Artificial Sequence
  Description of Artificial Sequence: Synthetic oligonucleotide
  Sense strand starting at position 3898 of SEQ ID NO: 1561594
gcaagugccguuccaguua

SEQ ID NO: 1683654 - RNA, 19 nt, Artificial Sequence
  Description of Artificial Sequence: Synthetic oligonucleotide
  Antisense strand to SEQ ID NO: 1683653
uaacuggaacggcacuugc

SEQ ID NO: 1683655 - RNA, 19 nt, Artificial Sequence
  Description of Artificial Sequence: Synthetic oligonucleotide
  Sense strand starting at position 3907 of SEQ ID NO: 1561594
guuccaguuacuuggcaga

SEQ ID NO: 1683656 - RNA, 19 nt, Artificial Sequence
  Description of Artificial Sequence: Synthetic oligonucleotide
  Antisense strand to SEQ ID NO: 1683655
ucugccaaguaacuggaac

SEQ ID NO: 1683657 - RNA, 19 nt, Artificial Sequence
  Description of Artificial Sequence: Synthetic oligonucleotide
  Sense strand starting at position 109 of SEQ ID NO: 1561595
ccucaauaucagcauguga

SEQ ID NO: 1683658 - RNA, 19 nt, Artificial Sequence
  Description of Artificial Sequence: Synthetic oligonucleotide
  Antisense strand to SEQ ID NO: 1683657
ucacaugcugauauugagg

SEQ ID NO: 1683659 - RNA, 19 nt, Artificial Sequence
  Description of Artificial Sequence: Synthetic oligonucleotide
  Sense strand starting at position 111 of SEQ ID NO: 1561595
ucaauaucagcaugugauu

SEQ ID NO: 1683660 - RNA, 19 nt, Artificial Sequence
  Description of Artificial Sequence: Synthetic oligonucleotide
  Antisense strand to SEQ ID NO: 1683659
aaucacaugcugauauuga

SEQ ID NO: 1683661 - RNA, 19 nt, Artificial Sequence
  Description of Artificial Sequence: Synthetic oligonucleotide
  Sense strand starting at position 136 of SEQ ID NO: 1561595
ccagcaaucugucuccaag

SEQ ID NO: 1683662 - RNA, 19 nt, Artificial Sequence
  Description of Artificial Sequence: Synthetic oligonucleotide
  Antisense strand to SEQ ID NO: 1683661
cuuggagacagauugcugg

SEQ ID NO: 1683663 - RNA, 19 nt, Artificial Sequence
  Description of Artificial Sequence: Synthetic oligonucleotide
  Sense strand starting at position 138 of SEQ ID NO: 1561595
agcaaucugucuccaagaa

SEQ ID NO: 1683664 - RNA, 19 nt, Artificial Sequence
  Description of Artificial Sequence: Synthetic oligonucleotide
  Antisense strand to SEQ ID NO: 1683663
uucuuggagacagauugcu

SEQ ID NO: 1683665 - RNA, 19 nt, Artificial Sequence
  Description of Artificial Sequence: Synthetic oligonucleotide
  Sense strand starting at position 139 of SEQ ID NO: 1561595
gcaaucugucuccaagaaa

SEQ ID NO: 1683666 - RNA, 19 nt, Artificial Sequence
  Description of Artificial Sequence: Synthetic oligonucleotide
  Antisense strand to SEQ ID NO: 1683665
uuucuuggagacagauugc

SEQ ID NO: 1683667 - RNA, 19 nt, Artificial Sequence
  Description of Artificial Sequence: Synthetic oligonucleotide
  Sense strand starting at position 172 of SEQ ID NO: 1561595
ggugaagacaauuguaaug

SEQ ID NO: 1683668 - RNA, 19 nt, Artificial Sequence
  Description of Artificial Sequence: Synthetic oligonucleotide
  Antisense strand to SEQ ID NO: 1683667
cauuacaauugucuucacc

SEQ ID NO: 1683669 - RNA, 19 nt, Artificial Sequence
  Description of Artificial Sequence: Synthetic oligonucleotide
  Sense strand starting at position 282 of SEQ ID NO: 1561595
cagguuguccuaugaaaga

SEQ ID NO: 1683670 - RNA, 19 nt, Artificial Sequence
  Description of Artificial Sequence: Synthetic oligonucleotide
  Antisense strand to SEQ ID NO: 1683669
ucuuucauaggacaaccug

SEQ ID NO: 1683671 - RNA, 19 nt, Artificial Sequence
  Description of Artificial Sequence: Synthetic oligonucleotide
  Sense strand starting at position 304 of SEQ ID NO: 1561595
cgacuuaggagcugauauu

SEQ ID NO: 1683672 - RNA, 19 nt, Artificial Sequence
  Description of Artificial Sequence: Synthetic oligonucleotide
  Antisense strand to SEQ ID NO: 1683671
aauaucagcuccuaagucg

SEQ ID NO: 1683673 - RNA, 19 nt, Artificial Sequence
  Description of Artificial Sequence: Synthetic oligonucleotide
  Sense strand starting at position 351 of SEQ ID NO: 1561595
agcaguuaucuugguuuau

SEQ ID NO: 1683674 - RNA, 19 nt, Artificial Sequence
  Description of Artificial Sequence: Synthetic oligonucleotide
  Antisense strand to SEQ ID NO: 1683673
auaaaccaagauaacugcu

SEQ ID NO: 1683675 - RNA, 19 nt, Artificial Sequence
  Description of Artificial Sequence: Synthetic oligonucleotide
  Sense strand starting at position 352 of SEQ ID NO: 1561595
gcaguuaucuugguuuauu

SEQ ID NO: 1683676 - RNA, 19 nt, Artificial Sequence
  Description of Artificial Sequence: Synthetic oligonucleotide
  Antisense strand to SEQ ID NO: 1683675
aauaaaccaagauaacugc

SEQ ID NO: 1683677 - RNA, 19 nt, Artificial Sequence
  Description of Artificial Sequence: Synthetic oligonucleotide
  Sense strand starting at position 482 of SEQ ID NO: 1561595
agaccuuugugccuaggga

SEQ ID NO: 1683678 - RNA, 19 nt, Artificial Sequence
  Description of Artificial Sequence: Synthetic oligonucleotide
  Antisense strand to SEQ ID NO: 1683677
ucccuaggcacaaaggucu

SEQ ID NO: 1683679 - RNA, 19 nt, Artificial Sequence
  Description of Artificial Sequence: Synthetic oligonucleotide
  Sense strand starting at position 483 of SEQ ID NO: 1561595
gaccuuugugccuagggaa

SEQ ID NO: 1683680 - RNA, 19 nt, Artificial Sequence
  Description of Artificial Sequence: Synthetic oligonucleotide
  Antisense strand to SEQ ID NO: 1683679
uucccuaggcacaaagguc

SEQ ID NO: 1683681 - RNA, 19 nt, Artificial Sequence
  Description of Artificial Sequence: Synthetic oligonucleotide
  Sense strand starting at position 574 of SEQ ID NO: 1561595
gggaaauacuuacaaacag

SEQ ID NO: 1683682 - RNA, 19 nt, Artificial Sequence
  Description of Artificial Sequence: Synthetic oligonucleotide
  Antisense strand to SEQ ID NO: 1683681
cuguuuguaaguauuuccc

SEQ ID NO: 1683683 - RNA, 19 nt, Artificial Sequence
  Description of Artificial Sequence: Synthetic oligonucleotide
  Sense strand starting at position 728 of SEQ ID NO: 1561595
uacugagaaugcccaguaa

SEQ ID NO: 1683684 - RNA, 19 nt, Artificial Sequence
  Description of Artificial Sequence: Synthetic oligonucleotide
  Antisense strand to SEQ ID NO: 1683683
uuacugggcauucucagua

SEQ ID NO: 1683685 - RNA, 19 nt, Artificial Sequence
  Description of Artificial Sequence: Synthetic oligonucleotide
  Sense strand starting at position 835 of SEQ ID NO: 1561595
gccaucuaaugcuuuguca

SEQ ID NO: 1683686 - RNA, 19 nt, Artificial Sequence
  Description of Artificial Sequence: Synthetic oligonucleotide
  Antisense strand to SEQ ID NO: 1683685
ugacaaagcauuagauggc

SEQ ID NO: 1683687 - RNA, 19 nt, Artificial Sequence
  Description of Artificial Sequence: Synthetic oligonucleotide
  Sense strand starting at position 926 of SEQ ID NO: 1561595
agaggaaguuggcauuuga

SEQ ID NO: 1683688 - RNA, 19 nt, Artificial Sequence
  Description of Artificial Sequence: Synthetic oligonucleotide
  Antisense strand to SEQ ID NO: 1683687
ucaaaugccaacuuccucu

SEQ ID NO: 1683689 - RNA, 19 nt, Artificial Sequence
  Description of Artificial Sequence: Synthetic oligonucleotide
  Sense strand starting at position 988 of SEQ ID NO: 1561595
agaguuaggcugcagaaau

SEQ ID NO: 1683690 - RNA, 19 nt, Artificial Sequence
  Description of Artificial Sequence: Synthetic oligonucleotide
  Antisense strand to SEQ ID NO: 1683689
auuucugcagccuaacucu

SEQ ID NO: 1683691 - RNA, 19 nt, Artificial Sequence
  Description of Artificial Sequence: Synthetic oligonucleotide
  Sense strand starting at position 1037 of SEQ ID NO: 1561595
uugggacccaugugaaaca

SEQ ID NO: 1683692 - RNA, 19 nt, Artificial Sequence
  Description of Artificial Sequence: Synthetic oligonucleotide
  Antisense strand to SEQ ID NO: 1683691
uguuucacaugggucccaa

SEQ ID NO: 1683693 - RNA, 19 nt, Artificial Sequence
  Description of Artificial Sequence: Synthetic oligonucleotide
  Sense strand starting at position 1200 of SEQ ID NO: 1561595
augauaaacugccaaguaa

SEQ ID NO: 1683694 - RNA, 19 nt, Artificial Sequence
  Description of Artificial Sequence: Synthetic oligonucleotide
  Antisense strand to SEQ ID NO: 1683693
uuacuuggcaguuuaucau

SEQ ID NO: 1683695 - RNA, 19 nt, Artificial Sequence
  Description of Artificial Sequence: Synthetic oligonucleotide
  Sense strand starting at position 1215 of SEQ ID NO: 1561595
guaaguucugauuacacaa

SEQ ID NO: 1683696 - RNA, 19 nt, Artificial Sequence
  Description of Artificial Sequence: Synthetic oligonucleotide
  Antisense strand to SEQ ID NO: 1683695
uuguguaaucagaacuuac

SEQ ID NO: 1683697 - RNA, 19 nt, Artificial Sequence
  Description of Artificial Sequence: Synthetic oligonucleotide
  Sense strand starting at position 1234 of SEQ ID NO: 1561595
ccaggaaauuucuaggcuu

SEQ ID NO: 1683698 - RNA, 19 nt, Artificial Sequence
  Description of Artificial Sequence: Synthetic oligonucleotide
  Antisense strand to SEQ ID NO: 1683697
aagccuagaaauuuccugg

SEQ ID NO: 1683699 - RNA, 19 nt, Artificial Sequence
  Description of Artificial Sequence: Synthetic oligonucleotide
  Sense strand starting at position 1285 of SEQ ID NO: 1561595
cuaaccgauuacugaauuu

SEQ ID NO: 1683700 - RNA, 19 nt, Artificial Sequence
  Description of Artificial Sequence: Synthetic oligonucleotide
  Antisense strand to SEQ ID NO: 1683699
aaauucaguaaucgguuag

SEQ ID NO: 1683701 - RNA, 19 nt, Artificial Sequence
  Description of Artificial Sequence: Synthetic oligonucleotide
  Sense strand starting at position 1387 of SEQ ID NO: 1561595
ugaaccgcuccuuguuuaa

SEQ ID NO: 1683702 - RNA, 19 nt, Artificial Sequence
  Description of Artificial Sequence: Synthetic oligonucleotide
  Antisense strand to SEQ ID NO: 1683701
uuaaacaaggagcgguuca

SEQ ID NO: 1683703 - RNA, 19 nt, Artificial Sequence
  Description of Artificial Sequence: Synthetic oligonucleotide
  Sense strand starting at position 1390 of SEQ ID NO: 1561595
accgcuccuuguuuaaauu

SEQ ID NO: 1683704 - RNA, 19 nt, Artificial Sequence
  Description of Artificial Sequence: Synthetic oligonucleotide
  Antisense strand to SEQ ID NO: 1683703
aauuuaaacaaggagcggu

SEQ ID NO: 1683705 - RNA, 19 nt, Artificial Sequence
  Description of Artificial Sequence: Synthetic oligonucleotide
  Sense strand starting at position 1408 of SEQ ID NO: 1561595
ucuuaaguacugucgcgau

SEQ ID NO: 1683706 - RNA, 19 nt, Artificial Sequence
  Description of Artificial Sequence: Synthetic oligonucleotide
  Antisense strand to SEQ ID NO: 1683705
aucgcgacaguacuuaaga

SEQ ID NO: 1683707 - RNA, 19 nt, Artificial Sequence
  Description of Artificial Sequence: Synthetic oligonucleotide
  Sense strand starting at position 1412 of SEQ ID NO: 1561595
aaguacugucgcgauaauu

SEQ ID NO: 1683708 - RNA, 19 nt, Artificial Sequence
  Description of Artificial Sequence: Synthetic oligonucleotide
  Antisense strand to SEQ ID NO: 1683707
aauuaucgcgacaguacuu

SEQ ID NO: 1683709 - RNA, 19 nt, Artificial Sequence
  Description of Artificial Sequence: Synthetic oligonucleotide
  Sense strand starting at position 1420 of SEQ ID NO: 1561595
ucgcgauaauucccauaca

SEQ ID NO: 1683710 - RNA, 19 nt, Artificial Sequence
  Description of Artificial Sequence: Synthetic oligonucleotide
  Antisense strand to SEQ ID NO: 1683709
uguaugggaauuaucgcga

SEQ ID NO: 1683711 - RNA, 19 nt, Artificial Sequence
  Description of Artificial Sequence: Synthetic oligonucleotide
  Sense strand starting at position 1875 of SEQ ID NO: 1561595
gcaucuuagcuguggauuc

SEQ ID NO: 1683712 - RNA, 19 nt, Artificial Sequence
  Description of Artificial Sequence: Synthetic oligonucleotide
  Antisense strand to SEQ ID NO: 1683711
gaauccacagcuaagaugc

SEQ ID NO: 1683713 - RNA, 19 nt, Artificial Sequence
  Description of Artificial Sequence: Synthetic oligonucleotide
  Sense strand starting at position 2066 of SEQ ID NO: 1561595
cagcgucucugacuuguua

SEQ ID NO: 1683714 - RNA, 19 nt, Artificial Sequence
  Description of Artificial Sequence: Synthetic oligonucleotide
  Antisense strand to SEQ ID NO: 1683713
uaacaagucagagacgcug

SEQ ID NO: 1683715 - RNA, 19 nt, Artificial Sequence
  Description of Artificial Sequence: Synthetic oligonucleotide
  Sense strand starting at position 2070 of SEQ ID NO: 1561595
gucucugacuuguuaacgu

SEQ ID NO: 1683716 - RNA, 19 nt, Artificial Sequence
  Description of Artificial Sequence: Synthetic oligonucleotide
  Antisense strand to SEQ ID NO: 1683715
acguuaacaagucagagac

SEQ ID NO: 1683717 - RNA, 19 nt, Artificial Sequence
  Description of Artificial Sequence: Synthetic oligonucleotide
  Sense strand starting at position 2078 of SEQ ID NO: 1561595
cuuguuaacguuuaagauc

SEQ ID NO: 1683718 - RNA, 19 nt, Artificial Sequence
  Description of Artificial Sequence: Synthetic oligonucleotide
  Antisense strand to SEQ ID NO: 1683717
gaucuuaaacguuaacaag

SEQ ID NO: 1683719 - RNA, 19 nt, Artificial Sequence
  Description of Artificial Sequence: Synthetic oligonucleotide
  Sense strand starting at position 2131 of SEQ ID NO: 1561595
accaaaugcugggcugaau

SEQ ID NO: 1683720 - RNA, 19 nt, Artificial Sequence
  Description of Artificial Sequence: Synthetic oligonucleotide
  Antisense strand to SEQ ID NO: 1683719
auucagcccagcauuuggu

SEQ ID NO: 1683721 - RNA, 19 nt, Artificial Sequence
  Description of Artificial Sequence: Synthetic oligonucleotide
  Sense strand starting at position 2224 of SEQ ID NO: 1561595
gaggguguuugccuuaaac

SEQ ID NO: 1683722 - RNA, 19 nt, Artificial Sequence
  Description of Artificial Sequence: Synthetic oligonucleotide
  Antisense strand to SEQ ID NO: 1683721
guuuaaggcaaacacccuc

SEQ ID NO: 1683723 - RNA, 19 nt, Artificial Sequence
  Description of Artificial Sequence: Synthetic oligonucleotide
  Sense strand starting at position 2226 of SEQ ID NO: 1561595
ggguguuugccuuaaaccu

SEQ ID NO: 1683724 - RNA, 19 nt, Artificial Sequence
  Description of Artificial Sequence: Synthetic oligonucleotide
  Antisense strand to SEQ ID NO: 1683723
agguuuaaggcaaacaccc

SEQ ID NO: 1683725 - RNA, 19 nt, Artificial Sequence
  Description of Artificial Sequence: Synthetic oligonucleotide
  Sense strand starting at position 2703 of SEQ ID NO: 1561595
uguguuaagauggagucuu

SEQ ID NO: 1683726 - RNA, 19 nt, Artificial Sequence
  Description of Artificial Sequence: Synthetic oligonucleotide
  Antisense strand to SEQ ID NO: 1683725
aagacuccaucuuaacaca

SEQ ID NO: 1683727 - RNA, 19 nt, Artificial Sequence
  Description of Artificial Sequence: Synthetic oligonucleotide
  Sense strand starting at position 2904 of SEQ ID NO: 1561595
gcugaacucccaggugauc

SEQ ID NO: 1683728 - RNA, 19 nt, Artificial Sequence
  Description of Artificial Sequence: Synthetic oligonucleotide
  Antisense strand to SEQ ID NO: 1683727
gaucaccugggaguucagc

SEQ ID NO: 1683729 - RNA, 19 nt, Artificial Sequence
  Description of Artificial Sequence: Synthetic oligonucleotide
  Sense strand starting at position 3692 of SEQ ID NO: 1561595
uugauacgugugggcuauu

SEQ ID NO: 1683730 - RNA, 19 nt, Artificial Sequence
  Description of Artificial Sequence: Synthetic oligonucleotide
  Antisense strand to SEQ ID NO: 1683729
aauagcccacacguaucaa

SEQ ID NO: 1683731 - RNA, 19 nt, Artificial Sequence
  Description of Artificial Sequence: Synthetic oligonucleotide
  Sense strand starting at position 3695 of SEQ ID NO: 1561595
auacgugugggcuauuuau

SEQ ID NO: 1683732 - RNA, 19 nt, Artificial Sequence
  Description of Artificial Sequence: Synthetic oligonucleotide
  Antisense strand to SEQ ID NO: 1683731
auaaauagcccacacguau

SEQ ID NO: 1683733 - RNA, 19 nt, Artificial Sequence
  Description of Artificial Sequence: Synthetic oligonucleotide
  Sense strand starting at position 3733 of SEQ ID NO: 1561595
aaguacugugccugaacca

SEQ ID NO: 1683734 - RNA, 19 nt, Artificial Sequence
  Description of Artificial Sequence: Synthetic oligonucleotide
  Antisense strand to SEQ ID NO: 1683733
ugguucaggcacaguacuu

SEQ ID NO: 1683735 - RNA, 19 nt, Artificial Sequence
  Description of Artificial Sequence: Synthetic oligonucleotide
  Sense strand starting at position 3936 of SEQ ID NO: 1561595
ucucgaguagcugagaauu

SEQ ID NO: 1683736 - RNA, 19 nt, Artificial Sequence
  Description of Artificial Sequence: Synthetic oligonucleotide
  Antisense strand to SEQ ID NO: 1683735
aauucucagcuacucgaga

SEQ ID NO: 1683737 - RNA, 19 nt, Artificial Sequence
  Description of Artificial Sequence: Synthetic oligonucleotide
  Sense strand starting at position 18 of SEQ ID NO: 1561596
agaguuaggcugcaggaau

SEQ ID NO: 1683738 - RNA, 19 nt, Artificial Sequence
  Description of Artificial Sequence: Synthetic oligonucleotide
  Antisense strand to SEQ ID NO: 1683737
auuccugcagccuaacucu

SEQ ID NO: 1683739 - RNA, 19 nt, Artificial Sequence
  Description of Artificial Sequence: Synthetic oligonucleotide
  Sense strand starting at position 53 of SEQ ID NO: 1561596
acauaauacucugcuugag

SEQ ID NO: 1683740 - RNA, 19 nt, Artificial Sequence
  Description of Artificial Sequence: Synthetic oligonucleotide
  Antisense strand to SEQ ID NO: 1683739
cucaagcagaguauuaugu

SEQ ID NO: 1683741 - RNA, 19 nt, Artificial Sequence
  Description of Artificial Sequence: Synthetic oligonucleotide
  Sense strand starting at position 102 of SEQ ID NO: 1561596
ucaucugaggagugugaaa

SEQ ID NO: 1683742 - RNA, 19 nt, Artificial Sequence
  Description of Artificial Sequence: Synthetic oligonucleotide
  Antisense strand to SEQ ID NO: 1683741
uuucacacuccucagauga

SEQ ID NO: 1683743 - RNA, 19 nt, Artificial Sequence
  Description of Artificial Sequence: Synthetic oligonucleotide
  Sense strand starting at position 133 of SEQ ID NO: 1561596
aauuaaguggcaggcaaau

SEQ ID NO: 1683744 - RNA, 19 nt, Artificial Sequence
  Description of Artificial Sequence: Synthetic oligonucleotide
  Antisense strand to SEQ ID NO: 1683743
auuugccugccacuuaauu

SEQ ID NO: 1683745 - RNA, 19 nt, Artificial Sequence
  Description of Artificial Sequence: Synthetic oligonucleotide
  Sense strand starting at position 161 of SEQ ID NO: 1561596
uggcucuagugccugauau

SEQ ID NO: 1683746 - RNA, 19 nt, Artificial Sequence
  Description of Artificial Sequence: Synthetic oligonucleotide
  Antisense strand to SEQ ID NO: 1683745
auaucaggcacuagagcca

SEQ ID NO: 1683747 - RNA, 19 nt, Artificial Sequence
  Description of Artificial Sequence: Synthetic oligonucleotide
  Sense strand starting at position 162 of SEQ ID NO: 1561596
ggcucuagugccugauauc

SEQ ID NO: 1683748 - RNA, 19 nt, Artificial Sequence
  Description of Artificial Sequence: Synthetic oligonucleotide
  Antisense strand to SEQ ID NO: 1683747
gauaucaggcacuagagcc

SEQ ID NO: 1683749 - RNA, 19 nt, Artificial Sequence
  Description of Artificial Sequence: Synthetic oligonucleotide
  Sense strand starting at position 163 of SEQ ID NO: 1561596
gcucuagugccugauaucu

SEQ ID NO: 1683750 - RNA, 19 nt, Artificial Sequence
  Description of Artificial Sequence: Synthetic oligonucleotide
  Antisense strand to SEQ ID NO: 1683749
agauaucaggcacuagagc

SEQ ID NO: 1683751 - RNA, 19 nt, Artificial Sequence
  Description of Artificial Sequence: Synthetic oligonucleotide
  Sense strand starting at position 214 of SEQ ID NO: 1561596
cggucuuguugcccagaau

SEQ ID NO: 1683752 - RNA, 19 nt, Artificial Sequence
  Description of Artificial Sequence: Synthetic oligonucleotide
  Antisense strand to SEQ ID NO: 1683751
auucugggcaacaagaccg

SEQ ID NO: 1683753 - RNA, 19 nt, Artificial Sequence
  Description of Artificial Sequence: Synthetic oligonucleotide
  Sense strand starting at position 215 of SEQ ID NO: 1561596
ggucuuguugcccagaaug

SEQ ID NO: 1683754 - RNA, 19 nt, Artificial Sequence
  Description of Artificial Sequence: Synthetic oligonucleotide
  Antisense strand to SEQ ID NO: 1683753
cauucugggcaacaagacc

SEQ ID NO: 1683755 - RNA, 19 nt, Artificial Sequence
  Description of Artificial Sequence: Synthetic oligonucleotide
  Sense strand starting at position 785 of SEQ ID NO: 1561596
ccgagccaggccugauaau

SEQ ID NO: 1683756 - RNA, 19 nt, Artificial Sequence
  Description of Artificial Sequence: Synthetic oligonucleotide
  Antisense strand to SEQ ID NO: 1683755
auuaucaggccuggcucgg

SEQ ID NO: 1683757 - RNA, 19 nt, Artificial Sequence
  Description of Artificial Sequence: Synthetic oligonucleotide
  Sense strand starting at position 1232 of SEQ ID NO: 1561596
acgggaaauuuccaucuug

SEQ ID NO: 1683758 - RNA, 19 nt, Artificial Sequence
  Description of Artificial Sequence: Synthetic oligonucleotide
  Antisense strand to SEQ ID NO: 1683757
caagauggaaauuucccgu

SEQ ID NO: 1683759 - RNA, 19 nt, Artificial Sequence
  Description of Artificial Sequence: Synthetic oligonucleotide
  Sense strand starting at position 1240 of SEQ ID NO: 1561596
uuuccaucuugauuguaca

SEQ ID NO: 1683760 - RNA, 19 nt, Artificial Sequence
  Description of Artificial Sequence: Synthetic oligonucleotide
  Antisense strand to SEQ ID NO: 1683759
uguacaaucaagauggaaa

SEQ ID NO: 1683761 - RNA, 19 nt, Artificial Sequence
  Description of Artificial Sequence: Synthetic oligonucleotide
  Sense strand starting at position 1261 of SEQ ID NO: 1561596
uuaagaaucuacguaacug

SEQ ID NO: 1683762 - RNA, 19 nt, Artificial Sequence
  Description of Artificial Sequence: Synthetic oligonucleotide
  Antisense strand to SEQ ID NO: 1683761
caguuacguagauucuuaa

SEQ ID NO: 1683763 - RNA, 19 nt, Artificial Sequence
  Description of Artificial Sequence: Synthetic oligonucleotide
  Sense strand starting at position 1417 of SEQ ID NO: 1561596
ccuuuauuacuuuagugau

SEQ ID NO: 1683764 - RNA, 19 nt, Artificial Sequence
  Description of Artificial Sequence: Synthetic oligonucleotide
  Antisense strand to SEQ ID NO: 1683763
aucacuaaaguaauaaagg

SEQ ID NO: 1683765 - RNA, 19 nt, Artificial Sequence
  Description of Artificial Sequence: Synthetic oligonucleotide
  Sense strand starting at position 1558 of SEQ ID NO: 1561596
cugcacaaucugugagaga

SEQ ID NO: 1683766 - RNA, 19 nt, Artificial Sequence
  Description of Artificial Sequence: Synthetic oligonucleotide
  Antisense strand to SEQ ID NO: 1683765
ucucucacagauugugcag

SEQ ID NO: 1683767 - RNA, 19 nt, Artificial Sequence
  Description of Artificial Sequence: Synthetic oligonucleotide
  Sense strand starting at position 1683 of SEQ ID NO: 1561596
ccaucuuauggcugaagga

SEQ ID NO: 1683768 - RNA, 19 nt, Artificial Sequence
  Description of Artificial Sequence: Synthetic oligonucleotide
  Antisense strand to SEQ ID NO: 1683767
uccuucagccauaagaugg

SEQ ID NO: 1683769 - RNA, 19 nt, Artificial Sequence
  Description of Artificial Sequence: Synthetic oligonucleotide
  Sense strand starting at position 1876 of SEQ ID NO: 1561596
agcuguggaucuccaaaua

SEQ ID NO: 1683770 - RNA, 19 nt, Artificial Sequence
  Description of Artificial Sequence: Synthetic oligonucleotide
  Antisense strand to SEQ ID NO: 1683769
uauuuggagauccacagcu

SEQ ID NO: 1683771 - RNA, 19 nt, Artificial Sequence
  Description of Artificial Sequence: Synthetic oligonucleotide
  Sense strand starting at position 2098 of SEQ ID NO: 1561596
gacagaagaugugaucuga

SEQ ID NO: 1683772 - RNA, 19 nt, Artificial Sequence
  Description of Artificial Sequence: Synthetic oligonucleotide
  Antisense strand to SEQ ID NO: 1683771
ucagaucacaucuucuguc

SEQ ID NO: 1683773 - RNA, 19 nt, Artificial Sequence
  Description of Artificial Sequence: Synthetic oligonucleotide
  Sense strand starting at position 2111 of SEQ ID NO: 1561596
aucugaugcugagcugaau

SEQ ID NO: 1683774 - RNA, 19 nt, Artificial Sequence
  Description of Artificial Sequence: Synthetic oligonucleotide
  Antisense strand to SEQ ID NO: 1683773
auucagcucagcaucagau

SEQ ID NO: 1683775 - RNA, 19 nt, Artificial Sequence
  Description of Artificial Sequence: Synthetic oligonucleotide
  Sense strand starting at position 2114 of SEQ ID NO: 1561596
ugaugcugagcugaaugaa

SEQ ID NO: 1683776 - RNA, 19 nt, Artificial Sequence
  Description of Artificial Sequence: Synthetic oligonucleotide
  Antisense strand to SEQ ID NO: 1683775
uucauucagcucagcauca

SEQ ID NO: 1683777 - RNA, 19 nt, Artificial Sequence
  Description of Artificial Sequence: Synthetic oligonucleotide
  Sense strand starting at position 2327 of SEQ ID NO: 1561596
acgagaauugcuuaaacuc

SEQ ID NO: 1683778 - RNA, 19 nt, Artificial Sequence
  Description of Artificial Sequence: Synthetic oligonucleotide
  Antisense strand to SEQ ID NO: 1683777
gaguuuaagcaauucucgu

SEQ ID NO: 1683779 - RNA, 19 nt, Artificial Sequence
  Description of Artificial Sequence: Synthetic oligonucleotide
  Sense strand starting at position 2404 of SEQ ID NO: 1561596
gagcgagauucugucacga

SEQ ID NO: 1683780 - RNA, 19 nt, Artificial Sequence
  Description of Artificial Sequence: Synthetic oligonucleotide
  Antisense strand to SEQ ID NO: 1683779
ucgugacagaaucucgcuc

SEQ ID NO: 1683781 - RNA, 19 nt, Artificial Sequence
  Description of Artificial Sequence: Synthetic oligonucleotide
  Sense strand starting at position 2488 of SEQ ID NO: 1561596
ggcuuccuuccugaacuga

SEQ ID NO: 1683782 - RNA, 19 nt, Artificial Sequence
  Description of Artificial Sequence: Synthetic oligonucleotide
  Antisense strand to SEQ ID NO: 1683781
ucaguucaggaaggaagcc

SEQ ID NO: 1683783 - RNA, 19 nt, Artificial Sequence
  Description of Artificial Sequence: Synthetic oligonucleotide
  Sense strand starting at position 2768 of SEQ ID NO: 1561596
uggaauuuauuguagcaau

SEQ ID NO: 1683784 - RNA, 19 nt, Artificial Sequence
  Description of Artificial Sequence: Synthetic oligonucleotide
  Antisense strand to SEQ ID NO: 1683783
auugcuacaauaaauucca

SEQ ID NO: 1683785 - RNA, 19 nt, Artificial Sequence
  Description of Artificial Sequence: Synthetic oligonucleotide
  Sense strand starting at position 2813 of SEQ ID NO: 1561596
ucaucuuaauacguaagca

SEQ ID NO: 1683786 - RNA, 19 nt, Artificial Sequence
  Description of Artificial Sequence: Synthetic oligonucleotide
  Antisense strand to SEQ ID NO: 1683785
ugcuuacguauuaagauga

SEQ ID NO: 1683787 - RNA, 19 nt, Artificial Sequence
  Description of Artificial Sequence: Synthetic oligonucleotide
  Sense strand starting at position 2941 of SEQ ID NO: 1561596
gcacucagucgccacacau

SEQ ID NO: 1683788 - RNA, 19 nt, Artificial Sequence
  Description of Artificial Sequence: Synthetic oligonucleotide
  Antisense strand to SEQ ID NO: 1683787
auguguggcgacugagugc

SEQ ID NO: 1683789 - RNA, 19 nt, Artificial Sequence
  Description of Artificial Sequence: Synthetic oligonucleotide
  Sense strand starting at position 3219 of SEQ ID NO: 1561596
agaagaaaucucugugucu

SEQ ID NO: 1683790 - RNA, 19 nt, Artificial Sequence
  Description of Artificial Sequence: Synthetic oligonucleotide
  Antisense strand to SEQ ID NO: 1683789
agacacagagauuucuucu

SEQ ID NO: 1683791 - RNA, 19 nt, Artificial Sequence
  Description of Artificial Sequence: Synthetic oligonucleotide
  Sense strand starting at position 3220 of SEQ ID NO: 1561596
gaagaaaucucugugucuu

SEQ ID NO: 1683792 - RNA, 19 nt, Artificial Sequence
  Description of Artificial Sequence: Synthetic oligonucleotide
  Antisense strand to SEQ ID NO: 1683791
aagacacagagauuucuuc

SEQ ID NO: 1683793 - RNA, 19 nt, Artificial Sequence
  Description of Artificial Sequence: Synthetic oligonucleotide
  Sense strand starting at position 3310 of SEQ ID NO: 1561596
cuauuuguccuuggcccua

SEQ ID NO: 1683794 - RNA, 19 nt, Artificial Sequence
  Description of Artificial Sequence: Synthetic oligonucleotide
  Antisense strand to SEQ ID NO: 1683793
uagggccaaggacaaauag

SEQ ID NO: 1683795 - RNA, 19 nt, Artificial Sequence
  Description of Artificial Sequence: Synthetic oligonucleotide
  Sense strand starting at position 3398 of SEQ ID NO: 1561596
augcauacauguccacaua

SEQ ID NO: 1683796 - RNA, 19 nt, Artificial Sequence
  Description of Artificial Sequence: Synthetic oligonucleotide
  Antisense strand to SEQ ID NO: 1683795
uauguggacauguaugcau

SEQ ID NO: 1683797 - RNA, 19 nt, Artificial Sequence
  Description of Artificial Sequence: Synthetic oligonucleotide
  Sense strand starting at position 3399 of SEQ ID NO: 1561596
ugcauacauguccacauau

SEQ ID NO: 1683798 - RNA, 19 nt, Artificial Sequence
  Description of Artificial Sequence: Synthetic oligonucleotide
  Antisense strand to SEQ ID NO: 1683797
auauguggacauguaugca

SEQ ID NO: 1683799 - RNA, 19 nt, Artificial Sequence
  Description of Artificial Sequence: Synthetic oligonucleotide
  Sense strand starting at position 3442 of SEQ ID NO: 1561596
uuacgaggccuccaacuuu

SEQ ID NO: 1683800 - RNA, 19 nt, Artificial Sequence
  Description of Artificial Sequence: Synthetic oligonucleotide
  Antisense strand to SEQ ID NO: 1683799
aaaguuggaggccucguaa

SEQ ID NO: 1683801 - RNA, 19 nt, Artificial Sequence
  Description of Artificial Sequence: Synthetic oligonucleotide
  Sense strand starting at position 3486 of SEQ ID NO: 1561596
uaggguacccacuguuaga

SEQ ID NO: 1683802 - RNA, 19 nt, Artificial Sequence
  Description of Artificial Sequence: Synthetic oligonucleotide
  Antisense strand to SEQ ID NO: 1683801
ucuaacaguggguacccua

SEQ ID NO: 1683803 - RNA, 19 nt, Artificial Sequence
  Description of Artificial Sequence: Synthetic oligonucleotide
  Sense strand starting at position 3514 of SEQ ID NO: 1561596
guaaucaacuugucaauga

SEQ ID NO: 1683804 - RNA, 19 nt, Artificial Sequence
  Description of Artificial Sequence: Synthetic oligonucleotide
  Antisense strand to SEQ ID NO: 1683803
ucauugacaaguugauuac

SEQ ID NO: 1683805 - RNA, 19 nt, Artificial Sequence
  Description of Artificial Sequence: Synthetic oligonucleotide
  Sense strand starting at position 3615 of SEQ ID NO: 1561596
aauugagauggucagcuau

SEQ ID NO: 1683806 - RNA, 19 nt, Artificial Sequence
  Description of Artificial Sequence: Synthetic oligonucleotide
  Antisense strand to SEQ ID NO: 1683805
auagcugaccaucucaauu

SEQ ID NO: 1683807 - RNA, 19 nt, Artificial Sequence
  Description of Artificial Sequence: Synthetic oligonucleotide
  Sense strand starting at position 3891 of SEQ ID NO: 1561596
acuaguacauugucauguu

SEQ ID NO: 1683808 - RNA, 19 nt, Artificial Sequence
  Description of Artificial Sequence: Synthetic oligonucleotide
  Antisense strand to SEQ ID NO: 1683807
aacaugacaauguacuagu

SEQ ID NO: 1683809 - RNA, 19 nt, Artificial Sequence
  Description of Artificial Sequence: Synthetic oligonucleotide
  Sense strand starting at position 3916 of SEQ ID NO: 1561596
uuucuacugcccugaguga

SEQ ID NO: 1683810 - RNA, 19 nt, Artificial Sequence
  Description of Artificial Sequence: Synthetic oligonucleotide
  Antisense strand to SEQ ID NO: 1683809
ucacucagggcaguagaaa

SEQ ID NO: 1683811 - RNA, 19 nt, Artificial Sequence
  Description of Artificial Sequence: Synthetic oligonucleotide
  Sense strand starting at position 3917 of SEQ ID NO: 1561596
uucuacugcccugagugaa

SEQ ID NO: 1683812 - RNA, 19 nt, Artificial Sequence
  Description of Artificial Sequence: Synthetic oligonucleotide
  Antisense strand to SEQ ID NO: 1683811
uucacucagggcaguagaa

SEQ ID NO: 1683813 - RNA, 19 nt, Artificial Sequence
  Description of Artificial Sequence: Synthetic oligonucleotide
  Sense strand starting at position 3920 of SEQ ID NO: 1561596
uacugcccugagugaauaa

SEQ ID NO: 1683814 - RNA, 19 nt, Artificial Sequence
  Description of Artificial Sequence: Synthetic oligonucleotide
  Antisense strand to SEQ ID NO: 1683813
uuauucacucagggcagua

SEQ ID NO: 1683815 - RNA, 19 nt, Artificial Sequence
  Description of Artificial Sequence: Synthetic oligonucleotide
  Sense strand starting at position 3930 of SEQ ID NO: 1561596
agugaauaaggccagcaaa

SEQ ID NO: 1683816 - RNA, 19 nt, Artificial Sequence
  Description of Artificial Sequence: Synthetic oligonucleotide
  Antisense strand to SEQ ID NO: 1683815
uuugcuggccuuauucacu

SEQ ID NO: 1683817 - RNA, 19 nt, Artificial Sequence
  Description of Artificial Sequence: Synthetic oligonucleotide
  Sense strand starting at position 138 of SEQ ID NO: 1561597
accucuaaccuugagcgaa

SEQ ID NO: 1683818 - RNA, 19 nt, Artificial Sequence
  Description of Artificial Sequence: Synthetic oligonucleotide
  Antisense strand to SEQ ID NO: 1683817
uucgcucaagguuagaggu

SEQ ID NO: 1683819 - RNA, 19 nt, Artificial Sequence
  Description of Artificial Sequence: Synthetic oligonucleotide
  Sense strand starting at position 190 of SEQ ID NO: 1561597
gggaucccaugagacauaa

SEQ ID NO: 1683820 - RNA, 19 nt, Artificial Sequence
  Description of Artificial Sequence: Synthetic oligonucleotide
  Antisense strand to SEQ ID NO: 1683819
uuaugucucaugggauccc

SEQ ID NO: 1683821 - RNA, 19 nt, Artificial Sequence
  Description of Artificial Sequence: Synthetic oligonucleotide
  Sense strand starting at position 229 of SEQ ID NO: 1561597
guuggagaacucuauggca

SEQ ID NO: 1683822 - RNA, 19 nt, Artificial Sequence
  Description of Artificial Sequence: Synthetic oligonucleotide
  Antisense strand to SEQ ID NO: 1683821
ugccauagaguucuccaac

SEQ ID NO: 1683823 - RNA, 19 nt, Artificial Sequence
  Description of Artificial Sequence: Synthetic oligonucleotide
  Sense strand starting at position 1998 of SEQ ID NO: 1561597
aggagucaccaggguucua

SEQ ID NO: 1683824 - RNA, 19 nt, Artificial Sequence
  Description of Artificial Sequence: Synthetic oligonucleotide
  Antisense strand to SEQ ID NO: 1683823
uagaacccuggugacuccu

SEQ ID NO: 1683825 - RNA, 19 nt, Artificial Sequence
  Description of Artificial Sequence: Synthetic oligonucleotide
  Sense strand starting at position 2031 of SEQ ID NO: 1561597
cugugacaucgcccugcua

SEQ ID NO: 1683826 - RNA, 19 nt, Artificial Sequence
  Description of Artificial Sequence: Synthetic oligonucleotide
  Antisense strand to SEQ ID NO: 1683825
uagcagggcgaugucacag

SEQ ID NO: 1683827 - RNA, 19 nt, Artificial Sequence
  Description of Artificial Sequence: Synthetic oligonucleotide
  Sense strand starting at position 2033 of SEQ ID NO: 1561597
gugacaucgcccugcuaca

SEQ ID NO: 1683828 - RNA, 19 nt, Artificial Sequence
  Description of Artificial Sequence: Synthetic oligonucleotide
  Antisense strand to SEQ ID NO: 1683827
uguagcagggcgaugucac

SEQ ID NO: 1683829 - RNA, 19 nt, Artificial Sequence
  Description of Artificial Sequence: Synthetic oligonucleotide
  Sense strand starting at position 2046 of SEQ ID NO: 1561597
gcuacauucugucccagga

SEQ ID NO: 1683830 - RNA, 19 nt, Artificial Sequence
  Description of Artificial Sequence: Synthetic oligonucleotide
  Antisense strand to SEQ ID NO: 1683829
uccugggacagaauguagc

SEQ ID NO: 1683831 - RNA, 19 nt, Artificial Sequence
  Description of Artificial Sequence: Synthetic oligonucleotide
  Sense strand starting at position 2094 of SEQ ID NO: 1561597
ggaucauuccuaggucugu

SEQ ID NO: 1683832 - RNA, 19 nt, Artificial Sequence
  Description of Artificial Sequence: Synthetic oligonucleotide
  Antisense strand to SEQ ID NO: 1683831
acagaccuaggaaugaucc

SEQ ID NO: 1683833 - RNA, 19 nt, Artificial Sequence
  Description of Artificial Sequence: Synthetic oligonucleotide
  Sense strand starting at position 2098 of SEQ ID NO: 1561597
cauuccuaggucugugauu

SEQ ID NO: 1683834 - RNA, 19 nt, Artificial Sequence
  Description of Artificial Sequence: Synthetic oligonucleotide
  Antisense strand to SEQ ID NO: 1683833
aaucacagaccuaggaaug

SEQ ID NO: 1683835 - RNA, 19 nt, Artificial Sequence
  Description of Artificial Sequence: Synthetic oligonucleotide
  Sense strand starting at position 2100 of SEQ ID NO: 1561597
uuccuaggucugugauuug

SEQ ID NO: 1683836 - RNA, 19 nt, Artificial Sequence
  Description of Artificial Sequence: Synthetic oligonucleotide
  Antisense strand to SEQ ID NO: 1683835
caaaucacagaccuaggaa

SEQ ID NO: 1683837 - RNA, 19 nt, Artificial Sequence
  Description of Artificial Sequence: Synthetic oligonucleotide
  Sense strand starting at position 2126 of SEQ ID NO: 1561597
ccgggcaagcuuugagaua

SEQ ID NO: 1683838 - RNA, 19 nt, Artificial Sequence
  Description of Artificial Sequence: Synthetic oligonucleotide
  Antisense strand to SEQ ID NO: 1683837
uaucucaaagcuugcccgg

SEQ ID NO: 1683839 - RNA, 19 nt, Artificial Sequence
  Description of Artificial Sequence: Synthetic oligonucleotide
  Sense strand starting at position 2127 of SEQ ID NO: 1561597
cgggcaagcuuugagauaa

SEQ ID NO: 1683840 - RNA, 19 nt, Artificial Sequence
  Description of Artificial Sequence: Synthetic oligonucleotide
  Antisense strand to SEQ ID NO: 1683839
uuaucucaaagcuugcccg

SEQ ID NO: 1683841 - RNA, 19 nt, Artificial Sequence
  Description of Artificial Sequence: Synthetic oligonucleotide
  Sense strand starting at position 2139 of SEQ ID NO: 1561597
gagauaacuucuugaaggc

SEQ ID NO: 1683842 - RNA, 19 nt, Artificial Sequence
  Description of Artificial Sequence: Synthetic oligonucleotide
  Antisense strand to SEQ ID NO: 1683841
gccuucaagaaguuaucuc

SEQ ID NO: 1683843 - RNA, 19 nt, Artificial Sequence
  Description of Artificial Sequence: Synthetic oligonucleotide
  Sense strand starting at position 2160 of SEQ ID NO: 1561597
aggguaucuuuggacccaa

SEQ ID NO: 1683844 - RNA, 19 nt, Artificial Sequence
  Description of Artificial Sequence: Synthetic oligonucleotide
  Antisense strand to SEQ ID NO: 1683843
uuggguccaaagauacccu

SEQ ID NO: 1683845 - RNA, 19 nt, Artificial Sequence
  Description of Artificial Sequence: Synthetic oligonucleotide
  Sense strand starting at position 2270 of SEQ ID NO: 1561597
ggagguuccuagcaacaca

SEQ ID NO: 1683846 - RNA, 19 nt, Artificial Sequence
  Description of Artificial Sequence: Synthetic oligonucleotide
  Antisense strand to SEQ ID NO: 1683845
uguguugcuaggaaccucc

SEQ ID NO: 1683847 - RNA, 19 nt, Artificial Sequence
  Description of Artificial Sequence: Synthetic oligonucleotide
  Sense strand starting at position 2303 of SEQ ID NO: 1561597
auguuacccuugucugaga

SEQ ID NO: 1683848 - RNA, 19 nt, Artificial Sequence
  Description of Artificial Sequence: Synthetic oligonucleotide
  Antisense strand to SEQ ID NO: 1683847
ucucagacaaggguaacau

SEQ ID NO: 1683849 - RNA, 19 nt, Artificial Sequence
  Description of Artificial Sequence: Synthetic oligonucleotide
  Sense strand starting at position 2305 of SEQ ID NO: 1561597
guuacccuugucugagacu

SEQ ID NO: 1683850 - RNA, 19 nt, Artificial Sequence
  Description of Artificial Sequence: Synthetic oligonucleotide
  Antisense strand to SEQ ID NO: 1683849
agucucagacaaggguaac

SEQ ID NO: 1683851 - RNA, 19 nt, Artificial Sequence
  Description of Artificial Sequence: Synthetic oligonucleotide
  Sense strand starting at position 2363 of SEQ ID NO: 1561597
caaugagaucagugcuuaa

SEQ ID NO: 1683852 - RNA, 19 nt, Artificial Sequence
  Description of Artificial Sequence: Synthetic oligonucleotide
  Antisense strand to SEQ ID NO: 1683851
uuaagcacugaucucauug

SEQ ID NO: 1683853 - RNA, 19 nt, Artificial Sequence
  Description of Artificial Sequence: Synthetic oligonucleotide
  Sense strand starting at position 2553 of SEQ ID NO: 1561597
caggucugaguccauauau

SEQ ID NO: 1683854 - RNA, 19 nt, Artificial Sequence
  Description of Artificial Sequence: Synthetic oligonucleotide
  Antisense strand to SEQ ID NO: 1683853
auauauggacucagaccug

SEQ ID NO: 1683855 - RNA, 19 nt, Artificial Sequence
  Description of Artificial Sequence: Synthetic oligonucleotide
  Sense strand starting at position 2845 of SEQ ID NO: 1561597
ggauuucugucucugccau

SEQ ID NO: 1683856 - RNA, 19 nt, Artificial Sequence
  Description of Artificial Sequence: Synthetic oligonucleotide
  Antisense strand to SEQ ID NO: 1683855
auggcagagacagaaaucc

SEQ ID NO: 1683857 - RNA, 19 nt, Artificial Sequence
  Description of Artificial Sequence: Synthetic oligonucleotide
  Sense strand starting at position 2864 of SEQ ID NO: 1561597
ucauaagcuguaugacauc

SEQ ID NO: 1683858 - RNA, 19 nt, Artificial Sequence
  Description of Artificial Sequence: Synthetic oligonucleotide
  Antisense strand to SEQ ID NO: 1683857
gaugucauacagcuuauga

SEQ ID NO: 1683859 - RNA, 19 nt, Artificial Sequence
  Description of Artificial Sequence: Synthetic oligonucleotide
  Sense strand starting at position 2870 of SEQ ID NO: 1561597
gcuguaugacaucagcuaa

SEQ ID NO: 1683860 - RNA, 19 nt, Artificial Sequence
  Description of Artificial Sequence: Synthetic oligonucleotide
  Antisense strand to SEQ ID NO: 1683859
uuagcugaugucauacagc

SEQ ID NO: 1683861 - RNA, 19 nt, Artificial Sequence
  Description of Artificial Sequence: Synthetic oligonucleotide
  Sense strand starting at position 2925 of SEQ ID NO: 1561597
guaacauagucuuucccau

SEQ ID NO: 1683862 - RNA, 19 nt, Artificial Sequence
  Description of Artificial Sequence: Synthetic oligonucleotide
  Antisense strand to SEQ ID NO: 1683861
augggaaagacuauguuac

SEQ ID NO: 1683863 - RNA, 19 nt, Artificial Sequence
  Description of Artificial Sequence: Synthetic oligonucleotide
  Sense strand starting at position 3041 of SEQ ID NO: 1561597
cucugaagccuggaugauu

SEQ ID NO: 1683864 - RNA, 19 nt, Artificial Sequence
  Description of Artificial Sequence: Synthetic oligonucleotide
  Antisense strand to SEQ ID NO: 1683863
aaucauccaggcuucagag

SEQ ID NO: 1683865 - RNA, 19 nt, Artificial Sequence
  Description of Artificial Sequence: Synthetic oligonucleotide
  Sense strand starting at position 3060 of SEQ ID NO: 1561597
ugcaaugucccagaggcau

SEQ ID NO: 1683866 - RNA, 19 nt, Artificial Sequence
  Description of Artificial Sequence: Synthetic oligonucleotide
  Antisense strand to SEQ ID NO: 1683865
augccucugggacauugca

SEQ ID NO: 1683867 - RNA, 19 nt, Artificial Sequence
  Description of Artificial Sequence: Synthetic oligonucleotide
  Sense strand starting at position 3071 of SEQ ID NO: 1561597
agaggcaucuugcuuuguu

SEQ ID NO: 1683868 - RNA, 19 nt, Artificial Sequence
  Description of Artificial Sequence: Synthetic oligonucleotide
  Antisense strand to SEQ ID NO: 1683867
aacaaagcaagaugccucu

SEQ ID NO: 1683869 - RNA, 19 nt, Artificial Sequence
  Description of Artificial Sequence: Synthetic oligonucleotide
  Sense strand starting at position 3164 of SEQ ID NO: 1561597
gcugacuacuuagucuuua

SEQ ID NO: 1683870 - RNA, 19 nt, Artificial Sequence
  Description of Artificial Sequence: Synthetic oligonucleotide
  Antisense strand to SEQ ID NO: 1683869
uaaagacuaaguagucagc

SEQ ID NO: 1683871 - RNA, 19 nt, Artificial Sequence
  Description of Artificial Sequence: Synthetic oligonucleotide
  Sense strand starting at position 3168 of SEQ ID NO: 1561597
acuacuuagucuuuagauu

SEQ ID NO: 1683872 - RNA, 19 nt, Artificial Sequence
  Description of Artificial Sequence: Synthetic oligonucleotide
  Antisense strand to SEQ ID NO: 1683871
aaucuaaagacuaaguagu

SEQ ID NO: 1683873 - RNA, 19 nt, Artificial Sequence
  Description of Artificial Sequence: Synthetic oligonucleotide
  Sense strand starting at position 3270 of SEQ ID NO: 1561597
ucccucuuaugggacaaau

SEQ ID NO: 1683874 - RNA, 19 nt, Artificial Sequence
  Description of Artificial Sequence: Synthetic oligonucleotide
  Antisense strand to SEQ ID NO: 1683873
auuugucccauaagaggga

SEQ ID NO: 1683875 - RNA, 19 nt, Artificial Sequence
  Description of Artificial Sequence: Synthetic oligonucleotide
  Sense strand starting at position 3289 of SEQ ID NO: 1561597
cgaaguauguucuaccaua

SEQ ID NO: 1683876 - RNA, 19 nt, Artificial Sequence
  Description of Artificial Sequence: Synthetic oligonucleotide
  Antisense strand to SEQ ID NO: 1683875
uaugguagaacauacuucg

SEQ ID NO: 1683877 - RNA, 19 nt, Artificial Sequence
  Description of Artificial Sequence: Synthetic oligonucleotide
  Sense strand starting at position 3326 of SEQ ID NO: 1561597
ucgaaugagcuccauaagu

SEQ ID NO: 1683878 - RNA, 19 nt, Artificial Sequence
  Description of Artificial Sequence: Synthetic oligonucleotide
  Antisense strand to SEQ ID NO: 1683877
acuuauggagcucauucga

SEQ ID NO: 1683879 - RNA, 19 nt, Artificial Sequence
  Description of Artificial Sequence: Synthetic oligonucleotide
  Sense strand starting at position 3328 of SEQ ID NO: 1561597
gaaugagcuccauaaguca

SEQ ID NO: 1683880 - RNA, 19 nt, Artificial Sequence
  Description of Artificial Sequence: Synthetic oligonucleotide
  Antisense strand to SEQ ID NO: 1683879
ugacuuauggagcucauuc

SEQ ID NO: 1683881 - RNA, 19 nt, Artificial Sequence
  Description of Artificial Sequence: Synthetic oligonucleotide
  Sense strand starting at position 3353 of SEQ ID NO: 1561597
ccaguacugucuugucaau

SEQ ID NO: 1683882 - RNA, 19 nt, Artificial Sequence
  Description of Artificial Sequence: Synthetic oligonucleotide
  Antisense strand to SEQ ID NO: 1683881
auugacaagacaguacugg

SEQ ID NO: 1683883 - RNA, 19 nt, Artificial Sequence
  Description of Artificial Sequence: Synthetic oligonucleotide
  Sense strand starting at position 3355 of SEQ ID NO: 1561597
aguacugucuugucaauga

SEQ ID NO: 1683884 - RNA, 19 nt, Artificial Sequence
  Description of Artificial Sequence: Synthetic oligonucleotide
  Antisense strand to SEQ ID NO: 1683883
ucauugacaagacaguacu

SEQ ID NO: 1683885 - RNA, 19 nt, Artificial Sequence
  Description of Artificial Sequence: Synthetic oligonucleotide
  Sense strand starting at position 3529 of SEQ ID NO: 1561597
uggaccuuauuuggaaaua

SEQ ID NO: 1683886 - RNA, 19 nt, Artificial Sequence
  Description of Artificial Sequence: Synthetic oligonucleotide
  Antisense strand to SEQ ID NO: 1683885
uauuuccaaauaaggucca

SEQ ID NO: 1683887 - RNA, 19 nt, Artificial Sequence
  Description of Artificial Sequence: Synthetic oligonucleotide
  Sense strand starting at position 3547 of SEQ ID NO: 1561597
aagaucuuugcagagguuu

SEQ ID NO: 1683888 - RNA, 19 nt, Artificial Sequence
  Description of Artificial Sequence: Synthetic oligonucleotide
  Antisense strand to SEQ ID NO: 1683887
aaaccucugcaaagaucuu

SEQ ID NO: 1683889 - RNA, 19 nt, Artificial Sequence
  Description of Artificial Sequence: Synthetic oligonucleotide
  Sense strand starting at position 128 of SEQ ID NO: 1561598
aagacaucuuuaggaagga

SEQ ID NO: 1683890 - RNA, 19 nt, Artificial Sequence
  Description of Artificial Sequence: Synthetic oligonucleotide
  Antisense strand to SEQ ID NO: 1683889
uccuuccuaaagaugucuu

SEQ ID NO: 1683891 - RNA, 19 nt, Artificial Sequence
  Description of Artificial Sequence: Synthetic oligonucleotide
  Sense strand starting at position 129 of SEQ ID NO: 1561598
agacaucuuuaggaaggau

SEQ ID NO: 1683892 - RNA, 19 nt, Artificial Sequence
  Description of Artificial Sequence: Synthetic oligonucleotide
  Antisense strand to SEQ ID NO: 1683891
auccuuccuaaagaugucu

SEQ ID NO: 1683893 - RNA, 19 nt, Artificial Sequence
  Description of Artificial Sequence: Synthetic oligonucleotide
  Sense strand starting at position 161 of SEQ ID NO: 1561598
ggaaaugcuuaugacaagu

SEQ ID NO: 1683894 - RNA, 19 nt, Artificial Sequence
  Description of Artificial Sequence: Synthetic oligonucleotide
  Antisense strand to SEQ ID NO: 1683893
acuugucauaagcauuucc

SEQ ID NO: 1683895 - RNA, 19 nt, Artificial Sequence
  Description of Artificial Sequence: Synthetic oligonucleotide
  Sense strand starting at position 333 of SEQ ID NO: 1561598
ccaucuucgagucagcgua

SEQ ID NO: 1683896 - RNA, 19 nt, Artificial Sequence
  Description of Artificial Sequence: Synthetic oligonucleotide
  Antisense strand to SEQ ID NO: 1683895
uacgcugacucgaagaugg

SEQ ID NO: 1683897 - RNA, 19 nt, Artificial Sequence
  Description of Artificial Sequence: Synthetic oligonucleotide
  Sense strand starting at position 635 of SEQ ID NO: 1561598
aggagaugcuaaguuuauc

SEQ ID NO: 1683898 - RNA, 19 nt, Artificial Sequence
  Description of Artificial Sequence: Synthetic oligonucleotide
  Antisense strand to SEQ ID NO: 1683897
gauaaacuuagcaucuccu

SEQ ID NO: 1683899 - RNA, 19 nt, Artificial Sequence
  Description of Artificial Sequence: Synthetic oligonucleotide
  Sense strand starting at position 640 of SEQ ID NO: 1561598
augcuaaguuuaucaggga

SEQ ID NO: 1683900 - RNA, 19 nt, Artificial Sequence
  Description of Artificial Sequence: Synthetic oligonucleotide
  Antisense strand to SEQ ID NO: 1683899
ucccugauaaacuuagcau

SEQ ID NO: 1683901 - RNA, 19 nt, Artificial Sequence
  Description of Artificial Sequence: Synthetic oligonucleotide
  Sense strand starting at position 662 of SEQ ID NO: 1561598
ggguaaagaggaggucuua

SEQ ID NO: 1683902 - RNA, 19 nt, Artificial Sequence
  Description of Artificial Sequence: Synthetic oligonucleotide
  Antisense strand to SEQ ID NO: 1683901
uaagaccuccucuuuaccc

SEQ ID NO: 1683903 - RNA, 19 nt, Artificial Sequence
  Description of Artificial Sequence: Synthetic oligonucleotide
  Sense strand starting at position 758 of SEQ ID NO: 1561598
gguaccugagcugaugaga

SEQ ID NO: 1683904 - RNA, 19 nt, Artificial Sequence
  Description of Artificial Sequence: Synthetic oligonucleotide
  Antisense strand to SEQ ID NO: 1683903
ucucaucagcucagguacc

SEQ ID NO: 1683905 - RNA, 19 nt, Artificial Sequence
  Description of Artificial Sequence: Synthetic oligonucleotide
  Sense strand starting at position 910 of SEQ ID NO: 1561598
cuagaagucuacuuuggua

SEQ ID NO: 1683906 - RNA, 19 nt, Artificial Sequence
  Description of Artificial Sequence: Synthetic oligonucleotide
  Antisense strand to SEQ ID NO: 1683905
uaccaaaguagacuucuag

SEQ ID NO: 1683907 - RNA, 19 nt, Artificial Sequence
  Description of Artificial Sequence: Synthetic oligonucleotide
  Sense strand starting at position 964 of SEQ ID NO: 1561598
gagagagugucacuuggag

SEQ ID NO: 1683908 - RNA, 19 nt, Artificial Sequence
  Description of Artificial Sequence: Synthetic oligonucleotide
  Antisense strand to SEQ ID NO: 1683907
cuccaagugacacucucuc

SEQ ID NO: 1683909 - RNA, 19 nt, Artificial Sequence
  Description of Artificial Sequence: Synthetic oligonucleotide
  Sense strand starting at position 982 of SEQ ID NO: 1561598
gggcucagugccuguggaa

SEQ ID NO: 1683910 - RNA, 19 nt, Artificial Sequence
  Description of Artificial Sequence: Synthetic oligonucleotide
  Antisense strand to SEQ ID NO: 1683909
uuccacaggcacugagccc

SEQ ID NO: 1683911 - RNA, 19 nt, Artificial Sequence
  Description of Artificial Sequence: Synthetic oligonucleotide
  Sense strand starting at position 1091 of SEQ ID NO: 1561598
gccggaugcuuagugacau

SEQ ID NO: 1683912 - RNA, 19 nt, Artificial Sequence
  Description of Artificial Sequence: Synthetic oligonucleotide
  Antisense strand to SEQ ID NO: 1683911
augucacuaagcauccggc

SEQ ID NO: 1683913 - RNA, 19 nt, Artificial Sequence
  Description of Artificial Sequence: Synthetic oligonucleotide
  Sense strand starting at position 1141 of SEQ ID NO: 1561598
ugguucuggcuuugagaag

SEQ ID NO: 1683914 - RNA, 19 nt, Artificial Sequence
  Description of Artificial Sequence: Synthetic oligonucleotide
  Antisense strand to SEQ ID NO: 1683913
cuucucaaagccagaacca

SEQ ID NO: 1683915 - RNA, 19 nt, Artificial Sequence
  Description of Artificial Sequence: Synthetic oligonucleotide
  Sense strand starting at position 1207 of SEQ ID NO: 1561598
ggaguuccauaauaaacga

SEQ ID NO: 1683916 - RNA, 19 nt, Artificial Sequence
  Description of Artificial Sequence: Synthetic oligonucleotide
  Antisense strand to SEQ ID NO: 1683915
ucguuuauuauggaacucc

SEQ ID NO: 1683917 - RNA, 19 nt, Artificial Sequence
  Description of Artificial Sequence: Synthetic oligonucleotide
  Sense strand starting at position 1478 of SEQ ID NO: 1561598
gcuguucaggagggagaua

SEQ ID NO: 1683918 - RNA, 19 nt, Artificial Sequence
  Description of Artificial Sequence: Synthetic oligonucleotide
  Antisense strand to SEQ ID NO: 1683917
uaucucccuccugaacagc

SEQ ID NO: 1683919 - RNA, 19 nt, Artificial Sequence
  Description of Artificial Sequence: Synthetic oligonucleotide
  Sense strand starting at position 2322 of SEQ ID NO: 1561598
uuauacaguguccaagagu

SEQ ID NO: 1683920 - RNA, 19 nt, Artificial Sequence
  Description of Artificial Sequence: Synthetic oligonucleotide
  Antisense strand to SEQ ID NO: 1683919
acucuuggacacuguauaa

SEQ ID NO: 1683921 - RNA, 19 nt, Artificial Sequence
  Description of Artificial Sequence: Synthetic oligonucleotide
  Sense strand starting at position 2325 of SEQ ID NO: 1561598
uacaguguccaagaguagu

SEQ ID NO: 1683922 - RNA, 19 nt, Artificial Sequence
  Description of Artificial Sequence: Synthetic oligonucleotide
  Antisense strand to SEQ ID NO: 1683921
acuacucuuggacacugua

SEQ ID NO: 1683923 - RNA, 19 nt, Artificial Sequence
  Description of Artificial Sequence: Synthetic oligonucleotide
  Sense strand starting at position 2333 of SEQ ID NO: 1561598
ccaagaguaguauguuaaa

SEQ ID NO: 1683924 - RNA, 19 nt, Artificial Sequence
  Description of Artificial Sequence: Synthetic oligonucleotide
  Antisense strand to SEQ ID NO: 1683923
uuuaacauacuacucuugg

SEQ ID NO: 1683925 - RNA, 19 nt, Artificial Sequence
  Description of Artificial Sequence: Synthetic oligonucleotide
  Sense strand starting at position 2403 of SEQ ID NO: 1561598
ucgccacucuuagcaaaua

SEQ ID NO: 1683926 - RNA, 19 nt, Artificial Sequence
  Description of Artificial Sequence: Synthetic oligonucleotide
  Antisense strand to SEQ ID NO: 1683925
uauuugcuaagaguggcga

SEQ ID NO: 1683927 - RNA, 19 nt, Artificial Sequence
  Description of Artificial Sequence: Synthetic oligonucleotide
  Sense strand starting at position 3130 of SEQ ID NO: 1561598
guaucaauguguccuauau

SEQ ID NO: 1683928 - RNA, 19 nt, Artificial Sequence
  Description of Artificial Sequence: Synthetic oligonucleotide
  Antisense strand to SEQ ID NO: 1683927
auauaggacacauugauac

SEQ ID NO: 1683929 - RNA, 19 nt, Artificial Sequence
  Description of Artificial Sequence: Synthetic oligonucleotide
  Sense strand starting at position 3132 of SEQ ID NO: 1561598
aucaauguguccuauauuu

SEQ ID NO: 1683930 - RNA, 19 nt, Artificial Sequence
  Description of Artificial Sequence: Synthetic oligonucleotide
  Antisense strand to SEQ ID NO: 1683929
aaauauaggacacauugau

SEQ ID NO: 1683931 - RNA, 19 nt, Artificial Sequence
  Description of Artificial Sequence: Synthetic oligonucleotide
  Sense strand starting at position 3222 of SEQ ID NO: 1561598
aaccaugugccagaauagu

SEQ ID NO: 1683932 - RNA, 19 nt, Artificial Sequence
  Description of Artificial Sequence: Synthetic oligonucleotide
  Antisense strand to SEQ ID NO: 1683931
acuauucuggcacaugguu

SEQ ID NO: 1683933 - RNA, 19 nt, Artificial Sequence
  Description of Artificial Sequence: Synthetic oligonucleotide
  Sense strand starting at position 3320 of SEQ ID NO: 1561598
gacugagcucaggauagcu

SEQ ID NO: 1683934 - RNA, 19 nt, Artificial Sequence
  Description of Artificial Sequence: Synthetic oligonucleotide
  Antisense strand to SEQ ID NO: 1683933
agcuauccugagcucaguc

SEQ ID NO: 1683935 - RNA, 19 nt, Artificial Sequence
  Description of Artificial Sequence: Synthetic oligonucleotide
  Sense strand starting at position 3339 of SEQ ID NO: 1561598
gaagcugcucauugcugaa

SEQ ID NO: 1683936 - RNA, 19 nt, Artificial Sequence
  Description of Artificial Sequence: Synthetic oligonucleotide
  Antisense strand to SEQ ID NO: 1683935
uucagcaaugagcagcuuc

SEQ ID NO: 1683937 - RNA, 19 nt, Artificial Sequence
  Description of Artificial Sequence: Synthetic oligonucleotide
  Sense strand starting at position 3432 of SEQ ID NO: 1561598
cuguuuauugagggccuau

SEQ ID NO: 1683938 - RNA, 19 nt, Artificial Sequence
  Description of Artificial Sequence: Synthetic oligonucleotide
  Antisense strand to SEQ ID NO: 1683937
auaggcccucaauaaacag

SEQ ID NO: 1683939 - RNA, 19 nt, Artificial Sequence
  Description of Artificial Sequence: Synthetic oligonucleotide
  Sense strand starting at position 3510 of SEQ ID NO: 1561598
gggcuuuagucccuuggaa

SEQ ID NO: 1683940 - RNA, 19 nt, Artificial Sequence
  Description of Artificial Sequence: Synthetic oligonucleotide
  Antisense strand to SEQ ID NO: 1683939
uuccaagggacuaaagccc

SEQ ID NO: 1683941 - RNA, 19 nt, Artificial Sequence
  Description of Artificial Sequence: Synthetic oligonucleotide
  Sense strand starting at position 3617 of SEQ ID NO: 1561598
gauuaagagucccaggagu

SEQ ID NO: 1683942 - RNA, 19 nt, Artificial Sequence
  Description of Artificial Sequence: Synthetic oligonucleotide
  Antisense strand to SEQ ID NO: 1683941
acuccugggacucuuaauc

SEQ ID NO: 1683943 - RNA, 19 nt, Artificial Sequence
  Description of Artificial Sequence: Synthetic oligonucleotide
  Sense strand starting at position 3651 of SEQ ID NO: 1561598
ggcugccucagcuggauaa

SEQ ID NO: 1683944 - RNA, 19 nt, Artificial Sequence
  Description of Artificial Sequence: Synthetic oligonucleotide
  Antisense strand to SEQ ID NO: 1683943
uuauccagcugaggcagcc

SEQ ID NO: 1683945 - RNA, 19 nt, Artificial Sequence
  Description of Artificial Sequence: Synthetic oligonucleotide
  Sense strand starting at position 3652 of SEQ ID NO: 1561598
gcugccucagcuggauaau

SEQ ID NO: 1683946 - RNA, 19 nt, Artificial Sequence
  Description of Artificial Sequence: Synthetic oligonucleotide
  Antisense strand to SEQ ID NO: 1683945
auuauccagcugaggcagc

SEQ ID NO: 1683947 - RNA, 19 nt, Artificial Sequence
  Description of Artificial Sequence: Synthetic oligonucleotide
  Sense strand starting at position 3730 of SEQ ID NO: 1561598
augccacuuugugcagaaa

SEQ ID NO: 1683948 - RNA, 19 nt, Artificial Sequence
  Description of Artificial Sequence: Synthetic oligonucleotide
  Antisense strand to SEQ ID NO: 1683947
uuucugcacaaaguggcau

SEQ ID NO: 1683949 - RNA, 19 nt, Artificial Sequence
  Description of Artificial Sequence: Synthetic oligonucleotide
  Sense strand starting at position 3733 of SEQ ID NO: 1561598
ccacuuugugcagaaacca

SEQ ID NO: 1683950 - RNA, 19 nt, Artificial Sequence
  Description of Artificial Sequence: Synthetic oligonucleotide
  Antisense strand to SEQ ID NO: 1683949
ugguuucugcacaaagugg

SEQ ID NO: 1683951 - RNA, 19 nt, Artificial Sequence
  Description of Artificial Sequence: Synthetic oligonucleotide
  Sense strand starting at position 3773 of SEQ ID NO: 1561598
gugcuaagggcuuauuauu

SEQ ID NO: 1683952 - RNA, 19 nt, Artificial Sequence
  Description of Artificial Sequence: Synthetic oligonucleotide
  Antisense strand to SEQ ID NO: 1683951
aauaauaagcccuuagcac

SEQ ID NO: 1683953 - RNA, 19 nt, Artificial Sequence
  Description of Artificial Sequence: Synthetic oligonucleotide
  Sense strand starting at position 3873 of SEQ ID NO: 1561598
gaaggcucaugugugcauu

SEQ ID NO: 1683954 - RNA, 19 nt, Artificial Sequence
  Description of Artificial Sequence: Synthetic oligonucleotide
  Antisense strand to SEQ ID NO: 1683953
aaugcacacaugagccuuc

SEQ ID NO: 1683955 - RNA, 19 nt, Artificial Sequence
  Description of Artificial Sequence: Synthetic oligonucleotide
  Sense strand starting at position 3875 of SEQ ID NO: 1561598
aggcucaugugugcauuua

SEQ ID NO: 1683956 - RNA, 19 nt, Artificial Sequence
  Description of Artificial Sequence: Synthetic oligonucleotide
  Antisense strand to SEQ ID NO: 1683955
uaaaugcacacaugagccu

SEQ ID NO: 1683957 - RNA, 19 nt, Artificial Sequence
  Description of Artificial Sequence: Synthetic oligonucleotide
  Sense strand starting at position 3876 of SEQ ID NO: 1561598
ggcucaugugugcauuuau

SEQ ID NO: 1683958 - RNA, 19 nt, Artificial Sequence
  Description of Artificial Sequence: Synthetic oligonucleotide
  Antisense strand to SEQ ID NO: 1683957
auaaaugcacacaugagcc

SEQ ID NO: 1683959 - RNA, 19 nt, Artificial Sequence
  Description of Artificial Sequence: Synthetic oligonucleotide
  Sense strand starting at position 3900 of SEQ ID NO: 1561598
ccacccauuugggaaaucu

SEQ ID NO: 1683960 - RNA, 19 nt, Artificial Sequence
  Description of Artificial Sequence: Synthetic oligonucleotide
  Antisense strand to SEQ ID NO: 1683959
agauuucccaaaugggugg

SEQ ID NO: 1683961 - RNA, 19 nt, Artificial Sequence
  Description of Artificial Sequence: Synthetic oligonucleotide
  Sense strand starting at position 3933 of SEQ ID NO: 1561598
cugacuuagucugucucua

SEQ ID NO: 1683962 - RNA, 19 nt, Artificial Sequence
  Description of Artificial Sequence: Synthetic oligonucleotide
  Antisense strand to SEQ ID NO: 1683961
uagagacagacuaagucag

SEQ ID NO: 1683963 - RNA, 19 nt, Artificial Sequence
  Description of Artificial Sequence: Synthetic oligonucleotide
  Sense strand starting at position 3935 of SEQ ID NO: 1561598
gacuuagucugucucuaga

SEQ ID NO: 1683964 - RNA, 19 nt, Artificial Sequence
  Description of Artificial Sequence: Synthetic oligonucleotide
  Antisense strand to SEQ ID NO: 1683963
ucuagagacagacuaaguc

SEQ ID NO: 1683965 - RNA, 19 nt, Artificial Sequence
  Description of Artificial Sequence: Synthetic oligonucleotide
  Sense strand starting at position 3937 of SEQ ID NO: 1561598
cuuagucugucucuagagu

SEQ ID NO: 1683966 - RNA, 19 nt, Artificial Sequence
  Description of Artificial Sequence: Synthetic oligonucleotide
  Antisense strand to SEQ ID NO: 1683965
acucuagagacagacuaag

SEQ ID NO: 1683967 - RNA, 19 nt, Artificial Sequence
  Description of Artificial Sequence: Synthetic oligonucleotide
  Sense strand starting at position 3983 of SEQ ID NO: 1561598
cugguaacucuagauccau

SEQ ID NO: 1683968 - RNA, 19 nt, Artificial Sequence
  Description of Artificial Sequence: Synthetic oligonucleotide
  Antisense strand to SEQ ID NO: 1683967
auggaucuagaguuaccag

SEQ ID NO: 1683969 - RNA, 19 nt, Artificial Sequence
  Description of Artificial Sequence: Synthetic oligonucleotide
  Sense strand starting at position 14 of SEQ ID NO: 1561599
ggcauucugguaugggaau

SEQ ID NO: 1683970 - RNA, 19 nt, Artificial Sequence
  Description of Artificial Sequence: Synthetic oligonucleotide
  Antisense strand to SEQ ID NO: 1683969
auucccauaccagaaugcc

SEQ ID NO: 1683971 - RNA, 19 nt, Artificial Sequence
  Description of Artificial Sequence: Synthetic oligonucleotide
  Sense strand starting at position 42 of SEQ ID NO: 1561599
acugcagaaucugucacua

SEQ ID NO: 1683972 - RNA, 19 nt, Artificial Sequence
  Description of Artificial Sequence: Synthetic oligonucleotide
  Antisense strand to SEQ ID NO: 1683971
uagugacagauucugcagu

SEQ ID NO: 1683973 - RNA, 19 nt, Artificial Sequence
  Description of Artificial Sequence: Synthetic oligonucleotide
  Sense strand starting at position 99 of SEQ ID NO: 1561599
uccaguuucugaguuacag

SEQ ID NO: 1683974 - RNA, 19 nt, Artificial Sequence
  Description of Artificial Sequence: Synthetic oligonucleotide
  Antisense strand to SEQ ID NO: 1683973
cuguaacucagaaacugga

SEQ ID NO: 1683975 - RNA, 19 nt, Artificial Sequence
  Description of Artificial Sequence: Synthetic oligonucleotide
  Sense strand starting at position 263 of SEQ ID NO: 1561599
gcaaacaguccuuagccua

SEQ ID NO: 1683976 - RNA, 19 nt, Artificial Sequence
  Description of Artificial Sequence: Synthetic oligonucleotide
  Antisense strand to SEQ ID NO: 1683975
uaggcuaaggacuguuugc

SEQ ID NO: 1683977 - RNA, 19 nt, Artificial Sequence
  Description of Artificial Sequence: Synthetic oligonucleotide
  Sense strand starting at position 314 of SEQ ID NO: 1561599
gccuguuacugaguaagga

SEQ ID NO: 1683978 - RNA, 19 nt, Artificial Sequence
  Description of Artificial Sequence: Synthetic oligonucleotide
  Antisense strand to SEQ ID NO: 1683977
uccuuacucaguaacaggc

SEQ ID NO: 1683979 - RNA, 19 nt, Artificial Sequence
  Description of Artificial Sequence: Synthetic oligonucleotide
  Sense strand starting at position 335 of SEQ ID NO: 1561599
guguuuagaggacagaugu

SEQ ID NO: 1683980 - RNA, 19 nt, Artificial Sequence
  Description of Artificial Sequence: Synthetic oligonucleotide
  Antisense strand to SEQ ID NO: 1683979
acaucuguccucuaaacac

SEQ ID NO: 1683981 - RNA, 19 nt, Artificial Sequence
  Description of Artificial Sequence: Synthetic oligonucleotide
  Sense strand starting at position 404 of SEQ ID NO: 1561599
aggagaugcccguaccaga

SEQ ID NO: 1683982 - RNA, 19 nt, Artificial Sequence
  Description of Artificial Sequence: Synthetic oligonucleotide
  Antisense strand to SEQ ID NO: 1683981
ucugguacgggcaucuccu

SEQ ID NO: 1683983 - RNA, 19 nt, Artificial Sequence
  Description of Artificial Sequence: Synthetic oligonucleotide
  Sense strand starting at position 422 of SEQ ID NO: 1561599
agaguagagguguggugau

SEQ ID NO: 1683984 - RNA, 19 nt, Artificial Sequence
  Description of Artificial Sequence: Synthetic oligonucleotide
  Antisense strand to SEQ ID NO: 1683983
aucaccacaccucuacucu

SEQ ID NO: 1683985 - RNA, 19 nt, Artificial Sequence
  Description of Artificial Sequence: Synthetic oligonucleotide
  Sense strand starting at position 434 of SEQ ID NO: 1561599
uggugauguggcuaaauuc

SEQ ID NO: 1683986 - RNA, 19 nt, Artificial Sequence
  Description of Artificial Sequence: Synthetic oligonucleotide
  Antisense strand to SEQ ID NO: 1683985
gaauuuagccacaucacca

SEQ ID NO: 1683987 - RNA, 19 nt, Artificial Sequence
  Description of Artificial Sequence: Synthetic oligonucleotide
  Sense strand starting at position 707 of SEQ ID NO: 1561599
aagguuaagccaugggauu

SEQ ID NO: 1683988 - RNA, 19 nt, Artificial Sequence
  Description of Artificial Sequence: Synthetic oligonucleotide
  Antisense strand to SEQ ID NO: 1683987
aaucccauggcuuaaccuu

SEQ ID NO: 1683989 - RNA, 19 nt, Artificial Sequence
  Description of Artificial Sequence: Synthetic oligonucleotide
  Sense strand starting at position 892 of SEQ ID NO: 1561599
ucagcauucgggcaucaga

SEQ ID NO: 1683990 - RNA, 19 nt, Artificial Sequence
  Description of Artificial Sequence: Synthetic oligonucleotide
  Antisense strand to SEQ ID NO: 1683989
ucugaugcccgaaugcuga

SEQ ID NO: 1683991 - RNA, 19 nt, Artificial Sequence
  Description of Artificial Sequence: Synthetic oligonucleotide
  Sense strand starting at position 1141 of SEQ ID NO: 1561599
cguccuugggaguaagaca

SEQ ID NO: 1683992 - RNA, 19 nt, Artificial Sequence
  Description of Artificial Sequence: Synthetic oligonucleotide
  Antisense strand to SEQ ID NO: 1683991
ugucuuacucccaaggacg

SEQ ID NO: 1683993 - RNA, 19 nt, Artificial Sequence
  Description of Artificial Sequence: Synthetic oligonucleotide
  Sense strand starting at position 2155 of SEQ ID NO: 1561599
guaggugagguuuaacaga

SEQ ID NO: 1683994 - RNA, 19 nt, Artificial Sequence
  Description of Artificial Sequence: Synthetic oligonucleotide
  Antisense strand to SEQ ID NO: 1683993
ucuguuaaaccucaccuac

SEQ ID NO: 1683995 - RNA, 19 nt, Artificial Sequence
  Description of Artificial Sequence: Synthetic oligonucleotide
  Sense strand starting at position 2288 of SEQ ID NO: 1561599
cguggucucggcagaaucu

SEQ ID NO: 1683996 - RNA, 19 nt, Artificial Sequence
  Description of Artificial Sequence: Synthetic oligonucleotide
  Antisense strand to SEQ ID NO: 1683995
agauucugccgagaccacg

SEQ ID NO: 1683997 - RNA, 19 nt, Artificial Sequence
  Description of Artificial Sequence: Synthetic oligonucleotide
  Sense strand starting at position 2422 of SEQ ID NO: 1561599
accuucaugcggucguuua

SEQ ID NO: 1683998 - RNA, 19 nt, Artificial Sequence
  Description of Artificial Sequence: Synthetic oligonucleotide
  Antisense strand to SEQ ID NO: 1683997
uaaacgaccgcaugaaggu

SEQ ID NO: 1683999 - RNA, 19 nt, Artificial Sequence
  Description of Artificial Sequence: Synthetic oligonucleotide
  Sense strand starting at position 2553 of SEQ ID NO: 1561599
guaagacuccauggcacaa

SEQ ID NO: 1684000 - RNA, 19 nt, Artificial Sequence
  Description of Artificial Sequence: Synthetic oligonucleotide
  Antisense strand to SEQ ID NO: 1683999
uugugccauggagucuuac

SEQ ID NO: 1684001 - RNA, 19 nt, Artificial Sequence
  Description of Artificial Sequence: Synthetic oligonucleotide
  Sense strand starting at position 2576 of SEQ ID NO: 1561599
cccuucaugcgguugugua

SEQ ID NO: 1684002 - RNA, 19 nt, Artificial Sequence
  Description of Artificial Sequence: Synthetic oligonucleotide
  Antisense strand to SEQ ID NO: 1684001
uacacaaccgcaugaaggg

SEQ ID NO: 1684003 - RNA, 19 nt, Artificial Sequence
  Description of Artificial Sequence: Synthetic oligonucleotide
  Sense strand starting at position 2589 of SEQ ID NO: 1561599
uguguaacucuccauggca

SEQ ID NO: 1684004 - RNA, 19 nt, Artificial Sequence
  Description of Artificial Sequence: Synthetic oligonucleotide
  Antisense strand to SEQ ID NO: 1684003
ugccauggagaguuacaca

SEQ ID NO: 1684005 - RNA, 19 nt, Artificial Sequence
  Description of Artificial Sequence: Synthetic oligonucleotide
  Sense strand starting at position 2591 of SEQ ID NO: 1561599
uguaacucuccauggcaca

SEQ ID NO: 1684006 - RNA, 19 nt, Artificial Sequence
  Description of Artificial Sequence: Synthetic oligonucleotide
  Antisense strand to SEQ ID NO: 1684005
ugugccauggagaguuaca

SEQ ID NO: 1684007 - RNA, 19 nt, Artificial Sequence
  Description of Artificial Sequence: Synthetic oligonucleotide
  Sense strand starting at position 2592 of SEQ ID NO: 1561599
guaacucuccauggcacaa

SEQ ID NO: 1684008 - RNA, 19 nt, Artificial Sequence
  Description of Artificial Sequence: Synthetic oligonucleotide
  Antisense strand to SEQ ID NO: 1684007
uugugccauggagaguuac

SEQ ID NO: 1684009 - RNA, 19 nt, Artificial Sequence
  Description of Artificial Sequence: Synthetic oligonucleotide
  Sense strand starting at position 2780 of SEQ ID NO: 1561599
uguguaauccuccagggca

SEQ ID NO: 1684010 - RNA, 19 nt, Artificial Sequence
  Description of Artificial Sequence: Synthetic oligonucleotide
  Antisense strand to SEQ ID NO: 1684009
ugcccuggaggauuacaca

SEQ ID NO: 1684011 - RNA, 19 nt, Artificial Sequence
  Description of Artificial Sequence: Synthetic oligonucleotide
  Sense strand starting at position 2782 of SEQ ID NO: 1561599
uguaauccuccagggcaca

SEQ ID NO: 1684012 - RNA, 19 nt, Artificial Sequence
  Description of Artificial Sequence: Synthetic oligonucleotide
  Antisense strand to SEQ ID NO: 1684011
ugugcccuggaggauuaca

SEQ ID NO: 1684013 - RNA, 19 nt, Artificial Sequence
  Description of Artificial Sequence: Synthetic oligonucleotide
  Sense strand starting at position 2891 of SEQ ID NO: 1561599
ccaguugggaguuacuaca

SEQ ID NO: 1684014 - RNA, 19 nt, Artificial Sequence
  Description of Artificial Sequence: Synthetic oligonucleotide
  Antisense strand to SEQ ID NO: 1684013
uguaguaacucccaacugg

SEQ ID NO: 1684015 - RNA, 19 nt, Artificial Sequence
  Description of Artificial Sequence: Synthetic oligonucleotide
  Sense strand starting at position 2951 of SEQ ID NO: 1561599
gcagguuuguauuucuguu

SEQ ID NO: 1684016 - RNA, 19 nt, Artificial Sequence
  Description of Artificial Sequence: Synthetic oligonucleotide
  Antisense strand to SEQ ID NO: 1684015
aacagaaauacaaaccugc

SEQ ID NO: 1684017 - RNA, 19 nt, Artificial Sequence
  Description of Artificial Sequence: Synthetic oligonucleotide
  Sense strand starting at position 2958 of SEQ ID NO: 1561599
uguauuucuguugggugaa

SEQ ID NO: 1684018 - RNA, 19 nt, Artificial Sequence
  Description of Artificial Sequence: Synthetic oligonucleotide
  Antisense strand to SEQ ID NO: 1684017
uucacccaacagaaauaca

SEQ ID NO: 1684019 - RNA, 19 nt, Artificial Sequence
  Description of Artificial Sequence: Synthetic oligonucleotide
  Sense strand starting at position 3010 of SEQ ID NO: 1561599
accuguucagguuaggaga

SEQ ID NO: 1684020 - RNA, 19 nt, Artificial Sequence
  Description of Artificial Sequence: Synthetic oligonucleotide
  Antisense strand to SEQ ID NO: 1684019
ucuccuaaccugaacaggu

SEQ ID NO: 1684021 - RNA, 19 nt, Artificial Sequence
  Description of Artificial Sequence: Synthetic oligonucleotide
  Sense strand starting at position 3050 of SEQ ID NO: 1561599
ccugcagugguguauaaga

SEQ ID NO: 1684022 - RNA, 19 nt, Artificial Sequence
  Description of Artificial Sequence: Synthetic oligonucleotide
  Antisense strand to SEQ ID NO: 1684021
ucuuauacaccacugcagg

SEQ ID NO: 1684023 - RNA, 19 nt, Artificial Sequence
  Description of Artificial Sequence: Synthetic oligonucleotide
  Sense strand starting at position 3052 of SEQ ID NO: 1561599
ugcagugguguauaagauu

SEQ ID NO: 1684024 - RNA, 19 nt, Artificial Sequence
  Description of Artificial Sequence: Synthetic oligonucleotide
  Antisense strand to SEQ ID NO: 1684023
aaucuuauacaccacugca

SEQ ID NO: 1684025 - RNA, 19 nt, Artificial Sequence
  Description of Artificial Sequence: Synthetic oligonucleotide
  Sense strand starting at position 3129 of SEQ ID NO: 1561599
auuagugugaugugaagua

SEQ ID NO: 1684026 - RNA, 19 nt, Artificial Sequence
  Description of Artificial Sequence: Synthetic oligonucleotide
  Antisense strand to SEQ ID NO: 1684025
uacuucacaucacacuaau

SEQ ID NO: 1684027 - RNA, 19 nt, Artificial Sequence
  Description of Artificial Sequence: Synthetic oligonucleotide
  Sense strand starting at position 3159 of SEQ ID NO: 1561599
ugguuucucugauuaguag

SEQ ID NO: 1684028 - RNA, 19 nt, Artificial Sequence
  Description of Artificial Sequence: Synthetic oligonucleotide
  Antisense strand to SEQ ID NO: 1684027
cuacuaaucagagaaacca

SEQ ID NO: 1684029 - RNA, 19 nt, Artificial Sequence
  Description of Artificial Sequence: Synthetic oligonucleotide
  Sense strand starting at position 3160 of SEQ ID NO: 1561599
gguuucucugauuaguagu

SEQ ID NO: 1684030 - RNA, 19 nt, Artificial Sequence
  Description of Artificial Sequence: Synthetic oligonucleotide
  Antisense strand to SEQ ID NO: 1684029
acuacuaaucagagaaacc

SEQ ID NO: 1684031 - RNA, 19 nt, Artificial Sequence
  Description of Artificial Sequence: Synthetic oligonucleotide
  Sense strand starting at position 3162 of SEQ ID NO: 1561599
uuucucugauuaguaguaa

SEQ ID NO: 1684032 - RNA, 19 nt, Artificial Sequence
  Description of Artificial Sequence: Synthetic oligonucleotide
  Antisense strand to SEQ ID NO: 1684031
uuacuacuaaucagagaaa

SEQ ID NO: 1684033 - RNA, 19 nt, Artificial Sequence
  Description of Artificial Sequence: Synthetic oligonucleotide
  Sense strand starting at position 3274 of SEQ ID NO: 1561599
guugcauucuuauugagau

SEQ ID NO: 1684034 - RNA, 19 nt, Artificial Sequence
  Description of Artificial Sequence: Synthetic oligonucleotide
  Antisense strand to SEQ ID NO: 1684033
aucucaauaagaaugcaac

SEQ ID NO: 1684035 - RNA, 19 nt, Artificial Sequence
  Description of Artificial Sequence: Synthetic oligonucleotide
  Sense strand starting at position 3280 of SEQ ID NO: 1561599
uucuuauugagaugcugag

SEQ ID NO: 1684036 - RNA, 19 nt, Artificial Sequence
  Description of Artificial Sequence: Synthetic oligonucleotide
  Antisense strand to SEQ ID NO: 1684035
cucagcaucucaauaagaa

SEQ ID NO: 1684037 - RNA, 19 nt, Artificial Sequence
  Description of Artificial Sequence: Synthetic oligonucleotide
  Sense strand starting at position 3290 of SEQ ID NO: 1561599
gaugcugaguucuuuauau

SEQ ID NO: 1684038 - RNA, 19 nt, Artificial Sequence
  Description of Artificial Sequence: Synthetic oligonucleotide
  Antisense strand to SEQ ID NO: 1684037
auauaaagaacucagcauc

SEQ ID NO: 1684039 - RNA, 19 nt, Artificial Sequence
  Description of Artificial Sequence: Synthetic oligonucleotide
  Sense strand starting at position 3292 of SEQ ID NO: 1561599
ugcugaguucuuuauauau

SEQ ID NO: 1684040 - RNA, 19 nt, Artificial Sequence
  Description of Artificial Sequence: Synthetic oligonucleotide
  Antisense strand to SEQ ID NO: 1684039
auauauaaagaacucagca

SEQ ID NO: 1684041 - RNA, 19 nt, Artificial Sequence
  Description of Artificial Sequence: Synthetic oligonucleotide
  Sense strand starting at position 3385 of SEQ ID NO: 1561599
uugcuuucugaugaacaua

SEQ ID NO: 1684042 - RNA, 19 nt, Artificial Sequence
  Description of Artificial Sequence: Synthetic oligonucleotide
  Antisense strand to SEQ ID NO: 1684041
uauguucaucagaaagcaa

SEQ ID NO: 1684043 - RNA, 19 nt, Artificial Sequence
  Description of Artificial Sequence: Synthetic oligonucleotide
  Sense strand starting at position 3745 of SEQ ID NO: 1561599
ggaguagauuccucacacu

SEQ ID NO: 1684044 - RNA, 19 nt, Artificial Sequence
  Description of Artificial Sequence: Synthetic oligonucleotide
  Antisense strand to SEQ ID NO: 1684043
agugugaggaaucuacucc

SEQ ID NO: 1684045 - RNA, 19 nt, Artificial Sequence
  Description of Artificial Sequence: Synthetic oligonucleotide
  Sense strand starting at position 3960 of SEQ ID NO: 1561599
cucauauucucuuugguca

SEQ ID NO: 1684046 - RNA, 19 nt, Artificial Sequence
  Description of Artificial Sequence: Synthetic oligonucleotide
  Antisense strand to SEQ ID NO: 1684045
ugaccaaagagaauaugag

SEQ ID NO: 1684047 - RNA, 19 nt, Artificial Sequence
  Description of Artificial Sequence: Synthetic oligonucleotide
  Sense strand starting at position 3983 of SEQ ID NO: 1561599
uuucuauccucugugauug

SEQ ID NO: 1684048 - RNA, 19 nt, Artificial Sequence
  Description of Artificial Sequence: Synthetic oligonucleotide
  Antisense strand to SEQ ID NO: 1684047
caaucacagaggauagaaa

SEQ ID NO: 1684049 - RNA, 19 nt, Artificial Sequence
  Description of Artificial Sequence: Synthetic oligonucleotide
  Sense strand starting at position 62 of SEQ ID NO: 1561600
gagccaguccuguaggcuu

SEQ ID NO: 1684050 - RNA, 19 nt, Artificial Sequence
  Description of Artificial Sequence: Synthetic oligonucleotide
  Antisense strand to SEQ ID NO: 1684049
aagccuacaggacuggcuc

SEQ ID NO: 1684051 - RNA, 19 nt, Artificial Sequence
  Description of Artificial Sequence: Synthetic oligonucleotide
  Sense strand starting at position 86 of SEQ ID NO: 1561600
cacccagaggccuggaaua

SEQ ID NO: 1684052 - RNA, 19 nt, Artificial Sequence
  Description of Artificial Sequence: Synthetic oligonucleotide
  Antisense strand to SEQ ID NO: 1684051
uauuccaggccucugggug

SEQ ID NO: 1684053 - RNA, 19 nt, Artificial Sequence
  Description of Artificial Sequence: Synthetic oligonucleotide
  Sense strand starting at position 177 of SEQ ID NO: 1561600
uccagaguccugcagcaaa

SEQ ID NO: 1684054 - RNA, 19 nt, Artificial Sequence
  Description of Artificial Sequence: Synthetic oligonucleotide
  Antisense strand to SEQ ID NO: 1684053
uuugcugcaggacucugga

SEQ ID NO: 1684055 - RNA, 19 nt, Artificial Sequence
  Description of Artificial Sequence: Synthetic oligonucleotide
  Sense strand starting at position 370 of SEQ ID NO: 1561600
augggaugugguuguugau

SEQ ID NO: 1684056 - RNA, 19 nt, Artificial Sequence
  Description of Artificial Sequence: Synthetic oligonucleotide
  Antisense strand to SEQ ID NO: 1684055
aucaacaaccacaucccau

SEQ ID NO: 1684057 - RNA, 19 nt, Artificial Sequence
  Description of Artificial Sequence: Synthetic oligonucleotide
  Sense strand starting at position 383 of SEQ ID NO: 1561600
guugaugggucgccggaua

SEQ ID NO: 1684058 - RNA, 19 nt, Artificial Sequence
  Description of Artificial Sequence: Synthetic oligonucleotide
  Antisense strand to SEQ ID NO: 1684057
uauccggcgacccaucaac

SEQ ID NO: 1684059 - RNA, 19 nt, Artificial Sequence
  Description of Artificial Sequence: Synthetic oligonucleotide
  Sense strand starting at position 488 of SEQ ID NO: 1561600
uggaguaagggucgucguu

SEQ ID NO: 1684060 - RNA, 19 nt, Artificial Sequence
  Description of Artificial Sequence: Synthetic oligonucleotide
  Antisense strand to SEQ ID NO: 1684059
aacgacgacccuuacucca

SEQ ID NO: 1684061 - RNA, 19 nt, Artificial Sequence
  Description of Artificial Sequence: Synthetic oligonucleotide
  Sense strand starting at position 490 of SEQ ID NO: 1561600
gaguaagggucgucguuca

SEQ ID NO: 1684062 - RNA, 19 nt, Artificial Sequence
  Description of Artificial Sequence: Synthetic oligonucleotide
  Antisense strand to SEQ ID NO: 1684061
ugaacgacgacccuuacuc

SEQ ID NO: 1684063 - RNA, 19 nt, Artificial Sequence
  Description of Artificial Sequence: Synthetic oligonucleotide
  Sense strand starting at position 564 of SEQ ID NO: 1561600
agagauguccugcgcaacu

SEQ ID NO: 1684064 - RNA, 19 nt, Artificial Sequence
  Description of Artificial Sequence: Synthetic oligonucleotide
  Antisense strand to SEQ ID NO: 1684063
aguugcgcaggacaucucu

SEQ ID NO: 1684065 - RNA, 19 nt, Artificial Sequence
  Description of Artificial Sequence: Synthetic oligonucleotide
  Sense strand starting at position 813 of SEQ ID NO: 1561600
ggcgaauauaugggaaagu

SEQ ID NO: 1684066 - RNA, 19 nt, Artificial Sequence
  Description of Artificial Sequence: Synthetic oligonucleotide
  Antisense strand to SEQ ID NO: 1684065
acuuucccauauauucgcc

SEQ ID NO: 1684067 - RNA, 19 nt, Artificial Sequence
  Description of Artificial Sequence: Synthetic oligonucleotide
  Sense strand starting at position 1001 of SEQ ID NO: 1561600
gagugaugggagggugagu

SEQ ID NO: 1684068 - RNA, 19 nt, Artificial Sequence
  Description of Artificial Sequence: Synthetic oligonucleotide
  Antisense strand to SEQ ID NO: 1684067
acucacccucccaucacuc

SEQ ID NO: 1684069 - RNA, 19 nt, Artificial Sequence
  Description of Artificial Sequence: Synthetic oligonucleotide
  Sense strand starting at position 1072 of SEQ ID NO: 1561600
uugccucuuccacgagaga

SEQ ID NO: 1684070 - RNA, 19 nt, Artificial Sequence
  Description of Artificial Sequence: Synthetic oligonucleotide
  Antisense strand to SEQ ID NO: 1684069
ucucucguggaagaggcaa

SEQ ID NO: 1684071 - RNA, 19 nt, Artificial Sequence
  Description of Artificial Sequence: Synthetic oligonucleotide
  Sense strand starting at position 1155 of SEQ ID NO: 1561600
gcgagauauuccaagggug

SEQ ID NO: 1684072 - RNA, 19 nt, Artificial Sequence
  Description of Artificial Sequence: Synthetic oligonucleotide
  Antisense strand to SEQ ID NO: 1684071
cacccuuggaauaucucgc

SEQ ID NO: 1684073 - RNA, 19 nt, Artificial Sequence
  Description of Artificial Sequence: Synthetic oligonucleotide
  Sense strand starting at position 2066 of SEQ ID NO: 1561600
aguaaacaagcggguaaau

SEQ ID NO: 1684074 - RNA, 19 nt, Artificial Sequence
  Description of Artificial Sequence: Synthetic oligonucleotide
  Antisense strand to SEQ ID NO: 1684073
auuuacccgcuuguuuacu

SEQ ID NO: 1684075 - RNA, 19 nt, Artificial Sequence
  Description of Artificial Sequence: Synthetic oligonucleotide
  Sense strand starting at position 2271 of SEQ ID NO: 1561600
ccagcucacgguuaagaaa

SEQ ID NO: 1684076 - RNA, 19 nt, Artificial Sequence
  Description of Artificial Sequence: Synthetic oligonucleotide
  Antisense strand to SEQ ID NO: 1684075
uuucuuaaccgugagcugg

SEQ ID NO: 1684077 - RNA, 19 nt, Artificial Sequence
  Description of Artificial Sequence: Synthetic oligonucleotide
  Sense strand starting at position 2326 of SEQ ID NO: 1561600
ccagcaugggcucaagaaa

SEQ ID NO: 1684078 - RNA, 19 nt, Artificial Sequence
  Description of Artificial Sequence: Synthetic oligonucleotide
  Antisense strand to SEQ ID NO: 1684077
uuucuugagcccaugcugg

SEQ ID NO: 1684079 - RNA, 19 nt, Artificial Sequence
  Description of Artificial Sequence: Synthetic oligonucleotide
  Sense strand starting at position 2407 of SEQ ID NO: 1561600
ugagacagaucuggacaga

SEQ ID NO: 1684080 - RNA, 19 nt, Artificial Sequence
  Description of Artificial Sequence: Synthetic oligonucleotide
  Antisense strand to SEQ ID NO: 1684079
ucuguccagaucugucuca

SEQ ID NO: 1684081 - RNA, 19 nt, Artificial Sequence
  Description of Artificial Sequence: Synthetic oligonucleotide
  Sense strand starting at position 2599 of SEQ ID NO: 1561600
gggugagggcuuuggcaaa

SEQ ID NO: 1684082 - RNA, 19 nt, Artificial Sequence
  Description of Artificial Sequence: Synthetic oligonucleotide
  Antisense strand to SEQ ID NO: 1684081
uuugccaaagcccucaccc

SEQ ID NO: 1684083 - RNA, 19 nt, Artificial Sequence
  Description of Artificial Sequence: Synthetic oligonucleotide
  Sense strand starting at position 2696 of SEQ ID NO: 1561600
cgcuuaugaggaugccauu

SEQ ID NO: 1684084 - RNA, 19 nt, Artificial Sequence
  Description of Artificial Sequence: Synthetic oligonucleotide
  Antisense strand to SEQ ID NO: 1684083
aauggcauccucauaagcg

SEQ ID NO: 1684085 - RNA, 19 nt, Artificial Sequence
  Description of Artificial Sequence: Synthetic oligonucleotide
  Sense strand starting at position 2747 of SEQ ID NO: 1561600
uguauaucugaacaguuua

SEQ ID NO: 1684086 - RNA, 19 nt, Artificial Sequence
  Description of Artificial Sequence: Synthetic oligonucleotide
  Antisense strand to SEQ ID NO: 1684085
uaaacuguucagauauaca

SEQ ID NO: 1684087 - RNA, 19 nt, Artificial Sequence
  Description of Artificial Sequence: Synthetic oligonucleotide
  Sense strand starting at position 2920 of SEQ ID NO: 1561600
aggaacagcuaaucuaagu

SEQ ID NO: 1684088 - RNA, 19 nt, Artificial Sequence
  Description of Artificial Sequence: Synthetic oligonucleotide
  Antisense strand to SEQ ID NO: 1684087
acuuagauuagcuguuccu

SEQ ID NO: 1684089 - RNA, 19 nt, Artificial Sequence
  Description of Artificial Sequence: Synthetic oligonucleotide
  Sense strand starting at position 2966 of SEQ ID NO: 1561600
agugucauauaagugggau

SEQ ID NO: 1684090 - RNA, 19 nt, Artificial Sequence
  Description of Artificial Sequence: Synthetic oligonucleotide
  Antisense strand to SEQ ID NO: 1684089
aucccacuuauaugacacu

SEQ ID NO: 1684091 - RNA, 19 nt, Artificial Sequence
  Description of Artificial Sequence: Synthetic oligonucleotide
  Sense strand starting at position 2967 of SEQ ID NO: 1561600
gugucauauaagugggauc

SEQ ID NO: 1684092 - RNA, 19 nt, Artificial Sequence
  Description of Artificial Sequence: Synthetic oligonucleotide
  Antisense strand to SEQ ID NO: 1684091
gaucccacuuauaugacac

SEQ ID NO: 1684093 - RNA, 19 nt, Artificial Sequence
  Description of Artificial Sequence: Synthetic oligonucleotide
  Sense strand starting at position 3040 of SEQ ID NO: 1561600
gaggcauugaaguaguaug

SEQ ID NO: 1684094 - RNA, 19 nt, Artificial Sequence
  Description of Artificial Sequence: Synthetic oligonucleotide
  Antisense strand to SEQ ID NO: 1684093
cauacuacuucaaugccuc

SEQ ID NO: 1684095 - RNA, 19 nt, Artificial Sequence
  Description of Artificial Sequence: Synthetic oligonucleotide
  Sense strand starting at position 3045 of SEQ ID NO: 1561600
auugaaguaguauguauca

SEQ ID NO: 1684096 - RNA, 19 nt, Artificial Sequence
  Description of Artificial Sequence: Synthetic oligonucleotide
  Antisense strand to SEQ ID NO: 1684095
ugauacauacuacuucaau

SEQ ID NO: 1684097 - RNA, 19 nt, Artificial Sequence
  Description of Artificial Sequence: Synthetic oligonucleotide
  Sense strand starting at position 3118 of SEQ ID NO: 1561600
accuucucccacugagaga

SEQ ID NO: 1684098 - RNA, 19 nt, Artificial Sequence
  Description of Artificial Sequence: Synthetic oligonucleotide
  Antisense strand to SEQ ID NO: 1684097
ucucucagugggagaaggu

SEQ ID NO: 1684099 - RNA, 19 nt, Artificial Sequence
  Description of Artificial Sequence: Synthetic oligonucleotide
  Sense strand starting at position 3131 of SEQ ID NO: 1561600
gagagauauuaggaucguu

SEQ ID NO: 1684100 - RNA, 19 nt, Artificial Sequence
  Description of Artificial Sequence: Synthetic oligonucleotide
  Antisense strand to SEQ ID NO: 1684099
aacgauccuaauaucucuc

SEQ ID NO: 1684101 - RNA, 19 nt, Artificial Sequence
  Description of Artificial Sequence: Synthetic oligonucleotide
  Sense strand starting at position 3183 of SEQ ID NO: 1561600
ugaacauucguguacagau

SEQ ID NO: 1684102 - RNA, 19 nt, Artificial Sequence
  Description of Artificial Sequence: Synthetic oligonucleotide
  Antisense strand to SEQ ID NO: 1684101
aucuguacacgaauguuca

SEQ ID NO: 1684103 - RNA, 19 nt, Artificial Sequence
  Description of Artificial Sequence: Synthetic oligonucleotide
  Sense strand starting at position 3271 of SEQ ID NO: 1561600
ugaacacgugcuuauuagu

SEQ ID NO: 1684104 - RNA, 19 nt, Artificial Sequence
  Description of Artificial Sequence: Synthetic oligonucleotide
  Antisense strand to SEQ ID NO: 1684103
acuaauaagcacguguuca

SEQ ID NO: 1684105 - RNA, 19 nt, Artificial Sequence
  Description of Artificial Sequence: Synthetic oligonucleotide
  Sense strand starting at position 3350 of SEQ ID NO: 1561600
caaugaaugugugaaucca

SEQ ID NO: 1684106 - RNA, 19 nt, Artificial Sequence
  Description of Artificial Sequence: Synthetic oligonucleotide
  Antisense strand to SEQ ID NO: 1684105
uggauucacacauucauug

SEQ ID NO: 1684107 - RNA, 19 nt, Artificial Sequence
  Description of Artificial Sequence: Synthetic oligonucleotide
  Sense strand starting at position 3433 of SEQ ID NO: 1561600
acugauauaucauuguggu

SEQ ID NO: 1684108 - RNA, 19 nt, Artificial Sequence
  Description of Artificial Sequence: Synthetic oligonucleotide
  Antisense strand to SEQ ID NO: 1684107
accacaaugauauaucagu

SEQ ID NO: 1684109 - RNA, 19 nt, Artificial Sequence
  Description of Artificial Sequence: Synthetic oligonucleotide
  Sense strand starting at position 3434 of SEQ ID NO: 1561600
cugauauaucauugugguu

SEQ ID NO: 1684110 - RNA, 19 nt, Artificial Sequence
  Description of Artificial Sequence: Synthetic oligonucleotide
  Antisense strand to SEQ ID NO: 1684109
aaccacaaugauauaucag

SEQ ID NO: 1684111 - RNA, 19 nt, Artificial Sequence
  Description of Artificial Sequence: Synthetic oligonucleotide
  Sense strand starting at position 3485 of SEQ ID NO: 1561600
uugagcacacuuuaaugau

SEQ ID NO: 1684112 - RNA, 19 nt, Artificial Sequence
  Description of Artificial Sequence: Synthetic oligonucleotide
  Antisense strand to SEQ ID NO: 1684111
aucauuaaagugugcucaa

SEQ ID NO: 1684113 - RNA, 19 nt, Artificial Sequence
  Description of Artificial Sequence: Synthetic oligonucleotide
  Sense strand starting at position 3530 of SEQ ID NO: 1561600
auuaaaguaucuguucgua

SEQ ID NO: 1684114 - RNA, 19 nt, Artificial Sequence
  Description of Artificial Sequence: Synthetic oligonucleotide
  Antisense strand to SEQ ID NO: 1684113
uacgaacagauacuuuaau

SEQ ID NO: 1684115 - RNA, 19 nt, Artificial Sequence
  Description of Artificial Sequence: Synthetic oligonucleotide
  Sense strand starting at position 3532 of SEQ ID NO: 1561600
uaaaguaucuguucguauc

SEQ ID NO: 1684116 - RNA, 19 nt, Artificial Sequence
  Description of Artificial Sequence: Synthetic oligonucleotide
  Antisense strand to SEQ ID NO: 1684115
gauacgaacagauacuuua

SEQ ID NO: 1684117 - RNA, 19 nt, Artificial Sequence
  Description of Artificial Sequence: Synthetic oligonucleotide
  Sense strand starting at position 3533 of SEQ ID NO: 1561600
aaaguaucuguucguaucu

SEQ ID NO: 1684118 - RNA, 19 nt, Artificial Sequence
  Description of Artificial Sequence: Synthetic oligonucleotide
  Antisense strand to SEQ ID NO: 1684117
agauacgaacagauacuuu

SEQ ID NO: 1684119 - RNA, 19 nt, Artificial Sequence
  Description of Artificial Sequence: Synthetic oligonucleotide
  Sense strand starting at position 3534 of SEQ ID NO: 1561600
aaguaucuguucguaucuu

SEQ ID NO: 1684120 - RNA, 19 nt, Artificial Sequence
  Description of Artificial Sequence: Synthetic oligonucleotide
  Antisense strand to SEQ ID NO: 1684119
aagauacgaacagauacuu

SEQ ID NO: 1684121 - RNA, 19 nt, Artificial Sequence
  Description of Artificial Sequence: Synthetic oligonucleotide
  Sense strand starting at position 3735 of SEQ ID NO: 1561600
acaggugugcgcuaccaua

SEQ ID NO: 1684122 - RNA, 19 nt, Artificial Sequence
  Description of Artificial Sequence: Synthetic oligonucleotide
  Antisense strand to SEQ ID NO: 1684121
uaugguagcgcacaccugu

SEQ ID NO: 1684123 - RNA, 19 nt, Artificial Sequence
  Description of Artificial Sequence: Synthetic oligonucleotide
  Sense strand starting at position 3796 of SEQ ID NO: 1561600
ugcuaaggcuggucucaga

SEQ ID NO: 1684124 - RNA, 19 nt, Artificial Sequence
  Description of Artificial Sequence: Synthetic oligonucleotide
  Antisense strand to SEQ ID NO: 1684123
ucugagaccagccuuagca

SEQ ID NO: 1684125 - RNA, 19 nt, Artificial Sequence
  Description of Artificial Sequence: Synthetic oligonucleotide
  Sense strand starting at position 3883 of SEQ ID NO: 1561600
ugcccagucuuuccaguuu

SEQ ID NO: 1684126 - RNA, 19 nt, Artificial Sequence
  Description of Artificial Sequence: Synthetic oligonucleotide
  Antisense strand to SEQ ID NO: 1684125
aaacuggaaagacugggca

SEQ ID NO: 1684127 - RNA, 19 nt, Artificial Sequence
  Description of Artificial Sequence: Synthetic oligonucleotide
  Sense strand starting at position 3910 of SEQ ID NO: 1561600
ggauauaacucaggaacug

SEQ ID NO: 1684128 - RNA, 19 nt, Artificial Sequence
  Description of Artificial Sequence: Synthetic oligonucleotide
  Antisense strand to SEQ ID NO: 1684127
caguuccugaguuauaucc

SEQ ID NO: 1684129 - RNA, 19 nt, Artificial Sequence
  Description of Artificial Sequence: Synthetic oligonucleotide
  Sense strand starting at position 32 of SEQ ID NO: 1561601
cccagagugcccuggguaa

SEQ ID NO: 1684130 - RNA, 19 nt, Artificial Sequence
  Description of Artificial Sequence: Synthetic oligonucleotide
  Antisense strand to SEQ ID NO: 1684129
uuacccagggcacucuggg

SEQ ID NO: 1684131 - RNA, 19 nt, Artificial Sequence
  Description of Artificial Sequence: Synthetic oligonucleotide
  Sense strand starting at position 63 of SEQ ID NO: 1561601
ucuguacuguuuccucaga

SEQ ID NO: 1684132 - RNA, 19 nt, Artificial Sequence
  Description of Artificial Sequence: Synthetic oligonucleotide
  Antisense strand to SEQ ID NO: 1684131
ucugaggaaacaguacaga

SEQ ID NO: 1684133 - RNA, 19 nt, Artificial Sequence
  Description of Artificial Sequence: Synthetic oligonucleotide
  Sense strand starting at position 65 of SEQ ID NO: 1561601
uguacuguuuccucagaga

SEQ ID NO: 1684134 - RNA, 19 nt, Artificial Sequence
  Description of Artificial Sequence: Synthetic oligonucleotide
  Antisense strand to SEQ ID NO: 1684133
ucucugaggaaacaguaca

SEQ ID NO: 1684135 - RNA, 19 nt, Artificial Sequence
  Description of Artificial Sequence: Synthetic oligonucleotide
  Sense strand starting at position 112 of SEQ ID NO: 1561601
caggacuugcccuauagca

SEQ ID NO: 1684136 - RNA, 19 nt, Artificial Sequence
  Description of Artificial Sequence: Synthetic oligonucleotide
  Antisense strand to SEQ ID NO: 1684135
ugcuauagggcaaguccug

SEQ ID NO: 1684137 - RNA, 19 nt, Artificial Sequence
  Description of Artificial Sequence: Synthetic oligonucleotide
  Sense strand starting at position 179 of SEQ ID NO: 1561601
gagcaugguuacccaagaa

SEQ ID NO: 1684138 - RNA, 19 nt, Artificial Sequence
  Description of Artificial Sequence: Synthetic oligonucleotide
  Antisense strand to SEQ ID NO: 1684137
uucuuggguaaccaugcuc

SEQ ID NO: 1684139 - RNA, 19 nt, Artificial Sequence
  Description of Artificial Sequence: Synthetic oligonucleotide
  Sense strand starting at position 312 of SEQ ID NO: 1561601
ucaugacggucucugaaau

SEQ ID NO: 1684140 - RNA, 19 nt, Artificial Sequence
  Description of Artificial Sequence: Synthetic oligonucleotide
  Antisense strand to SEQ ID NO: 1684139
auuucagagaccgucauga

SEQ ID NO: 1684141 - RNA, 19 nt, Artificial Sequence
  Description of Artificial Sequence: Synthetic oligonucleotide
  Sense strand starting at position 313 of SEQ ID NO: 1561601
caugacggucucugaaaua

SEQ ID NO: 1684142 - RNA, 19 nt, Artificial Sequence
  Description of Artificial Sequence: Synthetic oligonucleotide
  Antisense strand to SEQ ID NO: 1684141
uauuucagagaccgucaug

SEQ ID NO: 1684143 - RNA, 19 nt, Artificial Sequence
  Description of Artificial Sequence: Synthetic oligonucleotide
  Sense strand starting at position 338 of SEQ ID NO: 1561601
ugugaaacuuccucagccu

SEQ ID NO: 1684144 - RNA, 19 nt, Artificial Sequence
  Description of Artificial Sequence: Synthetic oligonucleotide
  Antisense strand to SEQ ID NO: 1684143
aggcugaggaaguuucaca

SEQ ID NO: 1684145 - RNA, 19 nt, Artificial Sequence
  Description of Artificial Sequence: Synthetic oligonucleotide
  Sense strand starting at position 373 of SEQ ID NO: 1561601
cuccuaucagguugagguu

SEQ ID NO: 1684146 - RNA, 19 nt, Artificial Sequence
  Description of Artificial Sequence: Synthetic oligonucleotide
  Antisense strand to SEQ ID NO: 1684145
aaccucaaccugauaggag

SEQ ID NO: 1684147 - RNA, 19 nt, Artificial Sequence
  Description of Artificial Sequence: Synthetic oligonucleotide
  Sense strand starting at position 490 of SEQ ID NO: 1561601
uugcuaugagauuauguga

SEQ ID NO: 1684148 - RNA, 19 nt, Artificial Sequence
  Description of Artificial Sequence: Synthetic oligonucleotide
  Antisense strand to SEQ ID NO: 1684147
ucacauaaucucauagcaa

SEQ ID NO: 1684149 - RNA, 19 nt, Artificial Sequence
  Description of Artificial Sequence: Synthetic oligonucleotide
  Sense strand starting at position 493 of SEQ ID NO: 1561601
cuaugagauuaugugaggu

SEQ ID NO: 1684150 - RNA, 19 nt, Artificial Sequence
  Description of Artificial Sequence: Synthetic oligonucleotide
  Antisense strand to SEQ ID NO: 1684149
accucacauaaucucauag

SEQ ID NO: 1684151 - RNA, 19 nt, Artificial Sequence
  Description of Artificial Sequence: Synthetic oligonucleotide
  Sense strand starting at position 517 of SEQ ID NO: 1561601
auuauaaguguccagcaca

SEQ ID NO: 1684152 - RNA, 19 nt, Artificial Sequence
  Description of Artificial Sequence: Synthetic oligonucleotide
  Antisense strand to SEQ ID NO: 1684151
ugugcuggacacuuauaau

SEQ ID NO: 1684153 - RNA, 19 nt, Artificial Sequence
  Description of Artificial Sequence: Synthetic oligonucleotide
  Sense strand starting at position 557 of SEQ ID NO: 1561601
gcaguagauguauggauac

SEQ ID NO: 1684154 - RNA, 19 nt, Artificial Sequence
  Description of Artificial Sequence: Synthetic oligonucleotide
  Antisense strand to SEQ ID NO: 1684153
guauccauacaucuacugc

SEQ ID NO: 1684155 - RNA, 19 nt, Artificial Sequence
  Description of Artificial Sequence: Synthetic oligonucleotide
  Sense strand starting at position 685 of SEQ ID NO: 1561601
ucucucauaugcuugguaa

SEQ ID NO: 1684156 - RNA, 19 nt, Artificial Sequence
  Description of Artificial Sequence: Synthetic oligonucleotide
  Antisense strand to SEQ ID NO: 1684155
uuaccaagcauaugagaga

SEQ ID NO: 1684157 - RNA, 19 nt, Artificial Sequence
  Description of Artificial Sequence: Synthetic oligonucleotide
  Sense strand starting at position 687 of SEQ ID NO: 1561601
ucucauaugcuugguaaac

SEQ ID NO: 1684158 - RNA, 19 nt, Artificial Sequence
  Description of Artificial Sequence: Synthetic oligonucleotide
  Antisense strand to SEQ ID NO: 1684157
guuuaccaagcauaugaga

SEQ ID NO: 1684159 - RNA, 19 nt, Artificial Sequence
  Description of Artificial Sequence: Synthetic oligonucleotide
  Sense strand starting at position 688 of SEQ ID NO: 1561601
cucauaugcuugguaaacu

SEQ ID NO: 1684160 - RNA, 19 nt, Artificial Sequence
  Description of Artificial Sequence: Synthetic oligonucleotide
  Antisense strand to SEQ ID NO: 1684159
aguuuaccaagcauaugag

SEQ ID NO: 1684161 - RNA, 19 nt, Artificial Sequence
  Description of Artificial Sequence: Synthetic oligonucleotide
  Sense strand starting at position 697 of SEQ ID NO: 1561601
uugguaaacuguuugugga

SEQ ID NO: 1684162 - RNA, 19 nt, Artificial Sequence
  Description of Artificial Sequence: Synthetic oligonucleotide
  Antisense strand to SEQ ID NO: 1684161
uccacaaacaguuuaccaa

SEQ ID NO: 1684163 - RNA, 19 nt, Artificial Sequence
  Description of Artificial Sequence: Synthetic oligonucleotide
  Sense strand starting at position 698 of SEQ ID NO: 1561601
ugguaaacuguuuguggau

SEQ ID NO: 1684164 - RNA, 19 nt, Artificial Sequence
  Description of Artificial Sequence: Synthetic oligonucleotide
  Antisense strand to SEQ ID NO: 1684163
auccacaaacaguuuacca

SEQ ID NO: 1684165 - RNA, 19 nt, Artificial Sequence
  Description of Artificial Sequence: Synthetic oligonucleotide
  Sense strand starting at position 699 of SEQ ID NO: 1561601
gguaaacuguuuguggauc

SEQ ID NO: 1684166 - RNA, 19 nt, Artificial Sequence
  Description of Artificial Sequence: Synthetic oligonucleotide
  Antisense strand to SEQ ID NO: 1684165
gauccacaaacaguuuacc

SEQ ID NO: 1684167 - RNA, 19 nt, Artificial Sequence
  Description of Artificial Sequence: Synthetic oligonucleotide
  Sense strand starting at position 1191 of SEQ ID NO: 1561601
guauuauucugaucacagu

SEQ ID NO: 1684168 - RNA, 19 nt, Artificial Sequence
  Description of Artificial Sequence: Synthetic oligonucleotide
  Antisense strand to SEQ ID NO: 1684167
acugugaucagaauaauac

SEQ ID NO: 1684169 - RNA, 19 nt, Artificial Sequence
  Description of Artificial Sequence: Synthetic oligonucleotide
  Sense strand starting at position 1263 of SEQ ID NO: 1561601
uugaaaucccaccgucaca

SEQ ID NO: 1684170 - RNA, 19 nt, Artificial Sequence
  Description of Artificial Sequence: Synthetic oligonucleotide
  Antisense strand to SEQ ID NO: 1684169
ugugacggugggauuucaa

SEQ ID NO: 1684171 - RNA, 19 nt, Artificial Sequence
  Description of Artificial Sequence: Synthetic oligonucleotide
  Sense strand starting at position 2077 of SEQ ID NO: 1561601
ugggaauuguaguugacgu

SEQ ID NO: 1684172 - RNA, 19 nt, Artificial Sequence
  Description of Artificial Sequence: Synthetic oligonucleotide
  Antisense strand to SEQ ID NO: 1684171
acgucaacuacaauuccca

SEQ ID NO: 1684173 - RNA, 19 nt, Artificial Sequence
  Description of Artificial Sequence: Synthetic oligonucleotide
  Sense strand starting at position 2078 of SEQ ID NO: 1561601
gggaauuguaguugacguu

SEQ ID NO: 1684174 - RNA, 19 nt, Artificial Sequence
  Description of Artificial Sequence: Synthetic oligonucleotide
  Antisense strand to SEQ ID NO: 1684173
aacgucaacuacaauuccc

SEQ ID NO: 1684175 - RNA, 19 nt, Artificial Sequence
  Description of Artificial Sequence: Synthetic oligonucleotide
  Sense strand starting at position 2569 of SEQ ID NO: 1561601
ggaaacugcagcuauggua

SEQ ID NO: 1684176 - RNA, 19 nt, Artificial Sequence
  Description of Artificial Sequence: Synthetic oligonucleotide
  Antisense strand to SEQ ID NO: 1684175
uaccauagcugcaguuucc

SEQ ID NO: 1684177 - RNA, 19 nt, Artificial Sequence
  Description of Artificial Sequence: Synthetic oligonucleotide
  Sense strand starting at position 2576 of SEQ ID NO: 1561601
gcagcuaugguaggaaaua

SEQ ID NO: 1684178 - RNA, 19 nt, Artificial Sequence
  Description of Artificial Sequence: Synthetic oligonucleotide
  Antisense strand to SEQ ID NO: 1684177
uauuuccuaccauagcugc

SEQ ID NO: 1684179 - RNA, 19 nt, Artificial Sequence
  Description of Artificial Sequence: Synthetic oligonucleotide
  Sense strand starting at position 2600 of SEQ ID NO: 1561601
uccauuuaugcagggcgua

SEQ ID NO: 1684180 - RNA, 19 nt, Artificial Sequence
  Description of Artificial Sequence: Synthetic oligonucleotide
  Antisense strand to SEQ ID NO: 1684179
uacgcccugcauaaaugga

SEQ ID NO: 1684181 - RNA, 19 nt, Artificial Sequence
  Description of Artificial Sequence: Synthetic oligonucleotide
  Sense strand starting at position 2614 of SEQ ID NO: 1561601
gcguacauggaguaaauca

SEQ ID NO: 1684182 - RNA, 19 nt, Artificial Sequence
  Description of Artificial Sequence: Synthetic oligonucleotide
  Antisense strand to SEQ ID NO: 1684181
ugauuuacuccauguacgc

SEQ ID NO: 1684183 - RNA, 19 nt, Artificial Sequence
  Description of Artificial Sequence: Synthetic oligonucleotide
  Sense strand starting at position 2621 of SEQ ID NO: 1561601
uggaguaaaucacuuugua

SEQ ID NO: 1684184 - RNA, 19 nt, Artificial Sequence
  Description of Artificial Sequence: Synthetic oligonucleotide
  Antisense strand to SEQ ID NO: 1684183
uacaaagugauuuacucca

SEQ ID NO: 1684185 - RNA, 19 nt, Artificial Sequence
  Description of Artificial Sequence: Synthetic oligonucleotide
  Sense strand starting at position 3192 of SEQ ID NO: 1561601
gugugugaccugugauuua

SEQ ID NO: 1684186 - RNA, 19 nt, Artificial Sequence
  Description of Artificial Sequence: Synthetic oligonucleotide
  Antisense strand to SEQ ID NO: 1684185
uaaaucacaggucacacac

SEQ ID NO: 1684187 - RNA, 19 nt, Artificial Sequence
  Description of Artificial Sequence: Synthetic oligonucleotide
  Sense strand starting at position 3221 of SEQ ID NO: 1561601
gugauaaucaugcagcugu

SEQ ID NO: 1684188 - RNA, 19 nt, Artificial Sequence
  Description of Artificial Sequence: Synthetic oligonucleotide
  Antisense strand to SEQ ID NO: 1684187
acagcugcaugauuaucac

SEQ ID NO: 1684189 - RNA, 19 nt, Artificial Sequence
  Description of Artificial Sequence: Synthetic oligonucleotide
  Sense strand starting at position 3256 of SEQ ID NO: 1561601
uguaauugugucugagaca

SEQ ID NO: 1684190 - RNA, 19 nt, Artificial Sequence
  Description of Artificial Sequence: Synthetic oligonucleotide
  Antisense strand to SEQ ID NO: 1684189
ugucucagacacaauuaca

SEQ ID NO: 1684191 - RNA, 19 nt, Artificial Sequence
  Description of Artificial Sequence: Synthetic oligonucleotide
  Sense strand starting at position 3263 of SEQ ID NO: 1561601
gugucugagacagauacuu

SEQ ID NO: 1684192 - RNA, 19 nt, Artificial Sequence
  Description of Artificial Sequence: Synthetic oligonucleotide
  Antisense strand to SEQ ID NO: 1684191
aaguaucugucucagacac

SEQ ID NO: 1684193 - RNA, 19 nt, Artificial Sequence
  Description of Artificial Sequence: Synthetic oligonucleotide
  Sense strand starting at position 3343 of SEQ ID NO: 1561601
ggugacugugaaugguagu

SEQ ID NO: 1684194 - RNA, 19 nt, Artificial Sequence
  Description of Artificial Sequence: Synthetic oligonucleotide
  Antisense strand to SEQ ID NO: 1684193
acuaccauucacagucacc

SEQ ID NO: 1684195 - RNA, 19 nt, Artificial Sequence
  Description of Artificial Sequence: Synthetic oligonucleotide
  Sense strand starting at position 3399 of SEQ ID NO: 1561601
gagaauguaucuucucugu

SEQ ID NO: 1684196 - RNA, 19 nt, Artificial Sequence
  Description of Artificial Sequence: Synthetic oligonucleotide
  Antisense strand to SEQ ID NO: 1684195
acagagaagauacauucuc

SEQ ID NO: 1684197 - RNA, 19 nt, Artificial Sequence
  Description of Artificial Sequence: Synthetic oligonucleotide
  Sense strand starting at position 3704 of SEQ ID NO: 1561601
uggauacugcaaugaugau

SEQ ID NO: 1684198 - RNA, 19 nt, Artificial Sequence
  Description of Artificial Sequence: Synthetic oligonucleotide
  Antisense strand to SEQ ID NO: 1684197
aucaucauugcaguaucca

SEQ ID NO: 1684199 - RNA, 19 nt, Artificial Sequence
  Description of Artificial Sequence: Synthetic oligonucleotide
  Sense strand starting at position 3735 of SEQ ID NO: 1561601
ccuuuauggaggugauguu

SEQ ID NO: 1684200 - RNA, 19 nt, Artificial Sequence
  Description of Artificial Sequence: Synthetic oligonucleotide
  Antisense strand to SEQ ID NO: 1684199
aacaucaccuccauaaagg

SEQ ID NO: 1684201 - RNA, 19 nt, Artificial Sequence
  Description of Artificial Sequence: Synthetic oligonucleotide
  Sense strand starting at position 3736 of SEQ ID NO: 1561601
cuuuauggaggugauguua

SEQ ID NO: 1684202 - RNA, 19 nt, Artificial Sequence
  Description of Artificial Sequence: Synthetic oligonucleotide
  Antisense strand to SEQ ID NO: 1684201
uaacaucaccuccauaaag

SEQ ID NO: 1684203 - RNA, 19 nt, Artificial Sequence
  Description of Artificial Sequence: Synthetic oligonucleotide
  Sense strand starting at position 3795 of SEQ ID NO: 1561601
cugagaaguugguauuuaa

SEQ ID NO: 1684204 - RNA, 19 nt, Artificial Sequence
  Description of Artificial Sequence: Synthetic oligonucleotide
  Antisense strand to SEQ ID NO: 1684203
uuaaauaccaacuucucag

SEQ ID NO: 1684205 - RNA, 19 nt, Artificial Sequence
  Description of Artificial Sequence: Synthetic oligonucleotide
  Sense strand starting at position 3820 of SEQ ID NO: 1561601
gccugaauagagcgaagaa

SEQ ID NO: 1684206 - RNA, 19 nt, Artificial Sequence
  Description of Artificial Sequence: Synthetic oligonucleotide
  Antisense strand to SEQ ID NO: 1684205
uucuucgcucuauucaggc

SEQ ID NO: 1684207 - RNA, 19 nt, Artificial Sequence
  Description of Artificial Sequence: Synthetic oligonucleotide
  Sense strand starting at position 3832 of SEQ ID NO: 1561601
cgaagaacucagggagagu

SEQ ID NO: 1684208 - RNA, 19 nt, Artificial Sequence
  Description of Artificial Sequence: Synthetic oligonucleotide
  Antisense strand to SEQ ID NO: 1684207
acucucccugaguucuucg

SEQ ID NO: 1684209 - RNA, 19 nt, Artificial Sequence
  Description of Artificial Sequence: Synthetic oligonucleotide
  Sense strand starting at position 22 of SEQ ID NO: 1561602
aaacuuuagccugggugau

SEQ ID NO: 1684210 - RNA, 19 nt, Artificial Sequence
  Description of Artificial Sequence: Synthetic oligonucleotide
  Antisense strand to SEQ ID NO: 1684209
aucacccaggcuaaaguuu

SEQ ID NO: 1684211 - RNA, 19 nt, Artificial Sequence
  Description of Artificial Sequence: Synthetic oligonucleotide
  Sense strand starting at position 40 of SEQ ID NO: 1561602
uagagaucuugucucgaaa

SEQ ID NO: 1684212 - RNA, 19 nt, Artificial Sequence
  Description of Artificial Sequence: Synthetic oligonucleotide
  Antisense strand to SEQ ID NO: 1684211
uuucgagacaagaucucua

SEQ ID NO: 1684213 - RNA, 19 nt, Artificial Sequence
  Description of Artificial Sequence: Synthetic oligonucleotide
  Sense strand starting at position 213 of SEQ ID NO: 1561602
cccauaucucuguaguuag

SEQ ID NO: 1684214 - RNA, 19 nt, Artificial Sequence
  Description of Artificial Sequence: Synthetic oligonucleotide
  Antisense strand to SEQ ID NO: 1684213
cuaacuacagagauauggg

SEQ ID NO: 1684215 - RNA, 19 nt, Artificial Sequence
  Description of Artificial Sequence: Synthetic oligonucleotide
  Sense strand starting at position 216 of SEQ ID NO: 1561602
auaucucuguaguuaggaa

SEQ ID NO: 1684216 - RNA, 19 nt, Artificial Sequence
  Description of Artificial Sequence: Synthetic oligonucleotide
  Antisense strand to SEQ ID NO: 1684215
uuccuaacuacagagauau

SEQ ID NO: 1684217 - RNA, 19 nt, Artificial Sequence
  Description of Artificial Sequence: Synthetic oligonucleotide
  Sense strand starting at position 241 of SEQ ID NO: 1561602
ugaaauagcuaugccuaca

SEQ ID NO: 1684218 - RNA, 19 nt, Artificial Sequence
  Description of Artificial Sequence: Synthetic oligonucleotide
  Antisense strand to SEQ ID NO: 1684217
uguaggcauagcuauuuca

SEQ ID NO: 1684219 - RNA, 19 nt, Artificial Sequence
  Description of Artificial Sequence: Synthetic oligonucleotide
  Sense strand starting at position 998 of SEQ ID NO: 1561602
agagcaagacucugugaau

SEQ ID NO: 1684220 - RNA, 19 nt, Artificial Sequence
  Description of Artificial Sequence: Synthetic oligonucleotide
  Antisense strand to SEQ ID NO: 1684219
auucacagagucuugcucu

SEQ ID NO: 1684221 - RNA, 19 nt, Artificial Sequence
  Description of Artificial Sequence: Synthetic oligonucleotide
  Sense strand starting at position 999 of SEQ ID NO: 1561602
gagcaagacucugugaauc

SEQ ID NO: 1684222 - RNA, 19 nt, Artificial Sequence
  Description of Artificial Sequence: Synthetic oligonucleotide
  Antisense strand to SEQ ID NO: 1684221
gauucacagagucuugcuc

SEQ ID NO: 1684223 - RNA, 19 nt, Artificial Sequence
  Description of Artificial Sequence: Synthetic oligonucleotide
  Sense strand starting at position 1155 of SEQ ID NO: 1561602
gaacucuggccugggaaau

SEQ ID NO: 1684224 - RNA, 19 nt, Artificial Sequence
  Description of Artificial Sequence: Synthetic oligonucleotide
  Antisense strand to SEQ ID NO: 1684223
auuucccaggccagaguuc

SEQ ID NO: 1684225 - RNA, 19 nt, Artificial Sequence
  Description of Artificial Sequence: Synthetic oligonucleotide
  Sense strand starting at position 2169 of SEQ ID NO: 1561602
ugagaaagcauaugauguu

SEQ ID NO: 1684226 - RNA, 19 nt, Artificial Sequence
  Description of Artificial Sequence: Synthetic oligonucleotide
  Antisense strand to SEQ ID NO: 1684225
aacaucauaugcuuucuca

SEQ ID NO: 1684227 - RNA, 19 nt, Artificial Sequence
  Description of Artificial Sequence: Synthetic oligonucleotide
  Sense strand starting at position 2175 of SEQ ID NO: 1561602
agcauaugauguuugauag

SEQ ID NO: 1684228 - RNA, 19 nt, Artificial Sequence
  Description of Artificial Sequence: Synthetic oligonucleotide
  Antisense strand to SEQ ID NO: 1684227
cuaucaaacaucauaugcu

SEQ ID NO: 1684229 - RNA, 19 nt, Artificial Sequence
  Description of Artificial Sequence: Synthetic oligonucleotide
  Sense strand starting at position 2176 of SEQ ID NO: 1561602
gcauaugauguuugauaga

SEQ ID NO: 1684230 - RNA, 19 nt, Artificial Sequence
  Description of Artificial Sequence: Synthetic oligonucleotide
  Antisense strand to SEQ ID NO: 1684229
ucuaucaaacaucauaugc

SEQ ID NO: 1684231 - RNA, 19 nt, Artificial Sequence
  Description of Artificial Sequence: Synthetic oligonucleotide
  Sense strand starting at position 2430 of SEQ ID NO: 1561602
uaucacuguuggguacaga

SEQ ID NO: 1684232 - RNA, 19 nt, Artificial Sequence
  Description of Artificial Sequence: Synthetic oligonucleotide
  Antisense strand to SEQ ID NO: 1684231
ucuguacccaacagugaua

SEQ ID NO: 1684233 - RNA, 19 nt, Artificial Sequence
  Description of Artificial Sequence: Synthetic oligonucleotide
  Sense strand starting at position 2440 of SEQ ID NO: 1561602
ggguacagaguuugaaucu

SEQ ID NO: 1684234 - RNA, 19 nt, Artificial Sequence
  Description of Artificial Sequence: Synthetic oligonucleotide
  Antisense strand to SEQ ID NO: 1684233
agauucaaacucuguaccc

SEQ ID NO: 1684235 - RNA, 19 nt, Artificial Sequence
  Description of Artificial Sequence: Synthetic oligonucleotide
  Sense strand starting at position 2447 of SEQ ID NO: 1561602
gaguuugaaucuccuggua

SEQ ID NO: 1684236 - RNA, 19 nt, Artificial Sequence
  Description of Artificial Sequence: Synthetic oligonucleotide
  Antisense strand to SEQ ID NO: 1684235
uaccaggagauucaaacuc

SEQ ID NO: 1684237 - RNA, 19 nt, Artificial Sequence
  Description of Artificial Sequence: Synthetic oligonucleotide
  Sense strand starting at position 2472 of SEQ ID NO: 1561602
ugaugaaaugucugcuuga

SEQ ID NO: 1684238 - RNA, 19 nt, Artificial Sequence
  Description of Artificial Sequence: Synthetic oligonucleotide
  Antisense strand to SEQ ID NO: 1684237
ucaagcagacauuucauca

SEQ ID NO: 1684239 - RNA, 19 nt, Artificial Sequence
  Description of Artificial Sequence: Synthetic oligonucleotide
  Sense strand starting at position 2473 of SEQ ID NO: 1561602
gaugaaaugucugcuugac

SEQ ID NO: 1684240 - RNA, 19 nt, Artificial Sequence
  Description of Artificial Sequence: Synthetic oligonucleotide
  Antisense strand to SEQ ID NO: 1684239
gucaagcagacauuucauc

SEQ ID NO: 1684241 - RNA, 19 nt, Artificial Sequence
  Description of Artificial Sequence: Synthetic oligonucleotide
  Sense strand starting at position 2502 of SEQ ID NO: 1561602
uaggaauuauguucugaau

SEQ ID NO: 1684242 - RNA, 19 nt, Artificial Sequence
  Description of Artificial Sequence: Synthetic oligonucleotide
  Antisense strand to SEQ ID NO: 1684241
auucagaacauaauuccua

SEQ ID NO: 1684243 - RNA, 19 nt, Artificial Sequence
  Description of Artificial Sequence: Synthetic oligonucleotide
  Sense strand starting at position 2525 of SEQ ID NO: 1561602
acauuauaagacuguguac

SEQ ID NO: 1684244 - RNA, 19 nt, Artificial Sequence
  Description of Artificial Sequence: Synthetic oligonucleotide
  Antisense strand to SEQ ID NO: 1684243
guacacagucuuauaaugu

SEQ ID NO: 1684245 - RNA, 19 nt, Artificial Sequence
  Description of Artificial Sequence: Synthetic oligonucleotide
  Sense strand starting at position 2527 of SEQ ID NO: 1561602
auuauaagacuguguacua

SEQ ID NO: 1684246 - RNA, 19 nt, Artificial Sequence
  Description of Artificial Sequence: Synthetic oligonucleotide
  Antisense strand to SEQ ID NO: 1684245
uaguacacagucuuauaau

SEQ ID NO: 1684247 - RNA, 19 nt, Artificial Sequence
  Description of Artificial Sequence: Synthetic oligonucleotide
  Sense strand starting at position 2636 of SEQ ID NO: 1561602
agguccugucaccaacuau

SEQ ID NO: 1684248 - RNA, 19 nt, Artificial Sequence
  Description of Artificial Sequence: Synthetic oligonucleotide
  Antisense strand to SEQ ID NO: 1684247
auaguuggugacaggaccu

SEQ ID NO: 1684249 - RNA, 19 nt, Artificial Sequence
  Description of Artificial Sequence: Synthetic oligonucleotide
  Sense strand starting at position 2643 of SEQ ID NO: 1561602
gucaccaacuaugucauua

SEQ ID NO: 1684250 - RNA, 19 nt, Artificial Sequence
  Description of Artificial Sequence: Synthetic oligonucleotide
  Antisense strand to SEQ ID NO: 1684249
uaaugacauaguuggugac

SEQ ID NO: 1684251 - RNA, 19 nt, Artificial Sequence
  Description of Artificial Sequence: Synthetic oligonucleotide
  Sense strand starting at position 2699 of SEQ ID NO: 1561602
cagggauacuucucugcua

SEQ ID NO: 1684252 - RNA, 19 nt, Artificial Sequence
  Description of Artificial Sequence: Synthetic oligonucleotide
  Antisense strand to SEQ ID NO: 1684251
uagcagagaaguaucccug

SEQ ID NO: 1684253 - RNA, 19 nt, Artificial Sequence
  Description of Artificial Sequence: Synthetic oligonucleotide
  Sense strand starting at position 2701 of SEQ ID NO: 1561602
gggauacuucucugcuaca

SEQ ID NO: 1684254 - RNA, 19 nt, Artificial Sequence
  Description of Artificial Sequence: Synthetic oligonucleotide
  Antisense strand to SEQ ID NO: 1684253
uguagcagagaaguauccc

SEQ ID NO: 1684255 - RNA, 19 nt, Artificial Sequence
  Description of Artificial Sequence: Synthetic oligonucleotide
  Sense strand starting at position 2702 of SEQ ID NO: 1561602
ggauacuucucugcuacaa

SEQ ID NO: 1684256 - RNA, 19 nt, Artificial Sequence
  Description of Artificial Sequence: Synthetic oligonucleotide
  Antisense strand to SEQ ID NO: 1684255
uuguagcagagaaguaucc

SEQ ID NO: 1684257 - RNA, 19 nt, Artificial Sequence
  Description of Artificial Sequence: Synthetic oligonucleotide
  Sense strand starting at position 3067 of SEQ ID NO: 1561602
aaauguagacaaugugagu

SEQ ID NO: 1684258 - RNA, 19 nt, Artificial Sequence
  Description of Artificial Sequence: Synthetic oligonucleotide
  Antisense strand to SEQ ID NO: 1684257
acucacauugucuacauuu

SEQ ID NO: 1684259 - RNA, 19 nt, Artificial Sequence
  Description of Artificial Sequence: Synthetic oligonucleotide
  Sense strand starting at position 3151 of SEQ ID NO: 1561602
caaggaguuccuugagcuc

SEQ ID NO: 1684260 - RNA, 19 nt, Artificial Sequence
  Description of Artificial Sequence: Synthetic oligonucleotide
  Antisense strand to SEQ ID NO: 1684259
gagcucaaggaacuccuug

SEQ ID NO: 1684261 - RNA, 19 nt, Artificial Sequence
  Description of Artificial Sequence: Synthetic oligonucleotide
  Sense strand starting at position 3160 of SEQ ID NO: 1561602
ccuugagcucuguaaggag

SEQ ID NO: 1684262 - RNA, 19 nt, Artificial Sequence
  Description of Artificial Sequence: Synthetic oligonucleotide
  Antisense strand to SEQ ID NO: 1684261
cuccuuacagagcucaagg

SEQ ID NO: 1684263 - RNA, 19 nt, Artificial Sequence
  Description of Artificial Sequence: Synthetic oligonucleotide
  Sense strand starting at position 3213 of SEQ ID NO: 1561602
uucuguuuggaggagguua

SEQ ID NO: 1684264 - RNA, 19 nt, Artificial Sequence
  Description of Artificial Sequence: Synthetic oligonucleotide
  Antisense strand to SEQ ID NO: 1684263
uaaccuccuccaaacagaa

SEQ ID NO: 1684265 - RNA, 19 nt, Artificial Sequence
  Description of Artificial Sequence: Synthetic oligonucleotide
  Sense strand starting at position 3215 of SEQ ID NO: 1561602
cuguuuggaggagguuauu

SEQ ID NO: 1684266 - RNA, 19 nt, Artificial Sequence
  Description of Artificial Sequence: Synthetic oligonucleotide
  Antisense strand to SEQ ID NO: 1684265
aauaaccuccuccaaacag

SEQ ID NO: 1684267 - RNA, 19 nt, Artificial Sequence
  Description of Artificial Sequence: Synthetic oligonucleotide
  Sense strand starting at position 3292 of SEQ ID NO: 1561602
agcaguuagaccugaggca

SEQ ID NO: 1684268 - RNA, 19 nt, Artificial Sequence
  Description of Artificial Sequence: Synthetic oligonucleotide
  Antisense strand to SEQ ID NO: 1684267
ugccucaggucuaacugcu

SEQ ID NO: 1684269 - RNA, 19 nt, Artificial Sequence
  Description of Artificial Sequence: Synthetic oligonucleotide
  Sense strand starting at position 3311 of SEQ ID NO: 1561602
cgaugauaucaguaagagu

SEQ ID NO: 1684270 - RNA, 19 nt, Artificial Sequence
  Description of Artificial Sequence: Synthetic oligonucleotide
  Antisense strand to SEQ ID NO: 1684269
acucuuacugauaucaucg

SEQ ID NO: 1684271 - RNA, 19 nt, Artificial Sequence
  Description of Artificial Sequence: Synthetic oligonucleotide
  Sense strand starting at position 3380 of SEQ ID NO: 1561602
auuugacucuguucucagu

SEQ ID NO: 1684272 - RNA, 19 nt, Artificial Sequence
  Description of Artificial Sequence: Synthetic oligonucleotide
  Antisense strand to SEQ ID NO: 1684271
acugagaacagagucaaau

SEQ ID NO: 1684273 - RNA, 19 nt, Artificial Sequence
  Description of Artificial Sequence: Synthetic oligonucleotide
  Sense strand starting at position 3390 of SEQ ID NO: 1561602
guucucagugcuuucugua

SEQ ID NO: 1684274 - RNA, 19 nt, Artificial Sequence
  Description of Artificial Sequence: Synthetic oligonucleotide
  Antisense strand to SEQ ID NO: 1684273
uacagaaagcacugagaac

SEQ ID NO: 1684275 - RNA, 19 nt, Artificial Sequence
  Description of Artificial Sequence: Synthetic oligonucleotide
  Sense strand starting at position 3427 of SEQ ID NO: 1561602
acaacaguccuguaaagua

SEQ ID NO: 1684276 - RNA, 19 nt, Artificial Sequence
  Description of Artificial Sequence: Synthetic oligonucleotide
  Antisense strand to SEQ ID NO: 1684275
uacuuuacaggacuguugu

SEQ ID NO: 1684277 - RNA, 19 nt, Artificial Sequence
  Description of Artificial Sequence: Synthetic oligonucleotide
  Sense strand starting at position 3434 of SEQ ID NO: 1561602
uccuguaaaguagauccua

SEQ ID NO: 1684278 - RNA, 19 nt, Artificial Sequence
  Description of Artificial Sequence: Synthetic oligonucleotide
  Antisense strand to SEQ ID NO: 1684277
uaggaucuacuuuacagga

SEQ ID NO: 1684279 - RNA, 19 nt, Artificial Sequence
  Description of Artificial Sequence: Synthetic oligonucleotide
  Sense strand starting at position 3545 of SEQ ID NO: 1561602
uuugauaccuggcuccaga

SEQ ID NO: 1684280 - RNA, 19 nt, Artificial Sequence
  Description of Artificial Sequence: Synthetic oligonucleotide
  Antisense strand to SEQ ID NO: 1684279
ucuggagccagguaucaaa

SEQ ID NO: 1684281 - RNA, 19 nt, Artificial Sequence
  Description of Artificial Sequence: Synthetic oligonucleotide
  Sense strand starting at position 3565 of SEQ ID NO: 1561602
ugggacucugaaugcuaca

SEQ ID NO: 1684282 - RNA, 19 nt, Artificial Sequence
  Description of Artificial Sequence: Synthetic oligonucleotide
  Antisense strand to SEQ ID NO: 1684281
uguagcauucagaguccca

SEQ ID NO: 1684283 - RNA, 19 nt, Artificial Sequence
  Description of Artificial Sequence: Synthetic oligonucleotide
  Sense strand starting at position 3570 of SEQ ID NO: 1561602
cucugaaugcuacauuaag

SEQ ID NO: 1684284 - RNA, 19 nt, Artificial Sequence
  Description of Artificial Sequence: Synthetic oligonucleotide
  Antisense strand to SEQ ID NO: 1684283
cuuaauguagcauucagag

SEQ ID NO: 1684285 - RNA, 19 nt, Artificial Sequence
  Description of Artificial Sequence: Synthetic oligonucleotide
  Sense strand starting at position 3852 of SEQ ID NO: 1561602
gguagugcugccuuuggua

SEQ ID NO: 1684286 - RNA, 19 nt, Artificial Sequence
  Description of Artificial Sequence: Synthetic oligonucleotide
  Antisense strand to SEQ ID NO: 1684285
uaccaaaggcagcacuacc

SEQ ID NO: 1684287 - RNA, 19 nt, Artificial Sequence
  Description of Artificial Sequence: Synthetic oligonucleotide
  Sense strand starting at position 3932 of SEQ ID NO: 1561602
uccagugugagugaggaaa

SEQ ID NO: 1684288 - RNA, 19 nt, Artificial Sequence
  Description of Artificial Sequence: Synthetic oligonucleotide
  Antisense strand to SEQ ID NO: 1684287
uuuccucacucacacugga

SEQ ID NO: 1684289 - RNA, 19 nt, Artificial Sequence
  Description of Artificial Sequence: Synthetic oligonucleotide
  Sense strand starting at position 524 of SEQ ID NO: 1561603
uccucauauccugggugau

SEQ ID NO: 1684290 - RNA, 19 nt, Artificial Sequence
  Description of Artificial Sequence: Synthetic oligonucleotide
  Antisense strand to SEQ ID NO: 1684289
aucacccaggauaugagga

SEQ ID NO: 1684291 - RNA, 19 nt, Artificial Sequence
  Description of Artificial Sequence: Synthetic oligonucleotide
  Sense strand starting at position 525 of SEQ ID NO: 1561603
ccucauauccugggugaug

SEQ ID NO: 1684292 - RNA, 19 nt, Artificial Sequence
  Description of Artificial Sequence: Synthetic oligonucleotide
  Antisense strand to SEQ ID NO: 1684291
caucacccaggauaugagg

SEQ ID NO: 1684293 - RNA, 19 nt, Artificial Sequence
  Description of Artificial Sequence: Synthetic oligonucleotide
  Sense strand starting at position 536 of SEQ ID NO: 1561603
gggugauggguagagucau

SEQ ID NO: 1684294 - RNA, 19 nt, Artificial Sequence
  Description of Artificial Sequence: Synthetic oligonucleotide
  Antisense strand to SEQ ID NO: 1684293
augacucuacccaucaccc

SEQ ID NO: 1684295 - RNA, 19 nt, Artificial Sequence
  Description of Artificial Sequence: Synthetic oligonucleotide
  Sense strand starting at position 699 of SEQ ID NO: 1561603
cauaguaguagugaguaga

SEQ ID NO: 1684296 - RNA, 19 nt, Artificial Sequence
  Description of Artificial Sequence: Synthetic oligonucleotide
  Antisense strand to SEQ ID NO: 1684295
ucuacucacuacuacuaug

SEQ ID NO: 1684297 - RNA, 19 nt, Artificial Sequence
  Description of Artificial Sequence: Synthetic oligonucleotide
  Sense strand starting at position 702 of SEQ ID NO: 1561603
aguaguagugaguagaaua

SEQ ID NO: 1684298 - RNA, 19 nt, Artificial Sequence
  Description of Artificial Sequence: Synthetic oligonucleotide
  Antisense strand to SEQ ID NO: 1684297
uauucuacucacuacuacu

SEQ ID NO: 1684299 - RNA, 19 nt, Artificial Sequence
  Description of Artificial Sequence: Synthetic oligonucleotide
  Sense strand starting at position 797 of SEQ ID NO: 1561603
agagcaauuguccaacaug

SEQ ID NO: 1684300 - RNA, 19 nt, Artificial Sequence
  Description of Artificial Sequence: Synthetic oligonucleotide
  Antisense strand to SEQ ID NO: 1684299
cauguuggacaauugcucu

SEQ ID NO: 1684301 - RNA, 19 nt, Artificial Sequence
  Description of Artificial Sequence: Synthetic oligonucleotide
  Sense strand starting at position 898 of SEQ ID NO: 1561603
augguuaguacaugaggua

SEQ ID NO: 1684302 - RNA, 19 nt, Artificial Sequence
  Description of Artificial Sequence: Synthetic oligonucleotide
  Antisense strand to SEQ ID NO: 1684301
uaccucauguacuaaccau

SEQ ID NO: 1684303 - RNA, 19 nt, Artificial Sequence
  Description of Artificial Sequence: Synthetic oligonucleotide
  Sense strand starting at position 943 of SEQ ID NO: 1561603
gccauuuaacaauguuugu

SEQ ID NO: 1684304 - RNA, 19 nt, Artificial Sequence
  Description of Artificial Sequence: Synthetic oligonucleotide
  Antisense strand to SEQ ID NO: 1684303
acaaacauuguuaaauggc

SEQ ID NO: 1684305 - RNA, 19 nt, Artificial Sequence
  Description of Artificial Sequence: Synthetic oligonucleotide
  Sense strand starting at position 1247 of SEQ ID NO: 1561603
cuuuguauuugaucuuagu

SEQ ID NO: 1684306 - RNA, 19 nt, Artificial Sequence
  Description of Artificial Sequence: Synthetic oligonucleotide
  Antisense strand to SEQ ID NO: 1684305
acuaagaucaaauacaaag

SEQ ID NO: 1684307 - RNA, 19 nt, Artificial Sequence
  Description of Artificial Sequence: Synthetic oligonucleotide
  Sense strand starting at position 1382 of SEQ ID NO: 1561603
ucagauucucauuggccua

SEQ ID NO: 1684308 - RNA, 19 nt, Artificial Sequence
  Description of Artificial Sequence: Synthetic oligonucleotide
  Antisense strand to SEQ ID NO: 1684307
uaggccaaugagaaucuga

SEQ ID NO: 1684309 - RNA, 19 nt, Artificial Sequence
  Description of Artificial Sequence: Synthetic oligonucleotide
  Sense strand starting at position 1507 of SEQ ID NO: 1561603
guaauucuaacagguugga

SEQ ID NO: 1684310 - RNA, 19 nt, Artificial Sequence
  Description of Artificial Sequence: Synthetic oligonucleotide
  Antisense strand to SEQ ID NO: 1684309
uccaaccuguuagaauuac

SEQ ID NO: 1684311 - RNA, 19 nt, Artificial Sequence
  Description of Artificial Sequence: Synthetic oligonucleotide
  Sense strand starting at position 1691 of SEQ ID NO: 1561603
ccaggaauuccaggcuagu

SEQ ID NO: 1684312 - RNA, 19 nt, Artificial Sequence
  Description of Artificial Sequence: Synthetic oligonucleotide
  Antisense strand to SEQ ID NO: 1684311
acuagccuggaauuccugg

SEQ ID NO: 1684313 - RNA, 19 nt, Artificial Sequence
  Description of Artificial Sequence: Synthetic oligonucleotide
  Sense strand starting at position 1810 of SEQ ID NO: 1561603
acgagucagaguuaaucau

SEQ ID NO: 1684314 - RNA, 19 nt, Artificial Sequence
  Description of Artificial Sequence: Synthetic oligonucleotide
  Antisense strand to SEQ ID NO: 1684313
augauuaacucugacucgu

SEQ ID NO: 1684315 - RNA, 19 nt, Artificial Sequence
  Description of Artificial Sequence: Synthetic oligonucleotide
  Sense strand starting at position 2121 of SEQ ID NO: 1561603
uacguaaucggcguugauu

SEQ ID NO: 1684316 - RNA, 19 nt, Artificial Sequence
  Description of Artificial Sequence: Synthetic oligonucleotide
  Antisense strand to SEQ ID NO: 1684315
aaucaacgccgauuacgua

SEQ ID NO: 1684317 - RNA, 19 nt, Artificial Sequence
  Description of Artificial Sequence: Synthetic oligonucleotide
  Sense strand starting at position 2122 of SEQ ID NO: 1561603
acguaaucggcguugauua

SEQ ID NO: 1684318 - RNA, 19 nt, Artificial Sequence
  Description of Artificial Sequence: Synthetic oligonucleotide
  Antisense strand to SEQ ID NO: 1684317
uaaucaacgccgauuacgu

SEQ ID NO: 1684319 - RNA, 19 nt, Artificial Sequence
  Description of Artificial Sequence: Synthetic oligonucleotide
  Sense strand starting at position 2135 of SEQ ID NO: 1561603
ugauuaugguucccacuga

SEQ ID NO: 1684320 - RNA, 19 nt, Artificial Sequence
  Description of Artificial Sequence: Synthetic oligonucleotide
  Antisense strand to SEQ ID NO: 1684319
ucagugggaaccauaauca

SEQ ID NO: 1684321 - RNA, 19 nt, Artificial Sequence
  Description of Artificial Sequence: Synthetic oligonucleotide
  Sense strand starting at position 2186 of SEQ ID NO: 1561603
augccuacugugcaaauau

SEQ ID NO: 1684322 - RNA, 19 nt, Artificial Sequence
  Description of Artificial Sequence: Synthetic oligonucleotide
  Antisense strand to SEQ ID NO: 1684321
auauuugcacaguaggcau

SEQ ID NO: 1684323 - RNA, 19 nt, Artificial Sequence
  Description of Artificial Sequence: Synthetic oligonucleotide
  Sense strand starting at position 2222 of SEQ ID NO: 1561603
ugucauacugcugaaguau

SEQ ID NO: 1684324 - RNA, 19 nt, Artificial Sequence
  Description of Artificial Sequence: Synthetic oligonucleotide
  Antisense strand to SEQ ID NO: 1684323
auacuucagcaguaugaca

SEQ ID NO: 1684325 - RNA, 19 nt, Artificial Sequence
  Description of Artificial Sequence: Synthetic oligonucleotide
  Sense strand starting at position 2234 of SEQ ID NO: 1561603
gaaguauuugguggccuca

SEQ ID NO: 1684326 - RNA, 19 nt, Artificial Sequence
  Description of Artificial Sequence: Synthetic oligonucleotide
  Antisense strand to SEQ ID NO: 1684325
ugaggccaccaaauacuuc

SEQ ID NO: 1684327 - RNA, 19 nt, Artificial Sequence
  Description of Artificial Sequence: Synthetic oligonucleotide
  Sense strand starting at position 2420 of SEQ ID NO: 1561603
aagagacagucuuuguuga

SEQ ID NO: 1684328 - RNA, 19 nt, Artificial Sequence
  Description of Artificial Sequence: Synthetic oligonucleotide
  Antisense strand to SEQ ID NO: 1684327
ucaacaaagacugucucuu

SEQ ID NO: 1684329 - RNA, 19 nt, Artificial Sequence
  Description of Artificial Sequence: Synthetic oligonucleotide
  Sense strand starting at position 2421 of SEQ ID NO: 1561603
agagacagucuuuguugau

SEQ ID NO: 1684330 - RNA, 19 nt, Artificial Sequence
  Description of Artificial Sequence: Synthetic oligonucleotide
  Antisense strand to SEQ ID NO: 1684329
aucaacaaagacugucucu

SEQ ID NO: 1684331 - RNA, 19 nt, Artificial Sequence
  Description of Artificial Sequence: Synthetic oligonucleotide
  Sense strand starting at position 2422 of SEQ ID NO: 1561603
gagacagucuuuguugaua

SEQ ID NO: 1684332 - RNA, 19 nt, Artificial Sequence
  Description of Artificial Sequence: Synthetic oligonucleotide
  Antisense strand to SEQ ID NO: 1684331
uaucaacaaagacugucuc

SEQ ID NO: 1684333 - RNA, 19 nt, Artificial Sequence
  Description of Artificial Sequence: Synthetic oligonucleotide
  Sense strand starting at position 2425 of SEQ ID NO: 1561603
acagucuuuguugauacau

SEQ ID NO: 1684334 - RNA, 19 nt, Artificial Sequence
  Description of Artificial Sequence: Synthetic oligonucleotide
  Antisense strand to SEQ ID NO: 1684333
auguaucaacaaagacugu

SEQ ID NO: 1684335 - RNA, 19 nt, Artificial Sequence
  Description of Artificial Sequence: Synthetic oligonucleotide
  Sense strand starting at position 2553 of SEQ ID NO: 1561603
augggaaagcuuuguuuga

SEQ ID NO: 1684336 - RNA, 19 nt, Artificial Sequence
  Description of Artificial Sequence: Synthetic oligonucleotide
  Antisense strand to SEQ ID NO: 1684335
ucaaacaaagcuuucccau

SEQ ID NO: 1684337 - RNA, 19 nt, Artificial Sequence
  Description of Artificial Sequence: Synthetic oligonucleotide
  Sense strand starting at position 2554 of SEQ ID NO: 1561603
ugggaaagcuuuguuugaa

SEQ ID NO: 1684338 - RNA, 19 nt, Artificial Sequence
  Description of Artificial Sequence: Synthetic oligonucleotide
  Antisense strand to SEQ ID NO: 1684337
uucaaacaaagcuuuccca

SEQ ID NO: 1684339 - RNA, 19 nt, Artificial Sequence
  Description of Artificial Sequence: Synthetic oligonucleotide
  Sense strand starting at position 2578 of SEQ ID NO: 1561603
cuaaaucagugguuugaua

SEQ ID NO: 1684340 - RNA, 19 nt, Artificial Sequence
  Description of Artificial Sequence: Synthetic oligonucleotide
  Antisense strand to SEQ ID NO: 1684339
uaucaaaccacugauuuag

SEQ ID NO: 1684341 - RNA, 19 nt, Artificial Sequence
  Description of Artificial Sequence: Synthetic oligonucleotide
  Sense strand starting at position 2580 of SEQ ID NO: 1561603
aaaucagugguuugauauc

SEQ ID NO: 1684342 - RNA, 19 nt, Artificial Sequence
  Description of Artificial Sequence: Synthetic oligonucleotide
  Antisense strand to SEQ ID NO: 1684341
gauaucaaaccacugauuu

SEQ ID NO: 1684343 - RNA, 19 nt, Artificial Sequence
  Description of Artificial Sequence: Synthetic oligonucleotide
  Sense strand starting at position 3045 of SEQ ID NO: 1561603
aguagaacuuuccugaugu

SEQ ID NO: 1684344 - RNA, 19 nt, Artificial Sequence
  Description of Artificial Sequence: Synthetic oligonucleotide
  Antisense strand to SEQ ID NO: 1684343
acaucaggaaaguucuacu

SEQ ID NO: 1684345 - RNA, 19 nt, Artificial Sequence
  Description of Artificial Sequence: Synthetic oligonucleotide
  Sense strand starting at position 3047 of SEQ ID NO: 1561603
uagaacuuuccugaugugu

SEQ ID NO: 1684346 - RNA, 19 nt, Artificial Sequence
  Description of Artificial Sequence: Synthetic oligonucleotide
  Antisense strand to SEQ ID NO: 1684345
acacaucaggaaaguucua

SEQ ID NO: 1684347 - RNA, 19 nt, Artificial Sequence
  Description of Artificial Sequence: Synthetic oligonucleotide
  Sense strand starting at position 3078 of SEQ ID NO: 1561603
gaaguaagacuaugucagu

SEQ ID NO: 1684348 - RNA, 19 nt, Artificial Sequence
  Description of Artificial Sequence: Synthetic oligonucleotide
  Antisense strand to SEQ ID NO: 1684347
acugacauagucuuacuuc

SEQ ID NO: 1684349 - RNA, 19 nt, Artificial Sequence
  Description of Artificial Sequence: Synthetic oligonucleotide
  Sense strand starting at position 3079 of SEQ ID NO: 1561603
aaguaagacuaugucagua

SEQ ID NO: 1684350 - RNA, 19 nt, Artificial Sequence
  Description of Artificial Sequence: Synthetic oligonucleotide
  Antisense strand to SEQ ID NO: 1684349
uacugacauagucuuacuu

SEQ ID NO: 1684351 - RNA, 19 nt, Artificial Sequence
  Description of Artificial Sequence: Synthetic oligonucleotide
  Sense strand starting at position 3083 of SEQ ID NO: 1561603
aagacuaugucaguaaagu

SEQ ID NO: 1684352 - RNA, 19 nt, Artificial Sequence
  Description of Artificial Sequence: Synthetic oligonucleotide
  Antisense strand to SEQ ID NO: 1684351
acuuuacugacauagucuu

SEQ ID NO: 1684353 - RNA, 19 nt, Artificial Sequence
  Description of Artificial Sequence: Synthetic oligonucleotide
  Sense strand starting at position 3084 of SEQ ID NO: 1561603
agacuaugucaguaaagug

SEQ ID NO: 1684354 - RNA, 19 nt, Artificial Sequence
  Description of Artificial Sequence: Synthetic oligonucleotide
  Antisense strand to SEQ ID NO: 1684353
cacuuuacugacauagucu

SEQ ID NO: 1684355 - RNA, 19 nt, Artificial Sequence
  Description of Artificial Sequence: Synthetic oligonucleotide
  Sense strand starting at position 3191 of SEQ ID NO: 1561603
cacugagguguugacucua

SEQ ID NO: 1684356 - RNA, 19 nt, Artificial Sequence
  Description of Artificial Sequence: Synthetic oligonucleotide
  Antisense strand to SEQ ID NO: 1684355
uagagucaacaccucagug

SEQ ID NO: 1684357 - RNA, 19 nt, Artificial Sequence
  Description of Artificial Sequence: Synthetic oligonucleotide
  Sense strand starting at position 3196 of SEQ ID NO: 1561603
agguguugacucuaacuca

SEQ ID NO: 1684358 - RNA, 19 nt, Artificial Sequence
  Description of Artificial Sequence: Synthetic oligonucleotide
  Antisense strand to SEQ ID NO: 1684357
ugaguuagagucaacaccu

SEQ ID NO: 1684359 - RNA, 19 nt, Artificial Sequence
  Description of Artificial Sequence: Synthetic oligonucleotide
  Sense strand starting at position 3328 of SEQ ID NO: 1561603
guaaacucauagucuuauu

SEQ ID NO: 1684360 - RNA, 19 nt, Artificial Sequence
  Description of Artificial Sequence: Synthetic oligonucleotide
  Antisense strand to SEQ ID NO: 1684359
aauaagacuaugaguuuac

SEQ ID NO: 1684361 - RNA, 19 nt, Artificial Sequence
  Description of Artificial Sequence: Synthetic oligonucleotide
  Sense strand starting at position 3338 of SEQ ID NO: 1561603
agucuuauuucugugaagc

SEQ ID NO: 1684362 - RNA, 19 nt, Artificial Sequence
  Description of Artificial Sequence: Synthetic oligonucleotide
  Antisense strand to SEQ ID NO: 1684361
gcuucacagaaauaagacu

SEQ ID NO: 1684363 - RNA, 19 nt, Artificial Sequence
  Description of Artificial Sequence: Synthetic oligonucleotide
  Sense strand starting at position 3339 of SEQ ID NO: 1561603
gucuuauuucugugaagcu

SEQ ID NO: 1684364 - RNA, 19 nt, Artificial Sequence
  Description of Artificial Sequence: Synthetic oligonucleotide
  Antisense strand to SEQ ID NO: 1684363
agcuucacagaaauaagac

SEQ ID NO: 1684365 - RNA, 19 nt, Artificial Sequence
  Description of Artificial Sequence: Synthetic oligonucleotide
  Sense strand starting at position 3390 of SEQ ID NO: 1561603
ucugcugaugucuauuaau

SEQ ID NO: 1684366 - RNA, 19 nt, Artificial Sequence
  Description of Artificial Sequence: Synthetic oligonucleotide
  Antisense strand to SEQ ID NO: 1684365
auuaauagacaucagcaga

SEQ ID NO: 1684367 - RNA, 19 nt, Artificial Sequence
  Description of Artificial Sequence: Synthetic oligonucleotide
  Sense strand starting at position 3792 of SEQ ID NO: 1561603
ggcuaagacuuucccaaca

SEQ ID NO: 1684368 - RNA, 19 nt, Artificial Sequence
  Description of Artificial Sequence: Synthetic oligonucleotide
  Antisense strand to SEQ ID NO: 1684367
uguugggaaagucuuagcc

SEQ ID NO: 1684369 - RNA, 19 nt, Artificial Sequence
  Description of Artificial Sequence: Synthetic oligonucleotide
  Sense strand starting at position 139 of SEQ ID NO: 1561604
cuguuugguucucugagaa

SEQ ID NO: 1684370 - RNA, 19 nt, Artificial Sequence
  Description of Artificial Sequence: Synthetic oligonucleotide
  Antisense strand to SEQ ID NO: 1684369
uucucagagaaccaaacag

SEQ ID NO: 1684371 - RNA, 19 nt, Artificial Sequence
  Description of Artificial Sequence: Synthetic oligonucleotide
  Sense strand starting at position 378 of SEQ ID NO: 1561604
ccaaauguguccuuaaagg

SEQ ID NO: 1684372 - RNA, 19 nt, Artificial Sequence
  Description of Artificial Sequence: Synthetic oligonucleotide
  Antisense strand to SEQ ID NO: 1684371
ccuuuaaggacacauuugg

SEQ ID NO: 1684373 - RNA, 19 nt, Artificial Sequence
  Description of Artificial Sequence: Synthetic oligonucleotide
  Sense strand starting at position 444 of SEQ ID NO: 1561604
cugagaaaguggguuccuu

SEQ ID NO: 1684374 - RNA, 19 nt, Artificial Sequence
  Description of Artificial Sequence: Synthetic oligonucleotide
  Antisense strand to SEQ ID NO: 1684373
aaggaacccacuuucucag

SEQ ID NO: 1684375 - RNA, 19 nt, Artificial Sequence
  Description of Artificial Sequence: Synthetic oligonucleotide
  Sense strand starting at position 452 of SEQ ID NO: 1561604
guggguuccuugcugaaug

SEQ ID NO: 1684376 - RNA, 19 nt, Artificial Sequence
  Description of Artificial Sequence: Synthetic oligonucleotide
  Antisense strand to SEQ ID NO: 1684375
cauucagcaaggaacccac

SEQ ID NO: 1684377 - RNA, 19 nt, Artificial Sequence
  Description of Artificial Sequence: Synthetic oligonucleotide
  Sense strand starting at position 475 of SEQ ID NO: 1561604
caugaaaugucuuugcgga

SEQ ID NO: 1684378 - RNA, 19 nt, Artificial Sequence
  Description of Artificial Sequence: Synthetic oligonucleotide
  Antisense strand to SEQ ID NO: 1684377
uccgcaaagacauuucaug

SEQ ID NO: 1684379 - RNA, 19 nt, Artificial Sequence
  Description of Artificial Sequence: Synthetic oligonucleotide
  Sense strand starting at position 476 of SEQ ID NO: 1561604
augaaaugucuuugcggaa

SEQ ID NO: 1684380 - RNA, 19 nt, Artificial Sequence
  Description of Artificial Sequence: Synthetic oligonucleotide
  Antisense strand to SEQ ID NO: 1684379
uuccgcaaagacauuucau

SEQ ID NO: 1684381 - RNA, 19 nt, Artificial Sequence
  Description of Artificial Sequence: Synthetic oligonucleotide
  Sense strand starting at position 477 of SEQ ID NO: 1561604
ugaaaugucuuugcggaaa

SEQ ID NO: 1684382 - RNA, 19 nt, Artificial Sequence
  Description of Artificial Sequence: Synthetic oligonucleotide
  Antisense strand to SEQ ID NO: 1684381
uuuccgcaaagacauuuca

SEQ ID NO: 1684383 - RNA, 19 nt, Artificial Sequence
  Description of Artificial Sequence: Synthetic oligonucleotide
  Sense strand starting at position 911 of SEQ ID NO: 1561604
ucggaucaucucugacacu

SEQ ID NO: 1684384 - RNA, 19 nt, Artificial Sequence
  Description of Artificial Sequence: Synthetic oligonucleotide
  Antisense strand to SEQ ID NO: 1684383
agugucagagaugauccga

SEQ ID NO: 1684385 - RNA, 19 nt, Artificial Sequence
  Description of Artificial Sequence: Synthetic oligonucleotide
  Sense strand starting at position 941 of SEQ ID NO: 1561604
cagccaucucgacaucuga

SEQ ID NO: 1684386 - RNA, 19 nt, Artificial Sequence
  Description of Artificial Sequence: Synthetic oligonucleotide
  Antisense strand to SEQ ID NO: 1684385
ucagaugucgagauggcug

SEQ ID NO: 1684387 - RNA, 19 nt, Artificial Sequence
  Description of Artificial Sequence: Synthetic oligonucleotide
  Sense strand starting at position 967 of SEQ ID NO: 1561604
auaagauauucuuugccga

SEQ ID NO: 1684388 - RNA, 19 nt, Artificial Sequence
  Description of Artificial Sequence: Synthetic oligonucleotide
  Antisense strand to SEQ ID NO: 1684387
ucggcaaagaauaucuuau

SEQ ID NO: 1684389 - RNA, 19 nt, Artificial Sequence
  Description of Artificial Sequence: Synthetic oligonucleotide
  Sense strand starting at position 968 of SEQ ID NO: 1561604
uaagauauucuuugccgag

SEQ ID NO: 1684390 - RNA, 19 nt, Artificial Sequence
  Description of Artificial Sequence: Synthetic oligonucleotide
  Antisense strand to SEQ ID NO: 1684389
cucggcaaagaauaucuua

SEQ ID NO: 1684391 - RNA, 19 nt, Artificial Sequence
  Description of Artificial Sequence: Synthetic oligonucleotide
  Sense strand starting at position 970 of SEQ ID NO: 1561604
agauauucuuugccgagca

SEQ ID NO: 1684392 - RNA, 19 nt, Artificial Sequence
  Description of Artificial Sequence: Synthetic oligonucleotide
  Antisense strand to SEQ ID NO: 1684391
ugcucggcaaagaauaucu

SEQ ID NO: 1684393 - RNA, 19 nt, Artificial Sequence
  Description of Artificial Sequence: Synthetic oligonucleotide
  Sense strand starting at position 983 of SEQ ID NO: 1561604
cgagcaaguugacuauaga

SEQ ID NO: 1684394 - RNA, 19 nt, Artificial Sequence
  Description of Artificial Sequence: Synthetic oligonucleotide
  Antisense strand to SEQ ID NO: 1684393
ucuauagucaacuugcucg

SEQ ID NO: 1684395 - RNA, 19 nt, Artificial Sequence
  Description of Artificial Sequence: Synthetic oligonucleotide
  Sense strand starting at position 1125 of SEQ ID NO: 1561604
agaaucagcucuguggaca

SEQ ID NO: 1684396 - RNA, 19 nt, Artificial Sequence
  Description of Artificial Sequence: Synthetic oligonucleotide
  Antisense strand to SEQ ID NO: 1684395
uguccacagagcugauucu

SEQ ID NO: 1684397 - RNA, 19 nt, Artificial Sequence
  Description of Artificial Sequence: Synthetic oligonucleotide
  Sense strand starting at position 1190 of SEQ ID NO: 1561604
augagucauuuagaugaaa

SEQ ID NO: 1684398 - RNA, 19 nt, Artificial Sequence
  Description of Artificial Sequence: Synthetic oligonucleotide
  Antisense strand to SEQ ID NO: 1684397
uuucaucuaaaugacucau

SEQ ID NO: 1684399 - RNA, 19 nt, Artificial Sequence
  Description of Artificial Sequence: Synthetic oligonucleotide
  Sense strand starting at position 1276 of SEQ ID NO: 1561604
agcucaccuuguguuagaa

SEQ ID NO: 1684400 - RNA, 19 nt, Artificial Sequence
  Description of Artificial Sequence: Synthetic oligonucleotide
  Antisense strand to SEQ ID NO: 1684399
uucuaacacaaggugagcu

SEQ ID NO: 1684401 - RNA, 19 nt, Artificial Sequence
  Description of Artificial Sequence: Synthetic oligonucleotide
  Sense strand starting at position 1319 of SEQ ID NO: 1561604
gaggcagaucccugcaucu

SEQ ID NO: 1684402 - RNA, 19 nt, Artificial Sequence
  Description of Artificial Sequence: Synthetic oligonucleotide
  Antisense strand to SEQ ID NO: 1684401
agaugcagggaucugccuc

SEQ ID NO: 1684403 - RNA, 19 nt, Artificial Sequence
  Description of Artificial Sequence: Synthetic oligonucleotide
  Sense strand starting at position 1525 of SEQ ID NO: 1561604
aauauuagcugugcugaua

SEQ ID NO: 1684404 - RNA, 19 nt, Artificial Sequence
  Description of Artificial Sequence: Synthetic oligonucleotide
  Antisense strand to SEQ ID NO: 1684403
uaucagcacagcuaauauu

SEQ ID NO: 1684405 - RNA, 19 nt, Artificial Sequence
  Description of Artificial Sequence: Synthetic oligonucleotide
  Sense strand starting at position 1537 of SEQ ID NO: 1561604
gcugauauuugagacugga

SEQ ID NO: 1684406 - RNA, 19 nt, Artificial Sequence
  Description of Artificial Sequence: Synthetic oligonucleotide
  Antisense strand to SEQ ID NO: 1684405
uccagucucaaauaucagc

SEQ ID NO: 1684407 - RNA, 19 nt, Artificial Sequence
  Description of Artificial Sequence: Synthetic oligonucleotide
  Sense strand starting at position 1848 of SEQ ID NO: 1561604
gcugaacauccugaaauuc

SEQ ID NO: 1684408 - RNA, 19 nt, Artificial Sequence
  Description of Artificial Sequence: Synthetic oligonucleotide
  Antisense strand to SEQ ID NO: 1684407
gaauuucaggauguucagc

SEQ ID NO: 1684409 - RNA, 19 nt, Artificial Sequence
  Description of Artificial Sequence: Synthetic oligonucleotide
  Sense strand starting at position 2018 of SEQ ID NO: 1561604
ucaaucagccucugagcaa

SEQ ID NO: 1684410 - RNA, 19 nt, Artificial Sequence
  Description of Artificial Sequence: Synthetic oligonucleotide
  Antisense strand to SEQ ID NO: 1684409
uugcucagaggcugauuga

SEQ ID NO: 1684411 - RNA, 19 nt, Artificial Sequence
  Description of Artificial Sequence: Synthetic oligonucleotide
  Sense strand starting at position 2030 of SEQ ID NO: 1561604
ugagcaagcucuuccagua

SEQ ID NO: 1684412 - RNA, 19 nt, Artificial Sequence
  Description of Artificial Sequence: Synthetic oligonucleotide
  Antisense strand to SEQ ID NO: 1684411
uacuggaagagcuugcuca

SEQ ID NO: 1684413 - RNA, 19 nt, Artificial Sequence
  Description of Artificial Sequence: Synthetic oligonucleotide
  Sense strand starting at position 2042 of SEQ ID NO: 1561604
uccaguagccaguaucaaa

SEQ ID NO: 1684414 - RNA, 19 nt, Artificial Sequence
  Description of Artificial Sequence: Synthetic oligonucleotide
  Antisense strand to SEQ ID NO: 1684413
uuugauacuggcuacugga

SEQ ID NO: 1684415 - RNA, 19 nt, Artificial Sequence
  Description of Artificial Sequence: Synthetic oligonucleotide
  Sense strand starting at position 2085 of SEQ ID NO: 1561604
cccuguuucuucucaguaa

SEQ ID NO: 1684416 - RNA, 19 nt, Artificial Sequence
  Description of Artificial Sequence: Synthetic oligonucleotide
  Antisense strand to SEQ ID NO: 1684415
uuacugagaagaaacaggg

SEQ ID NO: 1684417 - RNA, 19 nt, Artificial Sequence
  Description of Artificial Sequence: Synthetic oligonucleotide
  Sense strand starting at position 2138 of SEQ ID NO: 1561604
aaagcaugagcccgauuau

SEQ ID NO: 1684418 - RNA, 19 nt, Artificial Sequence
  Description of Artificial Sequence: Synthetic oligonucleotide
  Antisense strand to SEQ ID NO: 1684417
auaaucgggcucaugcuuu

SEQ ID NO: 1684419 - RNA, 19 nt, Artificial Sequence
  Description of Artificial Sequence: Synthetic oligonucleotide
  Sense strand starting at position 2139 of SEQ ID NO: 1561604
aagcaugagcccgauuauu

SEQ ID NO: 1684420 - RNA, 19 nt, Artificial Sequence
  Description of Artificial Sequence: Synthetic oligonucleotide
  Antisense strand to SEQ ID NO: 1684419
aauaaucgggcucaugcuu

SEQ ID NO: 1684421 - RNA, 19 nt, Artificial Sequence
  Description of Artificial Sequence: Synthetic oligonucleotide
  Sense strand starting at position 2233 of SEQ ID NO: 1561604
cggacucagcccuguggaa

SEQ ID NO: 1684422 - RNA, 19 nt, Artificial Sequence
  Description of Artificial Sequence: Synthetic oligonucleotide
  Antisense strand to SEQ ID NO: 1684421
uuccacagggcugaguccg

SEQ ID NO: 1684423 - RNA, 19 nt, Artificial Sequence
  Description of Artificial Sequence: Synthetic oligonucleotide
  Sense strand starting at position 2235 of SEQ ID NO: 1561604
gacucagcccuguggaaau

SEQ ID NO: 1684424 - RNA, 19 nt, Artificial Sequence
  Description of Artificial Sequence: Synthetic oligonucleotide
  Antisense strand to SEQ ID NO: 1684423
auuuccacagggcugaguc

SEQ ID NO: 1684425 - RNA, 19 nt, Artificial Sequence
  Description of Artificial Sequence: Synthetic oligonucleotide
  Sense strand starting at position 2261 of SEQ ID NO: 1561604
cucuguucuucucugacua

SEQ ID NO: 1684426 - RNA, 19 nt, Artificial Sequence
  Description of Artificial Sequence: Synthetic oligonucleotide
  Antisense strand to SEQ ID NO: 1684425
uagucagagaagaacagag

SEQ ID NO: 1684427 - RNA, 19 nt, Artificial Sequence
  Description of Artificial Sequence: Synthetic oligonucleotide
  Sense strand starting at position 2328 of SEQ ID NO: 1561604
gggaucauugugcagaggu

SEQ ID NO: 1684428 - RNA, 19 nt, Artificial Sequence
  Description of Artificial Sequence: Synthetic oligonucleotide
  Antisense strand to SEQ ID NO: 1684427
accucugcacaaugauccc

SEQ ID NO: 1684429 - RNA, 19 nt, Artificial Sequence
  Description of Artificial Sequence: Synthetic oligonucleotide
  Sense strand starting at position 2377 of SEQ ID NO: 1561604
acugcucuugacuguaaau

SEQ ID NO: 1684430 - RNA, 19 nt, Artificial Sequence
  Description of Artificial Sequence: Synthetic oligonucleotide
  Antisense strand to SEQ ID NO: 1684429
auuuacagucaagagcagu

SEQ ID NO: 1684431 - RNA, 19 nt, Artificial Sequence
  Description of Artificial Sequence: Synthetic oligonucleotide
  Sense strand starting at position 2379 of SEQ ID NO: 1561604
ugcucuugacuguaaauua

SEQ ID NO: 1684432 - RNA, 19 nt, Artificial Sequence
  Description of Artificial Sequence: Synthetic oligonucleotide
  Antisense strand to SEQ ID NO: 1684431
uaauuuacagucaagagca

SEQ ID NO: 1684433 - RNA, 19 nt, Artificial Sequence
  Description of Artificial Sequence: Synthetic oligonucleotide
  Sense strand starting at position 2390 of SEQ ID NO: 1561604
guaaauuaaaucggauaug

SEQ ID NO: 1684434 - RNA, 19 nt, Artificial Sequence
  Description of Artificial Sequence: Synthetic oligonucleotide
  Antisense strand to SEQ ID NO: 1684433
cauauccgauuuaauuuac

SEQ ID NO: 1684435 - RNA, 19 nt, Artificial Sequence
  Description of Artificial Sequence: Synthetic oligonucleotide
  Sense strand starting at position 2399 of SEQ ID NO: 1561604
aucggauauguaugugaag

SEQ ID NO: 1684436 - RNA, 19 nt, Artificial Sequence
  Description of Artificial Sequence: Synthetic oligonucleotide
  Antisense strand to SEQ ID NO: 1684435
cuucacauacauauccgau

SEQ ID NO: 1684437 - RNA, 19 nt, Artificial Sequence
  Description of Artificial Sequence: Synthetic oligonucleotide
  Sense strand starting at position 2401 of SEQ ID NO: 1561604
cggauauguaugugaagcu

SEQ ID NO: 1684438 - RNA, 19 nt, Artificial Sequence
  Description of Artificial Sequence: Synthetic oligonucleotide
  Antisense strand to SEQ ID NO: 1684437
agcuucacauacauauccg

SEQ ID NO: 1684439 - RNA, 19 nt, Artificial Sequence
  Description of Artificial Sequence: Synthetic oligonucleotide
  Sense strand starting at position 2436 of SEQ ID NO: 1561604
acaauaaugucaguucuuu

SEQ ID NO: 1684440 - RNA, 19 nt, Artificial Sequence
  Description of Artificial Sequence: Synthetic oligonucleotide
  Antisense strand to SEQ ID NO: 1684439
aaagaacugacauuauugu

SEQ ID NO: 1684441 - RNA, 19 nt, Artificial Sequence
  Description of Artificial Sequence: Synthetic oligonucleotide
  Sense strand starting at position 2442 of SEQ ID NO: 1561604
augucaguucuuuauguuu

SEQ ID NO: 1684442 - RNA, 19 nt, Artificial Sequence
  Description of Artificial Sequence: Synthetic oligonucleotide
  Antisense strand to SEQ ID NO: 1684441
aaacauaaagaacugacau

SEQ ID NO: 1684443 - RNA, 19 nt, Artificial Sequence
  Description of Artificial Sequence: Synthetic oligonucleotide
  Sense strand starting at position 3203 of SEQ ID NO: 1561604
uuaugaaauuuccagguag

SEQ ID NO: 1684444 - RNA, 19 nt, Artificial Sequence
  Description of Artificial Sequence: Synthetic oligonucleotide
  Antisense strand to SEQ ID NO: 1684443
cuaccuggaaauuucauaa

SEQ ID NO: 1684445 - RNA, 19 nt, Artificial Sequence
  Description of Artificial Sequence: Synthetic oligonucleotide
  Sense strand starting at position 3293 of SEQ ID NO: 1561604
gagggaaauuugcagucau

SEQ ID NO: 1684446 - RNA, 19 nt, Artificial Sequence
  Description of Artificial Sequence: Synthetic oligonucleotide
  Antisense strand to SEQ ID NO: 1684445
augacugcaaauuucccuc

SEQ ID NO: 1684447 - RNA, 19 nt, Artificial Sequence
  Description of Artificial Sequence: Synthetic oligonucleotide
  Sense strand starting at position 3910 of SEQ ID NO: 1561604
guaugauacucuccaggca

SEQ ID NO: 1684448 - RNA, 19 nt, Artificial Sequence
  Description of Artificial Sequence: Synthetic oligonucleotide
  Antisense strand to SEQ ID NO: 1684447
ugccuggagaguaucauac

SEQ ID NO: 1684449 - RNA, 19 nt, Artificial Sequence
  Description of Artificial Sequence: Synthetic oligonucleotide
  Sense strand starting at position 221 of SEQ ID NO: 1561605
ugggcaaguuucucaacuu

SEQ ID NO: 1684450 - RNA, 19 nt, Artificial Sequence
  Description of Artificial Sequence: Synthetic oligonucleotide
  Antisense strand to SEQ ID NO: 1684449
aaguugagaaacuugccca

SEQ ID NO: 1684451 - RNA, 19 nt, Artificial Sequence
  Description of Artificial Sequence: Synthetic oligonucleotide
  Sense strand starting at position 222 of SEQ ID NO: 1561605
gggcaaguuucucaacuuc

SEQ ID NO: 1684452 - RNA, 19 nt, Artificial Sequence
  Description of Artificial Sequence: Synthetic oligonucleotide
  Antisense strand to SEQ ID NO: 1684451
gaaguugagaaacuugccc

SEQ ID NO: 1684453 - RNA, 19 nt, Artificial Sequence
  Description of Artificial Sequence: Synthetic oligonucleotide
  Sense strand starting at position 306 of SEQ ID NO: 1561605
gagcuucugugggucaaga

SEQ ID NO: 1684454 - RNA, 19 nt, Artificial Sequence
  Description of Artificial Sequence: Synthetic oligonucleotide
  Antisense strand to SEQ ID NO: 1684453
ucuugacccacagaagcuc

SEQ ID NO: 1684455 - RNA, 19 nt, Artificial Sequence
  Description of Artificial Sequence: Synthetic oligonucleotide
  Sense strand starting at position 308 of SEQ ID NO: 1561605
gcuucugugggucaagaac

SEQ ID NO: 1684456 - RNA, 19 nt, Artificial Sequence
  Description of Artificial Sequence: Synthetic oligonucleotide
  Antisense strand to SEQ ID NO: 1684455
guucuugacccacagaagc

SEQ ID NO: 1684457 - RNA, 19 nt, Artificial Sequence
  Description of Artificial Sequence: Synthetic oligonucleotide
  Sense strand starting at position 381 of SEQ ID NO: 1561605
cagauuguucugugugucu

SEQ ID NO: 1684458 - RNA, 19 nt, Artificial Sequence
  Description of Artificial Sequence: Synthetic oligonucleotide
  Antisense strand to SEQ ID NO: 1684457
agacacacagaacaaucug

SEQ ID NO: 1684459 - RNA, 19 nt, Artificial Sequence
  Description of Artificial Sequence: Synthetic oligonucleotide
  Sense strand starting at position 383 of SEQ ID NO: 1561605
gauuguucugugugucuca

SEQ ID NO: 1684460 - RNA, 19 nt, Artificial Sequence
  Description of Artificial Sequence: Synthetic oligonucleotide
  Antisense strand to SEQ ID NO: 1684459
ugagacacacagaacaauc

SEQ ID NO: 1684461 - RNA, 19 nt, Artificial Sequence
  Description of Artificial Sequence: Synthetic oligonucleotide
  Sense strand starting at position 392 of SEQ ID NO: 1561605
gugugucucacaugcaaug

SEQ ID NO: 1684462 - RNA, 19 nt, Artificial Sequence
  Description of Artificial Sequence: Synthetic oligonucleotide
  Antisense strand to SEQ ID NO: 1684461
cauugcaugugagacacac

SEQ ID NO: 1684463 - RNA, 19 nt, Artificial Sequence
  Description of Artificial Sequence: Synthetic oligonucleotide
  Sense strand starting at position 649 of SEQ ID NO: 1561605
gugugcuuccuguucaagu

SEQ ID NO: 1684464 - RNA, 19 nt, Artificial Sequence
  Description of Artificial Sequence: Synthetic oligonucleotide
  Antisense strand to SEQ ID NO: 1684463
acuugaacaggaagcacac

SEQ ID NO: 1684465 - RNA, 19 nt, Artificial Sequence
  Description of Artificial Sequence: Synthetic oligonucleotide
  Sense strand starting at position 898 of SEQ ID NO: 1561605
caguaaucccugcggcaag

SEQ ID NO: 1684466 - RNA, 19 nt, Artificial Sequence
  Description of Artificial Sequence: Synthetic oligonucleotide
  Antisense strand to SEQ ID NO: 1684465
cuugccgcagggauuacug

SEQ ID NO: 1684467 - RNA, 19 nt, Artificial Sequence
  Description of Artificial Sequence: Synthetic oligonucleotide
  Sense strand starting at position 942 of SEQ ID NO: 1561605
agaggaaucuggaggagua

SEQ ID NO: 1684468 - RNA, 19 nt, Artificial Sequence
  Description of Artificial Sequence: Synthetic oligonucleotide
  Antisense strand to SEQ ID NO: 1684467
uacuccuccagauuccucu

SEQ ID NO: 1684469 - RNA, 19 nt, Artificial Sequence
  Description of Artificial Sequence: Synthetic oligonucleotide
  Sense strand starting at position 1028 of SEQ ID NO: 1561605
ggugucuugagcuggaauc

SEQ ID NO: 1684470 - RNA, 19 nt, Artificial Sequence
  Description of Artificial Sequence: Synthetic oligonucleotide
  Antisense strand to SEQ ID NO: 1684469
gauuccagcucaagacacc

SEQ ID NO: 1684471 - RNA, 19 nt, Artificial Sequence
  Description of Artificial Sequence: Synthetic oligonucleotide
  Sense strand starting at position 1029 of SEQ ID NO: 1561605
gugucuugagcuggaaucu

SEQ ID NO: 1684472 - RNA, 19 nt, Artificial Sequence
  Description of Artificial Sequence: Synthetic oligonucleotide
  Antisense strand to SEQ ID NO: 1684471
agauuccagcucaagacac

SEQ ID NO: 1684473 - RNA, 19 nt, Artificial Sequence
  Description of Artificial Sequence: Synthetic oligonucleotide
  Sense strand starting at position 1195 of SEQ ID NO: 1561605
gugcccugauuggcgaaua

SEQ ID NO: 1684474 - RNA, 19 nt, Artificial Sequence
  Description of Artificial Sequence: Synthetic oligonucleotide
  Antisense strand to SEQ ID NO: 1684473
uauucgccaaucagggcac

SEQ ID NO: 1684475 - RNA, 19 nt, Artificial Sequence
  Description of Artificial Sequence: Synthetic oligonucleotide
  Sense strand starting at position 1196 of SEQ ID NO: 1561605
ugcccugauuggcgaauaa

SEQ ID NO: 1684476 - RNA, 19 nt, Artificial Sequence
  Description of Artificial Sequence: Synthetic oligonucleotide
  Antisense strand to SEQ ID NO: 1684475
uuauucgccaaucagggca

SEQ ID NO: 1684477 - RNA, 19 nt, Artificial Sequence
  Description of Artificial Sequence: Synthetic oligonucleotide
  Sense strand starting at position 1206 of SEQ ID NO: 1561605
ggcgaauaaagaugcggua

SEQ ID NO: 1684478 - RNA, 19 nt, Artificial Sequence
  Description of Artificial Sequence: Synthetic oligonucleotide
  Antisense strand to SEQ ID NO: 1684477
uaccgcaucuuuauucgcc

SEQ ID NO: 1684479 - RNA, 19 nt, Artificial Sequence
  Description of Artificial Sequence: Synthetic oligonucleotide
  Sense strand starting at position 1396 of SEQ ID NO: 1561605
aaggaaguguccugauuug

SEQ ID NO: 1684480 - RNA, 19 nt, Artificial Sequence
  Description of Artificial Sequence: Synthetic oligonucleotide
  Antisense strand to SEQ ID NO: 1684479
caaaucaggacacuuccuu

SEQ ID NO: 1684481 - RNA, 19 nt, Artificial Sequence
  Description of Artificial Sequence: Synthetic oligonucleotide
  Sense strand starting at position 1460 of SEQ ID NO: 1561605
guggguuacuggguuugaa

SEQ ID NO: 1684482 - RNA, 19 nt, Artificial Sequence
  Description of Artificial Sequence: Synthetic oligonucleotide
  Antisense strand to SEQ ID NO: 1684481
uucaaacccaguaacccac

SEQ ID NO: 1684483 - RNA, 19 nt, Artificial Sequence
  Description of Artificial Sequence: Synthetic oligonucleotide
  Sense strand starting at position 1547 of SEQ ID NO: 1561605
gggugucucugauuggguu

SEQ ID NO: 1684484 - RNA, 19 nt, Artificial Sequence
  Description of Artificial Sequence: Synthetic oligonucleotide
  Antisense strand to SEQ ID NO: 1684483
aacccaaucagagacaccc

SEQ ID NO: 1684485 - RNA, 19 nt, Artificial Sequence
  Description of Artificial Sequence: Synthetic oligonucleotide
  Sense strand starting at position 1548 of SEQ ID NO: 1561605
ggugucucugauuggguua

SEQ ID NO: 1684486 - RNA, 19 nt, Artificial Sequence
  Description of Artificial Sequence: Synthetic oligonucleotide
  Antisense strand to SEQ ID NO: 1684485
uaacccaaucagagacacc

SEQ ID NO: 1684487 - RNA, 19 nt, Artificial Sequence
  Description of Artificial Sequence: Synthetic oligonucleotide
  Sense strand starting at position 2502 of SEQ ID NO: 1561605
agcugugcgacccgagaaa

SEQ ID NO: 1684488 - RNA, 19 nt, Artificial Sequence
  Description of Artificial Sequence: Synthetic oligonucleotide
  Antisense strand to SEQ ID NO: 1684487
uuucucgggucgcacagcu

SEQ ID NO: 1684489 - RNA, 19 nt, Artificial Sequence
  Description of Artificial Sequence: Synthetic oligonucleotide
  Sense strand starting at position 2710 of SEQ ID NO: 1561605
uagauacuaucuuggguca

SEQ ID NO: 1684490 - RNA, 19 nt, Artificial Sequence
  Description of Artificial Sequence: Synthetic oligonucleotide
  Antisense strand to SEQ ID NO: 1684489
ugacccaagauaguaucua

SEQ ID NO: 1684491 - RNA, 19 nt, Artificial Sequence
  Description of Artificial Sequence: Synthetic oligonucleotide
  Sense strand starting at position 2711 of SEQ ID NO: 1561605
agauacuaucuugggucau

SEQ ID NO: 1684492 - RNA, 19 nt, Artificial Sequence
  Description of Artificial Sequence: Synthetic oligonucleotide
  Antisense strand to SEQ ID NO: 1684491
augacccaagauaguaucu

SEQ ID NO: 1684493 - RNA, 19 nt, Artificial Sequence
  Description of Artificial Sequence: Synthetic oligonucleotide
  Sense strand starting at position 2712 of SEQ ID NO: 1561605
gauacuaucuugggucaua

SEQ ID NO: 1684494 - RNA, 19 nt, Artificial Sequence
  Description of Artificial Sequence: Synthetic oligonucleotide
  Antisense strand to SEQ ID NO: 1684493
uaugacccaagauaguauc

SEQ ID NO: 1684495 - RNA, 19 nt, Artificial Sequence
  Description of Artificial Sequence: Synthetic oligonucleotide
  Sense strand starting at position 2713 of SEQ ID NO: 1561605
auacuaucuugggucauau

SEQ ID NO: 1684496 - RNA, 19 nt, Artificial Sequence
  Description of Artificial Sequence: Synthetic oligonucleotide
  Antisense strand to SEQ ID NO: 1684495
auaugacccaagauaguau

SEQ ID NO: 1684497 - RNA, 19 nt, Artificial Sequence
  Description of Artificial Sequence: Synthetic oligonucleotide
  Sense strand starting at position 2717 of SEQ ID NO: 1561605
uaucuugggucauaugaaa

SEQ ID NO: 1684498 - RNA, 19 nt, Artificial Sequence
  Description of Artificial Sequence: Synthetic oligonucleotide
  Antisense strand to SEQ ID NO: 1684497
uuucauaugacccaagaua

SEQ ID NO: 1684499 - RNA, 19 nt, Artificial Sequence
  Description of Artificial Sequence: Synthetic oligonucleotide
  Sense strand starting at position 2772 of SEQ ID NO: 1561605
auggcaauuccaugagguu

SEQ ID NO: 1684500 - RNA, 19 nt, Artificial Sequence
  Description of Artificial Sequence: Synthetic oligonucleotide
  Antisense strand to SEQ ID NO: 1684499
aaccucauggaauugccau

SEQ ID NO: 1684501 - RNA, 19 nt, Artificial Sequence
  Description of Artificial Sequence: Synthetic oligonucleotide
  Sense strand starting at position 2915 of SEQ ID NO: 1561605
ugccaauguccucagagga

SEQ ID NO: 1684502 - RNA, 19 nt, Artificial Sequence
  Description of Artificial Sequence: Synthetic oligonucleotide
  Antisense strand to SEQ ID NO: 1684501
uccucugaggacauuggca

SEQ ID NO: 1684503 - RNA, 19 nt, Artificial Sequence
  Description of Artificial Sequence: Synthetic oligonucleotide
  Sense strand starting at position 3249 of SEQ ID NO: 1561605
uuugguaguugcuuaauuu

SEQ ID NO: 1684504 - RNA, 19 nt, Artificial Sequence
  Description of Artificial Sequence: Synthetic oligonucleotide
  Antisense strand to SEQ ID NO: 1684503
aaauuaagcaacuaccaaa

SEQ ID NO: 1684505 - RNA, 19 nt, Artificial Sequence
  Description of Artificial Sequence: Synthetic oligonucleotide
  Sense strand starting at position 3301 of SEQ ID NO: 1561605
gcaggaguuugucccaucu

SEQ ID NO: 1684506 - RNA, 19 nt, Artificial Sequence
  Description of Artificial Sequence: Synthetic oligonucleotide
  Antisense strand to SEQ ID NO: 1684505
agaugggacaaacuccugc

SEQ ID NO: 1684507 - RNA, 19 nt, Artificial Sequence
  Description of Artificial Sequence: Synthetic oligonucleotide
  Sense strand starting at position 3303 of SEQ ID NO: 1561605
aggaguuugucccaucugu

SEQ ID NO: 1684508 - RNA, 19 nt, Artificial Sequence
  Description of Artificial Sequence: Synthetic oligonucleotide
  Antisense strand to SEQ ID NO: 1684507
acagaugggacaaacuccu

SEQ ID NO: 1684509 - RNA, 19 nt, Artificial Sequence
  Description of Artificial Sequence: Synthetic oligonucleotide
  Sense strand starting at position 3314 of SEQ ID NO: 1561605
ccaucugugcuuuacugua

SEQ ID NO: 1684510 - RNA, 19 nt, Artificial Sequence
  Description of Artificial Sequence: Synthetic oligonucleotide
  Antisense strand to SEQ ID NO: 1684509
uacaguaaagcacagaugg

SEQ ID NO: 1684511 - RNA, 19 nt, Artificial Sequence
  Description of Artificial Sequence: Synthetic oligonucleotide
  Sense strand starting at position 3362 of SEQ ID NO: 1561605
ccuagaacuuguugaaugu

SEQ ID NO: 1684512 - RNA, 19 nt, Artificial Sequence
  Description of Artificial Sequence: Synthetic oligonucleotide
  Antisense strand to SEQ ID NO: 1684511
acauucaacaaguucuagg

SEQ ID NO: 1684513 - RNA, 19 nt, Artificial Sequence
  Description of Artificial Sequence: Synthetic oligonucleotide
  Sense strand starting at position 3363 of SEQ ID NO: 1561605
cuagaacuuguugaaugua

SEQ ID NO: 1684514 - RNA, 19 nt, Artificial Sequence
  Description of Artificial Sequence: Synthetic oligonucleotide
  Antisense strand to SEQ ID NO: 1684513
uacauucaacaaguucuag

SEQ ID NO: 1684515 - RNA, 19 nt, Artificial Sequence
  Description of Artificial Sequence: Synthetic oligonucleotide
  Sense strand starting at position 3366 of SEQ ID NO: 1561605
gaacuuguugaauguacca

SEQ ID NO: 1684516 - RNA, 19 nt, Artificial Sequence
  Description of Artificial Sequence: Synthetic oligonucleotide
  Antisense strand to SEQ ID NO: 1684515
ugguacauucaacaaguuc

SEQ ID NO: 1684517 - RNA, 19 nt, Artificial Sequence
  Description of Artificial Sequence: Synthetic oligonucleotide
  Sense strand starting at position 3371 of SEQ ID NO: 1561605
uguugaauguaccaaccaa

SEQ ID NO: 1684518 - RNA, 19 nt, Artificial Sequence
  Description of Artificial Sequence: Synthetic oligonucleotide
  Antisense strand to SEQ ID NO: 1684517
uugguugguacauucaaca

SEQ ID NO: 1684519 - RNA, 19 nt, Artificial Sequence
  Description of Artificial Sequence: Synthetic oligonucleotide
  Sense strand starting at position 3588 of SEQ ID NO: 1561605
uguccaguauggucaccaa

SEQ ID NO: 1684520 - RNA, 19 nt, Artificial Sequence
  Description of Artificial Sequence: Synthetic oligonucleotide
  Antisense strand to SEQ ID NO: 1684519
uuggugaccauacuggaca

SEQ ID NO: 1684521 - RNA, 19 nt, Artificial Sequence
  Description of Artificial Sequence: Synthetic oligonucleotide
  Sense strand starting at position 3608 of SEQ ID NO: 1561605
ggccacaaguggucucuga

SEQ ID NO: 1684522 - RNA, 19 nt, Artificial Sequence
  Description of Artificial Sequence: Synthetic oligonucleotide
  Antisense strand to SEQ ID NO: 1684521
ucagagaccacuuguggcc

SEQ ID NO: 1684523 - RNA, 19 nt, Artificial Sequence
  Description of Artificial Sequence: Synthetic oligonucleotide
  Sense strand starting at position 3648 of SEQ ID NO: 1561605
gaaauuagguugugcugga

SEQ ID NO: 1684524 - RNA, 19 nt, Artificial Sequence
  Description of Artificial Sequence: Synthetic oligonucleotide
  Antisense strand to SEQ ID NO: 1684523
uccagcacaaccuaauuuc

SEQ ID NO: 1684525 - RNA, 19 nt, Artificial Sequence
  Description of Artificial Sequence: Synthetic oligonucleotide
  Sense strand starting at position 3649 of SEQ ID NO: 1561605
aaauuagguugugcuggaa

SEQ ID NO: 1684526 - RNA, 19 nt, Artificial Sequence
  Description of Artificial Sequence: Synthetic oligonucleotide
  Antisense strand to SEQ ID NO: 1684525
uuccagcacaaccuaauuu

SEQ ID NO: 1684527 - RNA, 19 nt, Artificial Sequence
  Description of Artificial Sequence: Synthetic oligonucleotide
  Sense strand starting at position 3653 of SEQ ID NO: 1561605
uagguugugcuggaaaggu

SEQ ID NO: 1684528 - RNA, 19 nt, Artificial Sequence
  Description of Artificial Sequence: Synthetic oligonucleotide
  Antisense strand to SEQ ID NO: 1684527
accuuuccagcacaaccua

SEQ ID NO: 1684529 - RNA, 19 nt, Artificial Sequence
  Description of Artificial Sequence: Synthetic oligonucleotide
  Sense strand starting at position 94 of SEQ ID NO: 1561606
gucacaauccauuagugga

SEQ ID NO: 1684530 - RNA, 19 nt, Artificial Sequence
  Description of Artificial Sequence: Synthetic oligonucleotide
  Antisense strand to SEQ ID NO: 1684529
uccacuaauggauugugac

SEQ ID NO: 1684531 - RNA, 19 nt, Artificial Sequence
  Description of Artificial Sequence: Synthetic oligonucleotide
  Sense strand starting at position 131 of SEQ ID NO: 1561606
ggucucaaccagcauuauu

SEQ ID NO: 1684532 - RNA, 19 nt, Artificial Sequence
  Description of Artificial Sequence: Synthetic oligonucleotide
  Antisense strand to SEQ ID NO: 1684531
aauaaugcugguugagacc

SEQ ID NO: 1684533 - RNA, 19 nt, Artificial Sequence
  Description of Artificial Sequence: Synthetic oligonucleotide
  Sense strand starting at position 224 of SEQ ID NO: 1561606
gagcuuuguguguuugugu

SEQ ID NO: 1684534 - RNA, 19 nt, Artificial Sequence
  Description of Artificial Sequence: Synthetic oligonucleotide
  Antisense strand to SEQ ID NO: 1684533
acacaaacacacaaagcuc

SEQ ID NO: 1684535 - RNA, 19 nt, Artificial Sequence
  Description of Artificial Sequence: Synthetic oligonucleotide
  Sense strand starting at position 245 of SEQ ID NO: 1561606
auacuugguugugccauaa

SEQ ID NO: 1684536 - RNA, 19 nt, Artificial Sequence
  Description of Artificial Sequence: Synthetic oligonucleotide
  Antisense strand to SEQ ID NO: 1684535
uuauggcacaaccaaguau

SEQ ID NO: 1684537 - RNA, 19 nt, Artificial Sequence
  Description of Artificial Sequence: Synthetic oligonucleotide
  Sense strand starting at position 263 of SEQ ID NO: 1561606
aaauguauucguuacugua

SEQ ID NO: 1684538 - RNA, 19 nt, Artificial Sequence
  Description of Artificial Sequence: Synthetic oligonucleotide
  Antisense strand to SEQ ID NO: 1684537
uacaguaacgaauacauuu

SEQ ID NO: 1684539 - RNA, 19 nt, Artificial Sequence
  Description of Artificial Sequence: Synthetic oligonucleotide
  Sense strand starting at position 300 of SEQ ID NO: 1561606
uugaaagacucugcucuaa

SEQ ID NO: 1684540 - RNA, 19 nt, Artificial Sequence
  Description of Artificial Sequence: Synthetic oligonucleotide
  Antisense strand to SEQ ID NO: 1684539
uuagagcagagucuuucaa

SEQ ID NO: 1684541 - RNA, 19 nt, Artificial Sequence
  Description of Artificial Sequence: Synthetic oligonucleotide
  Sense strand starting at position 787 of SEQ ID NO: 1561606
gugcuccuccuugauaaug

SEQ ID NO: 1684542 - RNA, 19 nt, Artificial Sequence
  Description of Artificial Sequence: Synthetic oligonucleotide
  Antisense strand to SEQ ID NO: 1684541
cauuaucaaggaggagcac

SEQ ID NO: 1684543 - RNA, 19 nt, Artificial Sequence
  Description of Artificial Sequence: Synthetic oligonucleotide
  Sense strand starting at position 823 of SEQ ID NO: 1561606
auuccaccagucuguaauu

SEQ ID NO: 1684544 - RNA, 19 nt, Artificial Sequence
  Description of Artificial Sequence: Synthetic oligonucleotide
  Antisense strand to SEQ ID NO: 1684543
aauuacagacugguggaau

SEQ ID NO: 1684545 - RNA, 19 nt, Artificial Sequence
  Description of Artificial Sequence: Synthetic oligonucleotide
  Sense strand starting at position 828 of SEQ ID NO: 1561606
accagucuguaauucuauu

SEQ ID NO: 1684546 - RNA, 19 nt, Artificial Sequence
  Description of Artificial Sequence: Synthetic oligonucleotide
  Antisense strand to SEQ ID NO: 1684545
aauagaauuacagacuggu

SEQ ID NO: 1684547 - RNA, 19 nt, Artificial Sequence
  Description of Artificial Sequence: Synthetic oligonucleotide
  Sense strand starting at position 958 of SEQ ID NO: 1561606
cugugaguuccucacaguc

SEQ ID NO: 1684548 - RNA, 19 nt, Artificial Sequence
  Description of Artificial Sequence: Synthetic oligonucleotide
  Antisense strand to SEQ ID NO: 1684547
gacugugaggaacucacag

SEQ ID NO: 1684549 - RNA, 19 nt, Artificial Sequence
  Description of Artificial Sequence: Synthetic oligonucleotide
  Sense strand starting at position 1141 of SEQ ID NO: 1561606
cugagugguuucccauaug

SEQ ID NO: 1684550 - RNA, 19 nt, Artificial Sequence
  Description of Artificial Sequence: Synthetic oligonucleotide
  Antisense strand to SEQ ID NO: 1684549
cauaugggaaaccacucag

SEQ ID NO: 1684551 - RNA, 19 nt, Artificial Sequence
  Description of Artificial Sequence: Synthetic oligonucleotide
  Sense strand starting at position 1144 of SEQ ID NO: 1561606
agugguuucccauaugguu

SEQ ID NO: 1684552 - RNA, 19 nt, Artificial Sequence
  Description of Artificial Sequence: Synthetic oligonucleotide
  Antisense strand to SEQ ID NO: 1684551
aaccauaugggaaaccacu

SEQ ID NO: 1684553 - RNA, 19 nt, Artificial Sequence
  Description of Artificial Sequence: Synthetic oligonucleotide
  Sense strand starting at position 1231 of SEQ ID NO: 1561606
gcuugugucacacaauggu

SEQ ID NO: 1684554 - RNA, 19 nt, Artificial Sequence
  Description of Artificial Sequence: Synthetic oligonucleotide
  Antisense strand to SEQ ID NO: 1684553
accauugugugacacaagc

SEQ ID NO: 1684555 - RNA, 19 nt, Artificial Sequence
  Description of Artificial Sequence: Synthetic oligonucleotide
  Sense strand starting at position 1300 of SEQ ID NO: 1561606
auuggaggcugucuccaua

SEQ ID NO: 1684556 - RNA, 19 nt, Artificial Sequence
  Description of Artificial Sequence: Synthetic oligonucleotide
  Antisense strand to SEQ ID NO: 1684555
uauggagacagccuccaau

SEQ ID NO: 1684557 - RNA, 19 nt, Artificial Sequence
  Description of Artificial Sequence: Synthetic oligonucleotide
  Sense strand starting at position 1415 of SEQ ID NO: 1561606
ucaggucuccugugauaua

SEQ ID NO: 1684558 - RNA, 19 nt, Artificial Sequence
  Description of Artificial Sequence: Synthetic oligonucleotide
  Antisense strand to SEQ ID NO: 1684557
uauaucacaggagaccuga

SEQ ID NO: 1684559 - RNA, 19 nt, Artificial Sequence
  Description of Artificial Sequence: Synthetic oligonucleotide
  Sense strand starting at position 1484 of SEQ ID NO: 1561606
ggauguuugauugaaggcu

SEQ ID NO: 1684560 - RNA, 19 nt, Artificial Sequence
  Description of Artificial Sequence: Synthetic oligonucleotide
  Antisense strand to SEQ ID NO: 1684559
agccuucaaucaaacaucc

SEQ ID NO: 1684561 - RNA, 19 nt, Artificial Sequence
  Description of Artificial Sequence: Synthetic oligonucleotide
  Sense strand starting at position 2010 of SEQ ID NO: 1561606
ccugggucgcgggaagaau

SEQ ID NO: 1684562 - RNA, 19 nt, Artificial Sequence
  Description of Artificial Sequence: Synthetic oligonucleotide
  Antisense strand to SEQ ID NO: 1684561
auucuucccgcgacccagg

SEQ ID NO: 1684563 - RNA, 19 nt, Artificial Sequence
  Description of Artificial Sequence: Synthetic oligonucleotide
  Sense strand starting at position 2183 of SEQ ID NO: 1561606
agcagucauggucacuaaa

SEQ ID NO: 1684564 - RNA, 19 nt, Artificial Sequence
  Description of Artificial Sequence: Synthetic oligonucleotide
  Antisense strand to SEQ ID NO: 1684563
uuuagugaccaugacugcu

SEQ ID NO: 1684565 - RNA, 19 nt, Artificial Sequence
  Description of Artificial Sequence: Synthetic oligonucleotide
  Sense strand starting at position 2186 of SEQ ID NO: 1561606
agucauggucacuaaagca

SEQ ID NO: 1684566 - RNA, 19 nt, Artificial Sequence
  Description of Artificial Sequence: Synthetic oligonucleotide
  Antisense strand to SEQ ID NO: 1684565
ugcuuuagugaccaugacu

SEQ ID NO: 1684567 - RNA, 19 nt, Artificial Sequence
  Description of Artificial Sequence: Synthetic oligonucleotide
  Sense strand starting at position 2492 of SEQ ID NO: 1561606
gaaggaaucugccugucuu

SEQ ID NO: 1684568 - RNA, 19 nt, Artificial Sequence
  Description of Artificial Sequence: Synthetic oligonucleotide
  Antisense strand to SEQ ID NO: 1684567
aagacaggcagauuccuuc

SEQ ID NO: 1684569 - RNA, 19 nt, Artificial Sequence
  Description of Artificial Sequence: Synthetic oligonucleotide
  Sense strand starting at position 2556 of SEQ ID NO: 1561606
agcucagcugaguacauau

SEQ ID NO: 1684570 - RNA, 19 nt, Artificial Sequence
  Description of Artificial Sequence: Synthetic oligonucleotide
  Antisense strand to SEQ ID NO: 1684569
auauguacucagcugagcu

SEQ ID NO: 1684571 - RNA, 19 nt, Artificial Sequence
  Description of Artificial Sequence: Synthetic oligonucleotide
  Sense strand starting at position 2631 of SEQ ID NO: 1561606
ggucuaacccugcacuauu

SEQ ID NO: 1684572 - RNA, 19 nt, Artificial Sequence
  Description of Artificial Sequence: Synthetic oligonucleotide
  Antisense strand to SEQ ID NO: 1684571
aauagugcaggguuagacc

SEQ ID NO: 1684573 - RNA, 19 nt, Artificial Sequence
  Description of Artificial Sequence: Synthetic oligonucleotide
  Sense strand starting at position 2644 of SEQ ID NO: 1561606
acuauuaaucaggguucca

SEQ ID NO: 1684574 - RNA, 19 nt, Artificial Sequence
  Description of Artificial Sequence: Synthetic oligonucleotide
  Antisense strand to SEQ ID NO: 1684573
uggaacccugauuaauagu

SEQ ID NO: 1684575 - RNA, 19 nt, Artificial Sequence
  Description of Artificial Sequence: Synthetic oligonucleotide
  Sense strand starting at position 2698 of SEQ ID NO: 1561606
gugauuuauugccaagaau

SEQ ID NO: 1684576 - RNA, 19 nt, Artificial Sequence
  Description of Artificial Sequence: Synthetic oligonucleotide
  Antisense strand to SEQ ID NO: 1684575
auucuuggcaauaaaucac

SEQ ID NO: 1684577 - RNA, 19 nt, Artificial Sequence
  Description of Artificial Sequence: Synthetic oligonucleotide
  Sense strand starting at position 2710 of SEQ ID NO: 1561606
caagaauuggcuuauguga

SEQ ID NO: 1684578 - RNA, 19 nt, Artificial Sequence
  Description of Artificial Sequence: Synthetic oligonucleotide
  Antisense strand to SEQ ID NO: 1684577
ucacauaagccaauucuug

SEQ ID NO: 1684579 - RNA, 19 nt, Artificial Sequence
  Description of Artificial Sequence: Synthetic oligonucleotide
  Sense strand starting at position 3082 of SEQ ID NO: 1561606
agguauguguauucccaau

SEQ ID NO: 1684580 - RNA, 19 nt, Artificial Sequence
  Description of Artificial Sequence: Synthetic oligonucleotide
  Antisense strand to SEQ ID NO: 1684579
auugggaauacacauaccu

SEQ ID NO: 1684581 - RNA, 19 nt, Artificial Sequence
  Description of Artificial Sequence: Synthetic oligonucleotide
  Sense strand starting at position 3309 of SEQ ID NO: 1561606
agucaugguuaaucacaau

SEQ ID NO: 1684582 - RNA, 19 nt, Artificial Sequence
  Description of Artificial Sequence: Synthetic oligonucleotide
  Antisense strand to SEQ ID NO: 1684581
auugugauuaaccaugacu

SEQ ID NO: 1684583 - RNA, 19 nt, Artificial Sequence
  Description of Artificial Sequence: Synthetic oligonucleotide
  Sense strand starting at position 3407 of SEQ ID NO: 1561606
ucaucuccugcaugaagaa

SEQ ID NO: 1684584 - RNA, 19 nt, Artificial Sequence
  Description of Artificial Sequence: Synthetic oligonucleotide
  Antisense strand to SEQ ID NO: 1684583
uucuucaugcaggagauga

SEQ ID NO: 1684585 - RNA, 19 nt, Artificial Sequence
  Description of Artificial Sequence: Synthetic oligonucleotide
  Sense strand starting at position 3541 of SEQ ID NO: 1561606
acugaacacugguuguaga

SEQ ID NO: 1684586 - RNA, 19 nt, Artificial Sequence
  Description of Artificial Sequence: Synthetic oligonucleotide
  Antisense strand to SEQ ID NO: 1684585
ucuacaaccaguguucagu

SEQ ID NO: 1684587 - RNA, 19 nt, Artificial Sequence
  Description of Artificial Sequence: Synthetic oligonucleotide
  Sense strand starting at position 3542 of SEQ ID NO: 1561606
cugaacacugguuguagaa

SEQ ID NO: 1684588 - RNA, 19 nt, Artificial Sequence
  Description of Artificial Sequence: Synthetic oligonucleotide
  Antisense strand to SEQ ID NO: 1684587
uucuacaaccaguguucag

SEQ ID NO: 1684589 - RNA, 19 nt, Artificial Sequence
  Description of Artificial Sequence: Synthetic oligonucleotide
  Sense strand starting at position 3551 of SEQ ID NO: 1561606
gguuguagaagcuguaaau

SEQ ID NO: 1684590 - RNA, 19 nt, Artificial Sequence
  Description of Artificial Sequence: Synthetic oligonucleotide
  Antisense strand to SEQ ID NO: 1684589
auuuacagcuucuacaacc

SEQ ID NO: 1684591 - RNA, 19 nt, Artificial Sequence
  Description of Artificial Sequence: Synthetic oligonucleotide
  Sense strand starting at position 3750 of SEQ ID NO: 1561606
ugugacaaccauugcuaaa

SEQ ID NO: 1684592 - RNA, 19 nt, Artificial Sequence
  Description of Artificial Sequence: Synthetic oligonucleotide
  Antisense strand to SEQ ID NO: 1684591
uuuagcaaugguugucaca

SEQ ID NO: 1684593 - RNA, 19 nt, Artificial Sequence
  Description of Artificial Sequence: Synthetic oligonucleotide
  Sense strand starting at position 3837 of SEQ ID NO: 1561606
acacuaaucugggugaacu

SEQ ID NO: 1684594 - RNA, 19 nt, Artificial Sequence
  Description of Artificial Sequence: Synthetic oligonucleotide
  Antisense strand to SEQ ID NO: 1684593
aguucacccagauuagugu

SEQ ID NO: 1684595 - RNA, 19 nt, Artificial Sequence
  Description of Artificial Sequence: Synthetic oligonucleotide
  Sense strand starting at position 3838 of SEQ ID NO: 1561606
cacuaaucugggugaacuu

SEQ ID NO: 1684596 - RNA, 19 nt, Artificial Sequence
  Description of Artificial Sequence: Synthetic oligonucleotide
  Antisense strand to SEQ ID NO: 1684595
aaguucacccagauuagug

SEQ ID NO: 1684597 - RNA, 19 nt, Artificial Sequence
  Description of Artificial Sequence: Synthetic oligonucleotide
  Sense strand starting at position 3847 of SEQ ID NO: 1561606
gggugaacuuaccuuugau

SEQ ID NO: 1684598 - RNA, 19 nt, Artificial Sequence
  Description of Artificial Sequence: Synthetic oligonucleotide
  Antisense strand to SEQ ID NO: 1684597
aucaaagguaaguucaccc

SEQ ID NO: 1684599 - RNA, 19 nt, Artificial Sequence
  Description of Artificial Sequence: Synthetic oligonucleotide
  Sense strand starting at position 3857 of SEQ ID NO: 1561606
accuuugauuauucgacaa

SEQ ID NO: 1684600 - RNA, 19 nt, Artificial Sequence
  Description of Artificial Sequence: Synthetic oligonucleotide
  Antisense strand to SEQ ID NO: 1684599
uugucgaauaaucaaaggu

SEQ ID NO: 1684601 - RNA, 19 nt, Artificial Sequence
  Description of Artificial Sequence: Synthetic oligonucleotide
  Sense strand starting at position 3881 of SEQ ID NO: 1561606
gagucaggaugguccuuua

SEQ ID NO: 1684602 - RNA, 19 nt, Artificial Sequence
  Description of Artificial Sequence: Synthetic oligonucleotide
  Antisense strand to SEQ ID NO: 1684601
uaaaggaccauccugacuc

SEQ ID NO: 1684603 - RNA, 19 nt, Artificial Sequence
  Description of Artificial Sequence: Synthetic oligonucleotide
  Sense strand starting at position 3890 of SEQ ID NO: 1561606
ugguccuuuaugggagaca

SEQ ID NO: 1684604 - RNA, 19 nt, Artificial Sequence
  Description of Artificial Sequence: Synthetic oligonucleotide
  Antisense strand to SEQ ID NO: 1684603
ugucucccauaaaggacca

SEQ ID NO: 1684605 - RNA, 19 nt, Artificial Sequence
  Description of Artificial Sequence: Synthetic oligonucleotide
  Sense strand starting at position 3950 of SEQ ID NO: 1561606
gaagacccauuguuuguaa

SEQ ID NO: 1684606 - RNA, 19 nt, Artificial Sequence
  Description of Artificial Sequence: Synthetic oligonucleotide
  Antisense strand to SEQ ID NO: 1684605
uuacaaacaaugggucuuc

SEQ ID NO: 1684607 - RNA, 19 nt, Artificial Sequence
  Description of Artificial Sequence: Synthetic oligonucleotide
  Sense strand starting at position 3952 of SEQ ID NO: 1561606
agacccauuguuuguaaac

SEQ ID NO: 1684608 - RNA, 19 nt, Artificial Sequence
  Description of Artificial Sequence: Synthetic oligonucleotide
  Antisense strand to SEQ ID NO: 1684607
guuuacaaacaaugggucu

SEQ ID NO: 1684609 - RNA, 19 nt, Artificial Sequence
  Description of Artificial Sequence: Synthetic oligonucleotide
  Sense strand starting at position 156 of SEQ ID NO: 1561607
uuaucuaagcguuaugcca

SEQ ID NO: 1684610 - RNA, 19 nt, Artificial Sequence
  Description of Artificial Sequence: Synthetic oligonucleotide
  Antisense strand to SEQ ID NO: 1684609
uggcauaacgcuuagauaa

SEQ ID NO: 1684611 - RNA, 19 nt, Artificial Sequence
  Description of Artificial Sequence: Synthetic oligonucleotide
  Sense strand starting at position 163 of SEQ ID NO: 1561607
agcguuaugccaugucugu

SEQ ID NO: 1684612 - RNA, 19 nt, Artificial Sequence
  Description of Artificial Sequence: Synthetic oligonucleotide
  Antisense strand to SEQ ID NO: 1684611
acagacauggcauaacgcu

SEQ ID NO: 1684613 - RNA, 19 nt, Artificial Sequence
  Description of Artificial Sequence: Synthetic oligonucleotide
  Sense strand starting at position 164 of SEQ ID NO: 1561607
gcguuaugccaugucuguu

SEQ ID NO: 1684614 - RNA, 19 nt, Artificial Sequence
  Description of Artificial Sequence: Synthetic oligonucleotide
  Antisense strand to SEQ ID NO: 1684613
aacagacauggcauaacgc

SEQ ID NO: 1684615 - RNA, 19 nt, Artificial Sequence
  Description of Artificial Sequence: Synthetic oligonucleotide
  Sense strand starting at position 165 of SEQ ID NO: 1561607
cguuaugccaugucuguua

SEQ ID NO: 1684616 - RNA, 19 nt, Artificial Sequence
  Description of Artificial Sequence: Synthetic oligonucleotide
  Antisense strand to SEQ ID NO: 1684615
uaacagacauggcauaacg

SEQ ID NO: 1684617 - RNA, 19 nt, Artificial Sequence
  Description of Artificial Sequence: Synthetic oligonucleotide
  Sense strand starting at position 167 of SEQ ID NO: 1561607
uuaugccaugucuguuaau

SEQ ID NO: 1684618 - RNA, 19 nt, Artificial Sequence
  Description of Artificial Sequence: Synthetic oligonucleotide
  Antisense strand to SEQ ID NO: 1684617
auuaacagacauggcauaa

SEQ ID NO: 1684619 - RNA, 19 nt, Artificial Sequence
  Description of Artificial Sequence: Synthetic oligonucleotide
  Sense strand starting at position 267 of SEQ ID NO: 1561607
agauauugaucagaugcua

SEQ ID NO: 1684620 - RNA, 19 nt, Artificial Sequence
  Description of Artificial Sequence: Synthetic oligonucleotide
  Antisense strand to SEQ ID NO: 1684619
uagcaucugaucaauaucu

SEQ ID NO: 1684621 - RNA, 19 nt, Artificial Sequence
  Description of Artificial Sequence: Synthetic oligonucleotide
  Sense strand starting at position 272 of SEQ ID NO: 1561607
uugaucagaugcuacauaa

SEQ ID NO: 1684622 - RNA, 19 nt, Artificial Sequence
  Description of Artificial Sequence: Synthetic oligonucleotide
  Antisense strand to SEQ ID NO: 1684621
uuauguagcaucugaucaa

SEQ ID NO: 1684623 - RNA, 19 nt, Artificial Sequence
  Description of Artificial Sequence: Synthetic oligonucleotide
  Sense strand starting at position 331 of SEQ ID NO: 1561607
cugucaaaccaucgacuua

SEQ ID NO: 1684624 - RNA, 19 nt, Artificial Sequence
  Description of Artificial Sequence: Synthetic oligonucleotide
  Antisense strand to SEQ ID NO: 1684623
uaagucgaugguuugacag

SEQ ID NO: 1684625 - RNA, 19 nt, Artificial Sequence
  Description of Artificial Sequence: Synthetic oligonucleotide
  Sense strand starting at position 342 of SEQ ID NO: 1561607
ucgacuuagaagugucuau

SEQ ID NO: 1684626 - RNA, 19 nt, Artificial Sequence
  Description of Artificial Sequence: Synthetic oligonucleotide
  Antisense strand to SEQ ID NO: 1684625
auagacacuucuaagucga

SEQ ID NO: 1684627 - RNA, 19 nt, Artificial Sequence
  Description of Artificial Sequence: Synthetic oligonucleotide
  Sense strand starting at position 346 of SEQ ID NO: 1561607
cuuagaagugucuauaguu

SEQ ID NO: 1684628 - RNA, 19 nt, Artificial Sequence
  Description of Artificial Sequence: Synthetic oligonucleotide
  Antisense strand to SEQ ID NO: 1684627
aacuauagacacuucuaag

SEQ ID NO: 1684629 - RNA, 19 nt, Artificial Sequence
  Description of Artificial Sequence: Synthetic oligonucleotide
  Sense strand starting at position 460 of SEQ ID NO: 1561607
gggcauuccagauggucaa

SEQ ID NO: 1684630 - RNA, 19 nt, Artificial Sequence
  Description of Artificial Sequence: Synthetic oligonucleotide
  Antisense strand to SEQ ID NO: 1684629
uugaccaucuggaaugccc

SEQ ID NO: 1684631 - RNA, 19 nt, Artificial Sequence
  Description of Artificial Sequence: Synthetic oligonucleotide
  Sense strand starting at position 482 of SEQ ID NO: 1561607
agaagugccucugcuacaa

SEQ ID NO: 1684632 - RNA, 19 nt, Artificial Sequence
  Description of Artificial Sequence: Synthetic oligonucleotide
  Antisense strand to SEQ ID NO: 1684631
uuguagcagaggcacuucu

SEQ ID NO: 1684633 - RNA, 19 nt, Artificial Sequence
  Description of Artificial Sequence: Synthetic oligonucleotide
  Sense strand starting at position 494 of SEQ ID NO: 1561607
gcuacaacgccugagauca

SEQ ID NO: 1684634 - RNA, 19 nt, Artificial Sequence
  Description of Artificial Sequence: Synthetic oligonucleotide
  Antisense strand to SEQ ID NO: 1684633
ugaucucaggcguuguagc

SEQ ID NO: 1684635 - RNA, 19 nt, Artificial Sequence
  Description of Artificial Sequence: Synthetic oligonucleotide
  Sense strand starting at position 504 of SEQ ID NO: 1561607
cugagaucaucauauagua

SEQ ID NO: 1684636 - RNA, 19 nt, Artificial Sequence
  Description of Artificial Sequence: Synthetic oligonucleotide
  Antisense strand to SEQ ID NO: 1684635
uacuauaugaugaucucag

SEQ ID NO: 1684637 - RNA, 19 nt, Artificial Sequence
  Description of Artificial Sequence: Synthetic oligonucleotide
  Sense strand starting at position 564 of SEQ ID NO: 1561607
ucaggaaugcuacguucua

SEQ ID NO: 1684638 - RNA, 19 nt, Artificial Sequence
  Description of Artificial Sequence: Synthetic oligonucleotide
  Antisense strand to SEQ ID NO: 1684637
uagaacguagcauuccuga

SEQ ID NO: 1684639 - RNA, 19 nt, Artificial Sequence
  Description of Artificial Sequence: Synthetic oligonucleotide
  Sense strand starting at position 589 of SEQ ID NO: 1561607
ccagauaauuaggaaacca

SEQ ID NO: 1684640 - RNA, 19 nt, Artificial Sequence
  Description of Artificial Sequence: Synthetic oligonucleotide
  Antisense strand to SEQ ID NO: 1684639
ugguuuccuaauuaucugg

SEQ ID NO: 1684641 - RNA, 19 nt, Artificial Sequence
  Description of Artificial Sequence: Synthetic oligonucleotide
  Sense strand starting at position 618 of SEQ ID NO: 1561607
ggagaaaucugucccuaug

SEQ ID NO: 1684642 - RNA, 19 nt, Artificial Sequence
  Description of Artificial Sequence: Synthetic oligonucleotide
  Antisense strand to SEQ ID NO: 1684641
cauagggacagauuucucc

SEQ ID NO: 1684643 - RNA, 19 nt, Artificial Sequence
  Description of Artificial Sequence: Synthetic oligonucleotide
  Sense strand starting at position 620 of SEQ ID NO: 1561607
agaaaucugucccuaugaa

SEQ ID NO: 1684644 - RNA, 19 nt, Artificial Sequence
  Description of Artificial Sequence: Synthetic oligonucleotide
  Antisense strand to SEQ ID NO: 1684643
uucauagggacagauuucu

SEQ ID NO: 1684645 - RNA, 19 nt, Artificial Sequence
  Description of Artificial Sequence: Synthetic oligonucleotide
  Sense strand starting at position 706 of SEQ ID NO: 1561607
aagguuauugaacgccaau

SEQ ID NO: 1684646 - RNA, 19 nt, Artificial Sequence
  Description of Artificial Sequence: Synthetic oligonucleotide
  Antisense strand to SEQ ID NO: 1684645
auuggcguucaauaaccuu

SEQ ID NO: 1684647 - RNA, 19 nt, Artificial Sequence
  Description of Artificial Sequence: Synthetic oligonucleotide
  Sense strand starting at position 709 of SEQ ID NO: 1561607
guuauugaacgccaauaac

SEQ ID NO: 1684648 - RNA, 19 nt, Artificial Sequence
  Description of Artificial Sequence: Synthetic oligonucleotide
  Antisense strand to SEQ ID NO: 1684647
guuauuggcguucaauaac

SEQ ID NO: 1684649 - RNA, 19 nt, Artificial Sequence
  Description of Artificial Sequence: Synthetic oligonucleotide
  Sense strand starting at position 736 of SEQ ID NO: 1561607
ucaggacugcgagaugauu

SEQ ID NO: 1684650 - RNA, 19 nt, Artificial Sequence
  Description of Artificial Sequence: Synthetic oligonucleotide
  Antisense strand to SEQ ID NO: 1684649
aaucaucucgcaguccuga

SEQ ID NO: 1684651 - RNA, 19 nt, Artificial Sequence
  Description of Artificial Sequence: Synthetic oligonucleotide
  Sense strand starting at position 744 of SEQ ID NO: 1561607
gcgagaugauucccaagga

SEQ ID NO: 1684652 - RNA, 19 nt, Artificial Sequence
  Description of Artificial Sequence: Synthetic oligonucleotide
  Antisense strand to SEQ ID NO: 1684651
uccuugggaaucaucucgc

SEQ ID NO: 1684653 - RNA, 19 nt, Artificial Sequence
  Description of Artificial Sequence: Synthetic oligonucleotide
  Sense strand starting at position 745 of SEQ ID NO: 1561607
cgagaugauucccaaggag

SEQ ID NO: 1684654 - RNA, 19 nt, Artificial Sequence
  Description of Artificial Sequence: Synthetic oligonucleotide
  Antisense strand to SEQ ID NO: 1684653
cuccuugggaaucaucucg

SEQ ID NO: 1684655 - RNA, 19 nt, Artificial Sequence
  Description of Artificial Sequence: Synthetic oligonucleotide
  Sense strand starting at position 765 of SEQ ID NO: 1561607
cgaacuugugcggacagau

SEQ ID NO: 1684656 - RNA, 19 nt, Artificial Sequence
  Description of Artificial Sequence: Synthetic oligonucleotide
  Antisense strand to SEQ ID NO: 1684655
aucuguccgcacaaguucg

SEQ ID NO: 1684657 - RNA, 19 nt, Artificial Sequence
  Description of Artificial Sequence: Synthetic oligonucleotide
  Sense strand starting at position 906 of SEQ ID NO: 1561607
ccgaguucugagcgacgca

SEQ ID NO: 1684658 - RNA, 19 nt, Artificial Sequence
  Description of Artificial Sequence: Synthetic oligonucleotide
  Antisense strand to SEQ ID NO: 1684657
ugcgucgcucagaacucgg

SEQ ID NO: 1684659 - RNA, 19 nt, Artificial Sequence
  Description of Artificial Sequence: Synthetic oligonucleotide
  Sense strand starting at position 2227 of SEQ ID NO: 1561607
gcaguuccguucucgugau

SEQ ID NO: 1684660 - RNA, 19 nt, Artificial Sequence
  Description of Artificial Sequence: Synthetic oligonucleotide
  Antisense strand to SEQ ID NO: 1684659
aucacgagaacggaacugc

SEQ ID NO: 1684661 - RNA, 19 nt, Artificial Sequence
  Description of Artificial Sequence: Synthetic oligonucleotide
  Sense strand starting at position 2231 of SEQ ID NO: 1561607
uuccguucucgugauucuu

SEQ ID NO: 1684662 - RNA, 19 nt, Artificial Sequence
  Description of Artificial Sequence: Synthetic oligonucleotide
  Antisense strand to SEQ ID NO: 1684661
aagaaucacgagaacggaa

SEQ ID NO: 1684663 - RNA, 19 nt, Artificial Sequence
  Description of Artificial Sequence: Synthetic oligonucleotide
  Sense strand starting at position 2233 of SEQ ID NO: 1561607
ccguucucgugauucuuaa

SEQ ID NO: 1684664 - RNA, 19 nt, Artificial Sequence
  Description of Artificial Sequence: Synthetic oligonucleotide
  Antisense strand to SEQ ID NO: 1684663
uuaagaaucacgagaacgg

SEQ ID NO: 1684665 - RNA, 19 nt, Artificial Sequence
  Description of Artificial Sequence: Synthetic oligonucleotide
  Sense strand starting at position 2283 of SEQ ID NO: 1561607
guaugcuuuccggucguca

SEQ ID NO: 1684666 - RNA, 19 nt, Artificial Sequence
  Description of Artificial Sequence: Synthetic oligonucleotide
  Antisense strand to SEQ ID NO: 1684665
ugacgaccggaaagcauac

SEQ ID NO: 1684667 - RNA, 19 nt, Artificial Sequence
  Description of Artificial Sequence: Synthetic oligonucleotide
  Sense strand starting at position 2321 of SEQ ID NO: 1561607
uguauauacucaguguuua

SEQ ID NO: 1684668 - RNA, 19 nt, Artificial Sequence
  Description of Artificial Sequence: Synthetic oligonucleotide
  Antisense strand to SEQ ID NO: 1684667
uaaacacugaguauauaca

SEQ ID NO: 1684669 - RNA, 19 nt, Artificial Sequence
  Description of Artificial Sequence: Synthetic oligonucleotide
  Sense strand starting at position 2322 of SEQ ID NO: 1561607
guauauacucaguguuuac

SEQ ID NO: 1684670 - RNA, 19 nt, Artificial Sequence
  Description of Artificial Sequence: Synthetic oligonucleotide
  Antisense strand to SEQ ID NO: 1684669
guaaacacugaguauauac

SEQ ID NO: 1684671 - RNA, 19 nt, Artificial Sequence
  Description of Artificial Sequence: Synthetic oligonucleotide
  Sense strand starting at position 2694 of SEQ ID NO: 1561607
gucaauuggaaaugcguuu

SEQ ID NO: 1684672 - RNA, 19 nt, Artificial Sequence
  Description of Artificial Sequence: Synthetic oligonucleotide
  Antisense strand to SEQ ID NO: 1684671
aaacgcauuuccaauugac

SEQ ID NO: 1684673 - RNA, 19 nt, Artificial Sequence
  Description of Artificial Sequence: Synthetic oligonucleotide
  Sense strand starting at position 2700 of SEQ ID NO: 1561607
uggaaaugcguuuagaaau

SEQ ID NO: 1684674 - RNA, 19 nt, Artificial Sequence
  Description of Artificial Sequence: Synthetic oligonucleotide
  Antisense strand to SEQ ID NO: 1684673
auuucuaaacgcauuucca

SEQ ID NO: 1684675 - RNA, 19 nt, Artificial Sequence
  Description of Artificial Sequence: Synthetic oligonucleotide
  Sense strand starting at position 3097 of SEQ ID NO: 1561607
ugaccauauuacuaagugu

SEQ ID NO: 1684676 - RNA, 19 nt, Artificial Sequence
  Description of Artificial Sequence: Synthetic oligonucleotide
  Antisense strand to SEQ ID NO: 1684675
acacuuaguaauaugguca

SEQ ID NO: 1684677 - RNA, 19 nt, Artificial Sequence
  Description of Artificial Sequence: Synthetic oligonucleotide
  Sense strand starting at position 3100 of SEQ ID NO: 1561607
ccauauuacuaaguguuac

SEQ ID NO: 1684678 - RNA, 19 nt, Artificial Sequence
  Description of Artificial Sequence: Synthetic oligonucleotide
  Antisense strand to SEQ ID NO: 1684677
guaacacuuaguaauaugg

SEQ ID NO: 1684679 - RNA, 19 nt, Artificial Sequence
  Description of Artificial Sequence: Synthetic oligonucleotide
  Sense strand starting at position 3128 of SEQ ID NO: 1561607
ucauaauugugucaauauc

SEQ ID NO: 1684680 - RNA, 19 nt, Artificial Sequence
  Description of Artificial Sequence: Synthetic oligonucleotide
  Antisense strand to SEQ ID NO: 1684679
gauauugacacaauuauga

SEQ ID NO: 1684681 - RNA, 19 nt, Artificial Sequence
  Description of Artificial Sequence: Synthetic oligonucleotide
  Sense strand starting at position 3134 of SEQ ID NO: 1561607
uugugucaauaucuccaga

SEQ ID NO: 1684682 - RNA, 19 nt, Artificial Sequence
  Description of Artificial Sequence: Synthetic oligonucleotide
  Antisense strand to SEQ ID NO: 1684681
ucuggagauauugacacaa

SEQ ID NO: 1684683 - RNA, 19 nt, Artificial Sequence
  Description of Artificial Sequence: Synthetic oligonucleotide
  Sense strand starting at position 3136 of SEQ ID NO: 1561607
gugucaauaucuccagaua

SEQ ID NO: 1684684 - RNA, 19 nt, Artificial Sequence
  Description of Artificial Sequence: Synthetic oligonucleotide
  Antisense strand to SEQ ID NO: 1684683
uaucuggagauauugacac

SEQ ID NO: 1684685 - RNA, 19 nt, Artificial Sequence
  Description of Artificial Sequence: Synthetic oligonucleotide
  Sense strand starting at position 3460 of SEQ ID NO: 1561607
ugaggcuauccuggccaau

SEQ ID NO: 1684686 - RNA, 19 nt, Artificial Sequence
  Description of Artificial Sequence: Synthetic oligonucleotide
  Antisense strand to SEQ ID NO: 1684685
auuggccaggauagccuca

SEQ ID NO: 1684687 - RNA, 19 nt, Artificial Sequence
  Description of Artificial Sequence: Synthetic oligonucleotide
  Sense strand starting at position 3463 of SEQ ID NO: 1561607
ggcuauccuggccaaugua

SEQ ID NO: 1684688 - RNA, 19 nt, Artificial Sequence
  Description of Artificial Sequence: Synthetic oligonucleotide
  Antisense strand to SEQ ID NO: 1684687
uacauuggccaggauagcc

SEQ ID NO: 1684689 - RNA, 19 nt, Artificial Sequence
  Description of Artificial Sequence: Synthetic oligonucleotide
  Sense strand starting at position 2380 of SEQ ID NO: 1561608
cggugcugaccagaaacaa

SEQ ID NO: 1684690 - RNA, 19 nt, Artificial Sequence
  Description of Artificial Sequence: Synthetic oligonucleotide
  Antisense strand to SEQ ID NO: 1684689
uuguuucuggucagcaccg

SEQ ID NO: 1684691 - RNA, 19 nt, Artificial Sequence
  Description of Artificial Sequence: Synthetic oligonucleotide
  Sense strand starting at position 2675 of SEQ ID NO: 1561608
ugcuacaaucagggaguuu

SEQ ID NO: 1684692 - RNA, 19 nt, Artificial Sequence
  Description of Artificial Sequence: Synthetic oligonucleotide
  Antisense strand to SEQ ID NO: 1684691
aaacucccugauuguagca

SEQ ID NO: 1684693 - RNA, 19 nt, Artificial Sequence
  Description of Artificial Sequence: Synthetic oligonucleotide
  Sense strand starting at position 2764 of SEQ ID NO: 1561608
guaguuucaggcugaagca

SEQ ID NO: 1684694 - RNA, 19 nt, Artificial Sequence
  Description of Artificial Sequence: Synthetic oligonucleotide
  Antisense strand to SEQ ID NO: 1684693
ugcuucagccugaaacuac

SEQ ID NO: 1684695 - RNA, 19 nt, Artificial Sequence
  Description of Artificial Sequence: Synthetic oligonucleotide
  Sense strand starting at position 2943 of SEQ ID NO: 1561608
cauucuagguugccagaua

SEQ ID NO: 1684696 - RNA, 19 nt, Artificial Sequence
  Description of Artificial Sequence: Synthetic oligonucleotide
  Antisense strand to SEQ ID NO: 1684695
uaucuggcaaccuagaaug

SEQ ID NO: 1684697 - RNA, 19 nt, Artificial Sequence
  Description of Artificial Sequence: Synthetic oligonucleotide
  Sense strand starting at position 2944 of SEQ ID NO: 1561608
auucuagguugccagauaa

SEQ ID NO: 1684698 - RNA, 19 nt, Artificial Sequence
  Description of Artificial Sequence: Synthetic oligonucleotide
  Antisense strand to SEQ ID NO: 1684697
uuaucuggcaaccuagaau

SEQ ID NO: 1684699 - RNA, 19 nt, Artificial Sequence
  Description of Artificial Sequence: Synthetic oligonucleotide
  Sense strand starting at position 2968 of SEQ ID NO: 1561608
agaauaauaugccaguuaa

SEQ ID NO: 1684700 - RNA, 19 nt, Artificial Sequence
  Description of Artificial Sequence: Synthetic oligonucleotide
  Antisense strand to SEQ ID NO: 1684699
uuaacuggcauauuauucu

SEQ ID NO: 1684701 - RNA, 19 nt, Artificial Sequence
  Description of Artificial Sequence: Synthetic oligonucleotide
  Sense strand starting at position 3017 of SEQ ID NO: 1561608
ggguauaaguauguuccaa

SEQ ID NO: 1684702 - RNA, 19 nt, Artificial Sequence
  Description of Artificial Sequence: Synthetic oligonucleotide
  Antisense strand to SEQ ID NO: 1684701
uuggaacauacuuauaccc

SEQ ID NO: 1684703 - RNA, 19 nt, Artificial Sequence
  Description of Artificial Sequence: Synthetic oligonucleotide
  Sense strand starting at position 3019 of SEQ ID NO: 1561608
guauaaguauguuccaacu

SEQ ID NO: 1684704 - RNA, 19 nt, Artificial Sequence
  Description of Artificial Sequence: Synthetic oligonucleotide
  Antisense strand to SEQ ID NO: 1684703
aguuggaacauacuuauac

SEQ ID NO: 1684705 - RNA, 19 nt, Artificial Sequence
  Description of Artificial Sequence: Synthetic oligonucleotide
  Sense strand starting at position 3032 of SEQ ID NO: 1561608
ccaacuucugcuugagaca

SEQ ID NO: 1684706 - RNA, 19 nt, Artificial Sequence
  Description of Artificial Sequence: Synthetic oligonucleotide
  Antisense strand to SEQ ID NO: 1684705
ugucucaagcagaaguugg

SEQ ID NO: 1684707 - RNA, 19 nt, Artificial Sequence
  Description of Artificial Sequence: Synthetic oligonucleotide
  Sense strand starting at position 3035 of SEQ ID NO: 1561608
acuucugcuugagacauua

SEQ ID NO: 1684708 - RNA, 19 nt, Artificial Sequence
  Description of Artificial Sequence: Synthetic oligonucleotide
  Antisense strand to SEQ ID NO: 1684707
uaaugucucaagcagaagu

SEQ ID NO: 1684709 - RNA, 19 nt, Artificial Sequence
  Description of Artificial Sequence: Synthetic oligonucleotide
  Sense strand starting at position 3535 of SEQ ID NO: 1561608
uacugugcucauuggucaa

SEQ ID NO: 1684710 - RNA, 19 nt, Artificial Sequence
  Description of Artificial Sequence: Synthetic oligonucleotide
  Antisense strand to SEQ ID NO: 1684709
uugaccaaugagcacagua

SEQ ID NO: 1684711 - RNA, 19 nt, Artificial Sequence
  Description of Artificial Sequence: Synthetic oligonucleotide
  Sense strand starting at position 3549 of SEQ ID NO: 1561608
gucaaagccugaggacaaa

SEQ ID NO: 1684712 - RNA, 19 nt, Artificial Sequence
  Description of Artificial Sequence: Synthetic oligonucleotide
  Antisense strand to SEQ ID NO: 1684711
uuuguccucaggcuuugac

SEQ ID NO: 1684713 - RNA, 19 nt, Artificial Sequence
  Description of Artificial Sequence: Synthetic oligonucleotide
  Sense strand starting at position 3784 of SEQ ID NO: 1561608
gauggaaacuucugcagag

SEQ ID NO: 1684714 - RNA, 19 nt, Artificial Sequence
  Description of Artificial Sequence: Synthetic oligonucleotide
  Antisense strand to SEQ ID NO: 1684713
cucugcagaaguuuccauc

SEQ ID NO: 1684715 - RNA, 19 nt, Artificial Sequence
  Description of Artificial Sequence: Synthetic oligonucleotide
  Sense strand starting at position 3807 of SEQ ID NO: 1561608
ggagaugauuccuuuccca

SEQ ID NO: 1684716 - RNA, 19 nt, Artificial Sequence
  Description of Artificial Sequence: Synthetic oligonucleotide
  Antisense strand to SEQ ID NO: 1684715
ugggaaaggaaucaucucc

SEQ ID NO: 1684717 - RNA, 19 nt, Artificial Sequence
  Description of Artificial Sequence: Synthetic oligonucleotide
  Sense strand starting at position 3810 of SEQ ID NO: 1561608
gaugauuccuuucccagga

SEQ ID NO: 1684718 - RNA, 19 nt, Artificial Sequence
  Description of Artificial Sequence: Synthetic oligonucleotide
  Antisense strand to SEQ ID NO: 1684717
uccugggaaaggaaucauc

SEQ ID NO: 1684719 - RNA, 19 nt, Artificial Sequence
  Description of Artificial Sequence: Synthetic oligonucleotide
  Sense strand starting at position 3937 of SEQ ID NO: 1561608
agccgaaguucugacagga

SEQ ID NO: 1684720 - RNA, 19 nt, Artificial Sequence
  Description of Artificial Sequence: Synthetic oligonucleotide
  Antisense strand to SEQ ID NO: 1684719
uccugucagaacuucggcu

SEQ ID NO: 1684721 - RNA, 19 nt, Artificial Sequence
  Description of Artificial Sequence: Synthetic oligonucleotide
  Sense strand starting at position 30 of SEQ ID NO: 1561609
aggcaaauauccuuaugca

SEQ ID NO: 1684722 - RNA, 19 nt, Artificial Sequence
  Description of Artificial Sequence: Synthetic oligonucleotide
  Antisense strand to SEQ ID NO: 1684721
ugcauaaggauauuugccu

SEQ ID NO: 1684723 - RNA, 19 nt, Artificial Sequence
  Description of Artificial Sequence: Synthetic oligonucleotide
  Sense strand starting at position 31 of SEQ ID NO: 1561609
ggcaaauauccuuaugcau

SEQ ID NO: 1684724 - RNA, 19 nt, Artificial Sequence
  Description of Artificial Sequence: Synthetic oligonucleotide
  Antisense strand to SEQ ID NO: 1684723
augcauaaggauauuugcc

SEQ ID NO: 1684725 - RNA, 19 nt, Artificial Sequence
  Description of Artificial Sequence: Synthetic oligonucleotide
  Sense strand starting at position 458 of SEQ ID NO: 1561609
aaugcuugcccagaaugua

SEQ ID NO: 1684726 - RNA, 19 nt, Artificial Sequence
  Description of Artificial Sequence: Synthetic oligonucleotide
  Antisense strand to SEQ ID NO: 1684725
uacauucugggcaagcauu

SEQ ID NO: 1684727 - RNA, 19 nt, Artificial Sequence
  Description of Artificial Sequence: Synthetic oligonucleotide
  Sense strand starting at position 539 of SEQ ID NO: 1561609
cuguaacaaugaguuauga

SEQ ID NO: 1684728 - RNA, 19 nt, Artificial Sequence
  Description of Artificial Sequence: Synthetic oligonucleotide
  Antisense strand to SEQ ID NO: 1684727
ucauaacucauuguuacag

SEQ ID NO: 1684729 - RNA, 19 nt, Artificial Sequence
  Description of Artificial Sequence: Synthetic oligonucleotide
  Sense strand starting at position 582 of SEQ ID NO: 1561609
ggcucucgccuguaaucaa

SEQ ID NO: 1684730 - RNA, 19 nt, Artificial Sequence
  Description of Artificial Sequence: Synthetic oligonucleotide
  Antisense strand to SEQ ID NO: 1684729
uugauuacaggcgagagcc

SEQ ID NO: 1684731 - RNA, 19 nt, Artificial Sequence
  Description of Artificial Sequence: Synthetic oligonucleotide
  Sense strand starting at position 677 of SEQ ID NO: 1561609
gggccucaugucuacuaaa

SEQ ID NO: 1684732 - RNA, 19 nt, Artificial Sequence
  Description of Artificial Sequence: Synthetic oligonucleotide
  Antisense strand to SEQ ID NO: 1684731
uuuaguagacaugaggccc

SEQ ID NO: 1684733 - RNA, 19 nt, Artificial Sequence
  Description of Artificial Sequence: Synthetic oligonucleotide
  Sense strand starting at position 726 of SEQ ID NO: 1561609
gcgcuuauggucccagcua

SEQ ID NO: 1684734 - RNA, 19 nt, Artificial Sequence
  Description of Artificial Sequence: Synthetic oligonucleotide
  Antisense strand to SEQ ID NO: 1684733
uagcugggaccauaagcgc

SEQ ID NO: 1684735 - RNA, 19 nt, Artificial Sequence
  Description of Artificial Sequence: Synthetic oligonucleotide
  Sense strand starting at position 961 of SEQ ID NO: 1561609
ggaggucaaagcuguuaga

SEQ ID NO: 1684736 - RNA, 19 nt, Artificial Sequence
  Description of Artificial Sequence: Synthetic oligonucleotide
  Antisense strand to SEQ ID NO: 1684735
ucuaacagcuuugaccucc

SEQ ID NO: 1684737 - RNA, 19 nt, Artificial Sequence
  Description of Artificial Sequence: Synthetic oligonucleotide
  Sense strand starting at position 1333 of SEQ ID NO: 1561609
augcuuaggccucagaaua

SEQ ID NO: 1684738 - RNA, 19 nt, Artificial Sequence
  Description of Artificial Sequence: Synthetic oligonucleotide
  Antisense strand to SEQ ID NO: 1684737
uauucugaggccuaagcau

SEQ ID NO: 1684739 - RNA, 19 nt, Artificial Sequence
  Description of Artificial Sequence: Synthetic oligonucleotide
  Sense strand starting at position 1341 of SEQ ID NO: 1561609
gccucagaauaaguaauga

SEQ ID NO: 1684740 - RNA, 19 nt, Artificial Sequence
  Description of Artificial Sequence: Synthetic oligonucleotide
  Antisense strand to SEQ ID NO: 1684739
ucauuacuuauucugaggc

SEQ ID NO: 1684741 - RNA, 19 nt, Artificial Sequence
  Description of Artificial Sequence: Synthetic oligonucleotide
  Sense strand starting at position 1391 of SEQ ID NO: 1561609
gggauauugugagaagaaa

SEQ ID NO: 1684742 - RNA, 19 nt, Artificial Sequence
  Description of Artificial Sequence: Synthetic oligonucleotide
  Antisense strand to SEQ ID NO: 1684741
uuucuucucacaauauccc

SEQ ID NO: 1684743 - RNA, 19 nt, Artificial Sequence
  Description of Artificial Sequence: Synthetic oligonucleotide
  Sense strand starting at position 1556 of SEQ ID NO: 1561609
acuauauuugcucagcugu

SEQ ID NO: 1684744 - RNA, 19 nt, Artificial Sequence
  Description of Artificial Sequence: Synthetic oligonucleotide
  Antisense strand to SEQ ID NO: 1684743
acagcugagcaaauauagu

SEQ ID NO: 1684745 - RNA, 19 nt, Artificial Sequence
  Description of Artificial Sequence: Synthetic oligonucleotide
  Sense strand starting at position 1718 of SEQ ID NO: 1561609
ggcagucaagaucaaguuu

SEQ ID NO: 1684746 - RNA, 19 nt, Artificial Sequence
  Description of Artificial Sequence: Synthetic oligonucleotide
  Antisense strand to SEQ ID NO: 1684745
aaacuugaucuugacugcc

SEQ ID NO: 1684747 - RNA, 19 nt, Artificial Sequence
  Description of Artificial Sequence: Synthetic oligonucleotide
  Sense strand starting at position 1729 of SEQ ID NO: 1561609
ucaaguuucugcccuaaag

SEQ ID NO: 1684748 - RNA, 19 nt, Artificial Sequence
  Description of Artificial Sequence: Synthetic oligonucleotide
  Antisense strand to SEQ ID NO: 1684747
cuuuagggcagaaacuuga

SEQ ID NO: 1684749 - RNA, 19 nt, Artificial Sequence
  Description of Artificial Sequence: Synthetic oligonucleotide
  Sense strand starting at position 1731 of SEQ ID NO: 1561609
aaguuucugcccuaaagga

SEQ ID NO: 1684750 - RNA, 19 nt, Artificial Sequence
  Description of Artificial Sequence: Synthetic oligonucleotide
  Antisense strand to SEQ ID NO: 1684749
uccuuuagggcagaaacuu

SEQ ID NO: 1684751 - RNA, 19 nt, Artificial Sequence
  Description of Artificial Sequence: Synthetic oligonucleotide
  Sense strand starting at position 1981 of SEQ ID NO: 1561609
ggcagauugcccuaguaac

SEQ ID NO: 1684752 - RNA, 19 nt, Artificial Sequence
  Description of Artificial Sequence: Synthetic oligonucleotide
  Antisense strand to SEQ ID NO: 1684751
guuacuagggcaaucugcc

SEQ ID NO: 1684753 - RNA, 19 nt, Artificial Sequence
  Description of Artificial Sequence: Synthetic oligonucleotide
  Sense strand starting at position 2036 of SEQ ID NO: 1561609
agguuaugauuggucagga

SEQ ID NO: 1684754 - RNA, 19 nt, Artificial Sequence
  Description of Artificial Sequence: Synthetic oligonucleotide
  Antisense strand to SEQ ID NO: 1684753
uccugaccaaucauaaccu

SEQ ID NO: 1684755 - RNA, 19 nt, Artificial Sequence
  Description of Artificial Sequence: Synthetic oligonucleotide
  Sense strand starting at position 2037 of SEQ ID NO: 1561609
gguuaugauuggucaggac

SEQ ID NO: 1684756 - RNA, 19 nt, Artificial Sequence
  Description of Artificial Sequence: Synthetic oligonucleotide
  Antisense strand to SEQ ID NO: 1684755
guccugaccaaucauaacc

SEQ ID NO: 1684757 - RNA, 19 nt, Artificial Sequence
  Description of Artificial Sequence: Synthetic oligonucleotide
  Sense strand starting at position 2080 of SEQ ID NO: 1561609
ggcccucuuucucuagcaa

SEQ ID NO: 1684758 - RNA, 19 nt, Artificial Sequence
  Description of Artificial Sequence: Synthetic oligonucleotide
  Antisense strand to SEQ ID NO: 1684757
uugcuagagaaagagggcc

SEQ ID NO: 1684759 - RNA, 19 nt, Artificial Sequence
  Description of Artificial Sequence: Synthetic oligonucleotide
  Sense strand starting at position 2139 of SEQ ID NO: 1561609
cuggauaugucgcugagga

SEQ ID NO: 1684760 - RNA, 19 nt, Artificial Sequence
  Description of Artificial Sequence: Synthetic oligonucleotide
  Antisense strand to SEQ ID NO: 1684759
uccucagcgacauauccag

SEQ ID NO: 1684761 - RNA, 19 nt, Artificial Sequence
  Description of Artificial Sequence: Synthetic oligonucleotide
  Sense strand starting at position 2140 of SEQ ID NO: 1561609
uggauaugucgcugaggag

SEQ ID NO: 1684762 - RNA, 19 nt, Artificial Sequence
  Description of Artificial Sequence: Synthetic oligonucleotide
  Antisense strand to SEQ ID NO: 1684761
cuccucagcgacauaucca

SEQ ID NO: 1684763 - RNA, 19 nt, Artificial Sequence
  Description of Artificial Sequence: Synthetic oligonucleotide
  Sense strand starting at position 2930 of SEQ ID NO: 1561609
gucacauggucguuggaau

SEQ ID NO: 1684764 - RNA, 19 nt, Artificial Sequence
  Description of Artificial Sequence: Synthetic oligonucleotide
  Antisense strand to SEQ ID NO: 1684763
auuccaacgaccaugugac

SEQ ID NO: 1684765 - RNA, 19 nt, Artificial Sequence
  Description of Artificial Sequence: Synthetic oligonucleotide
  Sense strand starting at position 2931 of SEQ ID NO: 1561609
ucacauggucguuggaaug

SEQ ID NO: 1684766 - RNA, 19 nt, Artificial Sequence
  Description of Artificial Sequence: Synthetic oligonucleotide
  Antisense strand to SEQ ID NO: 1684765
cauuccaacgaccauguga

SEQ ID NO: 1684767 - RNA, 19 nt, Artificial Sequence
  Description of Artificial Sequence: Synthetic oligonucleotide
  Sense strand starting at position 3196 of SEQ ID NO: 1561609
ccuggacuaagcgaucuuu

SEQ ID NO: 1684768 - RNA, 19 nt, Artificial Sequence
  Description of Artificial Sequence: Synthetic oligonucleotide
  Antisense strand to SEQ ID NO: 1684767
aaagaucgcuuaguccagg

SEQ ID NO: 1684769 - RNA, 19 nt, Artificial Sequence
  Description of Artificial Sequence: Synthetic oligonucleotide
  Sense strand starting at position 3207 of SEQ ID NO: 1561609
cgaucuuucggcgucucaa

SEQ ID NO: 1684770 - RNA, 19 nt, Artificial Sequence
  Description of Artificial Sequence: Synthetic oligonucleotide
  Antisense strand to SEQ ID NO: 1684769
uugagacgccgaaagaucg

SEQ ID NO: 1684771 - RNA, 19 nt, Artificial Sequence
  Description of Artificial Sequence: Synthetic oligonucleotide
  Sense strand starting at position 3334 of SEQ ID NO: 1561609
ggcaguguucucuaugcau

SEQ ID NO: 1684772 - RNA, 19 nt, Artificial Sequence
  Description of Artificial Sequence: Synthetic oligonucleotide
  Antisense strand to SEQ ID NO: 1684771
augcauagagaacacugcc

SEQ ID NO: 1684773 - RNA, 19 nt, Artificial Sequence
  Description of Artificial Sequence: Synthetic oligonucleotide
  Sense strand starting at position 3570 of SEQ ID NO: 1561609
acaccaggucuuugugcua

SEQ ID NO: 1684774 - RNA, 19 nt, Artificial Sequence
  Description of Artificial Sequence: Synthetic oligonucleotide
  Antisense strand to SEQ ID NO: 1684773
uagcacaaagaccuggugu

SEQ ID NO: 1684775 - RNA, 19 nt, Artificial Sequence
  Description of Artificial Sequence: Synthetic oligonucleotide
  Sense strand starting at position 3577 of SEQ ID NO: 1561609
gucuuugugcuagggacaa

SEQ ID NO: 1684776 - RNA, 19 nt, Artificial Sequence
  Description of Artificial Sequence: Synthetic oligonucleotide
  Antisense strand to SEQ ID NO: 1684775
uugucccuagcacaaagac

SEQ ID NO: 1684777 - RNA, 19 nt, Artificial Sequence
  Description of Artificial Sequence: Synthetic oligonucleotide
  Sense strand starting at position 3674 of SEQ ID NO: 1561609
gaucuaguguugccagaau

SEQ ID NO: 1684778 - RNA, 19 nt, Artificial Sequence
  Description of Artificial Sequence: Synthetic oligonucleotide
  Antisense strand to SEQ ID NO: 1684777
auucuggcaacacuagauc

SEQ ID NO: 1684779 - RNA, 19 nt, Artificial Sequence
  Description of Artificial Sequence: Synthetic oligonucleotide
  Sense strand starting at position 3694 of SEQ ID NO: 1561609
uugggcaagaguugucaga

SEQ ID NO: 1684780 - RNA, 19 nt, Artificial Sequence
  Description of Artificial Sequence: Synthetic oligonucleotide
  Antisense strand to SEQ ID NO: 1684779
ucugacaacucuugcccaa

SEQ ID NO: 1684781 - RNA, 19 nt, Artificial Sequence
  Description of Artificial Sequence: Synthetic oligonucleotide
  Sense strand starting at position 3696 of SEQ ID NO: 1561609
gggcaagaguugucagaaa

SEQ ID NO: 1684782 - RNA, 19 nt, Artificial Sequence
  Description of Artificial Sequence: Synthetic oligonucleotide
  Antisense strand to SEQ ID NO: 1684781
uuucugacaacucuugccc

SEQ ID NO: 1684783 - RNA, 19 nt, Artificial Sequence
  Description of Artificial Sequence: Synthetic oligonucleotide
  Sense strand starting at position 3793 of SEQ ID NO: 1561609
agaguuaaagcauauccga

SEQ ID NO: 1684784 - RNA, 19 nt, Artificial Sequence
  Description of Artificial Sequence: Synthetic oligonucleotide
  Antisense strand to SEQ ID NO: 1684783
ucggauaugcuuuaacucu

SEQ ID NO: 1684785 - RNA, 19 nt, Artificial Sequence
  Description of Artificial Sequence: Synthetic oligonucleotide
  Sense strand starting at position 3796 of SEQ ID NO: 1561609
guuaaagcauauccgaguu

SEQ ID NO: 1684786 - RNA, 19 nt, Artificial Sequence
  Description of Artificial Sequence: Synthetic oligonucleotide
  Antisense strand to SEQ ID NO: 1684785
aacucggauaugcuuuaac

SEQ ID NO: 1684787 - RNA, 19 nt, Artificial Sequence
  Description of Artificial Sequence: Synthetic oligonucleotide
  Sense strand starting at position 3810 of SEQ ID NO: 1561609
gaguuugagacuuggauug

SEQ ID NO: 1684788 - RNA, 19 nt, Artificial Sequence
  Description of Artificial Sequence: Synthetic oligonucleotide
  Antisense strand to SEQ ID NO: 1684787
caauccaagucucaaacuc

SEQ ID NO: 1684789 - RNA, 19 nt, Artificial Sequence
  Description of Artificial Sequence: Synthetic oligonucleotide
  Sense strand starting at position 3820 of SEQ ID NO: 1561609
cuuggauugagaugcucaa

SEQ ID NO: 1684790 - RNA, 19 nt, Artificial Sequence
  Description of Artificial Sequence: Synthetic oligonucleotide
  Antisense strand to SEQ ID NO: 1684789
uugagcaucucaauccaag

SEQ ID NO: 1684791 - RNA, 19 nt, Artificial Sequence
  Description of Artificial Sequence: Synthetic oligonucleotide
  Sense strand starting at position 3865 of SEQ ID NO: 1561609
gcuauauucuuuccacugu

SEQ ID NO: 1684792 - RNA, 19 nt, Artificial Sequence
  Description of Artificial Sequence: Synthetic oligonucleotide
  Antisense strand to SEQ ID NO: 1684791
acaguggaaagaauauagc

SEQ ID NO: 1684793 - RNA, 19 nt, Artificial Sequence
  Description of Artificial Sequence: Synthetic oligonucleotide
  Sense strand starting at position 3884 of SEQ ID NO: 1561609
ucugaaguccagugcuaug

SEQ ID NO: 1684794 - RNA, 19 nt, Artificial Sequence
  Description of Artificial Sequence: Synthetic oligonucleotide
  Antisense strand to SEQ ID NO: 1684793
cauagcacuggacuucaga

SEQ ID NO: 1684795 - RNA, 19 nt, Artificial Sequence
  Description of Artificial Sequence: Synthetic oligonucleotide
  Sense strand starting at position 3975 of SEQ ID NO: 1561609
agcaaacuggugugugaua

SEQ ID NO: 1684796 - RNA, 19 nt, Artificial Sequence
  Description of Artificial Sequence: Synthetic oligonucleotide
  Antisense strand to SEQ ID NO: 1684795
uaucacacaccaguuugcu

SEQ ID NO: 1684797 - RNA, 19 nt, Artificial Sequence
  Description of Artificial Sequence: Synthetic oligonucleotide
  Sense strand starting at position 3976 of SEQ ID NO: 1561609
gcaaacuggugugugauaa

SEQ ID NO: 1684798 - RNA, 19 nt, Artificial Sequence
  Description of Artificial Sequence: Synthetic oligonucleotide
  Antisense strand to SEQ ID NO: 1684797
uuaucacacaccaguuugc

SEQ ID NO: 1684799 - RNA, 19 nt, Artificial Sequence
  Description of Artificial Sequence: Synthetic oligonucleotide
  Sense strand starting at position 3977 of SEQ ID NO: 1561609
caaacuggugugugauaaa

SEQ ID NO: 1684800 - RNA, 19 nt, Artificial Sequence
  Description of Artificial Sequence: Synthetic oligonucleotide
  Antisense strand to SEQ ID NO: 1684799
uuuaucacacaccaguuug

SEQ ID NO: 1684801 - RNA, 19 nt, Artificial Sequence
  Description of Artificial Sequence: Synthetic oligonucleotide
  Sense strand starting at position 192 of SEQ ID NO: 1561610
cugacucaauguuaaagaa

SEQ ID NO: 1684802 - RNA, 19 nt, Artificial Sequence
  Description of Artificial Sequence: Synthetic oligonucleotide
  Antisense strand to SEQ ID NO: 1684801
uucuuuaacauugagucag

SEQ ID NO: 1684803 - RNA, 19 nt, Artificial Sequence
  Description of Artificial Sequence: Synthetic oligonucleotide
  Sense strand starting at position 212 of SEQ ID NO: 1561610
acacuuaucuaguaaguga

SEQ ID NO: 1684804 - RNA, 19 nt, Artificial Sequence
  Description of Artificial Sequence: Synthetic oligonucleotide
  Antisense strand to SEQ ID NO: 1684803
ucacuuacuagauaagugu

SEQ ID NO: 1684805 - RNA, 19 nt, Artificial Sequence
  Description of Artificial Sequence: Synthetic oligonucleotide
  Sense strand starting at position 282 of SEQ ID NO: 1561610
gguccaaaguuccuuccaa

SEQ ID NO: 1684806 - RNA, 19 nt, Artificial Sequence
  Description of Artificial Sequence: Synthetic oligonucleotide
  Antisense strand to SEQ ID NO: 1684805
uuggaaggaacuuuggacc

SEQ ID NO: 1684807 - RNA, 19 nt, Artificial Sequence
  Description of Artificial Sequence: Synthetic oligonucleotide
  Sense strand starting at position 283 of SEQ ID NO: 1561610
guccaaaguuccuuccaau

SEQ ID NO: 1684808 - RNA, 19 nt, Artificial Sequence
  Description of Artificial Sequence: Synthetic oligonucleotide
  Antisense strand to SEQ ID NO: 1684807
auuggaaggaacuuuggac

SEQ ID NO: 1684809 - RNA, 19 nt, Artificial Sequence
  Description of Artificial Sequence: Synthetic oligonucleotide
  Sense strand starting at position 341 of SEQ ID NO: 1561610
augacuauuucugaaguua

SEQ ID NO: 1684810 - RNA, 19 nt, Artificial Sequence
  Description of Artificial Sequence: Synthetic oligonucleotide
  Antisense strand to SEQ ID NO: 1684809
uaacuucagaaauagucau

SEQ ID NO: 1684811 - RNA, 19 nt, Artificial Sequence
  Description of Artificial Sequence: Synthetic oligonucleotide
  Sense strand starting at position 375 of SEQ ID NO: 1561610
gcuuaugggucaccaguaa

SEQ ID NO: 1684812 - RNA, 19 nt, Artificial Sequence
  Description of Artificial Sequence: Synthetic oligonucleotide
  Antisense strand to SEQ ID NO: 1684811
uuacuggugacccauaagc

SEQ ID NO: 1684813 - RNA, 19 nt, Artificial Sequence
  Description of Artificial Sequence: Synthetic oligonucleotide
  Sense strand starting at position 558 of SEQ ID NO: 1561610
gcagguccuuucuuaaaca

SEQ ID NO: 1684814 - RNA, 19 nt, Artificial Sequence
  Description of Artificial Sequence: Synthetic oligonucleotide
  Antisense strand to SEQ ID NO: 1684813
uguuuaagaaaggaccugc

SEQ ID NO: 1684815 - RNA, 19 nt, Artificial Sequence
  Description of Artificial Sequence: Synthetic oligonucleotide
  Sense strand starting at position 1077 of SEQ ID NO: 1561610
gccacagcucuguuuguuu

SEQ ID NO: 1684816 - RNA, 19 nt, Artificial Sequence
  Description of Artificial Sequence: Synthetic oligonucleotide
  Antisense strand to SEQ ID NO: 1684815
aaacaaacagagcuguggc

SEQ ID NO: 1684817 - RNA, 19 nt, Artificial Sequence
  Description of Artificial Sequence: Synthetic oligonucleotide
  Sense strand starting at position 1620 of SEQ ID NO: 1561610
cgaucuugccagugcugaa

SEQ ID NO: 1684818 - RNA, 19 nt, Artificial Sequence
  Description of Artificial Sequence: Synthetic oligonucleotide
  Antisense strand to SEQ ID NO: 1684817
uucagcacuggcaagaucg

SEQ ID NO: 1684819 - RNA, 19 nt, Artificial Sequence
  Description of Artificial Sequence: Synthetic oligonucleotide
  Sense strand starting at position 2278 of SEQ ID NO: 1561610
gcuucuucgagcugccaga

SEQ ID NO: 1684820 - RNA, 19 nt, Artificial Sequence
  Description of Artificial Sequence: Synthetic oligonucleotide
  Antisense strand to SEQ ID NO: 1684819
ucuggcagcucgaagaagc

SEQ ID NO: 1684821 - RNA, 19 nt, Artificial Sequence
  Description of Artificial Sequence: Synthetic oligonucleotide
  Sense strand starting at position 2434 of SEQ ID NO: 1561610
agacaauaggucggucagu

SEQ ID NO: 1684822 - RNA, 19 nt, Artificial Sequence
  Description of Artificial Sequence: Synthetic oligonucleotide
  Antisense strand to SEQ ID NO: 1684821
acugaccgaccuauugucu

SEQ ID NO: 1684823 - RNA, 19 nt, Artificial Sequence
  Description of Artificial Sequence: Synthetic oligonucleotide
  Sense strand starting at position 2435 of SEQ ID NO: 1561610
gacaauaggucggucaguu

SEQ ID NO: 1684824 - RNA, 19 nt, Artificial Sequence
  Description of Artificial Sequence: Synthetic oligonucleotide
  Antisense strand to SEQ ID NO: 1684823
aacugaccgaccuauuguc

SEQ ID NO: 1684825 - RNA, 19 nt, Artificial Sequence
  Description of Artificial Sequence: Synthetic oligonucleotide
  Sense strand starting at position 2445 of SEQ ID NO: 1561610
cggucaguuccgcaucuca

SEQ ID NO: 1684826 - RNA, 19 nt, Artificial Sequence
  Description of Artificial Sequence: Synthetic oligonucleotide
  Antisense strand to SEQ ID NO: 1684825
ugagaugcggaacugaccg

SEQ ID NO: 1684827 - RNA, 19 nt, Artificial Sequence
  Description of Artificial Sequence: Synthetic oligonucleotide
  Sense strand starting at position 2701 of SEQ ID NO: 1561610
ugaggacuuucuccaguug

SEQ ID NO: 1684828 - RNA, 19 nt, Artificial Sequence
  Description of Artificial Sequence: Synthetic oligonucleotide
  Antisense strand to SEQ ID NO: 1684827
caacuggagaaaguccuca

SEQ ID NO: 1684829 - RNA, 19 nt, Artificial Sequence
  Description of Artificial Sequence: Synthetic oligonucleotide
  Sense strand starting at position 2873 of SEQ ID NO: 1561610
gacaaugucugucaagcgu

SEQ ID NO: 1684830 - RNA, 19 nt, Artificial Sequence
  Description of Artificial Sequence: Synthetic oligonucleotide
  Antisense strand to SEQ ID NO: 1684829
acgcuugacagacauuguc

SEQ ID NO: 1684831 - RNA, 19 nt, Artificial Sequence
  Description of Artificial Sequence: Synthetic oligonucleotide
  Sense strand starting at position 2989 of SEQ ID NO: 1561610
uccaccgaguucuuaaaua

SEQ ID NO: 1684832 - RNA, 19 nt, Artificial Sequence
  Description of Artificial Sequence: Synthetic oligonucleotide
  Antisense strand to SEQ ID NO: 1684831
uauuuaagaacucggugga

SEQ ID NO: 1684833 - RNA, 19 nt, Artificial Sequence
  Description of Artificial Sequence: Synthetic oligonucleotide
  Sense strand starting at position 3073 of SEQ ID NO: 1561610
cugguuuauugaguucucu

SEQ ID NO: 1684834 - RNA, 19 nt, Artificial Sequence
  Description of Artificial Sequence: Synthetic oligonucleotide
  Antisense strand to SEQ ID NO: 1684833
agagaacucaauaaaccag

SEQ ID NO: 1684835 - RNA, 19 nt, Artificial Sequence
  Description of Artificial Sequence: Synthetic oligonucleotide
  Sense strand starting at position 3077 of SEQ ID NO: 1561610
uuuauugaguucucuguga

SEQ ID NO: 1684836 - RNA, 19 nt, Artificial Sequence
  Description of Artificial Sequence: Synthetic oligonucleotide
  Antisense strand to SEQ ID NO: 1684835
ucacagagaacucaauaaa

SEQ ID NO: 1684837 - RNA, 19 nt, Artificial Sequence
  Description of Artificial Sequence: Synthetic oligonucleotide
  Sense strand starting at position 3079 of SEQ ID NO: 1561610
uauugaguucucugugaug

SEQ ID NO: 1684838 - RNA, 19 nt, Artificial Sequence
  Description of Artificial Sequence: Synthetic oligonucleotide
  Antisense strand to SEQ ID NO: 1684837
caucacagagaacucaaua

SEQ ID NO: 1684839 - RNA, 19 nt, Artificial Sequence
  Description of Artificial Sequence: Synthetic oligonucleotide
  Sense strand starting at position 3082 of SEQ ID NO: 1561610
ugaguucucugugauggga

SEQ ID NO: 1684840 - RNA, 19 nt, Artificial Sequence
  Description of Artificial Sequence: Synthetic oligonucleotide
  Antisense strand to SEQ ID NO: 1684839
ucccaucacagagaacuca

SEQ ID NO: 1684841 - RNA, 19 nt, Artificial Sequence
  Description of Artificial Sequence: Synthetic oligonucleotide
  Sense strand starting at position 3084 of SEQ ID NO: 1561610
aguucucugugaugggaaa

SEQ ID NO: 1684842 - RNA, 19 nt, Artificial Sequence
  Description of Artificial Sequence: Synthetic oligonucleotide
  Antisense strand to SEQ ID NO: 1684841
uuucccaucacagagaacu

SEQ ID NO: 1684843 - RNA, 19 nt, Artificial Sequence
  Description of Artificial Sequence: Synthetic oligonucleotide
  Sense strand starting at position 3086 of SEQ ID NO: 1561610
uucucugugaugggaaagu

SEQ ID NO: 1684844 - RNA, 19 nt, Artificial Sequence
  Description of Artificial Sequence: Synthetic oligonucleotide
  Antisense strand to SEQ ID NO: 1684843
acuuucccaucacagagaa

SEQ ID NO: 1684845 - RNA, 19 nt, Artificial Sequence
  Description of Artificial Sequence: Synthetic oligonucleotide
  Sense strand starting at position 3096 of SEQ ID NO: 1561610
ugggaaaguuucuuucccu

SEQ ID NO: 1684846 - RNA, 19 nt, Artificial Sequence
  Description of Artificial Sequence: Synthetic oligonucleotide
  Antisense strand to SEQ ID NO: 1684845
agggaaagaaacuuuccca

SEQ ID NO: 1684847 - RNA, 19 nt, Artificial Sequence
  Description of Artificial Sequence: Synthetic oligonucleotide
  Sense strand starting at position 3097 of SEQ ID NO: 1561610
gggaaaguuucuuucccuu

SEQ ID NO: 1684848 - RNA, 19 nt, Artificial Sequence
  Description of Artificial Sequence: Synthetic oligonucleotide
  Antisense strand to SEQ ID NO: 1684847
aagggaaagaaacuuuccc

SEQ ID NO: 1684849 - RNA, 19 nt, Artificial Sequence
  Description of Artificial Sequence: Synthetic oligonucleotide
  Sense strand starting at position 3198 of SEQ ID NO: 1561610
gcugcugucugccagagaa

SEQ ID NO: 1684850 - RNA, 19 nt, Artificial Sequence
  Description of Artificial Sequence: Synthetic oligonucleotide
  Antisense strand to SEQ ID NO: 1684849
uucucuggcagacagcagc

SEQ ID NO: 1684851 - RNA, 19 nt, Artificial Sequence
  Description of Artificial Sequence: Synthetic oligonucleotide
  Sense strand starting at position 3226 of SEQ ID NO: 1561610
guaccuagagcuggagaau

SEQ ID NO: 1684852 - RNA, 19 nt, Artificial Sequence
  Description of Artificial Sequence: Synthetic oligonucleotide
  Antisense strand to SEQ ID NO: 1684851
auucuccagcucuagguac

SEQ ID NO: 1684853 - RNA, 19 nt, Artificial Sequence
  Description of Artificial Sequence: Synthetic oligonucleotide
  Sense strand starting at position 3235 of SEQ ID NO: 1561610
gcuggagaaucagugacau

SEQ ID NO: 1684854 - RNA, 19 nt, Artificial Sequence
  Description of Artificial Sequence: Synthetic oligonucleotide
  Antisense strand to SEQ ID NO: 1684853
augucacugauucuccagc

SEQ ID NO: 1684855 - RNA, 19 nt, Artificial Sequence
  Description of Artificial Sequence: Synthetic oligonucleotide
  Sense strand starting at position 3239 of SEQ ID NO: 1561610
gagaaucagugacaucuac

SEQ ID NO: 1684856 - RNA, 19 nt, Artificial Sequence
  Description of Artificial Sequence: Synthetic oligonucleotide
  Antisense strand to SEQ ID NO: 1684855
guagaugucacugauucuc

SEQ ID NO: 1684857 - RNA, 19 nt, Artificial Sequence
  Description of Artificial Sequence: Synthetic oligonucleotide
  Sense strand starting at position 3246 of SEQ ID NO: 1561610
agugacaucuacuagcaua

SEQ ID NO: 1684858 - RNA, 19 nt, Artificial Sequence
  Description of Artificial Sequence: Synthetic oligonucleotide
  Antisense strand to SEQ ID NO: 1684857
uaugcuaguagaugucacu

SEQ ID NO: 1684859 - RNA, 19 nt, Artificial Sequence
  Description of Artificial Sequence: Synthetic oligonucleotide
  Sense strand starting at position 3468 of SEQ ID NO: 1561610
acccgacuagucuacuuaa

SEQ ID NO: 1684860 - RNA, 19 nt, Artificial Sequence
  Description of Artificial Sequence: Synthetic oligonucleotide
  Antisense strand to SEQ ID NO: 1684859
uuaaguagacuagucgggu

SEQ ID NO: 1684861 - RNA, 19 nt, Artificial Sequence
  Description of Artificial Sequence: Synthetic oligonucleotide
  Sense strand starting at position 3494 of SEQ ID NO: 1561610
cuuaucuagugcuguccau

SEQ ID NO: 1684862 - RNA, 19 nt, Artificial Sequence
  Description of Artificial Sequence: Synthetic oligonucleotide
  Antisense strand to SEQ ID NO: 1684861
auggacagcacuagauaag

SEQ ID NO: 1684863 - RNA, 19 nt, Artificial Sequence
  Description of Artificial Sequence: Synthetic oligonucleotide
  Sense strand starting at position 3523 of SEQ ID NO: 1561610
ugucaaacuccagguggaa

SEQ ID NO: 1684864 - RNA, 19 nt, Artificial Sequence
  Description of Artificial Sequence: Synthetic oligonucleotide
  Antisense strand to SEQ ID NO: 1684863
uuccaccuggaguuugaca

SEQ ID NO: 1684865 - RNA, 19 nt, Artificial Sequence
  Description of Artificial Sequence: Synthetic oligonucleotide
  Sense strand starting at position 3707 of SEQ ID NO: 1561610
agaggucagugaguaguaa

SEQ ID NO: 1684866 - RNA, 19 nt, Artificial Sequence
  Description of Artificial Sequence: Synthetic oligonucleotide
  Antisense strand to SEQ ID NO: 1684865
uuacuacucacugaccucu

SEQ ID NO: 1684867 - RNA, 19 nt, Artificial Sequence
  Description of Artificial Sequence: Synthetic oligonucleotide
  Sense strand starting at position 3708 of SEQ ID NO: 1561610
gaggucagugaguaguaaa

SEQ ID NO: 1684868 - RNA, 19 nt, Artificial Sequence
  Description of Artificial Sequence: Synthetic oligonucleotide
  Antisense strand to SEQ ID NO: 1684867
uuuacuacucacugaccuc

SEQ ID NO: 1684869 - RNA, 19 nt, Artificial Sequence
  Description of Artificial Sequence: Synthetic oligonucleotide
  Sense strand starting at position 3727 of SEQ ID NO: 1561610
auuguaaacugagaaagcu

SEQ ID NO: 1684870 - RNA, 19 nt, Artificial Sequence
  Description of Artificial Sequence: Synthetic oligonucleotide
  Antisense strand to SEQ ID NO: 1684869
agcuuucucaguuuacaau

SEQ ID NO: 1684871 - RNA, 19 nt, Artificial Sequence
  Description of Artificial Sequence: Synthetic oligonucleotide
  Sense strand starting at position 3736 of SEQ ID NO: 1561610
ugagaaagcuccuaacugu

SEQ ID NO: 1684872 - RNA, 19 nt, Artificial Sequence
  Description of Artificial Sequence: Synthetic oligonucleotide
  Antisense strand to SEQ ID NO: 1684871
acaguuaggagcuuucuca

SEQ ID NO: 1684873 - RNA, 19 nt, Artificial Sequence
  Description of Artificial Sequence: Synthetic oligonucleotide
  Sense strand starting at position 3820 of SEQ ID NO: 1561610
gugugcugcucuguccaga

SEQ ID NO: 1684874 - RNA, 19 nt, Artificial Sequence
  Description of Artificial Sequence: Synthetic oligonucleotide
  Antisense strand to SEQ ID NO: 1684873
ucuggacagagcagcacac

SEQ ID NO: 1684875 - RNA, 19 nt, Artificial Sequence
  Description of Artificial Sequence: Synthetic oligonucleotide
  Sense strand starting at position 3886 of SEQ ID NO: 1561610
gagggaugcugugacaguu

SEQ ID NO: 1684876 - RNA, 19 nt, Artificial Sequence
  Description of Artificial Sequence: Synthetic oligonucleotide
  Antisense strand to SEQ ID NO: 1684875
aacugucacagcaucccuc

SEQ ID NO: 1684877 - RNA, 19 nt, Artificial Sequence
  Description of Artificial Sequence: Synthetic oligonucleotide
  Sense strand starting at position 3896 of SEQ ID NO: 1561610
gugacaguuccauguggag

SEQ ID NO: 1684878 - RNA, 19 nt, Artificial Sequence
  Description of Artificial Sequence: Synthetic oligonucleotide
  Antisense strand to SEQ ID NO: 1684877
cuccacauggaacugucac

SEQ ID NO: 1684879 - RNA, 19 nt, Artificial Sequence
  Description of Artificial Sequence: Synthetic oligonucleotide
  Sense strand starting at position 3898 of SEQ ID NO: 1561610
gacaguuccauguggaggu

SEQ ID NO: 1684880 - RNA, 19 nt, Artificial Sequence
  Description of Artificial Sequence: Synthetic oligonucleotide
  Antisense strand to SEQ ID NO: 1684879
accuccacauggaacuguc

SEQ ID NO: 1684881 - RNA, 19 nt, Artificial Sequence
  Description of Artificial Sequence: Synthetic oligonucleotide
  Sense strand starting at position 244 of SEQ ID NO: 1561611
aguaguucccugcagcaca

SEQ ID NO: 1684882 - RNA, 19 nt, Artificial Sequence
  Description of Artificial Sequence: Synthetic oligonucleotide
  Antisense strand to SEQ ID NO: 1684881
ugugcugcagggaacuacu

SEQ ID NO: 1684883 - RNA, 19 nt, Artificial Sequence
  Description of Artificial Sequence: Synthetic oligonucleotide
  Sense strand starting at position 384 of SEQ ID NO: 1561611
auacuuaaugcauggaaag

SEQ ID NO: 1684884 - RNA, 19 nt, Artificial Sequence
  Description of Artificial Sequence: Synthetic oligonucleotide
  Antisense strand to SEQ ID NO: 1684883
cuuuccaugcauuaaguau

SEQ ID NO: 1684885 - RNA, 19 nt, Artificial Sequence
  Description of Artificial Sequence: Synthetic oligonucleotide
  Sense strand starting at position 385 of SEQ ID NO: 1561611
uacuuaaugcauggaaagu

SEQ ID NO: 1684886 - RNA, 19 nt, Artificial Sequence
  Description of Artificial Sequence: Synthetic oligonucleotide
  Antisense strand to SEQ ID NO: 1684885
acuuuccaugcauuaagua

SEQ ID NO: 1684887 - RNA, 19 nt, Artificial Sequence
  Description of Artificial Sequence: Synthetic oligonucleotide
  Sense strand starting at position 442 of SEQ ID NO: 1561611
uugcuauuggcagagauuc

SEQ ID NO: 1684888 - RNA, 19 nt, Artificial Sequence
  Description of Artificial Sequence: Synthetic oligonucleotide
  Antisense strand to SEQ ID NO: 1684887
gaaucucugccaauagcaa

SEQ ID NO: 1684889 - RNA, 19 nt, Artificial Sequence
  Description of Artificial Sequence: Synthetic oligonucleotide
  Sense strand starting at position 476 of SEQ ID NO: 1561611
gggugacaaggcuauccuu

SEQ ID NO: 1684890 - RNA, 19 nt, Artificial Sequence
  Description of Artificial Sequence: Synthetic oligonucleotide
  Antisense strand to SEQ ID NO: 1684889
aaggauagccuugucaccc

SEQ ID NO: 1684891 - RNA, 19 nt, Artificial Sequence
  Description of Artificial Sequence: Synthetic oligonucleotide
  Sense strand starting at position 605 of SEQ ID NO: 1561611
agucaugacccacagucau

SEQ ID NO: 1684892 - RNA, 19 nt, Artificial Sequence
  Description of Artificial Sequence: Synthetic oligonucleotide
  Antisense strand to SEQ ID NO: 1684891
augacugugggucaugacu

SEQ ID NO: 1684893 - RNA, 19 nt, Artificial Sequence
  Description of Artificial Sequence: Synthetic oligonucleotide
  Sense strand starting at position 645 of SEQ ID NO: 1561611
guagcuuaauaccugcaaa

SEQ ID NO: 1684894 - RNA, 19 nt, Artificial Sequence
  Description of Artificial Sequence: Synthetic oligonucleotide
  Antisense strand to SEQ ID NO: 1684893
uuugcagguauuaagcuac

SEQ ID NO: 1684895 - RNA, 19 nt, Artificial Sequence
  Description of Artificial Sequence: Synthetic oligonucleotide
  Sense strand starting at position 648 of SEQ ID NO: 1561611
gcuuaauaccugcaaagac

SEQ ID NO: 1684896 - RNA, 19 nt, Artificial Sequence
  Description of Artificial Sequence: Synthetic oligonucleotide
  Antisense strand to SEQ ID NO: 1684895
gucuuugcagguauuaagc

SEQ ID NO: 1684897 - RNA, 19 nt, Artificial Sequence
  Description of Artificial Sequence: Synthetic oligonucleotide
  Sense strand starting at position 733 of SEQ ID NO: 1561611
auaggcaugcuuugaugua

SEQ ID NO: 1684898 - RNA, 19 nt, Artificial Sequence
  Description of Artificial Sequence: Synthetic oligonucleotide
  Antisense strand to SEQ ID NO: 1684897
uacaucaaagcaugccuau

SEQ ID NO: 1684899 - RNA, 19 nt, Artificial Sequence
  Description of Artificial Sequence: Synthetic oligonucleotide
  Sense strand starting at position 830 of SEQ ID NO: 1561611
ggagacauagcuuagcuuu

SEQ ID NO: 1684900 - RNA, 19 nt, Artificial Sequence
  Description of Artificial Sequence: Synthetic oligonucleotide
  Antisense strand to SEQ ID NO: 1684899
aaagcuaagcuaugucucc

SEQ ID NO: 1684901 - RNA, 19 nt, Artificial Sequence
  Description of Artificial Sequence: Synthetic oligonucleotide
  Sense strand starting at position 916 of SEQ ID NO: 1561611
ccuacuauguaacugagaa

SEQ ID NO: 1684902 - RNA, 19 nt, Artificial Sequence
  Description of Artificial Sequence: Synthetic oligonucleotide
  Antisense strand to SEQ ID NO: 1684901
uucucaguuacauaguagg

SEQ ID NO: 1684903 - RNA, 19 nt, Artificial Sequence
  Description of Artificial Sequence: Synthetic oligonucleotide
  Sense strand starting at position 981 of SEQ ID NO: 1561611
ggauuccuucccggcauga

SEQ ID NO: 1684904 - RNA, 19 nt, Artificial Sequence
  Description of Artificial Sequence: Synthetic oligonucleotide
  Antisense strand to SEQ ID NO: 1684903
ucaugccgggaaggaaucc

SEQ ID NO: 1684905 - RNA, 19 nt, Artificial Sequence
  Description of Artificial Sequence: Synthetic oligonucleotide
  Sense strand starting at position 1067 of SEQ ID NO: 1561611
aagugucugaggcauagau

SEQ ID NO: 1684906 - RNA, 19 nt, Artificial Sequence
  Description of Artificial Sequence: Synthetic oligonucleotide
  Antisense strand to SEQ ID NO: 1684905
aucuaugccucagacacuu

SEQ ID NO: 1684907 - RNA, 19 nt, Artificial Sequence
  Description of Artificial Sequence: Synthetic oligonucleotide
  Sense strand starting at position 1069 of SEQ ID NO: 1561611
gugucugaggcauagauca

SEQ ID NO: 1684908 - RNA, 19 nt, Artificial Sequence
  Description of Artificial Sequence: Synthetic oligonucleotide
  Antisense strand to SEQ ID NO: 1684907
ugaucuaugccucagacac

SEQ ID NO: 1684909 - RNA, 19 nt, Artificial Sequence
  Description of Artificial Sequence: Synthetic oligonucleotide
  Sense strand starting at position 1071 of SEQ ID NO: 1561611
gucugaggcauagaucauc

SEQ ID NO: 1684910 - RNA, 19 nt, Artificial Sequence
  Description of Artificial Sequence: Synthetic oligonucleotide
  Antisense strand to SEQ ID NO: 1684909
gaugaucuaugccucagac

SEQ ID NO: 1684911 - RNA, 19 nt, Artificial Sequence
  Description of Artificial Sequence: Synthetic oligonucleotide
  Sense strand starting at position 1076 of SEQ ID NO: 1561611
aggcauagaucaucauggu

SEQ ID NO: 1684912 - RNA, 19 nt, Artificial Sequence
  Description of Artificial Sequence: Synthetic oligonucleotide
  Antisense strand to SEQ ID NO: 1684911
accaugaugaucuaugccu

SEQ ID NO: 1684913 - RNA, 19 nt, Artificial Sequence
  Description of Artificial Sequence: Synthetic oligonucleotide
  Sense strand starting at position 1077 of SEQ ID NO: 1561611
ggcauagaucaucaugguu

SEQ ID NO: 1684914 - RNA, 19 nt, Artificial Sequence
  Description of Artificial Sequence: Synthetic oligonucleotide
  Antisense strand to SEQ ID NO: 1684913
aaccaugaugaucuaugcc

SEQ ID NO: 1684915 - RNA, 19 nt, Artificial Sequence
  Description of Artificial Sequence: Synthetic oligonucleotide
  Sense strand starting at position 1082 of SEQ ID NO: 1561611
agaucaucaugguuccaaa

SEQ ID NO: 1684916 - RNA, 19 nt, Artificial Sequence
  Description of Artificial Sequence: Synthetic oligonucleotide
  Antisense strand to SEQ ID NO: 1684915
uuuggaaccaugaugaucu

SEQ ID NO: 1684917 - RNA, 19 nt, Artificial Sequence
  Description of Artificial Sequence: Synthetic oligonucleotide
  Sense strand starting at position 1542 of SEQ ID NO: 1561611
gcaucaucucucugggcaa

SEQ ID NO: 1684918 - RNA, 19 nt, Artificial Sequence
  Description of Artificial Sequence: Synthetic oligonucleotide
  Antisense strand to SEQ ID NO: 1684917
uugcccagagagaugaugc

SEQ ID NO: 1684919 - RNA, 19 nt, Artificial Sequence
  Description of Artificial Sequence: Synthetic oligonucleotide
  Sense strand starting at position 2055 of SEQ ID NO: 1561611
augagcuguccgcaucaca

SEQ ID NO: 1684920 - RNA, 19 nt, Artificial Sequence
  Description of Artificial Sequence: Synthetic oligonucleotide
  Antisense strand to SEQ ID NO: 1684919
ugugaugcggacagcucau

SEQ ID NO: 1684921 - RNA, 19 nt, Artificial Sequence
  Description of Artificial Sequence: Synthetic oligonucleotide
  Sense strand starting at position 2293 of SEQ ID NO: 1561611
cuugccaagguuuaugaua

SEQ ID NO: 1684922 - RNA, 19 nt, Artificial Sequence
  Description of Artificial Sequence: Synthetic oligonucleotide
  Antisense strand to SEQ ID NO: 1684921
uaucauaaaccuuggcaag

SEQ ID NO: 1684923 - RNA, 19 nt, Artificial Sequence
  Description of Artificial Sequence: Synthetic oligonucleotide
  Sense strand starting at position 2521 of SEQ ID NO: 1561611
cuugaauuaugcucaccag

SEQ ID NO: 1684924 - RNA, 19 nt, Artificial Sequence
  Description of Artificial Sequence: Synthetic oligonucleotide
  Antisense strand to SEQ ID NO: 1684923
cuggugagcauaauucaag

SEQ ID NO: 1684925 - RNA, 19 nt, Artificial Sequence
  Description of Artificial Sequence: Synthetic oligonucleotide
  Sense strand starting at position 2522 of SEQ ID NO: 1561611
uugaauuaugcucaccagu

SEQ ID NO: 1684926 - RNA, 19 nt, Artificial Sequence
  Description of Artificial Sequence: Synthetic oligonucleotide
  Antisense strand to SEQ ID NO: 1684925
acuggugagcauaauucaa

SEQ ID NO: 1684927 - RNA, 19 nt, Artificial Sequence
  Description of Artificial Sequence: Synthetic oligonucleotide
  Sense strand starting at position 2537 of SEQ ID NO: 1561611
caguuaaauggcgaugaaa

SEQ ID NO: 1684928 - RNA, 19 nt, Artificial Sequence
  Description of Artificial Sequence: Synthetic oligonucleotide
  Antisense strand to SEQ ID NO: 1684927
uuucaucgccauuuaacug

SEQ ID NO: 1684929 - RNA, 19 nt, Artificial Sequence
  Description of Artificial Sequence: Synthetic oligonucleotide
  Sense strand starting at position 2539 of SEQ ID NO: 1561611
guuaaauggcgaugaaauu

SEQ ID NO: 1684930 - RNA, 19 nt, Artificial Sequence
  Description of Artificial Sequence: Synthetic oligonucleotide
  Antisense strand to SEQ ID NO: 1684929
aauuucaucgccauuuaac

SEQ ID NO: 1684931 - RNA, 19 nt, Artificial Sequence
  Description of Artificial Sequence: Synthetic oligonucleotide
  Sense strand starting at position 2608 of SEQ ID NO: 1561611
acuggacugucccuacaga

SEQ ID NO: 1684932 - RNA, 19 nt, Artificial Sequence
  Description of Artificial Sequence: Synthetic oligonucleotide
  Antisense strand to SEQ ID NO: 1684931
ucuguagggacaguccagu

SEQ ID NO: 1684933 - RNA, 19 nt, Artificial Sequence
  Description of Artificial Sequence: Synthetic oligonucleotide
  Sense strand starting at position 2647 of SEQ ID NO: 1561611
guaguagcugccuagacau

SEQ ID NO: 1684934 - RNA, 19 nt, Artificial Sequence
  Description of Artificial Sequence: Synthetic oligonucleotide
  Antisense strand to SEQ ID NO: 1684933
augucuaggcagcuacuac

SEQ ID NO: 1684935 - RNA, 19 nt, Artificial Sequence
  Description of Artificial Sequence: Synthetic oligonucleotide
  Sense strand starting at position 2668 of SEQ ID NO: 1561611
gagcuuaucuuucugagcu

SEQ ID NO: 1684936 - RNA, 19 nt, Artificial Sequence
  Description of Artificial Sequence: Synthetic oligonucleotide
  Antisense strand to SEQ ID NO: 1684935
agcucagaaagauaagcuc

SEQ ID NO: 1684937 - RNA, 19 nt, Artificial Sequence
  Description of Artificial Sequence: Synthetic oligonucleotide
  Sense strand starting at position 2802 of SEQ ID NO: 1561611
uucccaucagauggaaauu

SEQ ID NO: 1684938 - RNA, 19 nt, Artificial Sequence
  Description of Artificial Sequence: Synthetic oligonucleotide
  Antisense strand to SEQ ID NO: 1684937
aauuuccaucugaugggaa

SEQ ID NO: 1684939 - RNA, 19 nt, Artificial Sequence
  Description of Artificial Sequence: Synthetic oligonucleotide
  Sense strand starting at position 2821 of SEQ ID NO: 1561611
cucagaaaucuuuguuuga

SEQ ID NO: 1684940 - RNA, 19 nt, Artificial Sequence
  Description of Artificial Sequence: Synthetic oligonucleotide
  Antisense strand to SEQ ID NO: 1684939
ucaaacaaagauuucugag

SEQ ID NO: 1684941 - RNA, 19 nt, Artificial Sequence
  Description of Artificial Sequence: Synthetic oligonucleotide
  Sense strand starting at position 2879 of SEQ ID NO: 1561611
cagugaauuccugagaugu

SEQ ID NO: 1684942 - RNA, 19 nt, Artificial Sequence
  Description of Artificial Sequence: Synthetic oligonucleotide
  Antisense strand to SEQ ID NO: 1684941
acaucucaggaauucacug

SEQ ID NO: 1684943 - RNA, 19 nt, Artificial Sequence
  Description of Artificial Sequence: Synthetic oligonucleotide
  Sense strand starting at position 2937 of SEQ ID NO: 1561611
guuugcauuugagaaagga

SEQ ID NO: 1684944 - RNA, 19 nt, Artificial Sequence
  Description of Artificial Sequence: Synthetic oligonucleotide
  Antisense strand to SEQ ID NO: 1684943
uccuuucucaaaugcaaac

SEQ ID NO: 1684945 - RNA, 19 nt, Artificial Sequence
  Description of Artificial Sequence: Synthetic oligonucleotide
  Sense strand starting at position 2963 of SEQ ID NO: 1561611
gggagaguguccuccagga

SEQ ID NO: 1684946 - RNA, 19 nt, Artificial Sequence
  Description of Artificial Sequence: Synthetic oligonucleotide
  Antisense strand to SEQ ID NO: 1684945
uccuggaggacacucuccc

SEQ ID NO: 1684947 - RNA, 19 nt, Artificial Sequence
  Description of Artificial Sequence: Synthetic oligonucleotide
  Sense strand starting at position 3089 of SEQ ID NO: 1561611
gagcuuucuggauagauug

SEQ ID NO: 1684948 - RNA, 19 nt, Artificial Sequence
  Description of Artificial Sequence: Synthetic oligonucleotide
  Antisense strand to SEQ ID NO: 1684947
caaucuauccagaaagcuc

SEQ ID NO: 1684949 - RNA, 19 nt, Artificial Sequence
  Description of Artificial Sequence: Synthetic oligonucleotide
  Sense strand starting at position 3224 of SEQ ID NO: 1561611
ccagguuucccuggaagac

SEQ ID NO: 1684950 - RNA, 19 nt, Artificial Sequence
  Description of Artificial Sequence: Synthetic oligonucleotide
  Antisense strand to SEQ ID NO: 1684949
gucuuccagggaaaccugg

SEQ ID NO: 1684951 - RNA, 19 nt, Artificial Sequence
  Description of Artificial Sequence: Synthetic oligonucleotide
  Sense strand starting at position 3334 of SEQ ID NO: 1561611
aggauuugauccgguaaau

SEQ ID NO: 1684952 - RNA, 19 nt, Artificial Sequence
  Description of Artificial Sequence: Synthetic oligonucleotide
  Antisense strand to SEQ ID NO: 1684951
auuuaccggaucaaauccu

SEQ ID NO: 1684953 - RNA, 19 nt, Artificial Sequence
  Description of Artificial Sequence: Synthetic oligonucleotide
  Sense strand starting at position 3376 of SEQ ID NO: 1561611
uuucucugccaaggucaua

SEQ ID NO: 1684954 - RNA, 19 nt, Artificial Sequence
  Description of Artificial Sequence: Synthetic oligonucleotide
  Antisense strand to SEQ ID NO: 1684953
uaugaccuuggcagagaaa

SEQ ID NO: 1684955 - RNA, 19 nt, Artificial Sequence
  Description of Artificial Sequence: Synthetic oligonucleotide
  Sense strand starting at position 3388 of SEQ ID NO: 1561611
ggucauaaaccuugaagug

SEQ ID NO: 1684956 - RNA, 19 nt, Artificial Sequence
  Description of Artificial Sequence: Synthetic oligonucleotide
  Antisense strand to SEQ ID NO: 1684955
cacuucaagguuuaugacc

SEQ ID NO: 1684957 - RNA, 19 nt, Artificial Sequence
  Description of Artificial Sequence: Synthetic oligonucleotide
  Sense strand starting at position 3529 of SEQ ID NO: 1561611
gggccacaucucugucacu

SEQ ID NO: 1684958 - RNA, 19 nt, Artificial Sequence
  Description of Artificial Sequence: Synthetic oligonucleotide
  Antisense strand to SEQ ID NO: 1684957
agugacagagauguggccc

SEQ ID NO: 1684959 - RNA, 19 nt, Artificial Sequence
  Description of Artificial Sequence: Synthetic oligonucleotide
  Sense strand starting at position 3530 of SEQ ID NO: 1561611
ggccacaucucugucacuu

SEQ ID NO: 1684960 - RNA, 19 nt, Artificial Sequence
  Description of Artificial Sequence: Synthetic oligonucleotide
  Antisense strand to SEQ ID NO: 1684959
aagugacagagauguggcc

SEQ ID NO: 1684961 - RNA, 19 nt, Artificial Sequence
  Description of Artificial Sequence: Synthetic oligonucleotide
  Sense strand starting at position 14 of SEQ ID NO: 1561612
uugaauguguacugugcau

SEQ ID NO: 1684962 - RNA, 19 nt, Artificial Sequence
  Description of Artificial Sequence: Synthetic oligonucleotide
  Antisense strand to SEQ ID NO: 1684961
augcacaguacacauucaa

SEQ ID NO: 1684963 - RNA, 19 nt, Artificial Sequence
  Description of Artificial Sequence: Synthetic oligonucleotide
  Sense strand starting at position 16 of SEQ ID NO: 1561612
gaauguguacugugcauca

SEQ ID NO: 1684964 - RNA, 19 nt, Artificial Sequence
  Description of Artificial Sequence: Synthetic oligonucleotide
  Antisense strand to SEQ ID NO: 1684963
ugaugcacaguacacauuc

SEQ ID NO: 1684965 - RNA, 19 nt, Artificial Sequence
  Description of Artificial Sequence: Synthetic oligonucleotide
  Sense strand starting at position 25 of SEQ ID NO: 1561612
cugugcaucaggcauguua

SEQ ID NO: 1684966 - RNA, 19 nt, Artificial Sequence
  Description of Artificial Sequence: Synthetic oligonucleotide
  Antisense strand to SEQ ID NO: 1684965
uaacaugccugaugcacag

SEQ ID NO: 1684967 - RNA, 19 nt, Artificial Sequence
  Description of Artificial Sequence: Synthetic oligonucleotide
  Sense strand starting at position 27 of SEQ ID NO: 1561612
gugcaucaggcauguuaua

SEQ ID NO: 1684968 - RNA, 19 nt, Artificial Sequence
  Description of Artificial Sequence: Synthetic oligonucleotide
  Antisense strand to SEQ ID NO: 1684967
uauaacaugccugaugcac

SEQ ID NO: 1684969 - RNA, 19 nt, Artificial Sequence
  Description of Artificial Sequence: Synthetic oligonucleotide
  Sense strand starting at position 36 of SEQ ID NO: 1561612
gcauguuauagcgcauacu

SEQ ID NO: 1684970 - RNA, 19 nt, Artificial Sequence
  Description of Artificial Sequence: Synthetic oligonucleotide
  Antisense strand to SEQ ID NO: 1684969
aguaugcgcuauaacaugc

SEQ ID NO: 1684971 - RNA, 19 nt, Artificial Sequence
  Description of Artificial Sequence: Synthetic oligonucleotide
  Sense strand starting at position 37 of SEQ ID NO: 1561612
cauguuauagcgcauacuu

SEQ ID NO: 1684972 - RNA, 19 nt, Artificial Sequence
  Description of Artificial Sequence: Synthetic oligonucleotide
  Antisense strand to SEQ ID NO: 1684971
aaguaugcgcuauaacaug

SEQ ID NO: 1684973 - RNA, 19 nt, Artificial Sequence
  Description of Artificial Sequence: Synthetic oligonucleotide
  Sense strand starting at position 39 of SEQ ID NO: 1561612
uguuauagcgcauacuuau

SEQ ID NO: 1684974 - RNA, 19 nt, Artificial Sequence
  Description of Artificial Sequence: Synthetic oligonucleotide
  Antisense strand to SEQ ID NO: 1684973
auaaguaugcgcuauaaca

SEQ ID NO: 1684975 - RNA, 19 nt, Artificial Sequence
  Description of Artificial Sequence: Synthetic oligonucleotide
  Sense strand starting at position 86 of SEQ ID NO: 1561612
uuaggcaaguauuacuaga

SEQ ID NO: 1684976 - RNA, 19 nt, Artificial Sequence
  Description of Artificial Sequence: Synthetic oligonucleotide
  Antisense strand to SEQ ID NO: 1684975
ucuaguaauacuugccuaa

SEQ ID NO: 1684977 - RNA, 19 nt, Artificial Sequence
  Description of Artificial Sequence: Synthetic oligonucleotide
  Sense strand starting at position 211 of SEQ ID NO: 1561612
ggauuugauucguggccca

SEQ ID NO: 1684978 - RNA, 19 nt, Artificial Sequence
  Description of Artificial Sequence: Synthetic oligonucleotide
  Antisense strand to SEQ ID NO: 1684977
ugggccacgaaucaaaucc

SEQ ID NO: 1684979 - RNA, 19 nt, Artificial Sequence
  Description of Artificial Sequence: Synthetic oligonucleotide
  Sense strand starting at position 224 of SEQ ID NO: 1561612
ggcccauguuugucccaca

SEQ ID NO: 1684980 - RNA, 19 nt, Artificial Sequence
  Description of Artificial Sequence: Synthetic oligonucleotide
  Antisense strand to SEQ ID NO: 1684979
ugugggacaaacaugggcc

SEQ ID NO: 1684981 - RNA, 19 nt, Artificial Sequence
  Description of Artificial Sequence: Synthetic oligonucleotide
  Sense strand starting at position 225 of SEQ ID NO: 1561612
gcccauguuugucccacaa

SEQ ID NO: 1684982 - RNA, 19 nt, Artificial Sequence
  Description of Artificial Sequence: Synthetic oligonucleotide
  Antisense strand to SEQ ID NO: 1684981
uugugggacaaacaugggc

SEQ ID NO: 1684983 - RNA, 19 nt, Artificial Sequence
  Description of Artificial Sequence: Synthetic oligonucleotide
  Sense strand starting at position 229 of SEQ ID NO: 1561612
auguuugucccacaaccaa

SEQ ID NO: 1684984 - RNA, 19 nt, Artificial Sequence
  Description of Artificial Sequence: Synthetic oligonucleotide
  Antisense strand to SEQ ID NO: 1684983
uugguugugggacaaacau

SEQ ID NO: 1684985 - RNA, 19 nt, Artificial Sequence
  Description of Artificial Sequence: Synthetic oligonucleotide
  Sense strand starting at position 301 of SEQ ID NO: 1561612
guagcucaugcacauguaa

SEQ ID NO: 1684986 - RNA, 19 nt, Artificial Sequence
  Description of Artificial Sequence: Synthetic oligonucleotide
  Antisense strand to SEQ ID NO: 1684985
uuacaugugcaugagcuac

SEQ ID NO: 1684987 - RNA, 19 nt, Artificial Sequence
  Description of Artificial Sequence: Synthetic oligonucleotide
  Sense strand starting at position 498 of SEQ ID NO: 1561612
ccaggagaugcaggcuaua

SEQ ID NO: 1684988 - RNA, 19 nt, Artificial Sequence
  Description of Artificial Sequence: Synthetic oligonucleotide
  Antisense strand to SEQ ID NO: 1684987
uauagccugcaucuccugg

SEQ ID NO: 1684989 - RNA, 19 nt, Artificial Sequence
  Description of Artificial Sequence: Synthetic oligonucleotide
  Sense strand starting at position 1019 of SEQ ID NO: 1561612
ggaaccaucuaucagaacu

SEQ ID NO: 1684990 - RNA, 19 nt, Artificial Sequence
  Description of Artificial Sequence: Synthetic oligonucleotide
  Antisense strand to SEQ ID NO: 1684989
aguucugauagaugguucc

SEQ ID NO: 1684991 - RNA, 19 nt, Artificial Sequence
  Description of Artificial Sequence: Synthetic oligonucleotide
  Sense strand starting at position 1088 of SEQ ID NO: 1561612
acaacuugacaucguagua

SEQ ID NO: 1684992 - RNA, 19 nt, Artificial Sequence
  Description of Artificial Sequence: Synthetic oligonucleotide
  Antisense strand to SEQ ID NO: 1684991
uacuacgaugucaaguugu

SEQ ID NO: 1684993 - RNA, 19 nt, Artificial Sequence
  Description of Artificial Sequence: Synthetic oligonucleotide
  Sense strand starting at position 1100 of SEQ ID NO: 1561612
cguaguaacucguucaguc

SEQ ID NO: 1684994 - RNA, 19 nt, Artificial Sequence
  Description of Artificial Sequence: Synthetic oligonucleotide
  Antisense strand to SEQ ID NO: 1684993
gacugaacgaguuacuacg

SEQ ID NO: 1684995 - RNA, 19 nt, Artificial Sequence
  Description of Artificial Sequence: Synthetic oligonucleotide
  Sense strand starting at position 1113 of SEQ ID NO: 1561612
ucagucuuauaccgcguaa

SEQ ID NO: 1684996 - RNA, 19 nt, Artificial Sequence
  Description of Artificial Sequence: Synthetic oligonucleotide
  Antisense strand to SEQ ID NO: 1684995
uuacgcgguauaagacuga

SEQ ID NO: 1684997 - RNA, 19 nt, Artificial Sequence
  Description of Artificial Sequence: Synthetic oligonucleotide
  Sense strand starting at position 1115 of SEQ ID NO: 1561612
agucuuauaccgcguaauu

SEQ ID NO: 1684998 - RNA, 19 nt, Artificial Sequence
  Description of Artificial Sequence: Synthetic oligonucleotide
  Antisense strand to SEQ ID NO: 1684997
aauuacgcgguauaagacu

SEQ ID NO: 1684999 - RNA, 19 nt, Artificial Sequence
  Description of Artificial Sequence: Synthetic oligonucleotide
  Sense strand starting at position 1117 of SEQ ID NO: 1561612
ucuuauaccgcguaauuuc

SEQ ID NO: 1685000 - RNA, 19 nt, Artificial Sequence
  Description of Artificial Sequence: Synthetic oligonucleotide
  Antisense strand to SEQ ID NO: 1684999
gaaauuacgcgguauaaga

SEQ ID NO: 1685001 - RNA, 19 nt, Artificial Sequence
  Description of Artificial Sequence: Synthetic oligonucleotide
  Sense strand starting at position 1135 of SEQ ID NO: 1561612
ccauuaggauguccgauau

SEQ ID NO: 1685002 - RNA, 19 nt, Artificial Sequence
  Description of Artificial Sequence: Synthetic oligonucleotide
  Antisense strand to SEQ ID NO: 1685001
auaucggacauccuaaugg

SEQ ID NO: 1685003 - RNA, 19 nt, Artificial Sequence
  Description of Artificial Sequence: Synthetic oligonucleotide
  Sense strand starting at position 1139 of SEQ ID NO: 1561612
uaggauguccgauauacua

SEQ ID NO: 1685004 - RNA, 19 nt, Artificial Sequence
  Description of Artificial Sequence: Synthetic oligonucleotide
  Antisense strand to SEQ ID NO: 1685003
uaguauaucggacauccua

SEQ ID NO: 1685005 - RNA, 19 nt, Artificial Sequence
  Description of Artificial Sequence: Synthetic oligonucleotide
  Sense strand starting at position 1202 of SEQ ID NO: 1561612
gggaaccagacccguuauu

SEQ ID NO: 1685006 - RNA, 19 nt, Artificial Sequence
  Description of Artificial Sequence: Synthetic oligonucleotide
  Antisense strand to SEQ ID NO: 1685005
aauaacgggucugguuccc

SEQ ID NO: 1685007 - RNA, 19 nt, Artificial Sequence
  Description of Artificial Sequence: Synthetic oligonucleotide
  Sense strand starting at position 1214 of SEQ ID NO: 1561612
cguuauugcccucaacagu

SEQ ID NO: 1685008 - RNA, 19 nt, Artificial Sequence
  Description of Artificial Sequence: Synthetic oligonucleotide
  Antisense strand to SEQ ID NO: 1685007
acuguugagggcaauaacg

SEQ ID NO: 1685009 - RNA, 19 nt, Artificial Sequence
  Description of Artificial Sequence: Synthetic oligonucleotide
  Sense strand starting at position 1285 of SEQ ID NO: 1561612
caaagaaaguucuauucgu

SEQ ID NO: 1685010 - RNA, 19 nt, Artificial Sequence
  Description of Artificial Sequence: Synthetic oligonucleotide
  Antisense strand to SEQ ID NO: 1685009
acgaauagaacuuucuuug

SEQ ID NO: 1685011 - RNA, 19 nt, Artificial Sequence
  Description of Artificial Sequence: Synthetic oligonucleotide
  Sense strand starting at position 2275 of SEQ ID NO: 1561612
ggcugguugugacaggaga

SEQ ID NO: 1685012 - RNA, 19 nt, Artificial Sequence
  Description of Artificial Sequence: Synthetic oligonucleotide
  Antisense strand to SEQ ID NO: 1685011
ucuccugucacaaccagcc

SEQ ID NO: 1685013 - RNA, 19 nt, Artificial Sequence
  Description of Artificial Sequence: Synthetic oligonucleotide
  Sense strand starting at position 2399 of SEQ ID NO: 1561612
ggaguugaguaagguccau

SEQ ID NO: 1685014 - RNA, 19 nt, Artificial Sequence
  Description of Artificial Sequence: Synthetic oligonucleotide
  Antisense strand to SEQ ID NO: 1685013
auggaccuuacucaacucc

SEQ ID NO: 1685015 - RNA, 19 nt, Artificial Sequence
  Description of Artificial Sequence: Synthetic oligonucleotide
  Sense strand starting at position 2440 of SEQ ID NO: 1561612
auugcacaguccugacuau

SEQ ID NO: 1685016 - RNA, 19 nt, Artificial Sequence
  Description of Artificial Sequence: Synthetic oligonucleotide
  Antisense strand to SEQ ID NO: 1685015
auagucaggacugugcaau

SEQ ID NO: 1685017 - RNA, 19 nt, Artificial Sequence
  Description of Artificial Sequence: Synthetic oligonucleotide
  Sense strand starting at position 2462 of SEQ ID NO: 1561612
caguuccuuccaggugaca

SEQ ID NO: 1685018 - RNA, 19 nt, Artificial Sequence
  Description of Artificial Sequence: Synthetic oligonucleotide
  Antisense strand to SEQ ID NO: 1685017
ugucaccuggaaggaacug

SEQ ID NO: 1685019 - RNA, 19 nt, Artificial Sequence
  Description of Artificial Sequence: Synthetic oligonucleotide
  Sense strand starting at position 2798 of SEQ ID NO: 1561612
gcaaauaacgaccaaguua

SEQ ID NO: 1685020 - RNA, 19 nt, Artificial Sequence
  Description of Artificial Sequence: Synthetic oligonucleotide
  Antisense strand to SEQ ID NO: 1685019
uaacuuggucguuauuugc

SEQ ID NO: 1685021 - RNA, 19 nt, Artificial Sequence
  Description of Artificial Sequence: Synthetic oligonucleotide
  Sense strand starting at position 2822 of SEQ ID NO: 1561612
aaagcuagguucuuugacu

SEQ ID NO: 1685022 - RNA, 19 nt, Artificial Sequence
  Description of Artificial Sequence: Synthetic oligonucleotide
  Antisense strand to SEQ ID NO: 1685021
agucaaagaaccuagcuuu

SEQ ID NO: 1685023 - RNA, 19 nt, Artificial Sequence
  Description of Artificial Sequence: Synthetic oligonucleotide
  Sense strand starting at position 2827 of SEQ ID NO: 1561612
uagguucuuugacuccaga

SEQ ID NO: 1685024 - RNA, 19 nt, Artificial Sequence
  Description of Artificial Sequence: Synthetic oligonucleotide
  Antisense strand to SEQ ID NO: 1685023
ucuggagucaaagaaccua

SEQ ID NO: 1685025 - RNA, 19 nt, Artificial Sequence
  Description of Artificial Sequence: Synthetic oligonucleotide
  Sense strand starting at position 2890 of SEQ ID NO: 1561612
auaucaaagucugugcaaa

SEQ ID NO: 1685026 - RNA, 19 nt, Artificial Sequence
  Description of Artificial Sequence: Synthetic oligonucleotide
  Antisense strand to SEQ ID NO: 1685025
uuugcacagacuuugauau

SEQ ID NO: 1685027 - RNA, 19 nt, Artificial Sequence
  Description of Artificial Sequence: Synthetic oligonucleotide
  Sense strand starting at position 2892 of SEQ ID NO: 1561612
aucaaagucugugcaaaua

SEQ ID NO: 1685028 - RNA, 19 nt, Artificial Sequence
  Description of Artificial Sequence: Synthetic oligonucleotide
  Antisense strand to SEQ ID NO: 1685027
uauuugcacagacuuugau

SEQ ID NO: 1685029 - RNA, 19 nt, Artificial Sequence
  Description of Artificial Sequence: Synthetic oligonucleotide
  Sense strand starting at position 3642 of SEQ ID NO: 1561612
gaccgagagucugcccaau

SEQ ID NO: 1685030 - RNA, 19 nt, Artificial Sequence
  Description of Artificial Sequence: Synthetic oligonucleotide
  Antisense strand to SEQ ID NO: 1685029
auugggcagacucucgguc

SEQ ID NO: 1685031 - RNA, 19 nt, Artificial Sequence
  Description of Artificial Sequence: Synthetic oligonucleotide
  Sense strand starting at position 3836 of SEQ ID NO: 1561612
gguucucagaucugacuga

SEQ ID NO: 1685032 - RNA, 19 nt, Artificial Sequence
  Description of Artificial Sequence: Synthetic oligonucleotide
  Antisense strand to SEQ ID NO: 1685031
ucagucagaucugagaacc

SEQ ID NO: 1685033 - RNA, 19 nt, Artificial Sequence
  Description of Artificial Sequence: Synthetic oligonucleotide
  Sense strand starting at position 3837 of SEQ ID NO: 1561612
guucucagaucugacugaa

SEQ ID NO: 1685034 - RNA, 19 nt, Artificial Sequence
  Description of Artificial Sequence: Synthetic oligonucleotide
  Antisense strand to SEQ ID NO: 1685033
uucagucagaucugagaac

SEQ ID NO: 1685035 - RNA, 19 nt, Artificial Sequence
  Description of Artificial Sequence: Synthetic oligonucleotide
  Sense strand starting at position 3877 of SEQ ID NO: 1561612
ggacaugaauggcuuugaa

SEQ ID NO: 1685036 - RNA, 19 nt, Artificial Sequence
  Description of Artificial Sequence: Synthetic oligonucleotide
  Antisense strand to SEQ ID NO: 1685035
uucaaagccauucaugucc

SEQ ID NO: 1685037 - RNA, 19 nt, Artificial Sequence
  Description of Artificial Sequence: Synthetic oligonucleotide
  Sense strand starting at position 713 of SEQ ID NO: 1561613
ggcugguugugacaggaga

SEQ ID NO: 1685038 - RNA, 19 nt, Artificial Sequence
  Description of Artificial Sequence: Synthetic oligonucleotide
  Antisense strand to SEQ ID NO: 1685037
ucuccugucacaaccagcc

SEQ ID NO: 1685039 - RNA, 19 nt, Artificial Sequence
  Description of Artificial Sequence: Synthetic oligonucleotide
  Sense strand starting at position 900 of SEQ ID NO: 1561613
caguuccuuccaggugaca

SEQ ID NO: 1685040 - RNA, 19 nt, Artificial Sequence
  Description of Artificial Sequence: Synthetic oligonucleotide
  Antisense strand to SEQ ID NO: 1685039
ugucaccuggaaggaacug

SEQ ID NO: 1685041 - RNA, 19 nt, Artificial Sequence
  Description of Artificial Sequence: Synthetic oligonucleotide
  Sense strand starting at position 1236 of SEQ ID NO: 1561613
gcaaauaacgaccaaguua

SEQ ID NO: 1685042 - RNA, 19 nt, Artificial Sequence
  Description of Artificial Sequence: Synthetic oligonucleotide
  Antisense strand to SEQ ID NO: 1685041
uaacuuggucguuauuugc

SEQ ID NO: 1685043 - RNA, 19 nt, Artificial Sequence
  Description of Artificial Sequence: Synthetic oligonucleotide
  Sense strand starting at position 1260 of SEQ ID NO: 1561613
aaagcuagguucuuugacu

SEQ ID NO: 1685044 - RNA, 19 nt, Artificial Sequence
  Description of Artificial Sequence: Synthetic oligonucleotide
  Antisense strand to SEQ ID NO: 1685043
agucaaagaaccuagcuuu

SEQ ID NO: 1685045 - RNA, 19 nt, Artificial Sequence
  Description of Artificial Sequence: Synthetic oligonucleotide
  Sense strand starting at position 1265 of SEQ ID NO: 1561613
uagguucuuugacuccaga

SEQ ID NO: 1685046 - RNA, 19 nt, Artificial Sequence
  Description of Artificial Sequence: Synthetic oligonucleotide
  Antisense strand to SEQ ID NO: 1685045
ucuggagucaaagaaccua

SEQ ID NO: 1685047 - RNA, 19 nt, Artificial Sequence
  Description of Artificial Sequence: Synthetic oligonucleotide
  Sense strand starting at position 1328 of SEQ ID NO: 1561613
auaucaaagucugugcaaa

SEQ ID NO: 1685048 - RNA, 19 nt, Artificial Sequence
  Description of Artificial Sequence: Synthetic oligonucleotide
  Antisense strand to SEQ ID NO: 1685047
uuugcacagacuuugauau

SEQ ID NO: 1685049 - RNA, 19 nt, Artificial Sequence
  Description of Artificial Sequence: Synthetic oligonucleotide
  Sense strand starting at position 1330 of SEQ ID NO: 1561613
aucaaagucugugcaaaua

SEQ ID NO: 1685050 - RNA, 19 nt, Artificial Sequence
  Description of Artificial Sequence: Synthetic oligonucleotide
  Antisense strand to SEQ ID NO: 1685049
uauuugcacagacuuugau

SEQ ID NO: 1685051 - RNA, 19 nt, Artificial Sequence
  Description of Artificial Sequence: Synthetic oligonucleotide
  Sense strand starting at position 2080 of SEQ ID NO: 1561613
gaccgagagucugcccaau

SEQ ID NO: 1685052 - RNA, 19 nt, Artificial Sequence
  Description of Artificial Sequence: Synthetic oligonucleotide
  Antisense strand to SEQ ID NO: 1685051
auugggcagacucucgguc

SEQ ID NO: 1685053 - RNA, 19 nt, Artificial Sequence
  Description of Artificial Sequence: Synthetic oligonucleotide
  Sense strand starting at position 2274 of SEQ ID NO: 1561613
gguucucagaucugacuga

SEQ ID NO: 1685054 - RNA, 19 nt, Artificial Sequence
  Description of Artificial Sequence: Synthetic oligonucleotide
  Antisense strand to SEQ ID NO: 1685053
ucagucagaucugagaacc

SEQ ID NO: 1685055 - RNA, 19 nt, Artificial Sequence
  Description of Artificial Sequence: Synthetic oligonucleotide
  Sense strand starting at position 2275 of SEQ ID NO: 1561613
guucucagaucugacugaa

SEQ ID NO: 1685056 - RNA, 19 nt, Artificial Sequence
  Description of Artificial Sequence: Synthetic oligonucleotide
  Antisense strand to SEQ ID NO: 1685055
uucagucagaucugagaac

SEQ ID NO: 1685057 - RNA, 19 nt, Artificial Sequence
  Description of Artificial Sequence: Synthetic oligonucleotide
  Sense strand starting at position 2315 of SEQ ID NO: 1561613
ggacaugaauggcuuugaa

SEQ ID NO: 1685058 - RNA, 19 nt, Artificial Sequence
  Description of Artificial Sequence: Synthetic oligonucleotide
  Antisense strand to SEQ ID NO: 1685057
uucaaagccauucaugucc

SEQ ID NO: 1685059 - RNA, 19 nt, Artificial Sequence
  Description of Artificial Sequence: Synthetic oligonucleotide
  Sense strand starting at position 2534 of SEQ ID NO: 1561613
gguaguguaauagacccua

SEQ ID NO: 1685060 - RNA, 19 nt, Artificial Sequence
  Description of Artificial Sequence: Synthetic oligonucleotide
  Antisense strand to SEQ ID NO: 1685059
uagggucuauuacacuacc

SEQ ID NO: 1685061 - RNA, 19 nt, Artificial Sequence
  Description of Artificial Sequence: Synthetic oligonucleotide
  Sense strand starting at position 2765 of SEQ ID NO: 1561613
ugcagcugcuguguauaua

SEQ ID NO: 1685062 - RNA, 19 nt, Artificial Sequence
  Description of Artificial Sequence: Synthetic oligonucleotide
  Antisense strand to SEQ ID NO: 1685061
uauauacacagcagcugca

SEQ ID NO: 1685063 - RNA, 19 nt, Artificial Sequence
  Description of Artificial Sequence: Synthetic oligonucleotide
  Sense strand starting at position 2768 of SEQ ID NO: 1561613
agcugcuguguauauagua

SEQ ID NO: 1685064 - RNA, 19 nt, Artificial Sequence
  Description of Artificial Sequence: Synthetic oligonucleotide
  Antisense strand to SEQ ID NO: 1685063
uacuauauacacagcagcu

SEQ ID NO: 1685065 - RNA, 19 nt, Artificial Sequence
  Description of Artificial Sequence: Synthetic oligonucleotide
  Sense strand starting at position 2773 of SEQ ID NO: 1561613
cuguguauauaguagauuu

SEQ ID NO: 1685066 - RNA, 19 nt, Artificial Sequence
  Description of Artificial Sequence: Synthetic oligonucleotide
  Antisense strand to SEQ ID NO: 1685065
aaaucuacuauauacacag

SEQ ID NO: 1685067 - RNA, 19 nt, Artificial Sequence
  Description of Artificial Sequence: Synthetic oligonucleotide
  Sense strand starting at position 2895 of SEQ ID NO: 1561613
aaugaaaguuuggaacaga

SEQ ID NO: 1685068 - RNA, 19 nt, Artificial Sequence
  Description of Artificial Sequence: Synthetic oligonucleotide
  Antisense strand to SEQ ID NO: 1685067
ucuguuccaaacuuucauu

SEQ ID NO: 1685069 - RNA, 19 nt, Artificial Sequence
  Description of Artificial Sequence: Synthetic oligonucleotide
  Sense strand starting at position 2968 of SEQ ID NO: 1561613
gcuguagugugguuggaau

SEQ ID NO: 1685070 - RNA, 19 nt, Artificial Sequence
  Description of Artificial Sequence: Synthetic oligonucleotide
  Antisense strand to SEQ ID NO: 1685069
auuccaaccacacuacagc

SEQ ID NO: 1685071 - RNA, 19 nt, Artificial Sequence
  Description of Artificial Sequence: Synthetic oligonucleotide
  Sense strand starting at position 2970 of SEQ ID NO: 1561613
uguagugugguuggaauuu

SEQ ID NO: 1685072 - RNA, 19 nt, Artificial Sequence
  Description of Artificial Sequence: Synthetic oligonucleotide
  Antisense strand to SEQ ID NO: 1685071
aaauuccaaccacacuaca

SEQ ID NO: 1685073 - RNA, 19 nt, Artificial Sequence
  Description of Artificial Sequence: Synthetic oligonucleotide
  Sense strand starting at position 3006 of SEQ ID NO: 1561613
ggaugaguuuggagggaau

SEQ ID NO: 1685074 - RNA, 19 nt, Artificial Sequence
  Description of Artificial Sequence: Synthetic oligonucleotide
  Antisense strand to SEQ ID NO: 1685073
auucccuccaaacucaucc

SEQ ID NO: 1685075 - RNA, 19 nt, Artificial Sequence
  Description of Artificial Sequence: Synthetic oligonucleotide
  Sense strand starting at position 3055 of SEQ ID NO: 1561613
ugaugaugaugccauuuau

SEQ ID NO: 1685076 - RNA, 19 nt, Artificial Sequence
  Description of Artificial Sequence: Synthetic oligonucleotide
  Antisense strand to SEQ ID NO: 1685075
auaaauggcaucaucauca

SEQ ID NO: 1685077 - RNA, 19 nt, Artificial Sequence
  Description of Artificial Sequence: Synthetic oligonucleotide
  Sense strand starting at position 3080 of SEQ ID NO: 1561613
ggugccaagcccuauacua

SEQ ID NO: 1685078 - RNA, 19 nt, Artificial Sequence
  Description of Artificial Sequence: Synthetic oligonucleotide
  Antisense strand to SEQ ID NO: 1685077
uaguauagggcuuggcacc

SEQ ID NO: 1685079 - RNA, 19 nt, Artificial Sequence
  Description of Artificial Sequence: Synthetic oligonucleotide
  Sense strand starting at position 3088 of SEQ ID NO: 1561613
gcccuauacuaaucgcuuu

SEQ ID NO: 1685080 - RNA, 19 nt, Artificial Sequence
  Description of Artificial Sequence: Synthetic oligonucleotide
  Antisense strand to SEQ ID NO: 1685079
aaagcgauuaguauagggc

SEQ ID NO: 1685081 - RNA, 19 nt, Artificial Sequence
  Description of Artificial Sequence: Synthetic oligonucleotide
  Sense strand starting at position 3187 of SEQ ID NO: 1561613
uagagagacuaauugucuu

SEQ ID NO: 1685082 - RNA, 19 nt, Artificial Sequence
  Description of Artificial Sequence: Synthetic oligonucleotide
  Antisense strand to SEQ ID NO: 1685081
aagacaauuagucucucua

SEQ ID NO: 1685083 - RNA, 19 nt, Artificial Sequence
  Description of Artificial Sequence: Synthetic oligonucleotide
  Sense strand starting at position 3195 of SEQ ID NO: 1561613
cuaauugucuugcccaaga

SEQ ID NO: 1685084 - RNA, 19 nt, Artificial Sequence
  Description of Artificial Sequence: Synthetic oligonucleotide
  Antisense strand to SEQ ID NO: 1685083
ucuugggcaagacaauuag

SEQ ID NO: 1685085 - RNA, 19 nt, Artificial Sequence
  Description of Artificial Sequence: Synthetic oligonucleotide
  Sense strand starting at position 3210 of SEQ ID NO: 1561613
aagauuacacaguguuuga

SEQ ID NO: 1685086 - RNA, 19 nt, Artificial Sequence
  Description of Artificial Sequence: Synthetic oligonucleotide
  Antisense strand to SEQ ID NO: 1685085
ucaaacacuguguaaucuu

SEQ ID NO: 1685087 - RNA, 19 nt, Artificial Sequence
  Description of Artificial Sequence: Synthetic oligonucleotide
  Sense strand starting at position 3219 of SEQ ID NO: 1561613
caguguuugagcgguggca

SEQ ID NO: 1685088 - RNA, 19 nt, Artificial Sequence
  Description of Artificial Sequence: Synthetic oligonucleotide
  Antisense strand to SEQ ID NO: 1685087
ugccaccgcucaaacacug

SEQ ID NO: 1685089 - RNA, 19 nt, Artificial Sequence
  Description of Artificial Sequence: Synthetic oligonucleotide
  Sense strand starting at position 3221 of SEQ ID NO: 1561613
guguuugagcgguggcaga

SEQ ID NO: 1685090 - RNA, 19 nt, Artificial Sequence
  Description of Artificial Sequence: Synthetic oligonucleotide
  Antisense strand to SEQ ID NO: 1685089
ucugccaccgcucaaacac

SEQ ID NO: 1685091 - RNA, 19 nt, Artificial Sequence
  Description of Artificial Sequence: Synthetic oligonucleotide
  Sense strand starting at position 3412 of SEQ ID NO: 1561613
gaaucaugaucucuggagu

SEQ ID NO: 1685092 - RNA, 19 nt, Artificial Sequence
  Description of Artificial Sequence: Synthetic oligonucleotide
  Antisense strand to SEQ ID NO: 1685091
acuccagagaucaugauuc

SEQ ID NO: 1685093 - RNA, 19 nt, Artificial Sequence
  Description of Artificial Sequence: Synthetic oligonucleotide
  Sense strand starting at position 3413 of SEQ ID NO: 1561613
aaucaugaucucuggagug

SEQ ID NO: 1685094 - RNA, 19 nt, Artificial Sequence
  Description of Artificial Sequence: Synthetic oligonucleotide
  Antisense strand to SEQ ID NO: 1685093
cacuccagagaucaugauu

SEQ ID NO: 1685095 - RNA, 19 nt, Artificial Sequence
  Description of Artificial Sequence: Synthetic oligonucleotide
  Sense strand starting at position 3471 of SEQ ID NO: 1561613
aaaguuugagaaugcgguu

SEQ ID NO: 1685096 - RNA, 19 nt, Artificial Sequence
  Description of Artificial Sequence: Synthetic oligonucleotide
  Antisense strand to SEQ ID NO: 1685095
aaccgcauucucaaacuuu

SEQ ID NO: 1685097 - RNA, 19 nt, Artificial Sequence
  Description of Artificial Sequence: Synthetic oligonucleotide
  Sense strand starting at position 3477 of SEQ ID NO: 1561613
ugagaaugcgguugaaaga

SEQ ID NO: 1685098 - RNA, 19 nt, Artificial Sequence
  Description of Artificial Sequence: Synthetic oligonucleotide
  Antisense strand to SEQ ID NO: 1685097
ucuuucaaccgcauucuca

SEQ ID NO: 1685099 - RNA, 19 nt, Artificial Sequence
  Description of Artificial Sequence: Synthetic oligonucleotide
  Sense strand starting at position 3541 of SEQ ID NO: 1561613
agggaucuguuguccaaag

SEQ ID NO: 1685100 - RNA, 19 nt, Artificial Sequence
  Description of Artificial Sequence: Synthetic oligonucleotide
  Antisense strand to SEQ ID NO: 1685099
cuuuggacaacagaucccu

SEQ ID NO: 1685101 - RNA, 19 nt, Artificial Sequence
  Description of Artificial Sequence: Synthetic oligonucleotide
  Sense strand starting at position 3542 of SEQ ID NO: 1561613
gggaucuguuguccaaaga

SEQ ID NO: 1685102 - RNA, 19 nt, Artificial Sequence
  Description of Artificial Sequence: Synthetic oligonucleotide
  Antisense strand to SEQ ID NO: 1685101
ucuuuggacaacagauccc

SEQ ID NO: 1685103 - RNA, 19 nt, Artificial Sequence
  Description of Artificial Sequence: Synthetic oligonucleotide
  Sense strand starting at position 3543 of SEQ ID NO: 1561613
ggaucuguuguccaaagag

SEQ ID NO: 1685104 - RNA, 19 nt, Artificial Sequence
  Description of Artificial Sequence: Synthetic oligonucleotide
  Antisense strand to SEQ ID NO: 1685103
cucuuuggacaacagaucc

SEQ ID NO: 1685105 - RNA, 19 nt, Artificial Sequence
  Description of Artificial Sequence: Synthetic oligonucleotide
  Sense strand starting at position 3571 of SEQ ID NO: 1561613
gucaaagaggccuggagau

SEQ ID NO: 1685106 - RNA, 19 nt, Artificial Sequence
  Description of Artificial Sequence: Synthetic oligonucleotide
  Antisense strand to SEQ ID NO: 1685105
aucuccaggccucuuugac

SEQ ID NO: 1685107 - RNA, 19 nt, Artificial Sequence
  Description of Artificial Sequence: Synthetic oligonucleotide
  Sense strand starting at position 3687 of SEQ ID NO: 1561613
ggaggaggaucucggaauu

SEQ ID NO: 1685108 - RNA, 19 nt, Artificial Sequence
  Description of Artificial Sequence: Synthetic oligonucleotide
  Antisense strand to SEQ ID NO: 1685107
aauuccgagauccuccucc

SEQ ID NO: 1685109 - RNA, 19 nt, Artificial Sequence
  Description of Artificial Sequence: Synthetic oligonucleotide
  Sense strand starting at position 3761 of SEQ ID NO: 1561613
agagggauuugcggucagu

SEQ ID NO: 1685110 - RNA, 19 nt, Artificial Sequence
  Description of Artificial Sequence: Synthetic oligonucleotide
  Antisense strand to SEQ ID NO: 1685109
acugaccgcaaaucccucu

SEQ ID NO: 1685111 - RNA, 19 nt, Artificial Sequence
  Description of Artificial Sequence: Synthetic oligonucleotide
  Sense strand starting at position 3819 of SEQ ID NO: 1561613
ggaggacacuagcuguauu

SEQ ID NO: 1685112 - RNA, 19 nt, Artificial Sequence
  Description of Artificial Sequence: Synthetic oligonucleotide
  Antisense strand to SEQ ID NO: 1685111
aauacagcuaguguccucc

SEQ ID NO: 1685113 - RNA, 19 nt, Artificial Sequence
  Description of Artificial Sequence: Synthetic oligonucleotide
  Sense strand starting at position 3856 of SEQ ID NO: 1561613
ggguuuggucccugagcug

SEQ ID NO: 1685114 - RNA, 19 nt, Artificial Sequence
  Description of Artificial Sequence: Synthetic oligonucleotide
  Antisense strand to SEQ ID NO: 1685113
cagcucagggaccaaaccc

SEQ ID NO: 1685115 - RNA, 19 nt, Artificial Sequence
  Description of Artificial Sequence: Synthetic oligonucleotide
  Sense strand starting at position 3980 of SEQ ID NO: 1561613
gcugauagcgcugagcaga

SEQ ID NO: 1685116 - RNA, 19 nt, Artificial Sequence
  Description of Artificial Sequence: Synthetic oligonucleotide
  Antisense strand to SEQ ID NO: 1685115
ucugcucagcgcuaucagc

SEQ ID NO: 1685117 - RNA, 19 nt, Artificial Sequence
  Description of Artificial Sequence: Synthetic oligonucleotide
  Sense strand starting at position 1988 of SEQ ID NO: 1561614
gacggaaguuccugguugu

SEQ ID NO: 1685118 - RNA, 19 nt, Artificial Sequence
  Description of Artificial Sequence: Synthetic oligonucleotide
  Antisense strand to SEQ ID NO: 1685117
acaaccaggaacuuccguc

SEQ ID NO: 1685119 - RNA, 19 nt, Artificial Sequence
  Description of Artificial Sequence: Synthetic oligonucleotide
  Sense strand starting at position 1991 of SEQ ID NO: 1561614
ggaaguuccugguugugga

SEQ ID NO: 1685120 - RNA, 19 nt, Artificial Sequence
  Description of Artificial Sequence: Synthetic oligonucleotide
  Antisense strand to SEQ ID NO: 1685119
uccacaaccaggaacuucc

SEQ ID NO: 1685121 - RNA, 19 nt, Artificial Sequence
  Description of Artificial Sequence: Synthetic oligonucleotide
  Sense strand starting at position 2052 of SEQ ID NO: 1561614
ggcucauugugaccucacu

SEQ ID NO: 1685122 - RNA, 19 nt, Artificial Sequence
  Description of Artificial Sequence: Synthetic oligonucleotide
  Antisense strand to SEQ ID NO: 1685121
agugaggucacaaugagcc

SEQ ID NO: 1685123 - RNA, 19 nt, Artificial Sequence
  Description of Artificial Sequence: Synthetic oligonucleotide
  Sense strand starting at position 2123 of SEQ ID NO: 1561614
auccucucuucuggacaga

SEQ ID NO: 1685124 - RNA, 19 nt, Artificial Sequence
  Description of Artificial Sequence: Synthetic oligonucleotide
  Antisense strand to SEQ ID NO: 1685123
ucuguccagaagagaggau

SEQ ID NO: 1685125 - RNA, 19 nt, Artificial Sequence
  Description of Artificial Sequence: Synthetic oligonucleotide
  Sense strand starting at position 2218 of SEQ ID NO: 1561614
uuagaauuaucugauguac

SEQ ID NO: 1685126 - RNA, 19 nt, Artificial Sequence
  Description of Artificial Sequence: Synthetic oligonucleotide
  Antisense strand to SEQ ID NO: 1685125
guacaucagauaauucuaa

SEQ ID NO: 1685127 - RNA, 19 nt, Artificial Sequence
  Description of Artificial Sequence: Synthetic oligonucleotide
  Sense strand starting at position 2220 of SEQ ID NO: 1561614
agaauuaucugauguacuc

SEQ ID NO: 1685128 - RNA, 19 nt, Artificial Sequence
  Description of Artificial Sequence: Synthetic oligonucleotide
  Antisense strand to SEQ ID NO: 1685127
gaguacaucagauaauucu

SEQ ID NO: 1685129 - RNA, 19 nt, Artificial Sequence
  Description of Artificial Sequence: Synthetic oligonucleotide
  Sense strand starting at position 2230 of SEQ ID NO: 1561614
gauguacucuguccagaug

SEQ ID NO: 1685130 - RNA, 19 nt, Artificial Sequence
  Description of Artificial Sequence: Synthetic oligonucleotide
  Antisense strand to SEQ ID NO: 1685129
caucuggacagaguacauc

SEQ ID NO: 1685131 - RNA, 19 nt, Artificial Sequence
  Description of Artificial Sequence: Synthetic oligonucleotide
  Sense strand starting at position 2233 of SEQ ID NO: 1561614
guacucuguccagaugugu

SEQ ID NO: 1685132 - RNA, 19 nt, Artificial Sequence
  Description of Artificial Sequence: Synthetic oligonucleotide
  Antisense strand to SEQ ID NO: 1685131
acacaucuggacagaguac

SEQ ID NO: 1685133 - RNA, 19 nt, Artificial Sequence
  Description of Artificial Sequence: Synthetic oligonucleotide
  Sense strand starting at position 2263 of SEQ ID NO: 1561614
ccucccagugcugaagaaa

SEQ ID NO: 1685134 - RNA, 19 nt, Artificial Sequence
  Description of Artificial Sequence: Synthetic oligonucleotide
  Antisense strand to SEQ ID NO: 1685133
uuucuucagcacugggagg

SEQ ID NO: 1685135 - RNA, 19 nt, Artificial Sequence
  Description of Artificial Sequence: Synthetic oligonucleotide
  Sense strand starting at position 2733 of SEQ ID NO: 1561614
cuaagcaagucuugaucuu

SEQ ID NO: 1685136 - RNA, 19 nt, Artificial Sequence
  Description of Artificial Sequence: Synthetic oligonucleotide
  Antisense strand to SEQ ID NO: 1685135
aagaucaagacuugcuuag

SEQ ID NO: 1685137 - RNA, 19 nt, Artificial Sequence
  Description of Artificial Sequence: Synthetic oligonucleotide
  Sense strand starting at position 2814 of SEQ ID NO: 1561614
acuucuugucucugcaaag

SEQ ID NO: 1685138 - RNA, 19 nt, Artificial Sequence
  Description of Artificial Sequence: Synthetic oligonucleotide
  Antisense strand to SEQ ID NO: 1685137
cuuugcagagacaagaagu

SEQ ID NO: 1685139 - RNA, 19 nt, Artificial Sequence
  Description of Artificial Sequence: Synthetic oligonucleotide
  Sense strand starting at position 2865 of SEQ ID NO: 1561614
guagaagacucaggugaau

SEQ ID NO: 1685140 - RNA, 19 nt, Artificial Sequence
  Description of Artificial Sequence: Synthetic oligonucleotide
  Antisense strand to SEQ ID NO: 1685139
auucaccugagucuucuac

SEQ ID NO: 1685141 - RNA, 19 nt, Artificial Sequence
  Description of Artificial Sequence: Synthetic oligonucleotide
  Sense strand starting at position 2867 of SEQ ID NO: 1561614
agaagacucaggugaaugu

SEQ ID NO: 1685142 - RNA, 19 nt, Artificial Sequence
  Description of Artificial Sequence: Synthetic oligonucleotide
  Antisense strand to SEQ ID NO: 1685141
acauucaccugagucuucu

SEQ ID NO: 1685143 - RNA, 19 nt, Artificial Sequence
  Description of Artificial Sequence: Synthetic oligonucleotide
  Sense strand starting at position 2906 of SEQ ID NO: 1561614
uugaaaggaucuuacaugu

SEQ ID NO: 1685144 - RNA, 19 nt, Artificial Sequence
  Description of Artificial Sequence: Synthetic oligonucleotide
  Antisense strand to SEQ ID NO: 1685143
acauguaagauccuuucaa

SEQ ID NO: 1685145 - RNA, 19 nt, Artificial Sequence
  Description of Artificial Sequence: Synthetic oligonucleotide
  Sense strand starting at position 2913 of SEQ ID NO: 1561614
gaucuuacauguuauggau

SEQ ID NO: 1685146 - RNA, 19 nt, Artificial Sequence
  Description of Artificial Sequence: Synthetic oligonucleotide
  Antisense strand to SEQ ID NO: 1685145
auccauaacauguaagauc

SEQ ID NO: 1685147 - RNA, 19 nt, Artificial Sequence
  Description of Artificial Sequence: Synthetic oligonucleotide
  Sense strand starting at position 2915 of SEQ ID NO: 1561614
ucuuacauguuauggauau

SEQ ID NO: 1685148 - RNA, 19 nt, Artificial Sequence
  Description of Artificial Sequence: Synthetic oligonucleotide
  Antisense strand to SEQ ID NO: 1685147
auauccauaacauguaaga

SEQ ID NO: 1685149 - RNA, 19 nt, Artificial Sequence
  Description of Artificial Sequence: Synthetic oligonucleotide
  Sense strand starting at position 2916 of SEQ ID NO: 1561614
cuuacauguuauggauauc

SEQ ID NO: 1685150 - RNA, 19 nt, Artificial Sequence
  Description of Artificial Sequence: Synthetic oligonucleotide
  Antisense strand to SEQ ID NO: 1685149
gauauccauaacauguaag

SEQ ID NO: 1685151 - RNA, 19 nt, Artificial Sequence
  Description of Artificial Sequence: Synthetic oligonucleotide
  Sense strand starting at position 3355 of SEQ ID NO: 1561614
uagagaacauggucucuua

SEQ ID NO: 1685152 - RNA, 19 nt, Artificial Sequence
  Description of Artificial Sequence: Synthetic oligonucleotide
  Antisense strand to SEQ ID NO: 1685151
uaagagaccauguucucua

SEQ ID NO: 1685153 - RNA, 19 nt, Artificial Sequence
  Description of Artificial Sequence: Synthetic oligonucleotide
  Sense strand starting at position 3463 of SEQ ID NO: 1561614
gaacaugguuacccugauu

SEQ ID NO: 1685154 - RNA, 19 nt, Artificial Sequence
  Description of Artificial Sequence: Synthetic oligonucleotide
  Antisense strand to SEQ ID NO: 1685153
aaucaggguaaccauguuc

SEQ ID NO: 1685155 - RNA, 19 nt, Artificial Sequence
  Description of Artificial Sequence: Synthetic oligonucleotide
  Sense strand starting at position 3466 of SEQ ID NO: 1561614
caugguuacccugauugua

SEQ ID NO: 1685156 - RNA, 19 nt, Artificial Sequence
  Description of Artificial Sequence: Synthetic oligonucleotide
  Antisense strand to SEQ ID NO: 1685155
uacaaucaggguaaccaug

SEQ ID NO: 1685157 - RNA, 19 nt, Artificial Sequence
  Description of Artificial Sequence: Synthetic oligonucleotide
  Sense strand starting at position 3468 of SEQ ID NO: 1561614
ugguuacccugauuguaac

SEQ ID NO: 1685158 - RNA, 19 nt, Artificial Sequence
  Description of Artificial Sequence: Synthetic oligonucleotide
  Antisense strand to SEQ ID NO: 1685157
guuacaaucaggguaacca

SEQ ID NO: 1685159 - RNA, 19 nt, Artificial Sequence
  Description of Artificial Sequence: Synthetic oligonucleotide
  Sense strand starting at position 3499 of SEQ ID NO: 1561614
agggaagagucaguucuca

SEQ ID NO: 1685160 - RNA, 19 nt, Artificial Sequence
  Description of Artificial Sequence: Synthetic oligonucleotide
  Antisense strand to SEQ ID NO: 1685159
ugagaacugacucuucccu

SEQ ID NO: 1685161 - RNA, 19 nt, Artificial Sequence
  Description of Artificial Sequence: Synthetic oligonucleotide
  Sense strand starting at position 3504 of SEQ ID NO: 1561614
agagucaguucucacaauu

SEQ ID NO: 1685162 - RNA, 19 nt, Artificial Sequence
  Description of Artificial Sequence: Synthetic oligonucleotide
  Antisense strand to SEQ ID NO: 1685161
aauugugagaacugacucu

SEQ ID NO: 1685163 - RNA, 19 nt, Artificial Sequence
  Description of Artificial Sequence: Synthetic oligonucleotide
  Sense strand starting at position 3515 of SEQ ID NO: 1561614
ucacaauuagcaggaguga

SEQ ID NO: 1685164 - RNA, 19 nt, Artificial Sequence
  Description of Artificial Sequence: Synthetic oligonucleotide
  Antisense strand to SEQ ID NO: 1685163
ucacuccugcuaauuguga

SEQ ID NO: 1685165 - RNA, 19 nt, Artificial Sequence
  Description of Artificial Sequence: Synthetic oligonucleotide
  Sense strand starting at position 3520 of SEQ ID NO: 1561614
auuagcaggagugauguua

SEQ ID NO: 1685166 - RNA, 19 nt, Artificial Sequence
  Description of Artificial Sequence: Synthetic oligonucleotide
  Antisense strand to SEQ ID NO: 1685165
uaacaucacuccugcuaau

SEQ ID NO: 1685167 - RNA, 19 nt, Artificial Sequence
  Description of Artificial Sequence: Synthetic oligonucleotide
  Sense strand starting at position 3577 of SEQ ID NO: 1561614
aggagauguucauccuggu

SEQ ID NO: 1685168 - RNA, 19 nt, Artificial Sequence
  Description of Artificial Sequence: Synthetic oligonucleotide
  Antisense strand to SEQ ID NO: 1685167
accaggaugaacaucuccu

SEQ ID NO: 1685169 - RNA, 19 nt, Artificial Sequence
  Description of Artificial Sequence: Synthetic oligonucleotide
  Sense strand starting at position 3694 of SEQ ID NO: 1561614
ugagguuggucaccagagu

SEQ ID NO: 1685170 - RNA, 19 nt, Artificial Sequence
  Description of Artificial Sequence: Synthetic oligonucleotide
  Antisense strand to SEQ ID NO: 1685169
acucuggugaccaaccuca

SEQ ID NO: 1685171 - RNA, 19 nt, Artificial Sequence
  Description of Artificial Sequence: Synthetic oligonucleotide
  Sense strand starting at position 3833 of SEQ ID NO: 1561614
cagggcuucuucuaaguga

SEQ ID NO: 1685172 - RNA, 19 nt, Artificial Sequence
  Description of Artificial Sequence: Synthetic oligonucleotide
  Antisense strand to SEQ ID NO: 1685171
ucacuuagaagaagcccug

SEQ ID NO: 1685173 - RNA, 19 nt, Artificial Sequence
  Description of Artificial Sequence: Synthetic oligonucleotide
  Sense strand starting at position 3836 of SEQ ID NO: 1561614
ggcuucuucuaagugauuu

SEQ ID NO: 1685174 - RNA, 19 nt, Artificial Sequence
  Description of Artificial Sequence: Synthetic oligonucleotide
  Antisense strand to SEQ ID NO: 1685173
aaaucacuuagaagaagcc

SEQ ID NO: 1685175 - RNA, 19 nt, Artificial Sequence
  Description of Artificial Sequence: Synthetic oligonucleotide
  Sense strand starting at position 3906 of SEQ ID NO: 1561614
guugaaagcuuaugagcag

SEQ ID NO: 1685176 - RNA, 19 nt, Artificial Sequence
  Description of Artificial Sequence: Synthetic oligonucleotide
  Antisense strand to SEQ ID NO: 1685175
cugcucauaagcuuucaac

SEQ ID NO: 1685177 - RNA, 19 nt, Artificial Sequence
  Description of Artificial Sequence: Synthetic oligonucleotide
  Sense strand starting at position 3943 of SEQ ID NO: 1561614
acagguaagugguuuggaa

SEQ ID NO: 1685178 - RNA, 19 nt, Artificial Sequence
  Description of Artificial Sequence: Synthetic oligonucleotide
  Antisense strand to SEQ ID NO: 1685177
uuccaaaccacuuaccugu

SEQ ID NO: 1685179 - RNA, 19 nt, Artificial Sequence
  Description of Artificial Sequence: Synthetic oligonucleotide
  Sense strand starting at position 3945 of SEQ ID NO: 1561614
agguaagugguuuggaauu

SEQ ID NO: 1685180 - RNA, 19 nt, Artificial Sequence
  Description of Artificial Sequence: Synthetic oligonucleotide
  Antisense strand to SEQ ID NO: 1685179
aauuccaaaccacuuaccu

SEQ ID NO: 1685181 - RNA, 19 nt, Artificial Sequence
  Description of Artificial Sequence: Synthetic oligonucleotide
  Sense strand starting at position 3951 of SEQ ID NO: 1561614
gugguuuggaauuagucuu

SEQ ID NO: 1685182 - RNA, 19 nt, Artificial Sequence
  Description of Artificial Sequence: Synthetic oligonucleotide
  Antisense strand to SEQ ID NO: 1685181
aagacuaauuccaaaccac

SEQ ID NO: 1685183 - RNA, 19 nt, Artificial Sequence
  Description of Artificial Sequence: Synthetic oligonucleotide
  Sense strand starting at position 3957 of SEQ ID NO: 1561614
uggaauuagucuuugucac

SEQ ID NO: 1685184 - RNA, 19 nt, Artificial Sequence
  Description of Artificial Sequence: Synthetic oligonucleotide
  Antisense strand to SEQ ID NO: 1685183
gugacaaagacuaauucca

SEQ ID NO: 1685185 - RNA, 19 nt, Artificial Sequence
  Description of Artificial Sequence: Synthetic oligonucleotide
  Sense strand starting at position 3958 of SEQ ID NO: 1561614
ggaauuagucuuugucacg

SEQ ID NO: 1685186 - RNA, 19 nt, Artificial Sequence
  Description of Artificial Sequence: Synthetic oligonucleotide
  Antisense strand to SEQ ID NO: 1685185
cgugacaaagacuaauucc

SEQ ID NO: 1685187 - RNA, 19 nt, Artificial Sequence
  Description of Artificial Sequence: Synthetic oligonucleotide
  Sense strand starting at position 3959 of SEQ ID NO: 1561614
gaauuagucuuugucacgu

SEQ ID NO: 1685188 - RNA, 19 nt, Artificial Sequence
  Description of Artificial Sequence: Synthetic oligonucleotide
  Antisense strand to SEQ ID NO: 1685187
acgugacaaagacuaauuc

SEQ ID NO: 1685189 - RNA, 19 nt, Artificial Sequence
  Description of Artificial Sequence: Synthetic oligonucleotide
  Sense strand starting at position 464 of SEQ ID NO: 1561615
gcaaauaaaugagugguaa

SEQ ID NO: 1685190 - RNA, 19 nt, Artificial Sequence
  Description of Artificial Sequence: Synthetic oligonucleotide
  Antisense strand to SEQ ID NO: 1685189
uuaccacucauuuauuugc

SEQ ID NO: 1685191 - RNA, 19 nt, Artificial Sequence
  Description of Artificial Sequence: Synthetic oligonucleotide
  Sense strand starting at position 465 of SEQ ID NO: 1561615
caaauaaaugagugguaac

SEQ ID NO: 1685192 - RNA, 19 nt, Artificial Sequence
  Description of Artificial Sequence: Synthetic oligonucleotide
  Antisense strand to SEQ ID NO: 1685191
guuaccacucauuuauuug

SEQ ID NO: 1685193 - RNA, 19 nt, Artificial Sequence
  Description of Artificial Sequence: Synthetic oligonucleotide
  Sense strand starting at position 476 of SEQ ID NO: 1561615
gugguaacagaauacucuu

SEQ ID NO: 1685194 - RNA, 19 nt, Artificial Sequence
  Description of Artificial Sequence: Synthetic oligonucleotide
  Antisense strand to SEQ ID NO: 1685193
aagaguauucuguuaccac

SEQ ID NO: 1685195 - RNA, 19 nt, Artificial Sequence
  Description of Artificial Sequence: Synthetic oligonucleotide
  Sense strand starting at position 518 of SEQ ID NO: 1561615
auccuuauugcaggacuga

SEQ ID NO: 1685196 - RNA, 19 nt, Artificial Sequence
  Description of Artificial Sequence: Synthetic oligonucleotide
  Antisense strand to SEQ ID NO: 1685195
ucaguccugcaauaaggau

SEQ ID NO: 1685197 - RNA, 19 nt, Artificial Sequence
  Description of Artificial Sequence: Synthetic oligonucleotide
  Sense strand starting at position 519 of SEQ ID NO: 1561615
uccuuauugcaggacugaa

SEQ ID NO: 1685198 - RNA, 19 nt, Artificial Sequence
  Description of Artificial Sequence: Synthetic oligonucleotide
  Antisense strand to SEQ ID NO: 1685197
uucaguccugcaauaagga

SEQ ID NO: 1685199 - RNA, 19 nt, Artificial Sequence
  Description of Artificial Sequence: Synthetic oligonucleotide
  Sense strand starting at position 564 of SEQ ID NO: 1561615
ccugaucagaggcgauuau

SEQ ID NO: 1685200 - RNA, 19 nt, Artificial Sequence
  Description of Artificial Sequence: Synthetic oligonucleotide
  Antisense strand to SEQ ID NO: 1685199
auaaucgccucugaucagg

SEQ ID NO: 1685201 - RNA, 19 nt, Artificial Sequence
  Description of Artificial Sequence: Synthetic oligonucleotide
  Sense strand starting at position 565 of SEQ ID NO: 1561615
cugaucagaggcgauuaua

SEQ ID NO: 1685202 - RNA, 19 nt, Artificial Sequence
  Description of Artificial Sequence: Synthetic oligonucleotide
  Antisense strand to SEQ ID NO: 1685201
uauaaucgccucugaucag

SEQ ID NO: 1685203 - RNA, 19 nt, Artificial Sequence
  Description of Artificial Sequence: Synthetic oligonucleotide
  Sense strand starting at position 758 of SEQ ID NO: 1561615
aucccuuaccuggguuauu

SEQ ID NO: 1685204 - RNA, 19 nt, Artificial Sequence
  Description of Artificial Sequence: Synthetic oligonucleotide
  Antisense strand to SEQ ID NO: 1685203
aauaacccagguaagggau

SEQ ID NO: 1685205 - RNA, 19 nt, Artificial Sequence
  Description of Artificial Sequence: Synthetic oligonucleotide
  Sense strand starting at position 833 of SEQ ID NO: 1561615
uccauacagcaguaauagu

SEQ ID NO: 1685206 - RNA, 19 nt, Artificial Sequence
  Description of Artificial Sequence: Synthetic oligonucleotide
  Antisense strand to SEQ ID NO: 1685205
acuauuacugcuguaugga

SEQ ID NO: 1685207 - RNA, 19 nt, Artificial Sequence
  Description of Artificial Sequence: Synthetic oligonucleotide
  Sense strand starting at position 925 of SEQ ID NO: 1561615
aagccuauaagguguguga

SEQ ID NO: 1685208 - RNA, 19 nt, Artificial Sequence
  Description of Artificial Sequence: Synthetic oligonucleotide
  Antisense strand to SEQ ID NO: 1685207
ucacacaccuuauaggcuu

SEQ ID NO: 1685209 - RNA, 19 nt, Artificial Sequence
  Description of Artificial Sequence: Synthetic oligonucleotide
  Sense strand starting at position 928 of SEQ ID NO: 1561615
ccuauaaggugugugaucu

SEQ ID NO: 1685210 - RNA, 19 nt, Artificial Sequence
  Description of Artificial Sequence: Synthetic oligonucleotide
  Antisense strand to SEQ ID NO: 1685209
agaucacacaccuuauagg

SEQ ID NO: 1685211 - RNA, 19 nt, Artificial Sequence
  Description of Artificial Sequence: Synthetic oligonucleotide
  Sense strand starting at position 1153 of SEQ ID NO: 1561615
cgaguccuacccugaccau

SEQ ID NO: 1685212 - RNA, 19 nt, Artificial Sequence
  Description of Artificial Sequence: Synthetic oligonucleotide
  Antisense strand to SEQ ID NO: 1685211
auggucaggguaggacucg

SEQ ID NO: 1685213 - RNA, 19 nt, Artificial Sequence
  Description of Artificial Sequence: Synthetic oligonucleotide
  Sense strand starting at position 1208 of SEQ ID NO: 1561615
cggcguagaaucuacuauu

SEQ ID NO: 1685214 - RNA, 19 nt, Artificial Sequence
  Description of Artificial Sequence: Synthetic oligonucleotide
  Antisense strand to SEQ ID NO: 1685213
aauaguagauucuacgccg

SEQ ID NO: 1685215 - RNA, 19 nt, Artificial Sequence
  Description of Artificial Sequence: Synthetic oligonucleotide
  Sense strand starting at position 1350 of SEQ ID NO: 1561615
guaagugcucaauacguau

SEQ ID NO: 1685216 - RNA, 19 nt, Artificial Sequence
  Description of Artificial Sequence: Synthetic oligonucleotide
  Antisense strand to SEQ ID NO: 1685215
auacguauugagcacuuac

SEQ ID NO: 1685217 - RNA, 19 nt, Artificial Sequence
  Description of Artificial Sequence: Synthetic oligonucleotide
  Sense strand starting at position 1354 of SEQ ID NO: 1561615
gugcucaauacguauuugu

SEQ ID NO: 1685218 - RNA, 19 nt, Artificial Sequence
  Description of Artificial Sequence: Synthetic oligonucleotide
  Antisense strand to SEQ ID NO: 1685217
acaaauacguauugagcac

SEQ ID NO: 1685219 - RNA, 19 nt, Artificial Sequence
  Description of Artificial Sequence: Synthetic oligonucleotide
  Sense strand starting at position 1398 of SEQ ID NO: 1561615
agcauauaugcccaaaggu

SEQ ID NO: 1685220 - RNA, 19 nt, Artificial Sequence
  Description of Artificial Sequence: Synthetic oligonucleotide
  Antisense strand to SEQ ID NO: 1685219
accuuugggcauauaugcu

SEQ ID NO: 1685221 - RNA, 19 nt, Artificial Sequence
  Description of Artificial Sequence: Synthetic oligonucleotide
  Sense strand starting at position 1468 of SEQ ID NO: 1561615
ccuagcaucuggucgacua

SEQ ID NO: 1685222 - RNA, 19 nt, Artificial Sequence
  Description of Artificial Sequence: Synthetic oligonucleotide
  Antisense strand to SEQ ID NO: 1685221
uagucgaccagaugcuagg

SEQ ID NO: 1685223 - RNA, 19 nt, Artificial Sequence
  Description of Artificial Sequence: Synthetic oligonucleotide
  Sense strand starting at position 1469 of SEQ ID NO: 1561615
cuagcaucuggucgacuaa

SEQ ID NO: 1685224 - RNA, 19 nt, Artificial Sequence
  Description of Artificial Sequence: Synthetic oligonucleotide
  Antisense strand to SEQ ID NO: 1685223
uuagucgaccagaugcuag

SEQ ID NO: 1685225 - RNA, 19 nt, Artificial Sequence
  Description of Artificial Sequence: Synthetic oligonucleotide
  Sense strand starting at position 1470 of SEQ ID NO: 1561615
uagcaucuggucgacuaaa

SEQ ID NO: 1685226 - RNA, 19 nt, Artificial Sequence
  Description of Artificial Sequence: Synthetic oligonucleotide
  Antisense strand to SEQ ID NO: 1685225
uuuagucgaccagaugcua

SEQ ID NO: 1685227 - RNA, 19 nt, Artificial Sequence
  Description of Artificial Sequence: Synthetic oligonucleotide
  Sense strand starting at position 1512 of SEQ ID NO: 1561615
acuguuaccucuccgagag

SEQ ID NO: 1685228 - RNA, 19 nt, Artificial Sequence
  Description of Artificial Sequence: Synthetic oligonucleotide
  Antisense strand to SEQ ID NO: 1685227
cucucggagagguaacagu

SEQ ID NO: 1685229 - RNA, 19 nt, Artificial Sequence
  Description of Artificial Sequence: Synthetic oligonucleotide
  Sense strand starting at position 1516 of SEQ ID NO: 1561615
uuaccucuccgagagcaga

SEQ ID NO: 1685230 - RNA, 19 nt, Artificial Sequence
  Description of Artificial Sequence: Synthetic oligonucleotide
  Antisense strand to SEQ ID NO: 1685229
ucugcucucggagagguaa

SEQ ID NO: 1685231 - RNA, 19 nt, Artificial Sequence
  Description of Artificial Sequence: Synthetic oligonucleotide
  Sense strand starting at position 2170 of SEQ ID NO: 1561615
acccauucuggcugcgaaa

SEQ ID NO: 1685232 - RNA, 19 nt, Artificial Sequence
  Description of Artificial Sequence: Synthetic oligonucleotide
  Antisense strand to SEQ ID NO: 1685231
uuucgcagccagaaugggu

SEQ ID NO: 1685233 - RNA, 19 nt, Artificial Sequence
  Description of Artificial Sequence: Synthetic oligonucleotide
  Sense strand starting at position 2483 of SEQ ID NO: 1561615
cuagaaggguccuuuaucu

SEQ ID NO: 1685234 - RNA, 19 nt, Artificial Sequence
  Description of Artificial Sequence: Synthetic oligonucleotide
  Antisense strand to SEQ ID NO: 1685233
agauaaaggacccuucuag

SEQ ID NO: 1685235 - RNA, 19 nt, Artificial Sequence
  Description of Artificial Sequence: Synthetic oligonucleotide
  Sense strand starting at position 2609 of SEQ ID NO: 1561615
ugugucuucucacuaagac

SEQ ID NO: 1685236 - RNA, 19 nt, Artificial Sequence
  Description of Artificial Sequence: Synthetic oligonucleotide
  Antisense strand to SEQ ID NO: 1685235
gucuuagugagaagacaca

SEQ ID NO: 1685237 - RNA, 19 nt, Artificial Sequence
  Description of Artificial Sequence: Synthetic oligonucleotide
  Sense strand starting at position 2610 of SEQ ID NO: 1561615
gugucuucucacuaagaca

SEQ ID NO: 1685238 - RNA, 19 nt, Artificial Sequence
  Description of Artificial Sequence: Synthetic oligonucleotide
  Antisense strand to SEQ ID NO: 1685237
ugucuuagugagaagacac

SEQ ID NO: 1685239 - RNA, 19 nt, Artificial Sequence
  Description of Artificial Sequence: Synthetic oligonucleotide
  Sense strand starting at position 2737 of SEQ ID NO: 1561615
ucuagaugcgcucauguga

SEQ ID NO: 1685240 - RNA, 19 nt, Artificial Sequence
  Description of Artificial Sequence: Synthetic oligonucleotide
  Antisense strand to SEQ ID NO: 1685239
ucacaugagcgcaucuaga

SEQ ID NO: 1685241 - RNA, 19 nt, Artificial Sequence
  Description of Artificial Sequence: Synthetic oligonucleotide
  Sense strand starting at position 2745 of SEQ ID NO: 1561615
cgcucaugugacuaaauuc

SEQ ID NO: 1685242 - RNA, 19 nt, Artificial Sequence
  Description of Artificial Sequence: Synthetic oligonucleotide
  Antisense strand to SEQ ID NO: 1685241
gaauuuagucacaugagcg

SEQ ID NO: 1685243 - RNA, 19 nt, Artificial Sequence
  Description of Artificial Sequence: Synthetic oligonucleotide
  Sense strand starting at position 2835 of SEQ ID NO: 1561615
cgcucuauccugucgcauu

SEQ ID NO: 1685244 - RNA, 19 nt, Artificial Sequence
  Description of Artificial Sequence: Synthetic oligonucleotide
  Antisense strand to SEQ ID NO: 1685243
aaugcgacaggauagagcg

SEQ ID NO: 1685245 - RNA, 19 nt, Artificial Sequence
  Description of Artificial Sequence: Synthetic oligonucleotide
  Sense strand starting at position 3187 of SEQ ID NO: 1561615
aagauauuguaagcgagaa

SEQ ID NO: 1685246 - RNA, 19 nt, Artificial Sequence
  Description of Artificial Sequence: Synthetic oligonucleotide
  Antisense strand to SEQ ID NO: 1685245
uucucgcuuacaauaucuu

SEQ ID NO: 1685247 - RNA, 19 nt, Artificial Sequence
  Description of Artificial Sequence: Synthetic oligonucleotide
  Sense strand starting at position 3188 of SEQ ID NO: 1561615
agauauuguaagcgagaaa

SEQ ID NO: 1685248 - RNA, 19 nt, Artificial Sequence
  Description of Artificial Sequence: Synthetic oligonucleotide
  Antisense strand to SEQ ID NO: 1685247
uuucucgcuuacaauaucu

SEQ ID NO: 1685249 - RNA, 19 nt, Artificial Sequence
  Description of Artificial Sequence: Synthetic oligonucleotide
  Sense strand starting at position 3191 of SEQ ID NO: 1561615
uauuguaagcgagaaauga

SEQ ID NO: 1685250 - RNA, 19 nt, Artificial Sequence
  Description of Artificial Sequence: Synthetic oligonucleotide
  Antisense strand to SEQ ID NO: 1685249
ucauuucucgcuuacaaua

SEQ ID NO: 1685251 - RNA, 19 nt, Artificial Sequence
  Description of Artificial Sequence: Synthetic oligonucleotide
  Sense strand starting at position 3195 of SEQ ID NO: 1561615
guaagcgagaaaugaaacu

SEQ ID NO: 1685252 - RNA, 19 nt, Artificial Sequence
  Description of Artificial Sequence: Synthetic oligonucleotide
  Antisense strand to SEQ ID NO: 1685251
aguuucauuucucgcuuac

SEQ ID NO: 1685253 - RNA, 19 nt, Artificial Sequence
  Description of Artificial Sequence: Synthetic oligonucleotide
  Sense strand starting at position 3648 of SEQ ID NO: 1561615
ugaaguaaccaucguuaag

SEQ ID NO: 1685254 - RNA, 19 nt, Artificial Sequence
  Description of Artificial Sequence: Synthetic oligonucleotide
  Antisense strand to SEQ ID NO: 1685253
cuuaacgaugguuacuuca

SEQ ID NO: 1685255 - RNA, 19 nt, Artificial Sequence
  Description of Artificial Sequence: Synthetic oligonucleotide
  Sense strand starting at position 3650 of SEQ ID NO: 1561615
aaguaaccaucguuaaguu

SEQ ID NO: 1685256 - RNA, 19 nt, Artificial Sequence
  Description of Artificial Sequence: Synthetic oligonucleotide
  Antisense strand to SEQ ID NO: 1685255
aacuuaacgaugguuacuu

SEQ ID NO: 1685257 - RNA, 19 nt, Artificial Sequence
  Description of Artificial Sequence: Synthetic oligonucleotide
  Sense strand starting at position 3651 of SEQ ID NO: 1561615
aguaaccaucguuaaguua

SEQ ID NO: 1685258 - RNA, 19 nt, Artificial Sequence
  Description of Artificial Sequence: Synthetic oligonucleotide
  Antisense strand to SEQ ID NO: 1685257
uaacuuaacgaugguuacu

SEQ ID NO: 1685259 - RNA, 19 nt, Artificial Sequence
  Description of Artificial Sequence: Synthetic oligonucleotide
  Sense strand starting at position 3659 of SEQ ID NO: 1561615
ucguuaaguuaauuaagag

SEQ ID NO: 1685260 - RNA, 19 nt, Artificial Sequence
  Description of Artificial Sequence: Synthetic oligonucleotide
  Antisense strand to SEQ ID NO: 1685259
cucuuaauuaacuuaacga

SEQ ID NO: 1685261 - RNA, 19 nt, Artificial Sequence
  Description of Artificial Sequence: Synthetic oligonucleotide
  Sense strand starting at position 3703 of SEQ ID NO: 1561615
guaaauguaaguuagugaa

SEQ ID NO: 1685262 - RNA, 19 nt, Artificial Sequence
  Description of Artificial Sequence: Synthetic oligonucleotide
  Antisense strand to SEQ ID NO: 1685261
uucacuaacuuacauuuac

SEQ ID NO: 1685263 - RNA, 19 nt, Artificial Sequence
  Description of Artificial Sequence: Synthetic oligonucleotide
  Sense strand starting at position 3707 of SEQ ID NO: 1561615
auguaaguuagugaauguu

SEQ ID NO: 1685264 - RNA, 19 nt, Artificial Sequence
  Description of Artificial Sequence: Synthetic oligonucleotide
  Antisense strand to SEQ ID NO: 1685263
aacauucacuaacuuacau

SEQ ID NO: 1685265 - RNA, 19 nt, Artificial Sequence
  Description of Artificial Sequence: Synthetic oligonucleotide
  Sense strand starting at position 3730 of SEQ ID NO: 1561615
uaagaauugugucuaugua

SEQ ID NO: 1685266 - RNA, 19 nt, Artificial Sequence
  Description of Artificial Sequence: Synthetic oligonucleotide
  Antisense strand to SEQ ID NO: 1685265
uacauagacacaauucuua

SEQ ID NO: 1685267 - RNA, 19 nt, Artificial Sequence
  Description of Artificial Sequence: Synthetic oligonucleotide
  Sense strand starting at position 3731 of SEQ ID NO: 1561615
aagaauugugucuauguau

SEQ ID NO: 1685268 - RNA, 19 nt, Artificial Sequence
  Description of Artificial Sequence: Synthetic oligonucleotide
  Antisense strand to SEQ ID NO: 1685267
auacauagacacaauucuu

SEQ ID NO: 1685269 - RNA, 19 nt, Artificial Sequence
  Description of Artificial Sequence: Synthetic oligonucleotide
  Sense strand starting at position 301 of SEQ ID NO: 1561616
aucaaagagcuuugcuauu

SEQ ID NO: 1685270 - RNA, 19 nt, Artificial Sequence
  Description of Artificial Sequence: Synthetic oligonucleotide
  Antisense strand to SEQ ID NO: 1685269
aauagcaaagcucuuugau

SEQ ID NO: 1685271 - RNA, 19 nt, Artificial Sequence
  Description of Artificial Sequence: Synthetic oligonucleotide
  Sense strand starting at position 312 of SEQ ID NO: 1561616
uugcuauugccauaggauu

SEQ ID NO: 1685272 - RNA, 19 nt, Artificial Sequence
  Description of Artificial Sequence: Synthetic oligonucleotide
  Antisense strand to SEQ ID NO: 1685271
aauccuauggcaauagcaa

SEQ ID NO: 1685273 - RNA, 19 nt, Artificial Sequence
  Description of Artificial Sequence: Synthetic oligonucleotide
  Sense strand starting at position 430 of SEQ ID NO: 1561616
uccaguaagacgugaagga

SEQ ID NO: 1685274 - RNA, 19 nt, Artificial Sequence
  Description of Artificial Sequence: Synthetic oligonucleotide
  Antisense strand to SEQ ID NO: 1685273
uccuucacgucuuacugga

SEQ ID NO: 1685275 - RNA, 19 nt, Artificial Sequence
  Description of Artificial Sequence: Synthetic oligonucleotide
  Sense strand starting at position 1231 of SEQ ID NO: 1561616
auggcuuggccucgaguga

SEQ ID NO: 1685276 - RNA, 19 nt, Artificial Sequence
  Description of Artificial Sequence: Synthetic oligonucleotide
  Antisense strand to SEQ ID NO: 1685275
ucacucgaggccaagccau

SEQ ID NO: 1685277 - RNA, 19 nt, Artificial Sequence
  Description of Artificial Sequence: Synthetic oligonucleotide
  Sense strand starting at position 1232 of SEQ ID NO: 1561616
uggcuuggccucgagugaa

SEQ ID NO: 1685278 - RNA, 19 nt, Artificial Sequence
  Description of Artificial Sequence: Synthetic oligonucleotide
  Antisense strand to SEQ ID NO: 1685277
uucacucgaggccaagcca

SEQ ID NO: 1685279 - RNA, 19 nt, Artificial Sequence
  Description of Artificial Sequence: Synthetic oligonucleotide
  Sense strand starting at position 1418 of SEQ ID NO: 1561616
guacaaagcugcuuccauu

SEQ ID NO: 1685280 - RNA, 19 nt, Artificial Sequence
  Description of Artificial Sequence: Synthetic oligonucleotide
  Antisense strand to SEQ ID NO: 1685279
aauggaagcagcuuuguac

SEQ ID NO: 1685281 - RNA, 19 nt, Artificial Sequence
  Description of Artificial Sequence: Synthetic oligonucleotide
  Sense strand starting at position 1474 of SEQ ID NO: 1561616
ugccuauccggcguagaca

SEQ ID NO: 1685282 - RNA, 19 nt, Artificial Sequence
  Description of Artificial Sequence: Synthetic oligonucleotide
  Antisense strand to SEQ ID NO: 1685281
ugucuacgccggauaggca

SEQ ID NO: 1685283 - RNA, 19 nt, Artificial Sequence
  Description of Artificial Sequence: Synthetic oligonucleotide
  Sense strand starting at position 1475 of SEQ ID NO: 1561616
gccuauccggcguagacau

SEQ ID NO: 1685284 - RNA, 19 nt, Artificial Sequence
  Description of Artificial Sequence: Synthetic oligonucleotide
  Antisense strand to SEQ ID NO: 1685283
augucuacgccggauaggc

SEQ ID NO: 1685285 - RNA, 19 nt, Artificial Sequence
  Description of Artificial Sequence: Synthetic oligonucleotide
  Sense strand starting at position 1488 of SEQ ID NO: 1561616
agacaucgggccugaucau

SEQ ID NO: 1685286 - RNA, 19 nt, Artificial Sequence
  Description of Artificial Sequence: Synthetic oligonucleotide
  Antisense strand to SEQ ID NO: 1685285
augaucaggcccgaugucu

SEQ ID NO: 1685287 - RNA, 19 nt, Artificial Sequence
  Description of Artificial Sequence: Synthetic oligonucleotide
  Sense strand starting at position 1489 of SEQ ID NO: 1561616
gacaucgggccugaucaua

SEQ ID NO: 1685288 - RNA, 19 nt, Artificial Sequence
  Description of Artificial Sequence: Synthetic oligonucleotide
  Antisense strand to SEQ ID NO: 1685287
uaugaucaggcccgauguc

SEQ ID NO: 1685289 - RNA, 19 nt, Artificial Sequence
  Description of Artificial Sequence: Synthetic oligonucleotide
  Sense strand starting at position 1676 of SEQ ID NO: 1561616
cugauuagcccgcaagcaa

SEQ ID NO: 1685290 - RNA, 19 nt, Artificial Sequence
  Description of Artificial Sequence: Synthetic oligonucleotide
  Antisense strand to SEQ ID NO: 1685289
uugcuugcgggcuaaucag

SEQ ID NO: 1685291 - RNA, 19 nt, Artificial Sequence
  Description of Artificial Sequence: Synthetic oligonucleotide
  Sense strand starting at position 1836 of SEQ ID NO: 1561616
ucacuuugggcuugucgaa

SEQ ID NO: 1685292 - RNA, 19 nt, Artificial Sequence
  Description of Artificial Sequence: Synthetic oligonucleotide
  Antisense strand to SEQ ID NO: 1685291
uucgacaagcccaaaguga

SEQ ID NO: 1685293 - RNA, 19 nt, Artificial Sequence
  Description of Artificial Sequence: Synthetic oligonucleotide
  Sense strand starting at position 2084 of SEQ ID NO: 1561616
cgcgcauuuccuggaauuc

SEQ ID NO: 1685294 - RNA, 19 nt, Artificial Sequence
  Description of Artificial Sequence: Synthetic oligonucleotide
  Antisense strand to SEQ ID NO: 1685293
gaauuccaggaaaugcgcg

SEQ ID NO: 1685295 - RNA, 19 nt, Artificial Sequence
  Description of Artificial Sequence: Synthetic oligonucleotide
  Sense strand starting at position 2085 of SEQ ID NO: 1561616
gcgcauuuccuggaauucu

SEQ ID NO: 1685296 - RNA, 19 nt, Artificial Sequence
  Description of Artificial Sequence: Synthetic oligonucleotide
  Antisense strand to SEQ ID NO: 1685295
agaauuccaggaaaugcgc

SEQ ID NO: 1685297 - RNA, 19 nt, Artificial Sequence
  Description of Artificial Sequence: Synthetic oligonucleotide
  Sense strand starting at position 2318 of SEQ ID NO: 1561616
gcgugccuuccaccggaua

SEQ ID NO: 1685298 - RNA, 19 nt, Artificial Sequence
  Description of Artificial Sequence: Synthetic oligonucleotide
  Antisense strand to SEQ ID NO: 1685297
uauccgguggaaggcacgc

SEQ ID NO: 1685299 - RNA, 19 nt, Artificial Sequence
  Description of Artificial Sequence: Synthetic oligonucleotide
  Sense strand starting at position 2320 of SEQ ID NO: 1561616
gugccuuccaccggauaga

SEQ ID NO: 1685300 - RNA, 19 nt, Artificial Sequence
  Description of Artificial Sequence: Synthetic oligonucleotide
  Antisense strand to SEQ ID NO: 1685299
ucuauccgguggaaggcac

SEQ ID NO: 1685301 - RNA, 19 nt, Artificial Sequence
  Description of Artificial Sequence: Synthetic oligonucleotide
  Sense strand starting at position 2361 of SEQ ID NO: 1561616
acaccauaauuguauaguu

SEQ ID NO: 1685302 - RNA, 19 nt, Artificial Sequence
  Description of Artificial Sequence: Synthetic oligonucleotide
  Antisense strand to SEQ ID NO: 1685301
aacuauacaauuauggugu

SEQ ID NO: 1685303 - RNA, 19 nt, Artificial Sequence
  Description of Artificial Sequence: Synthetic oligonucleotide
  Sense strand starting at position 2453 of SEQ ID NO: 1561616
gaggacauucuacgugaga

SEQ ID NO: 1685304 - RNA, 19 nt, Artificial Sequence
  Description of Artificial Sequence: Synthetic oligonucleotide
  Antisense strand to SEQ ID NO: 1685303
ucucacguagaauguccuc

SEQ ID NO: 1685305 - RNA, 19 nt, Artificial Sequence
  Description of Artificial Sequence: Synthetic oligonucleotide
  Sense strand starting at position 2454 of SEQ ID NO: 1561616
aggacauucuacgugagag

SEQ ID NO: 1685306 - RNA, 19 nt, Artificial Sequence
  Description of Artificial Sequence: Synthetic oligonucleotide
  Antisense strand to SEQ ID NO: 1685305
cucucacguagaauguccu

SEQ ID NO: 1685307 - RNA, 19 nt, Artificial Sequence
  Description of Artificial Sequence: Synthetic oligonucleotide
  Sense strand starting at position 2455 of SEQ ID NO: 1561616
ggacauucuacgugagaga

SEQ ID NO: 1685308 - RNA, 19 nt, Artificial Sequence
  Description of Artificial Sequence: Synthetic oligonucleotide
  Antisense strand to SEQ ID NO: 1685307
ucucucacguagaaugucc

SEQ ID NO: 1685309 - RNA, 19 nt, Artificial Sequence
  Description of Artificial Sequence: Synthetic oligonucleotide
  Sense strand starting at position 2589 of SEQ ID NO: 1561616
gagaccugugcagaauguu

SEQ ID NO: 1685310 - RNA, 19 nt, Artificial Sequence
  Description of Artificial Sequence: Synthetic oligonucleotide
  Antisense strand to SEQ ID NO: 1685309
aacauucugcacaggucuc

SEQ ID NO: 1685311 - RNA, 19 nt, Artificial Sequence
  Description of Artificial Sequence: Synthetic oligonucleotide
  Sense strand starting at position 2675 of SEQ ID NO: 1561616
gggcaaauaaaccggaaua

SEQ ID NO: 1685312 - RNA, 19 nt, Artificial Sequence
  Description of Artificial Sequence: Synthetic oligonucleotide
  Antisense strand to SEQ ID NO: 1685311
uauuccgguuuauuugccc

SEQ ID NO: 1685313 - RNA, 19 nt, Artificial Sequence
  Description of Artificial Sequence: Synthetic oligonucleotide
  Sense strand starting at position 2852 of SEQ ID NO: 1561616
aaguauguauguuuagaca

SEQ ID NO: 1685314 - RNA, 19 nt, Artificial Sequence
  Description of Artificial Sequence: Synthetic oligonucleotide
  Antisense strand to SEQ ID NO: 1685313
ugucuaaacauacauacuu

SEQ ID NO: 1685315 - RNA, 19 nt, Artificial Sequence
  Description of Artificial Sequence: Synthetic oligonucleotide
  Sense strand starting at position 2867 of SEQ ID NO: 1561616
gacacaugcaucgguggaa

SEQ ID NO: 1685316 - RNA, 19 nt, Artificial Sequence
  Description of Artificial Sequence: Synthetic oligonucleotide
  Antisense strand to SEQ ID NO: 1685315
uuccaccgaugcauguguc

SEQ ID NO: 1685317 - RNA, 19 nt, Artificial Sequence
  Description of Artificial Sequence: Synthetic oligonucleotide
  Sense strand starting at position 2868 of SEQ ID NO: 1561616
acacaugcaucgguggaaa

SEQ ID NO: 1685318 - RNA, 19 nt, Artificial Sequence
  Description of Artificial Sequence: Synthetic oligonucleotide
  Antisense strand to SEQ ID NO: 1685317
uuuccaccgaugcaugugu

SEQ ID NO: 1685319 - RNA, 19 nt, Artificial Sequence
  Description of Artificial Sequence: Synthetic oligonucleotide
  Sense strand starting at position 2909 of SEQ ID NO: 1561616
gagcauagauacgagaaga

SEQ ID NO: 1685320 - RNA, 19 nt, Artificial Sequence
  Description of Artificial Sequence: Synthetic oligonucleotide
  Antisense strand to SEQ ID NO: 1685319
ucuucucguaucuaugcuc

SEQ ID NO: 1685321 - RNA, 19 nt, Artificial Sequence
  Description of Artificial Sequence: Synthetic oligonucleotide
  Sense strand starting at position 2917 of SEQ ID NO: 1561616
auacgagaagagugguuau

SEQ ID NO: 1685322 - RNA, 19 nt, Artificial Sequence
  Description of Artificial Sequence: Synthetic oligonucleotide
  Antisense strand to SEQ ID NO: 1685321
auaaccacucuucucguau

SEQ ID NO: 1685323 - RNA, 19 nt, Artificial Sequence
  Description of Artificial Sequence: Synthetic oligonucleotide
  Sense strand starting at position 2920 of SEQ ID NO: 1561616
cgagaagagugguuaucuc

SEQ ID NO: 1685324 - RNA, 19 nt, Artificial Sequence
  Description of Artificial Sequence: Synthetic oligonucleotide
  Antisense strand to SEQ ID NO: 1685323
gagauaaccacucuucucg

SEQ ID NO: 1685325 - RNA, 19 nt, Artificial Sequence
  Description of Artificial Sequence: Synthetic oligonucleotide
  Sense strand starting at position 2930 of SEQ ID NO: 1561616
gguuaucucaggugaaagg

SEQ ID NO: 1685326 - RNA, 19 nt, Artificial Sequence
  Description of Artificial Sequence: Synthetic oligonucleotide
  Antisense strand to SEQ ID NO: 1685325
ccuuucaccugagauaacc

SEQ ID NO: 1685327 - RNA, 19 nt, Artificial Sequence
  Description of Artificial Sequence: Synthetic oligonucleotide
  Sense strand starting at position 3513 of SEQ ID NO: 1561616
uucccaaggcgugauuaca

SEQ ID NO: 1685328 - RNA, 19 nt, Artificial Sequence
  Description of Artificial Sequence: Synthetic oligonucleotide
  Antisense strand to SEQ ID NO: 1685327
uguaaucacgccuugggaa

SEQ ID NO: 1685329 - RNA, 19 nt, Artificial Sequence
  Description of Artificial Sequence: Synthetic oligonucleotide
  Sense strand starting at position 3559 of SEQ ID NO: 1561616
acagguuauugauaauguu

SEQ ID NO: 1685330 - RNA, 19 nt, Artificial Sequence
  Description of Artificial Sequence: Synthetic oligonucleotide
  Antisense strand to SEQ ID NO: 1685329
aacauuaucaauaaccugu

SEQ ID NO: 1685331 - RNA, 19 nt, Artificial Sequence
  Description of Artificial Sequence: Synthetic oligonucleotide
  Sense strand starting at position 3567 of SEQ ID NO: 1561616
uugauaauguuccaguacu

SEQ ID NO: 1685332 - RNA, 19 nt, Artificial Sequence
  Description of Artificial Sequence: Synthetic oligonucleotide
  Antisense strand to SEQ ID NO: 1685331
aguacuggaacauuaucaa

SEQ ID NO: 1685333 - RNA, 19 nt, Artificial Sequence
  Description of Artificial Sequence: Synthetic oligonucleotide
  Sense strand starting at position 3588 of SEQ ID NO: 1561616
gguggaugguagcuucauu

SEQ ID NO: 1685334 - RNA, 19 nt, Artificial Sequence
  Description of Artificial Sequence: Synthetic oligonucleotide
  Antisense strand to SEQ ID NO: 1685333
aaugaagcuaccauccacc

SEQ ID NO: 1685335 - RNA, 19 nt, Artificial Sequence
  Description of Artificial Sequence: Synthetic oligonucleotide
  Sense strand starting at position 3681 of SEQ ID NO: 1561616
gcuagaaggucugauggga

SEQ ID NO: 1685336 - RNA, 19 nt, Artificial Sequence
  Description of Artificial Sequence: Synthetic oligonucleotide
  Antisense strand to SEQ ID NO: 1685335
ucccaucagaccuucuagc

SEQ ID NO: 1685337 - RNA, 19 nt, Artificial Sequence
  Description of Artificial Sequence: Synthetic oligonucleotide
  Sense strand starting at position 3726 of SEQ ID NO: 1561616
ccagcgauggugugggauu

SEQ ID NO: 1685338 - RNA, 19 nt, Artificial Sequence
  Description of Artificial Sequence: Synthetic oligonucleotide
  Antisense strand to SEQ ID NO: 1685337
aaucccacaccaucgcugg

SEQ ID NO: 1685339 - RNA, 19 nt, Artificial Sequence
  Description of Artificial Sequence: Synthetic oligonucleotide
  Sense strand starting at position 3737 of SEQ ID NO: 1561616
gugggauuccuaggaaguc

SEQ ID NO: 1685340 - RNA, 19 nt, Artificial Sequence
  Description of Artificial Sequence: Synthetic oligonucleotide
  Antisense strand to SEQ ID NO: 1685339
gacuuccuaggaaucccac

SEQ ID NO: 1685341 - RNA, 19 nt, Artificial Sequence
  Description of Artificial Sequence: Synthetic oligonucleotide
  Sense strand starting at position 3738 of SEQ ID NO: 1561616
ugggauuccuaggaaguca

SEQ ID NO: 1685342 - RNA, 19 nt, Artificial Sequence
  Description of Artificial Sequence: Synthetic oligonucleotide
  Antisense strand to SEQ ID NO: 1685341
ugacuuccuaggaauccca

SEQ ID NO: 1685343 - RNA, 19 nt, Artificial Sequence
  Description of Artificial Sequence: Synthetic oligonucleotide
  Sense strand starting at position 3749 of SEQ ID NO: 1561616
ggaagucaguggaguguuu

SEQ ID NO: 1685344 - RNA, 19 nt, Artificial Sequence
  Description of Artificial Sequence: Synthetic oligonucleotide
  Antisense strand to SEQ ID NO: 1685343
aaacacuccacugacuucc

SEQ ID NO: 1685345 - RNA, 19 nt, Artificial Sequence
  Description of Artificial Sequence: Synthetic oligonucleotide
  Sense strand starting at position 3827 of SEQ ID NO: 1561616
aagugugauccagggauca

SEQ ID NO: 1685346 - RNA, 19 nt, Artificial Sequence
  Description of Artificial Sequence: Synthetic oligonucleotide
  Antisense strand to SEQ ID NO: 1685345
ugaucccuggaucacacuu

SEQ ID NO: 1685347 - RNA, 19 nt, Artificial Sequence
  Description of Artificial Sequence: Synthetic oligonucleotide
  Sense strand starting at position 3829 of SEQ ID NO: 1561616
gugugauccagggaucauc

SEQ ID NO: 1685348 - RNA, 19 nt, Artificial Sequence
  Description of Artificial Sequence: Synthetic oligonucleotide
  Antisense strand to SEQ ID NO: 1685347
gaugaucccuggaucacac

SEQ ID NO: 1685349 - RNA, 19 nt, Artificial Sequence
  Description of Artificial Sequence: Synthetic oligonucleotide
  Sense strand starting at position 403 of SEQ ID NO: 1561617
uugauuggaugagugaauu

SEQ ID NO: 1685350 - RNA, 19 nt, Artificial Sequence
  Description of Artificial Sequence: Synthetic oligonucleotide
  Antisense strand to SEQ ID NO: 1685349
aauucacucauccaaucaa

SEQ ID NO: 1685351 - RNA, 19 nt, Artificial Sequence
  Description of Artificial Sequence: Synthetic oligonucleotide
  Sense strand starting at position 409 of SEQ ID NO: 1561617
ggaugagugaauugccauc

SEQ ID NO: 1685352 - RNA, 19 nt, Artificial Sequence
  Description of Artificial Sequence: Synthetic oligonucleotide
  Antisense strand to SEQ ID NO: 1685351
gauggcaauucacucaucc

SEQ ID NO: 1685353 - RNA, 19 nt, Artificial Sequence
  Description of Artificial Sequence: Synthetic oligonucleotide
  Sense strand starting at position 527 of SEQ ID NO: 1561617
ggaggucucucagcccaga

SEQ ID NO: 1685354 - RNA, 19 nt, Artificial Sequence
  Description of Artificial Sequence: Synthetic oligonucleotide
  Antisense strand to SEQ ID NO: 1685353
ucugggcugagagaccucc

SEQ ID NO: 1685355 - RNA, 19 nt, Artificial Sequence
  Description of Artificial Sequence: Synthetic oligonucleotide
  Sense strand starting at position 545 of SEQ ID NO: 1561617
agagcacuuaacugagagu

SEQ ID NO: 1685356 - RNA, 19 nt, Artificial Sequence
  Description of Artificial Sequence: Synthetic oligonucleotide
  Antisense strand to SEQ ID NO: 1685355
acucucaguuaagugcucu

SEQ ID NO: 1685357 - RNA, 19 nt, Artificial Sequence
  Description of Artificial Sequence: Synthetic oligonucleotide
  Sense strand starting at position 548 of SEQ ID NO: 1561617
gcacuuaacugagaguaga

SEQ ID NO: 1685358 - RNA, 19 nt, Artificial Sequence
  Description of Artificial Sequence: Synthetic oligonucleotide
  Antisense strand to SEQ ID NO: 1685357
ucuacucucaguuaagugc

SEQ ID NO: 1685359 - RNA, 19 nt, Artificial Sequence
  Description of Artificial Sequence: Synthetic oligonucleotide
  Sense strand starting at position 1145 of SEQ ID NO: 1561617
gcagucuucccagagcacu

SEQ ID NO: 1685360 - RNA, 19 nt, Artificial Sequence
  Description of Artificial Sequence: Synthetic oligonucleotide
  Antisense strand to SEQ ID NO: 1685359
agugcucugggaagacugc

SEQ ID NO: 1685361 - RNA, 19 nt, Artificial Sequence
  Description of Artificial Sequence: Synthetic oligonucleotide
  Sense strand starting at position 1151 of SEQ ID NO: 1561617
uucccagagcacugcuaaa

SEQ ID NO: 1685362 - RNA, 19 nt, Artificial Sequence
  Description of Artificial Sequence: Synthetic oligonucleotide
  Antisense strand to SEQ ID NO: 1685361
uuuagcagugcucugggaa

SEQ ID NO: 1685363 - RNA, 19 nt, Artificial Sequence
  Description of Artificial Sequence: Synthetic oligonucleotide
  Sense strand starting at position 1172 of SEQ ID NO: 1561617
gacaccuucuaucuggaga

SEQ ID NO: 1685364 - RNA, 19 nt, Artificial Sequence
  Description of Artificial Sequence: Synthetic oligonucleotide
  Antisense strand to SEQ ID NO: 1685363
ucuccagauagaagguguc

SEQ ID NO: 1685365 - RNA, 19 nt, Artificial Sequence
  Description of Artificial Sequence: Synthetic oligonucleotide
  Sense strand starting at position 1431 of SEQ ID NO: 1561617
gcugguugugagagcgaga

SEQ ID NO: 1685366 - RNA, 19 nt, Artificial Sequence
  Description of Artificial Sequence: Synthetic oligonucleotide
  Antisense strand to SEQ ID NO: 1685365
ucucgcucucacaaccagc

SEQ ID NO: 1685367 - RNA, 19 nt, Artificial Sequence
  Description of Artificial Sequence: Synthetic oligonucleotide
  Sense strand starting at position 2205 of SEQ ID NO: 1561617
gccucuacuccugagagga

SEQ ID NO: 1685368 - RNA, 19 nt, Artificial Sequence
  Description of Artificial Sequence: Synthetic oligonucleotide
  Antisense strand to SEQ ID NO: 1685367
uccucucaggaguagaggc

SEQ ID NO: 1685369 - RNA, 19 nt, Artificial Sequence
  Description of Artificial Sequence: Synthetic oligonucleotide
  Sense strand starting at position 2320 of SEQ ID NO: 1561617
gcgcgaucuuccguggucu

SEQ ID NO: 1685370 - RNA, 19 nt, Artificial Sequence
  Description of Artificial Sequence: Synthetic oligonucleotide
  Antisense strand to SEQ ID NO: 1685369
agaccacggaagaucgcgc

SEQ ID NO: 1685371 - RNA, 19 nt, Artificial Sequence
  Description of Artificial Sequence: Synthetic oligonucleotide
  Sense strand starting at position 2397 of SEQ ID NO: 1561617
ggagguugagucgggucau

SEQ ID NO: 1685372 - RNA, 19 nt, Artificial Sequence
  Description of Artificial Sequence: Synthetic oligonucleotide
  Antisense strand to SEQ ID NO: 1685371
augacccgacucaaccucc

SEQ ID NO: 1685373 - RNA, 19 nt, Artificial Sequence
  Description of Artificial Sequence: Synthetic oligonucleotide
  Sense strand starting at position 2478 of SEQ ID NO: 1561617
gggcuucauugcugggcaa

SEQ ID NO: 1685374 - RNA, 19 nt, Artificial Sequence
  Description of Artificial Sequence: Synthetic oligonucleotide
  Antisense strand to SEQ ID NO: 1685373
uugcccagcaaugaagccc

SEQ ID NO: 1685375 - RNA, 19 nt, Artificial Sequence
  Description of Artificial Sequence: Synthetic oligonucleotide
  Sense strand starting at position 2634 of SEQ ID NO: 1561617
uuuccuacucggugcaaau

SEQ ID NO: 1685376 - RNA, 19 nt, Artificial Sequence
  Description of Artificial Sequence: Synthetic oligonucleotide
  Antisense strand to SEQ ID NO: 1685375
auuugcaccgaguaggaaa

SEQ ID NO: 1685377 - RNA, 19 nt, Artificial Sequence
  Description of Artificial Sequence: Synthetic oligonucleotide
  Sense strand starting at position 2644 of SEQ ID NO: 1561617
ggugcaaauuuggaugaga

SEQ ID NO: 1685378 - RNA, 19 nt, Artificial Sequence
  Description of Artificial Sequence: Synthetic oligonucleotide
  Antisense strand to SEQ ID NO: 1685377
ucucauccaaauuugcacc

SEQ ID NO: 1685379 - RNA, 19 nt, Artificial Sequence
  Description of Artificial Sequence: Synthetic oligonucleotide
  Sense strand starting at position 2649 of SEQ ID NO: 1561617
aaauuuggaugagauguua

SEQ ID NO: 1685380 - RNA, 19 nt, Artificial Sequence
  Description of Artificial Sequence: Synthetic oligonucleotide
  Antisense strand to SEQ ID NO: 1685379
uaacaucucauccaaauuu

SEQ ID NO: 1685381 - RNA, 19 nt, Artificial Sequence
  Description of Artificial Sequence: Synthetic oligonucleotide
  Sense strand starting at position 3343 of SEQ ID NO: 1561617
uaauuugguuagugaaagu

SEQ ID NO: 1685382 - RNA, 19 nt, Artificial Sequence
  Description of Artificial Sequence: Synthetic oligonucleotide
  Antisense strand to SEQ ID NO: 1685381
acuuucacuaaccaaauua

SEQ ID NO: 1685383 - RNA, 19 nt, Artificial Sequence
  Description of Artificial Sequence: Synthetic oligonucleotide
  Sense strand starting at position 3352 of SEQ ID NO: 1561617
uagugaaaguucgagcagu

SEQ ID NO: 1685384 - RNA, 19 nt, Artificial Sequence
  Description of Artificial Sequence: Synthetic oligonucleotide
  Antisense strand to SEQ ID NO: 1685383
acugcucgaacuuucacua

SEQ ID NO: 1685385 - RNA, 19 nt, Artificial Sequence
  Description of Artificial Sequence: Synthetic oligonucleotide
  Sense strand starting at position 3353 of SEQ ID NO: 1561617
agugaaaguucgagcagug

SEQ ID NO: 1685386 - RNA, 19 nt, Artificial Sequence
  Description of Artificial Sequence: Synthetic oligonucleotide
  Antisense strand to SEQ ID NO: 1685385
cacugcucgaacuuucacu

SEQ ID NO: 1685387 - RNA, 19 nt, Artificial Sequence
  Description of Artificial Sequence: Synthetic oligonucleotide
  Sense strand starting at position 3601 of SEQ ID NO: 1561617
cuuagauaucagugcguuu

SEQ ID NO: 1685388 - RNA, 19 nt, Artificial Sequence
  Description of Artificial Sequence: Synthetic oligonucleotide
  Antisense strand to SEQ ID NO: 1685387
aaacgcacugauaucuaag

SEQ ID NO: 1685389 - RNA, 19 nt, Artificial Sequence
  Description of Artificial Sequence: Synthetic oligonucleotide
  Sense strand starting at position 3603 of SEQ ID NO: 1561617
uagauaucagugcguuuag

SEQ ID NO: 1685390 - RNA, 19 nt, Artificial Sequence
  Description of Artificial Sequence: Synthetic oligonucleotide
  Antisense strand to SEQ ID NO: 1685389
cuaaacgcacugauaucua

SEQ ID NO: 1685391 - RNA, 19 nt, Artificial Sequence
  Description of Artificial Sequence: Synthetic oligonucleotide
  Sense strand starting at position 3604 of SEQ ID NO: 1561617
agauaucagugcguuuaga

SEQ ID NO: 1685392 - RNA, 19 nt, Artificial Sequence
  Description of Artificial Sequence: Synthetic oligonucleotide
  Antisense strand to SEQ ID NO: 1685391
ucuaaacgcacugauaucu

SEQ ID NO: 1685393 - RNA, 19 nt, Artificial Sequence
  Description of Artificial Sequence: Synthetic oligonucleotide
  Sense strand starting at position 3623 of SEQ ID NO: 1561617
ggguccuuguuguucuuau

SEQ ID NO: 1685394 - RNA, 19 nt, Artificial Sequence
  Description of Artificial Sequence: Synthetic oligonucleotide
  Antisense strand to SEQ ID NO: 1685393
auaagaacaacaaggaccc

SEQ ID NO: 1685395 - RNA, 19 nt, Artificial Sequence
  Description of Artificial Sequence: Synthetic oligonucleotide
  Sense strand starting at position 3627 of SEQ ID NO: 1561617
ccuuguuguucuuaugauu

SEQ ID NO: 1685396 - RNA, 19 nt, Artificial Sequence
  Description of Artificial Sequence: Synthetic oligonucleotide
  Antisense strand to SEQ ID NO: 1685395
aaucauaagaacaacaagg

SEQ ID NO: 1685397 - RNA, 19 nt, Artificial Sequence
  Description of Artificial Sequence: Synthetic oligonucleotide
  Sense strand starting at position 3642 of SEQ ID NO: 1561617
gauuauuauuuagagacag

SEQ ID NO: 1685398 - RNA, 19 nt, Artificial Sequence
  Description of Artificial Sequence: Synthetic oligonucleotide
  Antisense strand to SEQ ID NO: 1685397
cugucucuaaauaauaauc

SEQ ID NO: 1685399 - RNA, 19 nt, Artificial Sequence
  Description of Artificial Sequence: Synthetic oligonucleotide
  Sense strand starting at position 3 of SEQ ID NO: 1561618
uagcacaaggucugguaua

SEQ ID NO: 1685400 - RNA, 19 nt, Artificial Sequence
  Description of Artificial Sequence: Synthetic oligonucleotide
  Antisense strand to SEQ ID NO: 1685399
uauaccagaccuugugcua

SEQ ID NO: 1685401 - RNA, 19 nt, Artificial Sequence
  Description of Artificial Sequence: Synthetic oligonucleotide
  Sense strand starting at position 14 of SEQ ID NO: 1561618
cugguauauagucaguguu

SEQ ID NO: 1685402 - RNA, 19 nt, Artificial Sequence
  Description of Artificial Sequence: Synthetic oligonucleotide
  Antisense strand to SEQ ID NO: 1685401
aacacugacuauauaccag

SEQ ID NO: 1685403 - RNA, 19 nt, Artificial Sequence
  Description of Artificial Sequence: Synthetic oligonucleotide
  Sense strand starting at position 17 of SEQ ID NO: 1561618
guauauagucaguguucca

SEQ ID NO: 1685404 - RNA, 19 nt, Artificial Sequence
  Description of Artificial Sequence: Synthetic oligonucleotide
  Antisense strand to SEQ ID NO: 1685403
uggaacacugacuauauac

SEQ ID NO: 1685405 - RNA, 19 nt, Artificial Sequence
  Description of Artificial Sequence: Synthetic oligonucleotide
  Sense strand starting at position 512 of SEQ ID NO: 1561618
uggucuacccuaggacuau

SEQ ID NO: 1685406 - RNA, 19 nt, Artificial Sequence
  Description of Artificial Sequence: Synthetic oligonucleotide
  Antisense strand to SEQ ID NO: 1685405
auaguccuaggguagacca

SEQ ID NO: 1685407 - RNA, 19 nt, Artificial Sequence
  Description of Artificial Sequence: Synthetic oligonucleotide
  Sense strand starting at position 521 of SEQ ID NO: 1561618
cuaggacuaugaggagaau

SEQ ID NO: 1685408 - RNA, 19 nt, Artificial Sequence
  Description of Artificial Sequence: Synthetic oligonucleotide
  Antisense strand to SEQ ID NO: 1685407
auucuccucauaguccuag

SEQ ID NO: 1685409 - RNA, 19 nt, Artificial Sequence
  Description of Artificial Sequence: Synthetic oligonucleotide
  Sense strand starting at position 819 of SEQ ID NO: 1561618
cucugucugcuggaauaca

SEQ ID NO: 1685410 - RNA, 19 nt, Artificial Sequence
  Description of Artificial Sequence: Synthetic oligonucleotide
  Antisense strand to SEQ ID NO: 1685409
uguauuccagcagacagag

SEQ ID NO: 1685411 - RNA, 19 nt, Artificial Sequence
  Description of Artificial Sequence: Synthetic oligonucleotide
  Sense strand starting at position 1225 of SEQ ID NO: 1561618
ugcugaggucagggugaau

SEQ ID NO: 1685412 - RNA, 19 nt, Artificial Sequence
  Description of Artificial Sequence: Synthetic oligonucleotide
  Antisense strand to SEQ ID NO: 1685411
auucacccugaccucagca

SEQ ID NO: 1685413 - RNA, 19 nt, Artificial Sequence
  Description of Artificial Sequence: Synthetic oligonucleotide
  Sense strand starting at position 1276 of SEQ ID NO: 1561618
gcagccagauccuuucuga

SEQ ID NO: 1685414 - RNA, 19 nt, Artificial Sequence
  Description of Artificial Sequence: Synthetic oligonucleotide
  Antisense strand to SEQ ID NO: 1685413
ucagaaaggaucuggcugc

SEQ ID NO: 1685415 - RNA, 19 nt, Artificial Sequence
  Description of Artificial Sequence: Synthetic oligonucleotide
  Sense strand starting at position 1279 of SEQ ID NO: 1561618
gccagauccuuucugauac

SEQ ID NO: 1685416 - RNA, 19 nt, Artificial Sequence
  Description of Artificial Sequence: Synthetic oligonucleotide
  Antisense strand to SEQ ID NO: 1685415
guaucagaaaggaucuggc

SEQ ID NO: 1685417 - RNA, 19 nt, Artificial Sequence
  Description of Artificial Sequence: Synthetic oligonucleotide
  Sense strand starting at position 1316 of SEQ ID NO: 1561618
gugaguggucugcagguau

SEQ ID NO: 1685418 - RNA, 19 nt, Artificial Sequence
  Description of Artificial Sequence: Synthetic oligonucleotide
  Antisense strand to SEQ ID NO: 1685417
auaccugcagaccacucac

SEQ ID NO: 1685419 - RNA, 19 nt, Artificial Sequence
  Description of Artificial Sequence: Synthetic oligonucleotide
  Sense strand starting at position 1320 of SEQ ID NO: 1561618
guggucugcagguaucuga

SEQ ID NO: 1685420 - RNA, 19 nt, Artificial Sequence
  Description of Artificial Sequence: Synthetic oligonucleotide
  Antisense strand to SEQ ID NO: 1685419
ucagauaccugcagaccac

SEQ ID NO: 1685421 - RNA, 19 nt, Artificial Sequence
  Description of Artificial Sequence: Synthetic oligonucleotide
  Sense strand starting at position 1353 of SEQ ID NO: 1561618
ugcuguaucccaucgugca

SEQ ID NO: 1685422 - RNA, 19 nt, Artificial Sequence
  Description of Artificial Sequence: Synthetic oligonucleotide
  Antisense strand to SEQ ID NO: 1685421
ugcacgaugggauacagca

SEQ ID NO: 1685423 - RNA, 19 nt, Artificial Sequence
  Description of Artificial Sequence: Synthetic oligonucleotide
  Sense strand starting at position 1625 of SEQ ID NO: 1561618
ucucgaacucuagguuaag

SEQ ID NO: 1685424 - RNA, 19 nt, Artificial Sequence
  Description of Artificial Sequence: Synthetic oligonucleotide
  Antisense strand to SEQ ID NO: 1685423
cuuaaccuagaguucgaga

SEQ ID NO: 1685425 - RNA, 19 nt, Artificial Sequence
  Description of Artificial Sequence: Synthetic oligonucleotide
  Sense strand starting at position 1626 of SEQ ID NO: 1561618
cucgaacucuagguuaaga

SEQ ID NO: 1685426 - RNA, 19 nt, Artificial Sequence
  Description of Artificial Sequence: Synthetic oligonucleotide
  Antisense strand to SEQ ID NO: 1685425
ucuuaaccuagaguucgag

SEQ ID NO: 1685427 - RNA, 19 nt, Artificial Sequence
  Description of Artificial Sequence: Synthetic oligonucleotide
  Sense strand starting at position 1676 of SEQ ID NO: 1561618
uuaagaguugacugcuugu

SEQ ID NO: 1685428 - RNA, 19 nt, Artificial Sequence
  Description of Artificial Sequence: Synthetic oligonucleotide
  Antisense strand to SEQ ID NO: 1685427
acaagcagucaacucuuaa

SEQ ID NO: 1685429 - RNA, 19 nt, Artificial Sequence
  Description of Artificial Sequence: Synthetic oligonucleotide
  Sense strand starting at position 1679 of SEQ ID NO: 1561618
agaguugacugcuuguauc

SEQ ID NO: 1685430 - RNA, 19 nt, Artificial Sequence
  Description of Artificial Sequence: Synthetic oligonucleotide
  Antisense strand to SEQ ID NO: 1685429
gauacaagcagucaacucu

SEQ ID NO: 1685431 - RNA, 19 nt, Artificial Sequence
  Description of Artificial Sequence: Synthetic oligonucleotide
  Sense strand starting at position 1686 of SEQ ID NO: 1561618
acugcuuguaucuaagcga

SEQ ID NO: 1685432 - RNA, 19 nt, Artificial Sequence
  Description of Artificial Sequence: Synthetic oligonucleotide
  Antisense strand to SEQ ID NO: 1685431
ucgcuuagauacaagcagu

SEQ ID NO: 1685433 - RNA, 19 nt, Artificial Sequence
  Description of Artificial Sequence: Synthetic oligonucleotide
  Sense strand starting at position 1816 of SEQ ID NO: 1561618
gcucaccuuggcuaaguaa

SEQ ID NO: 1685434 - RNA, 19 nt, Artificial Sequence
  Description of Artificial Sequence: Synthetic oligonucleotide
  Antisense strand to SEQ ID NO: 1685433
uuacuuagccaaggugagc

SEQ ID NO: 1685435 - RNA, 19 nt, Artificial Sequence
  Description of Artificial Sequence: Synthetic oligonucleotide
  Sense strand starting at position 2042 of SEQ ID NO: 1561618
cugugacuaagcugugaca

SEQ ID NO: 1685436 - RNA, 19 nt, Artificial Sequence
  Description of Artificial Sequence: Synthetic oligonucleotide
  Antisense strand to SEQ ID NO: 1685435
ugucacagcuuagucacag

SEQ ID NO: 1685437 - RNA, 19 nt, Artificial Sequence
  Description of Artificial Sequence: Synthetic oligonucleotide
  Sense strand starting at position 2044 of SEQ ID NO: 1561618
gugacuaagcugugacaua

SEQ ID NO: 1685438 - RNA, 19 nt, Artificial Sequence
  Description of Artificial Sequence: Synthetic oligonucleotide
  Antisense strand to SEQ ID NO: 1685437
uaugucacagcuuagucac

SEQ ID NO: 1685439 - RNA, 19 nt, Artificial Sequence
  Description of Artificial Sequence: Synthetic oligonucleotide
  Sense strand starting at position 2118 of SEQ ID NO: 1561618
agcuguucuggaugaaagg

SEQ ID NO: 1685440 - RNA, 19 nt, Artificial Sequence
  Description of Artificial Sequence: Synthetic oligonucleotide
  Antisense strand to SEQ ID NO: 1685439
ccuuucauccagaacagcu

SEQ ID NO: 1685441 - RNA, 19 nt, Artificial Sequence
  Description of Artificial Sequence: Synthetic oligonucleotide
  Sense strand starting at position 2158 of SEQ ID NO: 1561618
cagacagucuggcugagaa

SEQ ID NO: 1685442 - RNA, 19 nt, Artificial Sequence
  Description of Artificial Sequence: Synthetic oligonucleotide
  Antisense strand to SEQ ID NO: 1685441
uucucagccagacugucug

SEQ ID NO: 1685443 - RNA, 19 nt, Artificial Sequence
  Description of Artificial Sequence: Synthetic oligonucleotide
  Sense strand starting at position 2160 of SEQ ID NO: 1561618
gacagucuggcugagaauu

SEQ ID NO: 1685444 - RNA, 19 nt, Artificial Sequence
  Description of Artificial Sequence: Synthetic oligonucleotide
  Antisense strand to SEQ ID NO: 1685443
aauucucagccagacuguc

SEQ ID NO: 1685445 - RNA, 19 nt, Artificial Sequence
  Description of Artificial Sequence: Synthetic oligonucleotide
  Sense strand starting at position 2208 of SEQ ID NO: 1561618
gcuugaaucucaguccagu

SEQ ID NO: 1685446 - RNA, 19 nt, Artificial Sequence
  Description of Artificial Sequence: Synthetic oligonucleotide
  Antisense strand to SEQ ID NO: 1685445
acuggacugagauucaagc

SEQ ID NO: 1685447 - RNA, 19 nt, Artificial Sequence
  Description of Artificial Sequence: Synthetic oligonucleotide
  Sense strand starting at position 2214 of SEQ ID NO: 1561618
aucucaguccaguagcuau

SEQ ID NO: 1685448 - RNA, 19 nt, Artificial Sequence
  Description of Artificial Sequence: Synthetic oligonucleotide
  Antisense strand to SEQ ID NO: 1685447
auagcuacuggacugagau

SEQ ID NO: 1685449 - RNA, 19 nt, Artificial Sequence
  Description of Artificial Sequence: Synthetic oligonucleotide
  Sense strand starting at position 2260 of SEQ ID NO: 1561618
uuucuuguaagauggagau

SEQ ID NO: 1685450 - RNA, 19 nt, Artificial Sequence
  Description of Artificial Sequence: Synthetic oligonucleotide
  Antisense strand to SEQ ID NO: 1685449
aucuccaucuuacaagaaa

SEQ ID NO: 1685451 - RNA, 19 nt, Artificial Sequence
  Description of Artificial Sequence: Synthetic oligonucleotide
  Sense strand starting at position 2273 of SEQ ID NO: 1561618
ggagauaauucuguuaagu

SEQ ID NO: 1685452 - RNA, 19 nt, Artificial Sequence
  Description of Artificial Sequence: Synthetic oligonucleotide
  Antisense strand to SEQ ID NO: 1685451
acuuaacagaauuaucucc

SEQ ID NO: 1685453 - RNA, 19 nt, Artificial Sequence
  Description of Artificial Sequence: Synthetic oligonucleotide
  Sense strand starting at position 2323 of SEQ ID NO: 1561618
aggaucgguguucauauau

SEQ ID NO: 1685454 - RNA, 19 nt, Artificial Sequence
  Description of Artificial Sequence: Synthetic oligonucleotide
  Antisense strand to SEQ ID NO: 1685453
auauaugaacaccgauccu

SEQ ID NO: 1685455 - RNA, 19 nt, Artificial Sequence
  Description of Artificial Sequence: Synthetic oligonucleotide
  Sense strand starting at position 2512 of SEQ ID NO: 1561618
aagugaaaugcagguccau

SEQ ID NO: 1685456 - RNA, 19 nt, Artificial Sequence
  Description of Artificial Sequence: Synthetic oligonucleotide
  Antisense strand to SEQ ID NO: 1685455
auggaccugcauuucacuu

SEQ ID NO: 1685457 - RNA, 19 nt, Artificial Sequence
  Description of Artificial Sequence: Synthetic oligonucleotide
  Sense strand starting at position 2571 of SEQ ID NO: 1561618
cuggauuucugugaaaucu

SEQ ID NO: 1685458 - RNA, 19 nt, Artificial Sequence
  Description of Artificial Sequence: Synthetic oligonucleotide
  Antisense strand to SEQ ID NO: 1685457
agauuucacagaaauccag

SEQ ID NO: 1685459 - RNA, 19 nt, Artificial Sequence
  Description of Artificial Sequence: Synthetic oligonucleotide
  Sense strand starting at position 2606 of SEQ ID NO: 1561618
cggaucagaccuugucaaa

SEQ ID NO: 1685460 - RNA, 19 nt, Artificial Sequence
  Description of Artificial Sequence: Synthetic oligonucleotide
  Antisense strand to SEQ ID NO: 1685459
uuugacaaggucugauccg

SEQ ID NO: 1685461 - RNA, 19 nt, Artificial Sequence
  Description of Artificial Sequence: Synthetic oligonucleotide
  Sense strand starting at position 2624 of SEQ ID NO: 1561618
agcacuguuggcuaaacaa

SEQ ID NO: 1685462 - RNA, 19 nt, Artificial Sequence
  Description of Artificial Sequence: Synthetic oligonucleotide
  Antisense strand to SEQ ID NO: 1685461
uuguuuagccaacagugcu

SEQ ID NO: 1685463 - RNA, 19 nt, Artificial Sequence
  Description of Artificial Sequence: Synthetic oligonucleotide
  Sense strand starting at position 2824 of SEQ ID NO: 1561618
guuccuuuaucuccugagu

SEQ ID NO: 1685464 - RNA, 19 nt, Artificial Sequence
  Description of Artificial Sequence: Synthetic oligonucleotide
  Antisense strand to SEQ ID NO: 1685463
acucaggagauaaaggaac

SEQ ID NO: 1685465 - RNA, 19 nt, Artificial Sequence
  Description of Artificial Sequence: Synthetic oligonucleotide
  Sense strand starting at position 2974 of SEQ ID NO: 1561618
gcugcaugguauucuccaa

SEQ ID NO: 1685466 - RNA, 19 nt, Artificial Sequence
  Description of Artificial Sequence: Synthetic oligonucleotide
  Antisense strand to SEQ ID NO: 1685465
uuggagaauaccaugcagc

SEQ ID NO: 1685467 - RNA, 19 nt, Artificial Sequence
  Description of Artificial Sequence: Synthetic oligonucleotide
  Sense strand starting at position 3146 of SEQ ID NO: 1561618
uagaaugauucugaugcag

SEQ ID NO: 1685468 - RNA, 19 nt, Artificial Sequence
  Description of Artificial Sequence: Synthetic oligonucleotide
  Antisense strand to SEQ ID NO: 1685467
cugcaucagaaucauucua

SEQ ID NO: 1685469 - RNA, 19 nt, Artificial Sequence
  Description of Artificial Sequence: Synthetic oligonucleotide
  Sense strand starting at position 3555 of SEQ ID NO: 1561618
gggugauucccuggaacug

SEQ ID NO: 1685470 - RNA, 19 nt, Artificial Sequence
  Description of Artificial Sequence: Synthetic oligonucleotide
  Antisense strand to SEQ ID NO: 1685469
caguuccagggaaucaccc

SEQ ID NO: 1685471 - RNA, 19 nt, Artificial Sequence
  Description of Artificial Sequence: Synthetic oligonucleotide
  Sense strand starting at position 3831 of SEQ ID NO: 1561618
ccacaaugguucucaugau

SEQ ID NO: 1685472 - RNA, 19 nt, Artificial Sequence
  Description of Artificial Sequence: Synthetic oligonucleotide
  Antisense strand to SEQ ID NO: 1685471
aucaugagaaccauugugg

SEQ ID NO: 1685473 - RNA, 19 nt, Artificial Sequence
  Description of Artificial Sequence: Synthetic oligonucleotide
  Sense strand starting at position 3835 of SEQ ID NO: 1561618
aaugguucucaugauuguu

SEQ ID NO: 1685474 - RNA, 19 nt, Artificial Sequence
  Description of Artificial Sequence: Synthetic oligonucleotide
  Antisense strand to SEQ ID NO: 1685473
aacaaucaugagaaccauu

SEQ ID NO: 1685475 - RNA, 19 nt, Artificial Sequence
  Description of Artificial Sequence: Synthetic oligonucleotide
  Sense strand starting at position 3870 of SEQ ID NO: 1561618
cuccacuaugugugaucca

SEQ ID NO: 1685476 - RNA, 19 nt, Artificial Sequence
  Description of Artificial Sequence: Synthetic oligonucleotide
  Antisense strand to SEQ ID NO: 1685475
uggaucacacauaguggag

SEQ ID NO: 1685477 - RNA, 19 nt, Artificial Sequence
  Description of Artificial Sequence: Synthetic oligonucleotide
  Sense strand starting at position 3877 of SEQ ID NO: 1561618
augugugauccaggccuga

SEQ ID NO: 1685478 - RNA, 19 nt, Artificial Sequence
  Description of Artificial Sequence: Synthetic oligonucleotide
  Antisense strand to SEQ ID NO: 1685477
ucaggccuggaucacacau

SEQ ID NO: 1685479 - RNA, 19 nt, Artificial Sequence
  Description of Artificial Sequence: Synthetic oligonucleotide
  Sense strand starting at position 2 of SEQ ID NO: 1561619
aacacuugaguucgacaau

SEQ ID NO: 1685480 - RNA, 19 nt, Artificial Sequence
  Description of Artificial Sequence: Synthetic oligonucleotide
  Antisense strand to SEQ ID NO: 1685479
auugucgaacucaaguguu

SEQ ID NO: 1685481 - RNA, 19 nt, Artificial Sequence
  Description of Artificial Sequence: Synthetic oligonucleotide
  Sense strand starting at position 8 of SEQ ID NO: 1561619
ugaguucgacaaugaagaa

SEQ ID NO: 1685482 - RNA, 19 nt, Artificial Sequence
  Description of Artificial Sequence: Synthetic oligonucleotide
  Antisense strand to SEQ ID NO: 1685481
uucuucauugucgaacuca

SEQ ID NO: 1685483 - RNA, 19 nt, Artificial Sequence
  Description of Artificial Sequence: Synthetic oligonucleotide
  Sense strand starting at position 34 of SEQ ID NO: 1561619
ugggcuugauguuuaccaa

SEQ ID NO: 1685484 - RNA, 19 nt, Artificial Sequence
  Description of Artificial Sequence: Synthetic oligonucleotide
  Antisense strand to SEQ ID NO: 1685483
uugguaaacaucaagccca

SEQ ID NO: 1685485 - RNA, 19 nt, Artificial Sequence
  Description of Artificial Sequence: Synthetic oligonucleotide
  Sense strand starting at position 35 of SEQ ID NO: 1561619
gggcuugauguuuaccaac

SEQ ID NO: 1685486 - RNA, 19 nt, Artificial Sequence
  Description of Artificial Sequence: Synthetic oligonucleotide
  Antisense strand to SEQ ID NO: 1685485
guugguaaacaucaagccc

SEQ ID NO: 1685487 - RNA, 19 nt, Artificial Sequence
  Description of Artificial Sequence: Synthetic oligonucleotide
  Sense strand starting at position 37 of SEQ ID NO: 1561619
gcuugauguuuaccaacaa

SEQ ID NO: 1685488 - RNA, 19 nt, Artificial Sequence
  Description of Artificial Sequence: Synthetic oligonucleotide
  Antisense strand to SEQ ID NO: 1685487
uuguugguaaacaucaagc

SEQ ID NO: 1685489 - RNA, 19 nt, Artificial Sequence
  Description of Artificial Sequence: Synthetic oligonucleotide
  Sense strand starting at position 49 of SEQ ID NO: 1561619
ccaacaaggcuuugcaaau

SEQ ID NO: 1685490 - RNA, 19 nt, Artificial Sequence
  Description of Artificial Sequence: Synthetic oligonucleotide
  Antisense strand to SEQ ID NO: 1685489
auuugcaaagccuuguugg

SEQ ID NO: 1685491 - RNA, 19 nt, Artificial Sequence
  Description of Artificial Sequence: Synthetic oligonucleotide
  Sense strand starting at position 122 of SEQ ID NO: 1561619
cucaaagaauuggaaagau

SEQ ID NO: 1685492 - RNA, 19 nt, Artificial Sequence
  Description of Artificial Sequence: Synthetic oligonucleotide
  Antisense strand to SEQ ID NO: 1685491
aucuuuccaauucuuugag

SEQ ID NO: 1685493 - RNA, 19 nt, Artificial Sequence
  Description of Artificial Sequence: Synthetic oligonucleotide
  Sense strand starting at position 300 of SEQ ID NO: 1561619
caaggugauucgucaagaa

SEQ ID NO: 1685494 - RNA, 19 nt, Artificial Sequence
  Description of Artificial Sequence: Synthetic oligonucleotide
  Antisense strand to SEQ ID NO: 1685493
uucuugacgaaucaccuug

SEQ ID NO: 1685495 - RNA, 19 nt, Artificial Sequence
  Description of Artificial Sequence: Synthetic oligonucleotide
  Sense strand starting at position 304 of SEQ ID NO: 1561619
gugauucgucaagaacaaa

SEQ ID NO: 1685496 - RNA, 19 nt, Artificial Sequence
  Description of Artificial Sequence: Synthetic oligonucleotide
  Antisense strand to SEQ ID NO: 1685495
uuuguucuugacgaaucac

SEQ ID NO: 1685497 - RNA, 19 nt, Artificial Sequence
  Description of Artificial Sequence: Synthetic oligonucleotide
  Sense strand starting at position 490 of SEQ ID NO: 1561619
uuucccauggucuguagaa

SEQ ID NO: 1685498 - RNA, 19 nt, Artificial Sequence
  Description of Artificial Sequence: Synthetic oligonucleotide
  Antisense strand to SEQ ID NO: 1685497
uucuacagaccaugggaaa

SEQ ID NO: 1685499 - RNA, 19 nt, Artificial Sequence
  Description of Artificial Sequence: Synthetic oligonucleotide
  Sense strand starting at position 708 of SEQ ID NO: 1561619
guaucaagcuauccaagag

SEQ ID NO: 1685500 - RNA, 19 nt, Artificial Sequence
  Description of Artificial Sequence: Synthetic oligonucleotide
  Antisense strand to SEQ ID NO: 1685499
cucuuggauagcuugauac

SEQ ID NO: 1685501 - RNA, 19 nt, Artificial Sequence
  Description of Artificial Sequence: Synthetic oligonucleotide
  Sense strand starting at position 877 of SEQ ID NO: 1561619
ggguuauggcaagaagugu

SEQ ID NO: 1685502 - RNA, 19 nt, Artificial Sequence
  Description of Artificial Sequence: Synthetic oligonucleotide
  Antisense strand to SEQ ID NO: 1685501
acacuucuugccauaaccc

SEQ ID NO: 1685503 - RNA, 19 nt, Artificial Sequence
  Description of Artificial Sequence: Synthetic oligonucleotide
  Sense strand starting at position 885 of SEQ ID NO: 1561619
gcaagaaguguccagagua

SEQ ID NO: 1685504 - RNA, 19 nt, Artificial Sequence
  Description of Artificial Sequence: Synthetic oligonucleotide
  Antisense strand to SEQ ID NO: 1685503
uacucuggacacuucuugc

SEQ ID NO: 1685505 - RNA, 19 nt, Artificial Sequence
  Description of Artificial Sequence: Synthetic oligonucleotide
  Sense strand starting at position 986 of SEQ ID NO: 1561619
cuuggucuugggcagaaga

SEQ ID NO: 1685506 - RNA, 19 nt, Artificial Sequence
  Description of Artificial Sequence: Synthetic oligonucleotide
  Antisense strand to SEQ ID NO: 1685505
ucuucugcccaagaccaag

SEQ ID NO: 1685507 - RNA, 19 nt, Artificial Sequence
  Description of Artificial Sequence: Synthetic oligonucleotide
  Sense strand starting at position 1202 of SEQ ID NO: 1561619
ggcucagaauguucgaaag

SEQ ID NO: 1685508 - RNA, 19 nt, Artificial Sequence
  Description of Artificial Sequence: Synthetic oligonucleotide
  Antisense strand to SEQ ID NO: 1685507
cuuucgaacauucugagcc

SEQ ID NO: 1685509 - RNA, 19 nt, Artificial Sequence
  Description of Artificial Sequence: Synthetic oligonucleotide
  Sense strand starting at position 1227 of SEQ ID NO: 1561619
ugaccaggcagcugagauu

SEQ ID NO: 1685510 - RNA, 19 nt, Artificial Sequence
  Description of Artificial Sequence: Synthetic oligonucleotide
  Antisense strand to SEQ ID NO: 1685509
aaucucagcugccugguca

SEQ ID NO: 1685511 - RNA, 19 nt, Artificial Sequence
  Description of Artificial Sequence: Synthetic oligonucleotide
  Sense strand starting at position 1262 of SEQ ID NO: 1561619
ggugaacuguggucaggau

SEQ ID NO: 1685512 - RNA, 19 nt, Artificial Sequence
  Description of Artificial Sequence: Synthetic oligonucleotide
  Antisense strand to SEQ ID NO: 1685511
auccugaccacaguucacc

SEQ ID NO: 1685513 - RNA, 19 nt, Artificial Sequence
  Description of Artificial Sequence: Synthetic oligonucleotide
  Sense strand starting at position 1263 of SEQ ID NO: 1561619
gugaacuguggucaggaua

SEQ ID NO: 1685514 - RNA, 19 nt, Artificial Sequence
  Description of Artificial Sequence: Synthetic oligonucleotide
  Antisense strand to SEQ ID NO: 1685513
uauccugaccacaguucac

SEQ ID NO: 1685515 - RNA, 19 nt, Artificial Sequence
  Description of Artificial Sequence: Synthetic oligonucleotide
  Sense strand starting at position 1475 of SEQ ID NO: 1561619
gggauuaguuccaggaugg

SEQ ID NO: 1685516 - RNA, 19 nt, Artificial Sequence
  Description of Artificial Sequence: Synthetic oligonucleotide
  Antisense strand to SEQ ID NO: 1685515
ccauccuggaacuaauccc

SEQ ID NO: 1685517 - RNA, 19 nt, Artificial Sequence
  Description of Artificial Sequence: Synthetic oligonucleotide
  Sense strand starting at position 2275 of SEQ ID NO: 1561619
gggaguucagcucauggau

SEQ ID NO: 1685518 - RNA, 19 nt, Artificial Sequence
  Description of Artificial Sequence: Synthetic oligonucleotide
  Antisense strand to SEQ ID NO: 1685517
auccaugagcugaacuccc

SEQ ID NO: 1685519 - RNA, 19 nt, Artificial Sequence
  Description of Artificial Sequence: Synthetic oligonucleotide
  Sense strand starting at position 2482 of SEQ ID NO: 1561619
aggacucauuguccagcua

SEQ ID NO: 1685520 - RNA, 19 nt, Artificial Sequence
  Description of Artificial Sequence: Synthetic oligonucleotide
  Antisense strand to SEQ ID NO: 1685519
uagcuggacaaugaguccu

SEQ ID NO: 1685521 - RNA, 19 nt, Artificial Sequence
  Description of Artificial Sequence: Synthetic oligonucleotide
  Sense strand starting at position 2483 of SEQ ID NO: 1561619
ggacucauuguccagcuaa

SEQ ID NO: 1685522 - RNA, 19 nt, Artificial Sequence
  Description of Artificial Sequence: Synthetic oligonucleotide
  Antisense strand to SEQ ID NO: 1685521
uuagcuggacaaugagucc

SEQ ID NO: 1685523 - RNA, 19 nt, Artificial Sequence
  Description of Artificial Sequence: Synthetic oligonucleotide
  Sense strand starting at position 2669 of SEQ ID NO: 1561619
gcgagaaccaggcggauuu

SEQ ID NO: 1685524 - RNA, 19 nt, Artificial Sequence
  Description of Artificial Sequence: Synthetic oligonucleotide
  Antisense strand to SEQ ID NO: 1685523
aaauccgccugguucucgc

SEQ ID NO: 1685525 - RNA, 19 nt, Artificial Sequence
  Description of Artificial Sequence: Synthetic oligonucleotide
  Sense strand starting at position 2937 of SEQ ID NO: 1561619
gcgcuuccacggcugagaa

SEQ ID NO: 1685526 - RNA, 19 nt, Artificial Sequence
  Description of Artificial Sequence: Synthetic oligonucleotide
  Antisense strand to SEQ ID NO: 1685525
uucucagccguggaagcgc

SEQ ID NO: 1685527 - RNA, 19 nt, Artificial Sequence
  Description of Artificial Sequence: Synthetic oligonucleotide
  Sense strand starting at position 3041 of SEQ ID NO: 1561619
agcgacuugagaugagaca

SEQ ID NO: 1685528 - RNA, 19 nt, Artificial Sequence
  Description of Artificial Sequence: Synthetic oligonucleotide
  Antisense strand to SEQ ID NO: 1685527
ugucucaucucaagucgcu

SEQ ID NO: 1685529 - RNA, 19 nt, Artificial Sequence
  Description of Artificial Sequence: Synthetic oligonucleotide
  Sense strand starting at position 3131 of SEQ ID NO: 1561619
cgccguuacccugugacuu

SEQ ID NO: 1685530 - RNA, 19 nt, Artificial Sequence
  Description of Artificial Sequence: Synthetic oligonucleotide
  Antisense strand to SEQ ID NO: 1685529
aagucacaggguaacggcg

SEQ ID NO: 1685531 - RNA, 19 nt, Artificial Sequence
  Description of Artificial Sequence: Synthetic oligonucleotide
  Sense strand starting at position 3146 of SEQ ID NO: 1561619
acuugacauucuucccagu

SEQ ID NO: 1685532 - RNA, 19 nt, Artificial Sequence
  Description of Artificial Sequence: Synthetic oligonucleotide
  Antisense strand to SEQ ID NO: 1685531
acugggaagaaugucaagu

SEQ ID NO: 1685533 - RNA, 19 nt, Artificial Sequence
  Description of Artificial Sequence: Synthetic oligonucleotide
  Sense strand starting at position 3148 of SEQ ID NO: 1561619
uugacauucuucccaguca

SEQ ID NO: 1685534 - RNA, 19 nt, Artificial Sequence
  Description of Artificial Sequence: Synthetic oligonucleotide
  Antisense strand to SEQ ID NO: 1685533
ugacugggaagaaugucaa

SEQ ID NO: 1685535 - RNA, 19 nt, Artificial Sequence
  Description of Artificial Sequence: Synthetic oligonucleotide
  Sense strand starting at position 3248 of SEQ ID NO: 1561619
aaggaugagaagugauguu

SEQ ID NO: 1685536 - RNA, 19 nt, Artificial Sequence
  Description of Artificial Sequence: Synthetic oligonucleotide
  Antisense strand to SEQ ID NO: 1685535
aacaucacuucucauccuu

SEQ ID NO: 1685537 - RNA, 19 nt, Artificial Sequence
  Description of Artificial Sequence: Synthetic oligonucleotide
  Sense strand starting at position 3312 of SEQ ID NO: 1561619
uuuguaguccuagggacau

SEQ ID NO: 1685538 - RNA, 19 nt, Artificial Sequence
  Description of Artificial Sequence: Synthetic oligonucleotide
  Antisense strand to SEQ ID NO: 1685537
augucccuaggacuacaaa

SEQ ID NO: 1685539 - RNA, 19 nt, Artificial Sequence
  Description of Artificial Sequence: Synthetic oligonucleotide
  Sense strand starting at position 3344 of SEQ ID NO: 1561619
cccacaaucuggguagcau

SEQ ID NO: 1685540 - RNA, 19 nt, Artificial Sequence
  Description of Artificial Sequence: Synthetic oligonucleotide
  Antisense strand to SEQ ID NO: 1685539
augcuacccagauuguggg

SEQ ID NO: 1685541 - RNA, 19 nt, Artificial Sequence
  Description of Artificial Sequence: Synthetic oligonucleotide
  Sense strand starting at position 3345 of SEQ ID NO: 1561619
ccacaaucuggguagcaua

SEQ ID NO: 1685542 - RNA, 19 nt, Artificial Sequence
  Description of Artificial Sequence: Synthetic oligonucleotide
  Antisense strand to SEQ ID NO: 1685541
uaugcuacccagauugugg

SEQ ID NO: 1685543 - RNA, 19 nt, Artificial Sequence
  Description of Artificial Sequence: Synthetic oligonucleotide
  Sense strand starting at position 3478 of SEQ ID NO: 1561619
aaguaucauugguugguua

SEQ ID NO: 1685544 - RNA, 19 nt, Artificial Sequence
  Description of Artificial Sequence: Synthetic oligonucleotide
  Antisense strand to SEQ ID NO: 1685543
uaaccaaccaaugauacuu

SEQ ID NO: 1685545 - RNA, 19 nt, Artificial Sequence
  Description of Artificial Sequence: Synthetic oligonucleotide
  Sense strand starting at position 3481 of SEQ ID NO: 1561619
uaucauugguugguuaaau

SEQ ID NO: 1685546 - RNA, 19 nt, Artificial Sequence
  Description of Artificial Sequence: Synthetic oligonucleotide
  Antisense strand to SEQ ID NO: 1685545
auuuaaccaaccaaugaua

SEQ ID NO: 1685547 - RNA, 19 nt, Artificial Sequence
  Description of Artificial Sequence: Synthetic oligonucleotide
  Sense strand starting at position 3482 of SEQ ID NO: 1561619
aucauugguugguuaaaug

SEQ ID NO: 1685548 - RNA, 19 nt, Artificial Sequence
  Description of Artificial Sequence: Synthetic oligonucleotide
  Antisense strand to SEQ ID NO: 1685547
cauuuaaccaaccaaugau

SEQ ID NO: 1685549 - RNA, 19 nt, Artificial Sequence
  Description of Artificial Sequence: Synthetic oligonucleotide
  Sense strand starting at position 3551 of SEQ ID NO: 1561619
cuuaauaugugaucuuuag

SEQ ID NO: 1685550 - RNA, 19 nt, Artificial Sequence
  Description of Artificial Sequence: Synthetic oligonucleotide
  Antisense strand to SEQ ID NO: 1685549
cuaaagaucacauauuaag

SEQ ID NO: 1685551 - RNA, 19 nt, Artificial Sequence
  Description of Artificial Sequence: Synthetic oligonucleotide
  Sense strand starting at position 3555 of SEQ ID NO: 1561619
auaugugaucuuuagguaa

SEQ ID NO: 1685552 - RNA, 19 nt, Artificial Sequence
  Description of Artificial Sequence: Synthetic oligonucleotide
  Antisense strand to SEQ ID NO: 1685551
uuaccuaaagaucacauau

SEQ ID NO: 1685553 - RNA, 19 nt, Artificial Sequence
  Description of Artificial Sequence: Synthetic oligonucleotide
  Sense strand starting at position 3558 of SEQ ID NO: 1561619
ugugaucuuuagguaaaua

SEQ ID NO: 1685554 - RNA, 19 nt, Artificial Sequence
  Description of Artificial Sequence: Synthetic oligonucleotide
  Antisense strand to SEQ ID NO: 1685553
uauuuaccuaaagaucaca

SEQ ID NO: 1685555 - RNA, 19 nt, Artificial Sequence
  Description of Artificial Sequence: Synthetic oligonucleotide
  Sense strand starting at position 3670 of SEQ ID NO: 1561619
auaaauugugguuacacau

SEQ ID NO: 1685556 - RNA, 19 nt, Artificial Sequence
  Description of Artificial Sequence: Synthetic oligonucleotide
  Antisense strand to SEQ ID NO: 1685555
auguguaaccacaauuuau

SEQ ID NO: 1685557 - RNA, 19 nt, Artificial Sequence
  Description of Artificial Sequence: Synthetic oligonucleotide
  Sense strand starting at position 3713 of SEQ ID NO: 1561619
guuagcccuguuuaacaaa

SEQ ID NO: 1685558 - RNA, 19 nt, Artificial Sequence
  Description of Artificial Sequence: Synthetic oligonucleotide
  Antisense strand to SEQ ID NO: 1685557
uuuguuaaacagggcuaac

SEQ ID NO: 1685559 - RNA, 19 nt, Artificial Sequence
  Description of Artificial Sequence: Synthetic oligonucleotide
  Sense strand starting at position 174 of SEQ ID NO: 1561620
auaugcguauuucugacau

SEQ ID NO: 1685560 - RNA, 19 nt, Artificial Sequence
  Description of Artificial Sequence: Synthetic oligonucleotide
  Antisense strand to SEQ ID NO: 1685559
augucagaaauacgcauau

SEQ ID NO: 1685561 - RNA, 19 nt, Artificial Sequence
  Description of Artificial Sequence: Synthetic oligonucleotide
  Sense strand starting at position 534 of SEQ ID NO: 1561620
gccaaacaauucuuuggaa

SEQ ID NO: 1685562 - RNA, 19 nt, Artificial Sequence
  Description of Artificial Sequence: Synthetic oligonucleotide
  Antisense strand to SEQ ID NO: 1685561
uuccaaagaauuguuuggc

SEQ ID NO: 1685563 - RNA, 19 nt, Artificial Sequence
  Description of Artificial Sequence: Synthetic oligonucleotide
  Sense strand starting at position 579 of SEQ ID NO: 1561620
caaucauuaugggugauaa

SEQ ID NO: 1685564 - RNA, 19 nt, Artificial Sequence
  Description of Artificial Sequence: Synthetic oligonucleotide
  Antisense strand to SEQ ID NO: 1685563
uuaucacccauaaugauug

SEQ ID NO: 1685565 - RNA, 19 nt, Artificial Sequence
  Description of Artificial Sequence: Synthetic oligonucleotide
  Sense strand starting at position 609 of SEQ ID NO: 1561620
gaaggacccuauguuucuu

SEQ ID NO: 1685566 - RNA, 19 nt, Artificial Sequence
  Description of Artificial Sequence: Synthetic oligonucleotide
  Antisense strand to SEQ ID NO: 1685565
aagaaacauaggguccuuc

SEQ ID NO: 1685567 - RNA, 19 nt, Artificial Sequence
  Description of Artificial Sequence: Synthetic oligonucleotide
  Sense strand starting at position 1036 of SEQ ID NO: 1561620
agggauccauacuuaagua

SEQ ID NO: 1685568 - RNA, 19 nt, Artificial Sequence
  Description of Artificial Sequence: Synthetic oligonucleotide
  Antisense strand to SEQ ID NO: 1685567
uacuuaaguauggaucccu

SEQ ID NO: 1685569 - RNA, 19 nt, Artificial Sequence
  Description of Artificial Sequence: Synthetic oligonucleotide
  Sense strand starting at position 1081 of SEQ ID NO: 1561620
agaaauugucucugccuga

SEQ ID NO: 1685570 - RNA, 19 nt, Artificial Sequence
  Description of Artificial Sequence: Synthetic oligonucleotide
  Antisense strand to SEQ ID NO: 1685569
ucaggcagagacaauuucu

SEQ ID NO: 1685571 - RNA, 19 nt, Artificial Sequence
  Description of Artificial Sequence: Synthetic oligonucleotide
  Sense strand starting at position 1086 of SEQ ID NO: 1561620
uugucucugccugaaauuc

SEQ ID NO: 1685572 - RNA, 19 nt, Artificial Sequence
  Description of Artificial Sequence: Synthetic oligonucleotide
  Antisense strand to SEQ ID NO: 1685571
gaauuucaggcagagacaa

SEQ ID NO: 1685573 - RNA, 19 nt, Artificial Sequence
  Description of Artificial Sequence: Synthetic oligonucleotide
  Sense strand starting at position 1116 of SEQ ID NO: 1561620
cucacuuucgaaugcaaag

SEQ ID NO: 1685574 - RNA, 19 nt, Artificial Sequence
  Description of Artificial Sequence: Synthetic oligonucleotide
  Antisense strand to SEQ ID NO: 1685573
cuuugcauucgaaagugag

SEQ ID NO: 1685575 - RNA, 19 nt, Artificial Sequence
  Description of Artificial Sequence: Synthetic oligonucleotide
  Sense strand starting at position 1263 of SEQ ID NO: 1561620
ucauuaggauggccauuaa

SEQ ID NO: 1685576 - RNA, 19 nt, Artificial Sequence
  Description of Artificial Sequence: Synthetic oligonucleotide
  Antisense strand to SEQ ID NO: 1685575
uuaauggccauccuaauga

SEQ ID NO: 1685577 - RNA, 19 nt, Artificial Sequence
  Description of Artificial Sequence: Synthetic oligonucleotide
  Sense strand starting at position 1370 of SEQ ID NO: 1561620
aggagaguagccugaccaa

SEQ ID NO: 1685578 - RNA, 19 nt, Artificial Sequence
  Description of Artificial Sequence: Synthetic oligonucleotide
  Antisense strand to SEQ ID NO: 1685577
uuggucaggcuacucuccu

SEQ ID NO: 1685579 - RNA, 19 nt, Artificial Sequence
  Description of Artificial Sequence: Synthetic oligonucleotide
  Sense strand starting at position 1442 of SEQ ID NO: 1561620
acaugucuguaauccuacu

SEQ ID NO: 1685580 - RNA, 19 nt, Artificial Sequence
  Description of Artificial Sequence: Synthetic oligonucleotide
  Antisense strand to SEQ ID NO: 1685579
aguaggauuacagacaugu

SEQ ID NO: 1685581 - RNA, 19 nt, Artificial Sequence
  Description of Artificial Sequence: Synthetic oligonucleotide
  Sense strand starting at position 1607 of SEQ ID NO: 1561620
ucagaugagcaucauuauu

SEQ ID NO: 1685582 - RNA, 19 nt, Artificial Sequence
  Description of Artificial Sequence: Synthetic oligonucleotide
  Antisense strand to SEQ ID NO: 1685581
aauaaugaugcucaucuga

SEQ ID NO: 1685583 - RNA, 19 nt, Artificial Sequence
  Description of Artificial Sequence: Synthetic oligonucleotide
  Sense strand starting at position 1787 of SEQ ID NO: 1561620
augaguaagacaugguucu

SEQ ID NO: 1685584 - RNA, 19 nt, Artificial Sequence
  Description of Artificial Sequence: Synthetic oligonucleotide
  Antisense strand to SEQ ID NO: 1685583
agaaccaugucuuacucau

SEQ ID NO: 1685585 - RNA, 19 nt, Artificial Sequence
  Description of Artificial Sequence: Synthetic oligonucleotide
  Sense strand starting at position 1788 of SEQ ID NO: 1561620
ugaguaagacaugguucuu

SEQ ID NO: 1685586 - RNA, 19 nt, Artificial Sequence
  Description of Artificial Sequence: Synthetic oligonucleotide
  Antisense strand to SEQ ID NO: 1685585
aagaaccaugucuuacuca

SEQ ID NO: 1685587 - RNA, 19 nt, Artificial Sequence
  Description of Artificial Sequence: Synthetic oligonucleotide
  Sense strand starting at position 1855 of SEQ ID NO: 1561620
gcccucaaucaguaggguu

SEQ ID NO: 1685588 - RNA, 19 nt, Artificial Sequence
  Description of Artificial Sequence: Synthetic oligonucleotide
  Antisense strand to SEQ ID NO: 1685587
aacccuacugauugagggc

SEQ ID NO: 1685589 - RNA, 19 nt, Artificial Sequence
  Description of Artificial Sequence: Synthetic oligonucleotide
  Sense strand starting at position 1857 of SEQ ID NO: 1561620
ccucaaucaguaggguuua

SEQ ID NO: 1685590 - RNA, 19 nt, Artificial Sequence
  Description of Artificial Sequence: Synthetic oligonucleotide
  Antisense strand to SEQ ID NO: 1685589
uaaacccuacugauugagg

SEQ ID NO: 1685591 - RNA, 19 nt, Artificial Sequence
  Description of Artificial Sequence: Synthetic oligonucleotide
  Sense strand starting at position 1974 of SEQ ID NO: 1561620
gacucaguuugacuaguua

SEQ ID NO: 1685592 - RNA, 19 nt, Artificial Sequence
  Description of Artificial Sequence: Synthetic oligonucleotide
  Antisense strand to SEQ ID NO: 1685591
uaacuagucaaacugaguc

SEQ ID NO: 1685593 - RNA, 19 nt, Artificial Sequence
  Description of Artificial Sequence: Synthetic oligonucleotide
  Sense strand starting at position 1978 of SEQ ID NO: 1561620
caguuugacuaguuaagaa

SEQ ID NO: 1685594 - RNA, 19 nt, Artificial Sequence
  Description of Artificial Sequence: Synthetic oligonucleotide
  Antisense strand to SEQ ID NO: 1685593
uucuuaacuagucaaacug

SEQ ID NO: 1685595 - RNA, 19 nt, Artificial Sequence
  Description of Artificial Sequence: Synthetic oligonucleotide
  Sense strand starting at position 2130 of SEQ ID NO: 1561620
guuuaagguccucaaucca

SEQ ID NO: 1685596 - RNA, 19 nt, Artificial Sequence
  Description of Artificial Sequence: Synthetic oligonucleotide
  Antisense strand to SEQ ID NO: 1685595
uggauugaggaccuuaaac

SEQ ID NO: 1685597 - RNA, 19 nt, Artificial Sequence
  Description of Artificial Sequence: Synthetic oligonucleotide
  Sense strand starting at position 2295 of SEQ ID NO: 1561620
gugaauaaauaagagggaa

SEQ ID NO: 1685598 - RNA, 19 nt, Artificial Sequence
  Description of Artificial Sequence: Synthetic oligonucleotide
  Antisense strand to SEQ ID NO: 1685597
uucccucuuauuuauucac

SEQ ID NO: 1685599 - RNA, 19 nt, Artificial Sequence
  Description of Artificial Sequence: Synthetic oligonucleotide
  Sense strand starting at position 2345 of SEQ ID NO: 1561620
gugaacugagucuaguaga

SEQ ID NO: 1685600 - RNA, 19 nt, Artificial Sequence
  Description of Artificial Sequence: Synthetic oligonucleotide
  Antisense strand to SEQ ID NO: 1685599
ucuacuagacucaguucac

SEQ ID NO: 1685601 - RNA, 19 nt, Artificial Sequence
  Description of Artificial Sequence: Synthetic oligonucleotide
  Sense strand starting at position 2601 of SEQ ID NO: 1561620
ggccgaguucaagaccaga

SEQ ID NO: 1685602 - RNA, 19 nt, Artificial Sequence
  Description of Artificial Sequence: Synthetic oligonucleotide
  Antisense strand to SEQ ID NO: 1685601
ucuggucuugaacucggcc

SEQ ID NO: 1685603 - RNA, 19 nt, Artificial Sequence
  Description of Artificial Sequence: Synthetic oligonucleotide
  Sense strand starting at position 2635 of SEQ ID NO: 1561620
agaccuauguuucuauaag

SEQ ID NO: 1685604 - RNA, 19 nt, Artificial Sequence
  Description of Artificial Sequence: Synthetic oligonucleotide
  Antisense strand to SEQ ID NO: 1685603
cuuauagaaacauaggucu

SEQ ID NO: 1685605 - RNA, 19 nt, Artificial Sequence
  Description of Artificial Sequence: Synthetic oligonucleotide
  Sense strand starting at position 2784 of SEQ ID NO: 1561620
aggcccugccucuaaauaa

SEQ ID NO: 1685606 - RNA, 19 nt, Artificial Sequence
  Description of Artificial Sequence: Synthetic oligonucleotide
  Antisense strand to SEQ ID NO: 1685605
uuauuuagaggcagggccu

SEQ ID NO: 1685607 - RNA, 19 nt, Artificial Sequence
  Description of Artificial Sequence: Synthetic oligonucleotide
  Sense strand starting at position 3183 of SEQ ID NO: 1561620
aacacuguugagugaacua

SEQ ID NO: 1685608 - RNA, 19 nt, Artificial Sequence
  Description of Artificial Sequence: Synthetic oligonucleotide
  Antisense strand to SEQ ID NO: 1685607
uaguucacucaacaguguu

SEQ ID NO: 1685609 - RNA, 19 nt, Artificial Sequence
  Description of Artificial Sequence: Synthetic oligonucleotide
  Sense strand starting at position 3188 of SEQ ID NO: 1561620
uguugagugaacuagccau

SEQ ID NO: 1685610 - RNA, 19 nt, Artificial Sequence
  Description of Artificial Sequence: Synthetic oligonucleotide
  Antisense strand to SEQ ID NO: 1685609
auggcuaguucacucaaca

SEQ ID NO: 1685611 - RNA, 19 nt, Artificial Sequence
  Description of Artificial Sequence: Synthetic oligonucleotide
  Sense strand starting at position 3194 of SEQ ID NO: 1561620
gugaacuagccauacucau

SEQ ID NO: 1685612 - RNA, 19 nt, Artificial Sequence
  Description of Artificial Sequence: Synthetic oligonucleotide
  Antisense strand to SEQ ID NO: 1685611
augaguauggcuaguucac

SEQ ID NO: 1685613 - RNA, 19 nt, Artificial Sequence
  Description of Artificial Sequence: Synthetic oligonucleotide
  Sense strand starting at position 3359 of SEQ ID NO: 1561620
ggcccuaggcuacagauaa

SEQ ID NO: 1685614 - RNA, 19 nt, Artificial Sequence
  Description of Artificial Sequence: Synthetic oligonucleotide
  Antisense strand to SEQ ID NO: 1685613
uuaucuguagccuagggcc

SEQ ID NO: 1685615 - RNA, 19 nt, Artificial Sequence
  Description of Artificial Sequence: Synthetic oligonucleotide
  Sense strand starting at position 3394 of SEQ ID NO: 1561620
ugauauuuguaucugugca

SEQ ID NO: 1685616 - RNA, 19 nt, Artificial Sequence
  Description of Artificial Sequence: Synthetic oligonucleotide
  Antisense strand to SEQ ID NO: 1685615
ugcacagauacaaauauca

SEQ ID NO: 1685617 - RNA, 19 nt, Artificial Sequence
  Description of Artificial Sequence: Synthetic oligonucleotide
  Sense strand starting at position 3396 of SEQ ID NO: 1561620
auauuuguaucugugcaga

SEQ ID NO: 1685618 - RNA, 19 nt, Artificial Sequence
  Description of Artificial Sequence: Synthetic oligonucleotide
  Antisense strand to SEQ ID NO: 1685617
ucugcacagauacaaauau

SEQ ID NO: 1685619 - RNA, 19 nt, Artificial Sequence
  Description of Artificial Sequence: Synthetic oligonucleotide
  Sense strand starting at position 3399 of SEQ ID NO: 1561620
uuuguaucugugcagaaac

SEQ ID NO: 1685620 - RNA, 19 nt, Artificial Sequence
  Description of Artificial Sequence: Synthetic oligonucleotide
  Antisense strand to SEQ ID NO: 1685619
guuucugcacagauacaaa

SEQ ID NO: 1685621 - RNA, 19 nt, Artificial Sequence
  Description of Artificial Sequence: Synthetic oligonucleotide
  Sense strand starting at position 3401 of SEQ ID NO: 1561620
uguaucugugcagaaacuu

SEQ ID NO: 1685622 - RNA, 19 nt, Artificial Sequence
  Description of Artificial Sequence: Synthetic oligonucleotide
  Antisense strand to SEQ ID NO: 1685621
aaguuucugcacagauaca

SEQ ID NO: 1685623 - RNA, 19 nt, Artificial Sequence
  Description of Artificial Sequence: Synthetic oligonucleotide
  Sense strand starting at position 3495 of SEQ ID NO: 1561620
gaccaauguccaugagagu

SEQ ID NO: 1685624 - RNA, 19 nt, Artificial Sequence
  Description of Artificial Sequence: Synthetic oligonucleotide
  Antisense strand to SEQ ID NO: 1685623
acucucauggacauugguc

SEQ ID NO: 1685625 - RNA, 19 nt, Artificial Sequence
  Description of Artificial Sequence: Synthetic oligonucleotide
  Sense strand starting at position 3496 of SEQ ID NO: 1561620
accaauguccaugagaguu

SEQ ID NO: 1685626 - RNA, 19 nt, Artificial Sequence
  Description of Artificial Sequence: Synthetic oligonucleotide
  Antisense strand to SEQ ID NO: 1685625
aacucucauggacauuggu

SEQ ID NO: 1685627 - RNA, 19 nt, Artificial Sequence
  Description of Artificial Sequence: Synthetic oligonucleotide
  Sense strand starting at position 3565 of SEQ ID NO: 1561620
uugaguugauuuccgcaua

SEQ ID NO: 1685628 - RNA, 19 nt, Artificial Sequence
  Description of Artificial Sequence: Synthetic oligonucleotide
  Antisense strand to SEQ ID NO: 1685627
uaugcggaaaucaacucaa

SEQ ID NO: 1685629 - RNA, 19 nt, Artificial Sequence
  Description of Artificial Sequence: Synthetic oligonucleotide
  Sense strand starting at position 3576 of SEQ ID NO: 1561620
uccgcauacggugagagau

SEQ ID NO: 1685630 - RNA, 19 nt, Artificial Sequence
  Description of Artificial Sequence: Synthetic oligonucleotide
  Antisense strand to SEQ ID NO: 1685629
aucucucaccguaugcgga

SEQ ID NO: 1685631 - RNA, 19 nt, Artificial Sequence
  Description of Artificial Sequence: Synthetic oligonucleotide
  Sense strand starting at position 3813 of SEQ ID NO: 1561620
aagguaaagucugcaggau

SEQ ID NO: 1685632 - RNA, 19 nt, Artificial Sequence
  Description of Artificial Sequence: Synthetic oligonucleotide
  Antisense strand to SEQ ID NO: 1685631
auccugcagacuuuaccuu

SEQ ID NO: 1685633 - RNA, 19 nt, Artificial Sequence
  Description of Artificial Sequence: Synthetic oligonucleotide
  Sense strand starting at position 3840 of SEQ ID NO: 1561620
ccaagaauuaguggagcuu

SEQ ID NO: 1685634 - RNA, 19 nt, Artificial Sequence
  Description of Artificial Sequence: Synthetic oligonucleotide
  Antisense strand to SEQ ID NO: 1685633
aagcuccacuaauucuugg

SEQ ID NO: 1685635 - RNA, 19 nt, Artificial Sequence
  Description of Artificial Sequence: Synthetic oligonucleotide
  Sense strand starting at position 3865 of SEQ ID NO: 1561620
gguaguucugcagagcuac

SEQ ID NO: 1685636 - RNA, 19 nt, Artificial Sequence
  Description of Artificial Sequence: Synthetic oligonucleotide
  Antisense strand to SEQ ID NO: 1685635
guagcucugcagaacuacc

SEQ ID NO: 1685637 - RNA, 19 nt, Artificial Sequence
  Description of Artificial Sequence: Synthetic oligonucleotide
  Sense strand starting at position 3896 of SEQ ID NO: 1561620
ggcaccauauagucuguau

SEQ ID NO: 1685638 - RNA, 19 nt, Artificial Sequence
  Description of Artificial Sequence: Synthetic oligonucleotide
  Antisense strand to SEQ ID NO: 1685637
auacagacuauauggugcc

SEQ ID NO: 1685639 - RNA, 19 nt, Artificial Sequence
  Description of Artificial Sequence: Synthetic oligonucleotide
  Sense strand starting at position 120 of SEQ ID NO: 1561621
ugcagcacagcuugugaaa

SEQ ID NO: 1685640 - RNA, 19 nt, Artificial Sequence
  Description of Artificial Sequence: Synthetic oligonucleotide
  Antisense strand to SEQ ID NO: 1685639
uuucacaagcugugcugca

SEQ ID NO: 1685641 - RNA, 19 nt, Artificial Sequence
  Description of Artificial Sequence: Synthetic oligonucleotide
  Sense strand starting at position 123 of SEQ ID NO: 1561621
agcacagcuugugaaagaa

SEQ ID NO: 1685642 - RNA, 19 nt, Artificial Sequence
  Description of Artificial Sequence: Synthetic oligonucleotide
  Antisense strand to SEQ ID NO: 1685641
uucuuucacaagcugugcu

SEQ ID NO: 1685643 - RNA, 19 nt, Artificial Sequence
  Description of Artificial Sequence: Synthetic oligonucleotide
  Sense strand starting at position 142 of SEQ ID NO: 1561621
gcaggaaaguuccucggaa

SEQ ID NO: 1685644 - RNA, 19 nt, Artificial Sequence
  Description of Artificial Sequence: Synthetic oligonucleotide
  Antisense strand to SEQ ID NO: 1685643
uuccgaggaacuuuccugc

SEQ ID NO: 1685645 - RNA, 19 nt, Artificial Sequence
  Description of Artificial Sequence: Synthetic oligonucleotide
  Sense strand starting at position 143 of SEQ ID NO: 1561621
caggaaaguuccucggaag

SEQ ID NO: 1685646 - RNA, 19 nt, Artificial Sequence
  Description of Artificial Sequence: Synthetic oligonucleotide
  Antisense strand to SEQ ID NO: 1685645
cuuccgaggaacuuuccug

SEQ ID NO: 1685647 - RNA, 19 nt, Artificial Sequence
  Description of Artificial Sequence: Synthetic oligonucleotide
  Sense strand starting at position 144 of SEQ ID NO: 1561621
aggaaaguuccucggaaga

SEQ ID NO: 1685648 - RNA, 19 nt, Artificial Sequence
  Description of Artificial Sequence: Synthetic oligonucleotide
  Antisense strand to SEQ ID NO: 1685647
ucuuccgaggaacuuuccu

SEQ ID NO: 1685649 - RNA, 19 nt, Artificial Sequence
  Description of Artificial Sequence: Synthetic oligonucleotide
  Sense strand starting at position 146 of SEQ ID NO: 1561621
gaaaguuccucggaagagc

SEQ ID NO: 1685650 - RNA, 19 nt, Artificial Sequence
  Description of Artificial Sequence: Synthetic oligonucleotide
  Antisense strand to SEQ ID NO: 1685649
gcucuuccgaggaacuuuc

SEQ ID NO: 1685651 - RNA, 19 nt, Artificial Sequence
  Description of Artificial Sequence: Synthetic oligonucleotide
  Sense strand starting at position 419 of SEQ ID NO: 1561621
agggcuugcuacccaugaa

SEQ ID NO: 1685652 - RNA, 19 nt, Artificial Sequence
  Description of Artificial Sequence: Synthetic oligonucleotide
  Antisense strand to SEQ ID NO: 1685651
uucauggguagcaagcccu

SEQ ID NO: 1685653 - RNA, 19 nt, Artificial Sequence
  Description of Artificial Sequence: Synthetic oligonucleotide
  Sense strand starting at position 420 of SEQ ID NO: 1561621
gggcuugcuacccaugaau

SEQ ID NO: 1685654 - RNA, 19 nt, Artificial Sequence
  Description of Artificial Sequence: Synthetic oligonucleotide
  Antisense strand to SEQ ID NO: 1685653
auucauggguagcaagccc

SEQ ID NO: 1685655 - RNA, 19 nt, Artificial Sequence
  Description of Artificial Sequence: Synthetic oligonucleotide
  Sense strand starting at position 620 of SEQ ID NO: 1561621
aaguuagaagccugugaaa

SEQ ID NO: 1685656 - RNA, 19 nt, Artificial Sequence
  Description of Artificial Sequence: Synthetic oligonucleotide
  Antisense strand to SEQ ID NO: 1685655
uuucacaggcuucuaacuu

SEQ ID NO: 1685657 - RNA, 19 nt, Artificial Sequence
  Description of Artificial Sequence: Synthetic oligonucleotide
  Sense strand starting at position 886 of SEQ ID NO: 1561621
cgacgauggccagagucuu

SEQ ID NO: 1685658 - RNA, 19 nt, Artificial Sequence
  Description of Artificial Sequence: Synthetic oligonucleotide
  Antisense strand to SEQ ID NO: 1685657
aagacucuggccaucgucg

SEQ ID NO: 1685659 - RNA, 19 nt, Artificial Sequence
  Description of Artificial Sequence: Synthetic oligonucleotide
  Sense strand starting at position 894 of SEQ ID NO: 1561621
gccagagucuuggccgcuu

SEQ ID NO: 1685660 - RNA, 19 nt, Artificial Sequence
  Description of Artificial Sequence: Synthetic oligonucleotide
  Antisense strand to SEQ ID NO: 1685659
aagcggccaagacucuggc

SEQ ID NO: 1685661 - RNA, 19 nt, Artificial Sequence
  Description of Artificial Sequence: Synthetic oligonucleotide
  Sense strand starting at position 898 of SEQ ID NO: 1561621
gagucuuggccgcuuucuu

SEQ ID NO: 1685662 - RNA, 19 nt, Artificial Sequence
  Description of Artificial Sequence: Synthetic oligonucleotide
  Antisense strand to SEQ ID NO: 1685661
aagaaagcggccaagacuc

SEQ ID NO: 1685663 - RNA, 19 nt, Artificial Sequence
  Description of Artificial Sequence: Synthetic oligonucleotide
  Sense strand starting at position 910 of SEQ ID NO: 1561621
cuuucuucucacgggagaa

SEQ ID NO: 1685664 - RNA, 19 nt, Artificial Sequence
  Description of Artificial Sequence: Synthetic oligonucleotide
  Antisense strand to SEQ ID NO: 1685663
uucucccgugagaagaaag

SEQ ID NO: 1685665 - RNA, 19 nt, Artificial Sequence
  Description of Artificial Sequence: Synthetic oligonucleotide
  Sense strand starting at position 911 of SEQ ID NO: 1561621
uuucuucucacgggagaac

SEQ ID NO: 1685666 - RNA, 19 nt, Artificial Sequence
  Description of Artificial Sequence: Synthetic oligonucleotide
  Antisense strand to SEQ ID NO: 1685665
guucucccgugagaagaaa

SEQ ID NO: 1685667 - RNA, 19 nt, Artificial Sequence
  Description of Artificial Sequence: Synthetic oligonucleotide
  Sense strand starting at position 912 of SEQ ID NO: 1561621
uucuucucacgggagaacu

SEQ ID NO: 1685668 - RNA, 19 nt, Artificial Sequence
  Description of Artificial Sequence: Synthetic oligonucleotide
  Antisense strand to SEQ ID NO: 1685667
aguucucccgugagaagaa

SEQ ID NO: 1685669 - RNA, 19 nt, Artificial Sequence
  Description of Artificial Sequence: Synthetic oligonucleotide
  Sense strand starting at position 1187 of SEQ ID NO: 1561621
gcccgccuccucggugaua

SEQ ID NO: 1685670 - RNA, 19 nt, Artificial Sequence
  Description of Artificial Sequence: Synthetic oligonucleotide
  Antisense strand to SEQ ID NO: 1685669
uaucaccgaggaggcgggc

SEQ ID NO: 1685671 - RNA, 19 nt, Artificial Sequence
  Description of Artificial Sequence: Synthetic oligonucleotide
  Sense strand starting at position 1924 of SEQ ID NO: 1561621
ucaggagaucgcggaaagu

SEQ ID NO: 1685672 - RNA, 19 nt, Artificial Sequence
  Description of Artificial Sequence: Synthetic oligonucleotide
  Antisense strand to SEQ ID NO: 1685671
acuuuccgcgaucuccuga

SEQ ID NO: 1685673 - RNA, 19 nt, Artificial Sequence
  Description of Artificial Sequence: Synthetic oligonucleotide
  Sense strand starting at position 1933 of SEQ ID NO: 1561621
cgcggaaagucaucucaac

SEQ ID NO: 1685674 - RNA, 19 nt, Artificial Sequence
  Description of Artificial Sequence: Synthetic oligonucleotide
  Antisense strand to SEQ ID NO: 1685673
guugagaugacuuuccgcg

SEQ ID NO: 1685675 - RNA, 19 nt, Artificial Sequence
  Description of Artificial Sequence: Synthetic oligonucleotide
  Sense strand starting at position 2663 of SEQ ID NO: 1561621
cggcuuuggccgccagaga

SEQ ID NO: 1685676 - RNA, 19 nt, Artificial Sequence
  Description of Artificial Sequence: Synthetic oligonucleotide
  Antisense strand to SEQ ID NO: 1685675
ucucuggcggccaaagccg

SEQ ID NO: 1685677 - RNA, 19 nt, Artificial Sequence
  Description of Artificial Sequence: Synthetic oligonucleotide
  Sense strand starting at position 2827 of SEQ ID NO: 1561621
gugcgauggcgugaagaga

SEQ ID NO: 1685678 - RNA, 19 nt, Artificial Sequence
  Description of Artificial Sequence: Synthetic oligonucleotide
  Antisense strand to SEQ ID NO: 1685677
ucucuucacgccaucgcac

SEQ ID NO: 1685679 - RNA, 19 nt, Artificial Sequence
  Description of Artificial Sequence: Synthetic oligonucleotide
  Sense strand starting at position 2984 of SEQ ID NO: 1561621
cccuguaucagaugcggga

SEQ ID NO: 1685680 - RNA, 19 nt, Artificial Sequence
  Description of Artificial Sequence: Synthetic oligonucleotide
  Antisense strand to SEQ ID NO: 1685679
ucccgcaucugauacaggg

SEQ ID NO: 1685681 - RNA, 19 nt, Artificial Sequence
  Description of Artificial Sequence: Synthetic oligonucleotide
  Sense strand starting at position 2988 of SEQ ID NO: 1561621
guaucagaugcgggaauaa

SEQ ID NO: 1685682 - RNA, 19 nt, Artificial Sequence
  Description of Artificial Sequence: Synthetic oligonucleotide
  Antisense strand to SEQ ID NO: 1685681
uuauucccgcaucugauac

SEQ ID NO: 1685683 - RNA, 19 nt, Artificial Sequence
  Description of Artificial Sequence: Synthetic oligonucleotide
  Sense strand starting at position 3250 of SEQ ID NO: 1561621
aggguuaacugaguaaaua

SEQ ID NO: 1685684 - RNA, 19 nt, Artificial Sequence
  Description of Artificial Sequence: Synthetic oligonucleotide
  Antisense strand to SEQ ID NO: 1685683
uauuuacucaguuaacccu

SEQ ID NO: 1685685 - RNA, 19 nt, Artificial Sequence
  Description of Artificial Sequence: Synthetic oligonucleotide
  Sense strand starting at position 3294 of SEQ ID NO: 1561621
ugggcaugucagcggagua

SEQ ID NO: 1685686 - RNA, 19 nt, Artificial Sequence
  Description of Artificial Sequence: Synthetic oligonucleotide
  Antisense strand to SEQ ID NO: 1685685
uacuccgcugacaugccca

SEQ ID NO: 1685687 - RNA, 19 nt, Artificial Sequence
  Description of Artificial Sequence: Synthetic oligonucleotide
  Sense strand starting at position 3405 of SEQ ID NO: 1561621
gugagaagcuucuugagca

SEQ ID NO: 1685688 - RNA, 19 nt, Artificial Sequence
  Description of Artificial Sequence: Synthetic oligonucleotide
  Antisense strand to SEQ ID NO: 1685687
ugcucaagaagcuucucac

SEQ ID NO: 1685689 - RNA, 19 nt, Artificial Sequence
  Description of Artificial Sequence: Synthetic oligonucleotide
  Sense strand starting at position 3409 of SEQ ID NO: 1561621
gaagcuucuugagcaauag

SEQ ID NO: 1685690 - RNA, 19 nt, Artificial Sequence
  Description of Artificial Sequence: Synthetic oligonucleotide
  Antisense strand to SEQ ID NO: 1685689
cuauugcucaagaagcuuc

SEQ ID NO: 1685691 - RNA, 19 nt, Artificial Sequence
  Description of Artificial Sequence: Synthetic oligonucleotide
  Sense strand starting at position 3542 of SEQ ID NO: 1561621
gccgucucauaguugcaga

SEQ ID NO: 1685692 - RNA, 19 nt, Artificial Sequence
  Description of Artificial Sequence: Synthetic oligonucleotide
  Antisense strand to SEQ ID NO: 1685691
ucugcaacuaugagacggc

SEQ ID NO: 1685693 - RNA, 19 nt, Artificial Sequence
  Description of Artificial Sequence: Synthetic oligonucleotide
  Sense strand starting at position 3543 of SEQ ID NO: 1561621
ccgucucauaguugcagaa

SEQ ID NO: 1685694 - RNA, 19 nt, Artificial Sequence
  Description of Artificial Sequence: Synthetic oligonucleotide
  Antisense strand to SEQ ID NO: 1685693
uucugcaacuaugagacgg

SEQ ID NO: 1685695 - RNA, 19 nt, Artificial Sequence
  Description of Artificial Sequence: Synthetic oligonucleotide
  Sense strand starting at position 3644 of SEQ ID NO: 1561621
guguucacugguuaugguu

SEQ ID NO: 1685696 - RNA, 19 nt, Artificial Sequence
  Description of Artificial Sequence: Synthetic oligonucleotide
  Antisense strand to SEQ ID NO: 1685695
aaccauaaccagugaacac

SEQ ID NO: 1685697 - RNA, 19 nt, Artificial Sequence
  Description of Artificial Sequence: Synthetic oligonucleotide
  Sense strand starting at position 3650 of SEQ ID NO: 1561621
acugguuaugguugacaca

SEQ ID NO: 1685698 - RNA, 19 nt, Artificial Sequence
  Description of Artificial Sequence: Synthetic oligonucleotide
  Antisense strand to SEQ ID NO: 1685697
ugugucaaccauaaccagu

SEQ ID NO: 1685699 - RNA, 19 nt, Artificial Sequence
  Description of Artificial Sequence: Synthetic oligonucleotide
  Sense strand starting at position 3673 of SEQ ID NO: 1561621
caggaugucugaguucuag

SEQ ID NO: 1685700 - RNA, 19 nt, Artificial Sequence
  Description of Artificial Sequence: Synthetic oligonucleotide
  Antisense strand to SEQ ID NO: 1685699
cuagaacucagacauccug

SEQ ID NO: 1685701 - RNA, 19 nt, Artificial Sequence
  Description of Artificial Sequence: Synthetic oligonucleotide
  Sense strand starting at position 3677 of SEQ ID NO: 1561621
augucugaguucuagauga

SEQ ID NO: 1685702 - RNA, 19 nt, Artificial Sequence
  Description of Artificial Sequence: Synthetic oligonucleotide
  Antisense strand to SEQ ID NO: 1685701
ucaucuagaacucagacau

SEQ ID NO: 1685703 - RNA, 19 nt, Artificial Sequence
  Description of Artificial Sequence: Synthetic oligonucleotide
  Sense strand starting at position 3679 of SEQ ID NO: 1561621
gucugaguucuagaugaga

SEQ ID NO: 1685704 - RNA, 19 nt, Artificial Sequence
  Description of Artificial Sequence: Synthetic oligonucleotide
  Antisense strand to SEQ ID NO: 1685703
ucucaucuagaacucagac

SEQ ID NO: 1685705 - RNA, 19 nt, Artificial Sequence
  Description of Artificial Sequence: Synthetic oligonucleotide
  Sense strand starting at position 3695 of SEQ ID NO: 1561621
agaagcugcuuuggagaaa

SEQ ID NO: 1685706 - RNA, 19 nt, Artificial Sequence
  Description of Artificial Sequence: Synthetic oligonucleotide
  Antisense strand to SEQ ID NO: 1685705
uuucuccaaagcagcuucu

SEQ ID NO: 1685707 - RNA, 19 nt, Artificial Sequence
  Description of Artificial Sequence: Synthetic oligonucleotide
  Sense strand starting at position 3766 of SEQ ID NO: 1561621
ugcccaguccaggaagaua

SEQ ID NO: 1685708 - RNA, 19 nt, Artificial Sequence
  Description of Artificial Sequence: Synthetic oligonucleotide
  Antisense strand to SEQ ID NO: 1685707
uaucuuccuggacugggca

SEQ ID NO: 1685709 - RNA, 19 nt, Artificial Sequence
  Description of Artificial Sequence: Synthetic oligonucleotide
  Sense strand starting at position 3791 of SEQ ID NO: 1561621
uuauaaucauagcuuggaa

SEQ ID NO: 1685710 - RNA, 19 nt, Artificial Sequence
  Description of Artificial Sequence: Synthetic oligonucleotide
  Antisense strand to SEQ ID NO: 1685709
uuccaagcuaugauuauaa

SEQ ID NO: 1685711 - RNA, 19 nt, Artificial Sequence
  Description of Artificial Sequence: Synthetic oligonucleotide
  Sense strand starting at position 3793 of SEQ ID NO: 1561621
auaaucauagcuuggaaac

SEQ ID NO: 1685712 - RNA, 19 nt, Artificial Sequence
  Description of Artificial Sequence: Synthetic oligonucleotide
  Antisense strand to SEQ ID NO: 1685711
guuuccaagcuaugauuau

SEQ ID NO: 1685713 - RNA, 19 nt, Artificial Sequence
  Description of Artificial Sequence: Synthetic oligonucleotide
  Sense strand starting at position 3857 of SEQ ID NO: 1561621
uuuggaaacuuacuauagu

SEQ ID NO: 1685714 - RNA, 19 nt, Artificial Sequence
  Description of Artificial Sequence: Synthetic oligonucleotide
  Antisense strand to SEQ ID NO: 1685713
acuauaguaaguuuccaaa

SEQ ID NO: 1685715 - RNA, 19 nt, Artificial Sequence
  Description of Artificial Sequence: Synthetic oligonucleotide
  Sense strand starting at position 3866 of SEQ ID NO: 1561621
uuacuauagugaguugaaa

SEQ ID NO: 1685716 - RNA, 19 nt, Artificial Sequence
  Description of Artificial Sequence: Synthetic oligonucleotide
  Antisense strand to SEQ ID NO: 1685715
uuucaacucacuauaguaa

SEQ ID NO: 1685717 - RNA, 19 nt, Artificial Sequence
  Description of Artificial Sequence: Synthetic oligonucleotide
  Sense strand starting at position 3874 of SEQ ID NO: 1561621
gugaguugaaacgaaagca

SEQ ID NO: 1685718 - RNA, 19 nt, Artificial Sequence
  Description of Artificial Sequence: Synthetic oligonucleotide
  Antisense strand to SEQ ID NO: 1685717
ugcuuucguuucaacucac

SEQ ID NO: 1685719 - RNA, 19 nt, Artificial Sequence
  Description of Artificial Sequence: Synthetic oligonucleotide
  Sense strand starting at position 70 of SEQ ID NO: 1561622
augucugucugccuggaaa

SEQ ID NO: 1685720 - RNA, 19 nt, Artificial Sequence
  Description of Artificial Sequence: Synthetic oligonucleotide
  Antisense strand to SEQ ID NO: 1685719
uuuccaggcagacagacau

SEQ ID NO: 1685721 - RNA, 19 nt, Artificial Sequence
  Description of Artificial Sequence: Synthetic oligonucleotide
  Sense strand starting at position 72 of SEQ ID NO: 1561622
gucugucugccuggaaauu

SEQ ID NO: 1685722 - RNA, 19 nt, Artificial Sequence
  Description of Artificial Sequence: Synthetic oligonucleotide
  Antisense strand to SEQ ID NO: 1685721
aauuuccaggcagacagac

SEQ ID NO: 1685723 - RNA, 19 nt, Artificial Sequence
  Description of Artificial Sequence: Synthetic oligonucleotide
  Sense strand starting at position 217 of SEQ ID NO: 1561622
ggcgccugcugguuuauaa

SEQ ID NO: 1685724 - RNA, 19 nt, Artificial Sequence
  Description of Artificial Sequence: Synthetic oligonucleotide
  Antisense strand to SEQ ID NO: 1685723
uuauaaaccagcaggcgcc

SEQ ID NO: 1685725 - RNA, 19 nt, Artificial Sequence
  Description of Artificial Sequence: Synthetic oligonucleotide
  Sense strand starting at position 218 of SEQ ID NO: 1561622
gcgccugcugguuuauaaa

SEQ ID NO: 1685726 - RNA, 19 nt, Artificial Sequence
  Description of Artificial Sequence: Synthetic oligonucleotide
  Antisense strand to SEQ ID NO: 1685725
uuuauaaaccagcaggcgc

SEQ ID NO: 1685727 - RNA, 19 nt, Artificial Sequence
  Description of Artificial Sequence: Synthetic oligonucleotide
  Sense strand starting at position 505 of SEQ ID NO: 1561622
uacugagcccugggucuaa

SEQ ID NO: 1685728 - RNA, 19 nt, Artificial Sequence
  Description of Artificial Sequence: Synthetic oligonucleotide
  Antisense strand to SEQ ID NO: 1685727
uuagacccagggcucagua

SEQ ID NO: 1685729 - RNA, 19 nt, Artificial Sequence
  Description of Artificial Sequence: Synthetic oligonucleotide
  Sense strand starting at position 672 of SEQ ID NO: 1561622
guuucugagacgugcugga

SEQ ID NO: 1685730 - RNA, 19 nt, Artificial Sequence
  Description of Artificial Sequence: Synthetic oligonucleotide
  Antisense strand to SEQ ID NO: 1685729
uccagcacgucucagaaac

SEQ ID NO: 1685731 - RNA, 19 nt, Artificial Sequence
  Description of Artificial Sequence: Synthetic oligonucleotide
  Sense strand starting at position 676 of SEQ ID NO: 1561622
cugagacgugcuggaaaca

SEQ ID NO: 1685732 - RNA, 19 nt, Artificial Sequence
  Description of Artificial Sequence: Synthetic oligonucleotide
  Antisense strand to SEQ ID NO: 1685731
uguuuccagcacgucucag

SEQ ID NO: 1685733 - RNA, 19 nt, Artificial Sequence
  Description of Artificial Sequence: Synthetic oligonucleotide
  Sense strand starting at position 692 of SEQ ID NO: 1561622
acaacauucccagaguagu

SEQ ID NO: 1685734 - RNA, 19 nt, Artificial Sequence
  Description of Artificial Sequence: Synthetic oligonucleotide
  Antisense strand to SEQ ID NO: 1685733
acuacucugggaauguugu

SEQ ID NO: 1685735 - RNA, 19 nt, Artificial Sequence
  Description of Artificial Sequence: Synthetic oligonucleotide
  Sense strand starting at position 695 of SEQ ID NO: 1561622
acauucccagaguaguuaa

SEQ ID NO: 1685736 - RNA, 19 nt, Artificial Sequence
  Description of Artificial Sequence: Synthetic oligonucleotide
  Antisense strand to SEQ ID NO: 1685735
uuaacuacucugggaaugu

SEQ ID NO: 1685737 - RNA, 19 nt, Artificial Sequence
  Description of Artificial Sequence: Synthetic oligonucleotide
  Sense strand starting at position 724 of SEQ ID NO: 1561622
cugaacugcucucaaaugu

SEQ ID NO: 1685738 - RNA, 19 nt, Artificial Sequence
  Description of Artificial Sequence: Synthetic oligonucleotide
  Antisense strand to SEQ ID NO: 1685737
acauuugagagcaguucag

SEQ ID NO: 1685739 - RNA, 19 nt, Artificial Sequence
  Description of Artificial Sequence: Synthetic oligonucleotide
  Sense strand starting at position 1073 of SEQ ID NO: 1561622
cgagaagucgccuguccug

SEQ ID NO: 1685740 - RNA, 19 nt, Artificial Sequence
  Description of Artificial Sequence: Synthetic oligonucleotide
  Antisense strand to SEQ ID NO: 1685739
caggacaggcgacuucucg

SEQ ID NO: 1685741 - RNA, 19 nt, Artificial Sequence
  Description of Artificial Sequence: Synthetic oligonucleotide
  Sense strand starting at position 1994 of SEQ ID NO: 1561622
gcucuaaccugccaacgau

SEQ ID NO: 1685742 - RNA, 19 nt, Artificial Sequence
  Description of Artificial Sequence: Synthetic oligonucleotide
  Antisense strand to SEQ ID NO: 1685741
aucguuggcagguuagagc

SEQ ID NO: 1685743 - RNA, 19 nt, Artificial Sequence
  Description of Artificial Sequence: Synthetic oligonucleotide
  Sense strand starting at position 2121 of SEQ ID NO: 1561622
ccuauuguugcugugucau

SEQ ID NO: 1685744 - RNA, 19 nt, Artificial Sequence
  Description of Artificial Sequence: Synthetic oligonucleotide
  Antisense strand to SEQ ID NO: 1685743
augacacagcaacaauagg

SEQ ID NO: 1685745 - RNA, 19 nt, Artificial Sequence
  Description of Artificial Sequence: Synthetic oligonucleotide
  Sense strand starting at position 2123 of SEQ ID NO: 1561622
uauuguugcugugucauag

SEQ ID NO: 1685746 - RNA, 19 nt, Artificial Sequence
  Description of Artificial Sequence: Synthetic oligonucleotide
  Antisense strand to SEQ ID NO: 1685745
cuaugacacagcaacaaua

SEQ ID NO: 1685747 - RNA, 19 nt, Artificial Sequence
  Description of Artificial Sequence: Synthetic oligonucleotide
  Sense strand starting at position 2351 of SEQ ID NO: 1561622
agaagugaccauggguuca

SEQ ID NO: 1685748 - RNA, 19 nt, Artificial Sequence
  Description of Artificial Sequence: Synthetic oligonucleotide
  Antisense strand to SEQ ID NO: 1685747
ugaacccauggucacuucu

SEQ ID NO: 1685749 - RNA, 19 nt, Artificial Sequence
  Description of Artificial Sequence: Synthetic oligonucleotide
  Sense strand starting at position 2440 of SEQ ID NO: 1561622
gagggugagaaccgugaua

SEQ ID NO: 1685750 - RNA, 19 nt, Artificial Sequence
  Description of Artificial Sequence: Synthetic oligonucleotide
  Antisense strand to SEQ ID NO: 1685749
uaucacgguucucacccuc

SEQ ID NO: 1685751 - RNA, 19 nt, Artificial Sequence
  Description of Artificial Sequence: Synthetic oligonucleotide
  Sense strand starting at position 2442 of SEQ ID NO: 1561622
gggugagaaccgugauaug

SEQ ID NO: 1685752 - RNA, 19 nt, Artificial Sequence
  Description of Artificial Sequence: Synthetic oligonucleotide
  Antisense strand to SEQ ID NO: 1685751
cauaucacgguucucaccc

SEQ ID NO: 1685753 - RNA, 19 nt, Artificial Sequence
  Description of Artificial Sequence: Synthetic oligonucleotide
  Sense strand starting at position 2453 of SEQ ID NO: 1561622
gugauauggucucagcugu

SEQ ID NO: 1685754 - RNA, 19 nt, Artificial Sequence
  Description of Artificial Sequence: Synthetic oligonucleotide
  Antisense strand to SEQ ID NO: 1685753
acagcugagaccauaucac

SEQ ID NO: 1685755 - RNA, 19 nt, Artificial Sequence
  Description of Artificial Sequence: Synthetic oligonucleotide
  Sense strand starting at position 2459 of SEQ ID NO: 1561622
uggucucagcuguauacau

SEQ ID NO: 1685756 - RNA, 19 nt, Artificial Sequence
  Description of Artificial Sequence: Synthetic oligonucleotide
  Antisense strand to SEQ ID NO: 1685755
auguauacagcugagacca

SEQ ID NO: 1685757 - RNA, 19 nt, Artificial Sequence
  Description of Artificial Sequence: Synthetic oligonucleotide
  Sense strand starting at position 2808 of SEQ ID NO: 1561622
gccaguguuguguaacuuu

SEQ ID NO: 1685758 - RNA, 19 nt, Artificial Sequence
  Description of Artificial Sequence: Synthetic oligonucleotide
  Antisense strand to SEQ ID NO: 1685757
aaaguuacacaacacuggc

SEQ ID NO: 1685759 - RNA, 19 nt, Artificial Sequence
  Description of Artificial Sequence: Synthetic oligonucleotide
  Sense strand starting at position 2817 of SEQ ID NO: 1561622
guguaacuuugagucacuu

SEQ ID NO: 1685760 - RNA, 19 nt, Artificial Sequence
  Description of Artificial Sequence: Synthetic oligonucleotide
  Antisense strand to SEQ ID NO: 1685759
aagugacucaaaguuacac

SEQ ID NO: 1685761 - RNA, 19 nt, Artificial Sequence
  Description of Artificial Sequence: Synthetic oligonucleotide
  Sense strand starting at position 2825 of SEQ ID NO: 1561622
uugagucacuuugacacaa

SEQ ID NO: 1685762 - RNA, 19 nt, Artificial Sequence
  Description of Artificial Sequence: Synthetic oligonucleotide
  Antisense strand to SEQ ID NO: 1685761
uugugucaaagugacucaa

SEQ ID NO: 1685763 - RNA, 19 nt, Artificial Sequence
  Description of Artificial Sequence: Synthetic oligonucleotide
  Sense strand starting at position 2896 of SEQ ID NO: 1561622
gggacacguucuuugggau

SEQ ID NO: 1685764 - RNA, 19 nt, Artificial Sequence
  Description of Artificial Sequence: Synthetic oligonucleotide
  Antisense strand to SEQ ID NO: 1685763
aucccaaagaacguguccc

SEQ ID NO: 1685765 - RNA, 19 nt, Artificial Sequence
  Description of Artificial Sequence: Synthetic oligonucleotide
  Sense strand starting at position 2897 of SEQ ID NO: 1561622
ggacacguucuuugggauu

SEQ ID NO: 1685766 - RNA, 19 nt, Artificial Sequence
  Description of Artificial Sequence: Synthetic oligonucleotide
  Antisense strand to SEQ ID NO: 1685765
aaucccaaagaacgugucc

SEQ ID NO: 1685767 - RNA, 19 nt, Artificial Sequence
  Description of Artificial Sequence: Synthetic oligonucleotide
  Sense strand starting at position 3329 of SEQ ID NO: 1561622
uaagcaagacuagauguuu

SEQ ID NO: 1685768 - RNA, 19 nt, Artificial Sequence
  Description of Artificial Sequence: Synthetic oligonucleotide
  Antisense strand to SEQ ID NO: 1685767
aaacaucuagucuugcuua

SEQ ID NO: 1685769 - RNA, 19 nt, Artificial Sequence
  Description of Artificial Sequence: Synthetic oligonucleotide
  Sense strand starting at position 3337 of SEQ ID NO: 1561622
acuagauguuugcagcuga

SEQ ID NO: 1685770 - RNA, 19 nt, Artificial Sequence
  Description of Artificial Sequence: Synthetic oligonucleotide
  Antisense strand to SEQ ID NO: 1685769
ucagcugcaaacaucuagu

SEQ ID NO: 1685771 - RNA, 19 nt, Artificial Sequence
  Description of Artificial Sequence: Synthetic oligonucleotide
  Sense strand starting at position 3493 of SEQ ID NO: 1561622
gugcuuacgugcucucuga

SEQ ID NO: 1685772 - RNA, 19 nt, Artificial Sequence
  Description of Artificial Sequence: Synthetic oligonucleotide
  Antisense strand to SEQ ID NO: 1685771
ucagagagcacguaagcac

SEQ ID NO: 1685773 - RNA, 19 nt, Artificial Sequence
  Description of Artificial Sequence: Synthetic oligonucleotide
  Sense strand starting at position 3506 of SEQ ID NO: 1561622
cucugaggucuuuaggugu

SEQ ID NO: 1685774 - RNA, 19 nt, Artificial Sequence
  Description of Artificial Sequence: Synthetic oligonucleotide
  Antisense strand to SEQ ID NO: 1685773
acaccuaaagaccucagag

SEQ ID NO: 1685775 - RNA, 19 nt, Artificial Sequence
  Description of Artificial Sequence: Synthetic oligonucleotide
  Sense strand starting at position 3545 of SEQ ID NO: 1561622
ugggagaugcguugguguu

SEQ ID NO: 1685776 - RNA, 19 nt, Artificial Sequence
  Description of Artificial Sequence: Synthetic oligonucleotide
  Antisense strand to SEQ ID NO: 1685775
aacaccaacgcaucuccca

SEQ ID NO: 1685777 - RNA, 19 nt, Artificial Sequence
  Description of Artificial Sequence: Synthetic oligonucleotide
  Sense strand starting at position 3634 of SEQ ID NO: 1561622
gagcuugugccaguuaugu

SEQ ID NO: 1685778 - RNA, 19 nt, Artificial Sequence
  Description of Artificial Sequence: Synthetic oligonucleotide
  Antisense strand to SEQ ID NO: 1685777
acauaacuggcacaagcuc

SEQ ID NO: 1685779 - RNA, 19 nt, Artificial Sequence
  Description of Artificial Sequence: Synthetic oligonucleotide
  Sense strand starting at position 3636 of SEQ ID NO: 1561622
gcuugugccaguuauguuu

SEQ ID NO: 1685780 - RNA, 19 nt, Artificial Sequence
  Description of Artificial Sequence: Synthetic oligonucleotide
  Antisense strand to SEQ ID NO: 1685779
aaacauaacuggcacaagc

SEQ ID NO: 1685781 - RNA, 19 nt, Artificial Sequence
  Description of Artificial Sequence: Synthetic oligonucleotide
  Sense strand starting at position 3640 of SEQ ID NO: 1561622
gugccaguuauguuuaguu

SEQ ID NO: 1685782 - RNA, 19 nt, Artificial Sequence
  Description of Artificial Sequence: Synthetic oligonucleotide
  Antisense strand to SEQ ID NO: 1685781
aacuaaacauaacuggcac

SEQ ID NO: 1685783 - RNA, 19 nt, Artificial Sequence
  Description of Artificial Sequence: Synthetic oligonucleotide
  Sense strand starting at position 3644 of SEQ ID NO: 1561622
caguuauguuuaguugcca

SEQ ID NO: 1685784 - RNA, 19 nt, Artificial Sequence
  Description of Artificial Sequence: Synthetic oligonucleotide
  Antisense strand to SEQ ID NO: 1685783
uggcaacuaaacauaacug

SEQ ID NO: 1685785 - RNA, 19 nt, Artificial Sequence
  Description of Artificial Sequence: Synthetic oligonucleotide
  Sense strand starting at position 3690 of SEQ ID NO: 1561622
ugaaacauugauugagcua

SEQ ID NO: 1685786 - RNA, 19 nt, Artificial Sequence
  Description of Artificial Sequence: Synthetic oligonucleotide
  Antisense strand to SEQ ID NO: 1685785
uagcucaaucaauguuuca

SEQ ID NO: 1685787 - RNA, 19 nt, Artificial Sequence
  Description of Artificial Sequence: Synthetic oligonucleotide
  Sense strand starting at position 3761 of SEQ ID NO: 1561622
uguguuaacagguaguaag

SEQ ID NO: 1685788 - RNA, 19 nt, Artificial Sequence
  Description of Artificial Sequence: Synthetic oligonucleotide
  Antisense strand to SEQ ID NO: 1685787
cuuacuaccuguuaacaca

SEQ ID NO: 1685789 - RNA, 19 nt, Artificial Sequence
  Description of Artificial Sequence: Synthetic oligonucleotide
  Sense strand starting at position 3771 of SEQ ID NO: 1561622
gguaguaaguuuguuauug

SEQ ID NO: 1685790 - RNA, 19 nt, Artificial Sequence
  Description of Artificial Sequence: Synthetic oligonucleotide
  Antisense strand to SEQ ID NO: 1685789
caauaacaaacuuacuacc

SEQ ID NO: 1685791 - RNA, 19 nt, Artificial Sequence
  Description of Artificial Sequence: Synthetic oligonucleotide
  Sense strand starting at position 3772 of SEQ ID NO: 1561622
guaguaaguuuguuauugu

SEQ ID NO: 1685792 - RNA, 19 nt, Artificial Sequence
  Description of Artificial Sequence: Synthetic oligonucleotide
  Antisense strand to SEQ ID NO: 1685791
acaauaacaaacuuacuac

SEQ ID NO: 1685793 - RNA, 19 nt, Artificial Sequence
  Description of Artificial Sequence: Synthetic oligonucleotide
  Sense strand starting at position 3825 of SEQ ID NO: 1561622
cuuaauuccuaguauggua

SEQ ID NO: 1685794 - RNA, 19 nt, Artificial Sequence
  Description of Artificial Sequence: Synthetic oligonucleotide
  Antisense strand to SEQ ID NO: 1685793
uaccauacuaggaauuaag

SEQ ID NO: 1685795 - RNA, 19 nt, Artificial Sequence
  Description of Artificial Sequence: Synthetic oligonucleotide
  Sense strand starting at position 3830 of SEQ ID NO: 1561622
uuccuaguaugguaaaugu

SEQ ID NO: 1685796 - RNA, 19 nt, Artificial Sequence
  Description of Artificial Sequence: Synthetic oligonucleotide
  Antisense strand to SEQ ID NO: 1685795
acauuuaccauacuaggaa

SEQ ID NO: 1685797 - RNA, 19 nt, Artificial Sequence
  Description of Artificial Sequence: Synthetic oligonucleotide
  Sense strand starting at position 3837 of SEQ ID NO: 1561622
uaugguaaaugucaauaga

SEQ ID NO: 1685798 - RNA, 19 nt, Artificial Sequence
  Description of Artificial Sequence: Synthetic oligonucleotide
  Antisense strand to SEQ ID NO: 1685797
ucuauugacauuuaccaua

SEQ ID NO: 1685799 - RNA, 19 nt, Artificial Sequence
  Description of Artificial Sequence: Synthetic oligonucleotide
  Sense strand starting at position 82 of SEQ ID NO: 1561623
cuguaaacaucaguuucuu

SEQ ID NO: 1685800 - RNA, 19 nt, Artificial Sequence
  Description of Artificial Sequence: Synthetic oligonucleotide
  Antisense strand to SEQ ID NO: 1685799
aagaaacugauguuuacag

SEQ ID NO: 1685801 - RNA, 19 nt, Artificial Sequence
  Description of Artificial Sequence: Synthetic oligonucleotide
  Sense strand starting at position 115 of SEQ ID NO: 1561623
ggauaaucaucccuagcuu

SEQ ID NO: 1685802 - RNA, 19 nt, Artificial Sequence
  Description of Artificial Sequence: Synthetic oligonucleotide
  Antisense strand to SEQ ID NO: 1685801
aagcuagggaugauuaucc

SEQ ID NO: 1685803 - RNA, 19 nt, Artificial Sequence
  Description of Artificial Sequence: Synthetic oligonucleotide
  Sense strand starting at position 132 of SEQ ID NO: 1561623
uugcuaugcgccuuaagua

SEQ ID NO: 1685804 - RNA, 19 nt, Artificial Sequence
  Description of Artificial Sequence: Synthetic oligonucleotide
  Antisense strand to SEQ ID NO: 1685803
uacuuaaggcgcauagcaa

SEQ ID NO: 1685805 - RNA, 19 nt, Artificial Sequence
  Description of Artificial Sequence: Synthetic oligonucleotide
  Sense strand starting at position 137 of SEQ ID NO: 1561623
augcgccuuaaguaaagau

SEQ ID NO: 1685806 - RNA, 19 nt, Artificial Sequence
  Description of Artificial Sequence: Synthetic oligonucleotide
  Antisense strand to SEQ ID NO: 1685805
aucuuuacuuaaggcgcau

SEQ ID NO: 1685807 - RNA, 19 nt, Artificial Sequence
  Description of Artificial Sequence: Synthetic oligonucleotide
  Sense strand starting at position 382 of SEQ ID NO: 1561623
gagacagucuacucuggua

SEQ ID NO: 1685808 - RNA, 19 nt, Artificial Sequence
  Description of Artificial Sequence: Synthetic oligonucleotide
  Antisense strand to SEQ ID NO: 1685807
uaccagaguagacugucuc

SEQ ID NO: 1685809 - RNA, 19 nt, Artificial Sequence
  Description of Artificial Sequence: Synthetic oligonucleotide
  Sense strand starting at position 419 of SEQ ID NO: 1561623
ucaacagaaucuuugcaag

SEQ ID NO: 1685810 - RNA, 19 nt, Artificial Sequence
  Description of Artificial Sequence: Synthetic oligonucleotide
  Antisense strand to SEQ ID NO: 1685809
cuugcaaagauucuguuga

SEQ ID NO: 1685811 - RNA, 19 nt, Artificial Sequence
  Description of Artificial Sequence: Synthetic oligonucleotide
  Sense strand starting at position 464 of SEQ ID NO: 1561623
gcucuauauaacgggauua

SEQ ID NO: 1685812 - RNA, 19 nt, Artificial Sequence
  Description of Artificial Sequence: Synthetic oligonucleotide
  Antisense strand to SEQ ID NO: 1685811
uaaucccguuauauagagc

SEQ ID NO: 1685813 - RNA, 19 nt, Artificial Sequence
  Description of Artificial Sequence: Synthetic oligonucleotide
  Sense strand starting at position 483 of SEQ ID NO: 1561623
cguccaccucuaugaagau

SEQ ID NO: 1685814 - RNA, 19 nt, Artificial Sequence
  Description of Artificial Sequence: Synthetic oligonucleotide
  Antisense strand to SEQ ID NO: 1685813
aucuucauagagguggacg

SEQ ID NO: 1685815 - RNA, 19 nt, Artificial Sequence
  Description of Artificial Sequence: Synthetic oligonucleotide
  Sense strand starting at position 492 of SEQ ID NO: 1561623
cuaugaagauuauugugua

SEQ ID NO: 1685816 - RNA, 19 nt, Artificial Sequence
  Description of Artificial Sequence: Synthetic oligonucleotide
  Antisense strand to SEQ ID NO: 1685815
uacacaauaaucuucauag

SEQ ID NO: 1685817 - RNA, 19 nt, Artificial Sequence
  Description of Artificial Sequence: Synthetic oligonucleotide
  Sense strand starting at position 496 of SEQ ID NO: 1561623
gaagauuauuguguaaaca

SEQ ID NO: 1685818 - RNA, 19 nt, Artificial Sequence
  Description of Artificial Sequence: Synthetic oligonucleotide
  Antisense strand to SEQ ID NO: 1685817
uguuuacacaauaaucuuc

SEQ ID NO: 1685819 - RNA, 19 nt, Artificial Sequence
  Description of Artificial Sequence: Synthetic oligonucleotide
  Sense strand starting at position 514 of SEQ ID NO: 1561623
acacguaaaucaccagaua

SEQ ID NO: 1685820 - RNA, 19 nt, Artificial Sequence
  Description of Artificial Sequence: Synthetic oligonucleotide
  Antisense strand to SEQ ID NO: 1685819
uaucuggugauuuacgugu

SEQ ID NO: 1685821 - RNA, 19 nt, Artificial Sequence
  Description of Artificial Sequence: Synthetic oligonucleotide
  Sense strand starting at position 548 of SEQ ID NO: 1561623
cauaaauguggauggcauu

SEQ ID NO: 1685822 - RNA, 19 nt, Artificial Sequence
  Description of Artificial Sequence: Synthetic oligonucleotide
  Antisense strand to SEQ ID NO: 1685821
aaugccauccacauuuaug

SEQ ID NO: 1685823 - RNA, 19 nt, Artificial Sequence
  Description of Artificial Sequence: Synthetic oligonucleotide
  Sense strand starting at position 558 of SEQ ID NO: 1561623
gauggcauucuccagacuu

SEQ ID NO: 1685824 - RNA, 19 nt, Artificial Sequence
  Description of Artificial Sequence: Synthetic oligonucleotide
  Antisense strand to SEQ ID NO: 1685823
aagucuggagaaugccauc

SEQ ID NO: 1685825 - RNA, 19 nt, Artificial Sequence
  Description of Artificial Sequence: Synthetic oligonucleotide
  Sense strand starting at position 560 of SEQ ID NO: 1561623
uggcauucuccagacuuaa

SEQ ID NO: 1685826 - RNA, 19 nt, Artificial Sequence
  Description of Artificial Sequence: Synthetic oligonucleotide
  Antisense strand to SEQ ID NO: 1685825
uuaagucuggagaaugcca

SEQ ID NO: 1685827 - RNA, 19 nt, Artificial Sequence
  Description of Artificial Sequence: Synthetic oligonucleotide
  Sense strand starting at position 897 of SEQ ID NO: 1561623
gugucaaaguuacuugaaa

SEQ ID NO: 1685828 - RNA, 19 nt, Artificial Sequence
  Description of Artificial Sequence: Synthetic oligonucleotide
  Antisense strand to SEQ ID NO: 1685827
uuucaaguaacuuugacac

SEQ ID NO: 1685829 - RNA, 19 nt, Artificial Sequence
  Description of Artificial Sequence: Synthetic oligonucleotide
  Sense strand starting at position 969 of SEQ ID NO: 1561623
gcguguauucgcuugcaca

SEQ ID NO: 1685830 - RNA, 19 nt, Artificial Sequence
  Description of Artificial Sequence: Synthetic oligonucleotide
  Antisense strand to SEQ ID NO: 1685829
ugugcaagcgaauacacgc

SEQ ID NO: 1685831 - RNA, 19 nt, Artificial Sequence
  Description of Artificial Sequence: Synthetic oligonucleotide
  Sense strand starting at position 971 of SEQ ID NO: 1561623
guguauucgcuugcacaca

SEQ ID NO: 1685832 - RNA, 19 nt, Artificial Sequence
  Description of Artificial Sequence: Synthetic oligonucleotide
  Antisense strand to SEQ ID NO: 1685831
ugugugcaagcgaauacac

SEQ ID NO: 1685833 - RNA, 19 nt, Artificial Sequence
  Description of Artificial Sequence: Synthetic oligonucleotide
  Sense strand starting at position 999 of SEQ ID NO: 1561623
gggugcgcucagagaucua

SEQ ID NO: 1685834 - RNA, 19 nt, Artificial Sequence
  Description of Artificial Sequence: Synthetic oligonucleotide
  Antisense strand to SEQ ID NO: 1685833
uagaucucugagcgcaccc

SEQ ID NO: 1685835 - RNA, 19 nt, Artificial Sequence
  Description of Artificial Sequence: Synthetic oligonucleotide
  Sense strand starting at position 1074 of SEQ ID NO: 1561623
uuaccucugccucaggauu

SEQ ID NO: 1685836 - RNA, 19 nt, Artificial Sequence
  Description of Artificial Sequence: Synthetic oligonucleotide
  Antisense strand to SEQ ID NO: 1685835
aauccugaggcagagguaa

SEQ ID NO: 1685837 - RNA, 19 nt, Artificial Sequence
  Description of Artificial Sequence: Synthetic oligonucleotide
  Sense strand starting at position 1082 of SEQ ID NO: 1561623
gccucaggauucucaucau

SEQ ID NO: 1685838 - RNA, 19 nt, Artificial Sequence
  Description of Artificial Sequence: Synthetic oligonucleotide
  Antisense strand to SEQ ID NO: 1685837
augaugagaauccugaggc

SEQ ID NO: 1685839 - RNA, 19 nt, Artificial Sequence
  Description of Artificial Sequence: Synthetic oligonucleotide
  Sense strand starting at position 1105 of SEQ ID NO: 1561623
ugagaacaguuucccuaua

SEQ ID NO: 1685840 - RNA, 19 nt, Artificial Sequence
  Description of Artificial Sequence: Synthetic oligonucleotide
  Antisense strand to SEQ ID NO: 1685839
uauagggaaacuguucuca

SEQ ID NO: 1685841 - RNA, 19 nt, Artificial Sequence
  Description of Artificial Sequence: Synthetic oligonucleotide
  Sense strand starting at position 1107 of SEQ ID NO: 1561623
agaacaguuucccuauaga

SEQ ID NO: 1685842 - RNA, 19 nt, Artificial Sequence
  Description of Artificial Sequence: Synthetic oligonucleotide
  Antisense strand to SEQ ID NO: 1685841
ucuauagggaaacuguucu

SEQ ID NO: 1685843 - RNA, 19 nt, Artificial Sequence
  Description of Artificial Sequence: Synthetic oligonucleotide
  Sense strand starting at position 1118 of SEQ ID NO: 1561623
ccuauagagccaugagacu

SEQ ID NO: 1685844 - RNA, 19 nt, Artificial Sequence
  Description of Artificial Sequence: Synthetic oligonucleotide
  Antisense strand to SEQ ID NO: 1685843
agucucauggcucuauagg

SEQ ID NO: 1685845 - RNA, 19 nt, Artificial Sequence
  Description of Artificial Sequence: Synthetic oligonucleotide
  Sense strand starting at position 1177 of SEQ ID NO: 1561623
cuaaguaaacguuaacuau

SEQ ID NO: 1685846 - RNA, 19 nt, Artificial Sequence
  Description of Artificial Sequence: Synthetic oligonucleotide
  Antisense strand to SEQ ID NO: 1685845
auaguuaacguuuacuuag

SEQ ID NO: 1685847 - RNA, 19 nt, Artificial Sequence
  Description of Artificial Sequence: Synthetic oligonucleotide
  Sense strand starting at position 1187 of SEQ ID NO: 1561623
guuaacuaucccuguauua

SEQ ID NO: 1685848 - RNA, 19 nt, Artificial Sequence
  Description of Artificial Sequence: Synthetic oligonucleotide
  Antisense strand to SEQ ID NO: 1685847
uaauacagggauaguuaac

SEQ ID NO: 1685849 - RNA, 19 nt, Artificial Sequence
  Description of Artificial Sequence: Synthetic oligonucleotide
  Sense strand starting at position 1573 of SEQ ID NO: 1561623
ccaguuugcggcucgcaga

SEQ ID NO: 1685850 - RNA, 19 nt, Artificial Sequence
  Description of Artificial Sequence: Synthetic oligonucleotide
  Antisense strand to SEQ ID NO: 1685849
ucugcgagccgcaaacugg

SEQ ID NO: 1685851 - RNA, 19 nt, Artificial Sequence
  Description of Artificial Sequence: Synthetic oligonucleotide
  Sense strand starting at position 1957 of SEQ ID NO: 1561623
ggcgccgacgccuuuaaau

SEQ ID NO: 1685852 - RNA, 19 nt, Artificial Sequence
  Description of Artificial Sequence: Synthetic oligonucleotide
  Antisense strand to SEQ ID NO: 1685851
auuuaaaggcgucggcgcc

SEQ ID NO: 1685853 - RNA, 19 nt, Artificial Sequence
  Description of Artificial Sequence: Synthetic oligonucleotide
  Sense strand starting at position 2265 of SEQ ID NO: 1561623
ugacaucugccacacagau

SEQ ID NO: 1685854 - RNA, 19 nt, Artificial Sequence
  Description of Artificial Sequence: Synthetic oligonucleotide
  Antisense strand to SEQ ID NO: 1685853
aucuguguggcagauguca

SEQ ID NO: 1685855 - RNA, 19 nt, Artificial Sequence
  Description of Artificial Sequence: Synthetic oligonucleotide
  Sense strand starting at position 2611 of SEQ ID NO: 1561623
aguugccauuugucaggua

SEQ ID NO: 1685856 - RNA, 19 nt, Artificial Sequence
  Description of Artificial Sequence: Synthetic oligonucleotide
  Antisense strand to SEQ ID NO: 1685855
uaccugacaaauggcaacu

SEQ ID NO: 1685857 - RNA, 19 nt, Artificial Sequence
  Description of Artificial Sequence: Synthetic oligonucleotide
  Sense strand starting at position 2649 of SEQ ID NO: 1561623
uucgccuuacuccaaguaa

SEQ ID NO: 1685858 - RNA, 19 nt, Artificial Sequence
  Description of Artificial Sequence: Synthetic oligonucleotide
  Antisense strand to SEQ ID NO: 1685857
uuacuuggaguaaggcgaa

SEQ ID NO: 1685859 - RNA, 19 nt, Artificial Sequence
  Description of Artificial Sequence: Synthetic oligonucleotide
  Sense strand starting at position 2682 of SEQ ID NO: 1561623
uuaaguaaguuugcauaca

SEQ ID NO: 1685860 - RNA, 19 nt, Artificial Sequence
  Description of Artificial Sequence: Synthetic oligonucleotide
  Antisense strand to SEQ ID NO: 1685859
uguaugcaaacuuacuuaa

SEQ ID NO: 1685861 - RNA, 19 nt, Artificial Sequence
  Description of Artificial Sequence: Synthetic oligonucleotide
  Sense strand starting at position 2715 of SEQ ID NO: 1561623
acugcauccguauaucauu

SEQ ID NO: 1685862 - RNA, 19 nt, Artificial Sequence
  Description of Artificial Sequence: Synthetic oligonucleotide
  Antisense strand to SEQ ID NO: 1685861
aaugauauacggaugcagu

SEQ ID NO: 1685863 - RNA, 19 nt, Artificial Sequence
  Description of Artificial Sequence: Synthetic oligonucleotide
  Sense strand starting at position 2721 of SEQ ID NO: 1561623
uccguauaucauuaaauag

SEQ ID NO: 1685864 - RNA, 19 nt, Artificial Sequence
  Description of Artificial Sequence: Synthetic oligonucleotide
  Antisense strand to SEQ ID NO: 1685863
cuauuuaaugauauacgga

SEQ ID NO: 1685865 - RNA, 19 nt, Artificial Sequence
  Description of Artificial Sequence: Synthetic oligonucleotide
  Sense strand starting at position 2818 of SEQ ID NO: 1561623
gagacucaugcauauagcu

SEQ ID NO: 1685866 - RNA, 19 nt, Artificial Sequence
  Description of Artificial Sequence: Synthetic oligonucleotide
  Antisense strand to SEQ ID NO: 1685865
agcuauaugcaugagucuc

SEQ ID NO: 1685867 - RNA, 19 nt, Artificial Sequence
  Description of Artificial Sequence: Synthetic oligonucleotide
  Sense strand starting at position 2826 of SEQ ID NO: 1561623
ugcauauagcuugaguaua

SEQ ID NO: 1685868 - RNA, 19 nt, Artificial Sequence
  Description of Artificial Sequence: Synthetic oligonucleotide
  Antisense strand to SEQ ID NO: 1685867
uauacucaagcuauaugca

SEQ ID NO: 1685869 - RNA, 19 nt, Artificial Sequence
  Description of Artificial Sequence: Synthetic oligonucleotide
  Sense strand starting at position 2957 of SEQ ID NO: 1561623
gaggcaguauuggcauaua

SEQ ID NO: 1685870 - RNA, 19 nt, Artificial Sequence
  Description of Artificial Sequence: Synthetic oligonucleotide
  Antisense strand to SEQ ID NO: 1685869
uauaugccaauacugccuc

SEQ ID NO: 1685871 - RNA, 19 nt, Artificial Sequence
  Description of Artificial Sequence: Synthetic oligonucleotide
  Sense strand starting at position 3938 of SEQ ID NO: 1561623
gaauuaaggucuucuauga

SEQ ID NO: 1685872 - RNA, 19 nt, Artificial Sequence
  Description of Artificial Sequence: Synthetic oligonucleotide
  Antisense strand to SEQ ID NO: 1685871
ucauagaagaccuuaauuc

SEQ ID NO: 1685873 - RNA, 19 nt, Artificial Sequence
  Description of Artificial Sequence: Synthetic oligonucleotide
  Sense strand starting at position 3960 of SEQ ID NO: 1561623
aguaaauguauuggucuca

SEQ ID NO: 1685874 - RNA, 19 nt, Artificial Sequence
  Description of Artificial Sequence: Synthetic oligonucleotide
  Antisense strand to SEQ ID NO: 1685873
ugagaccaauacauuuacu

SEQ ID NO: 1685875 - RNA, 19 nt, Artificial Sequence
  Description of Artificial Sequence: Synthetic oligonucleotide
  Sense strand starting at position 3976 of SEQ ID NO: 1561623
ucacuugaucuguacaucu

SEQ ID NO: 1685876 - RNA, 19 nt, Artificial Sequence
  Description of Artificial Sequence: Synthetic oligonucleotide
  Antisense strand to SEQ ID NO: 1685875
agauguacagaucaaguga

SEQ ID NO: 1685877 - RNA, 19 nt, Artificial Sequence
  Description of Artificial Sequence: Synthetic oligonucleotide
  Sense strand starting at position 3978 of SEQ ID NO: 1561623
acuugaucuguacaucuga

SEQ ID NO: 1685878 - RNA, 19 nt, Artificial Sequence
  Description of Artificial Sequence: Synthetic oligonucleotide
  Antisense strand to SEQ ID NO: 1685877
ucagauguacagaucaagu

SEQ ID NO: 1685879 - RNA, 19 nt, Artificial Sequence
  Description of Artificial Sequence: Synthetic oligonucleotide
  Sense strand starting at position 545 of SEQ ID NO: 1561624
ccaugcccggcugauuaau

SEQ ID NO: 1685880 - RNA, 19 nt, Artificial Sequence
  Description of Artificial Sequence: Synthetic oligonucleotide
  Antisense strand to SEQ ID NO: 1685879
auuaaucagccgggcaugg

SEQ ID NO: 1685881 - RNA, 19 nt, Artificial Sequence
  Description of Artificial Sequence: Synthetic oligonucleotide
  Sense strand starting at position 665 of SEQ ID NO: 1561624
gggauuguacauuggcaca

SEQ ID NO: 1685882 - RNA, 19 nt, Artificial Sequence
  Description of Artificial Sequence: Synthetic oligonucleotide
  Antisense strand to SEQ ID NO: 1685881
ugugccaauguacaauccc

SEQ ID NO: 1685883 - RNA, 19 nt, Artificial Sequence
  Description of Artificial Sequence: Synthetic oligonucleotide
  Sense strand starting at position 691 of SEQ ID NO: 1561624
ugaacaacacucugguaau

SEQ ID NO: 1685884 - RNA, 19 nt, Artificial Sequence
  Description of Artificial Sequence: Synthetic oligonucleotide
  Antisense strand to SEQ ID NO: 1685883
auuaccagaguguuguuca

SEQ ID NO: 1685885 - RNA, 19 nt, Artificial Sequence
  Description of Artificial Sequence: Synthetic oligonucleotide
  Sense strand starting at position 704 of SEQ ID NO: 1561624
gguaauaacuaacaagauu

SEQ ID NO: 1685886 - RNA, 19 nt, Artificial Sequence
  Description of Artificial Sequence: Synthetic oligonucleotide
  Antisense strand to SEQ ID NO: 1685885
aaucuuguuaguuauuacc

SEQ ID NO: 1685887 - RNA, 19 nt, Artificial Sequence
  Description of Artificial Sequence: Synthetic oligonucleotide
  Sense strand starting at position 762 of SEQ ID NO: 1561624
aggaauuuauuccaaagau

SEQ ID NO: 1685888 - RNA, 19 nt, Artificial Sequence
  Description of Artificial Sequence: Synthetic oligonucleotide
  Antisense strand to SEQ ID NO: 1685887
aucuuuggaauaaauuccu

SEQ ID NO: 1685889 - RNA, 19 nt, Artificial Sequence
  Description of Artificial Sequence: Synthetic oligonucleotide
  Sense strand starting at position 771 of SEQ ID NO: 1561624
uuccaaagauguuuguaca

SEQ ID NO: 1685890 - RNA, 19 nt, Artificial Sequence
  Description of Artificial Sequence: Synthetic oligonucleotide
  Antisense strand to SEQ ID NO: 1685889
uguacaaacaucuuuggaa

SEQ ID NO: 1685891 - RNA, 19 nt, Artificial Sequence
  Description of Artificial Sequence: Synthetic oligonucleotide
  Sense strand starting at position 781 of SEQ ID NO: 1561624
guuuguacacaugagcaaa

SEQ ID NO: 1685892 - RNA, 19 nt, Artificial Sequence
  Description of Artificial Sequence: Synthetic oligonucleotide
  Antisense strand to SEQ ID NO: 1685891
uuugcucauguguacaaac

SEQ ID NO: 1685893 - RNA, 19 nt, Artificial Sequence
  Description of Artificial Sequence: Synthetic oligonucleotide
  Sense strand starting at position 819 of SEQ ID NO: 1561624
acuguccuuccauggaaga

SEQ ID NO: 1685894 - RNA, 19 nt, Artificial Sequence
  Description of Artificial Sequence: Synthetic oligonucleotide
  Antisense strand to SEQ ID NO: 1685893
ucuuccauggaaggacagu

SEQ ID NO: 1685895 - RNA, 19 nt, Artificial Sequence
  Description of Artificial Sequence: Synthetic oligonucleotide
  Sense strand starting at position 872 of SEQ ID NO: 1561624
ggaauaugcagauagccau

SEQ ID NO: 1685896 - RNA, 19 nt, Artificial Sequence
  Description of Artificial Sequence: Synthetic oligonucleotide
  Antisense strand to SEQ ID NO: 1685895
auggcuaucugcauauucc

SEQ ID NO: 1685897 - RNA, 19 nt, Artificial Sequence
  Description of Artificial Sequence: Synthetic oligonucleotide
  Sense strand starting at position 903 of SEQ ID NO: 1561624
augagcuguuuaucuaaca

SEQ ID NO: 1685898 - RNA, 19 nt, Artificial Sequence
  Description of Artificial Sequence: Synthetic oligonucleotide
  Antisense strand to SEQ ID NO: 1685897
uguuagauaaacagcucau

SEQ ID NO: 1685899 - RNA, 19 nt, Artificial Sequence
  Description of Artificial Sequence: Synthetic oligonucleotide
  Sense strand starting at position 904 of SEQ ID NO: 1561624
ugagcuguuuaucuaacaa

SEQ ID NO: 1685900 - RNA, 19 nt, Artificial Sequence
  Description of Artificial Sequence: Synthetic oligonucleotide
  Antisense strand to SEQ ID NO: 1685899
uuguuagauaaacagcuca

SEQ ID NO: 1685901 - RNA, 19 nt, Artificial Sequence
  Description of Artificial Sequence: Synthetic oligonucleotide
  Sense strand starting at position 1405 of SEQ ID NO: 1561624
guaugcgauuauuuaugua

SEQ ID NO: 1685902 - RNA, 19 nt, Artificial Sequence
  Description of Artificial Sequence: Synthetic oligonucleotide
  Antisense strand to SEQ ID NO: 1685901
uacauaaauaaucgcauac

SEQ ID NO: 1685903 - RNA, 19 nt, Artificial Sequence
  Description of Artificial Sequence: Synthetic oligonucleotide
  Sense strand starting at position 1847 of SEQ ID NO: 1561624
gaggcuucgagaugggaua

SEQ ID NO: 1685904 - RNA, 19 nt, Artificial Sequence
  Description of Artificial Sequence: Synthetic oligonucleotide
  Antisense strand to SEQ ID NO: 1685903
uaucccaucucgaagccuc

SEQ ID NO: 1685905 - RNA, 19 nt, Artificial Sequence
  Description of Artificial Sequence: Synthetic oligonucleotide
  Sense strand starting at position 1916 of SEQ ID NO: 1561624
uaagcaguucuguggaguu

SEQ ID NO: 1685906 - RNA, 19 nt, Artificial Sequence
  Description of Artificial Sequence: Synthetic oligonucleotide
  Antisense strand to SEQ ID NO: 1685905
aacuccacagaacugcuua

SEQ ID NO: 1685907 - RNA, 19 nt, Artificial Sequence
  Description of Artificial Sequence: Synthetic oligonucleotide
  Sense strand starting at position 2186 of SEQ ID NO: 1561624
gcccuccagacucguagaa

SEQ ID NO: 1685908 - RNA, 19 nt, Artificial Sequence
  Description of Artificial Sequence: Synthetic oligonucleotide
  Antisense strand to SEQ ID NO: 1685907
uucuacgagucuggagggc

SEQ ID NO: 1685909 - RNA, 19 nt, Artificial Sequence
  Description of Artificial Sequence: Synthetic oligonucleotide
  Sense strand starting at position 2292 of SEQ ID NO: 1561624
gguucuauaucauuauauc

SEQ ID NO: 1685910 - RNA, 19 nt, Artificial Sequence
  Description of Artificial Sequence: Synthetic oligonucleotide
  Antisense strand to SEQ ID NO: 1685909
gauauaaugauauagaacc

SEQ ID NO: 1685911 - RNA, 19 nt, Artificial Sequence
  Description of Artificial Sequence: Synthetic oligonucleotide
  Sense strand starting at position 2311 of SEQ ID NO: 1561624
gaaaucaucugauuaugug

SEQ ID NO: 1685912 - RNA, 19 nt, Artificial Sequence
  Description of Artificial Sequence: Synthetic oligonucleotide
  Antisense strand to SEQ ID NO: 1685911
cacauaaucagaugauuuc

SEQ ID NO: 1685913 - RNA, 19 nt, Artificial Sequence
  Description of Artificial Sequence: Synthetic oligonucleotide
  Sense strand starting at position 2320 of SEQ ID NO: 1561624
ugauuaugugccuguccca

SEQ ID NO: 1685914 - RNA, 19 nt, Artificial Sequence
  Description of Artificial Sequence: Synthetic oligonucleotide
  Antisense strand to SEQ ID NO: 1685913
ugggacaggcacauaauca

SEQ ID NO: 1685915 - RNA, 19 nt, Artificial Sequence
  Description of Artificial Sequence: Synthetic oligonucleotide
  Sense strand starting at position 2323 of SEQ ID NO: 1561624
uuaugugccugucccauua

SEQ ID NO: 1685916 - RNA, 19 nt, Artificial Sequence
  Description of Artificial Sequence: Synthetic oligonucleotide
  Antisense strand to SEQ ID NO: 1685915
uaaugggacaggcacauaa

SEQ ID NO: 1685917 - RNA, 19 nt, Artificial Sequence
  Description of Artificial Sequence: Synthetic oligonucleotide
  Sense strand starting at position 2425 of SEQ ID NO: 1561624
acacaauauuugggaauga

SEQ ID NO: 1685918 - RNA, 19 nt, Artificial Sequence
  Description of Artificial Sequence: Synthetic oligonucleotide
  Antisense strand to SEQ ID NO: 1685917
ucauucccaaauauugugu

SEQ ID NO: 1685919 - RNA, 19 nt, Artificial Sequence
  Description of Artificial Sequence: Synthetic oligonucleotide
  Sense strand starting at position 2440 of SEQ ID NO: 1561624
augaauuaauguucccaga

SEQ ID NO: 1685920 - RNA, 19 nt, Artificial Sequence
  Description of Artificial Sequence: Synthetic oligonucleotide
  Antisense strand to SEQ ID NO: 1685919
ucugggaacauuaauucau

SEQ ID NO: 1685921 - RNA, 19 nt, Artificial Sequence
  Description of Artificial Sequence: Synthetic oligonucleotide
  Sense strand starting at position 2442 of SEQ ID NO: 1561624
gaauuaauguucccagaug

SEQ ID NO: 1685922 - RNA, 19 nt, Artificial Sequence
  Description of Artificial Sequence: Synthetic oligonucleotide
  Antisense strand to SEQ ID NO: 1685921
caucugggaacauuaauuc

SEQ ID NO: 1685923 - RNA, 19 nt, Artificial Sequence
  Description of Artificial Sequence: Synthetic oligonucleotide
  Sense strand starting at position 2751 of SEQ ID NO: 1561624
ggaacacucugagaacuug

SEQ ID NO: 1685924 - RNA, 19 nt, Artificial Sequence
  Description of Artificial Sequence: Synthetic oligonucleotide
  Antisense strand to SEQ ID NO: 1685923
caaguucucagaguguucc

SEQ ID NO: 1685925 - RNA, 19 nt, Artificial Sequence
  Description of Artificial Sequence: Synthetic oligonucleotide
  Sense strand starting at position 2942 of SEQ ID NO: 1561624
ccaccuuccuuugcggaua

SEQ ID NO: 1685926 - RNA, 19 nt, Artificial Sequence
  Description of Artificial Sequence: Synthetic oligonucleotide
  Antisense strand to SEQ ID NO: 1685925
uauccgcaaaggaaggugg

SEQ ID NO: 1685927 - RNA, 19 nt, Artificial Sequence
  Description of Artificial Sequence: Synthetic oligonucleotide
  Sense strand starting at position 3124 of SEQ ID NO: 1561624
ccagcugcccugggagaaa

SEQ ID NO: 1685928 - RNA, 19 nt, Artificial Sequence
  Description of Artificial Sequence: Synthetic oligonucleotide
  Antisense strand to SEQ ID NO: 1685927
uuucucccagggcagcugg

SEQ ID NO: 1685929 - RNA, 19 nt, Artificial Sequence
  Description of Artificial Sequence: Synthetic oligonucleotide
  Sense strand starting at position 3199 of SEQ ID NO: 1561624
caaugaauguugcuaguaa

SEQ ID NO: 1685930 - RNA, 19 nt, Artificial Sequence
  Description of Artificial Sequence: Synthetic oligonucleotide
  Antisense strand to SEQ ID NO: 1685929
uuacuagcaacauucauug

SEQ ID NO: 1685931 - RNA, 19 nt, Artificial Sequence
  Description of Artificial Sequence: Synthetic oligonucleotide
  Sense strand starting at position 3214 of SEQ ID NO: 1561624
guaaguggucuuuggacuu

SEQ ID NO: 1685932 - RNA, 19 nt, Artificial Sequence
  Description of Artificial Sequence: Synthetic oligonucleotide
  Antisense strand to SEQ ID NO: 1685931
aaguccaaagaccacuuac

SEQ ID NO: 1685933 - RNA, 19 nt, Artificial Sequence
  Description of Artificial Sequence: Synthetic oligonucleotide
  Sense strand starting at position 3257 of SEQ ID NO: 1561624
gaagcauuugucgggaugu

SEQ ID NO: 1685934 - RNA, 19 nt, Artificial Sequence
  Description of Artificial Sequence: Synthetic oligonucleotide
  Antisense strand to SEQ ID NO: 1685933
acaucccgacaaaugcuuc

SEQ ID NO: 1685935 - RNA, 19 nt, Artificial Sequence
  Description of Artificial Sequence: Synthetic oligonucleotide
  Sense strand starting at position 3259 of SEQ ID NO: 1561624
agcauuugucgggauguuu

SEQ ID NO: 1685936 - RNA, 19 nt, Artificial Sequence
  Description of Artificial Sequence: Synthetic oligonucleotide
  Antisense strand to SEQ ID NO: 1685935
aaacaucccgacaaaugcu

SEQ ID NO: 1685937 - RNA, 19 nt, Artificial Sequence
  Description of Artificial Sequence: Synthetic oligonucleotide
  Sense strand starting at position 3329 of SEQ ID NO: 1561624
augcuauggcaccaucaga

SEQ ID NO: 1685938 - RNA, 19 nt, Artificial Sequence
  Description of Artificial Sequence: Synthetic oligonucleotide
  Antisense strand to SEQ ID NO: 1685937
ucugauggugccauagcau

SEQ ID NO: 1685939 - RNA, 19 nt, Artificial Sequence
  Description of Artificial Sequence: Synthetic oligonucleotide
  Sense strand starting at position 3562 of SEQ ID NO: 1561624
aggcauaagccacauuguu

SEQ ID NO: 1685940 - RNA, 19 nt, Artificial Sequence
  Description of Artificial Sequence: Synthetic oligonucleotide
  Antisense strand to SEQ ID NO: 1685939
aacaauguggcuuaugccu

SEQ ID NO: 1685941 - RNA, 19 nt, Artificial Sequence
  Description of Artificial Sequence: Synthetic oligonucleotide
  Sense strand starting at position 3608 of SEQ ID NO: 1561624
ccaggauaaugauacuagu

SEQ ID NO: 1685942 - RNA, 19 nt, Artificial Sequence
  Description of Artificial Sequence: Synthetic oligonucleotide
  Antisense strand to SEQ ID NO: 1685941
acuaguaucauuauccugg

SEQ ID NO: 1685943 - RNA, 19 nt, Artificial Sequence
  Description of Artificial Sequence: Synthetic oligonucleotide
  Sense strand starting at position 3611 of SEQ ID NO: 1561624
ggauaaugauacuagucca

SEQ ID NO: 1685944 - RNA, 19 nt, Artificial Sequence
  Description of Artificial Sequence: Synthetic oligonucleotide
  Antisense strand to SEQ ID NO: 1685943
uggacuaguaucauuaucc

SEQ ID NO: 1685945 - RNA, 19 nt, Artificial Sequence
  Description of Artificial Sequence: Synthetic oligonucleotide
  Sense strand starting at position 3672 of SEQ ID NO: 1561624
ugaacuucccuguaaggua

SEQ ID NO: 1685946 - RNA, 19 nt, Artificial Sequence
  Description of Artificial Sequence: Synthetic oligonucleotide
  Antisense strand to SEQ ID NO: 1685945
uaccuuacagggaaguuca

SEQ ID NO: 1685947 - RNA, 19 nt, Artificial Sequence
  Description of Artificial Sequence: Synthetic oligonucleotide
  Sense strand starting at position 3687 of SEQ ID NO: 1561624
gguagauguugcccuacuu

SEQ ID NO: 1685948 - RNA, 19 nt, Artificial Sequence
  Description of Artificial Sequence: Synthetic oligonucleotide
  Antisense strand to SEQ ID NO: 1685947
aaguagggcaacaucuacc

SEQ ID NO: 1685949 - RNA, 19 nt, Artificial Sequence
  Description of Artificial Sequence: Synthetic oligonucleotide
  Sense strand starting at position 3694 of SEQ ID NO: 1561624
guugcccuacuuuauagau

SEQ ID NO: 1685950 - RNA, 19 nt, Artificial Sequence
  Description of Artificial Sequence: Synthetic oligonucleotide
  Antisense strand to SEQ ID NO: 1685949
aucuauaaaguagggcaac

SEQ ID NO: 1685951 - RNA, 19 nt, Artificial Sequence
  Description of Artificial Sequence: Synthetic oligonucleotide
  Sense strand starting at position 3710 of SEQ ID NO: 1561624
gaugcuacccuauaaggua

SEQ ID NO: 1685952 - RNA, 19 nt, Artificial Sequence
  Description of Artificial Sequence: Synthetic oligonucleotide
  Antisense strand to SEQ ID NO: 1685951
uaccuuauaggguagcauc

SEQ ID NO: 1685953 - RNA, 19 nt, Artificial Sequence
  Description of Artificial Sequence: Synthetic oligonucleotide
  Sense strand starting at position 3758 of SEQ ID NO: 1561624
ggcuccuagugguugauuu

SEQ ID NO: 1685954 - RNA, 19 nt, Artificial Sequence
  Description of Artificial Sequence: Synthetic oligonucleotide
  Antisense strand to SEQ ID NO: 1685953
aaaucaaccacuaggagcc

SEQ ID NO: 1685955 - RNA, 19 nt, Artificial Sequence
  Description of Artificial Sequence: Synthetic oligonucleotide
  Sense strand starting at position 3835 of SEQ ID NO: 1561624
gggcuacccuuccugcaau

SEQ ID NO: 1685956 - RNA, 19 nt, Artificial Sequence
  Description of Artificial Sequence: Synthetic oligonucleotide
  Antisense strand to SEQ ID NO: 1685955
auugcaggaaggguagccc

SEQ ID NO: 1685957 - RNA, 19 nt, Artificial Sequence
  Description of Artificial Sequence: Synthetic oligonucleotide
  Sense strand starting at position 3893 of SEQ ID NO: 1561624
uugagugugcuagaggcaa

SEQ ID NO: 1685958 - RNA, 19 nt, Artificial Sequence
  Description of Artificial Sequence: Synthetic oligonucleotide
  Antisense strand to SEQ ID NO: 1685957
uugccucuagcacacucaa

SEQ ID NO: 1685959 - RNA, 19 nt, Artificial Sequence
  Description of Artificial Sequence: Synthetic oligonucleotide
  Sense strand starting at position 104 of SEQ ID NO: 1561625
gaguaaggguucuugcuuu

SEQ ID NO: 1685960 - RNA, 19 nt, Artificial Sequence
  Description of Artificial Sequence: Synthetic oligonucleotide
  Antisense strand to SEQ ID NO: 1685959
aaagcaagaacccuuacuc

SEQ ID NO: 1685961 - RNA, 19 nt, Artificial Sequence
  Description of Artificial Sequence: Synthetic oligonucleotide
  Sense strand starting at position 190 of SEQ ID NO: 1561625
uggucugcugcauggagaa

SEQ ID NO: 1685962 - RNA, 19 nt, Artificial Sequence
  Description of Artificial Sequence: Synthetic oligonucleotide
  Antisense strand to SEQ ID NO: 1685961
uucuccaugcagcagacca

SEQ ID NO: 1685963 - RNA, 19 nt, Artificial Sequence
  Description of Artificial Sequence: Synthetic oligonucleotide
  Sense strand starting at position 275 of SEQ ID NO: 1561625
gccagaggugguugucaag

SEQ ID NO: 1685964 - RNA, 19 nt, Artificial Sequence
  Description of Artificial Sequence: Synthetic oligonucleotide
  Antisense strand to SEQ ID NO: 1685963
cuugacaaccaccucuggc

SEQ ID NO: 1685965 - RNA, 19 nt, Artificial Sequence
  Description of Artificial Sequence: Synthetic oligonucleotide
  Sense strand starting at position 290 of SEQ ID NO: 1561625
caagcuugucugcuguuua

SEQ ID NO: 1685966 - RNA, 19 nt, Artificial Sequence
  Description of Artificial Sequence: Synthetic oligonucleotide
  Antisense strand to SEQ ID NO: 1685965
uaaacagcagacaagcuug

SEQ ID NO: 1685967 - RNA, 19 nt, Artificial Sequence
  Description of Artificial Sequence: Synthetic oligonucleotide
  Sense strand starting at position 293 of SEQ ID NO: 1561625
gcuugucugcuguuuaaua

SEQ ID NO: 1685968 - RNA, 19 nt, Artificial Sequence
  Description of Artificial Sequence: Synthetic oligonucleotide
  Antisense strand to SEQ ID NO: 1685967
uauuaaacagcagacaagc

SEQ ID NO: 1685969 - RNA, 19 nt, Artificial Sequence
  Description of Artificial Sequence: Synthetic oligonucleotide
  Sense strand starting at position 501 of SEQ ID NO: 1561625
guagucagugcuucuccga

SEQ ID NO: 1685970 - RNA, 19 nt, Artificial Sequence
  Description of Artificial Sequence: Synthetic oligonucleotide
  Antisense strand to SEQ ID NO: 1685969
ucggagaagcacugacuac

SEQ ID NO: 1685971 - RNA, 19 nt, Artificial Sequence
  Description of Artificial Sequence: Synthetic oligonucleotide
  Sense strand starting at position 813 of SEQ ID NO: 1561625
ugcuguugaaaucgaauca

SEQ ID NO: 1685972 - RNA, 19 nt, Artificial Sequence
  Description of Artificial Sequence: Synthetic oligonucleotide
  Antisense strand to SEQ ID NO: 1685971
ugauucgauuucaacagca

SEQ ID NO: 1685973 - RNA, 19 nt, Artificial Sequence
  Description of Artificial Sequence: Synthetic oligonucleotide
  Sense strand starting at position 1076 of SEQ ID NO: 1561625
ugcagaacguucccucaaa

SEQ ID NO: 1685974 - RNA, 19 nt, Artificial Sequence
  Description of Artificial Sequence: Synthetic oligonucleotide
  Antisense strand to SEQ ID NO: 1685973
uuugagggaacguucugca

SEQ ID NO: 1685975 - RNA, 19 nt, Artificial Sequence
  Description of Artificial Sequence: Synthetic oligonucleotide
  Sense strand starting at position 1077 of SEQ ID NO: 1561625
gcagaacguucccucaaau

SEQ ID NO: 1685976 - RNA, 19 nt, Artificial Sequence
  Description of Artificial Sequence: Synthetic oligonucleotide
  Antisense strand to SEQ ID NO: 1685975
auuugagggaacguucugc

SEQ ID NO: 1685977 - RNA, 19 nt, Artificial Sequence
  Description of Artificial Sequence: Synthetic oligonucleotide
  Sense strand starting at position 1246 of SEQ ID NO: 1561625
aguagauuaucucuuacug

SEQ ID NO: 1685978 - RNA, 19 nt, Artificial Sequence
  Description of Artificial Sequence: Synthetic oligonucleotide
  Antisense strand to SEQ ID NO: 1685977
caguaagagauaaucuacu

SEQ ID NO: 1685979 - RNA, 19 nt, Artificial Sequence
  Description of Artificial Sequence: Synthetic oligonucleotide
  Sense strand starting at position 1361 of SEQ ID NO: 1561625
auggauuucuguuggauga

SEQ ID NO: 1685980 - RNA, 19 nt, Artificial Sequence
  Description of Artificial Sequence: Synthetic oligonucleotide
  Antisense strand to SEQ ID NO: 1685979
ucauccaacagaaauccau

SEQ ID NO: 1685981 - RNA, 19 nt, Artificial Sequence
  Description of Artificial Sequence: Synthetic oligonucleotide
  Sense strand starting at position 1363 of SEQ ID NO: 1561625
ggauuucuguuggaugaau

SEQ ID NO: 1685982 - RNA, 19 nt, Artificial Sequence
  Description of Artificial Sequence: Synthetic oligonucleotide
  Antisense strand to SEQ ID NO: 1685981
auucauccaacagaaaucc

SEQ ID NO: 1685983 - RNA, 19 nt, Artificial Sequence
  Description of Artificial Sequence: Synthetic oligonucleotide
  Sense strand starting at position 1414 of SEQ ID NO: 1561625
gcugacauugcccaaucuu

SEQ ID NO: 1685984 - RNA, 19 nt, Artificial Sequence
  Description of Artificial Sequence: Synthetic oligonucleotide
  Antisense strand to SEQ ID NO: 1685983
aagauugggcaaugucagc

SEQ ID NO: 1685985 - RNA, 19 nt, Artificial Sequence
  Description of Artificial Sequence: Synthetic oligonucleotide
  Sense strand starting at position 1484 of SEQ ID NO: 1561625
gcccucugugcucagggaa

SEQ ID NO: 1685986 - RNA, 19 nt, Artificial Sequence
  Description of Artificial Sequence: Synthetic oligonucleotide
  Antisense strand to SEQ ID NO: 1685985
uucccugagcacagagggc

SEQ ID NO: 1685987 - RNA, 19 nt, Artificial Sequence
  Description of Artificial Sequence: Synthetic oligonucleotide
  Sense strand starting at position 1670 of SEQ ID NO: 1561625
uggguuggccagugauucu

SEQ ID NO: 1685988 - RNA, 19 nt, Artificial Sequence
  Description of Artificial Sequence: Synthetic oligonucleotide
  Antisense strand to SEQ ID NO: 1685987
agaaucacuggccaaccca

SEQ ID NO: 1685989 - RNA, 19 nt, Artificial Sequence
  Description of Artificial Sequence: Synthetic oligonucleotide
  Sense strand starting at position 1677 of SEQ ID NO: 1561625
gccagugauucucucugga

SEQ ID NO: 1685990 - RNA, 19 nt, Artificial Sequence
  Description of Artificial Sequence: Synthetic oligonucleotide
  Antisense strand to SEQ ID NO: 1685989
uccagagagaaucacuggc

SEQ ID NO: 1685991 - RNA, 19 nt, Artificial Sequence
  Description of Artificial Sequence: Synthetic oligonucleotide
  Sense strand starting at position 1825 of SEQ ID NO: 1561625
ucuguugagccacagacau

SEQ ID NO: 1685992 - RNA, 19 nt, Artificial Sequence
  Description of Artificial Sequence: Synthetic oligonucleotide
  Antisense strand to SEQ ID NO: 1685991
augucuguggcucaacaga

SEQ ID NO: 1685993 - RNA, 19 nt, Artificial Sequence
  Description of Artificial Sequence: Synthetic oligonucleotide
  Sense strand starting at position 1896 of SEQ ID NO: 1561625
aucugaagaugugucaaug

SEQ ID NO: 1685994 - RNA, 19 nt, Artificial Sequence
  Description of Artificial Sequence: Synthetic oligonucleotide
  Antisense strand to SEQ ID NO: 1685993
cauugacacaucuucagau

SEQ ID NO: 1685995 - RNA, 19 nt, Artificial Sequence
  Description of Artificial Sequence: Synthetic oligonucleotide
  Sense strand starting at position 2219 of SEQ ID NO: 1561625
cucugagcccucugauuau

SEQ ID NO: 1685996 - RNA, 19 nt, Artificial Sequence
  Description of Artificial Sequence: Synthetic oligonucleotide
  Antisense strand to SEQ ID NO: 1685995
auaaucagagggcucagag

SEQ ID NO: 1685997 - RNA, 19 nt, Artificial Sequence
  Description of Artificial Sequence: Synthetic oligonucleotide
  Sense strand starting at position 2226 of SEQ ID NO: 1561625
cccucugauuauccaguga

SEQ ID NO: 1685998 - RNA, 19 nt, Artificial Sequence
  Description of Artificial Sequence: Synthetic oligonucleotide
  Antisense strand to SEQ ID NO: 1685997
ucacuggauaaucagaggg

SEQ ID NO: 1685999 - RNA, 19 nt, Artificial Sequence
  Description of Artificial Sequence: Synthetic oligonucleotide
  Sense strand starting at position 2231 of SEQ ID NO: 1561625
ugauuauccagugaggccu

SEQ ID NO: 1686000 - RNA, 19 nt, Artificial Sequence
  Description of Artificial Sequence: Synthetic oligonucleotide
  Antisense strand to SEQ ID NO: 1685999
aggccucacuggauaauca

SEQ ID NO: 1686001 - RNA, 19 nt, Artificial Sequence
  Description of Artificial Sequence: Synthetic oligonucleotide
  Sense strand starting at position 2554 of SEQ ID NO: 1561625
ccauguuagcgcuuggagu

SEQ ID NO: 1686002 - RNA, 19 nt, Artificial Sequence
  Description of Artificial Sequence: Synthetic oligonucleotide
  Antisense strand to SEQ ID NO: 1686001
acuccaagcgcuaacaugg

SEQ ID NO: 1686003 - RNA, 19 nt, Artificial Sequence
  Description of Artificial Sequence: Synthetic oligonucleotide
  Sense strand starting at position 2974 of SEQ ID NO: 1561625
ugaucuguaaacuggguaa

SEQ ID NO: 1686004 - RNA, 19 nt, Artificial Sequence
  Description of Artificial Sequence: Synthetic oligonucleotide
  Antisense strand to SEQ ID NO: 1686003
uuacccaguuuacagauca

SEQ ID NO: 1686005 - RNA, 19 nt, Artificial Sequence
  Description of Artificial Sequence: Synthetic oligonucleotide
  Sense strand starting at position 2985 of SEQ ID NO: 1561625
cuggguaaaccuuaucucu

SEQ ID NO: 1686006 - RNA, 19 nt, Artificial Sequence
  Description of Artificial Sequence: Synthetic oligonucleotide
  Antisense strand to SEQ ID NO: 1686005
agagauaagguuuacccag

SEQ ID NO: 1686007 - RNA, 19 nt, Artificial Sequence
  Description of Artificial Sequence: Synthetic oligonucleotide
  Sense strand starting at position 2987 of SEQ ID NO: 1561625
ggguaaaccuuaucucuug

SEQ ID NO: 1686008 - RNA, 19 nt, Artificial Sequence
  Description of Artificial Sequence: Synthetic oligonucleotide
  Antisense strand to SEQ ID NO: 1686007
caagagauaagguuuaccc

SEQ ID NO: 1686009 - RNA, 19 nt, Artificial Sequence
  Description of Artificial Sequence: Synthetic oligonucleotide
  Sense strand starting at position 2996 of SEQ ID NO: 1561625
uuaucucuugcaggaggaa

SEQ ID NO: 1686010 - RNA, 19 nt, Artificial Sequence
  Description of Artificial Sequence: Synthetic oligonucleotide
  Antisense strand to SEQ ID NO: 1686009
uuccuccugcaagagauaa

SEQ ID NO: 1686011 - RNA, 19 nt, Artificial Sequence
  Description of Artificial Sequence: Synthetic oligonucleotide
  Sense strand starting at position 3007 of SEQ ID NO: 1561625
aggaggaaugcgugugagu

SEQ ID NO: 1686012 - RNA, 19 nt, Artificial Sequence
  Description of Artificial Sequence: Synthetic oligonucleotide
  Antisense strand to SEQ ID NO: 1686011
acucacacgcauuccuccu

SEQ ID NO: 1686013 - RNA, 19 nt, Artificial Sequence
  Description of Artificial Sequence: Synthetic oligonucleotide
  Sense strand starting at position 3093 of SEQ ID NO: 1561625
guaugacuuugaguaaguc

SEQ ID NO: 1686014 - RNA, 19 nt, Artificial Sequence
  Description of Artificial Sequence: Synthetic oligonucleotide
  Antisense strand to SEQ ID NO: 1686013
gacuuacucaaagucauac

SEQ ID NO: 1686015 - RNA, 19 nt, Artificial Sequence
  Description of Artificial Sequence: Synthetic oligonucleotide
  Sense strand starting at position 3094 of SEQ ID NO: 1561625
uaugacuuugaguaaguca

SEQ ID NO: 1686016 - RNA, 19 nt, Artificial Sequence
  Description of Artificial Sequence: Synthetic oligonucleotide
  Antisense strand to SEQ ID NO: 1686015
ugacuuacucaaagucaua

SEQ ID NO: 1686017 - RNA, 19 nt, Artificial Sequence
  Description of Artificial Sequence: Synthetic oligonucleotide
  Sense strand starting at position 3134 of SEQ ID NO: 1561625
uuuccuccugaaugaggaa

SEQ ID NO: 1686018 - RNA, 19 nt, Artificial Sequence
  Description of Artificial Sequence: Synthetic oligonucleotide
  Antisense strand to SEQ ID NO: 1686017
uuccucauucaggaggaaa

SEQ ID NO: 1686019 - RNA, 19 nt, Artificial Sequence
  Description of Artificial Sequence: Synthetic oligonucleotide
  Sense strand starting at position 3211 of SEQ ID NO: 1561625
cagagcgagcacuaaauaa

SEQ ID NO: 1686020 - RNA, 19 nt, Artificial Sequence
  Description of Artificial Sequence: Synthetic oligonucleotide
  Antisense strand to SEQ ID NO: 1686019
uuauuuagugcucgcucug

SEQ ID NO: 1686021 - RNA, 19 nt, Artificial Sequence
  Description of Artificial Sequence: Synthetic oligonucleotide
  Sense strand starting at position 3449 of SEQ ID NO: 1561625
gccagucuggcuguuuagu

SEQ ID NO: 1686022 - RNA, 19 nt, Artificial Sequence
  Description of Artificial Sequence: Synthetic oligonucleotide
  Antisense strand to SEQ ID NO: 1686021
acuaaacagccagacuggc

SEQ ID NO: 1686023 - RNA, 19 nt, Artificial Sequence
  Description of Artificial Sequence: Synthetic oligonucleotide
  Sense strand starting at position 3485 of SEQ ID NO: 1561625
cucaaaucccgauagaguu

SEQ ID NO: 1686024 - RNA, 19 nt, Artificial Sequence
  Description of Artificial Sequence: Synthetic oligonucleotide
  Antisense strand to SEQ ID NO: 1686023
aacucuaucgggauuugag

SEQ ID NO: 1686025 - RNA, 19 nt, Artificial Sequence
  Description of Artificial Sequence: Synthetic oligonucleotide
  Sense strand starting at position 3534 of SEQ ID NO: 1561625
ugugaacuguggucucauc

SEQ ID NO: 1686026 - RNA, 19 nt, Artificial Sequence
  Description of Artificial Sequence: Synthetic oligonucleotide
  Antisense strand to SEQ ID NO: 1686025
gaugagaccacaguucaca

SEQ ID NO: 1686027 - RNA, 19 nt, Artificial Sequence
  Description of Artificial Sequence: Synthetic oligonucleotide
  Sense strand starting at position 3708 of SEQ ID NO: 1561625
gcacccugaccaugugaga

SEQ ID NO: 1686028 - RNA, 19 nt, Artificial Sequence
  Description of Artificial Sequence: Synthetic oligonucleotide
  Antisense strand to SEQ ID NO: 1686027
ucucacauggucagggugc

SEQ ID NO: 1686029 - RNA, 19 nt, Artificial Sequence
  Description of Artificial Sequence: Synthetic oligonucleotide
  Sense strand starting at position 3732 of SEQ ID NO: 1561625
guggacugauagcuuauca

SEQ ID NO: 1686030 - RNA, 19 nt, Artificial Sequence
  Description of Artificial Sequence: Synthetic oligonucleotide
  Antisense strand to SEQ ID NO: 1686029
ugauaagcuaucaguccac

SEQ ID NO: 1686031 - RNA, 19 nt, Artificial Sequence
  Description of Artificial Sequence: Synthetic oligonucleotide
  Sense strand starting at position 3764 of SEQ ID NO: 1561625
agagaagggcagugugaau

SEQ ID NO: 1686032 - RNA, 19 nt, Artificial Sequence
  Description of Artificial Sequence: Synthetic oligonucleotide
  Antisense strand to SEQ ID NO: 1686031
auucacacugcccuucucu

SEQ ID NO: 1686033 - RNA, 19 nt, Artificial Sequence
  Description of Artificial Sequence: Synthetic oligonucleotide
  Sense strand starting at position 3783 of SEQ ID NO: 1561625
gguggucgucauuaugauu

SEQ ID NO: 1686034 - RNA, 19 nt, Artificial Sequence
  Description of Artificial Sequence: Synthetic oligonucleotide
  Antisense strand to SEQ ID NO: 1686033
aaucauaaugacgaccacc

SEQ ID NO: 1686035 - RNA, 19 nt, Artificial Sequence
  Description of Artificial Sequence: Synthetic oligonucleotide
  Sense strand starting at position 3791 of SEQ ID NO: 1561625
ucauuaugauugucuugac

SEQ ID NO: 1686036 - RNA, 19 nt, Artificial Sequence
  Description of Artificial Sequence: Synthetic oligonucleotide
  Antisense strand to SEQ ID NO: 1686035
gucaagacaaucauaauga

SEQ ID NO: 1686037 - RNA, 19 nt, Artificial Sequence
  Description of Artificial Sequence: Synthetic oligonucleotide
  Sense strand starting at position 3807 of SEQ ID NO: 1561625
gacugagcugcuugauaau

SEQ ID NO: 1686038 - RNA, 19 nt, Artificial Sequence
  Description of Artificial Sequence: Synthetic oligonucleotide
  Antisense strand to SEQ ID NO: 1686037
auuaucaagcagcucaguc

SEQ ID NO: 1686039 - RNA, 19 nt, Artificial Sequence
  Description of Artificial Sequence: Synthetic oligonucleotide
  Sense strand starting at position 132 of SEQ ID NO: 1561626
gggcuagguccucaagacu

SEQ ID NO: 1686040 - RNA, 19 nt, Artificial Sequence
  Description of Artificial Sequence: Synthetic oligonucleotide
  Antisense strand to SEQ ID NO: 1686039
agucuugaggaccuagccc

SEQ ID NO: 1686041 - RNA, 19 nt, Artificial Sequence
  Description of Artificial Sequence: Synthetic oligonucleotide
  Sense strand starting at position 622 of SEQ ID NO: 1561626
uuauuauuaucggccauau

SEQ ID NO: 1686042 - RNA, 19 nt, Artificial Sequence
  Description of Artificial Sequence: Synthetic oligonucleotide
  Antisense strand to SEQ ID NO: 1686041
auauggccgauaauaauaa

SEQ ID NO: 1686043 - RNA, 19 nt, Artificial Sequence
  Description of Artificial Sequence: Synthetic oligonucleotide
  Sense strand starting at position 624 of SEQ ID NO: 1561626
auuauuaucggccauauuc

SEQ ID NO: 1686044 - RNA, 19 nt, Artificial Sequence
  Description of Artificial Sequence: Synthetic oligonucleotide
  Antisense strand to SEQ ID NO: 1686043
gaauauggccgauaauaau

SEQ ID NO: 1686045 - RNA, 19 nt, Artificial Sequence
  Description of Artificial Sequence: Synthetic oligonucleotide
  Sense strand starting at position 643 of SEQ ID NO: 1561626
cgauuaggugcggugucau

SEQ ID NO: 1686046 - RNA, 19 nt, Artificial Sequence
  Description of Artificial Sequence: Synthetic oligonucleotide
  Antisense strand to SEQ ID NO: 1686045
augacaccgcaccuaaucg

SEQ ID NO: 1686047 - RNA, 19 nt, Artificial Sequence
  Description of Artificial Sequence: Synthetic oligonucleotide
  Sense strand starting at position 678 of SEQ ID NO: 1561626
augugucaucuauggaaua

SEQ ID NO: 1686048 - RNA, 19 nt, Artificial Sequence
  Description of Artificial Sequence: Synthetic oligonucleotide
  Antisense strand to SEQ ID NO: 1686047
uauuccauagaugacacau

SEQ ID NO: 1686049 - RNA, 19 nt, Artificial Sequence
  Description of Artificial Sequence: Synthetic oligonucleotide
  Sense strand starting at position 680 of SEQ ID NO: 1561626
gugucaucuauggaauagg

SEQ ID NO: 1686050 - RNA, 19 nt, Artificial Sequence
  Description of Artificial Sequence: Synthetic oligonucleotide
  Antisense strand to SEQ ID NO: 1686049
ccuauuccauagaugacac

SEQ ID NO: 1686051 - RNA, 19 nt, Artificial Sequence
  Description of Artificial Sequence: Synthetic oligonucleotide
  Sense strand starting at position 706 of SEQ ID NO: 1561626
gcuccuacauagguaauga

SEQ ID NO: 1686052 - RNA, 19 nt, Artificial Sequence
  Description of Artificial Sequence: Synthetic oligonucleotide
  Antisense strand to SEQ ID NO: 1686051
ucauuaccuauguaggagc

SEQ ID NO: 1686053 - RNA, 19 nt, Artificial Sequence
  Description of Artificial Sequence: Synthetic oligonucleotide
  Sense strand starting at position 827 of SEQ ID NO: 1561626
agcagcuacagugaugaau

SEQ ID NO: 1686054 - RNA, 19 nt, Artificial Sequence
  Description of Artificial Sequence: Synthetic oligonucleotide
  Antisense strand to SEQ ID NO: 1686053
auucaucacuguagcugcu

SEQ ID NO: 1686055 - RNA, 19 nt, Artificial Sequence
  Description of Artificial Sequence: Synthetic oligonucleotide
  Sense strand starting at position 1023 of SEQ ID NO: 1561626
uuguaaauugagcagcaua

SEQ ID NO: 1686056 - RNA, 19 nt, Artificial Sequence
  Description of Artificial Sequence: Synthetic oligonucleotide
  Antisense strand to SEQ ID NO: 1686055
uaugcugcucaauuuacaa

SEQ ID NO: 1686057 - RNA, 19 nt, Artificial Sequence
  Description of Artificial Sequence: Synthetic oligonucleotide
  Sense strand starting at position 1136 of SEQ ID NO: 1561626
agagcagaaugucuugacu

SEQ ID NO: 1686058 - RNA, 19 nt, Artificial Sequence
  Description of Artificial Sequence: Synthetic oligonucleotide
  Antisense strand to SEQ ID NO: 1686057
agucaagacauucugcucu

SEQ ID NO: 1686059 - RNA, 19 nt, Artificial Sequence
  Description of Artificial Sequence: Synthetic oligonucleotide
  Sense strand starting at position 1139 of SEQ ID NO: 1561626
gcagaaugucuugacuuga

SEQ ID NO: 1686060 - RNA, 19 nt, Artificial Sequence
  Description of Artificial Sequence: Synthetic oligonucleotide
  Antisense strand to SEQ ID NO: 1686059
ucaagucaagacauucugc

SEQ ID NO: 1686061 - RNA, 19 nt, Artificial Sequence
  Description of Artificial Sequence: Synthetic oligonucleotide
  Sense strand starting at position 1170 of SEQ ID NO: 1561626
gggucugaauacucggaaa

SEQ ID NO: 1686062 - RNA, 19 nt, Artificial Sequence
  Description of Artificial Sequence: Synthetic oligonucleotide
  Antisense strand to SEQ ID NO: 1686061
uuuccgaguauucagaccc

SEQ ID NO: 1686063 - RNA, 19 nt, Artificial Sequence
  Description of Artificial Sequence: Synthetic oligonucleotide
  Sense strand starting at position 1172 of SEQ ID NO: 1561626
gucugaauacucggaaauu

SEQ ID NO: 1686064 - RNA, 19 nt, Artificial Sequence
  Description of Artificial Sequence: Synthetic oligonucleotide
  Antisense strand to SEQ ID NO: 1686063
aauuuccgaguauucagac

SEQ ID NO: 1686065 - RNA, 19 nt, Artificial Sequence
  Description of Artificial Sequence: Synthetic oligonucleotide
  Sense strand starting at position 1260 of SEQ ID NO: 1561626
gaaggaucauuagaaagag

SEQ ID NO: 1686066 - RNA, 19 nt, Artificial Sequence
  Description of Artificial Sequence: Synthetic oligonucleotide
  Antisense strand to SEQ ID NO: 1686065
cucuuucuaaugauccuuc

SEQ ID NO: 1686067 - RNA, 19 nt, Artificial Sequence
  Description of Artificial Sequence: Synthetic oligonucleotide
  Sense strand starting at position 1286 of SEQ ID NO: 1561626
ggaagacaagcuugguaca

SEQ ID NO: 1686068 - RNA, 19 nt, Artificial Sequence
  Description of Artificial Sequence: Synthetic oligonucleotide
  Antisense strand to SEQ ID NO: 1686067
uguaccaagcuugucuucc

SEQ ID NO: 1686069 - RNA, 19 nt, Artificial Sequence
  Description of Artificial Sequence: Synthetic oligonucleotide
  Sense strand starting at position 1392 of SEQ ID NO: 1561626
uggauaugcuaccuaccua

SEQ ID NO: 1686070 - RNA, 19 nt, Artificial Sequence
  Description of Artificial Sequence: Synthetic oligonucleotide
  Antisense strand to SEQ ID NO: 1686069
uagguagguagcauaucca

SEQ ID NO: 1686071 - RNA, 19 nt, Artificial Sequence
  Description of Artificial Sequence: Synthetic oligonucleotide
  Sense strand starting at position 1489 of SEQ ID NO: 1561626
gagauaugauccuuguaaa

SEQ ID NO: 1686072 - RNA, 19 nt, Artificial Sequence
  Description of Artificial Sequence: Synthetic oligonucleotide
  Antisense strand to SEQ ID NO: 1686071
uuuacaaggaucauaucuc

SEQ ID NO: 1686073 - RNA, 19 nt, Artificial Sequence
  Description of Artificial Sequence: Synthetic oligonucleotide
  Sense strand starting at position 1578 of SEQ ID NO: 1561626
acaaguguaagcgauaguu

SEQ ID NO: 1686074 - RNA, 19 nt, Artificial Sequence
  Description of Artificial Sequence: Synthetic oligonucleotide
  Antisense strand to SEQ ID NO: 1686073
aacuaucgcuuacacuugu

SEQ ID NO: 1686075 - RNA, 19 nt, Artificial Sequence
  Description of Artificial Sequence: Synthetic oligonucleotide
  Sense strand starting at position 1580 of SEQ ID NO: 1561626
aaguguaagcgauaguuua

SEQ ID NO: 1686076 - RNA, 19 nt, Artificial Sequence
  Description of Artificial Sequence: Synthetic oligonucleotide
  Antisense strand to SEQ ID NO: 1686075
uaaacuaucgcuuacacuu

SEQ ID NO: 1686077 - RNA, 19 nt, Artificial Sequence
  Description of Artificial Sequence: Synthetic oligonucleotide
  Sense strand starting at position 2251 of SEQ ID NO: 1561626
cgcagaaugcugcugucuu

SEQ ID NO: 1686078 - RNA, 19 nt, Artificial Sequence
  Description of Artificial Sequence: Synthetic oligonucleotide
  Antisense strand to SEQ ID NO: 1686077
aagacagcagcauucugcg

SEQ ID NO: 1686079 - RNA, 19 nt, Artificial Sequence
  Description of Artificial Sequence: Synthetic oligonucleotide
  Sense strand starting at position 2317 of SEQ ID NO: 1561626
gucagaacguaauuuaguu

SEQ ID NO: 1686080 - RNA, 19 nt, Artificial Sequence
  Description of Artificial Sequence: Synthetic oligonucleotide
  Antisense strand to SEQ ID NO: 1686079
aacuaaauuacguucugac

SEQ ID NO: 1686081 - RNA, 19 nt, Artificial Sequence
  Description of Artificial Sequence: Synthetic oligonucleotide
  Sense strand starting at position 2467 of SEQ ID NO: 1561626
ugccacagauucuugcaaa

SEQ ID NO: 1686082 - RNA, 19 nt, Artificial Sequence
  Description of Artificial Sequence: Synthetic oligonucleotide
  Antisense strand to SEQ ID NO: 1686081
uuugcaagaaucuguggca

SEQ ID NO: 1686083 - RNA, 19 nt, Artificial Sequence
  Description of Artificial Sequence: Synthetic oligonucleotide
  Sense strand starting at position 2516 of SEQ ID NO: 1561626
ggaugcauauaugcuuaaa

SEQ ID NO: 1686084 - RNA, 19 nt, Artificial Sequence
  Description of Artificial Sequence: Synthetic oligonucleotide
  Antisense strand to SEQ ID NO: 1686083
uuuaagcauauaugcaucc

SEQ ID NO: 1686085 - RNA, 19 nt, Artificial Sequence
  Description of Artificial Sequence: Synthetic oligonucleotide
  Sense strand starting at position 2647 of SEQ ID NO: 1561626
cugaaagcuuugguuugau

SEQ ID NO: 1686086 - RNA, 19 nt, Artificial Sequence
  Description of Artificial Sequence: Synthetic oligonucleotide
  Antisense strand to SEQ ID NO: 1686085
aucaaaccaaagcuuucag

SEQ ID NO: 1686087 - RNA, 19 nt, Artificial Sequence
  Description of Artificial Sequence: Synthetic oligonucleotide
  Sense strand starting at position 2650 of SEQ ID NO: 1561626
aaagcuuugguuugauuau

SEQ ID NO: 1686088 - RNA, 19 nt, Artificial Sequence
  Description of Artificial Sequence: Synthetic oligonucleotide
  Antisense strand to SEQ ID NO: 1686087
auaaucaaaccaaagcuuu

SEQ ID NO: 1686089 - RNA, 19 nt, Artificial Sequence
  Description of Artificial Sequence: Synthetic oligonucleotide
  Sense strand starting at position 2657 of SEQ ID NO: 1561626
ugguuugauuaugugaaug

SEQ ID NO: 1686090 - RNA, 19 nt, Artificial Sequence
  Description of Artificial Sequence: Synthetic oligonucleotide
  Antisense strand to SEQ ID NO: 1686089
cauucacauaaucaaacca

SEQ ID NO: 1686091 - RNA, 19 nt, Artificial Sequence
  Description of Artificial Sequence: Synthetic oligonucleotide
  Sense strand starting at position 2804 of SEQ ID NO: 1561626
gagcgaagacauggaauca

SEQ ID NO: 1686092 - RNA, 19 nt, Artificial Sequence
  Description of Artificial Sequence: Synthetic oligonucleotide
  Antisense strand to SEQ ID NO: 1686091
ugauuccaugucuucgcuc

SEQ ID NO: 1686093 - RNA, 19 nt, Artificial Sequence
  Description of Artificial Sequence: Synthetic oligonucleotide
  Sense strand starting at position 2854 of SEQ ID NO: 1561626
aagauaaugcgguacauau

SEQ ID NO: 1686094 - RNA, 19 nt, Artificial Sequence
  Description of Artificial Sequence: Synthetic oligonucleotide
  Antisense strand to SEQ ID NO: 1686093
auauguaccgcauuaucuu

SEQ ID NO: 1686095 - RNA, 19 nt, Artificial Sequence
  Description of Artificial Sequence: Synthetic oligonucleotide
  Sense strand starting at position 2941 of SEQ ID NO: 1561626
aggcaauuauccuuggcaa

SEQ ID NO: 1686096 - RNA, 19 nt, Artificial Sequence
  Description of Artificial Sequence: Synthetic oligonucleotide
  Antisense strand to SEQ ID NO: 1686095
uugccaaggauaauugccu

SEQ ID NO: 1686097 - RNA, 19 nt, Artificial Sequence
  Description of Artificial Sequence: Synthetic oligonucleotide
  Sense strand starting at position 2942 of SEQ ID NO: 1561626
ggcaauuauccuuggcaag

SEQ ID NO: 1686098 - RNA, 19 nt, Artificial Sequence
  Description of Artificial Sequence: Synthetic oligonucleotide
  Antisense strand to SEQ ID NO: 1686097
cuugccaaggauaauugcc

SEQ ID NO: 1686099 - RNA, 19 nt, Artificial Sequence
  Description of Artificial Sequence: Synthetic oligonucleotide
  Sense strand starting at position 3003 of SEQ ID NO: 1561626
augagugagagcuaaguga

SEQ ID NO: 1686100 - RNA, 19 nt, Artificial Sequence
  Description of Artificial Sequence: Synthetic oligonucleotide
  Antisense strand to SEQ ID NO: 1686099
ucacuuagcucucacucau

SEQ ID NO: 1686101 - RNA, 19 nt, Artificial Sequence
  Description of Artificial Sequence: Synthetic oligonucleotide
  Sense strand starting at position 3135 of SEQ ID NO: 1561626
ucuuaauaccugggugaga

SEQ ID NO: 1686102 - RNA, 19 nt, Artificial Sequence
  Description of Artificial Sequence: Synthetic oligonucleotide
  Antisense strand to SEQ ID NO: 1686101
ucucacccagguauuaaga

SEQ ID NO: 1686103 - RNA, 19 nt, Artificial Sequence
  Description of Artificial Sequence: Synthetic oligonucleotide
  Sense strand starting at position 3406 of SEQ ID NO: 1561626
ccucuacugcuguacuuau

SEQ ID NO: 1686104 - RNA, 19 nt, Artificial Sequence
  Description of Artificial Sequence: Synthetic oligonucleotide
  Antisense strand to SEQ ID NO: 1686103
auaaguacagcaguagagg

SEQ ID NO: 1686105 - RNA, 19 nt, Artificial Sequence
  Description of Artificial Sequence: Synthetic oligonucleotide
  Sense strand starting at position 3649 of SEQ ID NO: 1561626
aaauguaucuuuguuggua

SEQ ID NO: 1686106 - RNA, 19 nt, Artificial Sequence
  Description of Artificial Sequence: Synthetic oligonucleotide
  Antisense strand to SEQ ID NO: 1686105
uaccaacaaagauacauuu

SEQ ID NO: 1686107 - RNA, 19 nt, Artificial Sequence
  Description of Artificial Sequence: Synthetic oligonucleotide
  Sense strand starting at position 3663 of SEQ ID NO: 1561626
ugguauguuuaauuggagu

SEQ ID NO: 1686108 - RNA, 19 nt, Artificial Sequence
  Description of Artificial Sequence: Synthetic oligonucleotide
  Antisense strand to SEQ ID NO: 1686107
acuccaauuaaacauacca

SEQ ID NO: 1686109 - RNA, 19 nt, Artificial Sequence
  Description of Artificial Sequence: Synthetic oligonucleotide
  Sense strand starting at position 3677 of SEQ ID NO: 1561626
ggaguuccuuuaucuaaac

SEQ ID NO: 1686110 - RNA, 19 nt, Artificial Sequence
  Description of Artificial Sequence: Synthetic oligonucleotide
  Antisense strand to SEQ ID NO: 1686109
guuuagauaaaggaacucc

SEQ ID NO: 1686111 - RNA, 19 nt, Artificial Sequence
  Description of Artificial Sequence: Synthetic oligonucleotide
  Sense strand starting at position 3814 of SEQ ID NO: 1561626
guuuauaaaugucuuugga

SEQ ID NO: 1686112 - RNA, 19 nt, Artificial Sequence
  Description of Artificial Sequence: Synthetic oligonucleotide
  Antisense strand to SEQ ID NO: 1686111
uccaaagacauuuauaaac

SEQ ID NO: 1686113 - RNA, 19 nt, Artificial Sequence
  Description of Artificial Sequence: Synthetic oligonucleotide
  Sense strand starting at position 3856 of SEQ ID NO: 1561626
agaguauaugucuaggagu

SEQ ID NO: 1686114 - RNA, 19 nt, Artificial Sequence
  Description of Artificial Sequence: Synthetic oligonucleotide
  Antisense strand to SEQ ID NO: 1686113
acuccuagacauauacucu

SEQ ID NO: 1686115 - RNA, 19 nt, Artificial Sequence
  Description of Artificial Sequence: Synthetic oligonucleotide
  Sense strand starting at position 3858 of SEQ ID NO: 1561626
aguauaugucuaggaguua

SEQ ID NO: 1686116 - RNA, 19 nt, Artificial Sequence
  Description of Artificial Sequence: Synthetic oligonucleotide
  Antisense strand to SEQ ID NO: 1686115
uaacuccuagacauauacu

SEQ ID NO: 1686117 - RNA, 19 nt, Artificial Sequence
  Description of Artificial Sequence: Synthetic oligonucleotide
  Sense strand starting at position 3892 of SEQ ID NO: 1561626
gguuauuuauaacaucaag

SEQ ID NO: 1686118 - RNA, 19 nt, Artificial Sequence
  Description of Artificial Sequence: Synthetic oligonucleotide
  Antisense strand to SEQ ID NO: 1686117
cuugauguuauaaauaacc

SEQ ID NO: 1686119 - RNA, 19 nt, Artificial Sequence
  Description of Artificial Sequence: Synthetic oligonucleotide
  Sense strand starting at position 89 of SEQ ID NO: 1561627
ggaagacucucugggaaau

SEQ ID NO: 1686120 - RNA, 19 nt, Artificial Sequence
  Description of Artificial Sequence: Synthetic oligonucleotide
  Antisense strand to SEQ ID NO: 1686119
auuucccagagagucuucc

SEQ ID NO: 1686121 - RNA, 19 nt, Artificial Sequence
  Description of Artificial Sequence: Synthetic oligonucleotide
  Sense strand starting at position 130 of SEQ ID NO: 1561627
gcuucuuaguccuccuauu

SEQ ID NO: 1686122 - RNA, 19 nt, Artificial Sequence
  Description of Artificial Sequence: Synthetic oligonucleotide
  Antisense strand to SEQ ID NO: 1686121
aauaggaggacuaagaagc

SEQ ID NO: 1686123 - RNA, 19 nt, Artificial Sequence
  Description of Artificial Sequence: Synthetic oligonucleotide
  Sense strand starting at position 186 of SEQ ID NO: 1561627
ucagguacguguucaauga

SEQ ID NO: 1686124 - RNA, 19 nt, Artificial Sequence
  Description of Artificial Sequence: Synthetic oligonucleotide
  Antisense strand to SEQ ID NO: 1686123
ucauugaacacguaccuga

SEQ ID NO: 1686125 - RNA, 19 nt, Artificial Sequence
  Description of Artificial Sequence: Synthetic oligonucleotide
  Sense strand starting at position 439 of SEQ ID NO: 1561627
agacauugguaaggugaga

SEQ ID NO: 1686126 - RNA, 19 nt, Artificial Sequence
  Description of Artificial Sequence: Synthetic oligonucleotide
  Antisense strand to SEQ ID NO: 1686125
ucucaccuuaccaaugucu

SEQ ID NO: 1686127 - RNA, 19 nt, Artificial Sequence
  Description of Artificial Sequence: Synthetic oligonucleotide
  Sense strand starting at position 535 of SEQ ID NO: 1561627
ggcugaacacuuugaauaa

SEQ ID NO: 1686128 - RNA, 19 nt, Artificial Sequence
  Description of Artificial Sequence: Synthetic oligonucleotide
  Antisense strand to SEQ ID NO: 1686127
uuauucaaaguguucagcc

SEQ ID NO: 1686129 - RNA, 19 nt, Artificial Sequence
  Description of Artificial Sequence: Synthetic oligonucleotide
  Sense strand starting at position 737 of SEQ ID NO: 1561627
aggucaugcggucauggaa

SEQ ID NO: 1686130 - RNA, 19 nt, Artificial Sequence
  Description of Artificial Sequence: Synthetic oligonucleotide
  Antisense strand to SEQ ID NO: 1686129
uuccaugaccgcaugaccu

SEQ ID NO: 1686131 - RNA, 19 nt, Artificial Sequence
  Description of Artificial Sequence: Synthetic oligonucleotide
  Sense strand starting at position 803 of SEQ ID NO: 1561627
gcugaaugcgacguguacu

SEQ ID NO: 1686132 - RNA, 19 nt, Artificial Sequence
  Description of Artificial Sequence: Synthetic oligonucleotide
  Antisense strand to SEQ ID NO: 1686131
aguacacgucgcauucagc

SEQ ID NO: 1686133 - RNA, 19 nt, Artificial Sequence
  Description of Artificial Sequence: Synthetic oligonucleotide
  Sense strand starting at position 1176 of SEQ ID NO: 1561627
gggcauuauuaggacacua

SEQ ID NO: 1686134 - RNA, 19 nt, Artificial Sequence
  Description of Artificial Sequence: Synthetic oligonucleotide
  Antisense strand to SEQ ID NO: 1686133
uaguguccuaauaaugccc

SEQ ID NO: 1686135 - RNA, 19 nt, Artificial Sequence
  Description of Artificial Sequence: Synthetic oligonucleotide
  Sense strand starting at position 1245 of SEQ ID NO: 1561627
ugaccaauguuacccgauu

SEQ ID NO: 1686136 - RNA, 19 nt, Artificial Sequence
  Description of Artificial Sequence: Synthetic oligonucleotide
  Antisense strand to SEQ ID NO: 1686135
aaucggguaacauugguca

SEQ ID NO: 1686137 - RNA, 19 nt, Artificial Sequence
  Description of Artificial Sequence: Synthetic oligonucleotide
  Sense strand starting at position 1355 of SEQ ID NO: 1561627
ucacuugguccagggaaga

SEQ ID NO: 1686138 - RNA, 19 nt, Artificial Sequence
  Description of Artificial Sequence: Synthetic oligonucleotide
  Antisense strand to SEQ ID NO: 1686137
ucuucccuggaccaaguga

SEQ ID NO: 1686139 - RNA, 19 nt, Artificial Sequence
  Description of Artificial Sequence: Synthetic oligonucleotide
  Sense strand starting at position 1426 of SEQ ID NO: 1561627
gguuacaacuugugaaucu

SEQ ID NO: 1686140 - RNA, 19 nt, Artificial Sequence
  Description of Artificial Sequence: Synthetic oligonucleotide
  Antisense strand to SEQ ID NO: 1686139
agauucacaaguuguaacc

SEQ ID NO: 1686141 - RNA, 19 nt, Artificial Sequence
  Description of Artificial Sequence: Synthetic oligonucleotide
  Sense strand starting at position 1435 of SEQ ID NO: 1561627
uugugaaucucauccaagu

SEQ ID NO: 1686142 - RNA, 19 nt, Artificial Sequence
  Description of Artificial Sequence: Synthetic oligonucleotide
  Antisense strand to SEQ ID NO: 1686141
acuuggaugagauucacaa

SEQ ID NO: 1686143 - RNA, 19 nt, Artificial Sequence
  Description of Artificial Sequence: Synthetic oligonucleotide
  Sense strand starting at position 1506 of SEQ ID NO: 1561627
ugguuaucuggcuggcuca

SEQ ID NO: 1686144 - RNA, 19 nt, Artificial Sequence
  Description of Artificial Sequence: Synthetic oligonucleotide
  Antisense strand to SEQ ID NO: 1686143
ugagccagccagauaacca

SEQ ID NO: 1686145 - RNA, 19 nt, Artificial Sequence
  Description of Artificial Sequence: Synthetic oligonucleotide
  Sense strand starting at position 1587 of SEQ ID NO: 1561627
uaaacagaccgucaguuua

SEQ ID NO: 1686146 - RNA, 19 nt, Artificial Sequence
  Description of Artificial Sequence: Synthetic oligonucleotide
  Antisense strand to SEQ ID NO: 1686145
uaaacugacggucuguuua

SEQ ID NO: 1686147 - RNA, 19 nt, Artificial Sequence
  Description of Artificial Sequence: Synthetic oligonucleotide
  Sense strand starting at position 1589 of SEQ ID NO: 1561627
aacagaccgucaguuuaaa

SEQ ID NO: 1686148 - RNA, 19 nt, Artificial Sequence
  Description of Artificial Sequence: Synthetic oligonucleotide
  Antisense strand to SEQ ID NO: 1686147
uuuaaacugacggucuguu

SEQ ID NO: 1686149 - RNA, 19 nt, Artificial Sequence
  Description of Artificial Sequence: Synthetic oligonucleotide
  Sense strand starting at position 2089 of SEQ ID NO: 1561627
gcggcauaucccgaugcuu

SEQ ID NO: 1686150 - RNA, 19 nt, Artificial Sequence
  Description of Artificial Sequence: Synthetic oligonucleotide
  Antisense strand to SEQ ID NO: 1686149
aagcaucgggauaugccgc

SEQ ID NO: 1686151 - RNA, 19 nt, Artificial Sequence
  Description of Artificial Sequence: Synthetic oligonucleotide
  Sense strand starting at position 2408 of SEQ ID NO: 1561627
gcggcugaguucuuaucua

SEQ ID NO: 1686152 - RNA, 19 nt, Artificial Sequence
  Description of Artificial Sequence: Synthetic oligonucleotide
  Antisense strand to SEQ ID NO: 1686151
uagauaagaacucagccgc

SEQ ID NO: 1686153 - RNA, 19 nt, Artificial Sequence
  Description of Artificial Sequence: Synthetic oligonucleotide
  Sense strand starting at position 2412 of SEQ ID NO: 1561627
cugaguucuuaucuagcca

SEQ ID NO: 1686154 - RNA, 19 nt, Artificial Sequence
  Description of Artificial Sequence: Synthetic oligonucleotide
  Antisense strand to SEQ ID NO: 1686153
uggcuagauaagaacucag

SEQ ID NO: 1686155 - RNA, 19 nt, Artificial Sequence
  Description of Artificial Sequence: Synthetic oligonucleotide
  Sense strand starting at position 2426 of SEQ ID NO: 1561627
agccaacaugcgugagaau

SEQ ID NO: 1686156 - RNA, 19 nt, Artificial Sequence
  Description of Artificial Sequence: Synthetic oligonucleotide
  Antisense strand to SEQ ID NO: 1686155
auucucacgcauguuggcu

SEQ ID NO: 1686157 - RNA, 19 nt, Artificial Sequence
  Description of Artificial Sequence: Synthetic oligonucleotide
  Sense strand starting at position 2465 of SEQ ID NO: 1561627
uguacauuccugggcugua

SEQ ID NO: 1686158 - RNA, 19 nt, Artificial Sequence
  Description of Artificial Sequence: Synthetic oligonucleotide
  Antisense strand to SEQ ID NO: 1686157
uacagcccaggaauguaca

SEQ ID NO: 1686159 - RNA, 19 nt, Artificial Sequence
  Description of Artificial Sequence: Synthetic oligonucleotide
  Sense strand starting at position 2488 of SEQ ID NO: 1561627
cggaaauuaugacuuugga

SEQ ID NO: 1686160 - RNA, 19 nt, Artificial Sequence
  Description of Artificial Sequence: Synthetic oligonucleotide
  Antisense strand to SEQ ID NO: 1686159
uccaaagucauaauuuccg

SEQ ID NO: 1686161 - RNA, 19 nt, Artificial Sequence
  Description of Artificial Sequence: Synthetic oligonucleotide
  Sense strand starting at position 2492 of SEQ ID NO: 1561627
aauuaugacuuuggaggga

SEQ ID NO: 1686162 - RNA, 19 nt, Artificial Sequence
  Description of Artificial Sequence: Synthetic oligonucleotide
  Antisense strand to SEQ ID NO: 1686161
ucccuccaaagucauaauu

SEQ ID NO: 1686163 - RNA, 19 nt, Artificial Sequence
  Description of Artificial Sequence: Synthetic oligonucleotide
  Sense strand starting at position 2571 of SEQ ID NO: 1561627
uugcgcagauucugaauuu

SEQ ID NO: 1686164 - RNA, 19 nt, Artificial Sequence
  Description of Artificial Sequence: Synthetic oligonucleotide
  Antisense strand to SEQ ID NO: 1686163
aaauucagaaucugcgcaa

SEQ ID NO: 1686165 - RNA, 19 nt, Artificial Sequence
  Description of Artificial Sequence: Synthetic oligonucleotide
  Sense strand starting at position 2594 of SEQ ID NO: 1561627
guuccugcagcgguuuaau

SEQ ID NO: 1686166 - RNA, 19 nt, Artificial Sequence
  Description of Artificial Sequence: Synthetic oligonucleotide
  Antisense strand to SEQ ID NO: 1686165
auuaaaccgcugcaggaac

SEQ ID NO: 1686167 - RNA, 19 nt, Artificial Sequence
  Description of Artificial Sequence: Synthetic oligonucleotide
  Sense strand starting at position 2674 of SEQ ID NO: 1561627
ccuggcagaucugucaauu

SEQ ID NO: 1686168 - RNA, 19 nt, Artificial Sequence
  Description of Artificial Sequence: Synthetic oligonucleotide
  Antisense strand to SEQ ID NO: 1686167
aauugacagaucugccagg

SEQ ID NO: 1686169 - RNA, 19 nt, Artificial Sequence
  Description of Artificial Sequence: Synthetic oligonucleotide
  Sense strand starting at position 2796 of SEQ ID NO: 1561627
ggaagagguuuauaccuua

SEQ ID NO: 1686170 - RNA, 19 nt, Artificial Sequence
  Description of Artificial Sequence: Synthetic oligonucleotide
  Antisense strand to SEQ ID NO: 1686169
uaagguauaaaccucuucc

SEQ ID NO: 1686171 - RNA, 19 nt, Artificial Sequence
  Description of Artificial Sequence: Synthetic oligonucleotide
  Sense strand starting at position 2799 of SEQ ID NO: 1561627
agagguuuauaccuuaaac

SEQ ID NO: 1686172 - RNA, 19 nt, Artificial Sequence
  Description of Artificial Sequence: Synthetic oligonucleotide
  Antisense strand to SEQ ID NO: 1686171
guuuaagguauaaaccucu

SEQ ID NO: 1686173 - RNA, 19 nt, Artificial Sequence
  Description of Artificial Sequence: Synthetic oligonucleotide
  Sense strand starting at position 2844 of SEQ ID NO: 1561627
ccuauagagccuuacguaa

SEQ ID NO: 1686174 - RNA, 19 nt, Artificial Sequence
  Description of Artificial Sequence: Synthetic oligonucleotide
  Antisense strand to SEQ ID NO: 1686173
uuacguaaggcucuauagg

SEQ ID NO: 1686175 - RNA, 19 nt, Artificial Sequence
  Description of Artificial Sequence: Synthetic oligonucleotide
  Sense strand starting at position 2939 of SEQ ID NO: 1561627
gcauguguuccuccagcca

SEQ ID NO: 1686176 - RNA, 19 nt, Artificial Sequence
  Description of Artificial Sequence: Synthetic oligonucleotide
  Antisense strand to SEQ ID NO: 1686175
uggcuggaggaacacaugc

SEQ ID NO: 1686177 - RNA, 19 nt, Artificial Sequence
  Description of Artificial Sequence: Synthetic oligonucleotide
  Sense strand starting at position 3005 of SEQ ID NO: 1561627
uaccucuuggcaugugaau

SEQ ID NO: 1686178 - RNA, 19 nt, Artificial Sequence
  Description of Artificial Sequence: Synthetic oligonucleotide
  Antisense strand to SEQ ID NO: 1686177
auucacaugccaagaggua

SEQ ID NO: 1686179 - RNA, 19 nt, Artificial Sequence
  Description of Artificial Sequence: Synthetic oligonucleotide
  Sense strand starting at position 3235 of SEQ ID NO: 1561627
guuagcgucucacuguauu

SEQ ID NO: 1686180 - RNA, 19 nt, Artificial Sequence
  Description of Artificial Sequence: Synthetic oligonucleotide
  Antisense strand to SEQ ID NO: 1686179
aauacagugagacgcuaac

SEQ ID NO: 1686181 - RNA, 19 nt, Artificial Sequence
  Description of Artificial Sequence: Synthetic oligonucleotide
  Sense strand starting at position 3303 of SEQ ID NO: 1561627
cccacaaauugcuaggauu

SEQ ID NO: 1686182 - RNA, 19 nt, Artificial Sequence
  Description of Artificial Sequence: Synthetic oligonucleotide
  Antisense strand to SEQ ID NO: 1686181
aauccuagcaauuuguggg

SEQ ID NO: 1686183 - RNA, 19 nt, Artificial Sequence
  Description of Artificial Sequence: Synthetic oligonucleotide
  Sense strand starting at position 3359 of SEQ ID NO: 1561627
uuuaauugaccuuguagau

SEQ ID NO: 1686184 - RNA, 19 nt, Artificial Sequence
  Description of Artificial Sequence: Synthetic oligonucleotide
  Antisense strand to SEQ ID NO: 1686183
aucuacaaggucaauuaaa

SEQ ID NO: 1686185 - RNA, 19 nt, Artificial Sequence
  Description of Artificial Sequence: Synthetic oligonucleotide
  Sense strand starting at position 3451 of SEQ ID NO: 1561627
cccugugaaucaggucuca

SEQ ID NO: 1686186 - RNA, 19 nt, Artificial Sequence
  Description of Artificial Sequence: Synthetic oligonucleotide
  Antisense strand to SEQ ID NO: 1686185
ugagaccugauucacaggg

SEQ ID NO: 1686187 - RNA, 19 nt, Artificial Sequence
  Description of Artificial Sequence: Synthetic oligonucleotide
  Sense strand starting at position 3456 of SEQ ID NO: 1561627
ugaaucaggucucaccaau

SEQ ID NO: 1686188 - RNA, 19 nt, Artificial Sequence
  Description of Artificial Sequence: Synthetic oligonucleotide
  Antisense strand to SEQ ID NO: 1686187
auuggugagaccugauuca

SEQ ID NO: 1686189 - RNA, 19 nt, Artificial Sequence
  Description of Artificial Sequence: Synthetic oligonucleotide
  Sense strand starting at position 3542 of SEQ ID NO: 1561627
acgcucuuuggugacaaga

SEQ ID NO: 1686190 - RNA, 19 nt, Artificial Sequence
  Description of Artificial Sequence: Synthetic oligonucleotide
  Antisense strand to SEQ ID NO: 1686189
ucuugucaccaaagagcgu

SEQ ID NO: 1686191 - RNA, 19 nt, Artificial Sequence
  Description of Artificial Sequence: Synthetic oligonucleotide
  Sense strand starting at position 3544 of SEQ ID NO: 1561627
gcucuuuggugacaagaaa

SEQ ID NO: 1686192 - RNA, 19 nt, Artificial Sequence
  Description of Artificial Sequence: Synthetic oligonucleotide
  Antisense strand to SEQ ID NO: 1686191
uuucuugucaccaaagagc

SEQ ID NO: 1686193 - RNA, 19 nt, Artificial Sequence
  Description of Artificial Sequence: Synthetic oligonucleotide
  Sense strand starting at position 3711 of SEQ ID NO: 1561627
ugugacaacacguaaaugu

SEQ ID NO: 1686194 - RNA, 19 nt, Artificial Sequence
  Description of Artificial Sequence: Synthetic oligonucleotide
  Antisense strand to SEQ ID NO: 1686193
acauuuacguguugucaca

SEQ ID NO: 1686195 - RNA, 19 nt, Artificial Sequence
  Description of Artificial Sequence: Synthetic oligonucleotide
  Sense strand starting at position 3786 of SEQ ID NO: 1561627
gagugauguuggcacagcu

SEQ ID NO: 1686196 - RNA, 19 nt, Artificial Sequence
  Description of Artificial Sequence: Synthetic oligonucleotide
  Antisense strand to SEQ ID NO: 1686195
agcugugccaacaucacuc

SEQ ID NO: 1686197 - RNA, 19 nt, Artificial Sequence
  Description of Artificial Sequence: Synthetic oligonucleotide
  Sense strand starting at position 3952 of SEQ ID NO: 1561627
gugagucaacaccaaguuu

SEQ ID NO: 1686198 - RNA, 19 nt, Artificial Sequence
  Description of Artificial Sequence: Synthetic oligonucleotide
  Antisense strand to SEQ ID NO: 1686197
aaacuugguguugacucac

SEQ ID NO: 1686199 - RNA, 19 nt, Artificial Sequence
  Description of Artificial Sequence: Synthetic oligonucleotide
  Sense strand starting at position 40 of SEQ ID NO: 1561628
gcuguugaaucugucugau

SEQ ID NO: 1686200 - RNA, 19 nt, Artificial Sequence
  Description of Artificial Sequence: Synthetic oligonucleotide
  Antisense strand to SEQ ID NO: 1686199
aucagacagauucaacagc

SEQ ID NO: 1686201 - RNA, 19 nt, Artificial Sequence
  Description of Artificial Sequence: Synthetic oligonucleotide
  Sense strand starting at position 53 of SEQ ID NO: 1561628
ucugauuugcuguggugaa

SEQ ID NO: 1686202 - RNA, 19 nt, Artificial Sequence
  Description of Artificial Sequence: Synthetic oligonucleotide
  Antisense strand to SEQ ID NO: 1686201
uucaccacagcaaaucaga

SEQ ID NO: 1686203 - RNA, 19 nt, Artificial Sequence
  Description of Artificial Sequence: Synthetic oligonucleotide
  Sense strand starting at position 183 of SEQ ID NO: 1561628
augugcugugacugagacu

SEQ ID NO: 1686204 - RNA, 19 nt, Artificial Sequence
  Description of Artificial Sequence: Synthetic oligonucleotide
  Antisense strand to SEQ ID NO: 1686203
agucucagucacagcacau

SEQ ID NO: 1686205 - RNA, 19 nt, Artificial Sequence
  Description of Artificial Sequence: Synthetic oligonucleotide
  Sense strand starting at position 514 of SEQ ID NO: 1561628
ggaugaaugucccuuucga

SEQ ID NO: 1686206 - RNA, 19 nt, Artificial Sequence
  Description of Artificial Sequence: Synthetic oligonucleotide
  Antisense strand to SEQ ID NO: 1686205
ucgaaagggacauucaucc

SEQ ID NO: 1686207 - RNA, 19 nt, Artificial Sequence
  Description of Artificial Sequence: Synthetic oligonucleotide
  Sense strand starting at position 523 of SEQ ID NO: 1561628
ucccuuucgacaggugaau

SEQ ID NO: 1686208 - RNA, 19 nt, Artificial Sequence
  Description of Artificial Sequence: Synthetic oligonucleotide
  Antisense strand to SEQ ID NO: 1686207
auucaccugucgaaaggga

SEQ ID NO: 1686209 - RNA, 19 nt, Artificial Sequence
  Description of Artificial Sequence: Synthetic oligonucleotide
  Sense strand starting at position 525 of SEQ ID NO: 1561628
ccuuucgacaggugaaucu

SEQ ID NO: 1686210 - RNA, 19 nt, Artificial Sequence
  Description of Artificial Sequence: Synthetic oligonucleotide
  Antisense strand to SEQ ID NO: 1686209
agauucaccugucgaaagg

SEQ ID NO: 1686211 - RNA, 19 nt, Artificial Sequence
  Description of Artificial Sequence: Synthetic oligonucleotide
  Sense strand starting at position 612 of SEQ ID NO: 1561628
acagcuuguuuagaaauuu

SEQ ID NO: 1686212 - RNA, 19 nt, Artificial Sequence
  Description of Artificial Sequence: Synthetic oligonucleotide
  Antisense strand to SEQ ID NO: 1686211
aaauuucuaaacaagcugu

SEQ ID NO: 1686213 - RNA, 19 nt, Artificial Sequence
  Description of Artificial Sequence: Synthetic oligonucleotide
  Sense strand starting at position 662 of SEQ ID NO: 1561628
agcuccucgaggugacuua

SEQ ID NO: 1686214 - RNA, 19 nt, Artificial Sequence
  Description of Artificial Sequence: Synthetic oligonucleotide
  Antisense strand to SEQ ID NO: 1686213
uaagucaccucgaggagcu

SEQ ID NO: 1686215 - RNA, 19 nt, Artificial Sequence
  Description of Artificial Sequence: Synthetic oligonucleotide
  Sense strand starting at position 680 of SEQ ID NO: 1561628
agacuuugcuccuugccua

SEQ ID NO: 1686216 - RNA, 19 nt, Artificial Sequence
  Description of Artificial Sequence: Synthetic oligonucleotide
  Antisense strand to SEQ ID NO: 1686215
uaggcaaggagcaaagucu

SEQ ID NO: 1686217 - RNA, 19 nt, Artificial Sequence
  Description of Artificial Sequence: Synthetic oligonucleotide
  Sense strand starting at position 759 of SEQ ID NO: 1561628
gcugccauucccugaacau

SEQ ID NO: 1686218 - RNA, 19 nt, Artificial Sequence
  Description of Artificial Sequence: Synthetic oligonucleotide
  Antisense strand to SEQ ID NO: 1686217
auguucagggaauggcagc

SEQ ID NO: 1686219 - RNA, 19 nt, Artificial Sequence
  Description of Artificial Sequence: Synthetic oligonucleotide
  Sense strand starting at position 760 of SEQ ID NO: 1561628
cugccauucccugaacaug

SEQ ID NO: 1686220 - RNA, 19 nt, Artificial Sequence
  Description of Artificial Sequence: Synthetic oligonucleotide
  Antisense strand to SEQ ID NO: 1686219
cauguucagggaauggcag

SEQ ID NO: 1686221 - RNA, 19 nt, Artificial Sequence
  Description of Artificial Sequence: Synthetic oligonucleotide
  Sense strand starting at position 813 of SEQ ID NO: 1561628
cugcacgugcucucguaau

SEQ ID NO: 1686222 - RNA, 19 nt, Artificial Sequence
  Description of Artificial Sequence: Synthetic oligonucleotide
  Antisense strand to SEQ ID NO: 1686221
auuacgagagcacgugcag

SEQ ID NO: 1686223 - RNA, 19 nt, Artificial Sequence
  Description of Artificial Sequence: Synthetic oligonucleotide
  Sense strand starting at position 815 of SEQ ID NO: 1561628
gcacgugcucucguaaucu

SEQ ID NO: 1686224 - RNA, 19 nt, Artificial Sequence
  Description of Artificial Sequence: Synthetic oligonucleotide
  Antisense strand to SEQ ID NO: 1686223
agauuacgagagcacgugc

SEQ ID NO: 1686225 - RNA, 19 nt, Artificial Sequence
  Description of Artificial Sequence: Synthetic oligonucleotide
  Sense strand starting at position 1196 of SEQ ID NO: 1561628
ggcauugacuacucuacca

SEQ ID NO: 1686226 - RNA, 19 nt, Artificial Sequence
  Description of Artificial Sequence: Synthetic oligonucleotide
  Antisense strand to SEQ ID NO: 1686225
ugguagaguagucaaugcc

SEQ ID NO: 1686227 - RNA, 19 nt, Artificial Sequence
  Description of Artificial Sequence: Synthetic oligonucleotide
  Sense strand starting at position 1342 of SEQ ID NO: 1561628
ucaggauuccgugggcaaa

SEQ ID NO: 1686228 - RNA, 19 nt, Artificial Sequence
  Description of Artificial Sequence: Synthetic oligonucleotide
  Antisense strand to SEQ ID NO: 1686227
uuugcccacggaauccuga

SEQ ID NO: 1686229 - RNA, 19 nt, Artificial Sequence
  Description of Artificial Sequence: Synthetic oligonucleotide
  Sense strand starting at position 1367 of SEQ ID NO: 1561628
cccaguaaccuuggucuga

SEQ ID NO: 1686230 - RNA, 19 nt, Artificial Sequence
  Description of Artificial Sequence: Synthetic oligonucleotide
  Antisense strand to SEQ ID NO: 1686229
ucagaccaagguuacuggg

SEQ ID NO: 1686231 - RNA, 19 nt, Artificial Sequence
  Description of Artificial Sequence: Synthetic oligonucleotide
  Sense strand starting at position 1368 of SEQ ID NO: 1561628
ccaguaaccuuggucugaa

SEQ ID NO: 1686232 - RNA, 19 nt, Artificial Sequence
  Description of Artificial Sequence: Synthetic oligonucleotide
  Antisense strand to SEQ ID NO: 1686231
uucagaccaagguuacugg

SEQ ID NO: 1686233 - RNA, 19 nt, Artificial Sequence
  Description of Artificial Sequence: Synthetic oligonucleotide
  Sense strand starting at position 1369 of SEQ ID NO: 1561628
caguaaccuuggucugaau

SEQ ID NO: 1686234 - RNA, 19 nt, Artificial Sequence
  Description of Artificial Sequence: Synthetic oligonucleotide
  Antisense strand to SEQ ID NO: 1686233
auucagaccaagguuacug

SEQ ID NO: 1686235 - RNA, 19 nt, Artificial Sequence
  Description of Artificial Sequence: Synthetic oligonucleotide
  Sense strand starting at position 1371 of SEQ ID NO: 1561628
guaaccuuggucugaauag

SEQ ID NO: 1686236 - RNA, 19 nt, Artificial Sequence
  Description of Artificial Sequence: Synthetic oligonucleotide
  Antisense strand to SEQ ID NO: 1686235
cuauucagaccaagguuac

SEQ ID NO: 1686237 - RNA, 19 nt, Artificial Sequence
  Description of Artificial Sequence: Synthetic oligonucleotide
  Sense strand starting at position 1525 of SEQ ID NO: 1561628
gagugcagcggcucucaua

SEQ ID NO: 1686238 - RNA, 19 nt, Artificial Sequence
  Description of Artificial Sequence: Synthetic oligonucleotide
  Antisense strand to SEQ ID NO: 1686237
uaugagagccgcugcacuc

SEQ ID NO: 1686239 - RNA, 19 nt, Artificial Sequence
  Description of Artificial Sequence: Synthetic oligonucleotide
  Sense strand starting at position 1915 of SEQ ID NO: 1561628
gcuggaguccugcgaagaa

SEQ ID NO: 1686240 - RNA, 19 nt, Artificial Sequence
  Description of Artificial Sequence: Synthetic oligonucleotide
  Antisense strand to SEQ ID NO: 1686239
uucuucgcaggacuccagc

SEQ ID NO: 1686241 - RNA, 19 nt, Artificial Sequence
  Description of Artificial Sequence: Synthetic oligonucleotide
  Sense strand starting at position 1985 of SEQ ID NO: 1561628
ggcuguugauaguuguaag

SEQ ID NO: 1686242 - RNA, 19 nt, Artificial Sequence
  Description of Artificial Sequence: Synthetic oligonucleotide
  Antisense strand to SEQ ID NO: 1686241
cuuacaacuaucaacagcc

SEQ ID NO: 1686243 - RNA, 19 nt, Artificial Sequence
  Description of Artificial Sequence: Synthetic oligonucleotide
  Sense strand starting at position 2391 of SEQ ID NO: 1561628
ccagaagcgcagugaaagu

SEQ ID NO: 1686244 - RNA, 19 nt, Artificial Sequence
  Description of Artificial Sequence: Synthetic oligonucleotide
  Antisense strand to SEQ ID NO: 1686243
acuuucacugcgcuucugg

SEQ ID NO: 1686245 - RNA, 19 nt, Artificial Sequence
  Description of Artificial Sequence: Synthetic oligonucleotide
  Sense strand starting at position 2440 of SEQ ID NO: 1561628
ggccucugucuguaaauga

SEQ ID NO: 1686246 - RNA, 19 nt, Artificial Sequence
  Description of Artificial Sequence: Synthetic oligonucleotide
  Antisense strand to SEQ ID NO: 1686245
ucauuuacagacagaggcc

SEQ ID NO: 1686247 - RNA, 19 nt, Artificial Sequence
  Description of Artificial Sequence: Synthetic oligonucleotide
  Sense strand starting at position 2835 of SEQ ID NO: 1561628
cauggaucaccggguaacu

SEQ ID NO: 1686248 - RNA, 19 nt, Artificial Sequence
  Description of Artificial Sequence: Synthetic oligonucleotide
  Antisense strand to SEQ ID NO: 1686247
aguuacccggugauccaug

SEQ ID NO: 1686249 - RNA, 19 nt, Artificial Sequence
  Description of Artificial Sequence: Synthetic oligonucleotide
  Sense strand starting at position 3605 of SEQ ID NO: 1561628
cgaucaauuugcuuccuga

SEQ ID NO: 1686250 - RNA, 19 nt, Artificial Sequence
  Description of Artificial Sequence: Synthetic oligonucleotide
  Antisense strand to SEQ ID NO: 1686249
ucaggaagcaaauugaucg

SEQ ID NO: 1686251 - RNA, 19 nt, Artificial Sequence
  Description of Artificial Sequence: Synthetic oligonucleotide
  Sense strand starting at position 3676 of SEQ ID NO: 1561628
aacugaaaucgguaugagc

SEQ ID NO: 1686252 - RNA, 19 nt, Artificial Sequence
  Description of Artificial Sequence: Synthetic oligonucleotide
  Antisense strand to SEQ ID NO: 1686251
gcucauaccgauuucaguu

SEQ ID NO: 1686253 - RNA, 19 nt, Artificial Sequence
  Description of Artificial Sequence: Synthetic oligonucleotide
  Sense strand starting at position 3678 of SEQ ID NO: 1561628
cugaaaucgguaugagcuu

SEQ ID NO: 1686254 - RNA, 19 nt, Artificial Sequence
  Description of Artificial Sequence: Synthetic oligonucleotide
  Antisense strand to SEQ ID NO: 1686253
aagcucauaccgauuucag

SEQ ID NO: 1686255 - RNA, 19 nt, Artificial Sequence
  Description of Artificial Sequence: Synthetic oligonucleotide
  Sense strand starting at position 3689 of SEQ ID NO: 1561628
augagcuuucccuggcaga

SEQ ID NO: 1686256 - RNA, 19 nt, Artificial Sequence
  Description of Artificial Sequence: Synthetic oligonucleotide
  Antisense strand to SEQ ID NO: 1686255
ucugccagggaaagcucau

SEQ ID NO: 1686257 - RNA, 19 nt, Artificial Sequence
  Description of Artificial Sequence: Synthetic oligonucleotide
  Sense strand starting at position 3690 of SEQ ID NO: 1561628
ugagcuuucccuggcagac

SEQ ID NO: 1686258 - RNA, 19 nt, Artificial Sequence
  Description of Artificial Sequence: Synthetic oligonucleotide
  Antisense strand to SEQ ID NO: 1686257
gucugccagggaaagcuca

SEQ ID NO: 1686259 - RNA, 19 nt, Artificial Sequence
  Description of Artificial Sequence: Synthetic oligonucleotide
  Sense strand starting at position 3706 of SEQ ID NO: 1561628
gacaauggccauugucaca

SEQ ID NO: 1686260 - RNA, 19 nt, Artificial Sequence
  Description of Artificial Sequence: Synthetic oligonucleotide
  Antisense strand to SEQ ID NO: 1686259
ugugacaauggccauuguc

SEQ ID NO: 1686261 - RNA, 19 nt, Artificial Sequence
  Description of Artificial Sequence: Synthetic oligonucleotide
  Sense strand starting at position 3745 of SEQ ID NO: 1561628
gauaacuuugugggcaaga

SEQ ID NO: 1686262 - RNA, 19 nt, Artificial Sequence
  Description of Artificial Sequence: Synthetic oligonucleotide
  Antisense strand to SEQ ID NO: 1686261
ucuugcccacaaaguuauc

SEQ ID NO: 1686263 - RNA, 19 nt, Artificial Sequence
  Description of Artificial Sequence: Synthetic oligonucleotide
  Sense strand starting at position 3765 of SEQ ID NO: 1561628
gagaguugugcagggugau

SEQ ID NO: 1686264 - RNA, 19 nt, Artificial Sequence
  Description of Artificial Sequence: Synthetic oligonucleotide
  Antisense strand to SEQ ID NO: 1686263
aucacccugcacaacucuc

SEQ ID NO: 1686265 - RNA, 19 nt, Artificial Sequence
  Description of Artificial Sequence: Synthetic oligonucleotide
  Sense strand starting at position 3768 of SEQ ID NO: 1561628
aguugugcagggugauuau

SEQ ID NO: 1686266 - RNA, 19 nt, Artificial Sequence
  Description of Artificial Sequence: Synthetic oligonucleotide
  Antisense strand to SEQ ID NO: 1686265
auaaucacccugcacaacu

SEQ ID NO: 1686267 - RNA, 19 nt, Artificial Sequence
  Description of Artificial Sequence: Synthetic oligonucleotide
  Sense strand starting at position 3789 of SEQ ID NO: 1561628
auacuugcauaauugugau

SEQ ID NO: 1686268 - RNA, 19 nt, Artificial Sequence
  Description of Artificial Sequence: Synthetic oligonucleotide
  Antisense strand to SEQ ID NO: 1686267
aucacaauuaugcaaguau

SEQ ID NO: 1686269 - RNA, 19 nt, Artificial Sequence
  Description of Artificial Sequence: Synthetic oligonucleotide
  Sense strand starting at position 3801 of SEQ ID NO: 1561628
uugugauuauuuguggcaa

SEQ ID NO: 1686270 - RNA, 19 nt, Artificial Sequence
  Description of Artificial Sequence: Synthetic oligonucleotide
  Antisense strand to SEQ ID NO: 1686269
uugccacaaauaaucacaa

SEQ ID NO: 1686271 - RNA, 19 nt, Artificial Sequence
  Description of Artificial Sequence: Synthetic oligonucleotide
  Sense strand starting at position 3805 of SEQ ID NO: 1561628
gauuauuuguggcaauuau

SEQ ID NO: 1686272 - RNA, 19 nt, Artificial Sequence
  Description of Artificial Sequence: Synthetic oligonucleotide
  Antisense strand to SEQ ID NO: 1686271
auaauugccacaaauaauc

SEQ ID NO: 1686273 - RNA, 19 nt, Artificial Sequence
  Description of Artificial Sequence: Synthetic oligonucleotide
  Sense strand starting at position 3813 of SEQ ID NO: 1561628
guggcaauuaugggucuuu

SEQ ID NO: 1686274 - RNA, 19 nt, Artificial Sequence
  Description of Artificial Sequence: Synthetic oligonucleotide
  Antisense strand to SEQ ID NO: 1686273
aaagacccauaauugccac

SEQ ID NO: 1686275 - RNA, 19 nt, Artificial Sequence
  Description of Artificial Sequence: Synthetic oligonucleotide
  Sense strand starting at position 3845 of SEQ ID NO: 1561628
uuacaauuauggguaguuu

SEQ ID NO: 1686276 - RNA, 19 nt, Artificial Sequence
  Description of Artificial Sequence: Synthetic oligonucleotide
  Antisense strand to SEQ ID NO: 1686275
aaacuacccauaauuguaa

SEQ ID NO: 1686277 - RNA, 19 nt, Artificial Sequence
  Description of Artificial Sequence: Synthetic oligonucleotide
  Sense strand starting at position 3846 of SEQ ID NO: 1561628
uacaauuauggguaguuua

SEQ ID NO: 1686278 - RNA, 19 nt, Artificial Sequence
  Description of Artificial Sequence: Synthetic oligonucleotide
  Antisense strand to SEQ ID NO: 1686277
uaaacuacccauaauugua

SEQ ID NO: 1686279 - RNA, 19 nt, Artificial Sequence
  Description of Artificial Sequence: Synthetic oligonucleotide
  Sense strand starting at position 303 of SEQ ID NO: 1561629
agaagugugagccagccaa

SEQ ID NO: 1686280 - RNA, 19 nt, Artificial Sequence
  Description of Artificial Sequence: Synthetic oligonucleotide
  Antisense strand to SEQ ID NO: 1686279
uuggcuggcucacacuucu

SEQ ID NO: 1686281 - RNA, 19 nt, Artificial Sequence
  Description of Artificial Sequence: Synthetic oligonucleotide
  Sense strand starting at position 459 of SEQ ID NO: 1561629
aggaaaguguugccaauuc

SEQ ID NO: 1686282 - RNA, 19 nt, Artificial Sequence
  Description of Artificial Sequence: Synthetic oligonucleotide
  Antisense strand to SEQ ID NO: 1686281
gaauuggcaacacuuuccu

SEQ ID NO: 1686283 - RNA, 19 nt, Artificial Sequence
  Description of Artificial Sequence: Synthetic oligonucleotide
  Sense strand starting at position 541 of SEQ ID NO: 1561629
uaaguagggugaucagauu

SEQ ID NO: 1686284 - RNA, 19 nt, Artificial Sequence
  Description of Artificial Sequence: Synthetic oligonucleotide
  Antisense strand to SEQ ID NO: 1686283
aaucugaucacccuacuua

SEQ ID NO: 1686285 - RNA, 19 nt, Artificial Sequence
  Description of Artificial Sequence: Synthetic oligonucleotide
  Sense strand starting at position 547 of SEQ ID NO: 1561629
gggugaucagauuguccca

SEQ ID NO: 1686286 - RNA, 19 nt, Artificial Sequence
  Description of Artificial Sequence: Synthetic oligonucleotide
  Antisense strand to SEQ ID NO: 1686285
ugggacaaucugaucaccc

SEQ ID NO: 1686287 - RNA, 19 nt, Artificial Sequence
  Description of Artificial Sequence: Synthetic oligonucleotide
  Sense strand starting at position 550 of SEQ ID NO: 1561629
ugaucagauugucccaguu

SEQ ID NO: 1686288 - RNA, 19 nt, Artificial Sequence
  Description of Artificial Sequence: Synthetic oligonucleotide
  Antisense strand to SEQ ID NO: 1686287
aacugggacaaucugauca

SEQ ID NO: 1686289 - RNA, 19 nt, Artificial Sequence
  Description of Artificial Sequence: Synthetic oligonucleotide
  Sense strand starting at position 574 of SEQ ID NO: 1561629
agguuuagcacugaaaguu

SEQ ID NO: 1686290 - RNA, 19 nt, Artificial Sequence
  Description of Artificial Sequence: Synthetic oligonucleotide
  Antisense strand to SEQ ID NO: 1686289
aacuuucagugcuaaaccu

SEQ ID NO: 1686291 - RNA, 19 nt, Artificial Sequence
  Description of Artificial Sequence: Synthetic oligonucleotide
  Sense strand starting at position 589 of SEQ ID NO: 1561629
aguucuacauccuuggaaa

SEQ ID NO: 1686292 - RNA, 19 nt, Artificial Sequence
  Description of Artificial Sequence: Synthetic oligonucleotide
  Antisense strand to SEQ ID NO: 1686291
uuuccaaggauguagaacu

SEQ ID NO: 1686293 - RNA, 19 nt, Artificial Sequence
  Description of Artificial Sequence: Synthetic oligonucleotide
  Sense strand starting at position 590 of SEQ ID NO: 1561629
guucuacauccuuggaaac

SEQ ID NO: 1686294 - RNA, 19 nt, Artificial Sequence
  Description of Artificial Sequence: Synthetic oligonucleotide
  Antisense strand to SEQ ID NO: 1686293
guuuccaaggauguagaac

SEQ ID NO: 1686295 - RNA, 19 nt, Artificial Sequence
  Description of Artificial Sequence: Synthetic oligonucleotide
  Sense strand starting at position 626 of SEQ ID NO: 1561629
caggaugguuggucaggau

SEQ ID NO: 1686296 - RNA, 19 nt, Artificial Sequence
  Description of Artificial Sequence: Synthetic oligonucleotide
  Antisense strand to SEQ ID NO: 1686295
auccugaccaaccauccug

SEQ ID NO: 1686297 - RNA, 19 nt, Artificial Sequence
  Description of Artificial Sequence: Synthetic oligonucleotide
  Sense strand starting at position 630 of SEQ ID NO: 1561629
augguuggucaggauauau

SEQ ID NO: 1686298 - RNA, 19 nt, Artificial Sequence
  Description of Artificial Sequence: Synthetic oligonucleotide
  Antisense strand to SEQ ID NO: 1686297
auauauccugaccaaccau

SEQ ID NO: 1686299 - RNA, 19 nt, Artificial Sequence
  Description of Artificial Sequence: Synthetic oligonucleotide
  Sense strand starting at position 638 of SEQ ID NO: 1561629
ucaggauauaugggagcau

SEQ ID NO: 1686300 - RNA, 19 nt, Artificial Sequence
  Description of Artificial Sequence: Synthetic oligonucleotide
  Antisense strand to SEQ ID NO: 1686299
augcucccauauauccuga

SEQ ID NO: 1686301 - RNA, 19 nt, Artificial Sequence
  Description of Artificial Sequence: Synthetic oligonucleotide
  Sense strand starting at position 651 of SEQ ID NO: 1561629
gagcaucuucccgaucuuu

SEQ ID NO: 1686302 - RNA, 19 nt, Artificial Sequence
  Description of Artificial Sequence: Synthetic oligonucleotide
  Antisense strand to SEQ ID NO: 1686301
aaagaucgggaagaugcuc

SEQ ID NO: 1686303 - RNA, 19 nt, Artificial Sequence
  Description of Artificial Sequence: Synthetic oligonucleotide
  Sense strand starting at position 1015 of SEQ ID NO: 1561629
ugaaaucuaugcuuacgaa

SEQ ID NO: 1686304 - RNA, 19 nt, Artificial Sequence
  Description of Artificial Sequence: Synthetic oligonucleotide
  Antisense strand to SEQ ID NO: 1686303
uucguaagcauagauuuca

SEQ ID NO: 1686305 - RNA, 19 nt, Artificial Sequence
  Description of Artificial Sequence: Synthetic oligonucleotide
  Sense strand starting at position 1203 of SEQ ID NO: 1561629
cuacaaugucacuacuguu

SEQ ID NO: 1686306 - RNA, 19 nt, Artificial Sequence
  Description of Artificial Sequence: Synthetic oligonucleotide
  Antisense strand to SEQ ID NO: 1686305
aacaguagugacauuguag

SEQ ID NO: 1686307 - RNA, 19 nt, Artificial Sequence
  Description of Artificial Sequence: Synthetic oligonucleotide
  Sense strand starting at position 2115 of SEQ ID NO: 1561629
ucggaacccgcucagagau

SEQ ID NO: 1686308 - RNA, 19 nt, Artificial Sequence
  Description of Artificial Sequence: Synthetic oligonucleotide
  Antisense strand to SEQ ID NO: 1686307
aucucugagcggguuccga

SEQ ID NO: 1686309 - RNA, 19 nt, Artificial Sequence
  Description of Artificial Sequence: Synthetic oligonucleotide
  Sense strand starting at position 2237 of SEQ ID NO: 1561629
cuucgucucacguuucuga

SEQ ID NO: 1686310 - RNA, 19 nt, Artificial Sequence
  Description of Artificial Sequence: Synthetic oligonucleotide
  Antisense strand to SEQ ID NO: 1686309
ucagaaacgugagacgaag

SEQ ID NO: 1686311 - RNA, 19 nt, Artificial Sequence
  Description of Artificial Sequence: Synthetic oligonucleotide
  Sense strand starting at position 2268 of SEQ ID NO: 1561629
ucaugacgcacuugggaau

SEQ ID NO: 1686312 - RNA, 19 nt, Artificial Sequence
  Description of Artificial Sequence: Synthetic oligonucleotide
  Antisense strand to SEQ ID NO: 1686311
auucccaagugcgucauga

SEQ ID NO: 1686313 - RNA, 19 nt, Artificial Sequence
  Description of Artificial Sequence: Synthetic oligonucleotide
  Sense strand starting at position 2311 of SEQ ID NO: 1561629
uuuaucguuggagaggaua

SEQ ID NO: 1686314 - RNA, 19 nt, Artificial Sequence
  Description of Artificial Sequence: Synthetic oligonucleotide
  Antisense strand to SEQ ID NO: 1686313
uauccucuccaacgauaaa

SEQ ID NO: 1686315 - RNA, 19 nt, Artificial Sequence
  Description of Artificial Sequence: Synthetic oligonucleotide
  Sense strand starting at position 2492 of SEQ ID NO: 1561629
aggccagauguugaguauu

SEQ ID NO: 1686316 - RNA, 19 nt, Artificial Sequence
  Description of Artificial Sequence: Synthetic oligonucleotide
  Antisense strand to SEQ ID NO: 1686315
aauacucaacaucuggccu

SEQ ID NO: 1686317 - RNA, 19 nt, Artificial Sequence
  Description of Artificial Sequence: Synthetic oligonucleotide
  Sense strand starting at position 2494 of SEQ ID NO: 1561629
gccagauguugaguauuaa

SEQ ID NO: 1686318 - RNA, 19 nt, Artificial Sequence
  Description of Artificial Sequence: Synthetic oligonucleotide
  Antisense strand to SEQ ID NO: 1686317
uuaauacucaacaucuggc

SEQ ID NO: 1686319 - RNA, 19 nt, Artificial Sequence
  Description of Artificial Sequence: Synthetic oligonucleotide
  Sense strand starting at position 2533 of SEQ ID NO: 1561629
acagacauuugauaaaguu

SEQ ID NO: 1686320 - RNA, 19 nt, Artificial Sequence
  Description of Artificial Sequence: Synthetic oligonucleotide
  Antisense strand to SEQ ID NO: 1686319
aacuuuaucaaaugucugu

SEQ ID NO: 1686321 - RNA, 19 nt, Artificial Sequence
  Description of Artificial Sequence: Synthetic oligonucleotide
  Sense strand starting at position 2609 of SEQ ID NO: 1561629
aaguaaaguccagguagaa

SEQ ID NO: 1686322 - RNA, 19 nt, Artificial Sequence
  Description of Artificial Sequence: Synthetic oligonucleotide
  Antisense strand to SEQ ID NO: 1686321
uucuaccuggacuuuacuu

SEQ ID NO: 1686323 - RNA, 19 nt, Artificial Sequence
  Description of Artificial Sequence: Synthetic oligonucleotide
  Sense strand starting at position 2699 of SEQ ID NO: 1561629
ccagaaauguucccaggug

SEQ ID NO: 1686324 - RNA, 19 nt, Artificial Sequence
  Description of Artificial Sequence: Synthetic oligonucleotide
  Antisense strand to SEQ ID NO: 1686323
caccugggaacauuucugg

SEQ ID NO: 1686325 - RNA, 19 nt, Artificial Sequence
  Description of Artificial Sequence: Synthetic oligonucleotide
  Sense strand starting at position 3034 of SEQ ID NO: 1561629
gcuagauggcacuagaauu

SEQ ID NO: 1686326 - RNA, 19 nt, Artificial Sequence
  Description of Artificial Sequence: Synthetic oligonucleotide
  Antisense strand to SEQ ID NO: 1686325
aauucuagugccaucuagc

SEQ ID NO: 1686327 - RNA, 19 nt, Artificial Sequence
  Description of Artificial Sequence: Synthetic oligonucleotide
  Sense strand starting at position 3044 of SEQ ID NO: 1561629
acuagaauuccaugugaau

SEQ ID NO: 1686328 - RNA, 19 nt, Artificial Sequence
  Description of Artificial Sequence: Synthetic oligonucleotide
  Antisense strand to SEQ ID NO: 1686327
auucacauggaauucuagu

SEQ ID NO: 1686329 - RNA, 19 nt, Artificial Sequence
  Description of Artificial Sequence: Synthetic oligonucleotide
  Sense strand starting at position 3181 of SEQ ID NO: 1561629
cauucugugucauugagaa

SEQ ID NO: 1686330 - RNA, 19 nt, Artificial Sequence
  Description of Artificial Sequence: Synthetic oligonucleotide
  Antisense strand to SEQ ID NO: 1686329
uucucaaugacacagaaug

SEQ ID NO: 1686331 - RNA, 19 nt, Artificial Sequence
  Description of Artificial Sequence: Synthetic oligonucleotide
  Sense strand starting at position 3188 of SEQ ID NO: 1561629
ugucauugagaauagccaa

SEQ ID NO: 1686332 - RNA, 19 nt, Artificial Sequence
  Description of Artificial Sequence: Synthetic oligonucleotide
  Antisense strand to SEQ ID NO: 1686331
uuggcuauucucaaugaca

SEQ ID NO: 1686333 - RNA, 19 nt, Artificial Sequence
  Description of Artificial Sequence: Synthetic oligonucleotide
  Sense strand starting at position 3212 of SEQ ID NO: 1561629
cuauuaaaucagggauagu

SEQ ID NO: 1686334 - RNA, 19 nt, Artificial Sequence
  Description of Artificial Sequence: Synthetic oligonucleotide
  Antisense strand to SEQ ID NO: 1686333
acuaucccugauuuaauag

SEQ ID NO: 1686335 - RNA, 19 nt, Artificial Sequence
  Description of Artificial Sequence: Synthetic oligonucleotide
  Sense strand starting at position 3229 of SEQ ID NO: 1561629
guguuaacaaaguacugua

SEQ ID NO: 1686336 - RNA, 19 nt, Artificial Sequence
  Description of Artificial Sequence: Synthetic oligonucleotide
  Antisense strand to SEQ ID NO: 1686335
uacaguacuuuguuaacac

SEQ ID NO: 1686337 - RNA, 19 nt, Artificial Sequence
  Description of Artificial Sequence: Synthetic oligonucleotide
  Sense strand starting at position 3547 of SEQ ID NO: 1561629
ggagcuauuuguguuccau

SEQ ID NO: 1686338 - RNA, 19 nt, Artificial Sequence
  Description of Artificial Sequence: Synthetic oligonucleotide
  Antisense strand to SEQ ID NO: 1686337
auggaacacaaauagcucc

SEQ ID NO: 1686339 - RNA, 19 nt, Artificial Sequence
  Description of Artificial Sequence: Synthetic oligonucleotide
  Sense strand starting at position 3630 of SEQ ID NO: 1561629
guaaguuggguuuacugaa

SEQ ID NO: 1686340 - RNA, 19 nt, Artificial Sequence
  Description of Artificial Sequence: Synthetic oligonucleotide
  Antisense strand to SEQ ID NO: 1686339
uucaguaaacccaacuuac

SEQ ID NO: 1686341 - RNA, 19 nt, Artificial Sequence
  Description of Artificial Sequence: Synthetic oligonucleotide
  Sense strand starting at position 3752 of SEQ ID NO: 1561629
gauagucuugcccaggguu

SEQ ID NO: 1686342 - RNA, 19 nt, Artificial Sequence
  Description of Artificial Sequence: Synthetic oligonucleotide
  Antisense strand to SEQ ID NO: 1686341
aacccugggcaagacuauc

SEQ ID NO: 1686343 - RNA, 19 nt, Artificial Sequence
  Description of Artificial Sequence: Synthetic oligonucleotide
  Sense strand starting at position 3770 of SEQ ID NO: 1561629
uggucagaauccguuaaca

SEQ ID NO: 1686344 - RNA, 19 nt, Artificial Sequence
  Description of Artificial Sequence: Synthetic oligonucleotide
  Antisense strand to SEQ ID NO: 1686343
uguuaacggauucugacca

SEQ ID NO: 1686345 - RNA, 19 nt, Artificial Sequence
  Description of Artificial Sequence: Synthetic oligonucleotide
  Sense strand starting at position 3772 of SEQ ID NO: 1561629
gucagaauccguuaacaac

SEQ ID NO: 1686346 - RNA, 19 nt, Artificial Sequence
  Description of Artificial Sequence: Synthetic oligonucleotide
  Antisense strand to SEQ ID NO: 1686345
guuguuaacggauucugac

SEQ ID NO: 1686347 - RNA, 19 nt, Artificial Sequence
  Description of Artificial Sequence: Synthetic oligonucleotide
  Sense strand starting at position 3842 of SEQ ID NO: 1561629
cggaguuaucaggagguca

SEQ ID NO: 1686348 - RNA, 19 nt, Artificial Sequence
  Description of Artificial Sequence: Synthetic oligonucleotide
  Antisense strand to SEQ ID NO: 1686347
ugaccuccugauaacuccg

SEQ ID NO: 1686349 - RNA, 19 nt, Artificial Sequence
  Description of Artificial Sequence: Synthetic oligonucleotide
  Sense strand starting at position 3903 of SEQ ID NO: 1561629
aguggucugagcuagauca

SEQ ID NO: 1686350 - RNA, 19 nt, Artificial Sequence
  Description of Artificial Sequence: Synthetic oligonucleotide
  Antisense strand to SEQ ID NO: 1686349
ugaucuagcucagaccacu

SEQ ID NO: 1686351 - RNA, 19 nt, Artificial Sequence
  Description of Artificial Sequence: Synthetic oligonucleotide
  Sense strand starting at position 3905 of SEQ ID NO: 1561629
uggucugagcuagaucauu

SEQ ID NO: 1686352 - RNA, 19 nt, Artificial Sequence
  Description of Artificial Sequence: Synthetic oligonucleotide
  Antisense strand to SEQ ID NO: 1686351
aaugaucuagcucagacca

SEQ ID NO: 1686353 - RNA, 19 nt, Artificial Sequence
  Description of Artificial Sequence: Synthetic oligonucleotide
  Sense strand starting at position 3915 of SEQ ID NO: 1561629
uagaucauuugugcugcau

SEQ ID NO: 1686354 - RNA, 19 nt, Artificial Sequence
  Description of Artificial Sequence: Synthetic oligonucleotide
  Antisense strand to SEQ ID NO: 1686353
augcagcacaaaugaucua

SEQ ID NO: 1686355 - RNA, 19 nt, Artificial Sequence
  Description of Artificial Sequence: Synthetic oligonucleotide
  Sense strand starting at position 3919 of SEQ ID NO: 1561629
ucauuugugcugcauagca

SEQ ID NO: 1686356 - RNA, 19 nt, Artificial Sequence
  Description of Artificial Sequence: Synthetic oligonucleotide
  Antisense strand to SEQ ID NO: 1686355
ugcuaugcagcacaaauga

SEQ ID NO: 1686357 - RNA, 19 nt, Artificial Sequence
  Description of Artificial Sequence: Synthetic oligonucleotide
  Sense strand starting at position 3979 of SEQ ID NO: 1561629
cacgcuuugcuuguuguau

SEQ ID NO: 1686358 - RNA, 19 nt, Artificial Sequence
  Description of Artificial Sequence: Synthetic oligonucleotide
  Antisense strand to SEQ ID NO: 1686357
auacaacaagcaaagcgug

SEQ ID NO: 1686359 - RNA, 19 nt, Artificial Sequence
  Description of Artificial Sequence: Synthetic oligonucleotide
  Sense strand starting at position 161 of SEQ ID NO: 1561630
gugcguugucugaggcuca

SEQ ID NO: 1686360 - RNA, 19 nt, Artificial Sequence
  Description of Artificial Sequence: Synthetic oligonucleotide
  Antisense strand to SEQ ID NO: 1686359
ugagccucagacaacgcac

SEQ ID NO: 1686361 - RNA, 19 nt, Artificial Sequence
  Description of Artificial Sequence: Synthetic oligonucleotide
  Sense strand starting at position 321 of SEQ ID NO: 1561630
cuguguuuaagaggacugu

SEQ ID NO: 1686362 - RNA, 19 nt, Artificial Sequence
  Description of Artificial Sequence: Synthetic oligonucleotide
  Antisense strand to SEQ ID NO: 1686361
acaguccucuuaaacacag

SEQ ID NO: 1686363 - RNA, 19 nt, Artificial Sequence
  Description of Artificial Sequence: Synthetic oligonucleotide
  Sense strand starting at position 488 of SEQ ID NO: 1561630
cggccaaaguuucuaaauu

SEQ ID NO: 1686364 - RNA, 19 nt, Artificial Sequence
  Description of Artificial Sequence: Synthetic oligonucleotide
  Antisense strand to SEQ ID NO: 1686363
aauuuagaaacuuuggccg

SEQ ID NO: 1686365 - RNA, 19 nt, Artificial Sequence
  Description of Artificial Sequence: Synthetic oligonucleotide
  Sense strand starting at position 651 of SEQ ID NO: 1561630
cuguaagaguguccaggaa

SEQ ID NO: 1686366 - RNA, 19 nt, Artificial Sequence
  Description of Artificial Sequence: Synthetic oligonucleotide
  Antisense strand to SEQ ID NO: 1686365
uuccuggacacucuuacag

SEQ ID NO: 1686367 - RNA, 19 nt, Artificial Sequence
  Description of Artificial Sequence: Synthetic oligonucleotide
  Sense strand starting at position 691 of SEQ ID NO: 1561630
ucugaaugcucacuccuga

SEQ ID NO: 1686368 - RNA, 19 nt, Artificial Sequence
  Description of Artificial Sequence: Synthetic oligonucleotide
  Antisense strand to SEQ ID NO: 1686367
ucaggagugagcauucaga

SEQ ID NO: 1686369 - RNA, 19 nt, Artificial Sequence
  Description of Artificial Sequence: Synthetic oligonucleotide
  Sense strand starting at position 744 of SEQ ID NO: 1561630
ggcggauaccgucaucaaa

SEQ ID NO: 1686370 - RNA, 19 nt, Artificial Sequence
  Description of Artificial Sequence: Synthetic oligonucleotide
  Antisense strand to SEQ ID NO: 1686369
uuugaugacgguauccgcc

SEQ ID NO: 1686371 - RNA, 19 nt, Artificial Sequence
  Description of Artificial Sequence: Synthetic oligonucleotide
  Sense strand starting at position 746 of SEQ ID NO: 1561630
cggauaccgucaucaaacu

SEQ ID NO: 1686372 - RNA, 19 nt, Artificial Sequence
  Description of Artificial Sequence: Synthetic oligonucleotide
  Antisense strand to SEQ ID NO: 1686371
aguuugaugacgguauccg

SEQ ID NO: 1686373 - RNA, 19 nt, Artificial Sequence
  Description of Artificial Sequence: Synthetic oligonucleotide
  Sense strand starting at position 782 of SEQ ID NO: 1561630
gccgacugaggauggaaua

SEQ ID NO: 1686374 - RNA, 19 nt, Artificial Sequence
  Description of Artificial Sequence: Synthetic oligonucleotide
  Antisense strand to SEQ ID NO: 1686373
uauuccauccucagucggc

SEQ ID NO: 1686375 - RNA, 19 nt, Artificial Sequence
  Description of Artificial Sequence: Synthetic oligonucleotide
  Sense strand starting at position 984 of SEQ ID NO: 1561630
cgccauacucgguccugua

SEQ ID NO: 1686376 - RNA, 19 nt, Artificial Sequence
  Description of Artificial Sequence: Synthetic oligonucleotide
  Antisense strand to SEQ ID NO: 1686375
uacaggaccgaguauggcg

SEQ ID NO: 1686377 - RNA, 19 nt, Artificial Sequence
  Description of Artificial Sequence: Synthetic oligonucleotide
  Sense strand starting at position 1034 of SEQ ID NO: 1561630
gcuuauguauuggucaaca

SEQ ID NO: 1686378 - RNA, 19 nt, Artificial Sequence
  Description of Artificial Sequence: Synthetic oligonucleotide
  Antisense strand to SEQ ID NO: 1686377
uguugaccaauacauaagc

SEQ ID NO: 1686379 - RNA, 19 nt, Artificial Sequence
  Description of Artificial Sequence: Synthetic oligonucleotide
  Sense strand starting at position 1036 of SEQ ID NO: 1561630
uuauguauuggucaacaga

SEQ ID NO: 1686380 - RNA, 19 nt, Artificial Sequence
  Description of Artificial Sequence: Synthetic oligonucleotide
  Antisense strand to SEQ ID NO: 1686379
ucuguugaccaauacauaa

SEQ ID NO: 1686381 - RNA, 19 nt, Artificial Sequence
  Description of Artificial Sequence: Synthetic oligonucleotide
  Sense strand starting at position 1080 of SEQ ID NO: 1561630
ugaggagacggcuggaauu

SEQ ID NO: 1686382 - RNA, 19 nt, Artificial Sequence
  Description of Artificial Sequence: Synthetic oligonucleotide
  Antisense strand to SEQ ID NO: 1686381
aauuccagccgucuccuca

SEQ ID NO: 1686383 - RNA, 19 nt, Artificial Sequence
  Description of Artificial Sequence: Synthetic oligonucleotide
  Sense strand starting at position 1164 of SEQ ID NO: 1561630
ggacuuggcuuggauuuaa

SEQ ID NO: 1686384 - RNA, 19 nt, Artificial Sequence
  Description of Artificial Sequence: Synthetic oligonucleotide
  Antisense strand to SEQ ID NO: 1686383
uuaaauccaagccaagucc

SEQ ID NO: 1686385 - RNA, 19 nt, Artificial Sequence
  Description of Artificial Sequence: Synthetic oligonucleotide
  Sense strand starting at position 1183 of SEQ ID NO: 1561630
gaggaacuccucuacguga

SEQ ID NO: 1686386 - RNA, 19 nt, Artificial Sequence
  Description of Artificial Sequence: Synthetic oligonucleotide
  Antisense strand to SEQ ID NO: 1686385
ucacguagaggaguuccuc

SEQ ID NO: 1686387 - RNA, 19 nt, Artificial Sequence
  Description of Artificial Sequence: Synthetic oligonucleotide
  Sense strand starting at position 1186 of SEQ ID NO: 1561630
gaacuccucuacgugacua

SEQ ID NO: 1686388 - RNA, 19 nt, Artificial Sequence
  Description of Artificial Sequence: Synthetic oligonucleotide
  Antisense strand to SEQ ID NO: 1686387
uagucacguagaggaguuc

SEQ ID NO: 1686389 - RNA, 19 nt, Artificial Sequence
  Description of Artificial Sequence: Synthetic oligonucleotide
  Sense strand starting at position 1188 of SEQ ID NO: 1561630
acuccucuacgugacuauu

SEQ ID NO: 1686390 - RNA, 19 nt, Artificial Sequence
  Description of Artificial Sequence: Synthetic oligonucleotide
  Antisense strand to SEQ ID NO: 1686389
aauagucacguagaggagu

SEQ ID NO: 1686391 - RNA, 19 nt, Artificial Sequence
  Description of Artificial Sequence: Synthetic oligonucleotide
  Sense strand starting at position 1219 of SEQ ID NO: 1561630
gagcccuaguucccugaaa

SEQ ID NO: 1686392 - RNA, 19 nt, Artificial Sequence
  Description of Artificial Sequence: Synthetic oligonucleotide
  Antisense strand to SEQ ID NO: 1686391
uuucagggaacuagggcuc

SEQ ID NO: 1686393 - RNA, 19 nt, Artificial Sequence
  Description of Artificial Sequence: Synthetic oligonucleotide
  Sense strand starting at position 1220 of SEQ ID NO: 1561630
agcccuaguucccugaaau

SEQ ID NO: 1686394 - RNA, 19 nt, Artificial Sequence
  Description of Artificial Sequence: Synthetic oligonucleotide
  Antisense strand to SEQ ID NO: 1686393
auuucagggaacuagggcu

SEQ ID NO: 1686395 - RNA, 19 nt, Artificial Sequence
  Description of Artificial Sequence: Synthetic oligonucleotide
  Sense strand starting at position 1221 of SEQ ID NO: 1561630
gcccuaguucccugaaaug

SEQ ID NO: 1686396 - RNA, 19 nt, Artificial Sequence
  Description of Artificial Sequence: Synthetic oligonucleotide
  Antisense strand to SEQ ID NO: 1686395
cauuucagggaacuagggc

SEQ ID NO: 1686397 - RNA, 19 nt, Artificial Sequence
  Description of Artificial Sequence: Synthetic oligonucleotide
  Sense strand starting at position 1321 of SEQ ID NO: 1561630
cucugaacgcuugaaacca

SEQ ID NO: 1686398 - RNA, 19 nt, Artificial Sequence
  Description of Artificial Sequence: Synthetic oligonucleotide
  Antisense strand to SEQ ID NO: 1686397
ugguuucaagcguucagag

SEQ ID NO: 1686399 - RNA, 19 nt, Artificial Sequence
  Description of Artificial Sequence: Synthetic oligonucleotide
  Sense strand starting at position 2695 of SEQ ID NO: 1561630
ucaccugugggagguuaau

SEQ ID NO: 1686400 - RNA, 19 nt, Artificial Sequence
  Description of Artificial Sequence: Synthetic oligonucleotide
  Antisense strand to SEQ ID NO: 1686399
auuaaccucccacagguga

SEQ ID NO: 1686401 - RNA, 19 nt, Artificial Sequence
  Description of Artificial Sequence: Synthetic oligonucleotide
  Sense strand starting at position 2706 of SEQ ID NO: 1561630
agguuaauugcaggucacu

SEQ ID NO: 1686402 - RNA, 19 nt, Artificial Sequence
  Description of Artificial Sequence: Synthetic oligonucleotide
  Antisense strand to SEQ ID NO: 1686401
agugaccugcaauuaaccu

SEQ ID NO: 1686403 - RNA, 19 nt, Artificial Sequence
  Description of Artificial Sequence: Synthetic oligonucleotide
  Sense strand starting at position 2772 of SEQ ID NO: 1561630
cuccuugaucugggugacu

SEQ ID NO: 1686404 - RNA, 19 nt, Artificial Sequence
  Description of Artificial Sequence: Synthetic oligonucleotide
  Antisense strand to SEQ ID NO: 1686403
agucacccagaucaaggag

SEQ ID NO: 1686405 - RNA, 19 nt, Artificial Sequence
  Description of Artificial Sequence: Synthetic oligonucleotide
  Sense strand starting at position 2774 of SEQ ID NO: 1561630
ccuugaucugggugacuuu

SEQ ID NO: 1686406 - RNA, 19 nt, Artificial Sequence
  Description of Artificial Sequence: Synthetic oligonucleotide
  Antisense strand to SEQ ID NO: 1686405
aaagucacccagaucaagg

SEQ ID NO: 1686407 - RNA, 19 nt, Artificial Sequence
  Description of Artificial Sequence: Synthetic oligonucleotide
  Sense strand starting at position 2786 of SEQ ID NO: 1561630
ugacuuucgaaaugaugga

SEQ ID NO: 1686408 - RNA, 19 nt, Artificial Sequence
  Description of Artificial Sequence: Synthetic oligonucleotide
  Antisense strand to SEQ ID NO: 1686407
uccaucauuucgaaaguca

SEQ ID NO: 1686409 - RNA, 19 nt, Artificial Sequence
  Description of Artificial Sequence: Synthetic oligonucleotide
  Sense strand starting at position 2879 of SEQ ID NO: 1561630
ccagguaacgucuaccaua

SEQ ID NO: 1686410 - RNA, 19 nt, Artificial Sequence
  Description of Artificial Sequence: Synthetic oligonucleotide
  Antisense strand to SEQ ID NO: 1686409
uaugguagacguuaccugg

SEQ ID NO: 1686411 - RNA, 19 nt, Artificial Sequence
  Description of Artificial Sequence: Synthetic oligonucleotide
  Sense strand starting at position 2884 of SEQ ID NO: 1561630
uaacgucuaccauagugaa

SEQ ID NO: 1686412 - RNA, 19 nt, Artificial Sequence
  Description of Artificial Sequence: Synthetic oligonucleotide
  Antisense strand to SEQ ID NO: 1686411
uucacuaugguagacguua

SEQ ID NO: 1686413 - RNA, 19 nt, Artificial Sequence
  Description of Artificial Sequence: Synthetic oligonucleotide
  Sense strand starting at position 2929 of SEQ ID NO: 1561630
ccacucuucugauuccagu

SEQ ID NO: 1686414 - RNA, 19 nt, Artificial Sequence
  Description of Artificial Sequence: Synthetic oligonucleotide
  Antisense strand to SEQ ID NO: 1686413
acuggaaucagaagagugg

SEQ ID NO: 1686415 - RNA, 19 nt, Artificial Sequence
  Description of Artificial Sequence: Synthetic oligonucleotide
  Sense strand starting at position 2965 of SEQ ID NO: 1561630
uugucuguucuggaauauc

SEQ ID NO: 1686416 - RNA, 19 nt, Artificial Sequence
  Description of Artificial Sequence: Synthetic oligonucleotide
  Antisense strand to SEQ ID NO: 1686415
gauauuccagaacagacaa

SEQ ID NO: 1686417 - RNA, 19 nt, Artificial Sequence
  Description of Artificial Sequence: Synthetic oligonucleotide
  Sense strand starting at position 2968 of SEQ ID NO: 1561630
ucuguucuggaauaucaca

SEQ ID NO: 1686418 - RNA, 19 nt, Artificial Sequence
  Description of Artificial Sequence: Synthetic oligonucleotide
  Antisense strand to SEQ ID NO: 1686417
ugugauauuccagaacaga

SEQ ID NO: 1686419 - RNA, 19 nt, Artificial Sequence
  Description of Artificial Sequence: Synthetic oligonucleotide
  Sense strand starting at position 3022 of SEQ ID NO: 1561630
cuucuuucccuuuacguga

SEQ ID NO: 1686420 - RNA, 19 nt, Artificial Sequence
  Description of Artificial Sequence: Synthetic oligonucleotide
  Antisense strand to SEQ ID NO: 1686419
ucacguaaagggaaagaag

SEQ ID NO: 1686421 - RNA, 19 nt, Artificial Sequence
  Description of Artificial Sequence: Synthetic oligonucleotide
  Sense strand starting at position 3027 of SEQ ID NO: 1561630
uucccuuuacgugauaucu

SEQ ID NO: 1686422 - RNA, 19 nt, Artificial Sequence
  Description of Artificial Sequence: Synthetic oligonucleotide
  Antisense strand to SEQ ID NO: 1686421
agauaucacguaaagggaa

SEQ ID NO: 1686423 - RNA, 19 nt, Artificial Sequence
  Description of Artificial Sequence: Synthetic oligonucleotide
  Sense strand starting at position 3035 of SEQ ID NO: 1561630
acgugauaucucggagauu

SEQ ID NO: 1686424 - RNA, 19 nt, Artificial Sequence
  Description of Artificial Sequence: Synthetic oligonucleotide
  Antisense strand to SEQ ID NO: 1686423
aaucuccgagauaucacgu

SEQ ID NO: 1686425 - RNA, 19 nt, Artificial Sequence
  Description of Artificial Sequence: Synthetic oligonucleotide
  Sense strand starting at position 3072 of SEQ ID NO: 1561630
ccguaacugccgaguagug

SEQ ID NO: 1686426 - RNA, 19 nt, Artificial Sequence
  Description of Artificial Sequence: Synthetic oligonucleotide
  Antisense strand to SEQ ID NO: 1686425
cacuacucggcaguuacgg

SEQ ID NO: 1686427 - RNA, 19 nt, Artificial Sequence
  Description of Artificial Sequence: Synthetic oligonucleotide
  Sense strand starting at position 3172 of SEQ ID NO: 1561630
uaaagcugucuugaaaggu

SEQ ID NO: 1686428 - RNA, 19 nt, Artificial Sequence
  Description of Artificial Sequence: Synthetic oligonucleotide
  Antisense strand to SEQ ID NO: 1686427
accuuucaagacagcuuua

SEQ ID NO: 1686429 - RNA, 19 nt, Artificial Sequence
  Description of Artificial Sequence: Synthetic oligonucleotide
  Sense strand starting at position 3219 of SEQ ID NO: 1561630
uuagguaauuaccuagaag

SEQ ID NO: 1686430 - RNA, 19 nt, Artificial Sequence
  Description of Artificial Sequence: Synthetic oligonucleotide
  Antisense strand to SEQ ID NO: 1686429
cuucuagguaauuaccuaa

SEQ ID NO: 1686431 - RNA, 19 nt, Artificial Sequence
  Description of Artificial Sequence: Synthetic oligonucleotide
  Sense strand starting at position 3254 of SEQ ID NO: 1561630
uggguaaguguguauggaa

SEQ ID NO: 1686432 - RNA, 19 nt, Artificial Sequence
  Description of Artificial Sequence: Synthetic oligonucleotide
  Antisense strand to SEQ ID NO: 1686431
uuccauacacacuuaccca

SEQ ID NO: 1686433 - RNA, 19 nt, Artificial Sequence
  Description of Artificial Sequence: Synthetic oligonucleotide
  Sense strand starting at position 3745 of SEQ ID NO: 1561630
ucgccaguucuugcaguaa

SEQ ID NO: 1686434 - RNA, 19 nt, Artificial Sequence
  Description of Artificial Sequence: Synthetic oligonucleotide
  Antisense strand to SEQ ID NO: 1686433
uuacugcaagaacuggcga

SEQ ID NO: 1686435 - RNA, 19 nt, Artificial Sequence
  Description of Artificial Sequence: Synthetic oligonucleotide
  Sense strand starting at position 3749 of SEQ ID NO: 1561630
caguucuugcaguaagaaa

SEQ ID NO: 1686436 - RNA, 19 nt, Artificial Sequence
  Description of Artificial Sequence: Synthetic oligonucleotide
  Antisense strand to SEQ ID NO: 1686435
uuucuuacugcaagaacug

SEQ ID NO: 1686437 - RNA, 19 nt, Artificial Sequence
  Description of Artificial Sequence: Synthetic oligonucleotide
  Sense strand starting at position 3913 of SEQ ID NO: 1561630
agccaugugcuggauuagu

SEQ ID NO: 1686438 - RNA, 19 nt, Artificial Sequence
  Description of Artificial Sequence: Synthetic oligonucleotide
  Antisense strand to SEQ ID NO: 1686437
acuaauccagcacauggcu

SEQ ID NO: 1686439 - RNA, 19 nt, Artificial Sequence
  Description of Artificial Sequence: Synthetic oligonucleotide
  Sense strand starting at position 94 of SEQ ID NO: 1561631
ccaggcucuugccuaacaa

SEQ ID NO: 1686440 - RNA, 19 nt, Artificial Sequence
  Description of Artificial Sequence: Synthetic oligonucleotide
  Antisense strand to SEQ ID NO: 1686439
uuguuaggcaagagccugg

SEQ ID NO: 1686441 - RNA, 19 nt, Artificial Sequence
  Description of Artificial Sequence: Synthetic oligonucleotide
  Sense strand starting at position 124 of SEQ ID NO: 1561631
gugcuuaucccacauugcu

SEQ ID NO: 1686442 - RNA, 19 nt, Artificial Sequence
  Description of Artificial Sequence: Synthetic oligonucleotide
  Antisense strand to SEQ ID NO: 1686441
agcaaugugggauaagcac

SEQ ID NO: 1686443 - RNA, 19 nt, Artificial Sequence
  Description of Artificial Sequence: Synthetic oligonucleotide
  Sense strand starting at position 151 of SEQ ID NO: 1561631
acccaacagccuugguuau

SEQ ID NO: 1686444 - RNA, 19 nt, Artificial Sequence
  Description of Artificial Sequence: Synthetic oligonucleotide
  Antisense strand to SEQ ID NO: 1686443
auaaccaaggcuguugggu

SEQ ID NO: 1686445 - RNA, 19 nt, Artificial Sequence
  Description of Artificial Sequence: Synthetic oligonucleotide
  Sense strand starting at position 337 of SEQ ID NO: 1561631
accuucuuuccagggaagu

SEQ ID NO: 1686446 - RNA, 19 nt, Artificial Sequence
  Description of Artificial Sequence: Synthetic oligonucleotide
  Antisense strand to SEQ ID NO: 1686445
acuucccuggaaagaaggu

SEQ ID NO: 1686447 - RNA, 19 nt, Artificial Sequence
  Description of Artificial Sequence: Synthetic oligonucleotide
  Sense strand starting at position 531 of SEQ ID NO: 1561631
ggcagugaauuagcuugaa

SEQ ID NO: 1686448 - RNA, 19 nt, Artificial Sequence
  Description of Artificial Sequence: Synthetic oligonucleotide
  Antisense strand to SEQ ID NO: 1686447
uucaagcuaauucacugcc

SEQ ID NO: 1686449 - RNA, 19 nt, Artificial Sequence
  Description of Artificial Sequence: Synthetic oligonucleotide
  Sense strand starting at position 559 of SEQ ID NO: 1561631
ggucaaaugcauggauucu

SEQ ID NO: 1686450 - RNA, 19 nt, Artificial Sequence
  Description of Artificial Sequence: Synthetic oligonucleotide
  Antisense strand to SEQ ID NO: 1686449
agaauccaugcauuugacc

SEQ ID NO: 1686451 - RNA, 19 nt, Artificial Sequence
  Description of Artificial Sequence: Synthetic oligonucleotide
  Sense strand starting at position 601 of SEQ ID NO: 1561631
acuccauaugguggauagu

SEQ ID NO: 1686452 - RNA, 19 nt, Artificial Sequence
  Description of Artificial Sequence: Synthetic oligonucleotide
  Antisense strand to SEQ ID NO: 1686451
acuauccaccauauggagu

SEQ ID NO: 1686453 - RNA, 19 nt, Artificial Sequence
  Description of Artificial Sequence: Synthetic oligonucleotide
  Sense strand starting at position 602 of SEQ ID NO: 1561631
cuccauaugguggauaguu

SEQ ID NO: 1686454 - RNA, 19 nt, Artificial Sequence
  Description of Artificial Sequence: Synthetic oligonucleotide
  Antisense strand to SEQ ID NO: 1686453
aacuauccaccauauggag

SEQ ID NO: 1686455 - RNA, 19 nt, Artificial Sequence
  Description of Artificial Sequence: Synthetic oligonucleotide
  Sense strand starting at position 708 of SEQ ID NO: 1561631
uuacuuuccugaccaugga

SEQ ID NO: 1686456 - RNA, 19 nt, Artificial Sequence
  Description of Artificial Sequence: Synthetic oligonucleotide
  Antisense strand to SEQ ID NO: 1686455
uccauggucaggaaaguaa

SEQ ID NO: 1686457 - RNA, 19 nt, Artificial Sequence
  Description of Artificial Sequence: Synthetic oligonucleotide
  Sense strand starting at position 835 of SEQ ID NO: 1561631
ccucuauucgaguauaagc

SEQ ID NO: 1686458 - RNA, 19 nt, Artificial Sequence
  Description of Artificial Sequence: Synthetic oligonucleotide
  Antisense strand to SEQ ID NO: 1686457
gcuuauacucgaauagagg

SEQ ID NO: 1686459 - RNA, 19 nt, Artificial Sequence
  Description of Artificial Sequence: Synthetic oligonucleotide
  Sense strand starting at position 890 of SEQ ID NO: 1561631
acugaauucucaguaccug

SEQ ID NO: 1686460 - RNA, 19 nt, Artificial Sequence
  Description of Artificial Sequence: Synthetic oligonucleotide
  Antisense strand to SEQ ID NO: 1686459
cagguacugagaauucagu

SEQ ID NO: 1686461 - RNA, 19 nt, Artificial Sequence
  Description of Artificial Sequence: Synthetic oligonucleotide
  Sense strand starting at position 1023 of SEQ ID NO: 1561631
ccauaaucugaggguccau

SEQ ID NO: 1686462 - RNA, 19 nt, Artificial Sequence
  Description of Artificial Sequence: Synthetic oligonucleotide
  Antisense strand to SEQ ID NO: 1686461
auggacccucagauuaugg

SEQ ID NO: 1686463 - RNA, 19 nt, Artificial Sequence
  Description of Artificial Sequence: Synthetic oligonucleotide
  Sense strand starting at position 1137 of SEQ ID NO: 1561631
cgcugaagaccuuguauuu

SEQ ID NO: 1686464 - RNA, 19 nt, Artificial Sequence
  Description of Artificial Sequence: Synthetic oligonucleotide
  Antisense strand to SEQ ID NO: 1686463
aaauacaaggucuucagcg

SEQ ID NO: 1686465 - RNA, 19 nt, Artificial Sequence
  Description of Artificial Sequence: Synthetic oligonucleotide
  Sense strand starting at position 1157 of SEQ ID NO: 1561631
aguggacugcuaggaauaa

SEQ ID NO: 1686466 - RNA, 19 nt, Artificial Sequence
  Description of Artificial Sequence: Synthetic oligonucleotide
  Antisense strand to SEQ ID NO: 1686465
uuauuccuagcaguccacu

SEQ ID NO: 1686467 - RNA, 19 nt, Artificial Sequence
  Description of Artificial Sequence: Synthetic oligonucleotide
  Sense strand starting at position 1169 of SEQ ID NO: 1561631
ggaauaagcagaugucuug

SEQ ID NO: 1686468 - RNA, 19 nt, Artificial Sequence
  Description of Artificial Sequence: Synthetic oligonucleotide
  Antisense strand to SEQ ID NO: 1686467
caagacaucugcuuauucc

SEQ ID NO: 1686469 - RNA, 19 nt, Artificial Sequence
  Description of Artificial Sequence: Synthetic oligonucleotide
  Sense strand starting at position 1178 of SEQ ID NO: 1561631
agaugucuugcucacuaca

SEQ ID NO: 1686470 - RNA, 19 nt, Artificial Sequence
  Description of Artificial Sequence: Synthetic oligonucleotide
  Antisense strand to SEQ ID NO: 1686469
uguagugagcaagacaucu

SEQ ID NO: 1686471 - RNA, 19 nt, Artificial Sequence
  Description of Artificial Sequence: Synthetic oligonucleotide
  Sense strand starting at position 1191 of SEQ ID NO: 1561631
acuacaaugccugggagau

SEQ ID NO: 1686472 - RNA, 19 nt, Artificial Sequence
  Description of Artificial Sequence: Synthetic oligonucleotide
  Antisense strand to SEQ ID NO: 1686471
aucucccaggcauuguagu

SEQ ID NO: 1686473 - RNA, 19 nt, Artificial Sequence
  Description of Artificial Sequence: Synthetic oligonucleotide
  Sense strand starting at position 1192 of SEQ ID NO: 1561631
cuacaaugccugggagauc

SEQ ID NO: 1686474 - RNA, 19 nt, Artificial Sequence
  Description of Artificial Sequence: Synthetic oligonucleotide
  Antisense strand to SEQ ID NO: 1686473
gaucucccaggcauuguag

SEQ ID NO: 1686475 - RNA, 19 nt, Artificial Sequence
  Description of Artificial Sequence: Synthetic oligonucleotide
  Sense strand starting at position 1224 of SEQ ID NO: 1561631
acaauccuuccuugaggga

SEQ ID NO: 1686476 - RNA, 19 nt, Artificial Sequence
  Description of Artificial Sequence: Synthetic oligonucleotide
  Antisense strand to SEQ ID NO: 1686475
ucccucaaggaaggauugu

SEQ ID NO: 1686477 - RNA, 19 nt, Artificial Sequence
  Description of Artificial Sequence: Synthetic oligonucleotide
  Sense strand starting at position 2302 of SEQ ID NO: 1561631
ggagaugacguggguaaga

SEQ ID NO: 1686478 - RNA, 19 nt, Artificial Sequence
  Description of Artificial Sequence: Synthetic oligonucleotide
  Antisense strand to SEQ ID NO: 1686477
ucuuacccacgucaucucc

SEQ ID NO: 1686479 - RNA, 19 nt, Artificial Sequence
  Description of Artificial Sequence: Synthetic oligonucleotide
  Sense strand starting at position 2452 of SEQ ID NO: 1561631
gugaaugaaugagaaguga

SEQ ID NO: 1686480 - RNA, 19 nt, Artificial Sequence
  Description of Artificial Sequence: Synthetic oligonucleotide
  Antisense strand to SEQ ID NO: 1686479
ucacuucucauucauucac

SEQ ID NO: 1686481 - RNA, 19 nt, Artificial Sequence
  Description of Artificial Sequence: Synthetic oligonucleotide
  Sense strand starting at position 2460 of SEQ ID NO: 1561631
augagaagugaucgggagu

SEQ ID NO: 1686482 - RNA, 19 nt, Artificial Sequence
  Description of Artificial Sequence: Synthetic oligonucleotide
  Antisense strand to SEQ ID NO: 1686481
acucccgaucacuucucau

SEQ ID NO: 1686483 - RNA, 19 nt, Artificial Sequence
  Description of Artificial Sequence: Synthetic oligonucleotide
  Sense strand starting at position 2461 of SEQ ID NO: 1561631
ugagaagugaucgggagua

SEQ ID NO: 1686484 - RNA, 19 nt, Artificial Sequence
  Description of Artificial Sequence: Synthetic oligonucleotide
  Antisense strand to SEQ ID NO: 1686483
uacucccgaucacuucuca

SEQ ID NO: 1686485 - RNA, 19 nt, Artificial Sequence
  Description of Artificial Sequence: Synthetic oligonucleotide
  Sense strand starting at position 2845 of SEQ ID NO: 1561631
aggugaguuaguuauggag

SEQ ID NO: 1686486 - RNA, 19 nt, Artificial Sequence
  Description of Artificial Sequence: Synthetic oligonucleotide
  Antisense strand to SEQ ID NO: 1686485
cuccauaacuaacucaccu

SEQ ID NO: 1686487 - RNA, 19 nt, Artificial Sequence
  Description of Artificial Sequence: Synthetic oligonucleotide
  Sense strand starting at position 2851 of SEQ ID NO: 1561631
guuaguuauggaggagaug

SEQ ID NO: 1686488 - RNA, 19 nt, Artificial Sequence
  Description of Artificial Sequence: Synthetic oligonucleotide
  Antisense strand to SEQ ID NO: 1686487
caucuccuccauaacuaac

SEQ ID NO: 1686489 - RNA, 19 nt, Artificial Sequence
  Description of Artificial Sequence: Synthetic oligonucleotide
  Sense strand starting at position 3054 of SEQ ID NO: 1561631
agaugagaguaacaaguua

SEQ ID NO: 1686490 - RNA, 19 nt, Artificial Sequence
  Description of Artificial Sequence: Synthetic oligonucleotide
  Antisense strand to SEQ ID NO: 1686489
uaacuuguuacucucaucu

SEQ ID NO: 1686491 - RNA, 19 nt, Artificial Sequence
  Description of Artificial Sequence: Synthetic oligonucleotide
  Sense strand starting at position 3221 of SEQ ID NO: 1561631
gagagaagguguguuuaug

SEQ ID NO: 1686492 - RNA, 19 nt, Artificial Sequence
  Description of Artificial Sequence: Synthetic oligonucleotide
  Antisense strand to SEQ ID NO: 1686491
cauaaacacaccuucucuc

SEQ ID NO: 1686493 - RNA, 19 nt, Artificial Sequence
  Description of Artificial Sequence: Synthetic oligonucleotide
  Sense strand starting at position 3335 of SEQ ID NO: 1561631
gugaacuucuguuuauuga

SEQ ID NO: 1686494 - RNA, 19 nt, Artificial Sequence
  Description of Artificial Sequence: Synthetic oligonucleotide
  Antisense strand to SEQ ID NO: 1686493
ucaauaaacagaaguucac

SEQ ID NO: 1686495 - RNA, 19 nt, Artificial Sequence
  Description of Artificial Sequence: Synthetic oligonucleotide
  Sense strand starting at position 3368 of SEQ ID NO: 1561631
cauaguauaccaggaagca

SEQ ID NO: 1686496 - RNA, 19 nt, Artificial Sequence
  Description of Artificial Sequence: Synthetic oligonucleotide
  Antisense strand to SEQ ID NO: 1686495
ugcuuccugguauacuaug

SEQ ID NO: 1686497 - RNA, 19 nt, Artificial Sequence
  Description of Artificial Sequence: Synthetic oligonucleotide
  Sense strand starting at position 3620 of SEQ ID NO: 1561631
cagccaugggcuuaugcaa

SEQ ID NO: 1686498 - RNA, 19 nt, Artificial Sequence
  Description of Artificial Sequence: Synthetic oligonucleotide
  Antisense strand to SEQ ID NO: 1686497
uugcauaagcccauggcug

SEQ ID NO: 1686499 - RNA, 19 nt, Artificial Sequence
  Description of Artificial Sequence: Synthetic oligonucleotide
  Sense strand starting at position 3628 of SEQ ID NO: 1561631
ggcuuaugcaaagacaguu

SEQ ID NO: 1686500 - RNA, 19 nt, Artificial Sequence
  Description of Artificial Sequence: Synthetic oligonucleotide
  Antisense strand to SEQ ID NO: 1686499
aacugucuuugcauaagcc

SEQ ID NO: 1686501 - RNA, 19 nt, Artificial Sequence
  Description of Artificial Sequence: Synthetic oligonucleotide
  Sense strand starting at position 3641 of SEQ ID NO: 1561631
acaguugucuuccuuggaa

SEQ ID NO: 1686502 - RNA, 19 nt, Artificial Sequence
  Description of Artificial Sequence: Synthetic oligonucleotide
  Antisense strand to SEQ ID NO: 1686501
uuccaaggaagacaacugu

SEQ ID NO: 1686503 - RNA, 19 nt, Artificial Sequence
  Description of Artificial Sequence: Synthetic oligonucleotide
  Sense strand starting at position 3643 of SEQ ID NO: 1561631
aguugucuuccuuggaaac

SEQ ID NO: 1686504 - RNA, 19 nt, Artificial Sequence
  Description of Artificial Sequence: Synthetic oligonucleotide
  Antisense strand to SEQ ID NO: 1686503
guuuccaaggaagacaacu

SEQ ID NO: 1686505 - RNA, 19 nt, Artificial Sequence
  Description of Artificial Sequence: Synthetic oligonucleotide
  Sense strand starting at position 3801 of SEQ ID NO: 1561631
uuuguacguguugacuauu

SEQ ID NO: 1686506 - RNA, 19 nt, Artificial Sequence
  Description of Artificial Sequence: Synthetic oligonucleotide
  Antisense strand to SEQ ID NO: 1686505
aauagucaacacguacaaa

SEQ ID NO: 1686507 - RNA, 19 nt, Artificial Sequence
  Description of Artificial Sequence: Synthetic oligonucleotide
  Sense strand starting at position 3804 of SEQ ID NO: 1561631
guacguguugacuauuugu

SEQ ID NO: 1686508 - RNA, 19 nt, Artificial Sequence
  Description of Artificial Sequence: Synthetic oligonucleotide
  Antisense strand to SEQ ID NO: 1686507
acaaauagucaacacguac

SEQ ID NO: 1686509 - RNA, 19 nt, Artificial Sequence
  Description of Artificial Sequence: Synthetic oligonucleotide
  Sense strand starting at position 3877 of SEQ ID NO: 1561631
uacagucacguugaauauu

SEQ ID NO: 1686510 - RNA, 19 nt, Artificial Sequence
  Description of Artificial Sequence: Synthetic oligonucleotide
  Antisense strand to SEQ ID NO: 1686509
aauauucaacgugacugua

SEQ ID NO: 1686511 - RNA, 19 nt, Artificial Sequence
  Description of Artificial Sequence: Synthetic oligonucleotide
  Sense strand starting at position 3901 of SEQ ID NO: 1561631
gccuuaaauucugcaaguu

SEQ ID NO: 1686512 - RNA, 19 nt, Artificial Sequence
  Description of Artificial Sequence: Synthetic oligonucleotide
  Antisense strand to SEQ ID NO: 1686511
aacuugcagaauuuaaggc

SEQ ID NO: 1686513 - RNA, 19 nt, Artificial Sequence
  Description of Artificial Sequence: Synthetic oligonucleotide
  Sense strand starting at position 3930 of SEQ ID NO: 1561631
uaaugcgauuucgcaguca

SEQ ID NO: 1686514 - RNA, 19 nt, Artificial Sequence
  Description of Artificial Sequence: Synthetic oligonucleotide
  Antisense strand to SEQ ID NO: 1686513
ugacugcgaaaucgcauua

SEQ ID NO: 1686515 - RNA, 19 nt, Artificial Sequence
  Description of Artificial Sequence: Synthetic oligonucleotide
  Sense strand starting at position 3958 of SEQ ID NO: 1561631
agagguagaguuuguuucu

SEQ ID NO: 1686516 - RNA, 19 nt, Artificial Sequence
  Description of Artificial Sequence: Synthetic oligonucleotide
  Antisense strand to SEQ ID NO: 1686515
agaaacaaacucuaccucu

SEQ ID NO: 1686517 - RNA, 19 nt, Artificial Sequence
  Description of Artificial Sequence: Synthetic oligonucleotide
  Sense strand starting at position 3961 of SEQ ID NO: 1561631
gguagaguuuguuucucca

SEQ ID NO: 1686518 - RNA, 19 nt, Artificial Sequence
  Description of Artificial Sequence: Synthetic oligonucleotide
  Antisense strand to SEQ ID NO: 1686517
uggagaaacaaacucuacc

SEQ ID NO: 1686519 - RNA, 19 nt, Artificial Sequence
  Description of Artificial Sequence: Synthetic oligonucleotide
  Sense strand starting at position 54 of SEQ ID NO: 1561632
aucugaucgccuuggcauu

SEQ ID NO: 1686520 - RNA, 19 nt, Artificial Sequence
  Description of Artificial Sequence: Synthetic oligonucleotide
  Antisense strand to SEQ ID NO: 1686519
aaugccaaggcgaucagau

SEQ ID NO: 1686521 - RNA, 19 nt, Artificial Sequence
  Description of Artificial Sequence: Synthetic oligonucleotide
  Sense strand starting at position 61 of SEQ ID NO: 1561632
cgccuuggcauuuagugau

SEQ ID NO: 1686522 - RNA, 19 nt, Artificial Sequence
  Description of Artificial Sequence: Synthetic oligonucleotide
  Antisense strand to SEQ ID NO: 1686521
aucacuaaaugccaaggcg

SEQ ID NO: 1686523 - RNA, 19 nt, Artificial Sequence
  Description of Artificial Sequence: Synthetic oligonucleotide
  Sense strand starting at position 64 of SEQ ID NO: 1561632
cuuggcauuuagugauucu

SEQ ID NO: 1686524 - RNA, 19 nt, Artificial Sequence
  Description of Artificial Sequence: Synthetic oligonucleotide
  Antisense strand to SEQ ID NO: 1686523
agaaucacuaaaugccaag

SEQ ID NO: 1686525 - RNA, 19 nt, Artificial Sequence
  Description of Artificial Sequence: Synthetic oligonucleotide
  Sense strand starting at position 67 of SEQ ID NO: 1561632
ggcauuuagugauucuuuc

SEQ ID NO: 1686526 - RNA, 19 nt, Artificial Sequence
  Description of Artificial Sequence: Synthetic oligonucleotide
  Antisense strand to SEQ ID NO: 1686525
gaaagaaucacuaaaugcc

SEQ ID NO: 1686527 - RNA, 19 nt, Artificial Sequence
  Description of Artificial Sequence: Synthetic oligonucleotide
  Sense strand starting at position 73 of SEQ ID NO: 1561632
uagugauucuuucccugga

SEQ ID NO: 1686528 - RNA, 19 nt, Artificial Sequence
  Description of Artificial Sequence: Synthetic oligonucleotide
  Antisense strand to SEQ ID NO: 1686527
uccagggaaagaaucacua

SEQ ID NO: 1686529 - RNA, 19 nt, Artificial Sequence
  Description of Artificial Sequence: Synthetic oligonucleotide
  Sense strand starting at position 74 of SEQ ID NO: 1561632
agugauucuuucccuggaa

SEQ ID NO: 1686530 - RNA, 19 nt, Artificial Sequence
  Description of Artificial Sequence: Synthetic oligonucleotide
  Antisense strand to SEQ ID NO: 1686529
uuccagggaaagaaucacu

SEQ ID NO: 1686531 - RNA, 19 nt, Artificial Sequence
  Description of Artificial Sequence: Synthetic oligonucleotide
  Sense strand starting at position 75 of SEQ ID NO: 1561632
gugauucuuucccuggaau

SEQ ID NO: 1686532 - RNA, 19 nt, Artificial Sequence
  Description of Artificial Sequence: Synthetic oligonucleotide
  Antisense strand to SEQ ID NO: 1686531
auuccagggaaagaaucac

SEQ ID NO: 1686533 - RNA, 19 nt, Artificial Sequence
  Description of Artificial Sequence: Synthetic oligonucleotide
  Sense strand starting at position 76 of SEQ ID NO: 1561632
ugauucuuucccuggaauu

SEQ ID NO: 1686534 - RNA, 19 nt, Artificial Sequence
  Description of Artificial Sequence: Synthetic oligonucleotide
  Antisense strand to SEQ ID NO: 1686533
aauuccagggaaagaauca

SEQ ID NO: 1686535 - RNA, 19 nt, Artificial Sequence
  Description of Artificial Sequence: Synthetic oligonucleotide
  Sense strand starting at position 169 of SEQ ID NO: 1561632
aggguucagcugggacaaa

SEQ ID NO: 1686536 - RNA, 19 nt, Artificial Sequence
  Description of Artificial Sequence: Synthetic oligonucleotide
  Antisense strand to SEQ ID NO: 1686535
uuugucccagcugaacccu

SEQ ID NO: 1686537 - RNA, 19 nt, Artificial Sequence
  Description of Artificial Sequence: Synthetic oligonucleotide
  Sense strand starting at position 334 of SEQ ID NO: 1561632
ggagucuuaccuuguccca

SEQ ID NO: 1686538 - RNA, 19 nt, Artificial Sequence
  Description of Artificial Sequence: Synthetic oligonucleotide
  Antisense strand to SEQ ID NO: 1686537
ugggacaagguaagacucc

SEQ ID NO: 1686539 - RNA, 19 nt, Artificial Sequence
  Description of Artificial Sequence: Synthetic oligonucleotide
  Sense strand starting at position 336 of SEQ ID NO: 1561632
agucuuaccuugucccaca

SEQ ID NO: 1686540 - RNA, 19 nt, Artificial Sequence
  Description of Artificial Sequence: Synthetic oligonucleotide
  Antisense strand to SEQ ID NO: 1686539
ugugggacaagguaagacu

SEQ ID NO: 1686541 - RNA, 19 nt, Artificial Sequence
  Description of Artificial Sequence: Synthetic oligonucleotide
  Sense strand starting at position 337 of SEQ ID NO: 1561632
gucuuaccuugucccacaa

SEQ ID NO: 1686542 - RNA, 19 nt, Artificial Sequence
  Description of Artificial Sequence: Synthetic oligonucleotide
  Antisense strand to SEQ ID NO: 1686541
uugugggacaagguaagac

SEQ ID NO: 1686543 - RNA, 19 nt, Artificial Sequence
  Description of Artificial Sequence: Synthetic oligonucleotide
  Sense strand starting at position 458 of SEQ ID NO: 1561632
gaccuugguccucgacaca

SEQ ID NO: 1686544 - RNA, 19 nt, Artificial Sequence
  Description of Artificial Sequence: Synthetic oligonucleotide
  Antisense strand to SEQ ID NO: 1686543
ugugucgaggaccaagguc

SEQ ID NO: 1686545 - RNA, 19 nt, Artificial Sequence
  Description of Artificial Sequence: Synthetic oligonucleotide
  Sense strand starting at position 514 of SEQ ID NO: 1561632
gcuggugccacucaaauga

SEQ ID NO: 1686546 - RNA, 19 nt, Artificial Sequence
  Description of Artificial Sequence: Synthetic oligonucleotide
  Antisense strand to SEQ ID NO: 1686545
ucauuugaguggcaccagc

SEQ ID NO: 1686547 - RNA, 19 nt, Artificial Sequence
  Description of Artificial Sequence: Synthetic oligonucleotide
  Sense strand starting at position 569 of SEQ ID NO: 1561632
ccagcuggacugugaauau

SEQ ID NO: 1686548 - RNA, 19 nt, Artificial Sequence
  Description of Artificial Sequence: Synthetic oligonucleotide
  Antisense strand to SEQ ID NO: 1686547
auauucacaguccagcugg

SEQ ID NO: 1686549 - RNA, 19 nt, Artificial Sequence
  Description of Artificial Sequence: Synthetic oligonucleotide
  Sense strand starting at position 578 of SEQ ID NO: 1561632
cugugaauaucacggcauc

SEQ ID NO: 1686550 - RNA, 19 nt, Artificial Sequence
  Description of Artificial Sequence: Synthetic oligonucleotide
  Antisense strand to SEQ ID NO: 1686549
gaugccgugauauucacag

SEQ ID NO: 1686551 - RNA, 19 nt, Artificial Sequence
  Description of Artificial Sequence: Synthetic oligonucleotide
  Sense strand starting at position 625 of SEQ ID NO: 1561632
uugagacccuuacuguuua

SEQ ID NO: 1686552 - RNA, 19 nt, Artificial Sequence
  Description of Artificial Sequence: Synthetic oligonucleotide
  Antisense strand to SEQ ID NO: 1686551
uaaacaguaagggucucaa

SEQ ID NO: 1686553 - RNA, 19 nt, Artificial Sequence
  Description of Artificial Sequence: Synthetic oligonucleotide
  Sense strand starting at position 680 of SEQ ID NO: 1561632
ccuuguaguucuuguuaaa

SEQ ID NO: 1686554 - RNA, 19 nt, Artificial Sequence
  Description of Artificial Sequence: Synthetic oligonucleotide
  Antisense strand to SEQ ID NO: 1686553
uuuaacaagaacuacaagg

SEQ ID NO: 1686555 - RNA, 19 nt, Artificial Sequence
  Description of Artificial Sequence: Synthetic oligonucleotide
  Sense strand starting at position 716 of SEQ ID NO: 1561632
ccaggaaggucugaggaga

SEQ ID NO: 1686556 - RNA, 19 nt, Artificial Sequence
  Description of Artificial Sequence: Synthetic oligonucleotide
  Antisense strand to SEQ ID NO: 1686555
ucuccucagaccuuccugg

SEQ ID NO: 1686557 - RNA, 19 nt, Artificial Sequence
  Description of Artificial Sequence: Synthetic oligonucleotide
  Sense strand starting at position 762 of SEQ ID NO: 1561632
gggcuauacuggcuuccaa

SEQ ID NO: 1686558 - RNA, 19 nt, Artificial Sequence
  Description of Artificial Sequence: Synthetic oligonucleotide
  Antisense strand to SEQ ID NO: 1686557
uuggaagccaguauagccc

SEQ ID NO: 1686559 - RNA, 19 nt, Artificial Sequence
  Description of Artificial Sequence: Synthetic oligonucleotide
  Sense strand starting at position 865 of SEQ ID NO: 1561632
ccugccgucucaggugaaa

SEQ ID NO: 1686560 - RNA, 19 nt, Artificial Sequence
  Description of Artificial Sequence: Synthetic oligonucleotide
  Antisense strand to SEQ ID NO: 1686559
uuucaccugagacggcagg

SEQ ID NO: 1686561 - RNA, 19 nt, Artificial Sequence
  Description of Artificial Sequence: Synthetic oligonucleotide
  Sense strand starting at position 867 of SEQ ID NO: 1561632
ugccgucucaggugaaauu

SEQ ID NO: 1686562 - RNA, 19 nt, Artificial Sequence
  Description of Artificial Sequence: Synthetic oligonucleotide
  Antisense strand to SEQ ID NO: 1686561
aauuucaccugagacggca

SEQ ID NO: 1686563 - RNA, 19 nt, Artificial Sequence
  Description of Artificial Sequence: Synthetic oligonucleotide
  Sense strand starting at position 868 of SEQ ID NO: 1561632
gccgucucaggugaaauuu

SEQ ID NO: 1686564 - RNA, 19 nt, Artificial Sequence
  Description of Artificial Sequence: Synthetic oligonucleotide
  Antisense strand to SEQ ID NO: 1686563
aaauuucaccugagacggc

SEQ ID NO: 1686565 - RNA, 19 nt, Artificial Sequence
  Description of Artificial Sequence: Synthetic oligonucleotide
  Sense strand starting at position 877 of SEQ ID NO: 1561632
ggugaaauuuggcuuccgu

SEQ ID NO: 1686566 - RNA, 19 nt, Artificial Sequence
  Description of Artificial Sequence: Synthetic oligonucleotide
  Antisense strand to SEQ ID NO: 1686565
acggaagccaaauuucacc

SEQ ID NO: 1686567 - RNA, 19 nt, Artificial Sequence
  Description of Artificial Sequence: Synthetic oligonucleotide
  Sense strand starting at position 1023 of SEQ ID NO: 1561632
caguacucguccuucugaa

SEQ ID NO: 1686568 - RNA, 19 nt, Artificial Sequence
  Description of Artificial Sequence: Synthetic oligonucleotide
  Antisense strand to SEQ ID NO: 1686567
uucagaaggacgaguacug

SEQ ID NO: 1686569 - RNA, 19 nt, Artificial Sequence
  Description of Artificial Sequence: Synthetic oligonucleotide
  Sense strand starting at position 1027 of SEQ ID NO: 1561632
acucguccuucugaaacau

SEQ ID NO: 1686570 - RNA, 19 nt, Artificial Sequence
  Description of Artificial Sequence: Synthetic oligonucleotide
  Antisense strand to SEQ ID NO: 1686569
auguuucagaaggacgagu

SEQ ID NO: 1686571 - RNA, 19 nt, Artificial Sequence
  Description of Artificial Sequence: Synthetic oligonucleotide
  Sense strand starting at position 1038 of SEQ ID NO: 1561632
ugaaacauguacuuguaca

SEQ ID NO: 1686572 - RNA, 19 nt, Artificial Sequence
  Description of Artificial Sequence: Synthetic oligonucleotide
  Antisense strand to SEQ ID NO: 1686571
uguacaaguacauguuuca

SEQ ID NO: 1686573 - RNA, 19 nt, Artificial Sequence
  Description of Artificial Sequence: Synthetic oligonucleotide
  Sense strand starting at position 1243 of SEQ ID NO: 1561632
uguaacuucucccagguca

SEQ ID NO: 1686574 - RNA, 19 nt, Artificial Sequence
  Description of Artificial Sequence: Synthetic oligonucleotide
  Antisense strand to SEQ ID NO: 1686573
ugaccugggagaaguuaca

SEQ ID NO: 1686575 - RNA, 19 nt, Artificial Sequence
  Description of Artificial Sequence: Synthetic oligonucleotide
  Sense strand starting at position 1271 of SEQ ID NO: 1561632
guguccugcucacagcaau

SEQ ID NO: 1686576 - RNA, 19 nt, Artificial Sequence
  Description of Artificial Sequence: Synthetic oligonucleotide
  Antisense strand to SEQ ID NO: 1686575
auugcugugagcaggacac

SEQ ID NO: 1686577 - RNA, 19 nt, Artificial Sequence
  Description of Artificial Sequence: Synthetic oligonucleotide
  Sense strand starting at position 3156 of SEQ ID NO: 1561632
agcccuuuguugucagaug

SEQ ID NO: 1686578 - RNA, 19 nt, Artificial Sequence
  Description of Artificial Sequence: Synthetic oligonucleotide
  Antisense strand to SEQ ID NO: 1686577
caucugacaacaaagggcu

SEQ ID NO: 1686579 - RNA, 19 nt, Artificial Sequence
  Description of Artificial Sequence: Synthetic oligonucleotide
  Sense strand starting at position 3286 of SEQ ID NO: 1561632
gucuguguucaggcgucua

SEQ ID NO: 1686580 - RNA, 19 nt, Artificial Sequence
  Description of Artificial Sequence: Synthetic oligonucleotide
  Antisense strand to SEQ ID NO: 1686579
uagacgccugaacacagac

SEQ ID NO: 1686581 - RNA, 19 nt, Artificial Sequence
  Description of Artificial Sequence: Synthetic oligonucleotide
  Sense strand starting at position 3607 of SEQ ID NO: 1561632
gugcaaggcuuauguggaa

SEQ ID NO: 1686582 - RNA, 19 nt, Artificial Sequence
  Description of Artificial Sequence: Synthetic oligonucleotide
  Antisense strand to SEQ ID NO: 1686581
uuccacauaagccuugcac

SEQ ID NO: 1686583 - RNA, 19 nt, Artificial Sequence
  Description of Artificial Sequence: Synthetic oligonucleotide
  Sense strand starting at position 3612 of SEQ ID NO: 1561632
aggcuuauguggaagagag

SEQ ID NO: 1686584 - RNA, 19 nt, Artificial Sequence
  Description of Artificial Sequence: Synthetic oligonucleotide
  Antisense strand to SEQ ID NO: 1686583
cucucuuccacauaagccu

SEQ ID NO: 1686585 - RNA, 19 nt, Artificial Sequence
  Description of Artificial Sequence: Synthetic oligonucleotide
  Sense strand starting at position 3614 of SEQ ID NO: 1561632
gcuuauguggaagagagua

SEQ ID NO: 1686586 - RNA, 19 nt, Artificial Sequence
  Description of Artificial Sequence: Synthetic oligonucleotide
  Antisense strand to SEQ ID NO: 1686585
uacucucuuccacauaagc

SEQ ID NO: 1686587 - RNA, 19 nt, Artificial Sequence
  Description of Artificial Sequence: Synthetic oligonucleotide
  Sense strand starting at position 3627 of SEQ ID NO: 1561632
agaguaggucuccagccua

SEQ ID NO: 1686588 - RNA, 19 nt, Artificial Sequence
  Description of Artificial Sequence: Synthetic oligonucleotide
  Antisense strand to SEQ ID NO: 1686587
uaggcuggagaccuacucu

SEQ ID NO: 1686589 - RNA, 19 nt, Artificial Sequence
  Description of Artificial Sequence: Synthetic oligonucleotide
  Sense strand starting at position 7 of SEQ ID NO: 1561633
aagccaggguuugaacauu

SEQ ID NO: 1686590 - RNA, 19 nt, Artificial Sequence
  Description of Artificial Sequence: Synthetic oligonucleotide
  Antisense strand to SEQ ID NO: 1686589
aauguucaaacccuggcuu

SEQ ID NO: 1686591 - RNA, 19 nt, Artificial Sequence
  Description of Artificial Sequence: Synthetic oligonucleotide
  Sense strand starting at position 15 of SEQ ID NO: 1561633
guuugaacauucccagaca

SEQ ID NO: 1686592 - RNA, 19 nt, Artificial Sequence
  Description of Artificial Sequence: Synthetic oligonucleotide
  Antisense strand to SEQ ID NO: 1686591
ugucugggaauguucaaac

SEQ ID NO: 1686593 - RNA, 19 nt, Artificial Sequence
  Description of Artificial Sequence: Synthetic oligonucleotide
  Sense strand starting at position 26 of SEQ ID NO: 1561633
cccagacacuuguaagaug

SEQ ID NO: 1686594 - RNA, 19 nt, Artificial Sequence
  Description of Artificial Sequence: Synthetic oligonucleotide
  Antisense strand to SEQ ID NO: 1686593
caucuuacaagugucuggg

SEQ ID NO: 1686595 - RNA, 19 nt, Artificial Sequence
  Description of Artificial Sequence: Synthetic oligonucleotide
  Sense strand starting at position 34 of SEQ ID NO: 1561633
cuuguaagauguuuagguu

SEQ ID NO: 1686596 - RNA, 19 nt, Artificial Sequence
  Description of Artificial Sequence: Synthetic oligonucleotide
  Antisense strand to SEQ ID NO: 1686595
aaccuaaacaucuuacaag

SEQ ID NO: 1686597 - RNA, 19 nt, Artificial Sequence
  Description of Artificial Sequence: Synthetic oligonucleotide
  Sense strand starting at position 38 of SEQ ID NO: 1561633
uaagauguuuagguuguua

SEQ ID NO: 1686598 - RNA, 19 nt, Artificial Sequence
  Description of Artificial Sequence: Synthetic oligonucleotide
  Antisense strand to SEQ ID NO: 1686597
uaacaaccuaaacaucuua

SEQ ID NO: 1686599 - RNA, 19 nt, Artificial Sequence
  Description of Artificial Sequence: Synthetic oligonucleotide
  Sense strand starting at position 40 of SEQ ID NO: 1561633
agauguuuagguuguuaac

SEQ ID NO: 1686600 - RNA, 19 nt, Artificial Sequence
  Description of Artificial Sequence: Synthetic oligonucleotide
  Antisense strand to SEQ ID NO: 1686599
guuaacaaccuaaacaucu

SEQ ID NO: 1686601 - RNA, 19 nt, Artificial Sequence
  Description of Artificial Sequence: Synthetic oligonucleotide
  Sense strand starting at position 42 of SEQ ID NO: 1561633
auguuuagguuguuaacau

SEQ ID NO: 1686602 - RNA, 19 nt, Artificial Sequence
  Description of Artificial Sequence: Synthetic oligonucleotide
  Antisense strand to SEQ ID NO: 1686601
auguuaacaaccuaaacau

SEQ ID NO: 1686603 - RNA, 19 nt, Artificial Sequence
  Description of Artificial Sequence: Synthetic oligonucleotide
  Sense strand starting at position 43 of SEQ ID NO: 1561633
uguuuagguuguuaacaua

SEQ ID NO: 1686604 - RNA, 19 nt, Artificial Sequence
  Description of Artificial Sequence: Synthetic oligonucleotide
  Antisense strand to SEQ ID NO: 1686603
uauguuaacaaccuaaaca

SEQ ID NO: 1686605 - RNA, 19 nt, Artificial Sequence
  Description of Artificial Sequence: Synthetic oligonucleotide
  Sense strand starting at position 214 of SEQ ID NO: 1561633
aucugaucgccuuggcauu

SEQ ID NO: 1686606 - RNA, 19 nt, Artificial Sequence
  Description of Artificial Sequence: Synthetic oligonucleotide
  Antisense strand to SEQ ID NO: 1686605
aaugccaaggcgaucagau

SEQ ID NO: 1686607 - RNA, 19 nt, Artificial Sequence
  Description of Artificial Sequence: Synthetic oligonucleotide
  Sense strand starting at position 221 of SEQ ID NO: 1561633
cgccuuggcauuuagugau

SEQ ID NO: 1686608 - RNA, 19 nt, Artificial Sequence
  Description of Artificial Sequence: Synthetic oligonucleotide
  Antisense strand to SEQ ID NO: 1686607
aucacuaaaugccaaggcg

SEQ ID NO: 1686609 - RNA, 19 nt, Artificial Sequence
  Description of Artificial Sequence: Synthetic oligonucleotide
  Sense strand starting at position 224 of SEQ ID NO: 1561633
cuuggcauuuagugauucu

SEQ ID NO: 1686610 - RNA, 19 nt, Artificial Sequence
  Description of Artificial Sequence: Synthetic oligonucleotide
  Antisense strand to SEQ ID NO: 1686609
agaaucacuaaaugccaag

SEQ ID NO: 1686611 - RNA, 19 nt, Artificial Sequence
  Description of Artificial Sequence: Synthetic oligonucleotide
  Sense strand starting at position 227 of SEQ ID NO: 1561633
ggcauuuagugauucuuuc

SEQ ID NO: 1686612 - RNA, 19 nt, Artificial Sequence
  Description of Artificial Sequence: Synthetic oligonucleotide
  Antisense strand to SEQ ID NO: 1686611
gaaagaaucacuaaaugcc

SEQ ID NO: 1686613 - RNA, 19 nt, Artificial Sequence
  Description of Artificial Sequence: Synthetic oligonucleotide
  Sense strand starting at position 233 of SEQ ID NO: 1561633
uagugauucuuucccugga

SEQ ID NO: 1686614 - RNA, 19 nt, Artificial Sequence
  Description of Artificial Sequence: Synthetic oligonucleotide
  Antisense strand to SEQ ID NO: 1686613
uccagggaaagaaucacua

SEQ ID NO: 1686615 - RNA, 19 nt, Artificial Sequence
  Description of Artificial Sequence: Synthetic oligonucleotide
  Sense strand starting at position 234 of SEQ ID NO: 1561633
agugauucuuucccuggaa

SEQ ID NO: 1686616 - RNA, 19 nt, Artificial Sequence
  Description of Artificial Sequence: Synthetic oligonucleotide
  Antisense strand to SEQ ID NO: 1686615
uuccagggaaagaaucacu

SEQ ID NO: 1686617 - RNA, 19 nt, Artificial Sequence
  Description of Artificial Sequence: Synthetic oligonucleotide
  Sense strand starting at position 235 of SEQ ID NO: 1561633
gugauucuuucccuggaau

SEQ ID NO: 1686618 - RNA, 19 nt, Artificial Sequence
  Description of Artificial Sequence: Synthetic oligonucleotide
  Antisense strand to SEQ ID NO: 1686617
auuccagggaaagaaucac

SEQ ID NO: 1686619 - RNA, 19 nt, Artificial Sequence
  Description of Artificial Sequence: Synthetic oligonucleotide
  Sense strand starting at position 236 of SEQ ID NO: 1561633
ugauucuuucccuggaauu

SEQ ID NO: 1686620 - RNA, 19 nt, Artificial Sequence
  Description of Artificial Sequence: Synthetic oligonucleotide
  Antisense strand to SEQ ID NO: 1686619
aauuccagggaaagaauca

SEQ ID NO: 1686621 - RNA, 19 nt, Artificial Sequence
  Description of Artificial Sequence: Synthetic oligonucleotide
  Sense strand starting at position 329 of SEQ ID NO: 1561633
aggguucagcugggacaaa

SEQ ID NO: 1686622 - RNA, 19 nt, Artificial Sequence
  Description of Artificial Sequence: Synthetic oligonucleotide
  Antisense strand to SEQ ID NO: 1686621
uuugucccagcugaacccu

SEQ ID NO: 1686623 - RNA, 19 nt, Artificial Sequence
  Description of Artificial Sequence: Synthetic oligonucleotide
  Sense strand starting at position 494 of SEQ ID NO: 1561633
ggagucuuaccuuguccca

SEQ ID NO: 1686624 - RNA, 19 nt, Artificial Sequence
  Description of Artificial Sequence: Synthetic oligonucleotide
  Antisense strand to SEQ ID NO: 1686623
ugggacaagguaagacucc

SEQ ID NO: 1686625 - RNA, 19 nt, Artificial Sequence
  Description of Artificial Sequence: Synthetic oligonucleotide
  Sense strand starting at position 496 of SEQ ID NO: 1561633
agucuuaccuugucccaca

SEQ ID NO: 1686626 - RNA, 19 nt, Artificial Sequence
  Description of Artificial Sequence: Synthetic oligonucleotide
  Antisense strand to SEQ ID NO: 1686625
ugugggacaagguaagacu

SEQ ID NO: 1686627 - RNA, 19 nt, Artificial Sequence
  Description of Artificial Sequence: Synthetic oligonucleotide
  Sense strand starting at position 497 of SEQ ID NO: 1561633
gucuuaccuugucccacaa

SEQ ID NO: 1686628 - RNA, 19 nt, Artificial Sequence
  Description of Artificial Sequence: Synthetic oligonucleotide
  Antisense strand to SEQ ID NO: 1686627
uugugggacaagguaagac

SEQ ID NO: 1686629 - RNA, 19 nt, Artificial Sequence
  Description of Artificial Sequence: Synthetic oligonucleotide
  Sense strand starting at position 618 of SEQ ID NO: 1561633
gaccuugguccucgacaca

SEQ ID NO: 1686630 - RNA, 19 nt, Artificial Sequence
  Description of Artificial Sequence: Synthetic oligonucleotide
  Antisense strand to SEQ ID NO: 1686629
ugugucgaggaccaagguc

SEQ ID NO: 1686631 - RNA, 19 nt, Artificial Sequence
  Description of Artificial Sequence: Synthetic oligonucleotide
  Sense strand starting at position 674 of SEQ ID NO: 1561633
gcuggugccacucaaauga

SEQ ID NO: 1686632 - RNA, 19 nt, Artificial Sequence
  Description of Artificial Sequence: Synthetic oligonucleotide
  Antisense strand to SEQ ID NO: 1686631
ucauuugaguggcaccagc

SEQ ID NO: 1686633 - RNA, 19 nt, Artificial Sequence
  Description of Artificial Sequence: Synthetic oligonucleotide
  Sense strand starting at position 729 of SEQ ID NO: 1561633
ccagcuggacugugaauau

SEQ ID NO: 1686634 - RNA, 19 nt, Artificial Sequence
  Description of Artificial Sequence: Synthetic oligonucleotide
  Antisense strand to SEQ ID NO: 1686633
auauucacaguccagcugg

SEQ ID NO: 1686635 - RNA, 19 nt, Artificial Sequence
  Description of Artificial Sequence: Synthetic oligonucleotide
  Sense strand starting at position 738 of SEQ ID NO: 1561633
cugugaauaucacggcauc

SEQ ID NO: 1686636 - RNA, 19 nt, Artificial Sequence
  Description of Artificial Sequence: Synthetic oligonucleotide
  Antisense strand to SEQ ID NO: 1686635
gaugccgugauauucacag

SEQ ID NO: 1686637 - RNA, 19 nt, Artificial Sequence
  Description of Artificial Sequence: Synthetic oligonucleotide
  Sense strand starting at position 785 of SEQ ID NO: 1561633
uugagacccuuacuguuua

SEQ ID NO: 1686638 - RNA, 19 nt, Artificial Sequence
  Description of Artificial Sequence: Synthetic oligonucleotide
  Antisense strand to SEQ ID NO: 1686637
uaaacaguaagggucucaa

SEQ ID NO: 1686639 - RNA, 19 nt, Artificial Sequence
  Description of Artificial Sequence: Synthetic oligonucleotide
  Sense strand starting at position 876 of SEQ ID NO: 1561633
ccaggaaggucugaggaga

SEQ ID NO: 1686640 - RNA, 19 nt, Artificial Sequence
  Description of Artificial Sequence: Synthetic oligonucleotide
  Antisense strand to SEQ ID NO: 1686639
ucuccucagaccuuccugg

SEQ ID NO: 1686641 - RNA, 19 nt, Artificial Sequence
  Description of Artificial Sequence: Synthetic oligonucleotide
  Sense strand starting at position 922 of SEQ ID NO: 1561633
gggcuauacuggcuuccaa

SEQ ID NO: 1686642 - RNA, 19 nt, Artificial Sequence
  Description of Artificial Sequence: Synthetic oligonucleotide
  Antisense strand to SEQ ID NO: 1686641
uuggaagccaguauagccc

SEQ ID NO: 1686643 - RNA, 19 nt, Artificial Sequence
  Description of Artificial Sequence: Synthetic oligonucleotide
  Sense strand starting at position 1027 of SEQ ID NO: 1561633
ugccgucucaggugaaauu

SEQ ID NO: 1686644 - RNA, 19 nt, Artificial Sequence
  Description of Artificial Sequence: Synthetic oligonucleotide
  Antisense strand to SEQ ID NO: 1686643
aauuucaccugagacggca

SEQ ID NO: 1686645 - RNA, 19 nt, Artificial Sequence
  Description of Artificial Sequence: Synthetic oligonucleotide
  Sense strand starting at position 1028 of SEQ ID NO: 1561633
gccgucucaggugaaauuu

SEQ ID NO: 1686646 - RNA, 19 nt, Artificial Sequence
  Description of Artificial Sequence: Synthetic oligonucleotide
  Antisense strand to SEQ ID NO: 1686645
aaauuucaccugagacggc

SEQ ID NO: 1686647 - RNA, 19 nt, Artificial Sequence
  Description of Artificial Sequence: Synthetic oligonucleotide
  Sense strand starting at position 1037 of SEQ ID NO: 1561633
ggugaaauuuggcuuccgu

SEQ ID NO: 1686648 - RNA, 19 nt, Artificial Sequence
  Description of Artificial Sequence: Synthetic oligonucleotide
  Antisense strand to SEQ ID NO: 1686647
acggaagccaaauuucacc

SEQ ID NO: 1686649 - RNA, 19 nt, Artificial Sequence
  Description of Artificial Sequence: Synthetic oligonucleotide
  Sense strand starting at position 1183 of SEQ ID NO: 1561633
caguacucguccuucugaa

SEQ ID NO: 1686650 - RNA, 19 nt, Artificial Sequence
  Description of Artificial Sequence: Synthetic oligonucleotide
  Antisense strand to SEQ ID NO: 1686649
uucagaaggacgaguacug

SEQ ID NO: 1686651 - RNA, 19 nt, Artificial Sequence
  Description of Artificial Sequence: Synthetic oligonucleotide
  Sense strand starting at position 1187 of SEQ ID NO: 1561633
acucguccuucugaaacau

SEQ ID NO: 1686652 - RNA, 19 nt, Artificial Sequence
  Description of Artificial Sequence: Synthetic oligonucleotide
  Antisense strand to SEQ ID NO: 1686651
auguuucagaaggacgagu

SEQ ID NO: 1686653 - RNA, 19 nt, Artificial Sequence
  Description of Artificial Sequence: Synthetic oligonucleotide
  Sense strand starting at position 1198 of SEQ ID NO: 1561633
ugaaacauguacuuguaca

SEQ ID NO: 1686654 - RNA, 19 nt, Artificial Sequence
  Description of Artificial Sequence: Synthetic oligonucleotide
  Antisense strand to SEQ ID NO: 1686653
uguacaaguacauguuuca

SEQ ID NO: 1686655 - RNA, 19 nt, Artificial Sequence
  Description of Artificial Sequence: Synthetic oligonucleotide
  Sense strand starting at position 1403 of SEQ ID NO: 1561633
uguaacuucucccagguca

SEQ ID NO: 1686656 - RNA, 19 nt, Artificial Sequence
  Description of Artificial Sequence: Synthetic oligonucleotide
  Antisense strand to SEQ ID NO: 1686655
ugaccugggagaaguuaca

SEQ ID NO: 1686657 - RNA, 19 nt, Artificial Sequence
  Description of Artificial Sequence: Synthetic oligonucleotide
  Sense strand starting at position 3316 of SEQ ID NO: 1561633
agcccuuuguugucagaug

SEQ ID NO: 1686658 - RNA, 19 nt, Artificial Sequence
  Description of Artificial Sequence: Synthetic oligonucleotide
  Antisense strand to SEQ ID NO: 1686657
caucugacaacaaagggcu

SEQ ID NO: 1686659 - RNA, 19 nt, Artificial Sequence
  Description of Artificial Sequence: Synthetic oligonucleotide
  Sense strand starting at position 3446 of SEQ ID NO: 1561633
gucuguguucaggcgucua

SEQ ID NO: 1686660 - RNA, 19 nt, Artificial Sequence
  Description of Artificial Sequence: Synthetic oligonucleotide
  Antisense strand to SEQ ID NO: 1686659
uagacgccugaacacagac

SEQ ID NO: 1686661 - RNA, 19 nt, Artificial Sequence
  Description of Artificial Sequence: Synthetic oligonucleotide
  Sense strand starting at position 3767 of SEQ ID NO: 1561633
gugcaaggcuuauguggaa

SEQ ID NO: 1686662 - RNA, 19 nt, Artificial Sequence
  Description of Artificial Sequence: Synthetic oligonucleotide
  Antisense strand to SEQ ID NO: 1686661
uuccacauaagccuugcac

SEQ ID NO: 1686663 - RNA, 19 nt, Artificial Sequence
  Description of Artificial Sequence: Synthetic oligonucleotide
  Sense strand starting at position 3772 of SEQ ID NO: 1561633
aggcuuauguggaagagag

SEQ ID NO: 1686664 - RNA, 19 nt, Artificial Sequence
  Description of Artificial Sequence: Synthetic oligonucleotide
  Antisense strand to SEQ ID NO: 1686663
cucucuuccacauaagccu

SEQ ID NO: 1686665 - RNA, 19 nt, Artificial Sequence
  Description of Artificial Sequence: Synthetic oligonucleotide
  Sense strand starting at position 3774 of SEQ ID NO: 1561633
gcuuauguggaagagagua

SEQ ID NO: 1686666 - RNA, 19 nt, Artificial Sequence
  Description of Artificial Sequence: Synthetic oligonucleotide
  Antisense strand to SEQ ID NO: 1686665
uacucucuuccacauaagc

SEQ ID NO: 1686667 - RNA, 19 nt, Artificial Sequence
  Description of Artificial Sequence: Synthetic oligonucleotide
  Sense strand starting at position 3787 of SEQ ID NO: 1561633
agaguaggucuccagccua

SEQ ID NO: 1686668 - RNA, 19 nt, Artificial Sequence
  Description of Artificial Sequence: Synthetic oligonucleotide
  Antisense strand to SEQ ID NO: 1686667
uaggcuggagaccuacucu

SEQ ID NO: 1686669 - RNA, 19 nt, Artificial Sequence
  Description of Artificial Sequence: Synthetic oligonucleotide
  Sense strand starting at position 63 of SEQ ID NO: 1561634
gucagagucagagagaugu

SEQ ID NO: 1686670 - RNA, 19 nt, Artificial Sequence
  Description of Artificial Sequence: Synthetic oligonucleotide
  Antisense strand to SEQ ID NO: 1686669
acaucucucugacucugac

SEQ ID NO: 1686671 - RNA, 19 nt, Artificial Sequence
  Description of Artificial Sequence: Synthetic oligonucleotide
  Sense strand starting at position 67 of SEQ ID NO: 1561634
gagucagagagauguguga

SEQ ID NO: 1686672 - RNA, 19 nt, Artificial Sequence
  Description of Artificial Sequence: Synthetic oligonucleotide
  Antisense strand to SEQ ID NO: 1686671
ucacacaucucucugacuc

SEQ ID NO: 1686673 - RNA, 19 nt, Artificial Sequence
  Description of Artificial Sequence: Synthetic oligonucleotide
  Sense strand starting at position 69 of SEQ ID NO: 1561634
gucagagagaugugugaag

SEQ ID NO: 1686674 - RNA, 19 nt, Artificial Sequence
  Description of Artificial Sequence: Synthetic oligonucleotide
  Antisense strand to SEQ ID NO: 1686673
cuucacacaucucucugac

SEQ ID NO: 1686675 - RNA, 19 nt, Artificial Sequence
  Description of Artificial Sequence: Synthetic oligonucleotide
  Sense strand starting at position 71 of SEQ ID NO: 1561634
cagagagaugugugaagau

SEQ ID NO: 1686676 - RNA, 19 nt, Artificial Sequence
  Description of Artificial Sequence: Synthetic oligonucleotide
  Antisense strand to SEQ ID NO: 1686675
aucuucacacaucucucug

SEQ ID NO: 1686677 - RNA, 19 nt, Artificial Sequence
  Description of Artificial Sequence: Synthetic oligonucleotide
  Sense strand starting at position 359 of SEQ ID NO: 1561634
aagcuuaugugauuuguua

SEQ ID NO: 1686678 - RNA, 19 nt, Artificial Sequence
  Description of Artificial Sequence: Synthetic oligonucleotide
  Antisense strand to SEQ ID NO: 1686677
uaacaaaucacauaagcuu

SEQ ID NO: 1686679 - RNA, 19 nt, Artificial Sequence
  Description of Artificial Sequence: Synthetic oligonucleotide
  Sense strand starting at position 638 of SEQ ID NO: 1561634
gaacaugcuguaugaauga

SEQ ID NO: 1686680 - RNA, 19 nt, Artificial Sequence
  Description of Artificial Sequence: Synthetic oligonucleotide
  Antisense strand to SEQ ID NO: 1686679
ucauucauacagcauguuc

SEQ ID NO: 1686681 - RNA, 19 nt, Artificial Sequence
  Description of Artificial Sequence: Synthetic oligonucleotide
  Sense strand starting at position 764 of SEQ ID NO: 1561634
cugcuuucugaguacagac

SEQ ID NO: 1686682 - RNA, 19 nt, Artificial Sequence
  Description of Artificial Sequence: Synthetic oligonucleotide
  Antisense strand to SEQ ID NO: 1686681
gucuguacucagaaagcag

SEQ ID NO: 1686683 - RNA, 19 nt, Artificial Sequence
  Description of Artificial Sequence: Synthetic oligonucleotide
  Sense strand starting at position 920 of SEQ ID NO: 1561634
acaagucuaggaugugaau

SEQ ID NO: 1686684 - RNA, 19 nt, Artificial Sequence
  Description of Artificial Sequence: Synthetic oligonucleotide
  Antisense strand to SEQ ID NO: 1686683
auucacauccuagacuugu

SEQ ID NO: 1686685 - RNA, 19 nt, Artificial Sequence
  Description of Artificial Sequence: Synthetic oligonucleotide
  Sense strand starting at position 1084 of SEQ ID NO: 1561634
agugaaugaauuggaucuu

SEQ ID NO: 1686686 - RNA, 19 nt, Artificial Sequence
  Description of Artificial Sequence: Synthetic oligonucleotide
  Antisense strand to SEQ ID NO: 1686685
aagauccaauucauucacu

SEQ ID NO: 1686687 - RNA, 19 nt, Artificial Sequence
  Description of Artificial Sequence: Synthetic oligonucleotide
  Sense strand starting at position 1090 of SEQ ID NO: 1561634
ugaauuggaucuuuauguu

SEQ ID NO: 1686688 - RNA, 19 nt, Artificial Sequence
  Description of Artificial Sequence: Synthetic oligonucleotide
  Antisense strand to SEQ ID NO: 1686687
aacauaaagauccaauuca

SEQ ID NO: 1686689 - RNA, 19 nt, Artificial Sequence
  Description of Artificial Sequence: Synthetic oligonucleotide
  Sense strand starting at position 1098 of SEQ ID NO: 1561634
aucuuuauguuacugacau

SEQ ID NO: 1686690 - RNA, 19 nt, Artificial Sequence
  Description of Artificial Sequence: Synthetic oligonucleotide
  Antisense strand to SEQ ID NO: 1686689
augucaguaacauaaagau

SEQ ID NO: 1686691 - RNA, 19 nt, Artificial Sequence
  Description of Artificial Sequence: Synthetic oligonucleotide
  Sense strand starting at position 1113 of SEQ ID NO: 1561634
acauguaaauauguccaua

SEQ ID NO: 1686692 - RNA, 19 nt, Artificial Sequence
  Description of Artificial Sequence: Synthetic oligonucleotide
  Antisense strand to SEQ ID NO: 1686691
uauggacauauuuacaugu

SEQ ID NO: 1686693 - RNA, 19 nt, Artificial Sequence
  Description of Artificial Sequence: Synthetic oligonucleotide
  Sense strand starting at position 1115 of SEQ ID NO: 1561634
auguaaauauguccauaac

SEQ ID NO: 1686694 - RNA, 19 nt, Artificial Sequence
  Description of Artificial Sequence: Synthetic oligonucleotide
  Antisense strand to SEQ ID NO: 1686693
guuauggacauauuuacau

SEQ ID NO: 1686695 - RNA, 19 nt, Artificial Sequence
  Description of Artificial Sequence: Synthetic oligonucleotide
  Sense strand starting at position 1286 of SEQ ID NO: 1561634
acauauguauuccuguaca

SEQ ID NO: 1686696 - RNA, 19 nt, Artificial Sequence
  Description of Artificial Sequence: Synthetic oligonucleotide
  Antisense strand to SEQ ID NO: 1686695
uguacaggaauacauaugu

SEQ ID NO: 1686697 - RNA, 19 nt, Artificial Sequence
  Description of Artificial Sequence: Synthetic oligonucleotide
  Sense strand starting at position 1289 of SEQ ID NO: 1561634
uauguauuccuguacagua

SEQ ID NO: 1686698 - RNA, 19 nt, Artificial Sequence
  Description of Artificial Sequence: Synthetic oligonucleotide
  Antisense strand to SEQ ID NO: 1686697
uacuguacaggaauacaua

SEQ ID NO: 1686699 - RNA, 19 nt, Artificial Sequence
  Description of Artificial Sequence: Synthetic oligonucleotide
  Sense strand starting at position 1564 of SEQ ID NO: 1561634
cacucacggucucuaagaa

SEQ ID NO: 1686700 - RNA, 19 nt, Artificial Sequence
  Description of Artificial Sequence: Synthetic oligonucleotide
  Antisense strand to SEQ ID NO: 1686699
uucuuagagaccgugagug

SEQ ID NO: 1686701 - RNA, 19 nt, Artificial Sequence
  Description of Artificial Sequence: Synthetic oligonucleotide
  Sense strand starting at position 1565 of SEQ ID NO: 1561634
acucacggucucuaagaau

SEQ ID NO: 1686702 - RNA, 19 nt, Artificial Sequence
  Description of Artificial Sequence: Synthetic oligonucleotide
  Antisense strand to SEQ ID NO: 1686701
auucuuagagaccgugagu

SEQ ID NO: 1686703 - RNA, 19 nt, Artificial Sequence
  Description of Artificial Sequence: Synthetic oligonucleotide
  Sense strand starting at position 1643 of SEQ ID NO: 1561634
ccaggaaggcucuggguuu

SEQ ID NO: 1686704 - RNA, 19 nt, Artificial Sequence
  Description of Artificial Sequence: Synthetic oligonucleotide
  Antisense strand to SEQ ID NO: 1686703
aaacccagagccuuccugg

SEQ ID NO: 1686705 - RNA, 19 nt, Artificial Sequence
  Description of Artificial Sequence: Synthetic oligonucleotide
  Sense strand starting at position 1659 of SEQ ID NO: 1561634
uuuggagucccauggacua

SEQ ID NO: 1686706 - RNA, 19 nt, Artificial Sequence
  Description of Artificial Sequence: Synthetic oligonucleotide
  Antisense strand to SEQ ID NO: 1686705
uaguccaugggacuccaaa

SEQ ID NO: 1686707 - RNA, 19 nt, Artificial Sequence
  Description of Artificial Sequence: Synthetic oligonucleotide
  Sense strand starting at position 1757 of SEQ ID NO: 1561634
ggaagauucuugccucaca

SEQ ID NO: 1686708 - RNA, 19 nt, Artificial Sequence
  Description of Artificial Sequence: Synthetic oligonucleotide
  Antisense strand to SEQ ID NO: 1686707
ugugaggcaagaaucuucc

SEQ ID NO: 1686709 - RNA, 19 nt, Artificial Sequence
  Description of Artificial Sequence: Synthetic oligonucleotide
  Sense strand starting at position 2281 of SEQ ID NO: 1561634
uugcauggccacuauuauu

SEQ ID NO: 1686710 - RNA, 19 nt, Artificial Sequence
  Description of Artificial Sequence: Synthetic oligonucleotide
  Antisense strand to SEQ ID NO: 1686709
aauaauaguggccaugcaa

SEQ ID NO: 1686711 - RNA, 19 nt, Artificial Sequence
  Description of Artificial Sequence: Synthetic oligonucleotide
  Sense strand starting at position 2349 of SEQ ID NO: 1561634
ggcuacuauggguggaaga

SEQ ID NO: 1686712 - RNA, 19 nt, Artificial Sequence
  Description of Artificial Sequence: Synthetic oligonucleotide
  Antisense strand to SEQ ID NO: 1686711
ucuuccacccauaguagcc

SEQ ID NO: 1686713 - RNA, 19 nt, Artificial Sequence
  Description of Artificial Sequence: Synthetic oligonucleotide
  Sense strand starting at position 2350 of SEQ ID NO: 1561634
gcuacuauggguggaagaa

SEQ ID NO: 1686714 - RNA, 19 nt, Artificial Sequence
  Description of Artificial Sequence: Synthetic oligonucleotide
  Antisense strand to SEQ ID NO: 1686713
uucuuccacccauaguagc

SEQ ID NO: 1686715 - RNA, 19 nt, Artificial Sequence
  Description of Artificial Sequence: Synthetic oligonucleotide
  Sense strand starting at position 2495 of SEQ ID NO: 1561634
ggaagaugucaggguguaa

SEQ ID NO: 1686716 - RNA, 19 nt, Artificial Sequence
  Description of Artificial Sequence: Synthetic oligonucleotide
  Antisense strand to SEQ ID NO: 1686715
uuacacccugacaucuucc

SEQ ID NO: 1686717 - RNA, 19 nt, Artificial Sequence
  Description of Artificial Sequence: Synthetic oligonucleotide
  Sense strand starting at position 2722 of SEQ ID NO: 1561634
cuuagcaaaucuuuaugga

SEQ ID NO: 1686718 - RNA, 19 nt, Artificial Sequence
  Description of Artificial Sequence: Synthetic oligonucleotide
  Antisense strand to SEQ ID NO: 1686717
uccauaaagauuugcuaag

SEQ ID NO: 1686719 - RNA, 19 nt, Artificial Sequence
  Description of Artificial Sequence: Synthetic oligonucleotide
  Sense strand starting at position 3274 of SEQ ID NO: 1561634
uggcauuaaagacgggaaa

SEQ ID NO: 1686720 - RNA, 19 nt, Artificial Sequence
  Description of Artificial Sequence: Synthetic oligonucleotide
  Antisense strand to SEQ ID NO: 1686719
uuucccgucuuuaaugcca

SEQ ID NO: 1686721 - RNA, 19 nt, Artificial Sequence
  Description of Artificial Sequence: Synthetic oligonucleotide
  Sense strand starting at position 3459 of SEQ ID NO: 1561634
guccaauauguaggugaau

SEQ ID NO: 1686722 - RNA, 19 nt, Artificial Sequence
  Description of Artificial Sequence: Synthetic oligonucleotide
  Antisense strand to SEQ ID NO: 1686721
auucaccuacauauuggac

SEQ ID NO: 1686723 - RNA, 19 nt, Artificial Sequence
  Description of Artificial Sequence: Synthetic oligonucleotide
  Sense strand starting at position 3460 of SEQ ID NO: 1561634
uccaauauguaggugaauu

SEQ ID NO: 1686724 - RNA, 19 nt, Artificial Sequence
  Description of Artificial Sequence: Synthetic oligonucleotide
  Antisense strand to SEQ ID NO: 1686723
aauucaccuacauauugga

SEQ ID NO: 1686725 - RNA, 19 nt, Artificial Sequence
  Description of Artificial Sequence: Synthetic oligonucleotide
  Sense strand starting at position 3461 of SEQ ID NO: 1561634
ccaauauguaggugaauug

SEQ ID NO: 1686726 - RNA, 19 nt, Artificial Sequence
  Description of Artificial Sequence: Synthetic oligonucleotide
  Antisense strand to SEQ ID NO: 1686725
caauucaccuacauauugg

SEQ ID NO: 1686727 - RNA, 19 nt, Artificial Sequence
  Description of Artificial Sequence: Synthetic oligonucleotide
  Sense strand starting at position 3533 of SEQ ID NO: 1561634
gaaacaugguaggugcuua

SEQ ID NO: 1686728 - RNA, 19 nt, Artificial Sequence
  Description of Artificial Sequence: Synthetic oligonucleotide
  Antisense strand to SEQ ID NO: 1686727
uaagcaccuaccauguuuc

SEQ ID NO: 1686729 - RNA, 19 nt, Artificial Sequence
  Description of Artificial Sequence: Synthetic oligonucleotide
  Sense strand starting at position 3663 of SEQ ID NO: 1561634
ugaauaagagguugauggu

SEQ ID NO: 1686730 - RNA, 19 nt, Artificial Sequence
  Description of Artificial Sequence: Synthetic oligonucleotide
  Antisense strand to SEQ ID NO: 1686729
accaucaaccucuuauuca

SEQ ID NO: 1686731 - RNA, 19 nt, Artificial Sequence
  Description of Artificial Sequence: Synthetic oligonucleotide
  Sense strand starting at position 3684 of SEQ ID NO: 1561634
guuugauggguggauggau

SEQ ID NO: 1686732 - RNA, 19 nt, Artificial Sequence
  Description of Artificial Sequence: Synthetic oligonucleotide
  Antisense strand to SEQ ID NO: 1686731
auccauccacccaucaaac

SEQ ID NO: 1686733 - RNA, 19 nt, Artificial Sequence
  Description of Artificial Sequence: Synthetic oligonucleotide
  Sense strand starting at position 3764 of SEQ ID NO: 1561634
ugggcaugaauaugugaga

SEQ ID NO: 1686734 - RNA, 19 nt, Artificial Sequence
  Description of Artificial Sequence: Synthetic oligonucleotide
  Antisense strand to SEQ ID NO: 1686733
ucucacauauucaugccca

SEQ ID NO: 1686735 - RNA, 19 nt, Artificial Sequence
  Description of Artificial Sequence: Synthetic oligonucleotide
  Sense strand starting at position 3775 of SEQ ID NO: 1561634
augugagagcaugagugaa

SEQ ID NO: 1686736 - RNA, 19 nt, Artificial Sequence
  Description of Artificial Sequence: Synthetic oligonucleotide
  Antisense strand to SEQ ID NO: 1686735
uucacucaugcucucacau

SEQ ID NO: 1686737 - RNA, 19 nt, Artificial Sequence
  Description of Artificial Sequence: Synthetic oligonucleotide
  Sense strand starting at position 3797 of SEQ ID NO: 1561634
augaaucagugagccauua

SEQ ID NO: 1686738 - RNA, 19 nt, Artificial Sequence
  Description of Artificial Sequence: Synthetic oligonucleotide
  Antisense strand to SEQ ID NO: 1686737
uaauggcucacugauucau

SEQ ID NO: 1686739 - RNA, 19 nt, Artificial Sequence
  Description of Artificial Sequence: Synthetic oligonucleotide
  Sense strand starting at position 3853 of SEQ ID NO: 1561634
auaaaugcuugagugagua

SEQ ID NO: 1686740 - RNA, 19 nt, Artificial Sequence
  Description of Artificial Sequence: Synthetic oligonucleotide
  Antisense strand to SEQ ID NO: 1686739
uacucacucaagcauuuau

SEQ ID NO: 1686741 - RNA, 19 nt, Artificial Sequence
  Description of Artificial Sequence: Synthetic oligonucleotide
  Sense strand starting at position 3857 of SEQ ID NO: 1561634
augcuugagugaguaaaca

SEQ ID NO: 1686742 - RNA, 19 nt, Artificial Sequence
  Description of Artificial Sequence: Synthetic oligonucleotide
  Antisense strand to SEQ ID NO: 1686741
uguuuacucacucaagcau

SEQ ID NO: 1686743 - RNA, 19 nt, Artificial Sequence
  Description of Artificial Sequence: Synthetic oligonucleotide
  Sense strand starting at position 3875 of SEQ ID NO: 1561634
aaguuaguaccuggguaaa

SEQ ID NO: 1686744 - RNA, 19 nt, Artificial Sequence
  Description of Artificial Sequence: Synthetic oligonucleotide
  Antisense strand to SEQ ID NO: 1686743
uuuacccagguacuaacuu

SEQ ID NO: 1686745 - RNA, 19 nt, Artificial Sequence
  Description of Artificial Sequence: Synthetic oligonucleotide
  Sense strand starting at position 3877 of SEQ ID NO: 1561634
guuaguaccuggguaaaug

SEQ ID NO: 1686746 - RNA, 19 nt, Artificial Sequence
  Description of Artificial Sequence: Synthetic oligonucleotide
  Antisense strand to SEQ ID NO: 1686745
cauuuacccagguacuaac

SEQ ID NO: 1686747 - RNA, 19 nt, Artificial Sequence
  Description of Artificial Sequence: Synthetic oligonucleotide
  Sense strand starting at position 3978 of SEQ ID NO: 1561634
gagagaguggccugaaucu

SEQ ID NO: 1686748 - RNA, 19 nt, Artificial Sequence
  Description of Artificial Sequence: Synthetic oligonucleotide
  Antisense strand to SEQ ID NO: 1686747
agauucaggccacucucuc

SEQ ID NO: 1686749 - RNA, 19 nt, Artificial Sequence
  Description of Artificial Sequence: Synthetic oligonucleotide
  Sense strand starting at position 3 of SEQ ID NO: 1561635
ugacucugccaauauaaug

SEQ ID NO: 1686750 - RNA, 19 nt, Artificial Sequence
  Description of Artificial Sequence: Synthetic oligonucleotide
  Antisense strand to SEQ ID NO: 1686749
cauuauauuggcagaguca

SEQ ID NO: 1686751 - RNA, 19 nt, Artificial Sequence
  Description of Artificial Sequence: Synthetic oligonucleotide
  Sense strand starting at position 106 of SEQ ID NO: 1561635
caguauugucuugaggaua

SEQ ID NO: 1686752 - RNA, 19 nt, Artificial Sequence
  Description of Artificial Sequence: Synthetic oligonucleotide
  Antisense strand to SEQ ID NO: 1686751
uauccucaagacaauacug

SEQ ID NO: 1686753 - RNA, 19 nt, Artificial Sequence
  Description of Artificial Sequence: Synthetic oligonucleotide
  Sense strand starting at position 188 of SEQ ID NO: 1561635
ucccuucccugucugauau

SEQ ID NO: 1686754 - RNA, 19 nt, Artificial Sequence
  Description of Artificial Sequence: Synthetic oligonucleotide
  Antisense strand to SEQ ID NO: 1686753
auaucagacagggaaggga

SEQ ID NO: 1686755 - RNA, 19 nt, Artificial Sequence
  Description of Artificial Sequence: Synthetic oligonucleotide
  Sense strand starting at position 195 of SEQ ID NO: 1561635
ccugucugauauguguaga

SEQ ID NO: 1686756 - RNA, 19 nt, Artificial Sequence
  Description of Artificial Sequence: Synthetic oligonucleotide
  Antisense strand to SEQ ID NO: 1686755
ucuacacauaucagacagg

SEQ ID NO: 1686757 - RNA, 19 nt, Artificial Sequence
  Description of Artificial Sequence: Synthetic oligonucleotide
  Sense strand starting at position 196 of SEQ ID NO: 1561635
cugucugauauguguagaa

SEQ ID NO: 1686758 - RNA, 19 nt, Artificial Sequence
  Description of Artificial Sequence: Synthetic oligonucleotide
  Antisense strand to SEQ ID NO: 1686757
uucuacacauaucagacag

SEQ ID NO: 1686759 - RNA, 19 nt, Artificial Sequence
  Description of Artificial Sequence: Synthetic oligonucleotide
  Sense strand starting at position 198 of SEQ ID NO: 1561635
gucugauauguguagaaua

SEQ ID NO: 1686760 - RNA, 19 nt, Artificial Sequence
  Description of Artificial Sequence: Synthetic oligonucleotide
  Antisense strand to SEQ ID NO: 1686759
uauucuacacauaucagac

SEQ ID NO: 1686761 - RNA, 19 nt, Artificial Sequence
  Description of Artificial Sequence: Synthetic oligonucleotide
  Sense strand starting at position 200 of SEQ ID NO: 1561635
cugauauguguagaauauc

SEQ ID NO: 1686762 - RNA, 19 nt, Artificial Sequence
  Description of Artificial Sequence: Synthetic oligonucleotide
  Antisense strand to SEQ ID NO: 1686761
gauauucuacacauaucag

SEQ ID NO: 1686763 - RNA, 19 nt, Artificial Sequence
  Description of Artificial Sequence: Synthetic oligonucleotide
  Sense strand starting at position 1054 of SEQ ID NO: 1561635
cgcucagucuggucuugaa

SEQ ID NO: 1686764 - RNA, 19 nt, Artificial Sequence
  Description of Artificial Sequence: Synthetic oligonucleotide
  Antisense strand to SEQ ID NO: 1686763
uucaagaccagacugagcg

SEQ ID NO: 1686765 - RNA, 19 nt, Artificial Sequence
  Description of Artificial Sequence: Synthetic oligonucleotide
  Sense strand starting at position 1182 of SEQ ID NO: 1561635
gguaguaagagauauuagu

SEQ ID NO: 1686766 - RNA, 19 nt, Artificial Sequence
  Description of Artificial Sequence: Synthetic oligonucleotide
  Antisense strand to SEQ ID NO: 1686765
acuaauaucucuuacuacc

SEQ ID NO: 1686767 - RNA, 19 nt, Artificial Sequence
  Description of Artificial Sequence: Synthetic oligonucleotide
  Sense strand starting at position 1264 of SEQ ID NO: 1561635
gugugauccgugcuaguua

SEQ ID NO: 1686768 - RNA, 19 nt, Artificial Sequence
  Description of Artificial Sequence: Synthetic oligonucleotide
  Antisense strand to SEQ ID NO: 1686767
uaacuagcacggaucacac

SEQ ID NO: 1686769 - RNA, 19 nt, Artificial Sequence
  Description of Artificial Sequence: Synthetic oligonucleotide
  Sense strand starting at position 1271 of SEQ ID NO: 1561635
ccgugcuaguuacuuaauu

SEQ ID NO: 1686770 - RNA, 19 nt, Artificial Sequence
  Description of Artificial Sequence: Synthetic oligonucleotide
  Antisense strand to SEQ ID NO: 1686769
aauuaaguaacuagcacgg

SEQ ID NO: 1686771 - RNA, 19 nt, Artificial Sequence
  Description of Artificial Sequence: Synthetic oligonucleotide
  Sense strand starting at position 1304 of SEQ ID NO: 1561635
guuccucaacugugaaaua

SEQ ID NO: 1686772 - RNA, 19 nt, Artificial Sequence
  Description of Artificial Sequence: Synthetic oligonucleotide
  Antisense strand to SEQ ID NO: 1686771
uauuucacaguugaggaac

SEQ ID NO: 1686773 - RNA, 19 nt, Artificial Sequence
  Description of Artificial Sequence: Synthetic oligonucleotide
  Sense strand starting at position 1366 of SEQ ID NO: 1561635
ugucuaugauuauuaucag

SEQ ID NO: 1686774 - RNA, 19 nt, Artificial Sequence
  Description of Artificial Sequence: Synthetic oligonucleotide
  Antisense strand to SEQ ID NO: 1686773
cugauaauaaucauagaca

SEQ ID NO: 1686775 - RNA, 19 nt, Artificial Sequence
  Description of Artificial Sequence: Synthetic oligonucleotide
  Sense strand starting at position 1370 of SEQ ID NO: 1561635
uaugauuauuaucagguga

SEQ ID NO: 1686776 - RNA, 19 nt, Artificial Sequence
  Description of Artificial Sequence: Synthetic oligonucleotide
  Antisense strand to SEQ ID NO: 1686775
ucaccugauaauaaucaua

SEQ ID NO: 1686777 - RNA, 19 nt, Artificial Sequence
  Description of Artificial Sequence: Synthetic oligonucleotide
  Sense strand starting at position 1375 of SEQ ID NO: 1561635
uuauuaucaggugaaguca

SEQ ID NO: 1686778 - RNA, 19 nt, Artificial Sequence
  Description of Artificial Sequence: Synthetic oligonucleotide
  Antisense strand to SEQ ID NO: 1686777
ugacuucaccugauaauaa

SEQ ID NO: 1686779 - RNA, 19 nt, Artificial Sequence
  Description of Artificial Sequence: Synthetic oligonucleotide
  Sense strand starting at position 1491 of SEQ ID NO: 1561635
gcauauguucuggagcauu

SEQ ID NO: 1686780 - RNA, 19 nt, Artificial Sequence
  Description of Artificial Sequence: Synthetic oligonucleotide
  Antisense strand to SEQ ID NO: 1686779
aaugcuccagaacauaugc

SEQ ID NO: 1686781 - RNA, 19 nt, Artificial Sequence
  Description of Artificial Sequence: Synthetic oligonucleotide
  Sense strand starting at position 1510 of SEQ ID NO: 1561635
uccugaaguuuguuacugu

SEQ ID NO: 1686782 - RNA, 19 nt, Artificial Sequence
  Description of Artificial Sequence: Synthetic oligonucleotide
  Antisense strand to SEQ ID NO: 1686781
acaguaacaaacuucagga

SEQ ID NO: 1686783 - RNA, 19 nt, Artificial Sequence
  Description of Artificial Sequence: Synthetic oligonucleotide
  Sense strand starting at position 1513 of SEQ ID NO: 1561635
ugaaguuuguuacuguuga

SEQ ID NO: 1686784 - RNA, 19 nt, Artificial Sequence
  Description of Artificial Sequence: Synthetic oligonucleotide
  Antisense strand to SEQ ID NO: 1686783
ucaacaguaacaaacuuca

SEQ ID NO: 1686785 - RNA, 19 nt, Artificial Sequence
  Description of Artificial Sequence: Synthetic oligonucleotide
  Sense strand starting at position 1626 of SEQ ID NO: 1561635
ugcuaagcugcuuauuaga

SEQ ID NO: 1686786 - RNA, 19 nt, Artificial Sequence
  Description of Artificial Sequence: Synthetic oligonucleotide
  Antisense strand to SEQ ID NO: 1686785
ucuaauaagcagcuuagca

SEQ ID NO: 1686787 - RNA, 19 nt, Artificial Sequence
  Description of Artificial Sequence: Synthetic oligonucleotide
  Sense strand starting at position 1628 of SEQ ID NO: 1561635
cuaagcugcuuauuagacu

SEQ ID NO: 1686788 - RNA, 19 nt, Artificial Sequence
  Description of Artificial Sequence: Synthetic oligonucleotide
  Antisense strand to SEQ ID NO: 1686787
agucuaauaagcagcuuag

SEQ ID NO: 1686789 - RNA, 19 nt, Artificial Sequence
  Description of Artificial Sequence: Synthetic oligonucleotide
  Sense strand starting at position 1635 of SEQ ID NO: 1561635
gcuuauuagacugguggca

SEQ ID NO: 1686790 - RNA, 19 nt, Artificial Sequence
  Description of Artificial Sequence: Synthetic oligonucleotide
  Antisense strand to SEQ ID NO: 1686789
ugccaccagucuaauaagc

SEQ ID NO: 1686791 - RNA, 19 nt, Artificial Sequence
  Description of Artificial Sequence: Synthetic oligonucleotide
  Sense strand starting at position 1702 of SEQ ID NO: 1561635
aggauuauuuccuggaacg

SEQ ID NO: 1686792 - RNA, 19 nt, Artificial Sequence
  Description of Artificial Sequence: Synthetic oligonucleotide
  Antisense strand to SEQ ID NO: 1686791
cguuccaggaaauaauccu

SEQ ID NO: 1686793 - RNA, 19 nt, Artificial Sequence
  Description of Artificial Sequence: Synthetic oligonucleotide
  Sense strand starting at position 1819 of SEQ ID NO: 1561635
cuaggugacuuacccacaa

SEQ ID NO: 1686794 - RNA, 19 nt, Artificial Sequence
  Description of Artificial Sequence: Synthetic oligonucleotide
  Antisense strand to SEQ ID NO: 1686793
uuguggguaagucaccuag

SEQ ID NO: 1686795 - RNA, 19 nt, Artificial Sequence
  Description of Artificial Sequence: Synthetic oligonucleotide
  Sense strand starting at position 2157 of SEQ ID NO: 1561635
gggaauugaugagggaaga

SEQ ID NO: 1686796 - RNA, 19 nt, Artificial Sequence
  Description of Artificial Sequence: Synthetic oligonucleotide
  Antisense strand to SEQ ID NO: 1686795
ucuucccucaucaauuccc

SEQ ID NO: 1686797 - RNA, 19 nt, Artificial Sequence
  Description of Artificial Sequence: Synthetic oligonucleotide
  Sense strand starting at position 2343 of SEQ ID NO: 1561635
ugggcagaguuguugaaag

SEQ ID NO: 1686798 - RNA, 19 nt, Artificial Sequence
  Description of Artificial Sequence: Synthetic oligonucleotide
  Antisense strand to SEQ ID NO: 1686797
cuuucaacaacucugccca

SEQ ID NO: 1686799 - RNA, 19 nt, Artificial Sequence
  Description of Artificial Sequence: Synthetic oligonucleotide
  Sense strand starting at position 2423 of SEQ ID NO: 1561635
aauuaagucucagugagaa

SEQ ID NO: 1686800 - RNA, 19 nt, Artificial Sequence
  Description of Artificial Sequence: Synthetic oligonucleotide
  Antisense strand to SEQ ID NO: 1686799
uucucacugagacuuaauu

SEQ ID NO: 1686801 - RNA, 19 nt, Artificial Sequence
  Description of Artificial Sequence: Synthetic oligonucleotide
  Sense strand starting at position 2427 of SEQ ID NO: 1561635
aagucucagugagaaagau

SEQ ID NO: 1686802 - RNA, 19 nt, Artificial Sequence
  Description of Artificial Sequence: Synthetic oligonucleotide
  Antisense strand to SEQ ID NO: 1686801
aucuuucucacugagacuu

SEQ ID NO: 1686803 - RNA, 19 nt, Artificial Sequence
  Description of Artificial Sequence: Synthetic oligonucleotide
  Sense strand starting at position 2472 of SEQ ID NO: 1561635
agcauauauguuggcucau

SEQ ID NO: 1686804 - RNA, 19 nt, Artificial Sequence
  Description of Artificial Sequence: Synthetic oligonucleotide
  Antisense strand to SEQ ID NO: 1686803
augagccaacauauaugcu

SEQ ID NO: 1686805 - RNA, 19 nt, Artificial Sequence
  Description of Artificial Sequence: Synthetic oligonucleotide
  Sense strand starting at position 2473 of SEQ ID NO: 1561635
gcauauauguuggcucaua

SEQ ID NO: 1686806 - RNA, 19 nt, Artificial Sequence
  Description of Artificial Sequence: Synthetic oligonucleotide
  Antisense strand to SEQ ID NO: 1686805
uaugagccaacauauaugc

SEQ ID NO: 1686807 - RNA, 19 nt, Artificial Sequence
  Description of Artificial Sequence: Synthetic oligonucleotide
  Sense strand starting at position 2481 of SEQ ID NO: 1561635
guuggcucauauccuagau

SEQ ID NO: 1686808 - RNA, 19 nt, Artificial Sequence
  Description of Artificial Sequence: Synthetic oligonucleotide
  Antisense strand to SEQ ID NO: 1686807
aucuaggauaugagccaac

SEQ ID NO: 1686809 - RNA, 19 nt, Artificial Sequence
  Description of Artificial Sequence: Synthetic oligonucleotide
  Sense strand starting at position 2523 of SEQ ID NO: 1561635
gcagguauaguuuguguca

SEQ ID NO: 1686810 - RNA, 19 nt, Artificial Sequence
  Description of Artificial Sequence: Synthetic oligonucleotide
  Antisense strand to SEQ ID NO: 1686809
ugacacaaacuauaccugc

SEQ ID NO: 1686811 - RNA, 19 nt, Artificial Sequence
  Description of Artificial Sequence: Synthetic oligonucleotide
  Sense strand starting at position 2526 of SEQ ID NO: 1561635
gguauaguuugugucagga

SEQ ID NO: 1686812 - RNA, 19 nt, Artificial Sequence
  Description of Artificial Sequence: Synthetic oligonucleotide
  Antisense strand to SEQ ID NO: 1686811
uccugacacaaacuauacc

SEQ ID NO: 1686813 - RNA, 19 nt, Artificial Sequence
  Description of Artificial Sequence: Synthetic oligonucleotide
  Sense strand starting at position 2587 of SEQ ID NO: 1561635
uuuauuugcuagcuggauu

SEQ ID NO: 1686814 - RNA, 19 nt, Artificial Sequence
  Description of Artificial Sequence: Synthetic oligonucleotide
  Antisense strand to SEQ ID NO: 1686813
aauccagcuagcaaauaaa

SEQ ID NO: 1686815 - RNA, 19 nt, Artificial Sequence
  Description of Artificial Sequence: Synthetic oligonucleotide
  Sense strand starting at position 3138 of SEQ ID NO: 1561635
ucuguugucauuguuuguu

SEQ ID NO: 1686816 - RNA, 19 nt, Artificial Sequence
  Description of Artificial Sequence: Synthetic oligonucleotide
  Antisense strand to SEQ ID NO: 1686815
aacaaacaaugacaacaga

SEQ ID NO: 1686817 - RNA, 19 nt, Artificial Sequence
  Description of Artificial Sequence: Synthetic oligonucleotide
  Sense strand starting at position 3432 of SEQ ID NO: 1561635
uguucauuuguguguaugu

SEQ ID NO: 1686818 - RNA, 19 nt, Artificial Sequence
  Description of Artificial Sequence: Synthetic oligonucleotide
  Antisense strand to SEQ ID NO: 1686817
acauacacacaaaugaaca

SEQ ID NO: 1686819 - RNA, 19 nt, Artificial Sequence
  Description of Artificial Sequence: Synthetic oligonucleotide
  Sense strand starting at position 3812 of SEQ ID NO: 1561635
ccauaugaugcuuguccuu

SEQ ID NO: 1686820 - RNA, 19 nt, Artificial Sequence
  Description of Artificial Sequence: Synthetic oligonucleotide
  Antisense strand to SEQ ID NO: 1686819
aaggacaagcaucauaugg

SEQ ID NO: 1686821 - RNA, 19 nt, Artificial Sequence
  Description of Artificial Sequence: Synthetic oligonucleotide
  Sense strand starting at position 3879 of SEQ ID NO: 1561635
aucauuuguuaauggucau

SEQ ID NO: 1686822 - RNA, 19 nt, Artificial Sequence
  Description of Artificial Sequence: Synthetic oligonucleotide
  Antisense strand to SEQ ID NO: 1686821
augaccauuaacaaaugau

SEQ ID NO: 1686823 - RNA, 19 nt, Artificial Sequence
  Description of Artificial Sequence: Synthetic oligonucleotide
  Sense strand starting at position 3885 of SEQ ID NO: 1561635
uguuaauggucaucaaagc

SEQ ID NO: 1686824 - RNA, 19 nt, Artificial Sequence
  Description of Artificial Sequence: Synthetic oligonucleotide
  Antisense strand to SEQ ID NO: 1686823
gcuuugaugaccauuaaca

SEQ ID NO: 1686825 - RNA, 19 nt, Artificial Sequence
  Description of Artificial Sequence: Synthetic oligonucleotide
  Sense strand starting at position 3904 of SEQ ID NO: 1561635
ccaaaugagugacuacagu

SEQ ID NO: 1686826 - RNA, 19 nt, Artificial Sequence
  Description of Artificial Sequence: Synthetic oligonucleotide
  Antisense strand to SEQ ID NO: 1686825
acuguagucacucauuugg

SEQ ID NO: 1686827 - RNA, 19 nt, Artificial Sequence
  Description of Artificial Sequence: Synthetic oligonucleotide
  Sense strand starting at position 3910 of SEQ ID NO: 1561635
gagugacuacaguacuuau

SEQ ID NO: 1686828 - RNA, 19 nt, Artificial Sequence
  Description of Artificial Sequence: Synthetic oligonucleotide
  Antisense strand to SEQ ID NO: 1686827
auaaguacuguagucacuc

SEQ ID NO: 1686829 - RNA, 19 nt, Artificial Sequence
  Description of Artificial Sequence: Synthetic oligonucleotide
  Sense strand starting at position 451 of SEQ ID NO: 1561636
aucuuaguauaaccuguua

SEQ ID NO: 1686830 - RNA, 19 nt, Artificial Sequence
  Description of Artificial Sequence: Synthetic oligonucleotide
  Antisense strand to SEQ ID NO: 1686829
uaacagguuauacuaagau

SEQ ID NO: 1686831 - RNA, 19 nt, Artificial Sequence
  Description of Artificial Sequence: Synthetic oligonucleotide
  Sense strand starting at position 473 of SEQ ID NO: 1561636
cugguaucagcagauaauu

SEQ ID NO: 1686832 - RNA, 19 nt, Artificial Sequence
  Description of Artificial Sequence: Synthetic oligonucleotide
  Antisense strand to SEQ ID NO: 1686831
aauuaucugcugauaccag

SEQ ID NO: 1686833 - RNA, 19 nt, Artificial Sequence
  Description of Artificial Sequence: Synthetic oligonucleotide
  Sense strand starting at position 481 of SEQ ID NO: 1561636
agcagauaauuacccgaau

SEQ ID NO: 1686834 - RNA, 19 nt, Artificial Sequence
  Description of Artificial Sequence: Synthetic oligonucleotide
  Antisense strand to SEQ ID NO: 1686833
auucggguaauuaucugcu

SEQ ID NO: 1686835 - RNA, 19 nt, Artificial Sequence
  Description of Artificial Sequence: Synthetic oligonucleotide
  Sense strand starting at position 482 of SEQ ID NO: 1561636
gcagauaauuacccgaaua

SEQ ID NO: 1686836 - RNA, 19 nt, Artificial Sequence
  Description of Artificial Sequence: Synthetic oligonucleotide
  Antisense strand to SEQ ID NO: 1686835
uauucggguaauuaucugc

SEQ ID NO: 1686837 - RNA, 19 nt, Artificial Sequence
  Description of Artificial Sequence: Synthetic oligonucleotide
  Sense strand starting at position 492 of SEQ ID NO: 1561636
acccgaauaugucucaaag

SEQ ID NO: 1686838 - RNA, 19 nt, Artificial Sequence
  Description of Artificial Sequence: Synthetic oligonucleotide
  Antisense strand to SEQ ID NO: 1686837
cuuugagacauauucgggu

SEQ ID NO: 1686839 - RNA, 19 nt, Artificial Sequence
  Description of Artificial Sequence: Synthetic oligonucleotide
  Sense strand starting at position 514 of SEQ ID NO: 1561636
cugagcuuugugggaguaa

SEQ ID NO: 1686840 - RNA, 19 nt, Artificial Sequence
  Description of Artificial Sequence: Synthetic oligonucleotide
  Antisense strand to SEQ ID NO: 1686839
uuacucccacaaagcucag

SEQ ID NO: 1686841 - RNA, 19 nt, Artificial Sequence
  Description of Artificial Sequence: Synthetic oligonucleotide
  Sense strand starting at position 641 of SEQ ID NO: 1561636
cuugcuaaauccucaguga

SEQ ID NO: 1686842 - RNA, 19 nt, Artificial Sequence
  Description of Artificial Sequence: Synthetic oligonucleotide
  Antisense strand to SEQ ID NO: 1686841
ucacugaggauuuagcaag

SEQ ID NO: 1686843 - RNA, 19 nt, Artificial Sequence
  Description of Artificial Sequence: Synthetic oligonucleotide
  Sense strand starting at position 642 of SEQ ID NO: 1561636
uugcuaaauccucagugaa

SEQ ID NO: 1686844 - RNA, 19 nt, Artificial Sequence
  Description of Artificial Sequence: Synthetic oligonucleotide
  Antisense strand to SEQ ID NO: 1686843
uucacugaggauuuagcaa

SEQ ID NO: 1686845 - RNA, 19 nt, Artificial Sequence
  Description of Artificial Sequence: Synthetic oligonucleotide
  Sense strand starting at position 644 of SEQ ID NO: 1561636
gcuaaauccucagugaaca

SEQ ID NO: 1686846 - RNA, 19 nt, Artificial Sequence
  Description of Artificial Sequence: Synthetic oligonucleotide
  Antisense strand to SEQ ID NO: 1686845
uguucacugaggauuuagc

SEQ ID NO: 1686847 - RNA, 19 nt, Artificial Sequence
  Description of Artificial Sequence: Synthetic oligonucleotide
  Sense strand starting at position 662 of SEQ ID NO: 1561636
aacgucucccaacagagau

SEQ ID NO: 1686848 - RNA, 19 nt, Artificial Sequence
  Description of Artificial Sequence: Synthetic oligonucleotide
  Antisense strand to SEQ ID NO: 1686847
aucucuguugggagacguu

SEQ ID NO: 1686849 - RNA, 19 nt, Artificial Sequence
  Description of Artificial Sequence: Synthetic oligonucleotide
  Sense strand starting at position 674 of SEQ ID NO: 1561636
cagagauacuuugucuuug

SEQ ID NO: 1686850 - RNA, 19 nt, Artificial Sequence
  Description of Artificial Sequence: Synthetic oligonucleotide
  Antisense strand to SEQ ID NO: 1686849
caaagacaaaguaucucug

SEQ ID NO: 1686851 - RNA, 19 nt, Artificial Sequence
  Description of Artificial Sequence: Synthetic oligonucleotide
  Sense strand starting at position 675 of SEQ ID NO: 1561636
agagauacuuugucuuugu

SEQ ID NO: 1686852 - RNA, 19 nt, Artificial Sequence
  Description of Artificial Sequence: Synthetic oligonucleotide
  Antisense strand to SEQ ID NO: 1686851
acaaagacaaaguaucucu

SEQ ID NO: 1686853 - RNA, 19 nt, Artificial Sequence
  Description of Artificial Sequence: Synthetic oligonucleotide
  Sense strand starting at position 676 of SEQ ID NO: 1561636
gagauacuuugucuuuguc

SEQ ID NO: 1686854 - RNA, 19 nt, Artificial Sequence
  Description of Artificial Sequence: Synthetic oligonucleotide
  Antisense strand to SEQ ID NO: 1686853
gacaaagacaaaguaucuc

SEQ ID NO: 1686855 - RNA, 19 nt, Artificial Sequence
  Description of Artificial Sequence: Synthetic oligonucleotide
  Sense strand starting at position 683 of SEQ ID NO: 1561636
uuugucuuuguccaacaua

SEQ ID NO: 1686856 - RNA, 19 nt, Artificial Sequence
  Description of Artificial Sequence: Synthetic oligonucleotide
  Antisense strand to SEQ ID NO: 1686855
uauguuggacaaagacaaa

SEQ ID NO: 1686857 - RNA, 19 nt, Artificial Sequence
  Description of Artificial Sequence: Synthetic oligonucleotide
  Sense strand starting at position 686 of SEQ ID NO: 1561636
gucuuuguccaacauacau

SEQ ID NO: 1686858 - RNA, 19 nt, Artificial Sequence
  Description of Artificial Sequence: Synthetic oligonucleotide
  Antisense strand to SEQ ID NO: 1686857
auguauguuggacaaagac

SEQ ID NO: 1686859 - RNA, 19 nt, Artificial Sequence
  Description of Artificial Sequence: Synthetic oligonucleotide
  Sense strand starting at position 813 of SEQ ID NO: 1561636
guuugaaucaccugggaag

SEQ ID NO: 1686860 - RNA, 19 nt, Artificial Sequence
  Description of Artificial Sequence: Synthetic oligonucleotide
  Antisense strand to SEQ ID NO: 1686859
cuucccaggugauucaaac

SEQ ID NO: 1686861 - RNA, 19 nt, Artificial Sequence
  Description of Artificial Sequence: Synthetic oligonucleotide
  Sense strand starting at position 970 of SEQ ID NO: 1561636
ggguucaagcugggaguaa

SEQ ID NO: 1686862 - RNA, 19 nt, Artificial Sequence
  Description of Artificial Sequence: Synthetic oligonucleotide
  Antisense strand to SEQ ID NO: 1686861
uuacucccagcuugaaccc

SEQ ID NO: 1686863 - RNA, 19 nt, Artificial Sequence
  Description of Artificial Sequence: Synthetic oligonucleotide
  Sense strand starting at position 1010 of SEQ ID NO: 1561636
ccugguuuagauugggaaa

SEQ ID NO: 1686864 - RNA, 19 nt, Artificial Sequence
  Description of Artificial Sequence: Synthetic oligonucleotide
  Antisense strand to SEQ ID NO: 1686863
uuucccaaucuaaaccagg

SEQ ID NO: 1686865 - RNA, 19 nt, Artificial Sequence
  Description of Artificial Sequence: Synthetic oligonucleotide
  Sense strand starting at position 1011 of SEQ ID NO: 1561636
cugguuuagauugggaaag

SEQ ID NO: 1686866 - RNA, 19 nt, Artificial Sequence
  Description of Artificial Sequence: Synthetic oligonucleotide
  Antisense strand to SEQ ID NO: 1686865
cuuucccaaucuaaaccag

SEQ ID NO: 1686867 - RNA, 19 nt, Artificial Sequence
  Description of Artificial Sequence: Synthetic oligonucleotide
  Sense strand starting at position 1377 of SEQ ID NO: 1561636
cccguucuuaaaggaagau

SEQ ID NO: 1686868 - RNA, 19 nt, Artificial Sequence
  Description of Artificial Sequence: Synthetic oligonucleotide
  Antisense strand to SEQ ID NO: 1686867
aucuuccuuuaagaacggg

SEQ ID NO: 1686869 - RNA, 19 nt, Artificial Sequence
  Description of Artificial Sequence: Synthetic oligonucleotide
  Sense strand starting at position 2451 of SEQ ID NO: 1561636
gugcuucuccucgccuaaa

SEQ ID NO: 1686870 - RNA, 19 nt, Artificial Sequence
  Description of Artificial Sequence: Synthetic oligonucleotide
  Antisense strand to SEQ ID NO: 1686869
uuuaggcgaggagaagcac

SEQ ID NO: 1686871 - RNA, 19 nt, Artificial Sequence
  Description of Artificial Sequence: Synthetic oligonucleotide
  Sense strand starting at position 2464 of SEQ ID NO: 1561636
ccuaaacgguucuuaccua

SEQ ID NO: 1686872 - RNA, 19 nt, Artificial Sequence
  Description of Artificial Sequence: Synthetic oligonucleotide
  Antisense strand to SEQ ID NO: 1686871
uagguaagaaccguuuagg

SEQ ID NO: 1686873 - RNA, 19 nt, Artificial Sequence
  Description of Artificial Sequence: Synthetic oligonucleotide
  Sense strand starting at position 2519 of SEQ ID NO: 1561636
uuuggucaccucuaaauga

SEQ ID NO: 1686874 - RNA, 19 nt, Artificial Sequence
  Description of Artificial Sequence: Synthetic oligonucleotide
  Antisense strand to SEQ ID NO: 1686873
ucauuuagaggugaccaaa

SEQ ID NO: 1686875 - RNA, 19 nt, Artificial Sequence
  Description of Artificial Sequence: Synthetic oligonucleotide
  Sense strand starting at position 2672 of SEQ ID NO: 1561636
gcagccuagagcguucuua

SEQ ID NO: 1686876 - RNA, 19 nt, Artificial Sequence
  Description of Artificial Sequence: Synthetic oligonucleotide
  Antisense strand to SEQ ID NO: 1686875
uaagaacgcucuaggcugc

SEQ ID NO: 1686877 - RNA, 19 nt, Artificial Sequence
  Description of Artificial Sequence: Synthetic oligonucleotide
  Sense strand starting at position 2676 of SEQ ID NO: 1561636
ccuagagcguucuuaggaa

SEQ ID NO: 1686878 - RNA, 19 nt, Artificial Sequence
  Description of Artificial Sequence: Synthetic oligonucleotide
  Antisense strand to SEQ ID NO: 1686877
uuccuaagaacgcucuagg

SEQ ID NO: 1686879 - RNA, 19 nt, Artificial Sequence
  Description of Artificial Sequence: Synthetic oligonucleotide
  Sense strand starting at position 2703 of SEQ ID NO: 1561636
uauguugacgggucgugua

SEQ ID NO: 1686880 - RNA, 19 nt, Artificial Sequence
  Description of Artificial Sequence: Synthetic oligonucleotide
  Antisense strand to SEQ ID NO: 1686879
uacacgacccgucaacaua

SEQ ID NO: 1686881 - RNA, 19 nt, Artificial Sequence
  Description of Artificial Sequence: Synthetic oligonucleotide
  Sense strand starting at position 2708 of SEQ ID NO: 1561636
ugacgggucguguaaagaa

SEQ ID NO: 1686882 - RNA, 19 nt, Artificial Sequence
  Description of Artificial Sequence: Synthetic oligonucleotide
  Antisense strand to SEQ ID NO: 1686881
uucuuuacacgacccguca

SEQ ID NO: 1686883 - RNA, 19 nt, Artificial Sequence
  Description of Artificial Sequence: Synthetic oligonucleotide
  Sense strand starting at position 2738 of SEQ ID NO: 1561636
gggccauacugaccagaau

SEQ ID NO: 1686884 - RNA, 19 nt, Artificial Sequence
  Description of Artificial Sequence: Synthetic oligonucleotide
  Antisense strand to SEQ ID NO: 1686883
auucuggucaguauggccc

SEQ ID NO: 1686885 - RNA, 19 nt, Artificial Sequence
  Description of Artificial Sequence: Synthetic oligonucleotide
  Sense strand starting at position 2825 of SEQ ID NO: 1561636
acuggaaucuuggcugagu

SEQ ID NO: 1686886 - RNA, 19 nt, Artificial Sequence
  Description of Artificial Sequence: Synthetic oligonucleotide
  Antisense strand to SEQ ID NO: 1686885
acucagccaagauuccagu

SEQ ID NO: 1686887 - RNA, 19 nt, Artificial Sequence
  Description of Artificial Sequence: Synthetic oligonucleotide
  Sense strand starting at position 2827 of SEQ ID NO: 1561636
uggaaucuuggcugaguca

SEQ ID NO: 1686888 - RNA, 19 nt, Artificial Sequence
  Description of Artificial Sequence: Synthetic oligonucleotide
  Antisense strand to SEQ ID NO: 1686887
ugacucagccaagauucca

SEQ ID NO: 1686889 - RNA, 19 nt, Artificial Sequence
  Description of Artificial Sequence: Synthetic oligonucleotide
  Sense strand starting at position 2889 of SEQ ID NO: 1561636
aucugcauuugucuuguau

SEQ ID NO: 1686890 - RNA, 19 nt, Artificial Sequence
  Description of Artificial Sequence: Synthetic oligonucleotide
  Antisense strand to SEQ ID NO: 1686889
auacaagacaaaugcagau

SEQ ID NO: 1686891 - RNA, 19 nt, Artificial Sequence
  Description of Artificial Sequence: Synthetic oligonucleotide
  Sense strand starting at position 2984 of SEQ ID NO: 1561636
auuaucagguccguaugau

SEQ ID NO: 1686892 - RNA, 19 nt, Artificial Sequence
  Description of Artificial Sequence: Synthetic oligonucleotide
  Antisense strand to SEQ ID NO: 1686891
aucauacggaccugauaau

SEQ ID NO: 1686893 - RNA, 19 nt, Artificial Sequence
  Description of Artificial Sequence: Synthetic oligonucleotide
  Sense strand starting at position 2985 of SEQ ID NO: 1561636
uuaucagguccguaugaua

SEQ ID NO: 1686894 - RNA, 19 nt, Artificial Sequence
  Description of Artificial Sequence: Synthetic oligonucleotide
  Antisense strand to SEQ ID NO: 1686893
uaucauacggaccugauaa

SEQ ID NO: 1686895 - RNA, 19 nt, Artificial Sequence
  Description of Artificial Sequence: Synthetic oligonucleotide
  Sense strand starting at position 3158 of SEQ ID NO: 1561636
ucagucguuguccagaaac

SEQ ID NO: 1686896 - RNA, 19 nt, Artificial Sequence
  Description of Artificial Sequence: Synthetic oligonucleotide
  Antisense strand to SEQ ID NO: 1686895
guuucuggacaacgacuga

SEQ ID NO: 1686897 - RNA, 19 nt, Artificial Sequence
  Description of Artificial Sequence: Synthetic oligonucleotide
  Sense strand starting at position 3160 of SEQ ID NO: 1561636
agucguuguccagaaacau

SEQ ID NO: 1686898 - RNA, 19 nt, Artificial Sequence
  Description of Artificial Sequence: Synthetic oligonucleotide
  Antisense strand to SEQ ID NO: 1686897
auguuucuggacaacgacu

SEQ ID NO: 1686899 - RNA, 19 nt, Artificial Sequence
  Description of Artificial Sequence: Synthetic oligonucleotide
  Sense strand starting at position 3232 of SEQ ID NO: 1561636
caggaucaguggccacauu

SEQ ID NO: 1686900 - RNA, 19 nt, Artificial Sequence
  Description of Artificial Sequence: Synthetic oligonucleotide
  Antisense strand to SEQ ID NO: 1686899
aauguggccacugauccug

SEQ ID NO: 1686901 - RNA, 19 nt, Artificial Sequence
  Description of Artificial Sequence: Synthetic oligonucleotide
  Sense strand starting at position 3382 of SEQ ID NO: 1561636
uucuaauacuggucacaga

SEQ ID NO: 1686902 - RNA, 19 nt, Artificial Sequence
  Description of Artificial Sequence: Synthetic oligonucleotide
  Antisense strand to SEQ ID NO: 1686901
ucugugaccaguauuagaa

SEQ ID NO: 1686903 - RNA, 19 nt, Artificial Sequence
  Description of Artificial Sequence: Synthetic oligonucleotide
  Sense strand starting at position 3480 of SEQ ID NO: 1561636
cuagcuuuacccugagaga

SEQ ID NO: 1686904 - RNA, 19 nt, Artificial Sequence
  Description of Artificial Sequence: Synthetic oligonucleotide
  Antisense strand to SEQ ID NO: 1686903
ucucucaggguaaagcuag

SEQ ID NO: 1686905 - RNA, 19 nt, Artificial Sequence
  Description of Artificial Sequence: Synthetic oligonucleotide
  Sense strand starting at position 3571 of SEQ ID NO: 1561636
ucaaucuacggcugauaca

SEQ ID NO: 1686906 - RNA, 19 nt, Artificial Sequence
  Description of Artificial Sequence: Synthetic oligonucleotide
  Antisense strand to SEQ ID NO: 1686905
uguaucagccguagauuga

SEQ ID NO: 1686907 - RNA, 19 nt, Artificial Sequence
  Description of Artificial Sequence: Synthetic oligonucleotide
  Sense strand starting at position 3692 of SEQ ID NO: 1561636
gguacugugguagacagaa

SEQ ID NO: 1686908 - RNA, 19 nt, Artificial Sequence
  Description of Artificial Sequence: Synthetic oligonucleotide
  Antisense strand to SEQ ID NO: 1686907
uucugucuaccacaguacc

SEQ ID NO: 1686909 - RNA, 19 nt, Artificial Sequence
  Description of Artificial Sequence: Synthetic oligonucleotide
  Sense strand starting at position 35 of SEQ ID NO: 1561637
ugcacagaucugggaguau

SEQ ID NO: 1686910 - RNA, 19 nt, Artificial Sequence
  Description of Artificial Sequence: Synthetic oligonucleotide
  Antisense strand to SEQ ID NO: 1686909
auacucccagaucugugca

SEQ ID NO: 1686911 - RNA, 19 nt, Artificial Sequence
  Description of Artificial Sequence: Synthetic oligonucleotide
  Sense strand starting at position 46 of SEQ ID NO: 1561637
gggaguaucggauguagcu

SEQ ID NO: 1686912 - RNA, 19 nt, Artificial Sequence
  Description of Artificial Sequence: Synthetic oligonucleotide
  Antisense strand to SEQ ID NO: 1686911
agcuacauccgauacuccc

SEQ ID NO: 1686913 - RNA, 19 nt, Artificial Sequence
  Description of Artificial Sequence: Synthetic oligonucleotide
  Sense strand starting at position 163 of SEQ ID NO: 1561637
uugguuguaccuuauugua

SEQ ID NO: 1686914 - RNA, 19 nt, Artificial Sequence
  Description of Artificial Sequence: Synthetic oligonucleotide
  Antisense strand to SEQ ID NO: 1686913
uacaauaagguacaaccaa

SEQ ID NO: 1686915 - RNA, 19 nt, Artificial Sequence
  Description of Artificial Sequence: Synthetic oligonucleotide
  Sense strand starting at position 165 of SEQ ID NO: 1561637
gguuguaccuuauuguaga

SEQ ID NO: 1686916 - RNA, 19 nt, Artificial Sequence
  Description of Artificial Sequence: Synthetic oligonucleotide
  Antisense strand to SEQ ID NO: 1686915
ucuacaauaagguacaacc

SEQ ID NO: 1686917 - RNA, 19 nt, Artificial Sequence
  Description of Artificial Sequence: Synthetic oligonucleotide
  Sense strand starting at position 266 of SEQ ID NO: 1561637
ugguguuuggauggaugau

SEQ ID NO: 1686918 - RNA, 19 nt, Artificial Sequence
  Description of Artificial Sequence: Synthetic oligonucleotide
  Antisense strand to SEQ ID NO: 1686917
aucauccauccaaacacca

SEQ ID NO: 1686919 - RNA, 19 nt, Artificial Sequence
  Description of Artificial Sequence: Synthetic oligonucleotide
  Sense strand starting at position 267 of SEQ ID NO: 1561637
gguguuuggauggaugauc

SEQ ID NO: 1686920 - RNA, 19 nt, Artificial Sequence
  Description of Artificial Sequence: Synthetic oligonucleotide
  Antisense strand to SEQ ID NO: 1686919
gaucauccauccaaacacc

SEQ ID NO: 1686921 - RNA, 19 nt, Artificial Sequence
  Description of Artificial Sequence: Synthetic oligonucleotide
  Sense strand starting at position 798 of SEQ ID NO: 1561637
gacucagagguaugaguuc

SEQ ID NO: 1686922 - RNA, 19 nt, Artificial Sequence
  Description of Artificial Sequence: Synthetic oligonucleotide
  Antisense strand to SEQ ID NO: 1686921
gaacucauaccucugaguc

SEQ ID NO: 1686923 - RNA, 19 nt, Artificial Sequence
  Description of Artificial Sequence: Synthetic oligonucleotide
  Sense strand starting at position 981 of SEQ ID NO: 1561637
caggguagguugccuaaua

SEQ ID NO: 1686924 - RNA, 19 nt, Artificial Sequence
  Description of Artificial Sequence: Synthetic oligonucleotide
  Antisense strand to SEQ ID NO: 1686923
uauuaggcaaccuacccug

SEQ ID NO: 1686925 - RNA, 19 nt, Artificial Sequence
  Description of Artificial Sequence: Synthetic oligonucleotide
  Sense strand starting at position 982 of SEQ ID NO: 1561637
aggguagguugccuaauaa

SEQ ID NO: 1686926 - RNA, 19 nt, Artificial Sequence
  Description of Artificial Sequence: Synthetic oligonucleotide
  Antisense strand to SEQ ID NO: 1686925
uuauuaggcaaccuacccu

SEQ ID NO: 1686927 - RNA, 19 nt, Artificial Sequence
  Description of Artificial Sequence: Synthetic oligonucleotide
  Sense strand starting at position 1141 of SEQ ID NO: 1561637
aggugugucaccuagagca

SEQ ID NO: 1686928 - RNA, 19 nt, Artificial Sequence
  Description of Artificial Sequence: Synthetic oligonucleotide
  Antisense strand to SEQ ID NO: 1686927
ugcucuaggugacacaccu

SEQ ID NO: 1686929 - RNA, 19 nt, Artificial Sequence
  Description of Artificial Sequence: Synthetic oligonucleotide
  Sense strand starting at position 1160 of SEQ ID NO: 1561637
agguacuucugcucacuca

SEQ ID NO: 1686930 - RNA, 19 nt, Artificial Sequence
  Description of Artificial Sequence: Synthetic oligonucleotide
  Antisense strand to SEQ ID NO: 1686929
ugagugagcagaaguaccu

SEQ ID NO: 1686931 - RNA, 19 nt, Artificial Sequence
  Description of Artificial Sequence: Synthetic oligonucleotide
  Sense strand starting at position 1203 of SEQ ID NO: 1561637
augugacagcuagaccaau

SEQ ID NO: 1686932 - RNA, 19 nt, Artificial Sequence
  Description of Artificial Sequence: Synthetic oligonucleotide
  Antisense strand to SEQ ID NO: 1686931
auuggucuagcugucacau

SEQ ID NO: 1686933 - RNA, 19 nt, Artificial Sequence
  Description of Artificial Sequence: Synthetic oligonucleotide
  Sense strand starting at position 1227 of SEQ ID NO: 1561637
gcgguuccacuaugagaca

SEQ ID NO: 1686934 - RNA, 19 nt, Artificial Sequence
  Description of Artificial Sequence: Synthetic oligonucleotide
  Antisense strand to SEQ ID NO: 1686933
ugucucauaguggaaccgc

SEQ ID NO: 1686935 - RNA, 19 nt, Artificial Sequence
  Description of Artificial Sequence: Synthetic oligonucleotide
  Sense strand starting at position 1271 of SEQ ID NO: 1561637
uugagcuuuccaggagcca

SEQ ID NO: 1686936 - RNA, 19 nt, Artificial Sequence
  Description of Artificial Sequence: Synthetic oligonucleotide
  Antisense strand to SEQ ID NO: 1686935
uggcuccuggaaagcucaa

SEQ ID NO: 1686937 - RNA, 19 nt, Artificial Sequence
  Description of Artificial Sequence: Synthetic oligonucleotide
  Sense strand starting at position 1412 of SEQ ID NO: 1561637
caccucgaugcuggauuaa

SEQ ID NO: 1686938 - RNA, 19 nt, Artificial Sequence
  Description of Artificial Sequence: Synthetic oligonucleotide
  Antisense strand to SEQ ID NO: 1686937
uuaauccagcaucgaggug

SEQ ID NO: 1686939 - RNA, 19 nt, Artificial Sequence
  Description of Artificial Sequence: Synthetic oligonucleotide
  Sense strand starting at position 1450 of SEQ ID NO: 1561637
cggucacguggagagaaau

SEQ ID NO: 1686940 - RNA, 19 nt, Artificial Sequence
  Description of Artificial Sequence: Synthetic oligonucleotide
  Antisense strand to SEQ ID NO: 1686939
auuucucuccacgugaccg

SEQ ID NO: 1686941 - RNA, 19 nt, Artificial Sequence
  Description of Artificial Sequence: Synthetic oligonucleotide
  Sense strand starting at position 1464 of SEQ ID NO: 1561637
gaaaucuccuguuucccga

SEQ ID NO: 1686942 - RNA, 19 nt, Artificial Sequence
  Description of Artificial Sequence: Synthetic oligonucleotide
  Antisense strand to SEQ ID NO: 1686941
ucgggaaacaggagauuuc

SEQ ID NO: 1686943 - RNA, 19 nt, Artificial Sequence
  Description of Artificial Sequence: Synthetic oligonucleotide
  Sense strand starting at position 1483 of SEQ ID NO: 1561637
gguggaugugacuguacua

SEQ ID NO: 1686944 - RNA, 19 nt, Artificial Sequence
  Description of Artificial Sequence: Synthetic oligonucleotide
  Antisense strand to SEQ ID NO: 1686943
uaguacagucacauccacc

SEQ ID NO: 1686945 - RNA, 19 nt, Artificial Sequence
  Description of Artificial Sequence: Synthetic oligonucleotide
  Sense strand starting at position 2390 of SEQ ID NO: 1561637
uguccugagagcugagauu

SEQ ID NO: 1686946 - RNA, 19 nt, Artificial Sequence
  Description of Artificial Sequence: Synthetic oligonucleotide
  Antisense strand to SEQ ID NO: 1686945
aaucucagcucucaggaca

SEQ ID NO: 1686947 - RNA, 19 nt, Artificial Sequence
  Description of Artificial Sequence: Synthetic oligonucleotide
  Sense strand starting at position 2431 of SEQ ID NO: 1561637
ccuuucucggagugacacu

SEQ ID NO: 1686948 - RNA, 19 nt, Artificial Sequence
  Description of Artificial Sequence: Synthetic oligonucleotide
  Antisense strand to SEQ ID NO: 1686947
agugucacuccgagaaagg

SEQ ID NO: 1686949 - RNA, 19 nt, Artificial Sequence
  Description of Artificial Sequence: Synthetic oligonucleotide
  Sense strand starting at position 2547 of SEQ ID NO: 1561637
cacuguugcccggaaugga

SEQ ID NO: 1686950 - RNA, 19 nt, Artificial Sequence
  Description of Artificial Sequence: Synthetic oligonucleotide
  Antisense strand to SEQ ID NO: 1686949
uccauuccgggcaacagug

SEQ ID NO: 1686951 - RNA, 19 nt, Artificial Sequence
  Description of Artificial Sequence: Synthetic oligonucleotide
  Sense strand starting at position 2557 of SEQ ID NO: 1561637
cggaauggaugggaagaaa

SEQ ID NO: 1686952 - RNA, 19 nt, Artificial Sequence
  Description of Artificial Sequence: Synthetic oligonucleotide
  Antisense strand to SEQ ID NO: 1686951
uuucuucccauccauuccg

SEQ ID NO: 1686953 - RNA, 19 nt, Artificial Sequence
  Description of Artificial Sequence: Synthetic oligonucleotide
  Sense strand starting at position 2633 of SEQ ID NO: 1561637
caucucagagccugugauu

SEQ ID NO: 1686954 - RNA, 19 nt, Artificial Sequence
  Description of Artificial Sequence: Synthetic oligonucleotide
  Antisense strand to SEQ ID NO: 1686953
aaucacaggcucugagaug

SEQ ID NO: 1686955 - RNA, 19 nt, Artificial Sequence
  Description of Artificial Sequence: Synthetic oligonucleotide
  Sense strand starting at position 2642 of SEQ ID NO: 1561637
gccugugauuuagagaaac

SEQ ID NO: 1686956 - RNA, 19 nt, Artificial Sequence
  Description of Artificial Sequence: Synthetic oligonucleotide
  Antisense strand to SEQ ID NO: 1686955
guuucucuaaaucacaggc

SEQ ID NO: 1686957 - RNA, 19 nt, Artificial Sequence
  Description of Artificial Sequence: Synthetic oligonucleotide
  Sense strand starting at position 2679 of SEQ ID NO: 1561637
gcucacagucuaggaauua

SEQ ID NO: 1686958 - RNA, 19 nt, Artificial Sequence
  Description of Artificial Sequence: Synthetic oligonucleotide
  Antisense strand to SEQ ID NO: 1686957
uaauuccuagacugugagc

SEQ ID NO: 1686959 - RNA, 19 nt, Artificial Sequence
  Description of Artificial Sequence: Synthetic oligonucleotide
  Sense strand starting at position 2694 of SEQ ID NO: 1561637
auuaaaguguuucucucau

SEQ ID NO: 1686960 - RNA, 19 nt, Artificial Sequence
  Description of Artificial Sequence: Synthetic oligonucleotide
  Antisense strand to SEQ ID NO: 1686959
augagagaaacacuuuaau

SEQ ID NO: 1686961 - RNA, 19 nt, Artificial Sequence
  Description of Artificial Sequence: Synthetic oligonucleotide
  Sense strand starting at position 2873 of SEQ ID NO: 1561637
ccaguuuaguucucuuaaa

SEQ ID NO: 1686962 - RNA, 19 nt, Artificial Sequence
  Description of Artificial Sequence: Synthetic oligonucleotide
  Antisense strand to SEQ ID NO: 1686961
uuuaagagaacuaaacugg

SEQ ID NO: 1686963 - RNA, 19 nt, Artificial Sequence
  Description of Artificial Sequence: Synthetic oligonucleotide
  Sense strand starting at position 2897 of SEQ ID NO: 1561637
uugcuuguugugcauuuau

SEQ ID NO: 1686964 - RNA, 19 nt, Artificial Sequence
  Description of Artificial Sequence: Synthetic oligonucleotide
  Antisense strand to SEQ ID NO: 1686963
auaaaugcacaacaagcaa

SEQ ID NO: 1686965 - RNA, 19 nt, Artificial Sequence
  Description of Artificial Sequence: Synthetic oligonucleotide
  Sense strand starting at position 3256 of SEQ ID NO: 1561637
guguuauacuauuucugug

SEQ ID NO: 1686966 - RNA, 19 nt, Artificial Sequence
  Description of Artificial Sequence: Synthetic oligonucleotide
  Antisense strand to SEQ ID NO: 1686965
cacagaaauaguauaacac

SEQ ID NO: 1686967 - RNA, 19 nt, Artificial Sequence
  Description of Artificial Sequence: Synthetic oligonucleotide
  Sense strand starting at position 3264 of SEQ ID NO: 1561637
cuauuucugugguuuaugu

SEQ ID NO: 1686968 - RNA, 19 nt, Artificial Sequence
  Description of Artificial Sequence: Synthetic oligonucleotide
  Antisense strand to SEQ ID NO: 1686967
acauaaaccacagaaauag

SEQ ID NO: 1686969 - RNA, 19 nt, Artificial Sequence
  Description of Artificial Sequence: Synthetic oligonucleotide
  Sense strand starting at position 3272 of SEQ ID NO: 1561637
gugguuuauguacauauau

SEQ ID NO: 1686970 - RNA, 19 nt, Artificial Sequence
  Description of Artificial Sequence: Synthetic oligonucleotide
  Antisense strand to SEQ ID NO: 1686969
auauauguacauaaaccac

SEQ ID NO: 1686971 - RNA, 19 nt, Artificial Sequence
  Description of Artificial Sequence: Synthetic oligonucleotide
  Sense strand starting at position 3289 of SEQ ID NO: 1561637
auuaacuggucucuuggau

SEQ ID NO: 1686972 - RNA, 19 nt, Artificial Sequence
  Description of Artificial Sequence: Synthetic oligonucleotide
  Antisense strand to SEQ ID NO: 1686971
auccaagagaccaguuaau

SEQ ID NO: 1686973 - RNA, 19 nt, Artificial Sequence
  Description of Artificial Sequence: Synthetic oligonucleotide
  Sense strand starting at position 3297 of SEQ ID NO: 1561637
gucucuuggauaggaaaca

SEQ ID NO: 1686974 - RNA, 19 nt, Artificial Sequence
  Description of Artificial Sequence: Synthetic oligonucleotide
  Antisense strand to SEQ ID NO: 1686973
uguuuccuauccaagagac

SEQ ID NO: 1686975 - RNA, 19 nt, Artificial Sequence
  Description of Artificial Sequence: Synthetic oligonucleotide
  Sense strand starting at position 3407 of SEQ ID NO: 1561637
ugucaaagcuauuauuuag

SEQ ID NO: 1686976 - RNA, 19 nt, Artificial Sequence
  Description of Artificial Sequence: Synthetic oligonucleotide
  Antisense strand to SEQ ID NO: 1686975
cuaaauaauagcuuugaca

SEQ ID NO: 1686977 - RNA, 19 nt, Artificial Sequence
  Description of Artificial Sequence: Synthetic oligonucleotide
  Sense strand starting at position 3514 of SEQ ID NO: 1561637
aggaauucccguuaaguaa

SEQ ID NO: 1686978 - RNA, 19 nt, Artificial Sequence
  Description of Artificial Sequence: Synthetic oligonucleotide
  Antisense strand to SEQ ID NO: 1686977
uuacuuaacgggaauuccu

SEQ ID NO: 1686979 - RNA, 19 nt, Artificial Sequence
  Description of Artificial Sequence: Synthetic oligonucleotide
  Sense strand starting at position 3648 of SEQ ID NO: 1561637
cuaaguaccugggauuuau

SEQ ID NO: 1686980 - RNA, 19 nt, Artificial Sequence
  Description of Artificial Sequence: Synthetic oligonucleotide
  Antisense strand to SEQ ID NO: 1686979
auaaaucccagguacuuag

SEQ ID NO: 1686981 - RNA, 19 nt, Artificial Sequence
  Description of Artificial Sequence: Synthetic oligonucleotide
  Sense strand starting at position 3661 of SEQ ID NO: 1561637
auuuaugccucagagcaag

SEQ ID NO: 1686982 - RNA, 19 nt, Artificial Sequence
  Description of Artificial Sequence: Synthetic oligonucleotide
  Antisense strand to SEQ ID NO: 1686981
cuugcucugaggcauaaau

SEQ ID NO: 1686983 - RNA, 19 nt, Artificial Sequence
  Description of Artificial Sequence: Synthetic oligonucleotide
  Sense strand starting at position 3872 of SEQ ID NO: 1561637
gcuguucuucuguuuaagu

SEQ ID NO: 1686984 - RNA, 19 nt, Artificial Sequence
  Description of Artificial Sequence: Synthetic oligonucleotide
  Antisense strand to SEQ ID NO: 1686983
acuuaaacagaagaacagc

SEQ ID NO: 1686985 - RNA, 19 nt, Artificial Sequence
  Description of Artificial Sequence: Synthetic oligonucleotide
  Sense strand starting at position 3874 of SEQ ID NO: 1561637
uguucuucuguuuaaguua

SEQ ID NO: 1686986 - RNA, 19 nt, Artificial Sequence
  Description of Artificial Sequence: Synthetic oligonucleotide
  Antisense strand to SEQ ID NO: 1686985
uaacuuaaacagaagaaca

SEQ ID NO: 1686987 - RNA, 19 nt, Artificial Sequence
  Description of Artificial Sequence: Synthetic oligonucleotide
  Sense strand starting at position 3974 of SEQ ID NO: 1561637
guacaaauccaaggaaguu

SEQ ID NO: 1686988 - RNA, 19 nt, Artificial Sequence
  Description of Artificial Sequence: Synthetic oligonucleotide
  Antisense strand to SEQ ID NO: 1686987
aacuuccuuggauuuguac

SEQ ID NO: 1686989 - RNA, 19 nt, Artificial Sequence
  Description of Artificial Sequence: Synthetic oligonucleotide
  Sense strand starting at position 3 of SEQ ID NO: 1561638
uugcucauggcacaaauua

SEQ ID NO: 1686990 - RNA, 19 nt, Artificial Sequence
  Description of Artificial Sequence: Synthetic oligonucleotide
  Antisense strand to SEQ ID NO: 1686989
uaauuugugccaugagcaa

SEQ ID NO: 1686991 - RNA, 19 nt, Artificial Sequence
  Description of Artificial Sequence: Synthetic oligonucleotide
  Sense strand starting at position 64 of SEQ ID NO: 1561638
cacaguauuuacggaggau

SEQ ID NO: 1686992 - RNA, 19 nt, Artificial Sequence
  Description of Artificial Sequence: Synthetic oligonucleotide
  Antisense strand to SEQ ID NO: 1686991
auccuccguaaauacugug

SEQ ID NO: 1686993 - RNA, 19 nt, Artificial Sequence
  Description of Artificial Sequence: Synthetic oligonucleotide
  Sense strand starting at position 118 of SEQ ID NO: 1561638
ucaagucaauugucaucau

SEQ ID NO: 1686994 - RNA, 19 nt, Artificial Sequence
  Description of Artificial Sequence: Synthetic oligonucleotide
  Antisense strand to SEQ ID NO: 1686993
augaugacaauugacuuga

SEQ ID NO: 1686995 - RNA, 19 nt, Artificial Sequence
  Description of Artificial Sequence: Synthetic oligonucleotide
  Sense strand starting at position 121 of SEQ ID NO: 1561638
agucaauugucaucauuaa

SEQ ID NO: 1686996 - RNA, 19 nt, Artificial Sequence
  Description of Artificial Sequence: Synthetic oligonucleotide
  Antisense strand to SEQ ID NO: 1686995
uuaaugaugacaauugacu

SEQ ID NO: 1686997 - RNA, 19 nt, Artificial Sequence
  Description of Artificial Sequence: Synthetic oligonucleotide
  Sense strand starting at position 122 of SEQ ID NO: 1561638
gucaauugucaucauuaaa

SEQ ID NO: 1686998 - RNA, 19 nt, Artificial Sequence
  Description of Artificial Sequence: Synthetic oligonucleotide
  Antisense strand to SEQ ID NO: 1686997
uuuaaugaugacaauugac

SEQ ID NO: 1686999 - RNA, 19 nt, Artificial Sequence
  Description of Artificial Sequence: Synthetic oligonucleotide
  Sense strand starting at position 484 of SEQ ID NO: 1561638
gggaacuaucuuuggguca

SEQ ID NO: 1687000 - RNA, 19 nt, Artificial Sequence
  Description of Artificial Sequence: Synthetic oligonucleotide
  Antisense strand to SEQ ID NO: 1686999
ugacccaaagauaguuccc

SEQ ID NO: 1687001 - RNA, 19 nt, Artificial Sequence
  Description of Artificial Sequence: Synthetic oligonucleotide
  Sense strand starting at position 567 of SEQ ID NO: 1561638
aguuuccuccucuggguaa

SEQ ID NO: 1687002 - RNA, 19 nt, Artificial Sequence
  Description of Artificial Sequence: Synthetic oligonucleotide
  Antisense strand to SEQ ID NO: 1687001
uuacccagaggaggaaacu

SEQ ID NO: 1687003 - RNA, 19 nt, Artificial Sequence
  Description of Artificial Sequence: Synthetic oligonucleotide
  Sense strand starting at position 569 of SEQ ID NO: 1561638
uuuccuccucuggguaaua

SEQ ID NO: 1687004 - RNA, 19 nt, Artificial Sequence
  Description of Artificial Sequence: Synthetic oligonucleotide
  Antisense strand to SEQ ID NO: 1687003
uauuacccagaggaggaaa

SEQ ID NO: 1687005 - RNA, 19 nt, Artificial Sequence
  Description of Artificial Sequence: Synthetic oligonucleotide
  Sense strand starting at position 570 of SEQ ID NO: 1561638
uuccuccucuggguaauau

SEQ ID NO: 1687006 - RNA, 19 nt, Artificial Sequence
  Description of Artificial Sequence: Synthetic oligonucleotide
  Antisense strand to SEQ ID NO: 1687005
auauuacccagaggaggaa

SEQ ID NO: 1687007 - RNA, 19 nt, Artificial Sequence
  Description of Artificial Sequence: Synthetic oligonucleotide
  Sense strand starting at position 581 of SEQ ID NO: 1561638
gguaauaucagugaggccu

SEQ ID NO: 1687008 - RNA, 19 nt, Artificial Sequence
  Description of Artificial Sequence: Synthetic oligonucleotide
  Antisense strand to SEQ ID NO: 1687007
aggccucacugauauuacc

SEQ ID NO: 1687009 - RNA, 19 nt, Artificial Sequence
  Description of Artificial Sequence: Synthetic oligonucleotide
  Sense strand starting at position 735 of SEQ ID NO: 1561638
uccuguuccgagcaacuga

SEQ ID NO: 1687010 - RNA, 19 nt, Artificial Sequence
  Description of Artificial Sequence: Synthetic oligonucleotide
  Antisense strand to SEQ ID NO: 1687009
ucaguugcucggaacagga

SEQ ID NO: 1687011 - RNA, 19 nt, Artificial Sequence
  Description of Artificial Sequence: Synthetic oligonucleotide
  Sense strand starting at position 1020 of SEQ ID NO: 1561638
aagucuauggcaggcgaua

SEQ ID NO: 1687012 - RNA, 19 nt, Artificial Sequence
  Description of Artificial Sequence: Synthetic oligonucleotide
  Antisense strand to SEQ ID NO: 1687011
uaucgccugccauagacuu

SEQ ID NO: 1687013 - RNA, 19 nt, Artificial Sequence
  Description of Artificial Sequence: Synthetic oligonucleotide
  Sense strand starting at position 1494 of SEQ ID NO: 1561638
cggugugacacugaccaaa

SEQ ID NO: 1687014 - RNA, 19 nt, Artificial Sequence
  Description of Artificial Sequence: Synthetic oligonucleotide
  Antisense strand to SEQ ID NO: 1687013
uuuggucagugucacaccg

SEQ ID NO: 1687015 - RNA, 19 nt, Artificial Sequence
  Description of Artificial Sequence: Synthetic oligonucleotide
  Sense strand starting at position 1496 of SEQ ID NO: 1561638
gugugacacugaccaaauu

SEQ ID NO: 1687016 - RNA, 19 nt, Artificial Sequence
  Description of Artificial Sequence: Synthetic oligonucleotide
  Antisense strand to SEQ ID NO: 1687015
aauuuggucagugucacac

SEQ ID NO: 1687017 - RNA, 19 nt, Artificial Sequence
  Description of Artificial Sequence: Synthetic oligonucleotide
  Sense strand starting at position 1520 of SEQ ID NO: 1561638
cucagauauuaauuacgga

SEQ ID NO: 1687018 - RNA, 19 nt, Artificial Sequence
  Description of Artificial Sequence: Synthetic oligonucleotide
  Antisense strand to SEQ ID NO: 1687017
uccguaauuaauaucugag

SEQ ID NO: 1687019 - RNA, 19 nt, Artificial Sequence
  Description of Artificial Sequence: Synthetic oligonucleotide
  Sense strand starting at position 1586 of SEQ ID NO: 1561638
ccgaauuccgcgagugugu

SEQ ID NO: 1687020 - RNA, 19 nt, Artificial Sequence
  Description of Artificial Sequence: Synthetic oligonucleotide
  Antisense strand to SEQ ID NO: 1687019
acacacucgcggaauucgg

SEQ ID NO: 1687021 - RNA, 19 nt, Artificial Sequence
  Description of Artificial Sequence: Synthetic oligonucleotide
  Sense strand starting at position 1587 of SEQ ID NO: 1561638
cgaauuccgcgagugugua

SEQ ID NO: 1687022 - RNA, 19 nt, Artificial Sequence
  Description of Artificial Sequence: Synthetic oligonucleotide
  Antisense strand to SEQ ID NO: 1687021
uacacacucgcggaauucg

SEQ ID NO: 1687023 - RNA, 19 nt, Artificial Sequence
  Description of Artificial Sequence: Synthetic oligonucleotide
  Sense strand starting at position 1943 of SEQ ID NO: 1561638
ggauguuguccgucauguc

SEQ ID NO: 1687024 - RNA, 19 nt, Artificial Sequence
  Description of Artificial Sequence: Synthetic oligonucleotide
  Antisense strand to SEQ ID NO: 1687023
gacaugacggacaacaucc

SEQ ID NO: 1687025 - RNA, 19 nt, Artificial Sequence
  Description of Artificial Sequence: Synthetic oligonucleotide
  Sense strand starting at position 2682 of SEQ ID NO: 1561638
cacccaugugccugcagaa

SEQ ID NO: 1687026 - RNA, 19 nt, Artificial Sequence
  Description of Artificial Sequence: Synthetic oligonucleotide
  Antisense strand to SEQ ID NO: 1687025
uucugcaggcacaugggug

SEQ ID NO: 1687027 - RNA, 19 nt, Artificial Sequence
  Description of Artificial Sequence: Synthetic oligonucleotide
  Sense strand starting at position 2716 of SEQ ID NO: 1561638
ggacccucagcuuaucaga

SEQ ID NO: 1687028 - RNA, 19 nt, Artificial Sequence
  Description of Artificial Sequence: Synthetic oligonucleotide
  Antisense strand to SEQ ID NO: 1687027
ucugauaagcugagggucc

SEQ ID NO: 1687029 - RNA, 19 nt, Artificial Sequence
  Description of Artificial Sequence: Synthetic oligonucleotide
  Sense strand starting at position 2779 of SEQ ID NO: 1561638
ucuggauucugggaacuca

SEQ ID NO: 1687030 - RNA, 19 nt, Artificial Sequence
  Description of Artificial Sequence: Synthetic oligonucleotide
  Antisense strand to SEQ ID NO: 1687029
ugaguucccagaauccaga

SEQ ID NO: 1687031 - RNA, 19 nt, Artificial Sequence
  Description of Artificial Sequence: Synthetic oligonucleotide
  Sense strand starting at position 2929 of SEQ ID NO: 1561638
auuaccugucacugugauu

SEQ ID NO: 1687032 - RNA, 19 nt, Artificial Sequence
  Description of Artificial Sequence: Synthetic oligonucleotide
  Antisense strand to SEQ ID NO: 1687031
aaucacagugacagguaau

SEQ ID NO: 1687033 - RNA, 19 nt, Artificial Sequence
  Description of Artificial Sequence: Synthetic oligonucleotide
  Sense strand starting at position 3049 of SEQ ID NO: 1561638
ugauaaaguuaugagagca

SEQ ID NO: 1687034 - RNA, 19 nt, Artificial Sequence
  Description of Artificial Sequence: Synthetic oligonucleotide
  Antisense strand to SEQ ID NO: 1687033
ugcucucauaacuuuauca

SEQ ID NO: 1687035 - RNA, 19 nt, Artificial Sequence
  Description of Artificial Sequence: Synthetic oligonucleotide
  Sense strand starting at position 3191 of SEQ ID NO: 1561638
ucuaaugacugaucauguu

SEQ ID NO: 1687036 - RNA, 19 nt, Artificial Sequence
  Description of Artificial Sequence: Synthetic oligonucleotide
  Antisense strand to SEQ ID NO: 1687035
aacaugaucagucauuaga

SEQ ID NO: 1687037 - RNA, 19 nt, Artificial Sequence
  Description of Artificial Sequence: Synthetic oligonucleotide
  Sense strand starting at position 3356 of SEQ ID NO: 1561638
uauacaugugccuggcuaa

SEQ ID NO: 1687038 - RNA, 19 nt, Artificial Sequence
  Description of Artificial Sequence: Synthetic oligonucleotide
  Antisense strand to SEQ ID NO: 1687037
uuagccaggcacauguaua

SEQ ID NO: 1687039 - RNA, 19 nt, Artificial Sequence
  Description of Artificial Sequence: Synthetic oligonucleotide
  Sense strand starting at position 3357 of SEQ ID NO: 1561638
auacaugugccuggcuaau

SEQ ID NO: 1687040 - RNA, 19 nt, Artificial Sequence
  Description of Artificial Sequence: Synthetic oligonucleotide
  Antisense strand to SEQ ID NO: 1687039
auuagccaggcacauguau

SEQ ID NO: 1687041 - RNA, 19 nt, Artificial Sequence
  Description of Artificial Sequence: Synthetic oligonucleotide
  Sense strand starting at position 3508 of SEQ ID NO: 1561638
gagauuuaauugggaugaa

SEQ ID NO: 1687042 - RNA, 19 nt, Artificial Sequence
  Description of Artificial Sequence: Synthetic oligonucleotide
  Antisense strand to SEQ ID NO: 1687041
uucaucccaauuaaaucuc

SEQ ID NO: 1687043 - RNA, 19 nt, Artificial Sequence
  Description of Artificial Sequence: Synthetic oligonucleotide
  Sense strand starting at position 3733 of SEQ ID NO: 1561638
aaccaagaagugugacuua

SEQ ID NO: 1687044 - RNA, 19 nt, Artificial Sequence
  Description of Artificial Sequence: Synthetic oligonucleotide
  Antisense strand to SEQ ID NO: 1687043
uaagucacacuucuugguu

SEQ ID NO: 1687045 - RNA, 19 nt, Artificial Sequence
  Description of Artificial Sequence: Synthetic oligonucleotide
  Sense strand starting at position 3736 of SEQ ID NO: 1561638
caagaagugugacuuaucu

SEQ ID NO: 1687046 - RNA, 19 nt, Artificial Sequence
  Description of Artificial Sequence: Synthetic oligonucleotide
  Antisense strand to SEQ ID NO: 1687045
agauaagucacacuucuug

SEQ ID NO: 1687047 - RNA, 19 nt, Artificial Sequence
  Description of Artificial Sequence: Synthetic oligonucleotide
  Sense strand starting at position 3740 of SEQ ID NO: 1561638
aagugugacuuaucucaug

SEQ ID NO: 1687048 - RNA, 19 nt, Artificial Sequence
  Description of Artificial Sequence: Synthetic oligonucleotide
  Antisense strand to SEQ ID NO: 1687047
caugagauaagucacacuu

SEQ ID NO: 1687049 - RNA, 19 nt, Artificial Sequence
  Description of Artificial Sequence: Synthetic oligonucleotide
  Sense strand starting at position 3752 of SEQ ID NO: 1561638
ucucaugcaccagagaagu

SEQ ID NO: 1687050 - RNA, 19 nt, Artificial Sequence
  Description of Artificial Sequence: Synthetic oligonucleotide
  Antisense strand to SEQ ID NO: 1687049
acuucucuggugcaugaga

SEQ ID NO: 1687051 - RNA, 19 nt, Artificial Sequence
  Description of Artificial Sequence: Synthetic oligonucleotide
  Sense strand starting at position 3782 of SEQ ID NO: 1561638
agaagcaugucauuaguaa

SEQ ID NO: 1687052 - RNA, 19 nt, Artificial Sequence
  Description of Artificial Sequence: Synthetic oligonucleotide
  Antisense strand to SEQ ID NO: 1687051
uuacuaaugacaugcuucu

SEQ ID NO: 1687053 - RNA, 19 nt, Artificial Sequence
  Description of Artificial Sequence: Synthetic oligonucleotide
  Sense strand starting at position 3783 of SEQ ID NO: 1561638
gaagcaugucauuaguaau

SEQ ID NO: 1687054 - RNA, 19 nt, Artificial Sequence
  Description of Artificial Sequence: Synthetic oligonucleotide
  Antisense strand to SEQ ID NO: 1687053
auuacuaaugacaugcuuc

SEQ ID NO: 1687055 - RNA, 19 nt, Artificial Sequence
  Description of Artificial Sequence: Synthetic oligonucleotide
  Sense strand starting at position 3795 of SEQ ID NO: 1561638
uaguaauugcugcauugca

SEQ ID NO: 1687056 - RNA, 19 nt, Artificial Sequence
  Description of Artificial Sequence: Synthetic oligonucleotide
  Antisense strand to SEQ ID NO: 1687055
ugcaaugcagcaauuacua

SEQ ID NO: 1687057 - RNA, 19 nt, Artificial Sequence
  Description of Artificial Sequence: Synthetic oligonucleotide
  Sense strand starting at position 3867 of SEQ ID NO: 1561638
ccugcugucucuucuacau

SEQ ID NO: 1687058 - RNA, 19 nt, Artificial Sequence
  Description of Artificial Sequence: Synthetic oligonucleotide
  Antisense strand to SEQ ID NO: 1687057
auguagaagagacagcagg

SEQ ID NO: 1687059 - RNA, 19 nt, Artificial Sequence
  Description of Artificial Sequence: Synthetic oligonucleotide
  Sense strand starting at position 3889 of SEQ ID NO: 1561638
aaaugaugcuucguacaua

SEQ ID NO: 1687060 - RNA, 19 nt, Artificial Sequence
  Description of Artificial Sequence: Synthetic oligonucleotide
  Antisense strand to SEQ ID NO: 1687059
uauguacgaagcaucauuu

SEQ ID NO: 1687061 - RNA, 19 nt, Artificial Sequence
  Description of Artificial Sequence: Synthetic oligonucleotide
  Sense strand starting at position 3892 of SEQ ID NO: 1561638
ugaugcuucguacauagca

SEQ ID NO: 1687062 - RNA, 19 nt, Artificial Sequence
  Description of Artificial Sequence: Synthetic oligonucleotide
  Antisense strand to SEQ ID NO: 1687061
ugcuauguacgaagcauca

SEQ ID NO: 1687063 - RNA, 19 nt, Artificial Sequence
  Description of Artificial Sequence: Synthetic oligonucleotide
  Sense strand starting at position 3934 of SEQ ID NO: 1561638
aggcuucuugcauggaaga

SEQ ID NO: 1687064 - RNA, 19 nt, Artificial Sequence
  Description of Artificial Sequence: Synthetic oligonucleotide
  Antisense strand to SEQ ID NO: 1687063
ucuuccaugcaagaagccu

SEQ ID NO: 1687065 - RNA, 19 nt, Artificial Sequence
  Description of Artificial Sequence: Synthetic oligonucleotide
  Sense strand starting at position 3935 of SEQ ID NO: 1561638
ggcuucuugcauggaagaa

SEQ ID NO: 1687066 - RNA, 19 nt, Artificial Sequence
  Description of Artificial Sequence: Synthetic oligonucleotide
  Antisense strand to SEQ ID NO: 1687065
uucuuccaugcaagaagcc

SEQ ID NO: 1687067 - RNA, 19 nt, Artificial Sequence
  Description of Artificial Sequence: Synthetic oligonucleotide
  Sense strand starting at position 3936 of SEQ ID NO: 1561638
gcuucuugcauggaagaag

SEQ ID NO: 1687068 - RNA, 19 nt, Artificial Sequence
  Description of Artificial Sequence: Synthetic oligonucleotide
  Antisense strand to SEQ ID NO: 1687067
cuucuuccaugcaagaagc

SEQ ID NO: 1687069 - RNA, 19 nt, Artificial Sequence
  Description of Artificial Sequence: Synthetic oligonucleotide
  Sense strand starting at position 44 of SEQ ID NO: 1561639
uucucugaguuccucagaa

SEQ ID NO: 1687070 - RNA, 19 nt, Artificial Sequence
  Description of Artificial Sequence: Synthetic oligonucleotide
  Antisense strand to SEQ ID NO: 1687069
uucugaggaacucagagaa

SEQ ID NO: 1687071 - RNA, 19 nt, Artificial Sequence
  Description of Artificial Sequence: Synthetic oligonucleotide
  Sense strand starting at position 386 of SEQ ID NO: 1561639
aagagucaccaccgguuau

SEQ ID NO: 1687072 - RNA, 19 nt, Artificial Sequence
  Description of Artificial Sequence: Synthetic oligonucleotide
  Antisense strand to SEQ ID NO: 1687071
auaaccgguggugacucuu

SEQ ID NO: 1687073 - RNA, 19 nt, Artificial Sequence
  Description of Artificial Sequence: Synthetic oligonucleotide
  Sense strand starting at position 387 of SEQ ID NO: 1561639
agagucaccaccgguuaua

SEQ ID NO: 1687074 - RNA, 19 nt, Artificial Sequence
  Description of Artificial Sequence: Synthetic oligonucleotide
  Antisense strand to SEQ ID NO: 1687073
uauaaccgguggugacucu

SEQ ID NO: 1687075 - RNA, 19 nt, Artificial Sequence
  Description of Artificial Sequence: Synthetic oligonucleotide
  Sense strand starting at position 390 of SEQ ID NO: 1561639
gucaccaccgguuauaauu

SEQ ID NO: 1687076 - RNA, 19 nt, Artificial Sequence
  Description of Artificial Sequence: Synthetic oligonucleotide
  Antisense strand to SEQ ID NO: 1687075
aauuauaaccgguggugac

SEQ ID NO: 1687077 - RNA, 19 nt, Artificial Sequence
  Description of Artificial Sequence: Synthetic oligonucleotide
  Sense strand starting at position 398 of SEQ ID NO: 1561639
cgguuauaauucucuauca

SEQ ID NO: 1687078 - RNA, 19 nt, Artificial Sequence
  Description of Artificial Sequence: Synthetic oligonucleotide
  Antisense strand to SEQ ID NO: 1687077
ugauagagaauuauaaccg

SEQ ID NO: 1687079 - RNA, 19 nt, Artificial Sequence
  Description of Artificial Sequence: Synthetic oligonucleotide
  Sense strand starting at position 399 of SEQ ID NO: 1561639
gguuauaauucucuaucag

SEQ ID NO: 1687080 - RNA, 19 nt, Artificial Sequence
  Description of Artificial Sequence: Synthetic oligonucleotide
  Antisense strand to SEQ ID NO: 1687079
cugauagagaauuauaacc

SEQ ID NO: 1687081 - RNA, 19 nt, Artificial Sequence
  Description of Artificial Sequence: Synthetic oligonucleotide
  Sense strand starting at position 623 of SEQ ID NO: 1561639
cgugaaugacucuguaacc

SEQ ID NO: 1687082 - RNA, 19 nt, Artificial Sequence
  Description of Artificial Sequence: Synthetic oligonucleotide
  Antisense strand to SEQ ID NO: 1687081
gguuacagagucauucacg

SEQ ID NO: 1687083 - RNA, 19 nt, Artificial Sequence
  Description of Artificial Sequence: Synthetic oligonucleotide
  Sense strand starting at position 640 of SEQ ID NO: 1561639
cccuuaugacuaggguuau

SEQ ID NO: 1687084 - RNA, 19 nt, Artificial Sequence
  Description of Artificial Sequence: Synthetic oligonucleotide
  Antisense strand to SEQ ID NO: 1687083
auaacccuagucauaaggg

SEQ ID NO: 1687085 - RNA, 19 nt, Artificial Sequence
  Description of Artificial Sequence: Synthetic oligonucleotide
  Sense strand starting at position 721 of SEQ ID NO: 1561639
cuaaucugucuguauuauc

SEQ ID NO: 1687086 - RNA, 19 nt, Artificial Sequence
  Description of Artificial Sequence: Synthetic oligonucleotide
  Antisense strand to SEQ ID NO: 1687085
gauaauacagacagauuag

SEQ ID NO: 1687087 - RNA, 19 nt, Artificial Sequence
  Description of Artificial Sequence: Synthetic oligonucleotide
  Sense strand starting at position 726 of SEQ ID NO: 1561639
cugucuguauuaucuggaa

SEQ ID NO: 1687088 - RNA, 19 nt, Artificial Sequence
  Description of Artificial Sequence: Synthetic oligonucleotide
  Antisense strand to SEQ ID NO: 1687087
uuccagauaauacagacag

SEQ ID NO: 1687089 - RNA, 19 nt, Artificial Sequence
  Description of Artificial Sequence: Synthetic oligonucleotide
  Sense strand starting at position 1107 of SEQ ID NO: 1561639
ggcacauguggauguuaaa

SEQ ID NO: 1687090 - RNA, 19 nt, Artificial Sequence
  Description of Artificial Sequence: Synthetic oligonucleotide
  Antisense strand to SEQ ID NO: 1687089
uuuaacauccacaugugcc

SEQ ID NO: 1687091 - RNA, 19 nt, Artificial Sequence
  Description of Artificial Sequence: Synthetic oligonucleotide
  Sense strand starting at position 1168 of SEQ ID NO: 1561639
auaccucguuuagcugaaa

SEQ ID NO: 1687092 - RNA, 19 nt, Artificial Sequence
  Description of Artificial Sequence: Synthetic oligonucleotide
  Antisense strand to SEQ ID NO: 1687091
uuucagcuaaacgagguau

SEQ ID NO: 1687093 - RNA, 19 nt, Artificial Sequence
  Description of Artificial Sequence: Synthetic oligonucleotide
  Sense strand starting at position 2510 of SEQ ID NO: 1561639
aucacuugaucucugggau

SEQ ID NO: 1687094 - RNA, 19 nt, Artificial Sequence
  Description of Artificial Sequence: Synthetic oligonucleotide
  Antisense strand to SEQ ID NO: 1687093
aucccagagaucaagugau

SEQ ID NO: 1687095 - RNA, 19 nt, Artificial Sequence
  Description of Artificial Sequence: Synthetic oligonucleotide
  Sense strand starting at position 2908 of SEQ ID NO: 1561639
cucugaagagugggcaaua

SEQ ID NO: 1687096 - RNA, 19 nt, Artificial Sequence
  Description of Artificial Sequence: Synthetic oligonucleotide
  Antisense strand to SEQ ID NO: 1687095
uauugcccacucuucagag

SEQ ID NO: 1687097 - RNA, 19 nt, Artificial Sequence
  Description of Artificial Sequence: Synthetic oligonucleotide
  Sense strand starting at position 2909 of SEQ ID NO: 1561639
ucugaagagugggcaauau

SEQ ID NO: 1687098 - RNA, 19 nt, Artificial Sequence
  Description of Artificial Sequence: Synthetic oligonucleotide
  Antisense strand to SEQ ID NO: 1687097
auauugcccacucuucaga

SEQ ID NO: 1687099 - RNA, 19 nt, Artificial Sequence
  Description of Artificial Sequence: Synthetic oligonucleotide
  Sense strand starting at position 2987 of SEQ ID NO: 1561639
ggugucccucaaugagaca

SEQ ID NO: 1687100 - RNA, 19 nt, Artificial Sequence
  Description of Artificial Sequence: Synthetic oligonucleotide
  Antisense strand to SEQ ID NO: 1687099
ugucucauugagggacacc

SEQ ID NO: 1687101 - RNA, 19 nt, Artificial Sequence
  Description of Artificial Sequence: Synthetic oligonucleotide
  Sense strand starting at position 2999 of SEQ ID NO: 1561639
ugagacaugucuuccauca

SEQ ID NO: 1687102 - RNA, 19 nt, Artificial Sequence
  Description of Artificial Sequence: Synthetic oligonucleotide
  Antisense strand to SEQ ID NO: 1687101
ugauggaagacaugucuca

SEQ ID NO: 1687103 - RNA, 19 nt, Artificial Sequence
  Description of Artificial Sequence: Synthetic oligonucleotide
  Sense strand starting at position 3589 of SEQ ID NO: 1561639
uagcuaagggaucagucau

SEQ ID NO: 1687104 - RNA, 19 nt, Artificial Sequence
  Description of Artificial Sequence: Synthetic oligonucleotide
  Antisense strand to SEQ ID NO: 1687103
augacugaucccuuagcua

SEQ ID NO: 1687105 - RNA, 19 nt, Artificial Sequence
  Description of Artificial Sequence: Synthetic oligonucleotide
  Sense strand starting at position 3595 of SEQ ID NO: 1561639
agggaucagucauugagug

SEQ ID NO: 1687106 - RNA, 19 nt, Artificial Sequence
  Description of Artificial Sequence: Synthetic oligonucleotide
  Antisense strand to SEQ ID NO: 1687105
cacucaaugacugaucccu

SEQ ID NO: 1687107 - RNA, 19 nt, Artificial Sequence
  Description of Artificial Sequence: Synthetic oligonucleotide
  Sense strand starting at position 3596 of SEQ ID NO: 1561639
gggaucagucauugaguga

SEQ ID NO: 1687108 - RNA, 19 nt, Artificial Sequence
  Description of Artificial Sequence: Synthetic oligonucleotide
  Antisense strand to SEQ ID NO: 1687107
ucacucaaugacugauccc

SEQ ID NO: 1687109 - RNA, 19 nt, Artificial Sequence
  Description of Artificial Sequence: Synthetic oligonucleotide
  Sense strand starting at position 3599 of SEQ ID NO: 1561639
aucagucauugagugaaga

SEQ ID NO: 1687110 - RNA, 19 nt, Artificial Sequence
  Description of Artificial Sequence: Synthetic oligonucleotide
  Antisense strand to SEQ ID NO: 1687109
ucuucacucaaugacugau

SEQ ID NO: 1687111 - RNA, 19 nt, Artificial Sequence
  Description of Artificial Sequence: Synthetic oligonucleotide
  Sense strand starting at position 3600 of SEQ ID NO: 1561639
ucagucauugagugaagaa

SEQ ID NO: 1687112 - RNA, 19 nt, Artificial Sequence
  Description of Artificial Sequence: Synthetic oligonucleotide
  Antisense strand to SEQ ID NO: 1687111
uucuucacucaaugacuga

SEQ ID NO: 1687113 - RNA, 19 nt, Artificial Sequence
  Description of Artificial Sequence: Synthetic oligonucleotide
  Sense strand starting at position 3612 of SEQ ID NO: 1561639
ugaagaagcuaucuggguu

SEQ ID NO: 1687114 - RNA, 19 nt, Artificial Sequence
  Description of Artificial Sequence: Synthetic oligonucleotide
  Antisense strand to SEQ ID NO: 1687113
aacccagauagcuucuuca

SEQ ID NO: 1687115 - RNA, 19 nt, Artificial Sequence
  Description of Artificial Sequence: Synthetic oligonucleotide
  Sense strand starting at position 3613 of SEQ ID NO: 1561639
gaagaagcuaucuggguug

SEQ ID NO: 1687116 - RNA, 19 nt, Artificial Sequence
  Description of Artificial Sequence: Synthetic oligonucleotide
  Antisense strand to SEQ ID NO: 1687115
caacccagauagcuucuuc

SEQ ID NO: 1687117 - RNA, 19 nt, Artificial Sequence
  Description of Artificial Sequence: Synthetic oligonucleotide
  Sense strand starting at position 3657 of SEQ ID NO: 1561639
ccauguuaccuacaacagu

SEQ ID NO: 1687118 - RNA, 19 nt, Artificial Sequence
  Description of Artificial Sequence: Synthetic oligonucleotide
  Antisense strand to SEQ ID NO: 1687117
acuguuguagguaacaugg

SEQ ID NO: 1687119 - RNA, 19 nt, Artificial Sequence
  Description of Artificial Sequence: Synthetic oligonucleotide
  Sense strand starting at position 3673 of SEQ ID NO: 1561639
aguaacaggucuuuccuaa

SEQ ID NO: 1687120 - RNA, 19 nt, Artificial Sequence
  Description of Artificial Sequence: Synthetic oligonucleotide
  Antisense strand to SEQ ID NO: 1687119
uuaggaaagaccuguuacu

SEQ ID NO: 1687121 - RNA, 19 nt, Artificial Sequence
  Description of Artificial Sequence: Synthetic oligonucleotide
  Sense strand starting at position 3805 of SEQ ID NO: 1561639
uuuagagagguuuguuacu

SEQ ID NO: 1687122 - RNA, 19 nt, Artificial Sequence
  Description of Artificial Sequence: Synthetic oligonucleotide
  Antisense strand to SEQ ID NO: 1687121
aguaacaaaccucucuaaa

SEQ ID NO: 1687123 - RNA, 19 nt, Artificial Sequence
  Description of Artificial Sequence: Synthetic oligonucleotide
  Sense strand starting at position 3810 of SEQ ID NO: 1561639
agagguuuguuacucagua

SEQ ID NO: 1687124 - RNA, 19 nt, Artificial Sequence
  Description of Artificial Sequence: Synthetic oligonucleotide
  Antisense strand to SEQ ID NO: 1687123
uacugaguaacaaaccucu

SEQ ID NO: 1687125 - RNA, 19 nt, Artificial Sequence
  Description of Artificial Sequence: Synthetic oligonucleotide
  Sense strand starting at position 3811 of SEQ ID NO: 1561639
gagguuuguuacucaguaa

SEQ ID NO: 1687126 - RNA, 19 nt, Artificial Sequence
  Description of Artificial Sequence: Synthetic oligonucleotide
  Antisense strand to SEQ ID NO: 1687125
uuacugaguaacaaaccuc

SEQ ID NO: 1687127 - RNA, 19 nt, Artificial Sequence
  Description of Artificial Sequence: Synthetic oligonucleotide
  Sense strand starting at position 3812 of SEQ ID NO: 1561639
agguuuguuacucaguaau

SEQ ID NO: 1687128 - RNA, 19 nt, Artificial Sequence
  Description of Artificial Sequence: Synthetic oligonucleotide
  Antisense strand to SEQ ID NO: 1687127
auuacugaguaacaaaccu

SEQ ID NO: 1687129 - RNA, 19 nt, Artificial Sequence
  Description of Artificial Sequence: Synthetic oligonucleotide
  Sense strand starting at position 3814 of SEQ ID NO: 1561639
guuuguuacucaguaauag

SEQ ID NO: 1687130 - RNA, 19 nt, Artificial Sequence
  Description of Artificial Sequence: Synthetic oligonucleotide
  Antisense strand to SEQ ID NO: 1687129
cuauuacugaguaacaaac

SEQ ID NO: 1687131 - RNA, 19 nt, Artificial Sequence
  Description of Artificial Sequence: Synthetic oligonucleotide
  Sense strand starting at position 3837 of SEQ ID NO: 1561639
gcagaacauuguccgacau

SEQ ID NO: 1687132 - RNA, 19 nt, Artificial Sequence
  Description of Artificial Sequence: Synthetic oligonucleotide
  Antisense strand to SEQ ID NO: 1687131
augucggacaauguucugc

SEQ ID NO: 1687133 - RNA, 19 nt, Artificial Sequence
  Description of Artificial Sequence: Synthetic oligonucleotide
  Sense strand starting at position 3838 of SEQ ID NO: 1561639
cagaacauuguccgacaua

SEQ ID NO: 1687134 - RNA, 19 nt, Artificial Sequence
  Description of Artificial Sequence: Synthetic oligonucleotide
  Antisense strand to SEQ ID NO: 1687133
uaugucggacaauguucug

SEQ ID NO: 1687135 - RNA, 19 nt, Artificial Sequence
  Description of Artificial Sequence: Synthetic oligonucleotide
  Sense strand starting at position 3841 of SEQ ID NO: 1561639
aacauuguccgacauaaug

SEQ ID NO: 1687136 - RNA, 19 nt, Artificial Sequence
  Description of Artificial Sequence: Synthetic oligonucleotide
  Antisense strand to SEQ ID NO: 1687135
cauuaugucggacaauguu

SEQ ID NO: 1687137 - RNA, 19 nt, Artificial Sequence
  Description of Artificial Sequence: Synthetic oligonucleotide
  Sense strand starting at position 3857 of SEQ ID NO: 1561639
augcuugugcuaugaggaa

SEQ ID NO: 1687138 - RNA, 19 nt, Artificial Sequence
  Description of Artificial Sequence: Synthetic oligonucleotide
  Antisense strand to SEQ ID NO: 1687137
uuccucauagcacaagcau

SEQ ID NO: 1687139 - RNA, 19 nt, Artificial Sequence
  Description of Artificial Sequence: Synthetic oligonucleotide
  Sense strand starting at position 3861 of SEQ ID NO: 1561639
uugugcuaugaggaauauu

SEQ ID NO: 1687140 - RNA, 19 nt, Artificial Sequence
  Description of Artificial Sequence: Synthetic oligonucleotide
  Antisense strand to SEQ ID NO: 1687139
aauauuccucauagcacaa

SEQ ID NO: 1687141 - RNA, 19 nt, Artificial Sequence
  Description of Artificial Sequence: Synthetic oligonucleotide
  Sense strand starting at position 3872 of SEQ ID NO: 1561639
ggaauauuccuauggcacc

SEQ ID NO: 1687142 - RNA, 19 nt, Artificial Sequence
  Description of Artificial Sequence: Synthetic oligonucleotide
  Antisense strand to SEQ ID NO: 1687141
ggugccauaggaauauucc

SEQ ID NO: 1687143 - RNA, 19 nt, Artificial Sequence
  Description of Artificial Sequence: Synthetic oligonucleotide
  Sense strand starting at position 3909 of SEQ ID NO: 1561639
ccuuacagucccugggaaa

SEQ ID NO: 1687144 - RNA, 19 nt, Artificial Sequence
  Description of Artificial Sequence: Synthetic oligonucleotide
  Antisense strand to SEQ ID NO: 1687143
uuucccagggacuguaagg

SEQ ID NO: 1687145 - RNA, 19 nt, Artificial Sequence
  Description of Artificial Sequence: Synthetic oligonucleotide
  Sense strand starting at position 3961 of SEQ ID NO: 1561639
ucagcuuuaccucagagua

SEQ ID NO: 1687146 - RNA, 19 nt, Artificial Sequence
  Description of Artificial Sequence: Synthetic oligonucleotide
  Antisense strand to SEQ ID NO: 1687145
uacucugagguaaagcuga

SEQ ID NO: 1687147 - RNA, 19 nt, Artificial Sequence
  Description of Artificial Sequence: Synthetic oligonucleotide
  Sense strand starting at position 3969 of SEQ ID NO: 1561639
accucagaguauggaauuu

SEQ ID NO: 1687148 - RNA, 19 nt, Artificial Sequence
  Description of Artificial Sequence: Synthetic oligonucleotide
  Antisense strand to SEQ ID NO: 1687147
aaauuccauacucugaggu

SEQ ID NO: 1687149 - RNA, 19 nt, Artificial Sequence
  Description of Artificial Sequence: Synthetic oligonucleotide
  Sense strand starting at position 668 of SEQ ID NO: 1561640
cuaccuuucuuucuaggga

SEQ ID NO: 1687150 - RNA, 19 nt, Artificial Sequence
  Description of Artificial Sequence: Synthetic oligonucleotide
  Antisense strand to SEQ ID NO: 1687149
ucccuagaaagaaagguag

SEQ ID NO: 1687151 - RNA, 19 nt, Artificial Sequence
  Description of Artificial Sequence: Synthetic oligonucleotide
  Sense strand starting at position 671 of SEQ ID NO: 1561640
ccuuucuuucuagggaaau

SEQ ID NO: 1687152 - RNA, 19 nt, Artificial Sequence
  Description of Artificial Sequence: Synthetic oligonucleotide
  Antisense strand to SEQ ID NO: 1687151
auuucccuagaaagaaagg

SEQ ID NO: 1687153 - RNA, 19 nt, Artificial Sequence
  Description of Artificial Sequence: Synthetic oligonucleotide
  Sense strand starting at position 761 of SEQ ID NO: 1561640
aggugacucuaaucugcaa

SEQ ID NO: 1687154 - RNA, 19 nt, Artificial Sequence
  Description of Artificial Sequence: Synthetic oligonucleotide
  Antisense strand to SEQ ID NO: 1687153
uugcagauuagagucaccu

SEQ ID NO: 1687155 - RNA, 19 nt, Artificial Sequence
  Description of Artificial Sequence: Synthetic oligonucleotide
  Sense strand starting at position 1048 of SEQ ID NO: 1561640
gccggaugguucuuagaaa

SEQ ID NO: 1687156 - RNA, 19 nt, Artificial Sequence
  Description of Artificial Sequence: Synthetic oligonucleotide
  Antisense strand to SEQ ID NO: 1687155
uuucuaagaaccauccggc

SEQ ID NO: 1687157 - RNA, 19 nt, Artificial Sequence
  Description of Artificial Sequence: Synthetic oligonucleotide
  Sense strand starting at position 1056 of SEQ ID NO: 1561640
guucuuagaaauggagacu

SEQ ID NO: 1687158 - RNA, 19 nt, Artificial Sequence
  Description of Artificial Sequence: Synthetic oligonucleotide
  Antisense strand to SEQ ID NO: 1687157
agucuccauuucuaagaac

SEQ ID NO: 1687159 - RNA, 19 nt, Artificial Sequence
  Description of Artificial Sequence: Synthetic oligonucleotide
  Sense strand starting at position 1183 of SEQ ID NO: 1561640
ucuggagaguuuguuaaua

SEQ ID NO: 1687160 - RNA, 19 nt, Artificial Sequence
  Description of Artificial Sequence: Synthetic oligonucleotide
  Antisense strand to SEQ ID NO: 1687159
uauuaacaaacucuccaga

SEQ ID NO: 1687161 - RNA, 19 nt, Artificial Sequence
  Description of Artificial Sequence: Synthetic oligonucleotide
  Sense strand starting at position 1191 of SEQ ID NO: 1561640
guuuguuaauaacuagaca

SEQ ID NO: 1687162 - RNA, 19 nt, Artificial Sequence
  Description of Artificial Sequence: Synthetic oligonucleotide
  Antisense strand to SEQ ID NO: 1687161
ugucuaguuauuaacaaac

SEQ ID NO: 1687163 - RNA, 19 nt, Artificial Sequence
  Description of Artificial Sequence: Synthetic oligonucleotide
  Sense strand starting at position 1255 of SEQ ID NO: 1561640
ggagcuauauguuuaacaa

SEQ ID NO: 1687164 - RNA, 19 nt, Artificial Sequence
  Description of Artificial Sequence: Synthetic oligonucleotide
  Antisense strand to SEQ ID NO: 1687163
uuguuaaacauauagcucc

SEQ ID NO: 1687165 - RNA, 19 nt, Artificial Sequence
  Description of Artificial Sequence: Synthetic oligonucleotide
  Sense strand starting at position 1281 of SEQ ID NO: 1561640
aaguuaucccgguacaacu

SEQ ID NO: 1687166 - RNA, 19 nt, Artificial Sequence
  Description of Artificial Sequence: Synthetic oligonucleotide
  Antisense strand to SEQ ID NO: 1687165
aguuguaccgggauaacuu

SEQ ID NO: 1687167 - RNA, 19 nt, Artificial Sequence
  Description of Artificial Sequence: Synthetic oligonucleotide
  Sense strand starting at position 1306 of SEQ ID NO: 1561640
aggucuacggucugagaag

SEQ ID NO: 1687168 - RNA, 19 nt, Artificial Sequence
  Description of Artificial Sequence: Synthetic oligonucleotide
  Antisense strand to SEQ ID NO: 1687167
cuucucagaccguagaccu

SEQ ID NO: 1687169 - RNA, 19 nt, Artificial Sequence
  Description of Artificial Sequence: Synthetic oligonucleotide
  Sense strand starting at position 1884 of SEQ ID NO: 1561640
ggacccaagucuuccaaga

SEQ ID NO: 1687170 - RNA, 19 nt, Artificial Sequence
  Description of Artificial Sequence: Synthetic oligonucleotide
  Antisense strand to SEQ ID NO: 1687169
ucuuggaagacuugggucc

SEQ ID NO: 1687171 - RNA, 19 nt, Artificial Sequence
  Description of Artificial Sequence: Synthetic oligonucleotide
  Sense strand starting at position 1995 of SEQ ID NO: 1561640
ccuugugauugguugacaa

SEQ ID NO: 1687172 - RNA, 19 nt, Artificial Sequence
  Description of Artificial Sequence: Synthetic oligonucleotide
  Antisense strand to SEQ ID NO: 1687171
uugucaaccaaucacaagg

SEQ ID NO: 1687173 - RNA, 19 nt, Artificial Sequence
  Description of Artificial Sequence: Synthetic oligonucleotide
  Sense strand starting at position 1997 of SEQ ID NO: 1561640
uugugauugguugacaaca

SEQ ID NO: 1687174 - RNA, 19 nt, Artificial Sequence
  Description of Artificial Sequence: Synthetic oligonucleotide
  Antisense strand to SEQ ID NO: 1687173
uguugucaaccaaucacaa

SEQ ID NO: 1687175 - RNA, 19 nt, Artificial Sequence
  Description of Artificial Sequence: Synthetic oligonucleotide
  Sense strand starting at position 2063 of SEQ ID NO: 1561640
gcacuugcucccuaagaac

SEQ ID NO: 1687176 - RNA, 19 nt, Artificial Sequence
  Description of Artificial Sequence: Synthetic oligonucleotide
  Antisense strand to SEQ ID NO: 1687175
guucuuagggagcaagugc

SEQ ID NO: 1687177 - RNA, 19 nt, Artificial Sequence
  Description of Artificial Sequence: Synthetic oligonucleotide
  Sense strand starting at position 2725 of SEQ ID NO: 1561640
ucgugugcucaccugcaaa

SEQ ID NO: 1687178 - RNA, 19 nt, Artificial Sequence
  Description of Artificial Sequence: Synthetic oligonucleotide
  Antisense strand to SEQ ID NO: 1687177
uuugcaggugagcacacga

SEQ ID NO: 1687179 - RNA, 19 nt, Artificial Sequence
  Description of Artificial Sequence: Synthetic oligonucleotide
  Sense strand starting at position 2906 of SEQ ID NO: 1561640
ggaugugcucagcagaagu

SEQ ID NO: 1687180 - RNA, 19 nt, Artificial Sequence
  Description of Artificial Sequence: Synthetic oligonucleotide
  Antisense strand to SEQ ID NO: 1687179
acuucugcugagcacaucc

SEQ ID NO: 1687181 - RNA, 19 nt, Artificial Sequence
  Description of Artificial Sequence: Synthetic oligonucleotide
  Sense strand starting at position 2933 of SEQ ID NO: 1561640
cggauagaacaguggugua

SEQ ID NO: 1687182 - RNA, 19 nt, Artificial Sequence
  Description of Artificial Sequence: Synthetic oligonucleotide
  Antisense strand to SEQ ID NO: 1687181
uacaccacuguucuauccg

SEQ ID NO: 1687183 - RNA, 19 nt, Artificial Sequence
  Description of Artificial Sequence: Synthetic oligonucleotide
  Sense strand starting at position 3032 of SEQ ID NO: 1561640
cagauuacugcaggguaaa

SEQ ID NO: 1687184 - RNA, 19 nt, Artificial Sequence
  Description of Artificial Sequence: Synthetic oligonucleotide
  Antisense strand to SEQ ID NO: 1687183
uuuacccugcaguaaucug

SEQ ID NO: 1687185 - RNA, 19 nt, Artificial Sequence
  Description of Artificial Sequence: Synthetic oligonucleotide
  Sense strand starting at position 3033 of SEQ ID NO: 1561640
agauuacugcaggguaaac

SEQ ID NO: 1687186 - RNA, 19 nt, Artificial Sequence
  Description of Artificial Sequence: Synthetic oligonucleotide
  Antisense strand to SEQ ID NO: 1687185
guuuacccugcaguaaucu

SEQ ID NO: 1687187 - RNA, 19 nt, Artificial Sequence
  Description of Artificial Sequence: Synthetic oligonucleotide
  Sense strand starting at position 3050 of SEQ ID NO: 1561640
acaggaugugcauguaaag

SEQ ID NO: 1687188 - RNA, 19 nt, Artificial Sequence
  Description of Artificial Sequence: Synthetic oligonucleotide
  Antisense strand to SEQ ID NO: 1687187
cuuuacaugcacauccugu

SEQ ID NO: 1687189 - RNA, 19 nt, Artificial Sequence
  Description of Artificial Sequence: Synthetic oligonucleotide
  Sense strand starting at position 3072 of SEQ ID NO: 1561640
ugagcuagcauacggaaau

SEQ ID NO: 1687190 - RNA, 19 nt, Artificial Sequence
  Description of Artificial Sequence: Synthetic oligonucleotide
  Antisense strand to SEQ ID NO: 1687189
auuuccguaugcuagcuca

SEQ ID NO: 1687191 - RNA, 19 nt, Artificial Sequence
  Description of Artificial Sequence: Synthetic oligonucleotide
  Sense strand starting at position 3083 of SEQ ID NO: 1561640
acggaaauuauucgaguca

SEQ ID NO: 1687192 - RNA, 19 nt, Artificial Sequence
  Description of Artificial Sequence: Synthetic oligonucleotide
  Antisense strand to SEQ ID NO: 1687191
ugacucgaauaauuuccgu

SEQ ID NO: 1687193 - RNA, 19 nt, Artificial Sequence
  Description of Artificial Sequence: Synthetic oligonucleotide
  Sense strand starting at position 3110 of SEQ ID NO: 1561640
caacguuaacaguagaauc

SEQ ID NO: 1687194 - RNA, 19 nt, Artificial Sequence
  Description of Artificial Sequence: Synthetic oligonucleotide
  Antisense strand to SEQ ID NO: 1687193
gauucuacuguuaacguug

SEQ ID NO: 1687195 - RNA, 19 nt, Artificial Sequence
  Description of Artificial Sequence: Synthetic oligonucleotide
  Sense strand starting at position 3175 of SEQ ID NO: 1561640
cuuuauugguacuuaagaa

SEQ ID NO: 1687196 - RNA, 19 nt, Artificial Sequence
  Description of Artificial Sequence: Synthetic oligonucleotide
  Antisense strand to SEQ ID NO: 1687195
uucuuaaguaccaauaaag

SEQ ID NO: 1687197 - RNA, 19 nt, Artificial Sequence
  Description of Artificial Sequence: Synthetic oligonucleotide
  Sense strand starting at position 3286 of SEQ ID NO: 1561640
guugaagucagaugauuaa

SEQ ID NO: 1687198 - RNA, 19 nt, Artificial Sequence
  Description of Artificial Sequence: Synthetic oligonucleotide
  Antisense strand to SEQ ID NO: 1687197
uuaaucaucugacuucaac

SEQ ID NO: 1687199 - RNA, 19 nt, Artificial Sequence
  Description of Artificial Sequence: Synthetic oligonucleotide
  Sense strand starting at position 3381 of SEQ ID NO: 1561640
caaguuaugggacggugaa

SEQ ID NO: 1687200 - RNA, 19 nt, Artificial Sequence
  Description of Artificial Sequence: Synthetic oligonucleotide
  Antisense strand to SEQ ID NO: 1687199
uucaccgucccauaacuug

SEQ ID NO: 1687201 - RNA, 19 nt, Artificial Sequence
  Description of Artificial Sequence: Synthetic oligonucleotide
  Sense strand starting at position 3424 of SEQ ID NO: 1561640
guuuguuaugcagacagaa

SEQ ID NO: 1687202 - RNA, 19 nt, Artificial Sequence
  Description of Artificial Sequence: Synthetic oligonucleotide
  Antisense strand to SEQ ID NO: 1687201
uucugucugcauaacaaac

SEQ ID NO: 1687203 - RNA, 19 nt, Artificial Sequence
  Description of Artificial Sequence: Synthetic oligonucleotide
  Sense strand starting at position 3482 of SEQ ID NO: 1561640
ugugauccgaguuaaucuu

SEQ ID NO: 1687204 - RNA, 19 nt, Artificial Sequence
  Description of Artificial Sequence: Synthetic oligonucleotide
  Antisense strand to SEQ ID NO: 1687203
aagauuaacucggaucaca

SEQ ID NO: 1687205 - RNA, 19 nt, Artificial Sequence
  Description of Artificial Sequence: Synthetic oligonucleotide
  Sense strand starting at position 3507 of SEQ ID NO: 1561640
uuuauaaggauucgugaca

SEQ ID NO: 1687206 - RNA, 19 nt, Artificial Sequence
  Description of Artificial Sequence: Synthetic oligonucleotide
  Antisense strand to SEQ ID NO: 1687205
ugucacgaauccuuauaaa

SEQ ID NO: 1687207 - RNA, 19 nt, Artificial Sequence
  Description of Artificial Sequence: Synthetic oligonucleotide
  Sense strand starting at position 3508 of SEQ ID NO: 1561640
uuauaaggauucgugacaa

SEQ ID NO: 1687208 - RNA, 19 nt, Artificial Sequence
  Description of Artificial Sequence: Synthetic oligonucleotide
  Antisense strand to SEQ ID NO: 1687207
uugucacgaauccuuauaa

SEQ ID NO: 1687209 - RNA, 19 nt, Artificial Sequence
  Description of Artificial Sequence: Synthetic oligonucleotide
  Sense strand starting at position 3516 of SEQ ID NO: 1561640
auucgugacaauugaggua

SEQ ID NO: 1687210 - RNA, 19 nt, Artificial Sequence
  Description of Artificial Sequence: Synthetic oligonucleotide
  Antisense strand to SEQ ID NO: 1687209
uaccucaauugucacgaau

SEQ ID NO: 1687211 - RNA, 19 nt, Artificial Sequence
  Description of Artificial Sequence: Synthetic oligonucleotide
  Sense strand starting at position 3545 of SEQ ID NO: 1561640
gucagacuuuaggcaggua

SEQ ID NO: 1687212 - RNA, 19 nt, Artificial Sequence
  Description of Artificial Sequence: Synthetic oligonucleotide
  Antisense strand to SEQ ID NO: 1687211
uaccugccuaaagucugac

SEQ ID NO: 1687213 - RNA, 19 nt, Artificial Sequence
  Description of Artificial Sequence: Synthetic oligonucleotide
  Sense strand starting at position 3546 of SEQ ID NO: 1561640
ucagacuuuaggcagguaa

SEQ ID NO: 1687214 - RNA, 19 nt, Artificial Sequence
  Description of Artificial Sequence: Synthetic oligonucleotide
  Antisense strand to SEQ ID NO: 1687213
uuaccugccuaaagucuga

SEQ ID NO: 1687215 - RNA, 19 nt, Artificial Sequence
  Description of Artificial Sequence: Synthetic oligonucleotide
  Sense strand starting at position 3677 of SEQ ID NO: 1561640
agugguuaagcucagggau

SEQ ID NO: 1687216 - RNA, 19 nt, Artificial Sequence
  Description of Artificial Sequence: Synthetic oligonucleotide
  Antisense strand to SEQ ID NO: 1687215
aucccugagcuuaaccacu

SEQ ID NO: 1687217 - RNA, 19 nt, Artificial Sequence
  Description of Artificial Sequence: Synthetic oligonucleotide
  Sense strand starting at position 3691 of SEQ ID NO: 1561640
gggaucuggaguuggcaau

SEQ ID NO: 1687218 - RNA, 19 nt, Artificial Sequence
  Description of Artificial Sequence: Synthetic oligonucleotide
  Antisense strand to SEQ ID NO: 1687217
auugccaacuccagauccc

SEQ ID NO: 1687219 - RNA, 19 nt, Artificial Sequence
  Description of Artificial Sequence: Synthetic oligonucleotide
  Sense strand starting at position 3716 of SEQ ID NO: 1561640
gugcuuuaaccuuggacaa

SEQ ID NO: 1687220 - RNA, 19 nt, Artificial Sequence
  Description of Artificial Sequence: Synthetic oligonucleotide
  Antisense strand to SEQ ID NO: 1687219
uuguccaagguuaaagcac

SEQ ID NO: 1687221 - RNA, 19 nt, Artificial Sequence
  Description of Artificial Sequence: Synthetic oligonucleotide
  Sense strand starting at position 3717 of SEQ ID NO: 1561640
ugcuuuaaccuuggacaag

SEQ ID NO: 1687222 - RNA, 19 nt, Artificial Sequence
  Description of Artificial Sequence: Synthetic oligonucleotide
  Antisense strand to SEQ ID NO: 1687221
cuuguccaagguuaaagca

SEQ ID NO: 1687223 - RNA, 19 nt, Artificial Sequence
  Description of Artificial Sequence: Synthetic oligonucleotide
  Sense strand starting at position 3890 of SEQ ID NO: 1561640
gugaacugaugcuuacaaa

SEQ ID NO: 1687224 - RNA, 19 nt, Artificial Sequence
  Description of Artificial Sequence: Synthetic oligonucleotide
  Antisense strand to SEQ ID NO: 1687223
uuuguaagcaucaguucac

SEQ ID NO: 1687225 - RNA, 19 nt, Artificial Sequence
  Description of Artificial Sequence: Synthetic oligonucleotide
  Sense strand starting at position 3979 of SEQ ID NO: 1561640
gucauacaguguguaagaa

SEQ ID NO: 1687226 - RNA, 19 nt, Artificial Sequence
  Description of Artificial Sequence: Synthetic oligonucleotide
  Antisense strand to SEQ ID NO: 1687225
uucuuacacacuguaugac

SEQ ID NO: 1687227 - RNA, 19 nt, Artificial Sequence
  Description of Artificial Sequence: Synthetic oligonucleotide
  Sense strand starting at position 3980 of SEQ ID NO: 1561640
ucauacaguguguaagaaa

SEQ ID NO: 1687228 - RNA, 19 nt, Artificial Sequence
  Description of Artificial Sequence: Synthetic oligonucleotide
  Antisense strand to SEQ ID NO: 1687227
uuucuuacacacuguauga

SEQ ID NO: 1687229 - RNA, 19 nt, Artificial Sequence
  Description of Artificial Sequence: Synthetic oligonucleotide
  Sense strand starting at position 662 of SEQ ID NO: 1561641
ggaugaccucucggugaca

SEQ ID NO: 1687230 - RNA, 19 nt, Artificial Sequence
  Description of Artificial Sequence: Synthetic oligonucleotide
  Antisense strand to SEQ ID NO: 1687229
ugucaccgagaggucaucc

SEQ ID NO: 1687231 - RNA, 19 nt, Artificial Sequence
  Description of Artificial Sequence: Synthetic oligonucleotide
  Sense strand starting at position 710 of SEQ ID NO: 1561641
acgggucucccguggacua

SEQ ID NO: 1687232 - RNA, 19 nt, Artificial Sequence
  Description of Artificial Sequence: Synthetic oligonucleotide
  Antisense strand to SEQ ID NO: 1687231
uaguccacgggagacccgu

SEQ ID NO: 1687233 - RNA, 19 nt, Artificial Sequence
  Description of Artificial Sequence: Synthetic oligonucleotide
  Sense strand starting at position 1147 of SEQ ID NO: 1561641
gccgguucucuggcgcaau

SEQ ID NO: 1687234 - RNA, 19 nt, Artificial Sequence
  Description of Artificial Sequence: Synthetic oligonucleotide
  Antisense strand to SEQ ID NO: 1687233
auugcgccagagaaccggc

SEQ ID NO: 1687235 - RNA, 19 nt, Artificial Sequence
  Description of Artificial Sequence: Synthetic oligonucleotide
  Sense strand starting at position 1165 of SEQ ID NO: 1561641
uggauagcgcauuagacuu

SEQ ID NO: 1687236 - RNA, 19 nt, Artificial Sequence
  Description of Artificial Sequence: Synthetic oligonucleotide
  Antisense strand to SEQ ID NO: 1687235
aagucuaaugcgcuaucca

SEQ ID NO: 1687237 - RNA, 19 nt, Artificial Sequence
  Description of Artificial Sequence: Synthetic oligonucleotide
  Sense strand starting at position 1210 of SEQ ID NO: 1561641
ugcucaagggcucaucauu

SEQ ID NO: 1687238 - RNA, 19 nt, Artificial Sequence
  Description of Artificial Sequence: Synthetic oligonucleotide
  Antisense strand to SEQ ID NO: 1687237
aaugaugagcccuugagca

SEQ ID NO: 1687239 - RNA, 19 nt, Artificial Sequence
  Description of Artificial Sequence: Synthetic oligonucleotide
  Sense strand starting at position 1223 of SEQ ID NO: 1561641
aucauugagccuggacaga

SEQ ID NO: 1687240 - RNA, 19 nt, Artificial Sequence
  Description of Artificial Sequence: Synthetic oligonucleotide
  Antisense strand to SEQ ID NO: 1687239
ucuguccaggcucaaugau

SEQ ID NO: 1687241 - RNA, 19 nt, Artificial Sequence
  Description of Artificial Sequence: Synthetic oligonucleotide
  Sense strand starting at position 1243 of SEQ ID NO: 1561641
uugcaugcacaucgugauu

SEQ ID NO: 1687242 - RNA, 19 nt, Artificial Sequence
  Description of Artificial Sequence: Synthetic oligonucleotide
  Antisense strand to SEQ ID NO: 1687241
aaucacgaugugcaugcaa

SEQ ID NO: 1687243 - RNA, 19 nt, Artificial Sequence
  Description of Artificial Sequence: Synthetic oligonucleotide
  Sense strand starting at position 1248 of SEQ ID NO: 1561641
ugcacaucgugauuggauu

SEQ ID NO: 1687244 - RNA, 19 nt, Artificial Sequence
  Description of Artificial Sequence: Synthetic oligonucleotide
  Antisense strand to SEQ ID NO: 1687243
aauccaaucacgaugugca

SEQ ID NO: 1687245 - RNA, 19 nt, Artificial Sequence
  Description of Artificial Sequence: Synthetic oligonucleotide
  Sense strand starting at position 1249 of SEQ ID NO: 1561641
gcacaucgugauuggauuu

SEQ ID NO: 1687246 - RNA, 19 nt, Artificial Sequence
  Description of Artificial Sequence: Synthetic oligonucleotide
  Antisense strand to SEQ ID NO: 1687245
aaauccaaucacgaugugc

SEQ ID NO: 1687247 - RNA, 19 nt, Artificial Sequence
  Description of Artificial Sequence: Synthetic oligonucleotide
  Sense strand starting at position 1291 of SEQ ID NO: 1561641
ggaaacguccagcacuaua

SEQ ID NO: 1687248 - RNA, 19 nt, Artificial Sequence
  Description of Artificial Sequence: Synthetic oligonucleotide
  Antisense strand to SEQ ID NO: 1687247
uauagugcuggacguuucc

SEQ ID NO: 1687249 - RNA, 19 nt, Artificial Sequence
  Description of Artificial Sequence: Synthetic oligonucleotide
  Sense strand starting at position 1296 of SEQ ID NO: 1561641
cguccagcacuauagaauu

SEQ ID NO: 1687250 - RNA, 19 nt, Artificial Sequence
  Description of Artificial Sequence: Synthetic oligonucleotide
  Antisense strand to SEQ ID NO: 1687249
aauucuauagugcuggacg

SEQ ID NO: 1687251 - RNA, 19 nt, Artificial Sequence
  Description of Artificial Sequence: Synthetic oligonucleotide
  Sense strand starting at position 1318 of SEQ ID NO: 1561641
ccagguucccagcagaacu

SEQ ID NO: 1687252 - RNA, 19 nt, Artificial Sequence
  Description of Artificial Sequence: Synthetic oligonucleotide
  Antisense strand to SEQ ID NO: 1687251
aguucugcugggaaccugg

SEQ ID NO: 1687253 - RNA, 19 nt, Artificial Sequence
  Description of Artificial Sequence: Synthetic oligonucleotide
  Sense strand starting at position 1431 of SEQ ID NO: 1561641
gaggaaagccuccaaugcu

SEQ ID NO: 1687254 - RNA, 19 nt, Artificial Sequence
  Description of Artificial Sequence: Synthetic oligonucleotide
  Antisense strand to SEQ ID NO: 1687253
agcauuggaggcuuuccuc

SEQ ID NO: 1687255 - RNA, 19 nt, Artificial Sequence
  Description of Artificial Sequence: Synthetic oligonucleotide
  Sense strand starting at position 1872 of SEQ ID NO: 1561641
ucgggcaguucuggaagua

SEQ ID NO: 1687256 - RNA, 19 nt, Artificial Sequence
  Description of Artificial Sequence: Synthetic oligonucleotide
  Antisense strand to SEQ ID NO: 1687255
uacuuccagaacugcccga

SEQ ID NO: 1687257 - RNA, 19 nt, Artificial Sequence
  Description of Artificial Sequence: Synthetic oligonucleotide
  Sense strand starting at position 1932 of SEQ ID NO: 1561641
gcagcauggugucaggcau

SEQ ID NO: 1687258 - RNA, 19 nt, Artificial Sequence
  Description of Artificial Sequence: Synthetic oligonucleotide
  Antisense strand to SEQ ID NO: 1687257
augccugacaccaugcugc

SEQ ID NO: 1687259 - RNA, 19 nt, Artificial Sequence
  Description of Artificial Sequence: Synthetic oligonucleotide
  Sense strand starting at position 2023 of SEQ ID NO: 1561641
uauuuauguccgcaggugu

SEQ ID NO: 1687260 - RNA, 19 nt, Artificial Sequence
  Description of Artificial Sequence: Synthetic oligonucleotide
  Antisense strand to SEQ ID NO: 1687259
acaccugcggacauaaaua

SEQ ID NO: 1687261 - RNA, 19 nt, Artificial Sequence
  Description of Artificial Sequence: Synthetic oligonucleotide
  Sense strand starting at position 2115 of SEQ ID NO: 1561641
agccgucagcagugauuca

SEQ ID NO: 1687262 - RNA, 19 nt, Artificial Sequence
  Description of Artificial Sequence: Synthetic oligonucleotide
  Antisense strand to SEQ ID NO: 1687261
ugaaucacugcugacggcu

SEQ ID NO: 1687263 - RNA, 19 nt, Artificial Sequence
  Description of Artificial Sequence: Synthetic oligonucleotide
  Sense strand starting at position 2291 of SEQ ID NO: 1561641
gagaccaucucugagcuuu

SEQ ID NO: 1687264 - RNA, 19 nt, Artificial Sequence
  Description of Artificial Sequence: Synthetic oligonucleotide
  Antisense strand to SEQ ID NO: 1687263
aaagcucagagauggucuc

SEQ ID NO: 1687265 - RNA, 19 nt, Artificial Sequence
  Description of Artificial Sequence: Synthetic oligonucleotide
  Sense strand starting at position 2299 of SEQ ID NO: 1561641
cucugagcuuucugauuac

SEQ ID NO: 1687266 - RNA, 19 nt, Artificial Sequence
  Description of Artificial Sequence: Synthetic oligonucleotide
  Antisense strand to SEQ ID NO: 1687265
guaaucagaaagcucagag

SEQ ID NO: 1687267 - RNA, 19 nt, Artificial Sequence
  Description of Artificial Sequence: Synthetic oligonucleotide
  Sense strand starting at position 2302 of SEQ ID NO: 1561641
ugagcuuucugauuaccca

SEQ ID NO: 1687268 - RNA, 19 nt, Artificial Sequence
  Description of Artificial Sequence: Synthetic oligonucleotide
  Antisense strand to SEQ ID NO: 1687267
uggguaaucagaaagcuca

SEQ ID NO: 1687269 - RNA, 19 nt, Artificial Sequence
  Description of Artificial Sequence: Synthetic oligonucleotide
  Sense strand starting at position 2305 of SEQ ID NO: 1561641
gcuuucugauuacccagaa

SEQ ID NO: 1687270 - RNA, 19 nt, Artificial Sequence
  Description of Artificial Sequence: Synthetic oligonucleotide
  Antisense strand to SEQ ID NO: 1687269
uucuggguaaucagaaagc

SEQ ID NO: 1687271 - RNA, 19 nt, Artificial Sequence
  Description of Artificial Sequence: Synthetic oligonucleotide
  Sense strand starting at position 2326 of SEQ ID NO: 1561641
ggcguaggguccaagaaga

SEQ ID NO: 1687272 - RNA, 19 nt, Artificial Sequence
  Description of Artificial Sequence: Synthetic oligonucleotide
  Antisense strand to SEQ ID NO: 1687271
ucuucuuggacccuacgcc

SEQ ID NO: 1687273 - RNA, 19 nt, Artificial Sequence
  Description of Artificial Sequence: Synthetic oligonucleotide
  Sense strand starting at position 2434 of SEQ ID NO: 1561641
gaggguuagcccugugaca

SEQ ID NO: 1687274 - RNA, 19 nt, Artificial Sequence
  Description of Artificial Sequence: Synthetic oligonucleotide
  Antisense strand to SEQ ID NO: 1687273
ugucacagggcuaacccuc

SEQ ID NO: 1687275 - RNA, 19 nt, Artificial Sequence
  Description of Artificial Sequence: Synthetic oligonucleotide
  Sense strand starting at position 2436 of SEQ ID NO: 1561641
ggguuagcccugugacaac

SEQ ID NO: 1687276 - RNA, 19 nt, Artificial Sequence
  Description of Artificial Sequence: Synthetic oligonucleotide
  Antisense strand to SEQ ID NO: 1687275
guugucacagggcuaaccc

SEQ ID NO: 1687277 - RNA, 19 nt, Artificial Sequence
  Description of Artificial Sequence: Synthetic oligonucleotide
  Sense strand starting at position 2669 of SEQ ID NO: 1561641
ggacucaggcccugaaacu

SEQ ID NO: 1687278 - RNA, 19 nt, Artificial Sequence
  Description of Artificial Sequence: Synthetic oligonucleotide
  Antisense strand to SEQ ID NO: 1687277
aguuucagggccugagucc

SEQ ID NO: 1687279 - RNA, 19 nt, Artificial Sequence
  Description of Artificial Sequence: Synthetic oligonucleotide
  Sense strand starting at position 2824 of SEQ ID NO: 1561641
acaacaguuugucccaauu

SEQ ID NO: 1687280 - RNA, 19 nt, Artificial Sequence
  Description of Artificial Sequence: Synthetic oligonucleotide
  Antisense strand to SEQ ID NO: 1687279
aauugggacaaacuguugu

SEQ ID NO: 1687281 - RNA, 19 nt, Artificial Sequence
  Description of Artificial Sequence: Synthetic oligonucleotide
  Sense strand starting at position 2856 of SEQ ID NO: 1561641
ggaccuuaguauguggcaa

SEQ ID NO: 1687282 - RNA, 19 nt, Artificial Sequence
  Description of Artificial Sequence: Synthetic oligonucleotide
  Antisense strand to SEQ ID NO: 1687281
uugccacauacuaaggucc

SEQ ID NO: 1687283 - RNA, 19 nt, Artificial Sequence
  Description of Artificial Sequence: Synthetic oligonucleotide
  Sense strand starting at position 3335 of SEQ ID NO: 1561641
guuguuauugcaggaacac

SEQ ID NO: 1687284 - RNA, 19 nt, Artificial Sequence
  Description of Artificial Sequence: Synthetic oligonucleotide
  Antisense strand to SEQ ID NO: 1687283
guguuccugcaauaacaac

SEQ ID NO: 1687285 - RNA, 19 nt, Artificial Sequence
  Description of Artificial Sequence: Synthetic oligonucleotide
  Sense strand starting at position 3336 of SEQ ID NO: 1561641
uuguuauugcaggaacacu

SEQ ID NO: 1687286 - RNA, 19 nt, Artificial Sequence
  Description of Artificial Sequence: Synthetic oligonucleotide
  Antisense strand to SEQ ID NO: 1687285
aguguuccugcaauaacaa

SEQ ID NO: 1687287 - RNA, 19 nt, Artificial Sequence
  Description of Artificial Sequence: Synthetic oligonucleotide
  Sense strand starting at position 3383 of SEQ ID NO: 1561641
gccucuguugcucgacacu

SEQ ID NO: 1687288 - RNA, 19 nt, Artificial Sequence
  Description of Artificial Sequence: Synthetic oligonucleotide
  Antisense strand to SEQ ID NO: 1687287
agugucgagcaacagaggc

SEQ ID NO: 1687289 - RNA, 19 nt, Artificial Sequence
  Description of Artificial Sequence: Synthetic oligonucleotide
  Sense strand starting at position 3422 of SEQ ID NO: 1561641
uggacuucucugugccuua

SEQ ID NO: 1687290 - RNA, 19 nt, Artificial Sequence
  Description of Artificial Sequence: Synthetic oligonucleotide
  Antisense strand to SEQ ID NO: 1687289
uaaggcacagagaagucca

SEQ ID NO: 1687291 - RNA, 19 nt, Artificial Sequence
  Description of Artificial Sequence: Synthetic oligonucleotide
  Sense strand starting at position 3440 of SEQ ID NO: 1561641
acuuucugccagugugaag

SEQ ID NO: 1687292 - RNA, 19 nt, Artificial Sequence
  Description of Artificial Sequence: Synthetic oligonucleotide
  Antisense strand to SEQ ID NO: 1687291
cuucacacuggcagaaagu

SEQ ID NO: 1687293 - RNA, 19 nt, Artificial Sequence
  Description of Artificial Sequence: Synthetic oligonucleotide
  Sense strand starting at position 3447 of SEQ ID NO: 1561641
gccagugugaaguaaggaa

SEQ ID NO: 1687294 - RNA, 19 nt, Artificial Sequence
  Description of Artificial Sequence: Synthetic oligonucleotide
  Antisense strand to SEQ ID NO: 1687293
uuccuuacuucacacuggc

SEQ ID NO: 1687295 - RNA, 19 nt, Artificial Sequence
  Description of Artificial Sequence: Synthetic oligonucleotide
  Sense strand starting at position 3487 of SEQ ID NO: 1561641
gggucaaugugaggacaga

SEQ ID NO: 1687296 - RNA, 19 nt, Artificial Sequence
  Description of Artificial Sequence: Synthetic oligonucleotide
  Antisense strand to SEQ ID NO: 1687295
ucuguccucacauugaccc

SEQ ID NO: 1687297 - RNA, 19 nt, Artificial Sequence
  Description of Artificial Sequence: Synthetic oligonucleotide
  Sense strand starting at position 3 of SEQ ID NO: 1561642
gcuaguucugcguugacag

SEQ ID NO: 1687298 - RNA, 19 nt, Artificial Sequence
  Description of Artificial Sequence: Synthetic oligonucleotide
  Antisense strand to SEQ ID NO: 1687297
cugucaacgcagaacuagc

SEQ ID NO: 1687299 - RNA, 19 nt, Artificial Sequence
  Description of Artificial Sequence: Synthetic oligonucleotide
  Sense strand starting at position 250 of SEQ ID NO: 1561642
ucccuucuuccuggaaguu

SEQ ID NO: 1687300 - RNA, 19 nt, Artificial Sequence
  Description of Artificial Sequence: Synthetic oligonucleotide
  Antisense strand to SEQ ID NO: 1687299
aacuuccaggaagaaggga

SEQ ID NO: 1687301 - RNA, 19 nt, Artificial Sequence
  Description of Artificial Sequence: Synthetic oligonucleotide
  Sense strand starting at position 251 of SEQ ID NO: 1561642
cccuucuuccuggaaguua

SEQ ID NO: 1687302 - RNA, 19 nt, Artificial Sequence
  Description of Artificial Sequence: Synthetic oligonucleotide
  Antisense strand to SEQ ID NO: 1687301
uaacuuccaggaagaaggg

SEQ ID NO: 1687303 - RNA, 19 nt, Artificial Sequence
  Description of Artificial Sequence: Synthetic oligonucleotide
  Sense strand starting at position 262 of SEQ ID NO: 1561642
ggaaguuacauguaauagc

SEQ ID NO: 1687304 - RNA, 19 nt, Artificial Sequence
  Description of Artificial Sequence: Synthetic oligonucleotide
  Antisense strand to SEQ ID NO: 1687303
gcuauuacauguaacuucc

SEQ ID NO: 1687305 - RNA, 19 nt, Artificial Sequence
  Description of Artificial Sequence: Synthetic oligonucleotide
  Sense strand starting at position 365 of SEQ ID NO: 1561642
cuuaacacuguaugagauu

SEQ ID NO: 1687306 - RNA, 19 nt, Artificial Sequence
  Description of Artificial Sequence: Synthetic oligonucleotide
  Antisense strand to SEQ ID NO: 1687305
aaucucauacaguguuaag

SEQ ID NO: 1687307 - RNA, 19 nt, Artificial Sequence
  Description of Artificial Sequence: Synthetic oligonucleotide
  Sense strand starting at position 371 of SEQ ID NO: 1561642
acuguaugagauugggacu

SEQ ID NO: 1687308 - RNA, 19 nt, Artificial Sequence
  Description of Artificial Sequence: Synthetic oligonucleotide
  Antisense strand to SEQ ID NO: 1687307
agucccaaucucauacagu

SEQ ID NO: 1687309 - RNA, 19 nt, Artificial Sequence
  Description of Artificial Sequence: Synthetic oligonucleotide
  Sense strand starting at position 479 of SEQ ID NO: 1561642
cuguguccuccgcucuuaa

SEQ ID NO: 1687310 - RNA, 19 nt, Artificial Sequence
  Description of Artificial Sequence: Synthetic oligonucleotide
  Antisense strand to SEQ ID NO: 1687309
uuaagagcggaggacacag

SEQ ID NO: 1687311 - RNA, 19 nt, Artificial Sequence
  Description of Artificial Sequence: Synthetic oligonucleotide
  Sense strand starting at position 594 of SEQ ID NO: 1561642
gagggucaguuucuccaga

SEQ ID NO: 1687312 - RNA, 19 nt, Artificial Sequence
  Description of Artificial Sequence: Synthetic oligonucleotide
  Antisense strand to SEQ ID NO: 1687311
ucuggagaaacugacccuc

SEQ ID NO: 1687313 - RNA, 19 nt, Artificial Sequence
  Description of Artificial Sequence: Synthetic oligonucleotide
  Sense strand starting at position 596 of SEQ ID NO: 1561642
gggucaguuucuccagaga

SEQ ID NO: 1687314 - RNA, 19 nt, Artificial Sequence
  Description of Artificial Sequence: Synthetic oligonucleotide
  Antisense strand to SEQ ID NO: 1687313
ucucuggagaaacugaccc

SEQ ID NO: 1687315 - RNA, 19 nt, Artificial Sequence
  Description of Artificial Sequence: Synthetic oligonucleotide
  Sense strand starting at position 615 of SEQ ID NO: 1561642
ccgccuuuccuuuaaagga

SEQ ID NO: 1687316 - RNA, 19 nt, Artificial Sequence
  Description of Artificial Sequence: Synthetic oligonucleotide
  Antisense strand to SEQ ID NO: 1687315
uccuuuaaaggaaaggcgg

SEQ ID NO: 1687317 - RNA, 19 nt, Artificial Sequence
  Description of Artificial Sequence: Synthetic oligonucleotide
  Sense strand starting at position 1105 of SEQ ID NO: 1561642
ccuggagguggauguaaua

SEQ ID NO: 1687318 - RNA, 19 nt, Artificial Sequence
  Description of Artificial Sequence: Synthetic oligonucleotide
  Antisense strand to SEQ ID NO: 1687317
uauuacauccaccuccagg

SEQ ID NO: 1687319 - RNA, 19 nt, Artificial Sequence
  Description of Artificial Sequence: Synthetic oligonucleotide
  Sense strand starting at position 1340 of SEQ ID NO: 1561642
gcgggaguucucgagcaga

SEQ ID NO: 1687320 - RNA, 19 nt, Artificial Sequence
  Description of Artificial Sequence: Synthetic oligonucleotide
  Antisense strand to SEQ ID NO: 1687319
ucugcucgagaacucccgc

SEQ ID NO: 1687321 - RNA, 19 nt, Artificial Sequence
  Description of Artificial Sequence: Synthetic oligonucleotide
  Sense strand starting at position 1343 of SEQ ID NO: 1561642
ggaguucucgagcagagga

SEQ ID NO: 1687322 - RNA, 19 nt, Artificial Sequence
  Description of Artificial Sequence: Synthetic oligonucleotide
  Antisense strand to SEQ ID NO: 1687321
uccucugcucgagaacucc

SEQ ID NO: 1687323 - RNA, 19 nt, Artificial Sequence
  Description of Artificial Sequence: Synthetic oligonucleotide
  Sense strand starting at position 2157 of SEQ ID NO: 1561642
uggaguaaucgccaaaugg

SEQ ID NO: 1687324 - RNA, 19 nt, Artificial Sequence
  Description of Artificial Sequence: Synthetic oligonucleotide
  Antisense strand to SEQ ID NO: 1687323
ccauuuggcgauuacucca

SEQ ID NO: 1687325 - RNA, 19 nt, Artificial Sequence
  Description of Artificial Sequence: Synthetic oligonucleotide
  Sense strand starting at position 2504 of SEQ ID NO: 1561642
agaaacaaaucagcuagua

SEQ ID NO: 1687326 - RNA, 19 nt, Artificial Sequence
  Description of Artificial Sequence: Synthetic oligonucleotide
  Antisense strand to SEQ ID NO: 1687325
uacuagcugauuuguuucu

SEQ ID NO: 1687327 - RNA, 19 nt, Artificial Sequence
  Description of Artificial Sequence: Synthetic oligonucleotide
  Sense strand starting at position 2519 of SEQ ID NO: 1561642
aguaauaucagguacuggu

SEQ ID NO: 1687328 - RNA, 19 nt, Artificial Sequence
  Description of Artificial Sequence: Synthetic oligonucleotide
  Antisense strand to SEQ ID NO: 1687327
accaguaccugauauuacu

SEQ ID NO: 1687329 - RNA, 19 nt, Artificial Sequence
  Description of Artificial Sequence: Synthetic oligonucleotide
  Sense strand starting at position 2613 of SEQ ID NO: 1561642
agugacacgaacugagaua

SEQ ID NO: 1687330 - RNA, 19 nt, Artificial Sequence
  Description of Artificial Sequence: Synthetic oligonucleotide
  Antisense strand to SEQ ID NO: 1687329
uaucucaguucgugucacu

SEQ ID NO: 1687331 - RNA, 19 nt, Artificial Sequence
  Description of Artificial Sequence: Synthetic oligonucleotide
  Sense strand starting at position 2813 of SEQ ID NO: 1561642
gcuguagucagggauccua

SEQ ID NO: 1687332 - RNA, 19 nt, Artificial Sequence
  Description of Artificial Sequence: Synthetic oligonucleotide
  Antisense strand to SEQ ID NO: 1687331
uaggaucccugacuacagc

SEQ ID NO: 1687333 - RNA, 19 nt, Artificial Sequence
  Description of Artificial Sequence: Synthetic oligonucleotide
  Sense strand starting at position 2852 of SEQ ID NO: 1561642
ugauaacaauugucaaugu

SEQ ID NO: 1687334 - RNA, 19 nt, Artificial Sequence
  Description of Artificial Sequence: Synthetic oligonucleotide
  Antisense strand to SEQ ID NO: 1687333
acauugacaauuguuauca

SEQ ID NO: 1687335 - RNA, 19 nt, Artificial Sequence
  Description of Artificial Sequence: Synthetic oligonucleotide
  Sense strand starting at position 2861 of SEQ ID NO: 1561642
uugucaaugucucuagacu

SEQ ID NO: 1687336 - RNA, 19 nt, Artificial Sequence
  Description of Artificial Sequence: Synthetic oligonucleotide
  Antisense strand to SEQ ID NO: 1687335
agucuagagacauugacaa

SEQ ID NO: 1687337 - RNA, 19 nt, Artificial Sequence
  Description of Artificial Sequence: Synthetic oligonucleotide
  Sense strand starting at position 2862 of SEQ ID NO: 1561642
ugucaaugucucuagacuu

SEQ ID NO: 1687338 - RNA, 19 nt, Artificial Sequence
  Description of Artificial Sequence: Synthetic oligonucleotide
  Antisense strand to SEQ ID NO: 1687337
aagucuagagacauugaca

SEQ ID NO: 1687339 - RNA, 19 nt, Artificial Sequence
  Description of Artificial Sequence: Synthetic oligonucleotide
  Sense strand starting at position 2882 of SEQ ID NO: 1561642
ugcugagaaacauggacuu

SEQ ID NO: 1687340 - RNA, 19 nt, Artificial Sequence
  Description of Artificial Sequence: Synthetic oligonucleotide
  Antisense strand to SEQ ID NO: 1687339
aaguccauguuucucagca

SEQ ID NO: 1687341 - RNA, 19 nt, Artificial Sequence
  Description of Artificial Sequence: Synthetic oligonucleotide
  Sense strand starting at position 3014 of SEQ ID NO: 1561642
gcaguaagggcuuaaauca

SEQ ID NO: 1687342 - RNA, 19 nt, Artificial Sequence
  Description of Artificial Sequence: Synthetic oligonucleotide
  Antisense strand to SEQ ID NO: 1687341
ugauuuaagcccuuacugc

SEQ ID NO: 1687343 - RNA, 19 nt, Artificial Sequence
  Description of Artificial Sequence: Synthetic oligonucleotide
  Sense strand starting at position 3059 of SEQ ID NO: 1561642
ccuugaccucuagguugua

SEQ ID NO: 1687344 - RNA, 19 nt, Artificial Sequence
  Description of Artificial Sequence: Synthetic oligonucleotide
  Antisense strand to SEQ ID NO: 1687343
uacaaccuagaggucaagg

SEQ ID NO: 1687345 - RNA, 19 nt, Artificial Sequence
  Description of Artificial Sequence: Synthetic oligonucleotide
  Sense strand starting at position 3068 of SEQ ID NO: 1561642
cuagguuguaacugucuca

SEQ ID NO: 1687346 - RNA, 19 nt, Artificial Sequence
  Description of Artificial Sequence: Synthetic oligonucleotide
  Antisense strand to SEQ ID NO: 1687345
ugagacaguuacaaccuag

SEQ ID NO: 1687347 - RNA, 19 nt, Artificial Sequence
  Description of Artificial Sequence: Synthetic oligonucleotide
  Sense strand starting at position 3106 of SEQ ID NO: 1561642
auucuuauccugcaggcaa

SEQ ID NO: 1687348 - RNA, 19 nt, Artificial Sequence
  Description of Artificial Sequence: Synthetic oligonucleotide
  Antisense strand to SEQ ID NO: 1687347
uugccugcaggauaagaau

SEQ ID NO: 1687349 - RNA, 19 nt, Artificial Sequence
  Description of Artificial Sequence: Synthetic oligonucleotide
  Sense strand starting at position 3108 of SEQ ID NO: 1561642
ucuuauccugcaggcaaau

SEQ ID NO: 1687350 - RNA, 19 nt, Artificial Sequence
  Description of Artificial Sequence: Synthetic oligonucleotide
  Antisense strand to SEQ ID NO: 1687349
auuugccugcaggauaaga

SEQ ID NO: 1687351 - RNA, 19 nt, Artificial Sequence
  Description of Artificial Sequence: Synthetic oligonucleotide
  Sense strand starting at position 3118 of SEQ ID NO: 1561642
caggcaaaucgguauccua

SEQ ID NO: 1687352 - RNA, 19 nt, Artificial Sequence
  Description of Artificial Sequence: Synthetic oligonucleotide
  Antisense strand to SEQ ID NO: 1687351
uaggauaccgauuugccug

SEQ ID NO: 1687353 - RNA, 19 nt, Artificial Sequence
  Description of Artificial Sequence: Synthetic oligonucleotide
  Sense strand starting at position 3224 of SEQ ID NO: 1561642
ccuagaaauuuauggcaag

SEQ ID NO: 1687354 - RNA, 19 nt, Artificial Sequence
  Description of Artificial Sequence: Synthetic oligonucleotide
  Antisense strand to SEQ ID NO: 1687353
cuugccauaaauuucuagg

SEQ ID NO: 1687355 - RNA, 19 nt, Artificial Sequence
  Description of Artificial Sequence: Synthetic oligonucleotide
  Sense strand starting at position 3225 of SEQ ID NO: 1561642
cuagaaauuuauggcaaga

SEQ ID NO: 1687356 - RNA, 19 nt, Artificial Sequence
  Description of Artificial Sequence: Synthetic oligonucleotide
  Antisense strand to SEQ ID NO: 1687355
ucuugccauaaauuucuag

SEQ ID NO: 1687357 - RNA, 19 nt, Artificial Sequence
  Description of Artificial Sequence: Synthetic oligonucleotide
  Sense strand starting at position 3227 of SEQ ID NO: 1561642
agaaauuuauggcaagaag

SEQ ID NO: 1687358 - RNA, 19 nt, Artificial Sequence
  Description of Artificial Sequence: Synthetic oligonucleotide
  Antisense strand to SEQ ID NO: 1687357
cuucuugccauaaauuucu

SEQ ID NO: 1687359 - RNA, 19 nt, Artificial Sequence
  Description of Artificial Sequence: Synthetic oligonucleotide
  Sense strand starting at position 3280 of SEQ ID NO: 1561642
ugucccuguguagacauau

SEQ ID NO: 1687360 - RNA, 19 nt, Artificial Sequence
  Description of Artificial Sequence: Synthetic oligonucleotide
  Antisense strand to SEQ ID NO: 1687359
auaugucuacacagggaca

SEQ ID NO: 1687361 - RNA, 19 nt, Artificial Sequence
  Description of Artificial Sequence: Synthetic oligonucleotide
  Sense strand starting at position 3423 of SEQ ID NO: 1561642
guguuucuuugauccuuua

SEQ ID NO: 1687362 - RNA, 19 nt, Artificial Sequence
  Description of Artificial Sequence: Synthetic oligonucleotide
  Antisense strand to SEQ ID NO: 1687361
uaaaggaucaaagaaacac

SEQ ID NO: 1687363 - RNA, 19 nt, Artificial Sequence
  Description of Artificial Sequence: Synthetic oligonucleotide
  Sense strand starting at position 3651 of SEQ ID NO: 1561642
uggagaaugguauggugga

SEQ ID NO: 1687364 - RNA, 19 nt, Artificial Sequence
  Description of Artificial Sequence: Synthetic oligonucleotide
  Antisense strand to SEQ ID NO: 1687363
uccaccauaccauucucca

SEQ ID NO: 1687365 - RNA, 19 nt, Artificial Sequence
  Description of Artificial Sequence: Synthetic oligonucleotide
  Sense strand starting at position 3657 of SEQ ID NO: 1561642
augguaugguggaagagaa

SEQ ID NO: 1687366 - RNA, 19 nt, Artificial Sequence
  Description of Artificial Sequence: Synthetic oligonucleotide
  Antisense strand to SEQ ID NO: 1687365
uucucuuccaccauaccau

SEQ ID NO: 1687367 - RNA, 19 nt, Artificial Sequence
  Description of Artificial Sequence: Synthetic oligonucleotide
  Sense strand starting at position 3713 of SEQ ID NO: 1561642
gacucagauagaugugagu

SEQ ID NO: 1687368 - RNA, 19 nt, Artificial Sequence
  Description of Artificial Sequence: Synthetic oligonucleotide
  Antisense strand to SEQ ID NO: 1687367
acucacaucuaucugaguc

SEQ ID NO: 1687369 - RNA, 19 nt, Artificial Sequence
  Description of Artificial Sequence: Synthetic oligonucleotide
  Sense strand starting at position 3715 of SEQ ID NO: 1561642
cucagauagaugugaguuc

SEQ ID NO: 1687370 - RNA, 19 nt, Artificial Sequence
  Description of Artificial Sequence: Synthetic oligonucleotide
  Antisense strand to SEQ ID NO: 1687369
gaacucacaucuaucugag

SEQ ID NO: 1687371 - RNA, 19 nt, Artificial Sequence
  Description of Artificial Sequence: Synthetic oligonucleotide
  Sense strand starting at position 3844 of SEQ ID NO: 1561642
ggaugugauguggauucga

SEQ ID NO: 1687372 - RNA, 19 nt, Artificial Sequence
  Description of Artificial Sequence: Synthetic oligonucleotide
  Antisense strand to SEQ ID NO: 1687371
ucgaauccacaucacaucc

SEQ ID NO: 1687373 - RNA, 19 nt, Artificial Sequence
  Description of Artificial Sequence: Synthetic oligonucleotide
  Sense strand starting at position 3898 of SEQ ID NO: 1561642
ccagacuagccggaaucau

SEQ ID NO: 1687374 - RNA, 19 nt, Artificial Sequence
  Description of Artificial Sequence: Synthetic oligonucleotide
  Antisense strand to SEQ ID NO: 1687373
augauuccggcuagucugg

SEQ ID NO: 1687375 - RNA, 19 nt, Artificial Sequence
  Description of Artificial Sequence: Synthetic oligonucleotide
  Sense strand starting at position 3909 of SEQ ID NO: 1561642
ggaaucaucuaacuugcaa

SEQ ID NO: 1687376 - RNA, 19 nt, Artificial Sequence
  Description of Artificial Sequence: Synthetic oligonucleotide
  Antisense strand to SEQ ID NO: 1687375
uugcaaguuagaugauucc

SEQ ID NO: 1687377 - RNA, 19 nt, Artificial Sequence
  Description of Artificial Sequence: Synthetic oligonucleotide
  Sense strand starting at position 8 of SEQ ID NO: 1561643
gcugaaucauaaucuugau

SEQ ID NO: 1687378 - RNA, 19 nt, Artificial Sequence
  Description of Artificial Sequence: Synthetic oligonucleotide
  Antisense strand to SEQ ID NO: 1687377
aucaagauuaugauucagc

SEQ ID NO: 1687379 - RNA, 19 nt, Artificial Sequence
  Description of Artificial Sequence: Synthetic oligonucleotide
  Sense strand starting at position 112 of SEQ ID NO: 1561643
acagguuaacucugcaaau

SEQ ID NO: 1687380 - RNA, 19 nt, Artificial Sequence
  Description of Artificial Sequence: Synthetic oligonucleotide
  Antisense strand to SEQ ID NO: 1687379
auuugcagaguuaaccugu

SEQ ID NO: 1687381 - RNA, 19 nt, Artificial Sequence
  Description of Artificial Sequence: Synthetic oligonucleotide
  Sense strand starting at position 114 of SEQ ID NO: 1561643
agguuaacucugcaaauug

SEQ ID NO: 1687382 - RNA, 19 nt, Artificial Sequence
  Description of Artificial Sequence: Synthetic oligonucleotide
  Antisense strand to SEQ ID NO: 1687381
caauuugcagaguuaaccu

SEQ ID NO: 1687383 - RNA, 19 nt, Artificial Sequence
  Description of Artificial Sequence: Synthetic oligonucleotide
  Sense strand starting at position 499 of SEQ ID NO: 1561643
gaaggcaugcuccagguua

SEQ ID NO: 1687384 - RNA, 19 nt, Artificial Sequence
  Description of Artificial Sequence: Synthetic oligonucleotide
  Antisense strand to SEQ ID NO: 1687383
uaaccuggagcaugccuuc

SEQ ID NO: 1687385 - RNA, 19 nt, Artificial Sequence
  Description of Artificial Sequence: Synthetic oligonucleotide
  Sense strand starting at position 597 of SEQ ID NO: 1561643
uucacagaggucggaauua

SEQ ID NO: 1687386 - RNA, 19 nt, Artificial Sequence
  Description of Artificial Sequence: Synthetic oligonucleotide
  Antisense strand to SEQ ID NO: 1687385
uaauuccgaccucugugaa

SEQ ID NO: 1687387 - RNA, 19 nt, Artificial Sequence
  Description of Artificial Sequence: Synthetic oligonucleotide
  Sense strand starting at position 1039 of SEQ ID NO: 1561643
ggcacucacagauggugaa

SEQ ID NO: 1687388 - RNA, 19 nt, Artificial Sequence
  Description of Artificial Sequence: Synthetic oligonucleotide
  Antisense strand to SEQ ID NO: 1687387
uucaccaucugugagugcc

SEQ ID NO: 1687389 - RNA, 19 nt, Artificial Sequence
  Description of Artificial Sequence: Synthetic oligonucleotide
  Sense strand starting at position 1040 of SEQ ID NO: 1561643
gcacucacagauggugaau

SEQ ID NO: 1687390 - RNA, 19 nt, Artificial Sequence
  Description of Artificial Sequence: Synthetic oligonucleotide
  Antisense strand to SEQ ID NO: 1687389
auucaccaucugugagugc

SEQ ID NO: 1687391 - RNA, 19 nt, Artificial Sequence
  Description of Artificial Sequence: Synthetic oligonucleotide
  Sense strand starting at position 1152 of SEQ ID NO: 1561643
uauagaaggccuugagucu

SEQ ID NO: 1687392 - RNA, 19 nt, Artificial Sequence
  Description of Artificial Sequence: Synthetic oligonucleotide
  Antisense strand to SEQ ID NO: 1687391
agacucaaggccuucuaua

SEQ ID NO: 1687393 - RNA, 19 nt, Artificial Sequence
  Description of Artificial Sequence: Synthetic oligonucleotide
  Sense strand starting at position 1191 of SEQ ID NO: 1561643
gcagguggcccauauggaa

SEQ ID NO: 1687394 - RNA, 19 nt, Artificial Sequence
  Description of Artificial Sequence: Synthetic oligonucleotide
  Antisense strand to SEQ ID NO: 1687393
uuccauaugggccaccugc

SEQ ID NO: 1687395 - RNA, 19 nt, Artificial Sequence
  Description of Artificial Sequence: Synthetic oligonucleotide
  Sense strand starting at position 1214 of SEQ ID NO: 1561643
ccagcauccucuuugagag

SEQ ID NO: 1687396 - RNA, 19 nt, Artificial Sequence
  Description of Artificial Sequence: Synthetic oligonucleotide
  Antisense strand to SEQ ID NO: 1687395
cucucaaagaggaugcugg

SEQ ID NO: 1687397 - RNA, 19 nt, Artificial Sequence
  Description of Artificial Sequence: Synthetic oligonucleotide
  Sense strand starting at position 1215 of SEQ ID NO: 1561643
cagcauccucuuugagaga

SEQ ID NO: 1687398 - RNA, 19 nt, Artificial Sequence
  Description of Artificial Sequence: Synthetic oligonucleotide
  Antisense strand to SEQ ID NO: 1687397
ucucucaaagaggaugcug

SEQ ID NO: 1687399 - RNA, 19 nt, Artificial Sequence
  Description of Artificial Sequence: Synthetic oligonucleotide
  Sense strand starting at position 1222 of SEQ ID NO: 1561643
cucuuugagagauggcuuu

SEQ ID NO: 1687400 - RNA, 19 nt, Artificial Sequence
  Description of Artificial Sequence: Synthetic oligonucleotide
  Antisense strand to SEQ ID NO: 1687399
aaagccaucucucaaagag

SEQ ID NO: 1687401 - RNA, 19 nt, Artificial Sequence
  Description of Artificial Sequence: Synthetic oligonucleotide
  Sense strand starting at position 1305 of SEQ ID NO: 1561643
cuuauuucccgucacgauc

SEQ ID NO: 1687402 - RNA, 19 nt, Artificial Sequence
  Description of Artificial Sequence: Synthetic oligonucleotide
  Antisense strand to SEQ ID NO: 1687401
gaucgugacgggaaauaag

SEQ ID NO: 1687403 - RNA, 19 nt, Artificial Sequence
  Description of Artificial Sequence: Synthetic oligonucleotide
  Sense strand starting at position 1492 of SEQ ID NO: 1561643
cugcuauguggugugucau

SEQ ID NO: 1687404 - RNA, 19 nt, Artificial Sequence
  Description of Artificial Sequence: Synthetic oligonucleotide
  Antisense strand to SEQ ID NO: 1687403
augacacaccacauagcag

SEQ ID NO: 1687405 - RNA, 19 nt, Artificial Sequence
  Description of Artificial Sequence: Synthetic oligonucleotide
  Sense strand starting at position 1500 of SEQ ID NO: 1561643
uggugugucauuuggccaa

SEQ ID NO: 1687406 - RNA, 19 nt, Artificial Sequence
  Description of Artificial Sequence: Synthetic oligonucleotide
  Antisense strand to SEQ ID NO: 1687405
uuggccaaaugacacacca

SEQ ID NO: 1687407 - RNA, 19 nt, Artificial Sequence
  Description of Artificial Sequence: Synthetic oligonucleotide
  Sense strand starting at position 1502 of SEQ ID NO: 1561643
gugugucauuuggccaaug

SEQ ID NO: 1687408 - RNA, 19 nt, Artificial Sequence
  Description of Artificial Sequence: Synthetic oligonucleotide
  Antisense strand to SEQ ID NO: 1687407
cauuggccaaaugacacac

SEQ ID NO: 1687409 - RNA, 19 nt, Artificial Sequence
  Description of Artificial Sequence: Synthetic oligonucleotide
  Sense strand starting at position 1533 of SEQ ID NO: 1561643
cucaauuagggcuagaagu

SEQ ID NO: 1687410 - RNA, 19 nt, Artificial Sequence
  Description of Artificial Sequence: Synthetic oligonucleotide
  Antisense strand to SEQ ID NO: 1687409
acuucuagcccuaauugag

SEQ ID NO: 1687411 - RNA, 19 nt, Artificial Sequence
  Description of Artificial Sequence: Synthetic oligonucleotide
  Sense strand starting at position 1638 of SEQ ID NO: 1561643
gguggcaagccgagucuua

SEQ ID NO: 1687412 - RNA, 19 nt, Artificial Sequence
  Description of Artificial Sequence: Synthetic oligonucleotide
  Antisense strand to SEQ ID NO: 1687411
uaagacucggcuugccacc

SEQ ID NO: 1687413 - RNA, 19 nt, Artificial Sequence
  Description of Artificial Sequence: Synthetic oligonucleotide
  Sense strand starting at position 1731 of SEQ ID NO: 1561643
ugagucagcuuuccuagga

SEQ ID NO: 1687414 - RNA, 19 nt, Artificial Sequence
  Description of Artificial Sequence: Synthetic oligonucleotide
  Antisense strand to SEQ ID NO: 1687413
uccuaggaaagcugacuca

SEQ ID NO: 1687415 - RNA, 19 nt, Artificial Sequence
  Description of Artificial Sequence: Synthetic oligonucleotide
  Sense strand starting at position 1732 of SEQ ID NO: 1561643
gagucagcuuuccuaggaa

SEQ ID NO: 1687416 - RNA, 19 nt, Artificial Sequence
  Description of Artificial Sequence: Synthetic oligonucleotide
  Antisense strand to SEQ ID NO: 1687415
uuccuaggaaagcugacuc

SEQ ID NO: 1687417 - RNA, 19 nt, Artificial Sequence
  Description of Artificial Sequence: Synthetic oligonucleotide
  Sense strand starting at position 1735 of SEQ ID NO: 1561643
ucagcuuuccuaggaagag

SEQ ID NO: 1687418 - RNA, 19 nt, Artificial Sequence
  Description of Artificial Sequence: Synthetic oligonucleotide
  Antisense strand to SEQ ID NO: 1687417
cucuuccuaggaaagcuga

SEQ ID NO: 1687419 - RNA, 19 nt, Artificial Sequence
  Description of Artificial Sequence: Synthetic oligonucleotide
  Sense strand starting at position 1795 of SEQ ID NO: 1561643
caucuaaaccugugugaga

SEQ ID NO: 1687420 - RNA, 19 nt, Artificial Sequence
  Description of Artificial Sequence: Synthetic oligonucleotide
  Antisense strand to SEQ ID NO: 1687419
ucucacacagguuuagaug

SEQ ID NO: 1687421 - RNA, 19 nt, Artificial Sequence
  Description of Artificial Sequence: Synthetic oligonucleotide
  Sense strand starting at position 1796 of SEQ ID NO: 1561643
aucuaaaccugugugagaa

SEQ ID NO: 1687422 - RNA, 19 nt, Artificial Sequence
  Description of Artificial Sequence: Synthetic oligonucleotide
  Antisense strand to SEQ ID NO: 1687421
uucucacacagguuuagau

SEQ ID NO: 1687423 - RNA, 19 nt, Artificial Sequence
  Description of Artificial Sequence: Synthetic oligonucleotide
  Sense strand starting at position 1797 of SEQ ID NO: 1561643
ucuaaaccugugugagaau

SEQ ID NO: 1687424 - RNA, 19 nt, Artificial Sequence
  Description of Artificial Sequence: Synthetic oligonucleotide
  Antisense strand to SEQ ID NO: 1687423
auucucacacagguuuaga

SEQ ID NO: 1687425 - RNA, 19 nt, Artificial Sequence
  Description of Artificial Sequence: Synthetic oligonucleotide
  Sense strand starting at position 2218 of SEQ ID NO: 1561643
cuggaagacugcuuaugaa

SEQ ID NO: 1687426 - RNA, 19 nt, Artificial Sequence
  Description of Artificial Sequence: Synthetic oligonucleotide
  Antisense strand to SEQ ID NO: 1687425
uucauaagcagucuuccag

SEQ ID NO: 1687427 - RNA, 19 nt, Artificial Sequence
  Description of Artificial Sequence: Synthetic oligonucleotide
  Sense strand starting at position 2374 of SEQ ID NO: 1561643
cugugauggacuugaaauu

SEQ ID NO: 1687428 - RNA, 19 nt, Artificial Sequence
  Description of Artificial Sequence: Synthetic oligonucleotide
  Antisense strand to SEQ ID NO: 1687427
aauuucaaguccaucacag

SEQ ID NO: 1687429 - RNA, 19 nt, Artificial Sequence
  Description of Artificial Sequence: Synthetic oligonucleotide
  Sense strand starting at position 2477 of SEQ ID NO: 1561643
cuuaaauauuagcucagga

SEQ ID NO: 1687430 - RNA, 19 nt, Artificial Sequence
  Description of Artificial Sequence: Synthetic oligonucleotide
  Antisense strand to SEQ ID NO: 1687429
uccugagcuaauauuuaag

SEQ ID NO: 1687431 - RNA, 19 nt, Artificial Sequence
  Description of Artificial Sequence: Synthetic oligonucleotide
  Sense strand starting at position 2556 of SEQ ID NO: 1561643
gguuauccucuauagcaua

SEQ ID NO: 1687432 - RNA, 19 nt, Artificial Sequence
  Description of Artificial Sequence: Synthetic oligonucleotide
  Antisense strand to SEQ ID NO: 1687431
uaugcuauagaggauaacc

SEQ ID NO: 1687433 - RNA, 19 nt, Artificial Sequence
  Description of Artificial Sequence: Synthetic oligonucleotide
  Sense strand starting at position 2593 of SEQ ID NO: 1561643
cauuguugguaauugauaa

SEQ ID NO: 1687434 - RNA, 19 nt, Artificial Sequence
  Description of Artificial Sequence: Synthetic oligonucleotide
  Antisense strand to SEQ ID NO: 1687433
uuaucaauuaccaacaaug

SEQ ID NO: 1687435 - RNA, 19 nt, Artificial Sequence
  Description of Artificial Sequence: Synthetic oligonucleotide
  Sense strand starting at position 2600 of SEQ ID NO: 1561643
gguaauugauaacuuggua

SEQ ID NO: 1687436 - RNA, 19 nt, Artificial Sequence
  Description of Artificial Sequence: Synthetic oligonucleotide
  Antisense strand to SEQ ID NO: 1687435
uaccaaguuaucaauuacc

SEQ ID NO: 1687437 - RNA, 19 nt, Artificial Sequence
  Description of Artificial Sequence: Synthetic oligonucleotide
  Sense strand starting at position 2604 of SEQ ID NO: 1561643
auugauaacuugguacaau

SEQ ID NO: 1687438 - RNA, 19 nt, Artificial Sequence
  Description of Artificial Sequence: Synthetic oligonucleotide
  Antisense strand to SEQ ID NO: 1687437
auuguaccaaguuaucaau

SEQ ID NO: 1687439 - RNA, 19 nt, Artificial Sequence
  Description of Artificial Sequence: Synthetic oligonucleotide
  Sense strand starting at position 2830 of SEQ ID NO: 1561643
gcauuagaaugaccuggaa

SEQ ID NO: 1687440 - RNA, 19 nt, Artificial Sequence
  Description of Artificial Sequence: Synthetic oligonucleotide
  Antisense strand to SEQ ID NO: 1687439
uuccaggucauucuaaugc

SEQ ID NO: 1687441 - RNA, 19 nt, Artificial Sequence
  Description of Artificial Sequence: Synthetic oligonucleotide
  Sense strand starting at position 3132 of SEQ ID NO: 1561643
cgcuuuacugaggaucuau

SEQ ID NO: 1687442 - RNA, 19 nt, Artificial Sequence
  Description of Artificial Sequence: Synthetic oligonucleotide
  Antisense strand to SEQ ID NO: 1687441
auagauccucaguaaagcg

SEQ ID NO: 1687443 - RNA, 19 nt, Artificial Sequence
  Description of Artificial Sequence: Synthetic oligonucleotide
  Sense strand starting at position 3239 of SEQ ID NO: 1561643
guacaaagguaaucugacu

SEQ ID NO: 1687444 - RNA, 19 nt, Artificial Sequence
  Description of Artificial Sequence: Synthetic oligonucleotide
  Antisense strand to SEQ ID NO: 1687443
agucagauuaccuuuguac

SEQ ID NO: 1687445 - RNA, 19 nt, Artificial Sequence
  Description of Artificial Sequence: Synthetic oligonucleotide
  Sense strand starting at position 3365 of SEQ ID NO: 1561643
ugacuauuaucaguuggua

SEQ ID NO: 1687446 - RNA, 19 nt, Artificial Sequence
  Description of Artificial Sequence: Synthetic oligonucleotide
  Antisense strand to SEQ ID NO: 1687445
uaccaacugauaauaguca

SEQ ID NO: 1687447 - RNA, 19 nt, Artificial Sequence
  Description of Artificial Sequence: Synthetic oligonucleotide
  Sense strand starting at position 3368 of SEQ ID NO: 1561643
cuauuaucaguugguagau

SEQ ID NO: 1687448 - RNA, 19 nt, Artificial Sequence
  Description of Artificial Sequence: Synthetic oligonucleotide
  Antisense strand to SEQ ID NO: 1687447
aucuaccaacugauaauag

SEQ ID NO: 1687449 - RNA, 19 nt, Artificial Sequence
  Description of Artificial Sequence: Synthetic oligonucleotide
  Sense strand starting at position 3369 of SEQ ID NO: 1561643
uauuaucaguugguagaua

SEQ ID NO: 1687450 - RNA, 19 nt, Artificial Sequence
  Description of Artificial Sequence: Synthetic oligonucleotide
  Antisense strand to SEQ ID NO: 1687449
uaucuaccaacugauaaua

SEQ ID NO: 1687451 - RNA, 19 nt, Artificial Sequence
  Description of Artificial Sequence: Synthetic oligonucleotide
  Sense strand starting at position 3414 of SEQ ID NO: 1561643
guggaauaaccuggaguca

SEQ ID NO: 1687452 - RNA, 19 nt, Artificial Sequence
  Description of Artificial Sequence: Synthetic oligonucleotide
  Antisense strand to SEQ ID NO: 1687451
ugacuccagguuauuccac

SEQ ID NO: 1687453 - RNA, 19 nt, Artificial Sequence
  Description of Artificial Sequence: Synthetic oligonucleotide
  Sense strand starting at position 3627 of SEQ ID NO: 1561643
gcugacaauuaugucugaa

SEQ ID NO: 1687454 - RNA, 19 nt, Artificial Sequence
  Description of Artificial Sequence: Synthetic oligonucleotide
  Antisense strand to SEQ ID NO: 1687453
uucagacauaauugucagc

SEQ ID NO: 1687455 - RNA, 19 nt, Artificial Sequence
  Description of Artificial Sequence: Synthetic oligonucleotide
  Sense strand starting at position 3630 of SEQ ID NO: 1561643
gacaauuaugucugaaggu

SEQ ID NO: 1687456 - RNA, 19 nt, Artificial Sequence
  Description of Artificial Sequence: Synthetic oligonucleotide
  Antisense strand to SEQ ID NO: 1687455
accuucagacauaauuguc

SEQ ID NO: 1687457 - RNA, 19 nt, Artificial Sequence
  Description of Artificial Sequence: Synthetic oligonucleotide
  Sense strand starting at position 27 of SEQ ID NO: 1561644
uguggugugugcauaugua

SEQ ID NO: 1687458 - RNA, 19 nt, Artificial Sequence
  Description of Artificial Sequence: Synthetic oligonucleotide
  Antisense strand to SEQ ID NO: 1687457
uacauaugcacacaccaca

SEQ ID NO: 1687459 - RNA, 19 nt, Artificial Sequence
  Description of Artificial Sequence: Synthetic oligonucleotide
  Sense strand starting at position 272 of SEQ ID NO: 1561644
uugugaacauggcuuacua

SEQ ID NO: 1687460 - RNA, 19 nt, Artificial Sequence
  Description of Artificial Sequence: Synthetic oligonucleotide
  Antisense strand to SEQ ID NO: 1687459
uaguaagccauguucacaa

SEQ ID NO: 1687461 - RNA, 19 nt, Artificial Sequence
  Description of Artificial Sequence: Synthetic oligonucleotide
  Sense strand starting at position 274 of SEQ ID NO: 1561644
gugaacauggcuuacuaca

SEQ ID NO: 1687462 - RNA, 19 nt, Artificial Sequence
  Description of Artificial Sequence: Synthetic oligonucleotide
  Antisense strand to SEQ ID NO: 1687461
uguaguaagccauguucac

SEQ ID NO: 1687463 - RNA, 19 nt, Artificial Sequence
  Description of Artificial Sequence: Synthetic oligonucleotide
  Sense strand starting at position 604 of SEQ ID NO: 1561644
caaacagaguccuugguca

SEQ ID NO: 1687464 - RNA, 19 nt, Artificial Sequence
  Description of Artificial Sequence: Synthetic oligonucleotide
  Antisense strand to SEQ ID NO: 1687463
ugaccaaggacucuguuug

SEQ ID NO: 1687465 - RNA, 19 nt, Artificial Sequence
  Description of Artificial Sequence: Synthetic oligonucleotide
  Sense strand starting at position 606 of SEQ ID NO: 1561644
aacagaguccuuggucaaa

SEQ ID NO: 1687466 - RNA, 19 nt, Artificial Sequence
  Description of Artificial Sequence: Synthetic oligonucleotide
  Antisense strand to SEQ ID NO: 1687465
uuugaccaaggacucuguu

SEQ ID NO: 1687467 - RNA, 19 nt, Artificial Sequence
  Description of Artificial Sequence: Synthetic oligonucleotide
  Sense strand starting at position 659 of SEQ ID NO: 1561644
aaaggaaguuacuuccuga

SEQ ID NO: 1687468 - RNA, 19 nt, Artificial Sequence
  Description of Artificial Sequence: Synthetic oligonucleotide
  Antisense strand to SEQ ID NO: 1687467
ucaggaaguaacuuccuuu

SEQ ID NO: 1687469 - RNA, 19 nt, Artificial Sequence
  Description of Artificial Sequence: Synthetic oligonucleotide
  Sense strand starting at position 698 of SEQ ID NO: 1561644
auaaucaguuuguugggau

SEQ ID NO: 1687470 - RNA, 19 nt, Artificial Sequence
  Description of Artificial Sequence: Synthetic oligonucleotide
  Antisense strand to SEQ ID NO: 1687469
aucccaacaaacugauuau

SEQ ID NO: 1687471 - RNA, 19 nt, Artificial Sequence
  Description of Artificial Sequence: Synthetic oligonucleotide
  Sense strand starting at position 705 of SEQ ID NO: 1561644
guuuguugggaugauugaa

SEQ ID NO: 1687472 - RNA, 19 nt, Artificial Sequence
  Description of Artificial Sequence: Synthetic oligonucleotide
  Antisense strand to SEQ ID NO: 1687471
uucaaucaucccaacaaac

SEQ ID NO: 1687473 - RNA, 19 nt, Artificial Sequence
  Description of Artificial Sequence: Synthetic oligonucleotide
  Sense strand starting at position 1152 of SEQ ID NO: 1561644
uuaauaaauccagggcuua

SEQ ID NO: 1687474 - RNA, 19 nt, Artificial Sequence
  Description of Artificial Sequence: Synthetic oligonucleotide
  Antisense strand to SEQ ID NO: 1687473
uaagcccuggauuuauuaa

SEQ ID NO: 1687475 - RNA, 19 nt, Artificial Sequence
  Description of Artificial Sequence: Synthetic oligonucleotide
  Sense strand starting at position 1233 of SEQ ID NO: 1561644
aguuccuaagauugucgaa

SEQ ID NO: 1687476 - RNA, 19 nt, Artificial Sequence
  Description of Artificial Sequence: Synthetic oligonucleotide
  Antisense strand to SEQ ID NO: 1687475
uucgacaaucuuaggaacu

SEQ ID NO: 1687477 - RNA, 19 nt, Artificial Sequence
  Description of Artificial Sequence: Synthetic oligonucleotide
  Sense strand starting at position 1235 of SEQ ID NO: 1561644
uuccuaagauugucgaaca

SEQ ID NO: 1687478 - RNA, 19 nt, Artificial Sequence
  Description of Artificial Sequence: Synthetic oligonucleotide
  Antisense strand to SEQ ID NO: 1687477
uguucgacaaucuuaggaa

SEQ ID NO: 1687479 - RNA, 19 nt, Artificial Sequence
  Description of Artificial Sequence: Synthetic oligonucleotide
  Sense strand starting at position 1436 of SEQ ID NO: 1561644
acuugaaauugucuugguu

SEQ ID NO: 1687480 - RNA, 19 nt, Artificial Sequence
  Description of Artificial Sequence: Synthetic oligonucleotide
  Antisense strand to SEQ ID NO: 1687479
aaccaagacaauuucaagu

SEQ ID NO: 1687481 - RNA, 19 nt, Artificial Sequence
  Description of Artificial Sequence: Synthetic oligonucleotide
  Sense strand starting at position 1782 of SEQ ID NO: 1561644
ugugaagaugcgggaauaa

SEQ ID NO: 1687482 - RNA, 19 nt, Artificial Sequence
  Description of Artificial Sequence: Synthetic oligonucleotide
  Antisense strand to SEQ ID NO: 1687481
uuauucccgcaucuucaca

SEQ ID NO: 1687483 - RNA, 19 nt, Artificial Sequence
  Description of Artificial Sequence: Synthetic oligonucleotide
  Sense strand starting at position 1894 of SEQ ID NO: 1561644
ggugauuuguccuugccuc

SEQ ID NO: 1687484 - RNA, 19 nt, Artificial Sequence
  Description of Artificial Sequence: Synthetic oligonucleotide
  Antisense strand to SEQ ID NO: 1687483
gaggcaaggacaaaucacc

SEQ ID NO: 1687485 - RNA, 19 nt, Artificial Sequence
  Description of Artificial Sequence: Synthetic oligonucleotide
  Sense strand starting at position 2008 of SEQ ID NO: 1561644
aguucugauucugcauaaa

SEQ ID NO: 1687486 - RNA, 19 nt, Artificial Sequence
  Description of Artificial Sequence: Synthetic oligonucleotide
  Antisense strand to SEQ ID NO: 1687485
uuuaugcagaaucagaacu

SEQ ID NO: 1687487 - RNA, 19 nt, Artificial Sequence
  Description of Artificial Sequence: Synthetic oligonucleotide
  Sense strand starting at position 2170 of SEQ ID NO: 1561644
aagauuaaucuagguuugu

SEQ ID NO: 1687488 - RNA, 19 nt, Artificial Sequence
  Description of Artificial Sequence: Synthetic oligonucleotide
  Antisense strand to SEQ ID NO: 1687487
acaaaccuagauuaaucuu

SEQ ID NO: 1687489 - RNA, 19 nt, Artificial Sequence
  Description of Artificial Sequence: Synthetic oligonucleotide
  Sense strand starting at position 2171 of SEQ ID NO: 1561644
agauuaaucuagguuugua

SEQ ID NO: 1687490 - RNA, 19 nt, Artificial Sequence
  Description of Artificial Sequence: Synthetic oligonucleotide
  Antisense strand to SEQ ID NO: 1687489
uacaaaccuagauuaaucu

SEQ ID NO: 1687491 - RNA, 19 nt, Artificial Sequence
  Description of Artificial Sequence: Synthetic oligonucleotide
  Sense strand starting at position 2314 of SEQ ID NO: 1561644
ccaguacauuuccagaaag

SEQ ID NO: 1687492 - RNA, 19 nt, Artificial Sequence
  Description of Artificial Sequence: Synthetic oligonucleotide
  Antisense strand to SEQ ID NO: 1687491
cuuucuggaaauguacugg

SEQ ID NO: 1687493 - RNA, 19 nt, Artificial Sequence
  Description of Artificial Sequence: Synthetic oligonucleotide
  Sense strand starting at position 2360 of SEQ ID NO: 1561644
uucugaaauguccaugguu

SEQ ID NO: 1687494 - RNA, 19 nt, Artificial Sequence
  Description of Artificial Sequence: Synthetic oligonucleotide
  Antisense strand to SEQ ID NO: 1687493
aaccauggacauuucagaa

SEQ ID NO: 1687495 - RNA, 19 nt, Artificial Sequence
  Description of Artificial Sequence: Synthetic oligonucleotide
  Sense strand starting at position 2368 of SEQ ID NO: 1561644
uguccaugguuccuggaga

SEQ ID NO: 1687496 - RNA, 19 nt, Artificial Sequence
  Description of Artificial Sequence: Synthetic oligonucleotide
  Antisense strand to SEQ ID NO: 1687495
ucuccaggaaccauggaca

SEQ ID NO: 1687497 - RNA, 19 nt, Artificial Sequence
  Description of Artificial Sequence: Synthetic oligonucleotide
  Sense strand starting at position 2475 of SEQ ID NO: 1561644
ccagaaucucuuuaugcag

SEQ ID NO: 1687498 - RNA, 19 nt, Artificial Sequence
  Description of Artificial Sequence: Synthetic oligonucleotide
  Antisense strand to SEQ ID NO: 1687497
cugcauaaagagauucugg

SEQ ID NO: 1687499 - RNA, 19 nt, Artificial Sequence
  Description of Artificial Sequence: Synthetic oligonucleotide
  Sense strand starting at position 2528 of SEQ ID NO: 1561644
caaggaaugugucuuagaa

SEQ ID NO: 1687500 - RNA, 19 nt, Artificial Sequence
  Description of Artificial Sequence: Synthetic oligonucleotide
  Antisense strand to SEQ ID NO: 1687499
uucuaagacacauuccuug

SEQ ID NO: 1687501 - RNA, 19 nt, Artificial Sequence
  Description of Artificial Sequence: Synthetic oligonucleotide
  Sense strand starting at position 2632 of SEQ ID NO: 1561644
cuguauuaucuguauuaug

SEQ ID NO: 1687502 - RNA, 19 nt, Artificial Sequence
  Description of Artificial Sequence: Synthetic oligonucleotide
  Antisense strand to SEQ ID NO: 1687501
cauaauacagauaauacag

SEQ ID NO: 1687503 - RNA, 19 nt, Artificial Sequence
  Description of Artificial Sequence: Synthetic oligonucleotide
  Sense strand starting at position 2723 of SEQ ID NO: 1561644
guggaaauagcuugaagaa

SEQ ID NO: 1687504 - RNA, 19 nt, Artificial Sequence
  Description of Artificial Sequence: Synthetic oligonucleotide
  Antisense strand to SEQ ID NO: 1687503
uucuucaagcuauuuccac

SEQ ID NO: 1687505 - RNA, 19 nt, Artificial Sequence
  Description of Artificial Sequence: Synthetic oligonucleotide
  Sense strand starting at position 3053 of SEQ ID NO: 1561644
aaaucauauggguguuuaa

SEQ ID NO: 1687506 - RNA, 19 nt, Artificial Sequence
  Description of Artificial Sequence: Synthetic oligonucleotide
  Antisense strand to SEQ ID NO: 1687505
uuaaacacccauaugauuu

SEQ ID NO: 1687507 - RNA, 19 nt, Artificial Sequence
  Description of Artificial Sequence: Synthetic oligonucleotide
  Sense strand starting at position 3079 of SEQ ID NO: 1561644
gucaaugucuucuuggaca

SEQ ID NO: 1687508 - RNA, 19 nt, Artificial Sequence
  Description of Artificial Sequence: Synthetic oligonucleotide
  Antisense strand to SEQ ID NO: 1687507
uguccaagaagacauugac

SEQ ID NO: 1687509 - RNA, 19 nt, Artificial Sequence
  Description of Artificial Sequence: Synthetic oligonucleotide
  Sense strand starting at position 3081 of SEQ ID NO: 1561644
caaugucuucuuggacaga

SEQ ID NO: 1687510 - RNA, 19 nt, Artificial Sequence
  Description of Artificial Sequence: Synthetic oligonucleotide
  Antisense strand to SEQ ID NO: 1687509
ucuguccaagaagacauug

SEQ ID NO: 1687511 - RNA, 19 nt, Artificial Sequence
  Description of Artificial Sequence: Synthetic oligonucleotide
  Sense strand starting at position 3213 of SEQ ID NO: 1561644
ugcaaauuagucuaucuga

SEQ ID NO: 1687512 - RNA, 19 nt, Artificial Sequence
  Description of Artificial Sequence: Synthetic oligonucleotide
  Antisense strand to SEQ ID NO: 1687511
ucagauagacuaauuugca

SEQ ID NO: 1687513 - RNA, 19 nt, Artificial Sequence
  Description of Artificial Sequence: Synthetic oligonucleotide
  Sense strand starting at position 3216 of SEQ ID NO: 1561644
aaauuagucuaucugaggu

SEQ ID NO: 1687514 - RNA, 19 nt, Artificial Sequence
  Description of Artificial Sequence: Synthetic oligonucleotide
  Antisense strand to SEQ ID NO: 1687513
accucagauagacuaauuu

SEQ ID NO: 1687515 - RNA, 19 nt, Artificial Sequence
  Description of Artificial Sequence: Synthetic oligonucleotide
  Sense strand starting at position 3298 of SEQ ID NO: 1561644
ucaugagaaucugcagauu

SEQ ID NO: 1687516 - RNA, 19 nt, Artificial Sequence
  Description of Artificial Sequence: Synthetic oligonucleotide
  Antisense strand to SEQ ID NO: 1687515
aaucugcagauucucauga

SEQ ID NO: 1687517 - RNA, 19 nt, Artificial Sequence
  Description of Artificial Sequence: Synthetic oligonucleotide
  Sense strand starting at position 3413 of SEQ ID NO: 1561644
acaaguagcuuucugaaga

SEQ ID NO: 1687518 - RNA, 19 nt, Artificial Sequence
  Description of Artificial Sequence: Synthetic oligonucleotide
  Antisense strand to SEQ ID NO: 1687517
ucuucagaaagcuacuugu

SEQ ID NO: 1687519 - RNA, 19 nt, Artificial Sequence
  Description of Artificial Sequence: Synthetic oligonucleotide
  Sense strand starting at position 3529 of SEQ ID NO: 1561644
cugggauaguuggccugau

SEQ ID NO: 1687520 - RNA, 19 nt, Artificial Sequence
  Description of Artificial Sequence: Synthetic oligonucleotide
  Antisense strand to SEQ ID NO: 1687519
aucaggccaacuaucccag

SEQ ID NO: 1687521 - RNA, 19 nt, Artificial Sequence
  Description of Artificial Sequence: Synthetic oligonucleotide
  Sense strand starting at position 3530 of SEQ ID NO: 1561644
ugggauaguuggccugauc

SEQ ID NO: 1687522 - RNA, 19 nt, Artificial Sequence
  Description of Artificial Sequence: Synthetic oligonucleotide
  Antisense strand to SEQ ID NO: 1687521
gaucaggccaacuauccca

SEQ ID NO: 1687523 - RNA, 19 nt, Artificial Sequence
  Description of Artificial Sequence: Synthetic oligonucleotide
  Sense strand starting at position 3533 of SEQ ID NO: 1561644
gauaguuggccugaucuau

SEQ ID NO: 1687524 - RNA, 19 nt, Artificial Sequence
  Description of Artificial Sequence: Synthetic oligonucleotide
  Antisense strand to SEQ ID NO: 1687523
auagaucaggccaacuauc

SEQ ID NO: 1687525 - RNA, 19 nt, Artificial Sequence
  Description of Artificial Sequence: Synthetic oligonucleotide
  Sense strand starting at position 3545 of SEQ ID NO: 1561644
gaucuauuagcuggcagaa

SEQ ID NO: 1687526 - RNA, 19 nt, Artificial Sequence
  Description of Artificial Sequence: Synthetic oligonucleotide
  Antisense strand to SEQ ID NO: 1687525
uucugccagcuaauagauc

SEQ ID NO: 1687527 - RNA, 19 nt, Artificial Sequence
  Description of Artificial Sequence: Synthetic oligonucleotide
  Sense strand starting at position 3607 of SEQ ID NO: 1561644
gguggacccuuucugaaua

SEQ ID NO: 1687528 - RNA, 19 nt, Artificial Sequence
  Description of Artificial Sequence: Synthetic oligonucleotide
  Antisense strand to SEQ ID NO: 1687527
uauucagaaaggguccacc

SEQ ID NO: 1687529 - RNA, 19 nt, Artificial Sequence
  Description of Artificial Sequence: Synthetic oligonucleotide
  Sense strand starting at position 3871 of SEQ ID NO: 1561644
ugugaacacucagcagaga

SEQ ID NO: 1687530 - RNA, 19 nt, Artificial Sequence
  Description of Artificial Sequence: Synthetic oligonucleotide
  Antisense strand to SEQ ID NO: 1687529
ucucugcugaguguucaca

SEQ ID NO: 1687531 - RNA, 19 nt, Artificial Sequence
  Description of Artificial Sequence: Synthetic oligonucleotide
  Sense strand starting at position 3919 of SEQ ID NO: 1561644
gcccuaaagccaugaagaa

SEQ ID NO: 1687532 - RNA, 19 nt, Artificial Sequence
  Description of Artificial Sequence: Synthetic oligonucleotide
  Antisense strand to SEQ ID NO: 1687531
uucuucauggcuuuagggc

SEQ ID NO: 1687533 - RNA, 19 nt, Artificial Sequence
  Description of Artificial Sequence: Synthetic oligonucleotide
  Sense strand starting at position 3949 of SEQ ID NO: 1561644
gaaauaagcgcacagugau

SEQ ID NO: 1687534 - RNA, 19 nt, Artificial Sequence
  Description of Artificial Sequence: Synthetic oligonucleotide
  Antisense strand to SEQ ID NO: 1687533
aucacugugcgcuuauuuc

SEQ ID NO: 1687535 - RNA, 19 nt, Artificial Sequence
  Description of Artificial Sequence: Synthetic oligonucleotide
  Sense strand starting at position 3959 of SEQ ID NO: 1561644
cacagugauguagaaguga

SEQ ID NO: 1687536 - RNA, 19 nt, Artificial Sequence
  Description of Artificial Sequence: Synthetic oligonucleotide
  Antisense strand to SEQ ID NO: 1687535
ucacuucuacaucacugug

SEQ ID NO: 1687537 - RNA, 19 nt, Artificial Sequence
  Description of Artificial Sequence: Synthetic oligonucleotide
  Sense strand starting at position 12 of SEQ ID NO: 1561645
ggcacuuggcuugaagaga

SEQ ID NO: 1687538 - RNA, 19 nt, Artificial Sequence
  Description of Artificial Sequence: Synthetic oligonucleotide
  Antisense strand to SEQ ID NO: 1687537
ucucuucaagccaagugcc

SEQ ID NO: 1687539 - RNA, 19 nt, Artificial Sequence
  Description of Artificial Sequence: Synthetic oligonucleotide
  Sense strand starting at position 151 of SEQ ID NO: 1561645
aucucuugucaugguaaag

SEQ ID NO: 1687540 - RNA, 19 nt, Artificial Sequence
  Description of Artificial Sequence: Synthetic oligonucleotide
  Antisense strand to SEQ ID NO: 1687539
cuuuaccaugacaagagau

SEQ ID NO: 1687541 - RNA, 19 nt, Artificial Sequence
  Description of Artificial Sequence: Synthetic oligonucleotide
  Sense strand starting at position 324 of SEQ ID NO: 1561645
augagaaacuacuuuagca

SEQ ID NO: 1687542 - RNA, 19 nt, Artificial Sequence
  Description of Artificial Sequence: Synthetic oligonucleotide
  Antisense strand to SEQ ID NO: 1687541
ugcuaaaguaguuucucau

SEQ ID NO: 1687543 - RNA, 19 nt, Artificial Sequence
  Description of Artificial Sequence: Synthetic oligonucleotide
  Sense strand starting at position 354 of SEQ ID NO: 1561645
gucuguugucuuuauuuag

SEQ ID NO: 1687544 - RNA, 19 nt, Artificial Sequence
  Description of Artificial Sequence: Synthetic oligonucleotide
  Antisense strand to SEQ ID NO: 1687543
cuaaauaaagacaacagac

SEQ ID NO: 1687545 - RNA, 19 nt, Artificial Sequence
  Description of Artificial Sequence: Synthetic oligonucleotide
  Sense strand starting at position 384 of SEQ ID NO: 1561645
cucuacauacccugaguau

SEQ ID NO: 1687546 - RNA, 19 nt, Artificial Sequence
  Description of Artificial Sequence: Synthetic oligonucleotide
  Antisense strand to SEQ ID NO: 1687545
auacucaggguauguagag

SEQ ID NO: 1687547 - RNA, 19 nt, Artificial Sequence
  Description of Artificial Sequence: Synthetic oligonucleotide
  Sense strand starting at position 425 of SEQ ID NO: 1561645
cugugaucagcucaggauc

SEQ ID NO: 1687548 - RNA, 19 nt, Artificial Sequence
  Description of Artificial Sequence: Synthetic oligonucleotide
  Antisense strand to SEQ ID NO: 1687547
gauccugagcugaucacag

SEQ ID NO: 1687549 - RNA, 19 nt, Artificial Sequence
  Description of Artificial Sequence: Synthetic oligonucleotide
  Sense strand starting at position 504 of SEQ ID NO: 1561645
aaagcucagccauggagau

SEQ ID NO: 1687550 - RNA, 19 nt, Artificial Sequence
  Description of Artificial Sequence: Synthetic oligonucleotide
  Antisense strand to SEQ ID NO: 1687549
aucuccauggcugagcuuu

SEQ ID NO: 1687551 - RNA, 19 nt, Artificial Sequence
  Description of Artificial Sequence: Synthetic oligonucleotide
  Sense strand starting at position 662 of SEQ ID NO: 1561645
accguuuaucuccaugacu

SEQ ID NO: 1687552 - RNA, 19 nt, Artificial Sequence
  Description of Artificial Sequence: Synthetic oligonucleotide
  Antisense strand to SEQ ID NO: 1687551
agucauggagauaaacggu

SEQ ID NO: 1687553 - RNA, 19 nt, Artificial Sequence
  Description of Artificial Sequence: Synthetic oligonucleotide
  Sense strand starting at position 883 of SEQ ID NO: 1561645
aagaguuacuaagugcaca

SEQ ID NO: 1687554 - RNA, 19 nt, Artificial Sequence
  Description of Artificial Sequence: Synthetic oligonucleotide
  Antisense strand to SEQ ID NO: 1687553
ugugcacuuaguaacucuu

SEQ ID NO: 1687555 - RNA, 19 nt, Artificial Sequence
  Description of Artificial Sequence: Synthetic oligonucleotide
  Sense strand starting at position 888 of SEQ ID NO: 1561645
uuacuaagugcacagguau

SEQ ID NO: 1687556 - RNA, 19 nt, Artificial Sequence
  Description of Artificial Sequence: Synthetic oligonucleotide
  Antisense strand to SEQ ID NO: 1687555
auaccugugcacuuaguaa

SEQ ID NO: 1687557 - RNA, 19 nt, Artificial Sequence
  Description of Artificial Sequence: Synthetic oligonucleotide
  Sense strand starting at position 900 of SEQ ID NO: 1561645
cagguauuuacgggcagua

SEQ ID NO: 1687558 - RNA, 19 nt, Artificial Sequence
  Description of Artificial Sequence: Synthetic oligonucleotide
  Antisense strand to SEQ ID NO: 1687557
uacugcccguaaauaccug

SEQ ID NO: 1687559 - RNA, 19 nt, Artificial Sequence
  Description of Artificial Sequence: Synthetic oligonucleotide
  Sense strand starting at position 933 of SEQ ID NO: 1561645
cuuugaucucaguacuguu

SEQ ID NO: 1687560 - RNA, 19 nt, Artificial Sequence
  Description of Artificial Sequence: Synthetic oligonucleotide
  Antisense strand to SEQ ID NO: 1687559
aacaguacugagaucaaag

SEQ ID NO: 1687561 - RNA, 19 nt, Artificial Sequence
  Description of Artificial Sequence: Synthetic oligonucleotide
  Sense strand starting at position 1103 of SEQ ID NO: 1561645
gcaggaaacugguucagag

SEQ ID NO: 1687562 - RNA, 19 nt, Artificial Sequence
  Description of Artificial Sequence: Synthetic oligonucleotide
  Antisense strand to SEQ ID NO: 1687561
cucugaaccaguuuccugc

SEQ ID NO: 1687563 - RNA, 19 nt, Artificial Sequence
  Description of Artificial Sequence: Synthetic oligonucleotide
  Sense strand starting at position 1187 of SEQ ID NO: 1561645
uugagcguuaaauaagauu

SEQ ID NO: 1687564 - RNA, 19 nt, Artificial Sequence
  Description of Artificial Sequence: Synthetic oligonucleotide
  Antisense strand to SEQ ID NO: 1687563
aaucuuauuuaacgcucaa

SEQ ID NO: 1687565 - RNA, 19 nt, Artificial Sequence
  Description of Artificial Sequence: Synthetic oligonucleotide
  Sense strand starting at position 1298 of SEQ ID NO: 1561645
cauucuugcccugacggau

SEQ ID NO: 1687566 - RNA, 19 nt, Artificial Sequence
  Description of Artificial Sequence: Synthetic oligonucleotide
  Antisense strand to SEQ ID NO: 1687565
auccgucagggcaagaaug

SEQ ID NO: 1687567 - RNA, 19 nt, Artificial Sequence
  Description of Artificial Sequence: Synthetic oligonucleotide
  Sense strand starting at position 1444 of SEQ ID NO: 1561645
gucauuugcuccuuguaaa

SEQ ID NO: 1687568 - RNA, 19 nt, Artificial Sequence
  Description of Artificial Sequence: Synthetic oligonucleotide
  Antisense strand to SEQ ID NO: 1687567
uuuacaaggagcaaaugac

SEQ ID NO: 1687569 - RNA, 19 nt, Artificial Sequence
  Description of Artificial Sequence: Synthetic oligonucleotide
  Sense strand starting at position 2167 of SEQ ID NO: 1561645
ggaaauagcuucucaucca

SEQ ID NO: 1687570 - RNA, 19 nt, Artificial Sequence
  Description of Artificial Sequence: Synthetic oligonucleotide
  Antisense strand to SEQ ID NO: 1687569
uggaugagaagcuauuucc

SEQ ID NO: 1687571 - RNA, 19 nt, Artificial Sequence
  Description of Artificial Sequence: Synthetic oligonucleotide
  Sense strand starting at position 2261 of SEQ ID NO: 1561645
uuuauugcucuggagacau

SEQ ID NO: 1687572 - RNA, 19 nt, Artificial Sequence
  Description of Artificial Sequence: Synthetic oligonucleotide
  Antisense strand to SEQ ID NO: 1687571
augucuccagagcaauaaa

SEQ ID NO: 1687573 - RNA, 19 nt, Artificial Sequence
  Description of Artificial Sequence: Synthetic oligonucleotide
  Sense strand starting at position 2272 of SEQ ID NO: 1561645
ggagacauaccaugauguu

SEQ ID NO: 1687574 - RNA, 19 nt, Artificial Sequence
  Description of Artificial Sequence: Synthetic oligonucleotide
  Antisense strand to SEQ ID NO: 1687573
aacaucaugguaugucucc

SEQ ID NO: 1687575 - RNA, 19 nt, Artificial Sequence
  Description of Artificial Sequence: Synthetic oligonucleotide
  Sense strand starting at position 2318 of SEQ ID NO: 1561645
ccagaaauucgacaggcua

SEQ ID NO: 1687576 - RNA, 19 nt, Artificial Sequence
  Description of Artificial Sequence: Synthetic oligonucleotide
  Antisense strand to SEQ ID NO: 1687575
uagccugucgaauuucugg

SEQ ID NO: 1687577 - RNA, 19 nt, Artificial Sequence
  Description of Artificial Sequence: Synthetic oligonucleotide
  Sense strand starting at position 2357 of SEQ ID NO: 1561645
caaggauguuguuuaaagu

SEQ ID NO: 1687578 - RNA, 19 nt, Artificial Sequence
  Description of Artificial Sequence: Synthetic oligonucleotide
  Antisense strand to SEQ ID NO: 1687577
acuuuaaacaacauccuug

SEQ ID NO: 1687579 - RNA, 19 nt, Artificial Sequence
  Description of Artificial Sequence: Synthetic oligonucleotide
  Sense strand starting at position 2373 of SEQ ID NO: 1561645
agugucuuacaaggacaua

SEQ ID NO: 1687580 - RNA, 19 nt, Artificial Sequence
  Description of Artificial Sequence: Synthetic oligonucleotide
  Antisense strand to SEQ ID NO: 1687579
uauguccuuguaagacacu

SEQ ID NO: 1687581 - RNA, 19 nt, Artificial Sequence
  Description of Artificial Sequence: Synthetic oligonucleotide
  Sense strand starting at position 2498 of SEQ ID NO: 1561645
uuuacagacuugcuaugaa

SEQ ID NO: 1687582 - RNA, 19 nt, Artificial Sequence
  Description of Artificial Sequence: Synthetic oligonucleotide
  Antisense strand to SEQ ID NO: 1687581
uucauagcaagucuguaaa

SEQ ID NO: 1687583 - RNA, 19 nt, Artificial Sequence
  Description of Artificial Sequence: Synthetic oligonucleotide
  Sense strand starting at position 2510 of SEQ ID NO: 1561645
cuaugaaggguuugcagau

SEQ ID NO: 1687584 - RNA, 19 nt, Artificial Sequence
  Description of Artificial Sequence: Synthetic oligonucleotide
  Antisense strand to SEQ ID NO: 1687583
aucugcaaacccuucauag

SEQ ID NO: 1687585 - RNA, 19 nt, Artificial Sequence
  Description of Artificial Sequence: Synthetic oligonucleotide
  Sense strand starting at position 2511 of SEQ ID NO: 1561645
uaugaaggguuugcagaua

SEQ ID NO: 1687586 - RNA, 19 nt, Artificial Sequence
  Description of Artificial Sequence: Synthetic oligonucleotide
  Antisense strand to SEQ ID NO: 1687585
uaucugcaaacccuucaua

SEQ ID NO: 1687587 - RNA, 19 nt, Artificial Sequence
  Description of Artificial Sequence: Synthetic oligonucleotide
  Sense strand starting at position 2586 of SEQ ID NO: 1561645
cuuagugcucuggagaaga

SEQ ID NO: 1687588 - RNA, 19 nt, Artificial Sequence
  Description of Artificial Sequence: Synthetic oligonucleotide
  Antisense strand to SEQ ID NO: 1687587
ucuucuccagagcacuaag

SEQ ID NO: 1687589 - RNA, 19 nt, Artificial Sequence
  Description of Artificial Sequence: Synthetic oligonucleotide
  Sense strand starting at position 2701 of SEQ ID NO: 1561645
auauauaagccagaguuua

SEQ ID NO: 1687590 - RNA, 19 nt, Artificial Sequence
  Description of Artificial Sequence: Synthetic oligonucleotide
  Antisense strand to SEQ ID NO: 1687589
uaaacucuggcuuauauau

SEQ ID NO: 1687591 - RNA, 19 nt, Artificial Sequence
  Description of Artificial Sequence: Synthetic oligonucleotide
  Sense strand starting at position 2712 of SEQ ID NO: 1561645
agaguuuaaagaggugagu

SEQ ID NO: 1687592 - RNA, 19 nt, Artificial Sequence
  Description of Artificial Sequence: Synthetic oligonucleotide
  Antisense strand to SEQ ID NO: 1687591
acucaccucuuuaaacucu

SEQ ID NO: 1687593 - RNA, 19 nt, Artificial Sequence
  Description of Artificial Sequence: Synthetic oligonucleotide
  Sense strand starting at position 2714 of SEQ ID NO: 1561645
aguuuaaagaggugaguaa

SEQ ID NO: 1687594 - RNA, 19 nt, Artificial Sequence
  Description of Artificial Sequence: Synthetic oligonucleotide
  Antisense strand to SEQ ID NO: 1687593
uuacucaccucuuuaaacu

SEQ ID NO: 1687595 - RNA, 19 nt, Artificial Sequence
  Description of Artificial Sequence: Synthetic oligonucleotide
  Sense strand starting at position 2759 of SEQ ID NO: 1561645
cacucagugucauuggaca

SEQ ID NO: 1687596 - RNA, 19 nt, Artificial Sequence
  Description of Artificial Sequence: Synthetic oligonucleotide
  Antisense strand to SEQ ID NO: 1687595
uguccaaugacacugagug

SEQ ID NO: 1687597 - RNA, 19 nt, Artificial Sequence
  Description of Artificial Sequence: Synthetic oligonucleotide
  Sense strand starting at position 2799 of SEQ ID NO: 1561645
auagaauuacaggguguga

SEQ ID NO: 1687598 - RNA, 19 nt, Artificial Sequence
  Description of Artificial Sequence: Synthetic oligonucleotide
  Antisense strand to SEQ ID NO: 1687597
ucacacccuguaauucuau

SEQ ID NO: 1687599 - RNA, 19 nt, Artificial Sequence
  Description of Artificial Sequence: Synthetic oligonucleotide
  Sense strand starting at position 2801 of SEQ ID NO: 1561645
agaauuacagggugugauu

SEQ ID NO: 1687600 - RNA, 19 nt, Artificial Sequence
  Description of Artificial Sequence: Synthetic oligonucleotide
  Antisense strand to SEQ ID NO: 1687599
aaucacacccuguaauucu

SEQ ID NO: 1687601 - RNA, 19 nt, Artificial Sequence
  Description of Artificial Sequence: Synthetic oligonucleotide
  Sense strand starting at position 2812 of SEQ ID NO: 1561645
gugugauucucauuauaaa

SEQ ID NO: 1687602 - RNA, 19 nt, Artificial Sequence
  Description of Artificial Sequence: Synthetic oligonucleotide
  Antisense strand to SEQ ID NO: 1687601
uuuauaaugagaaucacac

SEQ ID NO: 1687603 - RNA, 19 nt, Artificial Sequence
  Description of Artificial Sequence: Synthetic oligonucleotide
  Sense strand starting at position 2993 of SEQ ID NO: 1561645
caugucaaucuggaaugua

SEQ ID NO: 1687604 - RNA, 19 nt, Artificial Sequence
  Description of Artificial Sequence: Synthetic oligonucleotide
  Antisense strand to SEQ ID NO: 1687603
uacauuccagauugacaug

SEQ ID NO: 1687605 - RNA, 19 nt, Artificial Sequence
  Description of Artificial Sequence: Synthetic oligonucleotide
  Sense strand starting at position 3118 of SEQ ID NO: 1561645
ggaucuugauucuuacuga

SEQ ID NO: 1687606 - RNA, 19 nt, Artificial Sequence
  Description of Artificial Sequence: Synthetic oligonucleotide
  Antisense strand to SEQ ID NO: 1687605
ucaguaagaaucaagaucc

SEQ ID NO: 1687607 - RNA, 19 nt, Artificial Sequence
  Description of Artificial Sequence: Synthetic oligonucleotide
  Sense strand starting at position 3144 of SEQ ID NO: 1561645
uggaauuaugagcaagcua

SEQ ID NO: 1687608 - RNA, 19 nt, Artificial Sequence
  Description of Artificial Sequence: Synthetic oligonucleotide
  Antisense strand to SEQ ID NO: 1687607
uagcuugcucauaauucca

SEQ ID NO: 1687609 - RNA, 19 nt, Artificial Sequence
  Description of Artificial Sequence: Synthetic oligonucleotide
  Sense strand starting at position 3162 of SEQ ID NO: 1561645
acuguacuucccuaagucu

SEQ ID NO: 1687610 - RNA, 19 nt, Artificial Sequence
  Description of Artificial Sequence: Synthetic oligonucleotide
  Antisense strand to SEQ ID NO: 1687609
agacuuagggaaguacagu

SEQ ID NO: 1687611 - RNA, 19 nt, Artificial Sequence
  Description of Artificial Sequence: Synthetic oligonucleotide
  Sense strand starting at position 3197 of SEQ ID NO: 1561645
cugugugcuccuuuguguu

SEQ ID NO: 1687612 - RNA, 19 nt, Artificial Sequence
  Description of Artificial Sequence: Synthetic oligonucleotide
  Antisense strand to SEQ ID NO: 1687611
aacacaaaggagcacacag

SEQ ID NO: 1687613 - RNA, 19 nt, Artificial Sequence
  Description of Artificial Sequence: Synthetic oligonucleotide
  Sense strand starting at position 3665 of SEQ ID NO: 1561645
cugccauuuggauggcauu

SEQ ID NO: 1687614 - RNA, 19 nt, Artificial Sequence
  Description of Artificial Sequence: Synthetic oligonucleotide
  Antisense strand to SEQ ID NO: 1687613
aaugccauccaaauggcag

SEQ ID NO: 1687615 - RNA, 19 nt, Artificial Sequence
  Description of Artificial Sequence: Synthetic oligonucleotide
  Sense strand starting at position 3724 of SEQ ID NO: 1561645
uuauguccacagugaaauu

SEQ ID NO: 1687616 - RNA, 19 nt, Artificial Sequence
  Description of Artificial Sequence: Synthetic oligonucleotide
  Antisense strand to SEQ ID NO: 1687615
aauuucacuguggacauaa

SEQ ID NO: 1687617 - RNA, 19 nt, Artificial Sequence
  Description of Artificial Sequence: Synthetic oligonucleotide
  Sense strand starting at position 752 of SEQ ID NO: 1561646
cccaguagugcugggauua

SEQ ID NO: 1687618 - RNA, 19 nt, Artificial Sequence
  Description of Artificial Sequence: Synthetic oligonucleotide
  Antisense strand to SEQ ID NO: 1687617
uaaucccagcacuacuggg

SEQ ID NO: 1687619 - RNA, 19 nt, Artificial Sequence
  Description of Artificial Sequence: Synthetic oligonucleotide
  Sense strand starting at position 958 of SEQ ID NO: 1561646
uacucugccuaggcagaua

SEQ ID NO: 1687620 - RNA, 19 nt, Artificial Sequence
  Description of Artificial Sequence: Synthetic oligonucleotide
  Antisense strand to SEQ ID NO: 1687619
uaucugccuaggcagagua

SEQ ID NO: 1687621 - RNA, 19 nt, Artificial Sequence
  Description of Artificial Sequence: Synthetic oligonucleotide
  Sense strand starting at position 1002 of SEQ ID NO: 1561646
uuuaaauguccggaaugau

SEQ ID NO: 1687622 - RNA, 19 nt, Artificial Sequence
  Description of Artificial Sequence: Synthetic oligonucleotide
  Antisense strand to SEQ ID NO: 1687621
aucauuccggacauuuaaa

SEQ ID NO: 1687623 - RNA, 19 nt, Artificial Sequence
  Description of Artificial Sequence: Synthetic oligonucleotide
  Sense strand starting at position 1012 of SEQ ID NO: 1561646
cggaaugauuuauaccaaa

SEQ ID NO: 1687624 - RNA, 19 nt, Artificial Sequence
  Description of Artificial Sequence: Synthetic oligonucleotide
  Antisense strand to SEQ ID NO: 1687623
uuugguauaaaucauuccg

SEQ ID NO: 1687625 - RNA, 19 nt, Artificial Sequence
  Description of Artificial Sequence: Synthetic oligonucleotide
  Sense strand starting at position 1090 of SEQ ID NO: 1561646
gugcauagccuuuauguua

SEQ ID NO: 1687626 - RNA, 19 nt, Artificial Sequence
  Description of Artificial Sequence: Synthetic oligonucleotide
  Antisense strand to SEQ ID NO: 1687625
uaacauaaaggcuaugcac

SEQ ID NO: 1687627 - RNA, 19 nt, Artificial Sequence
  Description of Artificial Sequence: Synthetic oligonucleotide
  Sense strand starting at position 1105 of SEQ ID NO: 1561646
guuaaauacuccuguacug

SEQ ID NO: 1687628 - RNA, 19 nt, Artificial Sequence
  Description of Artificial Sequence: Synthetic oligonucleotide
  Antisense strand to SEQ ID NO: 1687627
caguacaggaguauuuaac

SEQ ID NO: 1687629 - RNA, 19 nt, Artificial Sequence
  Description of Artificial Sequence: Synthetic oligonucleotide
  Sense strand starting at position 1148 of SEQ ID NO: 1561646
gguugaauuucugaccgua

SEQ ID NO: 1687630 - RNA, 19 nt, Artificial Sequence
  Description of Artificial Sequence: Synthetic oligonucleotide
  Antisense strand to SEQ ID NO: 1687629
uacggucagaaauucaacc

SEQ ID NO: 1687631 - RNA, 19 nt, Artificial Sequence
  Description of Artificial Sequence: Synthetic oligonucleotide
  Sense strand starting at position 1164 of SEQ ID NO: 1561646
guaaauaacuccuagugaa

SEQ ID NO: 1687632 - RNA, 19 nt, Artificial Sequence
  Description of Artificial Sequence: Synthetic oligonucleotide
  Antisense strand to SEQ ID NO: 1687631
uucacuaggaguuauuuac

SEQ ID NO: 1687633 - RNA, 19 nt, Artificial Sequence
  Description of Artificial Sequence: Synthetic oligonucleotide
  Sense strand starting at position 1682 of SEQ ID NO: 1561646
cgagaacccucuccuccaa

SEQ ID NO: 1687634 - RNA, 19 nt, Artificial Sequence
  Description of Artificial Sequence: Synthetic oligonucleotide
  Antisense strand to SEQ ID NO: 1687633
uuggaggagaggguucucg

SEQ ID NO: 1687635 - RNA, 19 nt, Artificial Sequence
  Description of Artificial Sequence: Synthetic oligonucleotide
  Sense strand starting at position 2039 of SEQ ID NO: 1561646
gggcaucagugcuuugcaa

SEQ ID NO: 1687636 - RNA, 19 nt, Artificial Sequence
  Description of Artificial Sequence: Synthetic oligonucleotide
  Antisense strand to SEQ ID NO: 1687635
uugcaaagcacugaugccc

SEQ ID NO: 1687637 - RNA, 19 nt, Artificial Sequence
  Description of Artificial Sequence: Synthetic oligonucleotide
  Sense strand starting at position 2041 of SEQ ID NO: 1561646
gcaucagugcuuugcaaac

SEQ ID NO: 1687638 - RNA, 19 nt, Artificial Sequence
  Description of Artificial Sequence: Synthetic oligonucleotide
  Antisense strand to SEQ ID NO: 1687637
guuugcaaagcacugaugc

SEQ ID NO: 1687639 - RNA, 19 nt, Artificial Sequence
  Description of Artificial Sequence: Synthetic oligonucleotide
  Sense strand starting at position 2053 of SEQ ID NO: 1561646
ugcaaacucgcuugcagau

SEQ ID NO: 1687640 - RNA, 19 nt, Artificial Sequence
  Description of Artificial Sequence: Synthetic oligonucleotide
  Antisense strand to SEQ ID NO: 1687639
aucugcaagcgaguuugca

SEQ ID NO: 1687641 - RNA, 19 nt, Artificial Sequence
  Description of Artificial Sequence: Synthetic oligonucleotide
  Sense strand starting at position 2116 of SEQ ID NO: 1561646
caccgucucuggguuaaga

SEQ ID NO: 1687642 - RNA, 19 nt, Artificial Sequence
  Description of Artificial Sequence: Synthetic oligonucleotide
  Antisense strand to SEQ ID NO: 1687641
ucuuaacccagagacggug

SEQ ID NO: 1687643 - RNA, 19 nt, Artificial Sequence
  Description of Artificial Sequence: Synthetic oligonucleotide
  Sense strand starting at position 2125 of SEQ ID NO: 1561646
uggguuaagaccugggcau

SEQ ID NO: 1687644 - RNA, 19 nt, Artificial Sequence
  Description of Artificial Sequence: Synthetic oligonucleotide
  Antisense strand to SEQ ID NO: 1687643
augcccaggucuuaaccca

SEQ ID NO: 1687645 - RNA, 19 nt, Artificial Sequence
  Description of Artificial Sequence: Synthetic oligonucleotide
  Sense strand starting at position 2194 of SEQ ID NO: 1561646
agcuaaauuugagaacuau

SEQ ID NO: 1687646 - RNA, 19 nt, Artificial Sequence
  Description of Artificial Sequence: Synthetic oligonucleotide
  Antisense strand to SEQ ID NO: 1687645
auaguucucaaauuuagcu

SEQ ID NO: 1687647 - RNA, 19 nt, Artificial Sequence
  Description of Artificial Sequence: Synthetic oligonucleotide
  Sense strand starting at position 2235 of SEQ ID NO: 1561646
ucggaaucccgguagagua

SEQ ID NO: 1687648 - RNA, 19 nt, Artificial Sequence
  Description of Artificial Sequence: Synthetic oligonucleotide
  Antisense strand to SEQ ID NO: 1687647
uacucuaccgggauuccga

SEQ ID NO: 1687649 - RNA, 19 nt, Artificial Sequence
  Description of Artificial Sequence: Synthetic oligonucleotide
  Sense strand starting at position 2334 of SEQ ID NO: 1561646
ggccgauuaaguuggaauc

SEQ ID NO: 1687650 - RNA, 19 nt, Artificial Sequence
  Description of Artificial Sequence: Synthetic oligonucleotide
  Antisense strand to SEQ ID NO: 1687649
gauuccaacuuaaucggcc

SEQ ID NO: 1687651 - RNA, 19 nt, Artificial Sequence
  Description of Artificial Sequence: Synthetic oligonucleotide
  Sense strand starting at position 2344 of SEQ ID NO: 1561646
guuggaauccuucggagug

SEQ ID NO: 1687652 - RNA, 19 nt, Artificial Sequence
  Description of Artificial Sequence: Synthetic oligonucleotide
  Antisense strand to SEQ ID NO: 1687651
cacuccgaaggauuccaac

SEQ ID NO: 1687653 - RNA, 19 nt, Artificial Sequence
  Description of Artificial Sequence: Synthetic oligonucleotide
  Sense strand starting at position 2369 of SEQ ID NO: 1561646
gggcaucgguaguuucuaa

SEQ ID NO: 1687654 - RNA, 19 nt, Artificial Sequence
  Description of Artificial Sequence: Synthetic oligonucleotide
  Antisense strand to SEQ ID NO: 1687653
uuagaaacuaccgaugccc

SEQ ID NO: 1687655 - RNA, 19 nt, Artificial Sequence
  Description of Artificial Sequence: Synthetic oligonucleotide
  Sense strand starting at position 2591 of SEQ ID NO: 1561646
gaaacuauugagcgcacua

SEQ ID NO: 1687656 - RNA, 19 nt, Artificial Sequence
  Description of Artificial Sequence: Synthetic oligonucleotide
  Antisense strand to SEQ ID NO: 1687655
uagugcgcucaauaguuuc

SEQ ID NO: 1687657 - RNA, 19 nt, Artificial Sequence
  Description of Artificial Sequence: Synthetic oligonucleotide
  Sense strand starting at position 2720 of SEQ ID NO: 1561646
cagugcuaaugaggaaagu

SEQ ID NO: 1687658 - RNA, 19 nt, Artificial Sequence
  Description of Artificial Sequence: Synthetic oligonucleotide
  Antisense strand to SEQ ID NO: 1687657
acuuuccucauuagcacug

SEQ ID NO: 1687659 - RNA, 19 nt, Artificial Sequence
  Description of Artificial Sequence: Synthetic oligonucleotide
  Sense strand starting at position 2757 of SEQ ID NO: 1561646
auaagacaagucugaaguu

SEQ ID NO: 1687660 - RNA, 19 nt, Artificial Sequence
  Description of Artificial Sequence: Synthetic oligonucleotide
  Antisense strand to SEQ ID NO: 1687659
aacuucagacuugucuuau

SEQ ID NO: 1687661 - RNA, 19 nt, Artificial Sequence
  Description of Artificial Sequence: Synthetic oligonucleotide
  Sense strand starting at position 2758 of SEQ ID NO: 1561646
uaagacaagucugaaguuu

SEQ ID NO: 1687662 - RNA, 19 nt, Artificial Sequence
  Description of Artificial Sequence: Synthetic oligonucleotide
  Antisense strand to SEQ ID NO: 1687661
aaacuucagacuugucuua

SEQ ID NO: 1687663 - RNA, 19 nt, Artificial Sequence
  Description of Artificial Sequence: Synthetic oligonucleotide
  Sense strand starting at position 2783 of SEQ ID NO: 1561646
uucguuugaugacuuauuu

SEQ ID NO: 1687664 - RNA, 19 nt, Artificial Sequence
  Description of Artificial Sequence: Synthetic oligonucleotide
  Antisense strand to SEQ ID NO: 1687663
aaauaagucaucaaacgaa

SEQ ID NO: 1687665 - RNA, 19 nt, Artificial Sequence
  Description of Artificial Sequence: Synthetic oligonucleotide
  Sense strand starting at position 3322 of SEQ ID NO: 1561646
caaggcuaccgcgaguuau

SEQ ID NO: 1687666 - RNA, 19 nt, Artificial Sequence
  Description of Artificial Sequence: Synthetic oligonucleotide
  Antisense strand to SEQ ID NO: 1687665
auaacucgcgguagccuug

SEQ ID NO: 1687667 - RNA, 19 nt, Artificial Sequence
  Description of Artificial Sequence: Synthetic oligonucleotide
  Sense strand starting at position 3422 of SEQ ID NO: 1561646
gcugguaucaagggugcaa

SEQ ID NO: 1687668 - RNA, 19 nt, Artificial Sequence
  Description of Artificial Sequence: Synthetic oligonucleotide
  Antisense strand to SEQ ID NO: 1687667
uugcacccuugauaccagc

SEQ ID NO: 1687669 - RNA, 19 nt, Artificial Sequence
  Description of Artificial Sequence: Synthetic oligonucleotide
  Sense strand starting at position 3424 of SEQ ID NO: 1561646
ugguaucaagggugcaaau

SEQ ID NO: 1687670 - RNA, 19 nt, Artificial Sequence
  Description of Artificial Sequence: Synthetic oligonucleotide
  Antisense strand to SEQ ID NO: 1687669
auuugcacccuugauacca

SEQ ID NO: 1687671 - RNA, 19 nt, Artificial Sequence
  Description of Artificial Sequence: Synthetic oligonucleotide
  Sense strand starting at position 3426 of SEQ ID NO: 1561646
guaucaagggugcaaauaa

SEQ ID NO: 1687672 - RNA, 19 nt, Artificial Sequence
  Description of Artificial Sequence: Synthetic oligonucleotide
  Antisense strand to SEQ ID NO: 1687671
uuauuugcacccuugauac

SEQ ID NO: 1687673 - RNA, 19 nt, Artificial Sequence
  Description of Artificial Sequence: Synthetic oligonucleotide
  Sense strand starting at position 3668 of SEQ ID NO: 1561646
gccucaagugcuuaagggu

SEQ ID NO: 1687674 - RNA, 19 nt, Artificial Sequence
  Description of Artificial Sequence: Synthetic oligonucleotide
  Antisense strand to SEQ ID NO: 1687673
acccuuaagcacuugaggc

SEQ ID NO: 1687675 - RNA, 19 nt, Artificial Sequence
  Description of Artificial Sequence: Synthetic oligonucleotide
  Sense strand starting at position 3715 of SEQ ID NO: 1561646
ggccauucgucauugucau

SEQ ID NO: 1687676 - RNA, 19 nt, Artificial Sequence
  Description of Artificial Sequence: Synthetic oligonucleotide
  Antisense strand to SEQ ID NO: 1687675
augacaaugacgaauggcc

SEQ ID NO: 1687677 - RNA, 19 nt, Artificial Sequence
  Description of Artificial Sequence: Synthetic oligonucleotide
  Sense strand starting at position 3716 of SEQ ID NO: 1561646
gccauucgucauugucaug

SEQ ID NO: 1687678 - RNA, 19 nt, Artificial Sequence
  Description of Artificial Sequence: Synthetic oligonucleotide
  Antisense strand to SEQ ID NO: 1687677
caugacaaugacgaauggc

SEQ ID NO: 1687679 - RNA, 19 nt, Artificial Sequence
  Description of Artificial Sequence: Synthetic oligonucleotide
  Sense strand starting at position 3719 of SEQ ID NO: 1561646
auucgucauugucaugauu

SEQ ID NO: 1687680 - RNA, 19 nt, Artificial Sequence
  Description of Artificial Sequence: Synthetic oligonucleotide
  Antisense strand to SEQ ID NO: 1687679
aaucaugacaaugacgaau

SEQ ID NO: 1687681 - RNA, 19 nt, Artificial Sequence
  Description of Artificial Sequence: Synthetic oligonucleotide
  Sense strand starting at position 3721 of SEQ ID NO: 1561646
ucgucauugucaugauuuc

SEQ ID NO: 1687682 - RNA, 19 nt, Artificial Sequence
  Description of Artificial Sequence: Synthetic oligonucleotide
  Antisense strand to SEQ ID NO: 1687681
gaaaucaugacaaugacga

SEQ ID NO: 1687683 - RNA, 19 nt, Artificial Sequence
  Description of Artificial Sequence: Synthetic oligonucleotide
  Sense strand starting at position 3838 of SEQ ID NO: 1561646
ggccucagaucaccaaauu

SEQ ID NO: 1687684 - RNA, 19 nt, Artificial Sequence
  Description of Artificial Sequence: Synthetic oligonucleotide
  Antisense strand to SEQ ID NO: 1687683
aauuuggugaucugaggcc

SEQ ID NO: 1687685 - RNA, 19 nt, Artificial Sequence
  Description of Artificial Sequence: Synthetic oligonucleotide
  Sense strand starting at position 3869 of SEQ ID NO: 1561646
gcaaacuucuccuggugga

SEQ ID NO: 1687686 - RNA, 19 nt, Artificial Sequence
  Description of Artificial Sequence: Synthetic oligonucleotide
  Antisense strand to SEQ ID NO: 1687685
uccaccaggagaaguuugc

SEQ ID NO: 1687687 - RNA, 19 nt, Artificial Sequence
  Description of Artificial Sequence: Synthetic oligonucleotide
  Sense strand starting at position 3870 of SEQ ID NO: 1561646
caaacuucuccugguggau

SEQ ID NO: 1687688 - RNA, 19 nt, Artificial Sequence
  Description of Artificial Sequence: Synthetic oligonucleotide
  Antisense strand to SEQ ID NO: 1687687
auccaccaggagaaguuug

SEQ ID NO: 1687689 - RNA, 19 nt, Artificial Sequence
  Description of Artificial Sequence: Synthetic oligonucleotide
  Sense strand starting at position 3873 of SEQ ID NO: 1561646
acuucuccugguggauaaa

SEQ ID NO: 1687690 - RNA, 19 nt, Artificial Sequence
  Description of Artificial Sequence: Synthetic oligonucleotide
  Antisense strand to SEQ ID NO: 1687689
uuuauccaccaggagaagu

SEQ ID NO: 1687691 - RNA, 19 nt, Artificial Sequence
  Description of Artificial Sequence: Synthetic oligonucleotide
  Sense strand starting at position 3874 of SEQ ID NO: 1561646
cuucuccugguggauaaau

SEQ ID NO: 1687692 - RNA, 19 nt, Artificial Sequence
  Description of Artificial Sequence: Synthetic oligonucleotide
  Antisense strand to SEQ ID NO: 1687691
auuuauccaccaggagaag

SEQ ID NO: 1687693 - RNA, 19 nt, Artificial Sequence
  Description of Artificial Sequence: Synthetic oligonucleotide
  Sense strand starting at position 3883 of SEQ ID NO: 1561646
guggauaaaucucagaaac

SEQ ID NO: 1687694 - RNA, 19 nt, Artificial Sequence
  Description of Artificial Sequence: Synthetic oligonucleotide
  Antisense strand to SEQ ID NO: 1687693
guuucugagauuuauccac

SEQ ID NO: 1687695 - RNA, 19 nt, Artificial Sequence
  Description of Artificial Sequence: Synthetic oligonucleotide
  Sense strand starting at position 3978 of SEQ ID NO: 1561646
gcagaaccacacuguauau

SEQ ID NO: 1687696 - RNA, 19 nt, Artificial Sequence
  Description of Artificial Sequence: Synthetic oligonucleotide
  Antisense strand to SEQ ID NO: 1687695
auauacagugugguucugc

SEQ ID NO: 1687697 - RNA, 19 nt, Artificial Sequence
  Description of Artificial Sequence: Synthetic oligonucleotide
  Sense strand starting at position 14 of SEQ ID NO: 1561647
gggcucuggccggaaagua

SEQ ID NO: 1687698 - RNA, 19 nt, Artificial Sequence
  Description of Artificial Sequence: Synthetic oligonucleotide
  Antisense strand to SEQ ID NO: 1687697
uacuuuccggccagagccc

SEQ ID NO: 1687699 - RNA, 19 nt, Artificial Sequence
  Description of Artificial Sequence: Synthetic oligonucleotide
  Sense strand starting at position 91 of SEQ ID NO: 1561647
uggcuuaaugugugacaca

SEQ ID NO: 1687700 - RNA, 19 nt, Artificial Sequence
  Description of Artificial Sequence: Synthetic oligonucleotide
  Antisense strand to SEQ ID NO: 1687699
ugugucacacauuaagcca

SEQ ID NO: 1687701 - RNA, 19 nt, Artificial Sequence
  Description of Artificial Sequence: Synthetic oligonucleotide
  Sense strand starting at position 110 of SEQ ID NO: 1561647
gcaagugcuccacaaacaa

SEQ ID NO: 1687702 - RNA, 19 nt, Artificial Sequence
  Description of Artificial Sequence: Synthetic oligonucleotide
  Antisense strand to SEQ ID NO: 1687701
uuguuuguggagcacuugc

SEQ ID NO: 1687703 - RNA, 19 nt, Artificial Sequence
  Description of Artificial Sequence: Synthetic oligonucleotide
  Sense strand starting at position 297 of SEQ ID NO: 1561647
acacgcaaacuuugaaaua

SEQ ID NO: 1687704 - RNA, 19 nt, Artificial Sequence
  Description of Artificial Sequence: Synthetic oligonucleotide
  Antisense strand to SEQ ID NO: 1687703
uauuucaaaguuugcgugu

SEQ ID NO: 1687705 - RNA, 19 nt, Artificial Sequence
  Description of Artificial Sequence: Synthetic oligonucleotide
  Sense strand starting at position 379 of SEQ ID NO: 1561647
uggagaggucuguggguca

SEQ ID NO: 1687706 - RNA, 19 nt, Artificial Sequence
  Description of Artificial Sequence: Synthetic oligonucleotide
  Antisense strand to SEQ ID NO: 1687705
ugacccacagaccucucca

SEQ ID NO: 1687707 - RNA, 19 nt, Artificial Sequence
  Description of Artificial Sequence: Synthetic oligonucleotide
  Sense strand starting at position 384 of SEQ ID NO: 1561647
aggucugugggucauugau

SEQ ID NO: 1687708 - RNA, 19 nt, Artificial Sequence
  Description of Artificial Sequence: Synthetic oligonucleotide
  Antisense strand to SEQ ID NO: 1687707
aucaaugacccacagaccu

SEQ ID NO: 1687709 - RNA, 19 nt, Artificial Sequence
  Description of Artificial Sequence: Synthetic oligonucleotide
  Sense strand starting at position 393 of SEQ ID NO: 1561647
ggucauugaugcucaucau

SEQ ID NO: 1687710 - RNA, 19 nt, Artificial Sequence
  Description of Artificial Sequence: Synthetic oligonucleotide
  Antisense strand to SEQ ID NO: 1687709
augaugagcaucaaugacc

SEQ ID NO: 1687711 - RNA, 19 nt, Artificial Sequence
  Description of Artificial Sequence: Synthetic oligonucleotide
  Sense strand starting at position 394 of SEQ ID NO: 1561647
gucauugaugcucaucauc

SEQ ID NO: 1687712 - RNA, 19 nt, Artificial Sequence
  Description of Artificial Sequence: Synthetic oligonucleotide
  Antisense strand to SEQ ID NO: 1687711
gaugaugagcaucaaugac

SEQ ID NO: 1687713 - RNA, 19 nt, Artificial Sequence
  Description of Artificial Sequence: Synthetic oligonucleotide
  Sense strand starting at position 592 of SEQ ID NO: 1561647
ggugaaagaugccugaucu

SEQ ID NO: 1687714 - RNA, 19 nt, Artificial Sequence
  Description of Artificial Sequence: Synthetic oligonucleotide
  Antisense strand to SEQ ID NO: 1687713
agaucaggcaucuuucacc

SEQ ID NO: 1687715 - RNA, 19 nt, Artificial Sequence
  Description of Artificial Sequence: Synthetic oligonucleotide
  Sense strand starting at position 593 of SEQ ID NO: 1561647
gugaaagaugccugaucuc

SEQ ID NO: 1687716 - RNA, 19 nt, Artificial Sequence
  Description of Artificial Sequence: Synthetic oligonucleotide
  Antisense strand to SEQ ID NO: 1687715
gagaucaggcaucuuucac

SEQ ID NO: 1687717 - RNA, 19 nt, Artificial Sequence
  Description of Artificial Sequence: Synthetic oligonucleotide
  Sense strand starting at position 600 of SEQ ID NO: 1561647
augccugaucucugaagca

SEQ ID NO: 1687718 - RNA, 19 nt, Artificial Sequence
  Description of Artificial Sequence: Synthetic oligonucleotide
  Antisense strand to SEQ ID NO: 1687717
ugcuucagagaucaggcau

SEQ ID NO: 1687719 - RNA, 19 nt, Artificial Sequence
  Description of Artificial Sequence: Synthetic oligonucleotide
  Sense strand starting at position 647 of SEQ ID NO: 1561647
accucuuguggugaaauga

SEQ ID NO: 1687720 - RNA, 19 nt, Artificial Sequence
  Description of Artificial Sequence: Synthetic oligonucleotide
  Antisense strand to SEQ ID NO: 1687719
ucauuucaccacaagaggu

SEQ ID NO: 1687721 - RNA, 19 nt, Artificial Sequence
  Description of Artificial Sequence: Synthetic oligonucleotide
  Sense strand starting at position 808 of SEQ ID NO: 1561647
gccguucuccuggauccaa

SEQ ID NO: 1687722 - RNA, 19 nt, Artificial Sequence
  Description of Artificial Sequence: Synthetic oligonucleotide
  Antisense strand to SEQ ID NO: 1687721
uuggauccaggagaacggc

SEQ ID NO: 1687723 - RNA, 19 nt, Artificial Sequence
  Description of Artificial Sequence: Synthetic oligonucleotide
  Sense strand starting at position 827 of SEQ ID NO: 1561647
ggcucuagguggucauuca

SEQ ID NO: 1687724 - RNA, 19 nt, Artificial Sequence
  Description of Artificial Sequence: Synthetic oligonucleotide
  Antisense strand to SEQ ID NO: 1687723
ugaaugaccaccuagagcc

SEQ ID NO: 1687725 - RNA, 19 nt, Artificial Sequence
  Description of Artificial Sequence: Synthetic oligonucleotide
  Sense strand starting at position 1256 of SEQ ID NO: 1561647
gccucaguccuguucucuu

SEQ ID NO: 1687726 - RNA, 19 nt, Artificial Sequence
  Description of Artificial Sequence: Synthetic oligonucleotide
  Antisense strand to SEQ ID NO: 1687725
aagagaacaggacugaggc

SEQ ID NO: 1687727 - RNA, 19 nt, Artificial Sequence
  Description of Artificial Sequence: Synthetic oligonucleotide
  Sense strand starting at position 1297 of SEQ ID NO: 1561647
gcuguauccuuucugggaa

SEQ ID NO: 1687728 - RNA, 19 nt, Artificial Sequence
  Description of Artificial Sequence: Synthetic oligonucleotide
  Antisense strand to SEQ ID NO: 1687727
uucccagaaaggauacagc

SEQ ID NO: 1687729 - RNA, 19 nt, Artificial Sequence
  Description of Artificial Sequence: Synthetic oligonucleotide
  Sense strand starting at position 1433 of SEQ ID NO: 1561647
ucugguuagugauucucuu

SEQ ID NO: 1687730 - RNA, 19 nt, Artificial Sequence
  Description of Artificial Sequence: Synthetic oligonucleotide
  Antisense strand to SEQ ID NO: 1687729
aagagaaucacuaaccaga

SEQ ID NO: 1687731 - RNA, 19 nt, Artificial Sequence
  Description of Artificial Sequence: Synthetic oligonucleotide
  Sense strand starting at position 1468 of SEQ ID NO: 1561647
agauaagauucugaaggga

SEQ ID NO: 1687732 - RNA, 19 nt, Artificial Sequence
  Description of Artificial Sequence: Synthetic oligonucleotide
  Antisense strand to SEQ ID NO: 1687731
ucccuucagaaucuuaucu

SEQ ID NO: 1687733 - RNA, 19 nt, Artificial Sequence
  Description of Artificial Sequence: Synthetic oligonucleotide
  Sense strand starting at position 1691 of SEQ ID NO: 1561647
cgaaaugccuuccucggaa

SEQ ID NO: 1687734 - RNA, 19 nt, Artificial Sequence
  Description of Artificial Sequence: Synthetic oligonucleotide
  Antisense strand to SEQ ID NO: 1687733
uuccgaggaaggcauuucg

SEQ ID NO: 1687735 - RNA, 19 nt, Artificial Sequence
  Description of Artificial Sequence: Synthetic oligonucleotide
  Sense strand starting at position 1694 of SEQ ID NO: 1561647
aaugccuuccucggaaagu

SEQ ID NO: 1687736 - RNA, 19 nt, Artificial Sequence
  Description of Artificial Sequence: Synthetic oligonucleotide
  Antisense strand to SEQ ID NO: 1687735
acuuuccgaggaaggcauu

SEQ ID NO: 1687737 - RNA, 19 nt, Artificial Sequence
  Description of Artificial Sequence: Synthetic oligonucleotide
  Sense strand starting at position 2284 of SEQ ID NO: 1561647
gcaaucugacuuugggaag

SEQ ID NO: 1687738 - RNA, 19 nt, Artificial Sequence
  Description of Artificial Sequence: Synthetic oligonucleotide
  Antisense strand to SEQ ID NO: 1687737
cuucccaaagucagauugc

SEQ ID NO: 1687739 - RNA, 19 nt, Artificial Sequence
  Description of Artificial Sequence: Synthetic oligonucleotide
  Sense strand starting at position 2654 of SEQ ID NO: 1561647
cggcuucucgagcucacua

SEQ ID NO: 1687740 - RNA, 19 nt, Artificial Sequence
  Description of Artificial Sequence: Synthetic oligonucleotide
  Antisense strand to SEQ ID NO: 1687739
uagugagcucgagaagccg

SEQ ID NO: 1687741 - RNA, 19 nt, Artificial Sequence
  Description of Artificial Sequence: Synthetic oligonucleotide
  Sense strand starting at position 3268 of SEQ ID NO: 1561647
gucagucacucaucaguca

SEQ ID NO: 1687742 - RNA, 19 nt, Artificial Sequence
  Description of Artificial Sequence: Synthetic oligonucleotide
  Antisense strand to SEQ ID NO: 1687741
ugacugaugagugacugac

SEQ ID NO: 1687743 - RNA, 19 nt, Artificial Sequence
  Description of Artificial Sequence: Synthetic oligonucleotide
  Sense strand starting at position 3295 of SEQ ID NO: 1561647
auuucauccguccgucagu

SEQ ID NO: 1687744 - RNA, 19 nt, Artificial Sequence
  Description of Artificial Sequence: Synthetic oligonucleotide
  Antisense strand to SEQ ID NO: 1687743
acugacggacggaugaaau

SEQ ID NO: 1687745 - RNA, 19 nt, Artificial Sequence
  Description of Artificial Sequence: Synthetic oligonucleotide
  Sense strand starting at position 3301 of SEQ ID NO: 1561647
uccguccgucaguuuauau

SEQ ID NO: 1687746 - RNA, 19 nt, Artificial Sequence
  Description of Artificial Sequence: Synthetic oligonucleotide
  Antisense strand to SEQ ID NO: 1687745
auauaaacugacggacgga

SEQ ID NO: 1687747 - RNA, 19 nt, Artificial Sequence
  Description of Artificial Sequence: Synthetic oligonucleotide
  Sense strand starting at position 3302 of SEQ ID NO: 1561647
ccguccgucaguuuauaua

SEQ ID NO: 1687748 - RNA, 19 nt, Artificial Sequence
  Description of Artificial Sequence: Synthetic oligonucleotide
  Antisense strand to SEQ ID NO: 1687747
uauauaaacugacggacgg

SEQ ID NO: 1687749 - RNA, 19 nt, Artificial Sequence
  Description of Artificial Sequence: Synthetic oligonucleotide
  Sense strand starting at position 3344 of SEQ ID NO: 1561647
uaagcacuuugucuggauu

SEQ ID NO: 1687750 - RNA, 19 nt, Artificial Sequence
  Description of Artificial Sequence: Synthetic oligonucleotide
  Antisense strand to SEQ ID NO: 1687749
aauccagacaaagugcuua

SEQ ID NO: 1687751 - RNA, 19 nt, Artificial Sequence
  Description of Artificial Sequence: Synthetic oligonucleotide
  Sense strand starting at position 3347 of SEQ ID NO: 1561647
gcacuuugucuggauucua

SEQ ID NO: 1687752 - RNA, 19 nt, Artificial Sequence
  Description of Artificial Sequence: Synthetic oligonucleotide
  Antisense strand to SEQ ID NO: 1687751
uagaauccagacaaagugc

SEQ ID NO: 1687753 - RNA, 19 nt, Artificial Sequence
  Description of Artificial Sequence: Synthetic oligonucleotide
  Sense strand starting at position 3358 of SEQ ID NO: 1561647
ggauucuaacucugcuagu

SEQ ID NO: 1687754 - RNA, 19 nt, Artificial Sequence
  Description of Artificial Sequence: Synthetic oligonucleotide
  Antisense strand to SEQ ID NO: 1687753
acuagcagaguuagaaucc

SEQ ID NO: 1687755 - RNA, 19 nt, Artificial Sequence
  Description of Artificial Sequence: Synthetic oligonucleotide
  Sense strand starting at position 3369 of SEQ ID NO: 1561647
cugcuaguuaggcaaguuu

SEQ ID NO: 1687756 - RNA, 19 nt, Artificial Sequence
  Description of Artificial Sequence: Synthetic oligonucleotide
  Antisense strand to SEQ ID NO: 1687755
aaacuugccuaacuagcag

SEQ ID NO: 1687757 - RNA, 19 nt, Artificial Sequence
  Description of Artificial Sequence: Synthetic oligonucleotide
  Sense strand starting at position 3441 of SEQ ID NO: 1561647
accucucucguugagcuau

SEQ ID NO: 1687758 - RNA, 19 nt, Artificial Sequence
  Description of Artificial Sequence: Synthetic oligonucleotide
  Antisense strand to SEQ ID NO: 1687757
auagcucaacgagagaggu

SEQ ID NO: 1687759 - RNA, 19 nt, Artificial Sequence
  Description of Artificial Sequence: Synthetic oligonucleotide
  Sense strand starting at position 3454 of SEQ ID NO: 1561647
agcuauugugaugauuaag

SEQ ID NO: 1687760 - RNA, 19 nt, Artificial Sequence
  Description of Artificial Sequence: Synthetic oligonucleotide
  Antisense strand to SEQ ID NO: 1687759
cuuaaucaucacaauagcu

SEQ ID NO: 1687761 - RNA, 19 nt, Artificial Sequence
  Description of Artificial Sequence: Synthetic oligonucleotide
  Sense strand starting at position 3705 of SEQ ID NO: 1561647
acaggagaaucguuuacag

SEQ ID NO: 1687762 - RNA, 19 nt, Artificial Sequence
  Description of Artificial Sequence: Synthetic oligonucleotide
  Antisense strand to SEQ ID NO: 1687761
cuguaaacgauucuccugu

SEQ ID NO: 1687763 - RNA, 19 nt, Artificial Sequence
  Description of Artificial Sequence: Synthetic oligonucleotide
  Sense strand starting at position 3768 of SEQ ID NO: 1561647
cacaguguguuaucaaaug

SEQ ID NO: 1687764 - RNA, 19 nt, Artificial Sequence
  Description of Artificial Sequence: Synthetic oligonucleotide
  Antisense strand to SEQ ID NO: 1687763
cauuugauaacacacugug

SEQ ID NO: 1687765 - RNA, 19 nt, Artificial Sequence
  Description of Artificial Sequence: Synthetic oligonucleotide
  Sense strand starting at position 3795 of SEQ ID NO: 1561647
uugccaauuagauggguaa

SEQ ID NO: 1687766 - RNA, 19 nt, Artificial Sequence
  Description of Artificial Sequence: Synthetic oligonucleotide
  Antisense strand to SEQ ID NO: 1687765
uuacccaucuaauuggcaa

SEQ ID NO: 1687767 - RNA, 19 nt, Artificial Sequence
  Description of Artificial Sequence: Synthetic oligonucleotide
  Sense strand starting at position 3796 of SEQ ID NO: 1561647
ugccaauuagauggguaaa

SEQ ID NO: 1687768 - RNA, 19 nt, Artificial Sequence
  Description of Artificial Sequence: Synthetic oligonucleotide
  Antisense strand to SEQ ID NO: 1687767
uuuacccaucuaauuggca

SEQ ID NO: 1687769 - RNA, 19 nt, Artificial Sequence
  Description of Artificial Sequence: Synthetic oligonucleotide
  Sense strand starting at position 3859 of SEQ ID NO: 1561647
ugagcaauuugucauauuu

SEQ ID NO: 1687770 - RNA, 19 nt, Artificial Sequence
  Description of Artificial Sequence: Synthetic oligonucleotide
  Antisense strand to SEQ ID NO: 1687769
aaauaugacaaauugcuca

SEQ ID NO: 1687771 - RNA, 19 nt, Artificial Sequence
  Description of Artificial Sequence: Synthetic oligonucleotide
  Sense strand starting at position 3902 of SEQ ID NO: 1561647
ggaucuuguauuggugaau

SEQ ID NO: 1687772 - RNA, 19 nt, Artificial Sequence
  Description of Artificial Sequence: Synthetic oligonucleotide
  Antisense strand to SEQ ID NO: 1687771
auucaccaauacaagaucc

SEQ ID NO: 1687773 - RNA, 19 nt, Artificial Sequence
  Description of Artificial Sequence: Synthetic oligonucleotide
  Sense strand starting at position 3903 of SEQ ID NO: 1561647
gaucuuguauuggugaauu

SEQ ID NO: 1687774 - RNA, 19 nt, Artificial Sequence
  Description of Artificial Sequence: Synthetic oligonucleotide
  Antisense strand to SEQ ID NO: 1687773
aauucaccaauacaagauc

SEQ ID NO: 1687775 - RNA, 19 nt, Artificial Sequence
  Description of Artificial Sequence: Synthetic oligonucleotide
  Sense strand starting at position 3949 of SEQ ID NO: 1561647
gguggucuuucuguugaac

SEQ ID NO: 1687776 - RNA, 19 nt, Artificial Sequence
  Description of Artificial Sequence: Synthetic oligonucleotide
  Antisense strand to SEQ ID NO: 1687775
guucaacagaaagaccacc

SEQ ID NO: 1687777 - RNA, 19 nt, Artificial Sequence
  Description of Artificial Sequence: Synthetic oligonucleotide
  Sense strand starting at position 279 of SEQ ID NO: 1561648
acgucaaucucucugaaua

SEQ ID NO: 1687778 - RNA, 19 nt, Artificial Sequence
  Description of Artificial Sequence: Synthetic oligonucleotide
  Antisense strand to SEQ ID NO: 1687777
uauucagagagauugacgu

SEQ ID NO: 1687779 - RNA, 19 nt, Artificial Sequence
  Description of Artificial Sequence: Synthetic oligonucleotide
  Sense strand starting at position 280 of SEQ ID NO: 1561648
cgucaaucucucugaauaa

SEQ ID NO: 1687780 - RNA, 19 nt, Artificial Sequence
  Description of Artificial Sequence: Synthetic oligonucleotide
  Antisense strand to SEQ ID NO: 1687779
uuauucagagagauugacg

SEQ ID NO: 1687781 - RNA, 19 nt, Artificial Sequence
  Description of Artificial Sequence: Synthetic oligonucleotide
  Sense strand starting at position 565 of SEQ ID NO: 1561648
uccauauauccaugagugg

SEQ ID NO: 1687782 - RNA, 19 nt, Artificial Sequence
  Description of Artificial Sequence: Synthetic oligonucleotide
  Antisense strand to SEQ ID NO: 1687781
ccacucauggauauaugga

SEQ ID NO: 1687783 - RNA, 19 nt, Artificial Sequence
  Description of Artificial Sequence: Synthetic oligonucleotide
  Sense strand starting at position 566 of SEQ ID NO: 1561648
ccauauauccaugaguggu

SEQ ID NO: 1687784 - RNA, 19 nt, Artificial Sequence
  Description of Artificial Sequence: Synthetic oligonucleotide
  Antisense strand to SEQ ID NO: 1687783
accacucauggauauaugg

SEQ ID NO: 1687785 - RNA, 19 nt, Artificial Sequence
  Description of Artificial Sequence: Synthetic oligonucleotide
  Sense strand starting at position 714 of SEQ ID NO: 1561648
auagaauuguagccugagu

SEQ ID NO: 1687786 - RNA, 19 nt, Artificial Sequence
  Description of Artificial Sequence: Synthetic oligonucleotide
  Antisense strand to SEQ ID NO: 1687785
acucaggcuacaauucuau

SEQ ID NO: 1687787 - RNA, 19 nt, Artificial Sequence
  Description of Artificial Sequence: Synthetic oligonucleotide
  Sense strand starting at position 728 of SEQ ID NO: 1561648
ugagucuuuccucaguuua

SEQ ID NO: 1687788 - RNA, 19 nt, Artificial Sequence
  Description of Artificial Sequence: Synthetic oligonucleotide
  Antisense strand to SEQ ID NO: 1687787
uaaacugaggaaagacuca

SEQ ID NO: 1687789 - RNA, 19 nt, Artificial Sequence
  Description of Artificial Sequence: Synthetic oligonucleotide
  Sense strand starting at position 750 of SEQ ID NO: 1561648
ugugauugauccuccuuac

SEQ ID NO: 1687790 - RNA, 19 nt, Artificial Sequence
  Description of Artificial Sequence: Synthetic oligonucleotide
  Antisense strand to SEQ ID NO: 1687789
guaaggaggaucaaucaca

SEQ ID NO: 1687791 - RNA, 19 nt, Artificial Sequence
  Description of Artificial Sequence: Synthetic oligonucleotide
  Sense strand starting at position 908 of SEQ ID NO: 1561648
cuguuaguaaguggauaca

SEQ ID NO: 1687792 - RNA, 19 nt, Artificial Sequence
  Description of Artificial Sequence: Synthetic oligonucleotide
  Antisense strand to SEQ ID NO: 1687791
uguauccacuuacuaacag

SEQ ID NO: 1687793 - RNA, 19 nt, Artificial Sequence
  Description of Artificial Sequence: Synthetic oligonucleotide
  Sense strand starting at position 1099 of SEQ ID NO: 1561648
gcugauauuccagauuccu

SEQ ID NO: 1687794 - RNA, 19 nt, Artificial Sequence
  Description of Artificial Sequence: Synthetic oligonucleotide
  Antisense strand to SEQ ID NO: 1687793
aggaaucuggaauaucagc

SEQ ID NO: 1687795 - RNA, 19 nt, Artificial Sequence
  Description of Artificial Sequence: Synthetic oligonucleotide
  Sense strand starting at position 1328 of SEQ ID NO: 1561648
auggcuuccugacugggaa

SEQ ID NO: 1687796 - RNA, 19 nt, Artificial Sequence
  Description of Artificial Sequence: Synthetic oligonucleotide
  Antisense strand to SEQ ID NO: 1687795
uucccagucaggaagccau

SEQ ID NO: 1687797 - RNA, 19 nt, Artificial Sequence
  Description of Artificial Sequence: Synthetic oligonucleotide
  Sense strand starting at position 1354 of SEQ ID NO: 1561648
cagucaucucagggaaguu

SEQ ID NO: 1687798 - RNA, 19 nt, Artificial Sequence
  Description of Artificial Sequence: Synthetic oligonucleotide
  Antisense strand to SEQ ID NO: 1687797
aacuucccugagaugacug

SEQ ID NO: 1687799 - RNA, 19 nt, Artificial Sequence
  Description of Artificial Sequence: Synthetic oligonucleotide
  Sense strand starting at position 1355 of SEQ ID NO: 1561648
agucaucucagggaaguuu

SEQ ID NO: 1687800 - RNA, 19 nt, Artificial Sequence
  Description of Artificial Sequence: Synthetic oligonucleotide
  Antisense strand to SEQ ID NO: 1687799
aaacuucccugagaugacu

SEQ ID NO: 1687801 - RNA, 19 nt, Artificial Sequence
  Description of Artificial Sequence: Synthetic oligonucleotide
  Sense strand starting at position 1369 of SEQ ID NO: 1561648
aguuucuggccuugggaaa

SEQ ID NO: 1687802 - RNA, 19 nt, Artificial Sequence
  Description of Artificial Sequence: Synthetic oligonucleotide
  Antisense strand to SEQ ID NO: 1687801
uuucccaaggccagaaacu

SEQ ID NO: 1687803 - RNA, 19 nt, Artificial Sequence
  Description of Artificial Sequence: Synthetic oligonucleotide
  Sense strand starting at position 1583 of SEQ ID NO: 1561648
uuuagaaauuuccaugagu

SEQ ID NO: 1687804 - RNA, 19 nt, Artificial Sequence
  Description of Artificial Sequence: Synthetic oligonucleotide
  Antisense strand to SEQ ID NO: 1687803
acucauggaaauuucuaaa

SEQ ID NO: 1687805 - RNA, 19 nt, Artificial Sequence
  Description of Artificial Sequence: Synthetic oligonucleotide
  Sense strand starting at position 1641 of SEQ ID NO: 1561648
gggaguuucuuuccuagag

SEQ ID NO: 1687806 - RNA, 19 nt, Artificial Sequence
  Description of Artificial Sequence: Synthetic oligonucleotide
  Antisense strand to SEQ ID NO: 1687805
cucuaggaaagaaacuccc

SEQ ID NO: 1687807 - RNA, 19 nt, Artificial Sequence
  Description of Artificial Sequence: Synthetic oligonucleotide
  Sense strand starting at position 1651 of SEQ ID NO: 1561648
uuccuagaguucuuuaaag

SEQ ID NO: 1687808 - RNA, 19 nt, Artificial Sequence
  Description of Artificial Sequence: Synthetic oligonucleotide
  Antisense strand to SEQ ID NO: 1687807
cuuuaaagaacucuaggaa

SEQ ID NO: 1687809 - RNA, 19 nt, Artificial Sequence
  Description of Artificial Sequence: Synthetic oligonucleotide
  Sense strand starting at position 1653 of SEQ ID NO: 1561648
ccuagaguucuuuaaagca

SEQ ID NO: 1687810 - RNA, 19 nt, Artificial Sequence
  Description of Artificial Sequence: Synthetic oligonucleotide
  Antisense strand to SEQ ID NO: 1687809
ugcuuuaaagaacucuagg

SEQ ID NO: 1687811 - RNA, 19 nt, Artificial Sequence
  Description of Artificial Sequence: Synthetic oligonucleotide
  Sense strand starting at position 1701 of SEQ ID NO: 1561648
acacuugccguuuaucaga

SEQ ID NO: 1687812 - RNA, 19 nt, Artificial Sequence
  Description of Artificial Sequence: Synthetic oligonucleotide
  Antisense strand to SEQ ID NO: 1687811
ucugauaaacggcaagugu

SEQ ID NO: 1687813 - RNA, 19 nt, Artificial Sequence
  Description of Artificial Sequence: Synthetic oligonucleotide
  Sense strand starting at position 1854 of SEQ ID NO: 1561648
ccaggucugggcugagaaa

SEQ ID NO: 1687814 - RNA, 19 nt, Artificial Sequence
  Description of Artificial Sequence: Synthetic oligonucleotide
  Antisense strand to SEQ ID NO: 1687813
uuucucagcccagaccugg

SEQ ID NO: 1687815 - RNA, 19 nt, Artificial Sequence
  Description of Artificial Sequence: Synthetic oligonucleotide
  Sense strand starting at position 1935 of SEQ ID NO: 1561648
aggcuuuccacaggauaga

SEQ ID NO: 1687816 - RNA, 19 nt, Artificial Sequence
  Description of Artificial Sequence: Synthetic oligonucleotide
  Antisense strand to SEQ ID NO: 1687815
ucuauccuguggaaagccu

SEQ ID NO: 1687817 - RNA, 19 nt, Artificial Sequence
  Description of Artificial Sequence: Synthetic oligonucleotide
  Sense strand starting at position 2103 of SEQ ID NO: 1561648
ccaauugcaagaugugaug

SEQ ID NO: 1687818 - RNA, 19 nt, Artificial Sequence
  Description of Artificial Sequence: Synthetic oligonucleotide
  Antisense strand to SEQ ID NO: 1687817
caucacaucuugcaauugg

SEQ ID NO: 1687819 - RNA, 19 nt, Artificial Sequence
  Description of Artificial Sequence: Synthetic oligonucleotide
  Sense strand starting at position 2118 of SEQ ID NO: 1561648
gauguuguuugccucauuu

SEQ ID NO: 1687820 - RNA, 19 nt, Artificial Sequence
  Description of Artificial Sequence: Synthetic oligonucleotide
  Antisense strand to SEQ ID NO: 1687819
aaaugaggcaaacaacauc

SEQ ID NO: 1687821 - RNA, 19 nt, Artificial Sequence
  Description of Artificial Sequence: Synthetic oligonucleotide
  Sense strand starting at position 2120 of SEQ ID NO: 1561648
uguuguuugccucauuuac

SEQ ID NO: 1687822 - RNA, 19 nt, Artificial Sequence
  Description of Artificial Sequence: Synthetic oligonucleotide
  Antisense strand to SEQ ID NO: 1687821
guaaaugaggcaaacaaca

SEQ ID NO: 1687823 - RNA, 19 nt, Artificial Sequence
  Description of Artificial Sequence: Synthetic oligonucleotide
  Sense strand starting at position 2194 of SEQ ID NO: 1561648
ugcccagacauggauaguu

SEQ ID NO: 1687824 - RNA, 19 nt, Artificial Sequence
  Description of Artificial Sequence: Synthetic oligonucleotide
  Antisense strand to SEQ ID NO: 1687823
aacuauccaugucugggca

SEQ ID NO: 1687825 - RNA, 19 nt, Artificial Sequence
  Description of Artificial Sequence: Synthetic oligonucleotide
  Sense strand starting at position 2333 of SEQ ID NO: 1561648
gcccaaggccuagaguuua

SEQ ID NO: 1687826 - RNA, 19 nt, Artificial Sequence
  Description of Artificial Sequence: Synthetic oligonucleotide
  Antisense strand to SEQ ID NO: 1687825
uaaacucuaggccuugggc

SEQ ID NO: 1687827 - RNA, 19 nt, Artificial Sequence
  Description of Artificial Sequence: Synthetic oligonucleotide
  Sense strand starting at position 2338 of SEQ ID NO: 1561648
aggccuagaguuuauaaau

SEQ ID NO: 1687828 - RNA, 19 nt, Artificial Sequence
  Description of Artificial Sequence: Synthetic oligonucleotide
  Antisense strand to SEQ ID NO: 1687827
auuuauaaacucuaggccu

SEQ ID NO: 1687829 - RNA, 19 nt, Artificial Sequence
  Description of Artificial Sequence: Synthetic oligonucleotide
  Sense strand starting at position 2365 of SEQ ID NO: 1561648
aagagacugcguuaguauu

SEQ ID NO: 1687830 - RNA, 19 nt, Artificial Sequence
  Description of Artificial Sequence: Synthetic oligonucleotide
  Antisense strand to SEQ ID NO: 1687829
aauacuaacgcagucucuu

SEQ ID NO: 1687831 - RNA, 19 nt, Artificial Sequence
  Description of Artificial Sequence: Synthetic oligonucleotide
  Sense strand starting at position 2476 of SEQ ID NO: 1561648
gggucaaauuagucaacau

SEQ ID NO: 1687832 - RNA, 19 nt, Artificial Sequence
  Description of Artificial Sequence: Synthetic oligonucleotide
  Antisense strand to SEQ ID NO: 1687831
auguugacuaauuugaccc

SEQ ID NO: 1687833 - RNA, 19 nt, Artificial Sequence
  Description of Artificial Sequence: Synthetic oligonucleotide
  Sense strand starting at position 2486 of SEQ ID NO: 1561648
agucaacaucuugaguuua

SEQ ID NO: 1687834 - RNA, 19 nt, Artificial Sequence
  Description of Artificial Sequence: Synthetic oligonucleotide
  Antisense strand to SEQ ID NO: 1687833
uaaacucaagauguugacu

SEQ ID NO: 1687835 - RNA, 19 nt, Artificial Sequence
  Description of Artificial Sequence: Synthetic oligonucleotide
  Sense strand starting at position 2497 of SEQ ID NO: 1561648
ugaguuuacaggugaggac

SEQ ID NO: 1687836 - RNA, 19 nt, Artificial Sequence
  Description of Artificial Sequence: Synthetic oligonucleotide
  Antisense strand to SEQ ID NO: 1687835
guccucaccuguaaacuca

SEQ ID NO: 1687837 - RNA, 19 nt, Artificial Sequence
  Description of Artificial Sequence: Synthetic oligonucleotide
  Sense strand starting at position 2545 of SEQ ID NO: 1561648
agguccuauggcuacuuaa

SEQ ID NO: 1687838 - RNA, 19 nt, Artificial Sequence
  Description of Artificial Sequence: Synthetic oligonucleotide
  Antisense strand to SEQ ID NO: 1687837
uuaaguagccauaggaccu

SEQ ID NO: 1687839 - RNA, 19 nt, Artificial Sequence
  Description of Artificial Sequence: Synthetic oligonucleotide
  Sense strand starting at position 2925 of SEQ ID NO: 1561648
gggaccucuuaucuagagu

SEQ ID NO: 1687840 - RNA, 19 nt, Artificial Sequence
  Description of Artificial Sequence: Synthetic oligonucleotide
  Antisense strand to SEQ ID NO: 1687839
acucuagauaagagguccc

SEQ ID NO: 1687841 - RNA, 19 nt, Artificial Sequence
  Description of Artificial Sequence: Synthetic oligonucleotide
  Sense strand starting at position 2958 of SEQ ID NO: 1561648
aaggacuggcaguggaaau

SEQ ID NO: 1687842 - RNA, 19 nt, Artificial Sequence
  Description of Artificial Sequence: Synthetic oligonucleotide
  Antisense strand to SEQ ID NO: 1687841
auuuccacugccaguccuu

SEQ ID NO: 1687843 - RNA, 19 nt, Artificial Sequence
  Description of Artificial Sequence: Synthetic oligonucleotide
  Sense strand starting at position 2959 of SEQ ID NO: 1561648
aggacuggcaguggaaaua

SEQ ID NO: 1687844 - RNA, 19 nt, Artificial Sequence
  Description of Artificial Sequence: Synthetic oligonucleotide
  Antisense strand to SEQ ID NO: 1687843
uauuuccacugccaguccu

SEQ ID NO: 1687845 - RNA, 19 nt, Artificial Sequence
  Description of Artificial Sequence: Synthetic oligonucleotide
  Sense strand starting at position 2968 of SEQ ID NO: 1561648
aguggaaauauuggagcaa

SEQ ID NO: 1687846 - RNA, 19 nt, Artificial Sequence
  Description of Artificial Sequence: Synthetic oligonucleotide
  Antisense strand to SEQ ID NO: 1687845
uugcuccaauauuuccacu

SEQ ID NO: 1687847 - RNA, 19 nt, Artificial Sequence
  Description of Artificial Sequence: Synthetic oligonucleotide
  Sense strand starting at position 3079 of SEQ ID NO: 1561648
agaguucccucaucaggaa

SEQ ID NO: 1687848 - RNA, 19 nt, Artificial Sequence
  Description of Artificial Sequence: Synthetic oligonucleotide
  Antisense strand to SEQ ID NO: 1687847
uuccugaugagggaacucu

SEQ ID NO: 1687849 - RNA, 19 nt, Artificial Sequence
  Description of Artificial Sequence: Synthetic oligonucleotide
  Sense strand starting at position 3105 of SEQ ID NO: 1561648
guuucuuuggcugaaccau

SEQ ID NO: 1687850 - RNA, 19 nt, Artificial Sequence
  Description of Artificial Sequence: Synthetic oligonucleotide
  Antisense strand to SEQ ID NO: 1687849
augguucagccaaagaaac

SEQ ID NO: 1687851 - RNA, 19 nt, Artificial Sequence
  Description of Artificial Sequence: Synthetic oligonucleotide
  Sense strand starting at position 3242 of SEQ ID NO: 1561648
uauguaucuugguccauag

SEQ ID NO: 1687852 - RNA, 19 nt, Artificial Sequence
  Description of Artificial Sequence: Synthetic oligonucleotide
  Antisense strand to SEQ ID NO: 1687851
cuauggaccaagauacaua

SEQ ID NO: 1687853 - RNA, 19 nt, Artificial Sequence
  Description of Artificial Sequence: Synthetic oligonucleotide
  Sense strand starting at position 3490 of SEQ ID NO: 1561648
gggaacuugggccaaguuu

SEQ ID NO: 1687854 - RNA, 19 nt, Artificial Sequence
  Description of Artificial Sequence: Synthetic oligonucleotide
  Antisense strand to SEQ ID NO: 1687853
aaacuuggcccaaguuccc

SEQ ID NO: 1687855 - RNA, 19 nt, Artificial Sequence
  Description of Artificial Sequence: Synthetic oligonucleotide
  Sense strand starting at position 3818 of SEQ ID NO: 1561648
agaagucugcagggaauaa

SEQ ID NO: 1687856 - RNA, 19 nt, Artificial Sequence
  Description of Artificial Sequence: Synthetic oligonucleotide
  Antisense strand to SEQ ID NO: 1687855
uuauucccugcagacuucu

SEQ ID NO: 1687857 - RNA, 19 nt, Artificial Sequence
  Description of Artificial Sequence: Synthetic oligonucleotide
  Sense strand starting at position 525 of SEQ ID NO: 1561649
agccuucugagucaaagag

SEQ ID NO: 1687858 - RNA, 19 nt, Artificial Sequence
  Description of Artificial Sequence: Synthetic oligonucleotide
  Antisense strand to SEQ ID NO: 1687857
cucuuugacucagaaggcu

SEQ ID NO: 1687859 - RNA, 19 nt, Artificial Sequence
  Description of Artificial Sequence: Synthetic oligonucleotide
  Sense strand starting at position 781 of SEQ ID NO: 1561649
gggugaugccaauacugcu

SEQ ID NO: 1687860 - RNA, 19 nt, Artificial Sequence
  Description of Artificial Sequence: Synthetic oligonucleotide
  Antisense strand to SEQ ID NO: 1687859
agcaguauuggcaucaccc

SEQ ID NO: 1687861 - RNA, 19 nt, Artificial Sequence
  Description of Artificial Sequence: Synthetic oligonucleotide
  Sense strand starting at position 885 of SEQ ID NO: 1561649
ggcaauuagacuuagcaug

SEQ ID NO: 1687862 - RNA, 19 nt, Artificial Sequence
  Description of Artificial Sequence: Synthetic oligonucleotide
  Antisense strand to SEQ ID NO: 1687861
caugcuaagucuaauugcc

SEQ ID NO: 1687863 - RNA, 19 nt, Artificial Sequence
  Description of Artificial Sequence: Synthetic oligonucleotide
  Sense strand starting at position 1013 of SEQ ID NO: 1561649
caguaaagauaaguaugua

SEQ ID NO: 1687864 - RNA, 19 nt, Artificial Sequence
  Description of Artificial Sequence: Synthetic oligonucleotide
  Antisense strand to SEQ ID NO: 1687863
uacauacuuaucuuuacug

SEQ ID NO: 1687865 - RNA, 19 nt, Artificial Sequence
  Description of Artificial Sequence: Synthetic oligonucleotide
  Sense strand starting at position 1035 of SEQ ID NO: 1561649
auuaaauaacaucgguaca

SEQ ID NO: 1687866 - RNA, 19 nt, Artificial Sequence
  Description of Artificial Sequence: Synthetic oligonucleotide
  Antisense strand to SEQ ID NO: 1687865
uguaccgauguuauuuaau

SEQ ID NO: 1687867 - RNA, 19 nt, Artificial Sequence
  Description of Artificial Sequence: Synthetic oligonucleotide
  Sense strand starting at position 1094 of SEQ ID NO: 1561649
gaguacaucccguaagauu

SEQ ID NO: 1687868 - RNA, 19 nt, Artificial Sequence
  Description of Artificial Sequence: Synthetic oligonucleotide
  Antisense strand to SEQ ID NO: 1687867
aaucuuacgggauguacuc

SEQ ID NO: 1687869 - RNA, 19 nt, Artificial Sequence
  Description of Artificial Sequence: Synthetic oligonucleotide
  Sense strand starting at position 1140 of SEQ ID NO: 1561649
aaagucaaucuauggugau

SEQ ID NO: 1687870 - RNA, 19 nt, Artificial Sequence
  Description of Artificial Sequence: Synthetic oligonucleotide
  Antisense strand to SEQ ID NO: 1687869
aucaccauagauugacuuu

SEQ ID NO: 1687871 - RNA, 19 nt, Artificial Sequence
  Description of Artificial Sequence: Synthetic oligonucleotide
  Sense strand starting at position 1238 of SEQ ID NO: 1561649
ggaaauaucucacuuguuu

SEQ ID NO: 1687872 - RNA, 19 nt, Artificial Sequence
  Description of Artificial Sequence: Synthetic oligonucleotide
  Antisense strand to SEQ ID NO: 1687871
aaacaagugagauauuucc

SEQ ID NO: 1687873 - RNA, 19 nt, Artificial Sequence
  Description of Artificial Sequence: Synthetic oligonucleotide
  Sense strand starting at position 1370 of SEQ ID NO: 1561649
augauacaacuucguguaa

SEQ ID NO: 1687874 - RNA, 19 nt, Artificial Sequence
  Description of Artificial Sequence: Synthetic oligonucleotide
  Antisense strand to SEQ ID NO: 1687873
uuacacgaaguuguaucau

SEQ ID NO: 1687875 - RNA, 19 nt, Artificial Sequence
  Description of Artificial Sequence: Synthetic oligonucleotide
  Sense strand starting at position 1371 of SEQ ID NO: 1561649
ugauacaacuucguguaaa

SEQ ID NO: 1687876 - RNA, 19 nt, Artificial Sequence
  Description of Artificial Sequence: Synthetic oligonucleotide
  Antisense strand to SEQ ID NO: 1687875
uuuacacgaaguuguauca

SEQ ID NO: 1687877 - RNA, 19 nt, Artificial Sequence
  Description of Artificial Sequence: Synthetic oligonucleotide
  Sense strand starting at position 1415 of SEQ ID NO: 1561649
ccagucuuagcuuaaggaa

SEQ ID NO: 1687878 - RNA, 19 nt, Artificial Sequence
  Description of Artificial Sequence: Synthetic oligonucleotide
  Antisense strand to SEQ ID NO: 1687877
uuccuuaagcuaagacugg

SEQ ID NO: 1687879 - RNA, 19 nt, Artificial Sequence
  Description of Artificial Sequence: Synthetic oligonucleotide
  Sense strand starting at position 1453 of SEQ ID NO: 1561649
ggaugaggucaucgaucga

SEQ ID NO: 1687880 - RNA, 19 nt, Artificial Sequence
  Description of Artificial Sequence: Synthetic oligonucleotide
  Antisense strand to SEQ ID NO: 1687879
ucgaucgaugaccucaucc

SEQ ID NO: 1687881 - RNA, 19 nt, Artificial Sequence
  Description of Artificial Sequence: Synthetic oligonucleotide
  Sense strand starting at position 2477 of SEQ ID NO: 1561649
auuuccaauugcucgguua

SEQ ID NO: 1687882 - RNA, 19 nt, Artificial Sequence
  Description of Artificial Sequence: Synthetic oligonucleotide
  Antisense strand to SEQ ID NO: 1687881
uaaccgagcaauuggaaau

SEQ ID NO: 1687883 - RNA, 19 nt, Artificial Sequence
  Description of Artificial Sequence: Synthetic oligonucleotide
  Sense strand starting at position 2536 of SEQ ID NO: 1561649
gacccuucuguauagcaga

SEQ ID NO: 1687884 - RNA, 19 nt, Artificial Sequence
  Description of Artificial Sequence: Synthetic oligonucleotide
  Antisense strand to SEQ ID NO: 1687883
ucugcuauacagaaggguc

SEQ ID NO: 1687885 - RNA, 19 nt, Artificial Sequence
  Description of Artificial Sequence: Synthetic oligonucleotide
  Sense strand starting at position 2552 of SEQ ID NO: 1561649
agagguucuuaaccaugga

SEQ ID NO: 1687886 - RNA, 19 nt, Artificial Sequence
  Description of Artificial Sequence: Synthetic oligonucleotide
  Antisense strand to SEQ ID NO: 1687885
uccaugguuaagaaccucu

SEQ ID NO: 1687887 - RNA, 19 nt, Artificial Sequence
  Description of Artificial Sequence: Synthetic oligonucleotide
  Sense strand starting at position 2582 of SEQ ID NO: 1561649
auggcaugucuccauuaag

SEQ ID NO: 1687888 - RNA, 19 nt, Artificial Sequence
  Description of Artificial Sequence: Synthetic oligonucleotide
  Antisense strand to SEQ ID NO: 1687887
cuuaauggagacaugccau

SEQ ID NO: 1687889 - RNA, 19 nt, Artificial Sequence
  Description of Artificial Sequence: Synthetic oligonucleotide
  Sense strand starting at position 2585 of SEQ ID NO: 1561649
gcaugucuccauuaaguag

SEQ ID NO: 1687890 - RNA, 19 nt, Artificial Sequence
  Description of Artificial Sequence: Synthetic oligonucleotide
  Antisense strand to SEQ ID NO: 1687889
cuacuuaauggagacaugc

SEQ ID NO: 1687891 - RNA, 19 nt, Artificial Sequence
  Description of Artificial Sequence: Synthetic oligonucleotide
  Sense strand starting at position 2593 of SEQ ID NO: 1561649
ccauuaaguagugaggugu

SEQ ID NO: 1687892 - RNA, 19 nt, Artificial Sequence
  Description of Artificial Sequence: Synthetic oligonucleotide
  Antisense strand to SEQ ID NO: 1687891
acaccucacuacuuaaugg

SEQ ID NO: 1687893 - RNA, 19 nt, Artificial Sequence
  Description of Artificial Sequence: Synthetic oligonucleotide
  Sense strand starting at position 2603 of SEQ ID NO: 1561649
gugagguguggcgcaagua

SEQ ID NO: 1687894 - RNA, 19 nt, Artificial Sequence
  Description of Artificial Sequence: Synthetic oligonucleotide
  Antisense strand to SEQ ID NO: 1687893
uacuugcgccacaccucac

SEQ ID NO: 1687895 - RNA, 19 nt, Artificial Sequence
  Description of Artificial Sequence: Synthetic oligonucleotide
  Sense strand starting at position 2606 of SEQ ID NO: 1561649
agguguggcgcaaguaauu

SEQ ID NO: 1687896 - RNA, 19 nt, Artificial Sequence
  Description of Artificial Sequence: Synthetic oligonucleotide
  Antisense strand to SEQ ID NO: 1687895
aauuacuugcgccacaccu

SEQ ID NO: 1687897 - RNA, 19 nt, Artificial Sequence
  Description of Artificial Sequence: Synthetic oligonucleotide
  Sense strand starting at position 2611 of SEQ ID NO: 1561649
uggcgcaaguaauuucuua

SEQ ID NO: 1687898 - RNA, 19 nt, Artificial Sequence
  Description of Artificial Sequence: Synthetic oligonucleotide
  Antisense strand to SEQ ID NO: 1687897
uaagaaauuacuugcgcca

SEQ ID NO: 1687899 - RNA, 19 nt, Artificial Sequence
  Description of Artificial Sequence: Synthetic oligonucleotide
  Sense strand starting at position 2663 of SEQ ID NO: 1561649
aggagacaugcacgguuau

SEQ ID NO: 1687900 - RNA, 19 nt, Artificial Sequence
  Description of Artificial Sequence: Synthetic oligonucleotide
  Antisense strand to SEQ ID NO: 1687899
auaaccgugcaugucuccu

SEQ ID NO: 1687901 - RNA, 19 nt, Artificial Sequence
  Description of Artificial Sequence: Synthetic oligonucleotide
  Sense strand starting at position 2714 of SEQ ID NO: 1561649
uugacaugcuuucuugaau

SEQ ID NO: 1687902 - RNA, 19 nt, Artificial Sequence
  Description of Artificial Sequence: Synthetic oligonucleotide
  Antisense strand to SEQ ID NO: 1687901
auucaagaaagcaugucaa

SEQ ID NO: 1687903 - RNA, 19 nt, Artificial Sequence
  Description of Artificial Sequence: Synthetic oligonucleotide
  Sense strand starting at position 2715 of SEQ ID NO: 1561649
ugacaugcuuucuugaaug

SEQ ID NO: 1687904 - RNA, 19 nt, Artificial Sequence
  Description of Artificial Sequence: Synthetic oligonucleotide
  Antisense strand to SEQ ID NO: 1687903
cauucaagaaagcauguca

SEQ ID NO: 1687905 - RNA, 19 nt, Artificial Sequence
  Description of Artificial Sequence: Synthetic oligonucleotide
  Sense strand starting at position 2717 of SEQ ID NO: 1561649
acaugcuuucuugaaugga

SEQ ID NO: 1687906 - RNA, 19 nt, Artificial Sequence
  Description of Artificial Sequence: Synthetic oligonucleotide
  Antisense strand to SEQ ID NO: 1687905
uccauucaagaaagcaugu

SEQ ID NO: 1687907 - RNA, 19 nt, Artificial Sequence
  Description of Artificial Sequence: Synthetic oligonucleotide
  Sense strand starting at position 2753 of SEQ ID NO: 1561649
cacccaugggccuguaaua

SEQ ID NO: 1687908 - RNA, 19 nt, Artificial Sequence
  Description of Artificial Sequence: Synthetic oligonucleotide
  Antisense strand to SEQ ID NO: 1687907
uauuacaggcccaugggug

SEQ ID NO: 1687909 - RNA, 19 nt, Artificial Sequence
  Description of Artificial Sequence: Synthetic oligonucleotide
  Sense strand starting at position 3235 of SEQ ID NO: 1561649
gugccauuauguuccauuu

SEQ ID NO: 1687910 - RNA, 19 nt, Artificial Sequence
  Description of Artificial Sequence: Synthetic oligonucleotide
  Antisense strand to SEQ ID NO: 1687909
aaauggaacauaauggcac

SEQ ID NO: 1687911 - RNA, 19 nt, Artificial Sequence
  Description of Artificial Sequence: Synthetic oligonucleotide
  Sense strand starting at position 3266 of SEQ ID NO: 1561649
uggaacuaauaguuggauu

SEQ ID NO: 1687912 - RNA, 19 nt, Artificial Sequence
  Description of Artificial Sequence: Synthetic oligonucleotide
  Antisense strand to SEQ ID NO: 1687911
aauccaacuauuaguucca

SEQ ID NO: 1687913 - RNA, 19 nt, Artificial Sequence
  Description of Artificial Sequence: Synthetic oligonucleotide
  Sense strand starting at position 3321 of SEQ ID NO: 1561649
auagcuagacuuugacaaa

SEQ ID NO: 1687914 - RNA, 19 nt, Artificial Sequence
  Description of Artificial Sequence: Synthetic oligonucleotide
  Antisense strand to SEQ ID NO: 1687913
uuugucaaagucuagcuau

SEQ ID NO: 1687915 - RNA, 19 nt, Artificial Sequence
  Description of Artificial Sequence: Synthetic oligonucleotide
  Sense strand starting at position 3324 of SEQ ID NO: 1561649
gcuagacuuugacaaauuu

SEQ ID NO: 1687916 - RNA, 19 nt, Artificial Sequence
  Description of Artificial Sequence: Synthetic oligonucleotide
  Antisense strand to SEQ ID NO: 1687915
aaauuugucaaagucuagc

SEQ ID NO: 1687917 - RNA, 19 nt, Artificial Sequence
  Description of Artificial Sequence: Synthetic oligonucleotide
  Sense strand starting at position 3374 of SEQ ID NO: 1561649
acuugaugagaauguuucu

SEQ ID NO: 1687918 - RNA, 19 nt, Artificial Sequence
  Description of Artificial Sequence: Synthetic oligonucleotide
  Antisense strand to SEQ ID NO: 1687917
agaaacauucucaucaagu

SEQ ID NO: 1687919 - RNA, 19 nt, Artificial Sequence
  Description of Artificial Sequence: Synthetic oligonucleotide
  Sense strand starting at position 3377 of SEQ ID NO: 1561649
ugaugagaauguuucugaa

SEQ ID NO: 1687920 - RNA, 19 nt, Artificial Sequence
  Description of Artificial Sequence: Synthetic oligonucleotide
  Antisense strand to SEQ ID NO: 1687919
uucagaaacauucucauca

SEQ ID NO: 1687921 - RNA, 19 nt, Artificial Sequence
  Description of Artificial Sequence: Synthetic oligonucleotide
  Sense strand starting at position 3379 of SEQ ID NO: 1561649
augagaauguuucugaaug

SEQ ID NO: 1687922 - RNA, 19 nt, Artificial Sequence
  Description of Artificial Sequence: Synthetic oligonucleotide
  Antisense strand to SEQ ID NO: 1687921
cauucagaaacauucucau

SEQ ID NO: 1687923 - RNA, 19 nt, Artificial Sequence
  Description of Artificial Sequence: Synthetic oligonucleotide
  Sense strand starting at position 3557 of SEQ ID NO: 1561649
cagaucuuuguggaguuua

SEQ ID NO: 1687924 - RNA, 19 nt, Artificial Sequence
  Description of Artificial Sequence: Synthetic oligonucleotide
  Antisense strand to SEQ ID NO: 1687923
uaaacuccacaaagaucug

SEQ ID NO: 1687925 - RNA, 19 nt, Artificial Sequence
  Description of Artificial Sequence: Synthetic oligonucleotide
  Sense strand starting at position 3562 of SEQ ID NO: 1561649
cuuuguggaguuuauuauu

SEQ ID NO: 1687926 - RNA, 19 nt, Artificial Sequence
  Description of Artificial Sequence: Synthetic oligonucleotide
  Antisense strand to SEQ ID NO: 1687925
aauaauaaacuccacaaag

SEQ ID NO: 1687927 - RNA, 19 nt, Artificial Sequence
  Description of Artificial Sequence: Synthetic oligonucleotide
  Sense strand starting at position 3602 of SEQ ID NO: 1561649
auaauagauuccgucugga

SEQ ID NO: 1687928 - RNA, 19 nt, Artificial Sequence
  Description of Artificial Sequence: Synthetic oligonucleotide
  Antisense strand to SEQ ID NO: 1687927
uccagacggaaucuauuau

SEQ ID NO: 1687929 - RNA, 19 nt, Artificial Sequence
  Description of Artificial Sequence: Synthetic oligonucleotide
  Sense strand starting at position 3605 of SEQ ID NO: 1561649
auagauuccgucuggaaua

SEQ ID NO: 1687930 - RNA, 19 nt, Artificial Sequence
  Description of Artificial Sequence: Synthetic oligonucleotide
  Antisense strand to SEQ ID NO: 1687929
uauuccagacggaaucuau

SEQ ID NO: 1687931 - RNA, 19 nt, Artificial Sequence
  Description of Artificial Sequence: Synthetic oligonucleotide
  Sense strand starting at position 3857 of SEQ ID NO: 1561649
aauguaauuguauggucaa

SEQ ID NO: 1687932 - RNA, 19 nt, Artificial Sequence
  Description of Artificial Sequence: Synthetic oligonucleotide
  Antisense strand to SEQ ID NO: 1687931
uugaccauacaauuacauu

SEQ ID NO: 1687933 - RNA, 19 nt, Artificial Sequence
  Description of Artificial Sequence: Synthetic oligonucleotide
  Sense strand starting at position 3860 of SEQ ID NO: 1561649
guaauuguauggucaaauu

SEQ ID NO: 1687934 - RNA, 19 nt, Artificial Sequence
  Description of Artificial Sequence: Synthetic oligonucleotide
  Antisense strand to SEQ ID NO: 1687933
aauuugaccauacaauuac

SEQ ID NO: 1687935 - RNA, 19 nt, Artificial Sequence
  Description of Artificial Sequence: Synthetic oligonucleotide
  Sense strand starting at position 3949 of SEQ ID NO: 1561649
gcuuccucacgagagcaaa

SEQ ID NO: 1687936 - RNA, 19 nt, Artificial Sequence
  Description of Artificial Sequence: Synthetic oligonucleotide
  Antisense strand to SEQ ID NO: 1687935
uuugcucucgugaggaagc

SEQ ID NO: 1687937 - RNA, 19 nt, Artificial Sequence
  Description of Artificial Sequence: Synthetic oligonucleotide
  Sense strand starting at position 322 of SEQ ID NO: 1561650
ucaggugauuuggaucuuu

SEQ ID NO: 1687938 - RNA, 19 nt, Artificial Sequence
  Description of Artificial Sequence: Synthetic oligonucleotide
  Antisense strand to SEQ ID NO: 1687937
aaagauccaaaucaccuga

SEQ ID NO: 1687939 - RNA, 19 nt, Artificial Sequence
  Description of Artificial Sequence: Synthetic oligonucleotide
  Sense strand starting at position 339 of SEQ ID NO: 1561650
uuauuaagauuugagaggu

SEQ ID NO: 1687940 - RNA, 19 nt, Artificial Sequence
  Description of Artificial Sequence: Synthetic oligonucleotide
  Antisense strand to SEQ ID NO: 1687939
accucucaaaucuuaauaa

SEQ ID NO: 1687941 - RNA, 19 nt, Artificial Sequence
  Description of Artificial Sequence: Synthetic oligonucleotide
  Sense strand starting at position 373 of SEQ ID NO: 1561650
gucuaaggccuguaaucuc

SEQ ID NO: 1687942 - RNA, 19 nt, Artificial Sequence
  Description of Artificial Sequence: Synthetic oligonucleotide
  Antisense strand to SEQ ID NO: 1687941
gagauuacaggccuuagac

SEQ ID NO: 1687943 - RNA, 19 nt, Artificial Sequence
  Description of Artificial Sequence: Synthetic oligonucleotide
  Sense strand starting at position 667 of SEQ ID NO: 1561650
agugaugaacucugggauu

SEQ ID NO: 1687944 - RNA, 19 nt, Artificial Sequence
  Description of Artificial Sequence: Synthetic oligonucleotide
  Antisense strand to SEQ ID NO: 1687943
aaucccagaguucaucacu

SEQ ID NO: 1687945 - RNA, 19 nt, Artificial Sequence
  Description of Artificial Sequence: Synthetic oligonucleotide
  Sense strand starting at position 670 of SEQ ID NO: 1561650
gaugaacucugggauuaua

SEQ ID NO: 1687946 - RNA, 19 nt, Artificial Sequence
  Description of Artificial Sequence: Synthetic oligonucleotide
  Antisense strand to SEQ ID NO: 1687945
uauaaucccagaguucauc

SEQ ID NO: 1687947 - RNA, 19 nt, Artificial Sequence
  Description of Artificial Sequence: Synthetic oligonucleotide
  Sense strand starting at position 769 of SEQ ID NO: 1561650
gggaagugguaagagaagu

SEQ ID NO: 1687948 - RNA, 19 nt, Artificial Sequence
  Description of Artificial Sequence: Synthetic oligonucleotide
  Antisense strand to SEQ ID NO: 1687947
acuucucuuaccacuuccc

SEQ ID NO: 1687949 - RNA, 19 nt, Artificial Sequence
  Description of Artificial Sequence: Synthetic oligonucleotide
  Sense strand starting at position 790 of SEQ ID NO: 1561650
ucagaugcgaagggugaua

SEQ ID NO: 1687950 - RNA, 19 nt, Artificial Sequence
  Description of Artificial Sequence: Synthetic oligonucleotide
  Antisense strand to SEQ ID NO: 1687949
uaucacccuucgcaucuga

SEQ ID NO: 1687951 - RNA, 19 nt, Artificial Sequence
  Description of Artificial Sequence: Synthetic oligonucleotide
  Sense strand starting at position 838 of SEQ ID NO: 1561650
gcccaugaucaagguaguu

SEQ ID NO: 1687952 - RNA, 19 nt, Artificial Sequence
  Description of Artificial Sequence: Synthetic oligonucleotide
  Antisense strand to SEQ ID NO: 1687951
aacuaccuugaucaugggc

SEQ ID NO: 1687953 - RNA, 19 nt, Artificial Sequence
  Description of Artificial Sequence: Synthetic oligonucleotide
  Sense strand starting at position 850 of SEQ ID NO: 1561650
gguaguuagaacuaguaag

SEQ ID NO: 1687954 - RNA, 19 nt, Artificial Sequence
  Description of Artificial Sequence: Synthetic oligonucleotide
  Antisense strand to SEQ ID NO: 1687953
cuuacuaguucuaacuacc

SEQ ID NO: 1687955 - RNA, 19 nt, Artificial Sequence
  Description of Artificial Sequence: Synthetic oligonucleotide
  Sense strand starting at position 870 of SEQ ID NO: 1561650
gguguucuggaaugagaag

SEQ ID NO: 1687956 - RNA, 19 nt, Artificial Sequence
  Description of Artificial Sequence: Synthetic oligonucleotide
  Antisense strand to SEQ ID NO: 1687955
cuucucauuccagaacacc

SEQ ID NO: 1687957 - RNA, 19 nt, Artificial Sequence
  Description of Artificial Sequence: Synthetic oligonucleotide
  Sense strand starting at position 871 of SEQ ID NO: 1561650
guguucuggaaugagaagu

SEQ ID NO: 1687958 - RNA, 19 nt, Artificial Sequence
  Description of Artificial Sequence: Synthetic oligonucleotide
  Antisense strand to SEQ ID NO: 1687957
acuucucauuccagaacac

SEQ ID NO: 1687959 - RNA, 19 nt, Artificial Sequence
  Description of Artificial Sequence: Synthetic oligonucleotide
  Sense strand starting at position 882 of SEQ ID NO: 1561650
ugagaaguuucgucuggga

SEQ ID NO: 1687960 - RNA, 19 nt, Artificial Sequence
  Description of Artificial Sequence: Synthetic oligonucleotide
  Antisense strand to SEQ ID NO: 1687959
ucccagacgaaacuucuca

SEQ ID NO: 1687961 - RNA, 19 nt, Artificial Sequence
  Description of Artificial Sequence: Synthetic oligonucleotide
  Sense strand starting at position 1109 of SEQ ID NO: 1561650
gcaggcauguauccuuaaa

SEQ ID NO: 1687962 - RNA, 19 nt, Artificial Sequence
  Description of Artificial Sequence: Synthetic oligonucleotide
  Antisense strand to SEQ ID NO: 1687961
uuuaaggauacaugccugc

SEQ ID NO: 1687963 - RNA, 19 nt, Artificial Sequence
  Description of Artificial Sequence: Synthetic oligonucleotide
  Sense strand starting at position 1111 of SEQ ID NO: 1561650
aggcauguauccuuaaaug

SEQ ID NO: 1687964 - RNA, 19 nt, Artificial Sequence
  Description of Artificial Sequence: Synthetic oligonucleotide
  Antisense strand to SEQ ID NO: 1687963
cauuuaaggauacaugccu

SEQ ID NO: 1687965 - RNA, 19 nt, Artificial Sequence
  Description of Artificial Sequence: Synthetic oligonucleotide
  Sense strand starting at position 1161 of SEQ ID NO: 1561650
ucugaauauuaagaagugu

SEQ ID NO: 1687966 - RNA, 19 nt, Artificial Sequence
  Description of Artificial Sequence: Synthetic oligonucleotide
  Antisense strand to SEQ ID NO: 1687965
acacuucuuaauauucaga

SEQ ID NO: 1687967 - RNA, 19 nt, Artificial Sequence
  Description of Artificial Sequence: Synthetic oligonucleotide
  Sense strand starting at position 1292 of SEQ ID NO: 1561650
ucaccuaggaguuguuaga

SEQ ID NO: 1687968 - RNA, 19 nt, Artificial Sequence
  Description of Artificial Sequence: Synthetic oligonucleotide
  Antisense strand to SEQ ID NO: 1687967
ucuaacaacuccuagguga

SEQ ID NO: 1687969 - RNA, 19 nt, Artificial Sequence
  Description of Artificial Sequence: Synthetic oligonucleotide
  Sense strand starting at position 1445 of SEQ ID NO: 1561650
ucaugucucaggugguaaa

SEQ ID NO: 1687970 - RNA, 19 nt, Artificial Sequence
  Description of Artificial Sequence: Synthetic oligonucleotide
  Antisense strand to SEQ ID NO: 1687969
uuuaccaccugagacauga

SEQ ID NO: 1687971 - RNA, 19 nt, Artificial Sequence
  Description of Artificial Sequence: Synthetic oligonucleotide
  Sense strand starting at position 1456 of SEQ ID NO: 1561650
gugguaaaggcuuagaacu

SEQ ID NO: 1687972 - RNA, 19 nt, Artificial Sequence
  Description of Artificial Sequence: Synthetic oligonucleotide
  Antisense strand to SEQ ID NO: 1687971
aguucuaagccuuuaccac

SEQ ID NO: 1687973 - RNA, 19 nt, Artificial Sequence
  Description of Artificial Sequence: Synthetic oligonucleotide
  Sense strand starting at position 1501 of SEQ ID NO: 1561650
gaacgaggguaaugagaaa

SEQ ID NO: 1687974 - RNA, 19 nt, Artificial Sequence
  Description of Artificial Sequence: Synthetic oligonucleotide
  Antisense strand to SEQ ID NO: 1687973
uuucucauuacccucguuc

SEQ ID NO: 1687975 - RNA, 19 nt, Artificial Sequence
  Description of Artificial Sequence: Synthetic oligonucleotide
  Sense strand starting at position 1515 of SEQ ID NO: 1561650
agaaauggguuccuauguu

SEQ ID NO: 1687976 - RNA, 19 nt, Artificial Sequence
  Description of Artificial Sequence: Synthetic oligonucleotide
  Antisense strand to SEQ ID NO: 1687975
aacauaggaacccauuucu

SEQ ID NO: 1687977 - RNA, 19 nt, Artificial Sequence
  Description of Artificial Sequence: Synthetic oligonucleotide
  Sense strand starting at position 1519 of SEQ ID NO: 1561650
auggguuccuauguugagu

SEQ ID NO: 1687978 - RNA, 19 nt, Artificial Sequence
  Description of Artificial Sequence: Synthetic oligonucleotide
  Antisense strand to SEQ ID NO: 1687977
acucaacauaggaacccau

SEQ ID NO: 1687979 - RNA, 19 nt, Artificial Sequence
  Description of Artificial Sequence: Synthetic oligonucleotide
  Sense strand starting at position 1656 of SEQ ID NO: 1561650
ugauguucucgguaaccua

SEQ ID NO: 1687980 - RNA, 19 nt, Artificial Sequence
  Description of Artificial Sequence: Synthetic oligonucleotide
  Antisense strand to SEQ ID NO: 1687979
uagguuaccgagaacauca

SEQ ID NO: 1687981 - RNA, 19 nt, Artificial Sequence
  Description of Artificial Sequence: Synthetic oligonucleotide
  Sense strand starting at position 1659 of SEQ ID NO: 1561650
uguucucgguaaccuaaau

SEQ ID NO: 1687982 - RNA, 19 nt, Artificial Sequence
  Description of Artificial Sequence: Synthetic oligonucleotide
  Antisense strand to SEQ ID NO: 1687981
auuuagguuaccgagaaca

SEQ ID NO: 1687983 - RNA, 19 nt, Artificial Sequence
  Description of Artificial Sequence: Synthetic oligonucleotide
  Sense strand starting at position 1950 of SEQ ID NO: 1561650
ccugaaauuaacggugacu

SEQ ID NO: 1687984 - RNA, 19 nt, Artificial Sequence
  Description of Artificial Sequence: Synthetic oligonucleotide
  Antisense strand to SEQ ID NO: 1687983
agucaccguuaauuucagg

SEQ ID NO: 1687985 - RNA, 19 nt, Artificial Sequence
  Description of Artificial Sequence: Synthetic oligonucleotide
  Sense strand starting at position 1952 of SEQ ID NO: 1561650
ugaaauuaacggugacuca

SEQ ID NO: 1687986 - RNA, 19 nt, Artificial Sequence
  Description of Artificial Sequence: Synthetic oligonucleotide
  Antisense strand to SEQ ID NO: 1687985
ugagucaccguuaauuuca

SEQ ID NO: 1687987 - RNA, 19 nt, Artificial Sequence
  Description of Artificial Sequence: Synthetic oligonucleotide
  Sense strand starting at position 2083 of SEQ ID NO: 1561650
cgggaaucgcaccaaagua

SEQ ID NO: 1687988 - RNA, 19 nt, Artificial Sequence
  Description of Artificial Sequence: Synthetic oligonucleotide
  Antisense strand to SEQ ID NO: 1687987
uacuuuggugcgauucccg

SEQ ID NO: 1687989 - RNA, 19 nt, Artificial Sequence
  Description of Artificial Sequence: Synthetic oligonucleotide
  Sense strand starting at position 3458 of SEQ ID NO: 1561650
gcccuugaggucuguccau

SEQ ID NO: 1687990 - RNA, 19 nt, Artificial Sequence
  Description of Artificial Sequence: Synthetic oligonucleotide
  Antisense strand to SEQ ID NO: 1687989
auggacagaccucaagggc

SEQ ID NO: 1687991 - RNA, 19 nt, Artificial Sequence
  Description of Artificial Sequence: Synthetic oligonucleotide
  Sense strand starting at position 3519 of SEQ ID NO: 1561650
acggaaugaucgcuaacga

SEQ ID NO: 1687992 - RNA, 19 nt, Artificial Sequence
  Description of Artificial Sequence: Synthetic oligonucleotide
  Antisense strand to SEQ ID NO: 1687991
ucguuagcgaucauuccgu

SEQ ID NO: 1687993 - RNA, 19 nt, Artificial Sequence
  Description of Artificial Sequence: Synthetic oligonucleotide
  Sense strand starting at position 3520 of SEQ ID NO: 1561650
cggaaugaucgcuaacgag

SEQ ID NO: 1687994 - RNA, 19 nt, Artificial Sequence
  Description of Artificial Sequence: Synthetic oligonucleotide
  Antisense strand to SEQ ID NO: 1687993
cucguuagcgaucauuccg

SEQ ID NO: 1687995 - RNA, 19 nt, Artificial Sequence
  Description of Artificial Sequence: Synthetic oligonucleotide
  Sense strand starting at position 3676 of SEQ ID NO: 1561650
cgaucuguccguguauggu

SEQ ID NO: 1687996 - RNA, 19 nt, Artificial Sequence
  Description of Artificial Sequence: Synthetic oligonucleotide
  Antisense strand to SEQ ID NO: 1687995
accauacacggacagaucg

SEQ ID NO: 1687997 - RNA, 19 nt, Artificial Sequence
  Description of Artificial Sequence: Synthetic oligonucleotide
  Sense strand starting at position 3682 of SEQ ID NO: 1561650
guccguguaugguuagaau

SEQ ID NO: 1687998 - RNA, 19 nt, Artificial Sequence
  Description of Artificial Sequence: Synthetic oligonucleotide
  Antisense strand to SEQ ID NO: 1687997
auucuaaccauacacggac

SEQ ID NO: 1687999 - RNA, 19 nt, Artificial Sequence
  Description of Artificial Sequence: Synthetic oligonucleotide
  Sense strand starting at position 3719 of SEQ ID NO: 1561650
acaguuggacucugccaga

SEQ ID NO: 1688000 - RNA, 19 nt, Artificial Sequence
  Description of Artificial Sequence: Synthetic oligonucleotide
  Antisense strand to SEQ ID NO: 1687999
ucuggcagaguccaacugu

SEQ ID NO: 1688001 - RNA, 19 nt, Artificial Sequence
  Description of Artificial Sequence: Synthetic oligonucleotide
  Sense strand starting at position 3833 of SEQ ID NO: 1561650
uaaacaggugcucauuagu

SEQ ID NO: 1688002 - RNA, 19 nt, Artificial Sequence
  Description of Artificial Sequence: Synthetic oligonucleotide
  Antisense strand to SEQ ID NO: 1688001
acuaaugagcaccuguuua

SEQ ID NO: 1688003 - RNA, 19 nt, Artificial Sequence
  Description of Artificial Sequence: Synthetic oligonucleotide
  Sense strand starting at position 3836 of SEQ ID NO: 1561650
acaggugcucauuaguaua

SEQ ID NO: 1688004 - RNA, 19 nt, Artificial Sequence
  Description of Artificial Sequence: Synthetic oligonucleotide
  Antisense strand to SEQ ID NO: 1688003
uauacuaaugagcaccugu

SEQ ID NO: 1688005 - RNA, 19 nt, Artificial Sequence
  Description of Artificial Sequence: Synthetic oligonucleotide
  Sense strand starting at position 3838 of SEQ ID NO: 1561650
aggugcucauuaguauauu

SEQ ID NO: 1688006 - RNA, 19 nt, Artificial Sequence
  Description of Artificial Sequence: Synthetic oligonucleotide
  Antisense strand to SEQ ID NO: 1688005
aauauacuaaugagcaccu

SEQ ID NO: 1688007 - RNA, 19 nt, Artificial Sequence
  Description of Artificial Sequence: Synthetic oligonucleotide
  Sense strand starting at position 3841 of SEQ ID NO: 1561650
ugcucauuaguauauucua

SEQ ID NO: 1688008 - RNA, 19 nt, Artificial Sequence
  Description of Artificial Sequence: Synthetic oligonucleotide
  Antisense strand to SEQ ID NO: 1688007
uagaauauacuaaugagca

SEQ ID NO: 1688009 - RNA, 19 nt, Artificial Sequence
  Description of Artificial Sequence: Synthetic oligonucleotide
  Sense strand starting at position 3854 of SEQ ID NO: 1561650
auucuauaugauggacauu

SEQ ID NO: 1688010 - RNA, 19 nt, Artificial Sequence
  Description of Artificial Sequence: Synthetic oligonucleotide
  Antisense strand to SEQ ID NO: 1688009
aauguccaucauauagaau

SEQ ID NO: 1688011 - RNA, 19 nt, Artificial Sequence
  Description of Artificial Sequence: Synthetic oligonucleotide
  Sense strand starting at position 3941 of SEQ ID NO: 1561650
acugaacuaucaguuggaa

SEQ ID NO: 1688012 - RNA, 19 nt, Artificial Sequence
  Description of Artificial Sequence: Synthetic oligonucleotide
  Antisense strand to SEQ ID NO: 1688011
uuccaacugauaguucagu

SEQ ID NO: 1688013 - RNA, 19 nt, Artificial Sequence
  Description of Artificial Sequence: Synthetic oligonucleotide
  Sense strand starting at position 3944 of SEQ ID NO: 1561650
gaacuaucaguuggaacau

SEQ ID NO: 1688014 - RNA, 19 nt, Artificial Sequence
  Description of Artificial Sequence: Synthetic oligonucleotide
  Antisense strand to SEQ ID NO: 1688013
auguuccaacugauaguuc

SEQ ID NO: 1688015 - RNA, 19 nt, Artificial Sequence
  Description of Artificial Sequence: Synthetic oligonucleotide
  Sense strand starting at position 3971 of SEQ ID NO: 1561650
uuucguuagugugcacaca

SEQ ID NO: 1688016 - RNA, 19 nt, Artificial Sequence
  Description of Artificial Sequence: Synthetic oligonucleotide
  Antisense strand to SEQ ID NO: 1688015
ugugugcacacuaacgaaa

SEQ ID NO: 1688017 - RNA, 19 nt, Artificial Sequence
  Description of Artificial Sequence: Synthetic oligonucleotide
  Sense strand starting at position 326 of SEQ ID NO: 1561651
ggcguccaauucccaaaua

SEQ ID NO: 1688018 - RNA, 19 nt, Artificial Sequence
  Description of Artificial Sequence: Synthetic oligonucleotide
  Antisense strand to SEQ ID NO: 1688017
uauuugggaauuggacgcc

SEQ ID NO: 1688019 - RNA, 19 nt, Artificial Sequence
  Description of Artificial Sequence: Synthetic oligonucleotide
  Sense strand starting at position 327 of SEQ ID NO: 1561651
gcguccaauucccaaauaa

SEQ ID NO: 1688020 - RNA, 19 nt, Artificial Sequence
  Description of Artificial Sequence: Synthetic oligonucleotide
  Antisense strand to SEQ ID NO: 1688019
uuauuugggaauuggacgc

SEQ ID NO: 1688021 - RNA, 19 nt, Artificial Sequence
  Description of Artificial Sequence: Synthetic oligonucleotide
  Sense strand starting at position 486 of SEQ ID NO: 1561651
gcgcguccucaggaacaga

SEQ ID NO: 1688022 - RNA, 19 nt, Artificial Sequence
  Description of Artificial Sequence: Synthetic oligonucleotide
  Antisense strand to SEQ ID NO: 1688021
ucuguuccugaggacgcgc

SEQ ID NO: 1688023 - RNA, 19 nt, Artificial Sequence
  Description of Artificial Sequence: Synthetic oligonucleotide
  Sense strand starting at position 751 of SEQ ID NO: 1561651
cuugcugggucccgacaau

SEQ ID NO: 1688024 - RNA, 19 nt, Artificial Sequence
  Description of Artificial Sequence: Synthetic oligonucleotide
  Antisense strand to SEQ ID NO: 1688023
auugucgggacccagcaag

SEQ ID NO: 1688025 - RNA, 19 nt, Artificial Sequence
  Description of Artificial Sequence: Synthetic oligonucleotide
  Sense strand starting at position 784 of SEQ ID NO: 1561651
gcgaguucccgggcgcaga

SEQ ID NO: 1688026 - RNA, 19 nt, Artificial Sequence
  Description of Artificial Sequence: Synthetic oligonucleotide
  Antisense strand to SEQ ID NO: 1688025
ucugcgcccgggaacucgc

SEQ ID NO: 1688027 - RNA, 19 nt, Artificial Sequence
  Description of Artificial Sequence: Synthetic oligonucleotide
  Sense strand starting at position 1015 of SEQ ID NO: 1561651
cacggcuucucgugacagu

SEQ ID NO: 1688028 - RNA, 19 nt, Artificial Sequence
  Description of Artificial Sequence: Synthetic oligonucleotide
  Antisense strand to SEQ ID NO: 1688027
acugucacgagaagccgug

SEQ ID NO: 1688029 - RNA, 19 nt, Artificial Sequence
  Description of Artificial Sequence: Synthetic oligonucleotide
  Sense strand starting at position 1018 of SEQ ID NO: 1561651
ggcuucucgugacaguguu

SEQ ID NO: 1688030 - RNA, 19 nt, Artificial Sequence
  Description of Artificial Sequence: Synthetic oligonucleotide
  Antisense strand to SEQ ID NO: 1688029
aacacugucacgagaagcc

SEQ ID NO: 1688031 - RNA, 19 nt, Artificial Sequence
  Description of Artificial Sequence: Synthetic oligonucleotide
  Sense strand starting at position 1024 of SEQ ID NO: 1561651
ucgugacaguguuugcaaa

SEQ ID NO: 1688032 - RNA, 19 nt, Artificial Sequence
  Description of Artificial Sequence: Synthetic oligonucleotide
  Antisense strand to SEQ ID NO: 1688031
uuugcaaacacugucacga

SEQ ID NO: 1688033 - RNA, 19 nt, Artificial Sequence
  Description of Artificial Sequence: Synthetic oligonucleotide
  Sense strand starting at position 1226 of SEQ ID NO: 1561651
gcgccugcaugaggauaua

SEQ ID NO: 1688034 - RNA, 19 nt, Artificial Sequence
  Description of Artificial Sequence: Synthetic oligonucleotide
  Antisense strand to SEQ ID NO: 1688033
uauauccucaugcaggcgc

SEQ ID NO: 1688035 - RNA, 19 nt, Artificial Sequence
  Description of Artificial Sequence: Synthetic oligonucleotide
  Sense strand starting at position 1229 of SEQ ID NO: 1561651
ccugcaugaggauauaguu

SEQ ID NO: 1688036 - RNA, 19 nt, Artificial Sequence
  Description of Artificial Sequence: Synthetic oligonucleotide
  Antisense strand to SEQ ID NO: 1688035
aacuauauccucaugcagg

SEQ ID NO: 1688037 - RNA, 19 nt, Artificial Sequence
  Description of Artificial Sequence: Synthetic oligonucleotide
  Sense strand starting at position 1237 of SEQ ID NO: 1561651
aggauauaguucuuggcga

SEQ ID NO: 1688038 - RNA, 19 nt, Artificial Sequence
  Description of Artificial Sequence: Synthetic oligonucleotide
  Antisense strand to SEQ ID NO: 1688037
ucgccaagaacuauauccu

SEQ ID NO: 1688039 - RNA, 19 nt, Artificial Sequence
  Description of Artificial Sequence: Synthetic oligonucleotide
  Sense strand starting at position 1238 of SEQ ID NO: 1561651
ggauauaguucuuggcgag

SEQ ID NO: 1688040 - RNA, 19 nt, Artificial Sequence
  Description of Artificial Sequence: Synthetic oligonucleotide
  Antisense strand to SEQ ID NO: 1688039
cucgccaagaacuauaucc

SEQ ID NO: 1688041 - RNA, 19 nt, Artificial Sequence
  Description of Artificial Sequence: Synthetic oligonucleotide
  Sense strand starting at position 2132 of SEQ ID NO: 1561651
gcuaguacuugcuucucga

SEQ ID NO: 1688042 - RNA, 19 nt, Artificial Sequence
  Description of Artificial Sequence: Synthetic oligonucleotide
  Antisense strand to SEQ ID NO: 1688041
ucgagaagcaaguacuagc

SEQ ID NO: 1688043 - RNA, 19 nt, Artificial Sequence
  Description of Artificial Sequence: Synthetic oligonucleotide
  Sense strand starting at position 2231 of SEQ ID NO: 1561651
gucuuugagucugacccua

SEQ ID NO: 1688044 - RNA, 19 nt, Artificial Sequence
  Description of Artificial Sequence: Synthetic oligonucleotide
  Antisense strand to SEQ ID NO: 1688043
uagggucagacucaaagac

SEQ ID NO: 1688045 - RNA, 19 nt, Artificial Sequence
  Description of Artificial Sequence: Synthetic oligonucleotide
  Sense strand starting at position 2252 of SEQ ID NO: 1561651
gcaagagucccuggcgaca

SEQ ID NO: 1688046 - RNA, 19 nt, Artificial Sequence
  Description of Artificial Sequence: Synthetic oligonucleotide
  Antisense strand to SEQ ID NO: 1688045
ugucgccagggacucuugc

SEQ ID NO: 1688047 - RNA, 19 nt, Artificial Sequence
  Description of Artificial Sequence: Synthetic oligonucleotide
  Sense strand starting at position 2616 of SEQ ID NO: 1561651
gggcaucuaucagcgaaac

SEQ ID NO: 1688048 - RNA, 19 nt, Artificial Sequence
  Description of Artificial Sequence: Synthetic oligonucleotide
  Antisense strand to SEQ ID NO: 1688047
guuucgcugauagaugccc

SEQ ID NO: 1688049 - RNA, 19 nt, Artificial Sequence
  Description of Artificial Sequence: Synthetic oligonucleotide
  Sense strand starting at position 2818 of SEQ ID NO: 1561651
gagugugcugagggauagu

SEQ ID NO: 1688050 - RNA, 19 nt, Artificial Sequence
  Description of Artificial Sequence: Synthetic oligonucleotide
  Antisense strand to SEQ ID NO: 1688049
acuaucccucagcacacuc

SEQ ID NO: 1688051 - RNA, 19 nt, Artificial Sequence
  Description of Artificial Sequence: Synthetic oligonucleotide
  Sense strand starting at position 3043 of SEQ ID NO: 1561651
augugcugucuggaagguu

SEQ ID NO: 1688052 - RNA, 19 nt, Artificial Sequence
  Description of Artificial Sequence: Synthetic oligonucleotide
  Antisense strand to SEQ ID NO: 1688051
aaccuuccagacagcacau

SEQ ID NO: 1688053 - RNA, 19 nt, Artificial Sequence
  Description of Artificial Sequence: Synthetic oligonucleotide
  Sense strand starting at position 3133 of SEQ ID NO: 1561651
uggauaagucuccguggga

SEQ ID NO: 1688054 - RNA, 19 nt, Artificial Sequence
  Description of Artificial Sequence: Synthetic oligonucleotide
  Antisense strand to SEQ ID NO: 1688053
ucccacggagacuuaucca

SEQ ID NO: 1688055 - RNA, 19 nt, Artificial Sequence
  Description of Artificial Sequence: Synthetic oligonucleotide
  Sense strand starting at position 3134 of SEQ ID NO: 1561651
ggauaagucuccgugggaa

SEQ ID NO: 1688056 - RNA, 19 nt, Artificial Sequence
  Description of Artificial Sequence: Synthetic oligonucleotide
  Antisense strand to SEQ ID NO: 1688055
uucccacggagacuuaucc

SEQ ID NO: 1688057 - RNA, 19 nt, Artificial Sequence
  Description of Artificial Sequence: Synthetic oligonucleotide
  Sense strand starting at position 3136 of SEQ ID NO: 1561651
auaagucuccgugggaaac

SEQ ID NO: 1688058 - RNA, 19 nt, Artificial Sequence
  Description of Artificial Sequence: Synthetic oligonucleotide
  Antisense strand to SEQ ID NO: 1688057
guuucccacggagacuuau

SEQ ID NO: 1688059 - RNA, 19 nt, Artificial Sequence
  Description of Artificial Sequence: Synthetic oligonucleotide
  Sense strand starting at position 3137 of SEQ ID NO: 1561651
uaagucuccgugggaaacu

SEQ ID NO: 1688060 - RNA, 19 nt, Artificial Sequence
  Description of Artificial Sequence: Synthetic oligonucleotide
  Antisense strand to SEQ ID NO: 1688059
aguuucccacggagacuua

SEQ ID NO: 1688061 - RNA, 19 nt, Artificial Sequence
  Description of Artificial Sequence: Synthetic oligonucleotide
  Sense strand starting at position 3146 of SEQ ID NO: 1561651
gugggaaacucaggccuuu

SEQ ID NO: 1688062 - RNA, 19 nt, Artificial Sequence
  Description of Artificial Sequence: Synthetic oligonucleotide
  Antisense strand to SEQ ID NO: 1688061
aaaggccugaguuucccac

SEQ ID NO: 1688063 - RNA, 19 nt, Artificial Sequence
  Description of Artificial Sequence: Synthetic oligonucleotide
  Sense strand starting at position 3288 of SEQ ID NO: 1561651
gauggaagcgucugucuga

SEQ ID NO: 1688064 - RNA, 19 nt, Artificial Sequence
  Description of Artificial Sequence: Synthetic oligonucleotide
  Antisense strand to SEQ ID NO: 1688063
ucagacagacgcuuccauc

SEQ ID NO: 1688065 - RNA, 19 nt, Artificial Sequence
  Description of Artificial Sequence: Synthetic oligonucleotide
  Sense strand starting at position 3377 of SEQ ID NO: 1561651
ggaggaggccgcuguguuu

SEQ ID NO: 1688066 - RNA, 19 nt, Artificial Sequence
  Description of Artificial Sequence: Synthetic oligonucleotide
  Antisense strand to SEQ ID NO: 1688065
aaacacagcggccuccucc

SEQ ID NO: 1688067 - RNA, 19 nt, Artificial Sequence
  Description of Artificial Sequence: Synthetic oligonucleotide
  Sense strand starting at position 3410 of SEQ ID NO: 1561651
agggugagugggugucauu

SEQ ID NO: 1688068 - RNA, 19 nt, Artificial Sequence
  Description of Artificial Sequence: Synthetic oligonucleotide
  Antisense strand to SEQ ID NO: 1688067
aaugacacccacucacccu

SEQ ID NO: 1688069 - RNA, 19 nt, Artificial Sequence
  Description of Artificial Sequence: Synthetic oligonucleotide
  Sense strand starting at position 3567 of SEQ ID NO: 1561651
gaguuuggucuuuauggga

SEQ ID NO: 1688070 - RNA, 19 nt, Artificial Sequence
  Description of Artificial Sequence: Synthetic oligonucleotide
  Antisense strand to SEQ ID NO: 1688069
ucccauaaagaccaaacuc

SEQ ID NO: 1688071 - RNA, 19 nt, Artificial Sequence
  Description of Artificial Sequence: Synthetic oligonucleotide
  Sense strand starting at position 3570 of SEQ ID NO: 1561651
uuuggucuuuaugggaaga

SEQ ID NO: 1688072 - RNA, 19 nt, Artificial Sequence
  Description of Artificial Sequence: Synthetic oligonucleotide
  Antisense strand to SEQ ID NO: 1688071
ucuucccauaaagaccaaa

SEQ ID NO: 1688073 - RNA, 19 nt, Artificial Sequence
  Description of Artificial Sequence: Synthetic oligonucleotide
  Sense strand starting at position 3571 of SEQ ID NO: 1561651
uuggucuuuaugggaagaa

SEQ ID NO: 1688074 - RNA, 19 nt, Artificial Sequence
  Description of Artificial Sequence: Synthetic oligonucleotide
  Antisense strand to SEQ ID NO: 1688073
uucuucccauaaagaccaa

SEQ ID NO: 1688075 - RNA, 19 nt, Artificial Sequence
  Description of Artificial Sequence: Synthetic oligonucleotide
  Sense strand starting at position 3760 of SEQ ID NO: 1561651
aagcuauggagcuggagaa

SEQ ID NO: 1688076 - RNA, 19 nt, Artificial Sequence
  Description of Artificial Sequence: Synthetic oligonucleotide
  Antisense strand to SEQ ID NO: 1688075
uucuccagcuccauagcuu

SEQ ID NO: 1688077 - RNA, 19 nt, Artificial Sequence
  Description of Artificial Sequence: Synthetic oligonucleotide
  Sense strand starting at position 3761 of SEQ ID NO: 1561651
agcuauggagcuggagaau

SEQ ID NO: 1688078 - RNA, 19 nt, Artificial Sequence
  Description of Artificial Sequence: Synthetic oligonucleotide
  Antisense strand to SEQ ID NO: 1688077
auucuccagcuccauagcu

SEQ ID NO: 1688079 - RNA, 19 nt, Artificial Sequence
  Description of Artificial Sequence: Synthetic oligonucleotide
  Sense strand starting at position 129 of SEQ ID NO: 1561652
ggaugucacuuguaccuca

SEQ ID NO: 1688080 - RNA, 19 nt, Artificial Sequence
  Description of Artificial Sequence: Synthetic oligonucleotide
  Antisense strand to SEQ ID NO: 1688079
ugagguacaagugacaucc

SEQ ID NO: 1688081 - RNA, 19 nt, Artificial Sequence
  Description of Artificial Sequence: Synthetic oligonucleotide
  Sense strand starting at position 132 of SEQ ID NO: 1561652
ugucacuuguaccucauua

SEQ ID NO: 1688082 - RNA, 19 nt, Artificial Sequence
  Description of Artificial Sequence: Synthetic oligonucleotide
  Antisense strand to SEQ ID NO: 1688081
uaaugagguacaagugaca

SEQ ID NO: 1688083 - RNA, 19 nt, Artificial Sequence
  Description of Artificial Sequence: Synthetic oligonucleotide
  Sense strand starting at position 136 of SEQ ID NO: 1561652
acuuguaccucauuagcau

SEQ ID NO: 1688084 - RNA, 19 nt, Artificial Sequence
  Description of Artificial Sequence: Synthetic oligonucleotide
  Antisense strand to SEQ ID NO: 1688083
augcuaaugagguacaagu

SEQ ID NO: 1688085 - RNA, 19 nt, Artificial Sequence
  Description of Artificial Sequence: Synthetic oligonucleotide
  Sense strand starting at position 143 of SEQ ID NO: 1561652
ccucauuagcaucaaaggu

SEQ ID NO: 1688086 - RNA, 19 nt, Artificial Sequence
  Description of Artificial Sequence: Synthetic oligonucleotide
  Antisense strand to SEQ ID NO: 1688085
accuuugaugcuaaugagg

SEQ ID NO: 1688087 - RNA, 19 nt, Artificial Sequence
  Description of Artificial Sequence: Synthetic oligonucleotide
  Sense strand starting at position 200 of SEQ ID NO: 1561652
gggcgagaauguucaggaa

SEQ ID NO: 1688088 - RNA, 19 nt, Artificial Sequence
  Description of Artificial Sequence: Synthetic oligonucleotide
  Antisense strand to SEQ ID NO: 1688087
uuccugaacauucucgccc

SEQ ID NO: 1688089 - RNA, 19 nt, Artificial Sequence
  Description of Artificial Sequence: Synthetic oligonucleotide
  Sense strand starting at position 203 of SEQ ID NO: 1561652
cgagaauguucaggaaagg

SEQ ID NO: 1688090 - RNA, 19 nt, Artificial Sequence
  Description of Artificial Sequence: Synthetic oligonucleotide
  Antisense strand to SEQ ID NO: 1688089
ccuuuccugaacauucucg

SEQ ID NO: 1688091 - RNA, 19 nt, Artificial Sequence
  Description of Artificial Sequence: Synthetic oligonucleotide
  Sense strand starting at position 234 of SEQ ID NO: 1561652
uuugcauuguucccagagu

SEQ ID NO: 1688092 - RNA, 19 nt, Artificial Sequence
  Description of Artificial Sequence: Synthetic oligonucleotide
  Antisense strand to SEQ ID NO: 1688091
acucugggaacaaugcaaa

SEQ ID NO: 1688093 - RNA, 19 nt, Artificial Sequence
  Description of Artificial Sequence: Synthetic oligonucleotide
  Sense strand starting at position 235 of SEQ ID NO: 1561652
uugcauuguucccagagug

SEQ ID NO: 1688094 - RNA, 19 nt, Artificial Sequence
  Description of Artificial Sequence: Synthetic oligonucleotide
  Antisense strand to SEQ ID NO: 1688093
cacucugggaacaaugcaa

SEQ ID NO: 1688095 - RNA, 19 nt, Artificial Sequence
  Description of Artificial Sequence: Synthetic oligonucleotide
  Sense strand starting at position 487 of SEQ ID NO: 1561652
gcauccaugcgauacguca

SEQ ID NO: 1688096 - RNA, 19 nt, Artificial Sequence
  Description of Artificial Sequence: Synthetic oligonucleotide
  Antisense strand to SEQ ID NO: 1688095
ugacguaucgcauggaugc

SEQ ID NO: 1688097 - RNA, 19 nt, Artificial Sequence
  Description of Artificial Sequence: Synthetic oligonucleotide
  Sense strand starting at position 1430 of SEQ ID NO: 1561652
gggacugaccuguguggaa

SEQ ID NO: 1688098 - RNA, 19 nt, Artificial Sequence
  Description of Artificial Sequence: Synthetic oligonucleotide
  Antisense strand to SEQ ID NO: 1688097
uuccacacaggucaguccc

SEQ ID NO: 1688099 - RNA, 19 nt, Artificial Sequence
  Description of Artificial Sequence: Synthetic oligonucleotide
  Sense strand starting at position 1432 of SEQ ID NO: 1561652
gacugaccuguguggaaga

SEQ ID NO: 1688100 - RNA, 19 nt, Artificial Sequence
  Description of Artificial Sequence: Synthetic oligonucleotide
  Antisense strand to SEQ ID NO: 1688099
ucuuccacacaggucaguc

SEQ ID NO: 1688101 - RNA, 19 nt, Artificial Sequence
  Description of Artificial Sequence: Synthetic oligonucleotide
  Sense strand starting at position 2295 of SEQ ID NO: 1561652
gggugacucuagccucaca

SEQ ID NO: 1688102 - RNA, 19 nt, Artificial Sequence
  Description of Artificial Sequence: Synthetic oligonucleotide
  Antisense strand to SEQ ID NO: 1688101
ugugaggcuagagucaccc

SEQ ID NO: 1688103 - RNA, 19 nt, Artificial Sequence
  Description of Artificial Sequence: Synthetic oligonucleotide
  Sense strand starting at position 2356 of SEQ ID NO: 1561652
ccggcuguucucugaaaca

SEQ ID NO: 1688104 - RNA, 19 nt, Artificial Sequence
  Description of Artificial Sequence: Synthetic oligonucleotide
  Antisense strand to SEQ ID NO: 1688103
uguuucagagaacagccgg

SEQ ID NO: 1688105 - RNA, 19 nt, Artificial Sequence
  Description of Artificial Sequence: Synthetic oligonucleotide
  Sense strand starting at position 2428 of SEQ ID NO: 1561652
ccaggaagaucagagcaaa

SEQ ID NO: 1688106 - RNA, 19 nt, Artificial Sequence
  Description of Artificial Sequence: Synthetic oligonucleotide
  Antisense strand to SEQ ID NO: 1688105
uuugcucugaucuuccugg

SEQ ID NO: 1688107 - RNA, 19 nt, Artificial Sequence
  Description of Artificial Sequence: Synthetic oligonucleotide
  Sense strand starting at position 2570 of SEQ ID NO: 1561652
caguguuggcacuggaauc

SEQ ID NO: 1688108 - RNA, 19 nt, Artificial Sequence
  Description of Artificial Sequence: Synthetic oligonucleotide
  Antisense strand to SEQ ID NO: 1688107
gauuccagugccaacacug

SEQ ID NO: 1688109 - RNA, 19 nt, Artificial Sequence
  Description of Artificial Sequence: Synthetic oligonucleotide
  Sense strand starting at position 2903 of SEQ ID NO: 1561652
gcucacagaguuuggaaga

SEQ ID NO: 1688110 - RNA, 19 nt, Artificial Sequence
  Description of Artificial Sequence: Synthetic oligonucleotide
  Antisense strand to SEQ ID NO: 1688109
ucuuccaaacucugugagc

SEQ ID NO: 1688111 - RNA, 19 nt, Artificial Sequence
  Description of Artificial Sequence: Synthetic oligonucleotide
  Sense strand starting at position 2904 of SEQ ID NO: 1561652
cucacagaguuuggaagaa

SEQ ID NO: 1688112 - RNA, 19 nt, Artificial Sequence
  Description of Artificial Sequence: Synthetic oligonucleotide
  Antisense strand to SEQ ID NO: 1688111
uucuuccaaacucugugag

SEQ ID NO: 1688113 - RNA, 19 nt, Artificial Sequence
  Description of Artificial Sequence: Synthetic oligonucleotide
  Sense strand starting at position 2983 of SEQ ID NO: 1561652
gaggguuagcugcagugaa

SEQ ID NO: 1688114 - RNA, 19 nt, Artificial Sequence
  Description of Artificial Sequence: Synthetic oligonucleotide
  Antisense strand to SEQ ID NO: 1688113
uucacugcagcuaacccuc

SEQ ID NO: 1688115 - RNA, 19 nt, Artificial Sequence
  Description of Artificial Sequence: Synthetic oligonucleotide
  Sense strand starting at position 3155 of SEQ ID NO: 1561652
uggugacuguucuggucau

SEQ ID NO: 1688116 - RNA, 19 nt, Artificial Sequence
  Description of Artificial Sequence: Synthetic oligonucleotide
  Antisense strand to SEQ ID NO: 1688115
augaccagaacagucacca

SEQ ID NO: 1688117 - RNA, 19 nt, Artificial Sequence
  Description of Artificial Sequence: Synthetic oligonucleotide
  Sense strand starting at position 3156 of SEQ ID NO: 1561652
ggugacuguucuggucaua

SEQ ID NO: 1688118 - RNA, 19 nt, Artificial Sequence
  Description of Artificial Sequence: Synthetic oligonucleotide
  Antisense strand to SEQ ID NO: 1688117
uaugaccagaacagucacc

SEQ ID NO: 1688119 - RNA, 19 nt, Artificial Sequence
  Description of Artificial Sequence: Synthetic oligonucleotide
  Sense strand starting at position 3240 of SEQ ID NO: 1561652
ccugguuuccugcagaaau

SEQ ID NO: 1688120 - RNA, 19 nt, Artificial Sequence
  Description of Artificial Sequence: Synthetic oligonucleotide
  Antisense strand to SEQ ID NO: 1688119
auuucugcaggaaaccagg

SEQ ID NO: 1688121 - RNA, 19 nt, Artificial Sequence
  Description of Artificial Sequence: Synthetic oligonucleotide
  Sense strand starting at position 3242 of SEQ ID NO: 1561652
ugguuuccugcagaaauca

SEQ ID NO: 1688122 - RNA, 19 nt, Artificial Sequence
  Description of Artificial Sequence: Synthetic oligonucleotide
  Antisense strand to SEQ ID NO: 1688121
ugauuucugcaggaaacca

SEQ ID NO: 1688123 - RNA, 19 nt, Artificial Sequence
  Description of Artificial Sequence: Synthetic oligonucleotide
  Sense strand starting at position 3460 of SEQ ID NO: 1561652
agaacuucccaguguguuu

SEQ ID NO: 1688124 - RNA, 19 nt, Artificial Sequence
  Description of Artificial Sequence: Synthetic oligonucleotide
  Antisense strand to SEQ ID NO: 1688123
aaacacacugggaaguucu

SEQ ID NO: 1688125 - RNA, 19 nt, Artificial Sequence
  Description of Artificial Sequence: Synthetic oligonucleotide
  Sense strand starting at position 3480 of SEQ ID NO: 1561652
cugggaugaucucagggua

SEQ ID NO: 1688126 - RNA, 19 nt, Artificial Sequence
  Description of Artificial Sequence: Synthetic oligonucleotide
  Antisense strand to SEQ ID NO: 1688125
uacccugagaucaucccag

SEQ ID NO: 1688127 - RNA, 19 nt, Artificial Sequence
  Description of Artificial Sequence: Synthetic oligonucleotide
  Sense strand starting at position 3483 of SEQ ID NO: 1561652
ggaugaucucaggguaccu

SEQ ID NO: 1688128 - RNA, 19 nt, Artificial Sequence
  Description of Artificial Sequence: Synthetic oligonucleotide
  Antisense strand to SEQ ID NO: 1688127
agguacccugagaucaucc

SEQ ID NO: 1688129 - RNA, 19 nt, Artificial Sequence
  Description of Artificial Sequence: Synthetic oligonucleotide
  Sense strand starting at position 3757 of SEQ ID NO: 1561652
gcgguuaccuuuggucacu

SEQ ID NO: 1688130 - RNA, 19 nt, Artificial Sequence
  Description of Artificial Sequence: Synthetic oligonucleotide
  Antisense strand to SEQ ID NO: 1688129
agugaccaaagguaaccgc

SEQ ID NO: 1688131 - RNA, 19 nt, Artificial Sequence
  Description of Artificial Sequence: Synthetic oligonucleotide
  Sense strand starting at position 3943 of SEQ ID NO: 1561652
ccagguuugcucugaacuc

SEQ ID NO: 1688132 - RNA, 19 nt, Artificial Sequence
  Description of Artificial Sequence: Synthetic oligonucleotide
  Antisense strand to SEQ ID NO: 1688131
gaguucagagcaaaccugg

SEQ ID NO: 1688133 - RNA, 19 nt, Artificial Sequence
  Description of Artificial Sequence: Synthetic oligonucleotide
  Sense strand starting at position 3944 of SEQ ID NO: 1561652
cagguuugcucugaacucu

SEQ ID NO: 1688134 - RNA, 19 nt, Artificial Sequence
  Description of Artificial Sequence: Synthetic oligonucleotide
  Antisense strand to SEQ ID NO: 1688133
agaguucagagcaaaccug

SEQ ID NO: 1688135 - RNA, 19 nt, Artificial Sequence
  Description of Artificial Sequence: Synthetic oligonucleotide
  Sense strand starting at position 5 of SEQ ID NO: 1561653
gugagagacccuugagacu

SEQ ID NO: 1688136 - RNA, 19 nt, Artificial Sequence
  Description of Artificial Sequence: Synthetic oligonucleotide
  Antisense strand to SEQ ID NO: 1688135
agucucaagggucucucac

SEQ ID NO: 1688137 - RNA, 19 nt, Artificial Sequence
  Description of Artificial Sequence: Synthetic oligonucleotide
  Sense strand starting at position 30 of SEQ ID NO: 1561653
ccaggauguuaguuucuua

SEQ ID NO: 1688138 - RNA, 19 nt, Artificial Sequence
  Description of Artificial Sequence: Synthetic oligonucleotide
  Antisense strand to SEQ ID NO: 1688137
uaagaaacuaacauccugg

SEQ ID NO: 1688139 - RNA, 19 nt, Artificial Sequence
  Description of Artificial Sequence: Synthetic oligonucleotide
  Sense strand starting at position 40 of SEQ ID NO: 1561653
aguuucuuagccuaacgaa

SEQ ID NO: 1688140 - RNA, 19 nt, Artificial Sequence
  Description of Artificial Sequence: Synthetic oligonucleotide
  Antisense strand to SEQ ID NO: 1688139
uucguuaggcuaagaaacu

SEQ ID NO: 1688141 - RNA, 19 nt, Artificial Sequence
  Description of Artificial Sequence: Synthetic oligonucleotide
  Sense strand starting at position 60 of SEQ ID NO: 1561653
ugaaguuaaguccagaggu

SEQ ID NO: 1688142 - RNA, 19 nt, Artificial Sequence
  Description of Artificial Sequence: Synthetic oligonucleotide
  Antisense strand to SEQ ID NO: 1688141
accucuggacuuaacuuca

SEQ ID NO: 1688143 - RNA, 19 nt, Artificial Sequence
  Description of Artificial Sequence: Synthetic oligonucleotide
  Sense strand starting at position 62 of SEQ ID NO: 1561653
aaguuaaguccagaggugu

SEQ ID NO: 1688144 - RNA, 19 nt, Artificial Sequence
  Description of Artificial Sequence: Synthetic oligonucleotide
  Antisense strand to SEQ ID NO: 1688143
acaccucuggacuuaacuu

SEQ ID NO: 1688145 - RNA, 19 nt, Artificial Sequence
  Description of Artificial Sequence: Synthetic oligonucleotide
  Sense strand starting at position 73 of SEQ ID NO: 1561653
agagguguuuagguaccau

SEQ ID NO: 1688146 - RNA, 19 nt, Artificial Sequence
  Description of Artificial Sequence: Synthetic oligonucleotide
  Antisense strand to SEQ ID NO: 1688145
augguaccuaaacaccucu

SEQ ID NO: 1688147 - RNA, 19 nt, Artificial Sequence
  Description of Artificial Sequence: Synthetic oligonucleotide
  Sense strand starting at position 126 of SEQ ID NO: 1561653
uuaccuuuaucuguggaau

SEQ ID NO: 1688148 - RNA, 19 nt, Artificial Sequence
  Description of Artificial Sequence: Synthetic oligonucleotide
  Antisense strand to SEQ ID NO: 1688147
auuccacagauaaagguaa

SEQ ID NO: 1688149 - RNA, 19 nt, Artificial Sequence
  Description of Artificial Sequence: Synthetic oligonucleotide
  Sense strand starting at position 129 of SEQ ID NO: 1561653
ccuuuaucuguggaauauu

SEQ ID NO: 1688150 - RNA, 19 nt, Artificial Sequence
  Description of Artificial Sequence: Synthetic oligonucleotide
  Antisense strand to SEQ ID NO: 1688149
aauauuccacagauaaagg

SEQ ID NO: 1688151 - RNA, 19 nt, Artificial Sequence
  Description of Artificial Sequence: Synthetic oligonucleotide
  Sense strand starting at position 146 of SEQ ID NO: 1561653
uuugaauugucacugaagg

SEQ ID NO: 1688152 - RNA, 19 nt, Artificial Sequence
  Description of Artificial Sequence: Synthetic oligonucleotide
  Antisense strand to SEQ ID NO: 1688151
ccuucagugacaauucaaa

SEQ ID NO: 1688153 - RNA, 19 nt, Artificial Sequence
  Description of Artificial Sequence: Synthetic oligonucleotide
  Sense strand starting at position 147 of SEQ ID NO: 1561653
uugaauugucacugaagga

SEQ ID NO: 1688154 - RNA, 19 nt, Artificial Sequence
  Description of Artificial Sequence: Synthetic oligonucleotide
  Antisense strand to SEQ ID NO: 1688153
uccuucagugacaauucaa

SEQ ID NO: 1688155 - RNA, 19 nt, Artificial Sequence
  Description of Artificial Sequence: Synthetic oligonucleotide
  Sense strand starting at position 278 of SEQ ID NO: 1561653
ugaaauguguaucuccuca

SEQ ID NO: 1688156 - RNA, 19 nt, Artificial Sequence
  Description of Artificial Sequence: Synthetic oligonucleotide
  Antisense strand to SEQ ID NO: 1688155
ugaggagauacacauuuca

SEQ ID NO: 1688157 - RNA, 19 nt, Artificial Sequence
  Description of Artificial Sequence: Synthetic oligonucleotide
  Sense strand starting at position 282 of SEQ ID NO: 1561653
auguguaucuccucaggag

SEQ ID NO: 1688158 - RNA, 19 nt, Artificial Sequence
  Description of Artificial Sequence: Synthetic oligonucleotide
  Antisense strand to SEQ ID NO: 1688157
cuccugaggagauacacau

SEQ ID NO: 1688159 - RNA, 19 nt, Artificial Sequence
  Description of Artificial Sequence: Synthetic oligonucleotide
  Sense strand starting at position 312 of SEQ ID NO: 1561653
aagggagauucugaauuug

SEQ ID NO: 1688160 - RNA, 19 nt, Artificial Sequence
  Description of Artificial Sequence: Synthetic oligonucleotide
  Antisense strand to SEQ ID NO: 1688159
caaauucagaaucucccuu

SEQ ID NO: 1688161 - RNA, 19 nt, Artificial Sequence
  Description of Artificial Sequence: Synthetic oligonucleotide
  Sense strand starting at position 370 of SEQ ID NO: 1561653
gagauuuaaacgugugcac

SEQ ID NO: 1688162 - RNA, 19 nt, Artificial Sequence
  Description of Artificial Sequence: Synthetic oligonucleotide
  Antisense strand to SEQ ID NO: 1688161
gugcacacguuuaaaucuc

SEQ ID NO: 1688163 - RNA, 19 nt, Artificial Sequence
  Description of Artificial Sequence: Synthetic oligonucleotide
  Sense strand starting at position 372 of SEQ ID NO: 1561653
gauuuaaacgugugcacuc

SEQ ID NO: 1688164 - RNA, 19 nt, Artificial Sequence
  Description of Artificial Sequence: Synthetic oligonucleotide
  Antisense strand to SEQ ID NO: 1688163
gagugcacacguuuaaauc

SEQ ID NO: 1688165 - RNA, 19 nt, Artificial Sequence
  Description of Artificial Sequence: Synthetic oligonucleotide
  Sense strand starting at position 482 of SEQ ID NO: 1561653
ccaucuucccugggaguga

SEQ ID NO: 1688166 - RNA, 19 nt, Artificial Sequence
  Description of Artificial Sequence: Synthetic oligonucleotide
  Antisense strand to SEQ ID NO: 1688165
ucacucccagggaagaugg

SEQ ID NO: 1688167 - RNA, 19 nt, Artificial Sequence
  Description of Artificial Sequence: Synthetic oligonucleotide
  Sense strand starting at position 634 of SEQ ID NO: 1561653
cagggacaggcuugaaaug

SEQ ID NO: 1688168 - RNA, 19 nt, Artificial Sequence
  Description of Artificial Sequence: Synthetic oligonucleotide
  Antisense strand to SEQ ID NO: 1688167
cauuucaagccugucccug

SEQ ID NO: 1688169 - RNA, 19 nt, Artificial Sequence
  Description of Artificial Sequence: Synthetic oligonucleotide
  Sense strand starting at position 790 of SEQ ID NO: 1561653
uggaauugaccuggucacu

SEQ ID NO: 1688170 - RNA, 19 nt, Artificial Sequence
  Description of Artificial Sequence: Synthetic oligonucleotide
  Antisense strand to SEQ ID NO: 1688169
agugaccaggucaauucca

SEQ ID NO: 1688171 - RNA, 19 nt, Artificial Sequence
  Description of Artificial Sequence: Synthetic oligonucleotide
  Sense strand starting at position 795 of SEQ ID NO: 1561653
uugaccuggucacuggaaa

SEQ ID NO: 1688172 - RNA, 19 nt, Artificial Sequence
  Description of Artificial Sequence: Synthetic oligonucleotide
  Antisense strand to SEQ ID NO: 1688171
uuuccagugaccaggucaa

SEQ ID NO: 1688173 - RNA, 19 nt, Artificial Sequence
  Description of Artificial Sequence: Synthetic oligonucleotide
  Sense strand starting at position 819 of SEQ ID NO: 1561653
caggcuucccgugaucaaa

SEQ ID NO: 1688174 - RNA, 19 nt, Artificial Sequence
  Description of Artificial Sequence: Synthetic oligonucleotide
  Antisense strand to SEQ ID NO: 1688173
uuugaucacgggaagccug

SEQ ID NO: 1688175 - RNA, 19 nt, Artificial Sequence
  Description of Artificial Sequence: Synthetic oligonucleotide
  Sense strand starting at position 847 of SEQ ID NO: 1561653
agauuugcuugacauuaau

SEQ ID NO: 1688176 - RNA, 19 nt, Artificial Sequence
  Description of Artificial Sequence: Synthetic oligonucleotide
  Antisense strand to SEQ ID NO: 1688175
auuaaugucaagcaaaucu

SEQ ID NO: 1688177 - RNA, 19 nt, Artificial Sequence
  Description of Artificial Sequence: Synthetic oligonucleotide
  Sense strand starting at position 917 of SEQ ID NO: 1561653
gcacuuaagcuggaacuuu

SEQ ID NO: 1688178 - RNA, 19 nt, Artificial Sequence
  Description of Artificial Sequence: Synthetic oligonucleotide
  Antisense strand to SEQ ID NO: 1688177
aaaguuccagcuuaagugc

SEQ ID NO: 1688179 - RNA, 19 nt, Artificial Sequence
  Description of Artificial Sequence: Synthetic oligonucleotide
  Sense strand starting at position 1075 of SEQ ID NO: 1561653
guuucuuuccgaggacaga

SEQ ID NO: 1688180 - RNA, 19 nt, Artificial Sequence
  Description of Artificial Sequence: Synthetic oligonucleotide
  Antisense strand to SEQ ID NO: 1688179
ucuguccucggaaagaaac

SEQ ID NO: 1688181 - RNA, 19 nt, Artificial Sequence
  Description of Artificial Sequence: Synthetic oligonucleotide
  Sense strand starting at position 1104 of SEQ ID NO: 1561653
ccaacauucggcgaugaaa

SEQ ID NO: 1688182 - RNA, 19 nt, Artificial Sequence
  Description of Artificial Sequence: Synthetic oligonucleotide
  Antisense strand to SEQ ID NO: 1688181
uuucaucgccgaauguugg

SEQ ID NO: 1688183 - RNA, 19 nt, Artificial Sequence
  Description of Artificial Sequence: Synthetic oligonucleotide
  Sense strand starting at position 1106 of SEQ ID NO: 1561653
aacauucggcgaugaaaug

SEQ ID NO: 1688184 - RNA, 19 nt, Artificial Sequence
  Description of Artificial Sequence: Synthetic oligonucleotide
  Antisense strand to SEQ ID NO: 1688183
cauuucaucgccgaauguu

SEQ ID NO: 1688185 - RNA, 19 nt, Artificial Sequence
  Description of Artificial Sequence: Synthetic oligonucleotide
  Sense strand starting at position 1294 of SEQ ID NO: 1561653
auguccacccuugauguaa

SEQ ID NO: 1688186 - RNA, 19 nt, Artificial Sequence
  Description of Artificial Sequence: Synthetic oligonucleotide
  Antisense strand to SEQ ID NO: 1688185
uuacaucaaggguggacau

SEQ ID NO: 1688187 - RNA, 19 nt, Artificial Sequence
  Description of Artificial Sequence: Synthetic oligonucleotide
  Sense strand starting at position 1308 of SEQ ID NO: 1561653
uguaaaguuggagggagua

SEQ ID NO: 1688188 - RNA, 19 nt, Artificial Sequence
  Description of Artificial Sequence: Synthetic oligonucleotide
  Antisense strand to SEQ ID NO: 1688187
uacucccuccaacuuuaca

SEQ ID NO: 1688189 - RNA, 19 nt, Artificial Sequence
  Description of Artificial Sequence: Synthetic oligonucleotide
  Sense strand starting at position 2220 of SEQ ID NO: 1561653
agcagauugugauccuuac

SEQ ID NO: 1688190 - RNA, 19 nt, Artificial Sequence
  Description of Artificial Sequence: Synthetic oligonucleotide
  Antisense strand to SEQ ID NO: 1688189
guaaggaucacaaucugcu

SEQ ID NO: 1688191 - RNA, 19 nt, Artificial Sequence
  Description of Artificial Sequence: Synthetic oligonucleotide
  Sense strand starting at position 2501 of SEQ ID NO: 1561653
uguugaaaugcccaccuua

SEQ ID NO: 1688192 - RNA, 19 nt, Artificial Sequence
  Description of Artificial Sequence: Synthetic oligonucleotide
  Antisense strand to SEQ ID NO: 1688191
uaaggugggcauuucaaca

SEQ ID NO: 1688193 - RNA, 19 nt, Artificial Sequence
  Description of Artificial Sequence: Synthetic oligonucleotide
  Sense strand starting at position 2541 of SEQ ID NO: 1561653
gaguccguguagucauuua

SEQ ID NO: 1688194 - RNA, 19 nt, Artificial Sequence
  Description of Artificial Sequence: Synthetic oligonucleotide
  Antisense strand to SEQ ID NO: 1688193
uaaaugacuacacggacuc

SEQ ID NO: 1688195 - RNA, 19 nt, Artificial Sequence
  Description of Artificial Sequence: Synthetic oligonucleotide
  Sense strand starting at position 2546 of SEQ ID NO: 1561653
cguguagucauuuauuagc

SEQ ID NO: 1688196 - RNA, 19 nt, Artificial Sequence
  Description of Artificial Sequence: Synthetic oligonucleotide
  Antisense strand to SEQ ID NO: 1688195
gcuaauaaaugacuacacg

SEQ ID NO: 1688197 - RNA, 19 nt, Artificial Sequence
  Description of Artificial Sequence: Synthetic oligonucleotide
  Sense strand starting at position 2693 of SEQ ID NO: 1561653
gucauauaaucacuguaua

SEQ ID NO: 1688198 - RNA, 19 nt, Artificial Sequence
  Description of Artificial Sequence: Synthetic oligonucleotide
  Antisense strand to SEQ ID NO: 1688197
uauacagugauuauaugac

SEQ ID NO: 1688199 - RNA, 19 nt, Artificial Sequence
  Description of Artificial Sequence: Synthetic oligonucleotide
  Sense strand starting at position 2746 of SEQ ID NO: 1561653
ugggaagugcugugagaag

SEQ ID NO: 1688200 - RNA, 19 nt, Artificial Sequence
  Description of Artificial Sequence: Synthetic oligonucleotide
  Antisense strand to SEQ ID NO: 1688199
cuucucacagcacuuccca

SEQ ID NO: 1688201 - RNA, 19 nt, Artificial Sequence
  Description of Artificial Sequence: Synthetic oligonucleotide
  Sense strand starting at position 2813 of SEQ ID NO: 1561653
gguggaaccuccuugggaa

SEQ ID NO: 1688202 - RNA, 19 nt, Artificial Sequence
  Description of Artificial Sequence: Synthetic oligonucleotide
  Antisense strand to SEQ ID NO: 1688201
uucccaaggagguuccacc

SEQ ID NO: 1688203 - RNA, 19 nt, Artificial Sequence
  Description of Artificial Sequence: Synthetic oligonucleotide
  Sense strand starting at position 2837 of SEQ ID NO: 1561653
cauuuagguugagaaacaa

SEQ ID NO: 1688204 - RNA, 19 nt, Artificial Sequence
  Description of Artificial Sequence: Synthetic oligonucleotide
  Antisense strand to SEQ ID NO: 1688203
uuguuucucaaccuaaaug

SEQ ID NO: 1688205 - RNA, 19 nt, Artificial Sequence
  Description of Artificial Sequence: Synthetic oligonucleotide
  Sense strand starting at position 3252 of SEQ ID NO: 1561653
uuuagccuugaguaaauga

SEQ ID NO: 1688206 - RNA, 19 nt, Artificial Sequence
  Description of Artificial Sequence: Synthetic oligonucleotide
  Antisense strand to SEQ ID NO: 1688205
ucauuuacucaaggcuaaa

SEQ ID NO: 1688207 - RNA, 19 nt, Artificial Sequence
  Description of Artificial Sequence: Synthetic oligonucleotide
  Sense strand starting at position 3347 of SEQ ID NO: 1561653
uugagaaguuaaguuugaa

SEQ ID NO: 1688208 - RNA, 19 nt, Artificial Sequence
  Description of Artificial Sequence: Synthetic oligonucleotide
  Antisense strand to SEQ ID NO: 1688207
uucaaacuuaacuucucaa

SEQ ID NO: 1688209 - RNA, 19 nt, Artificial Sequence
  Description of Artificial Sequence: Synthetic oligonucleotide
  Sense strand starting at position 3350 of SEQ ID NO: 1561653
agaaguuaaguuugaaaug

SEQ ID NO: 1688210 - RNA, 19 nt, Artificial Sequence
  Description of Artificial Sequence: Synthetic oligonucleotide
  Antisense strand to SEQ ID NO: 1688209
cauuucaaacuuaacuucu

SEQ ID NO: 1688211 - RNA, 19 nt, Artificial Sequence
  Description of Artificial Sequence: Synthetic oligonucleotide
  Sense strand starting at position 3641 of SEQ ID NO: 1561653
gcugaugcuguugagaaca

SEQ ID NO: 1688212 - RNA, 19 nt, Artificial Sequence
  Description of Artificial Sequence: Synthetic oligonucleotide
  Antisense strand to SEQ ID NO: 1688211
uguucucaacagcaucagc

SEQ ID NO: 1688213 - RNA, 19 nt, Artificial Sequence
  Description of Artificial Sequence: Synthetic oligonucleotide
  Sense strand starting at position 3782 of SEQ ID NO: 1561653
uaggcagugucaucaagga

SEQ ID NO: 1688214 - RNA, 19 nt, Artificial Sequence
  Description of Artificial Sequence: Synthetic oligonucleotide
  Antisense strand to SEQ ID NO: 1688213
uccuugaugacacugccua

SEQ ID NO: 1688215 - RNA, 19 nt, Artificial Sequence
  Description of Artificial Sequence: Synthetic oligonucleotide
  Sense strand starting at position 24 of SEQ ID NO: 1561654
gagcaaugcgaagaauuga

SEQ ID NO: 1688216 - RNA, 19 nt, Artificial Sequence
  Description of Artificial Sequence: Synthetic oligonucleotide
  Antisense strand to SEQ ID NO: 1688215
ucaauucuucgcauugcuc

SEQ ID NO: 1688217 - RNA, 19 nt, Artificial Sequence
  Description of Artificial Sequence: Synthetic oligonucleotide
  Sense strand starting at position 173 of SEQ ID NO: 1561654
ugggaauagcucuguggga

SEQ ID NO: 1688218 - RNA, 19 nt, Artificial Sequence
  Description of Artificial Sequence: Synthetic oligonucleotide
  Antisense strand to SEQ ID NO: 1688217
ucccacagagcuauuccca

SEQ ID NO: 1688219 - RNA, 19 nt, Artificial Sequence
  Description of Artificial Sequence: Synthetic oligonucleotide
  Sense strand starting at position 175 of SEQ ID NO: 1561654
ggaauagcucugugggacu

SEQ ID NO: 1688220 - RNA, 19 nt, Artificial Sequence
  Description of Artificial Sequence: Synthetic oligonucleotide
  Antisense strand to SEQ ID NO: 1688219
agucccacagagcuauucc

SEQ ID NO: 1688221 - RNA, 19 nt, Artificial Sequence
  Description of Artificial Sequence: Synthetic oligonucleotide
  Sense strand starting at position 204 of SEQ ID NO: 1561654
gugagagacccuugagacu

SEQ ID NO: 1688222 - RNA, 19 nt, Artificial Sequence
  Description of Artificial Sequence: Synthetic oligonucleotide
  Antisense strand to SEQ ID NO: 1688221
agucucaagggucucucac

SEQ ID NO: 1688223 - RNA, 19 nt, Artificial Sequence
  Description of Artificial Sequence: Synthetic oligonucleotide
  Sense strand starting at position 239 of SEQ ID NO: 1561654
aguuucuuagccuaacgaa

SEQ ID NO: 1688224 - RNA, 19 nt, Artificial Sequence
  Description of Artificial Sequence: Synthetic oligonucleotide
  Antisense strand to SEQ ID NO: 1688223
uucguuaggcuaagaaacu

SEQ ID NO: 1688225 - RNA, 19 nt, Artificial Sequence
  Description of Artificial Sequence: Synthetic oligonucleotide
  Sense strand starting at position 259 of SEQ ID NO: 1561654
ugaaguuaaguccagaggu

SEQ ID NO: 1688226 - RNA, 19 nt, Artificial Sequence
  Description of Artificial Sequence: Synthetic oligonucleotide
  Antisense strand to SEQ ID NO: 1688225
accucuggacuuaacuuca

SEQ ID NO: 1688227 - RNA, 19 nt, Artificial Sequence
  Description of Artificial Sequence: Synthetic oligonucleotide
  Sense strand starting at position 261 of SEQ ID NO: 1561654
aaguuaaguccagaggugu

SEQ ID NO: 1688228 - RNA, 19 nt, Artificial Sequence
  Description of Artificial Sequence: Synthetic oligonucleotide
  Antisense strand to SEQ ID NO: 1688227
acaccucuggacuuaacuu

SEQ ID NO: 1688229 - RNA, 19 nt, Artificial Sequence
  Description of Artificial Sequence: Synthetic oligonucleotide
  Sense strand starting at position 272 of SEQ ID NO: 1561654
agagguguuuagguaccau

SEQ ID NO: 1688230 - RNA, 19 nt, Artificial Sequence
  Description of Artificial Sequence: Synthetic oligonucleotide
  Antisense strand to SEQ ID NO: 1688229
augguaccuaaacaccucu

SEQ ID NO: 1688231 - RNA, 19 nt, Artificial Sequence
  Description of Artificial Sequence: Synthetic oligonucleotide
  Sense strand starting at position 325 of SEQ ID NO: 1561654
uuaccuuuaucuguggaau

SEQ ID NO: 1688232 - RNA, 19 nt, Artificial Sequence
  Description of Artificial Sequence: Synthetic oligonucleotide
  Antisense strand to SEQ ID NO: 1688231
auuccacagauaaagguaa

SEQ ID NO: 1688233 - RNA, 19 nt, Artificial Sequence
  Description of Artificial Sequence: Synthetic oligonucleotide
  Sense strand starting at position 328 of SEQ ID NO: 1561654
ccuuuaucuguggaauauu

SEQ ID NO: 1688234 - RNA, 19 nt, Artificial Sequence
  Description of Artificial Sequence: Synthetic oligonucleotide
  Antisense strand to SEQ ID NO: 1688233
aauauuccacagauaaagg

SEQ ID NO: 1688235 - RNA, 19 nt, Artificial Sequence
  Description of Artificial Sequence: Synthetic oligonucleotide
  Sense strand starting at position 345 of SEQ ID NO: 1561654
uuugaauugucacugaagg

SEQ ID NO: 1688236 - RNA, 19 nt, Artificial Sequence
  Description of Artificial Sequence: Synthetic oligonucleotide
  Antisense strand to SEQ ID NO: 1688235
ccuucagugacaauucaaa

SEQ ID NO: 1688237 - RNA, 19 nt, Artificial Sequence
  Description of Artificial Sequence: Synthetic oligonucleotide
  Sense strand starting at position 346 of SEQ ID NO: 1561654
uugaauugucacugaagga

SEQ ID NO: 1688238 - RNA, 19 nt, Artificial Sequence
  Description of Artificial Sequence: Synthetic oligonucleotide
  Antisense strand to SEQ ID NO: 1688237
uccuucagugacaauucaa

SEQ ID NO: 1688239 - RNA, 19 nt, Artificial Sequence
  Description of Artificial Sequence: Synthetic oligonucleotide
  Sense strand starting at position 477 of SEQ ID NO: 1561654
ugaaauguguaucuccuca

SEQ ID NO: 1688240 - RNA, 19 nt, Artificial Sequence
  Description of Artificial Sequence: Synthetic oligonucleotide
  Antisense strand to SEQ ID NO: 1688239
ugaggagauacacauuuca

SEQ ID NO: 1688241 - RNA, 19 nt, Artificial Sequence
  Description of Artificial Sequence: Synthetic oligonucleotide
  Sense strand starting at position 481 of SEQ ID NO: 1561654
auguguaucuccucaggag

SEQ ID NO: 1688242 - RNA, 19 nt, Artificial Sequence
  Description of Artificial Sequence: Synthetic oligonucleotide
  Antisense strand to SEQ ID NO: 1688241
cuccugaggagauacacau

SEQ ID NO: 1688243 - RNA, 19 nt, Artificial Sequence
  Description of Artificial Sequence: Synthetic oligonucleotide
  Sense strand starting at position 511 of SEQ ID NO: 1561654
aagggagauucugaauuug

SEQ ID NO: 1688244 - RNA, 19 nt, Artificial Sequence
  Description of Artificial Sequence: Synthetic oligonucleotide
  Antisense strand to SEQ ID NO: 1688243
caaauucagaaucucccuu

SEQ ID NO: 1688245 - RNA, 19 nt, Artificial Sequence
  Description of Artificial Sequence: Synthetic oligonucleotide
  Sense strand starting at position 569 of SEQ ID NO: 1561654
gagauuuaaacgugugcac

SEQ ID NO: 1688246 - RNA, 19 nt, Artificial Sequence
  Description of Artificial Sequence: Synthetic oligonucleotide
  Antisense strand to SEQ ID NO: 1688245
gugcacacguuuaaaucuc

SEQ ID NO: 1688247 - RNA, 19 nt, Artificial Sequence
  Description of Artificial Sequence: Synthetic oligonucleotide
  Sense strand starting at position 571 of SEQ ID NO: 1561654
gauuuaaacgugugcacuc

SEQ ID NO: 1688248 - RNA, 19 nt, Artificial Sequence
  Description of Artificial Sequence: Synthetic oligonucleotide
  Antisense strand to SEQ ID NO: 1688247
gagugcacacguuuaaauc

SEQ ID NO: 1688249 - RNA, 19 nt, Artificial Sequence
  Description of Artificial Sequence: Synthetic oligonucleotide
  Sense strand starting at position 681 of SEQ ID NO: 1561654
ccaucuucccugggaguga

SEQ ID NO: 1688250 - RNA, 19 nt, Artificial Sequence
  Description of Artificial Sequence: Synthetic oligonucleotide
  Antisense strand to SEQ ID NO: 1688249
ucacucccagggaagaugg

SEQ ID NO: 1688251 - RNA, 19 nt, Artificial Sequence
  Description of Artificial Sequence: Synthetic oligonucleotide
  Sense strand starting at position 833 of SEQ ID NO: 1561654
cagggacaggcuugaaaug

SEQ ID NO: 1688252 - RNA, 19 nt, Artificial Sequence
  Description of Artificial Sequence: Synthetic oligonucleotide
  Antisense strand to SEQ ID NO: 1688251
cauuucaagccugucccug

SEQ ID NO: 1688253 - RNA, 19 nt, Artificial Sequence
  Description of Artificial Sequence: Synthetic oligonucleotide
  Sense strand starting at position 989 of SEQ ID NO: 1561654
uggaauugaccuggucacu

SEQ ID NO: 1688254 - RNA, 19 nt, Artificial Sequence
  Description of Artificial Sequence: Synthetic oligonucleotide
  Antisense strand to SEQ ID NO: 1688253
agugaccaggucaauucca

SEQ ID NO: 1688255 - RNA, 19 nt, Artificial Sequence
  Description of Artificial Sequence: Synthetic oligonucleotide
  Sense strand starting at position 994 of SEQ ID NO: 1561654
uugaccuggucacuggaaa

SEQ ID NO: 1688256 - RNA, 19 nt, Artificial Sequence
  Description of Artificial Sequence: Synthetic oligonucleotide
  Antisense strand to SEQ ID NO: 1688255
uuuccagugaccaggucaa

SEQ ID NO: 1688257 - RNA, 19 nt, Artificial Sequence
  Description of Artificial Sequence: Synthetic oligonucleotide
  Sense strand starting at position 1018 of SEQ ID NO: 1561654
caggcuucccgugaucaaa

SEQ ID NO: 1688258 - RNA, 19 nt, Artificial Sequence
  Description of Artificial Sequence: Synthetic oligonucleotide
  Antisense strand to SEQ ID NO: 1688257
uuugaucacgggaagccug

SEQ ID NO: 1688259 - RNA, 19 nt, Artificial Sequence
  Description of Artificial Sequence: Synthetic oligonucleotide
  Sense strand starting at position 1116 of SEQ ID NO: 1561654
gcacuuaagcuggaacuuu

SEQ ID NO: 1688260 - RNA, 19 nt, Artificial Sequence
  Description of Artificial Sequence: Synthetic oligonucleotide
  Antisense strand to SEQ ID NO: 1688259
aaaguuccagcuuaagugc

SEQ ID NO: 1688261 - RNA, 19 nt, Artificial Sequence
  Description of Artificial Sequence: Synthetic oligonucleotide
  Sense strand starting at position 1274 of SEQ ID NO: 1561654
guuucuuuccgaggacaga

SEQ ID NO: 1688262 - RNA, 19 nt, Artificial Sequence
  Description of Artificial Sequence: Synthetic oligonucleotide
  Antisense strand to SEQ ID NO: 1688261
ucuguccucggaaagaaac

SEQ ID NO: 1688263 - RNA, 19 nt, Artificial Sequence
  Description of Artificial Sequence: Synthetic oligonucleotide
  Sense strand starting at position 1303 of SEQ ID NO: 1561654
ccaacauucggcgaugaaa

SEQ ID NO: 1688264 - RNA, 19 nt, Artificial Sequence
  Description of Artificial Sequence: Synthetic oligonucleotide
  Antisense strand to SEQ ID NO: 1688263
uuucaucgccgaauguugg

SEQ ID NO: 1688265 - RNA, 19 nt, Artificial Sequence
  Description of Artificial Sequence: Synthetic oligonucleotide
  Sense strand starting at position 1305 of SEQ ID NO: 1561654
aacauucggcgaugaaaug

SEQ ID NO: 1688266 - RNA, 19 nt, Artificial Sequence
  Description of Artificial Sequence: Synthetic oligonucleotide
  Antisense strand to SEQ ID NO: 1688265
cauuucaucgccgaauguu

SEQ ID NO: 1688267 - RNA, 19 nt, Artificial Sequence
  Description of Artificial Sequence: Synthetic oligonucleotide
  Sense strand starting at position 1493 of SEQ ID NO: 1561654
auguccacccuugauguaa

SEQ ID NO: 1688268 - RNA, 19 nt, Artificial Sequence
  Description of Artificial Sequence: Synthetic oligonucleotide
  Antisense strand to SEQ ID NO: 1688267
uuacaucaaggguggacau

SEQ ID NO: 1688269 - RNA, 19 nt, Artificial Sequence
  Description of Artificial Sequence: Synthetic oligonucleotide
  Sense strand starting at position 1507 of SEQ ID NO: 1561654
uguaaaguuggagggagua

SEQ ID NO: 1688270 - RNA, 19 nt, Artificial Sequence
  Description of Artificial Sequence: Synthetic oligonucleotide
  Antisense strand to SEQ ID NO: 1688269
uacucccuccaacuuuaca

SEQ ID NO: 1688271 - RNA, 19 nt, Artificial Sequence
  Description of Artificial Sequence: Synthetic oligonucleotide
  Sense strand starting at position 2700 of SEQ ID NO: 1561654
uguugaaaugcccaccuua

SEQ ID NO: 1688272 - RNA, 19 nt, Artificial Sequence
  Description of Artificial Sequence: Synthetic oligonucleotide
  Antisense strand to SEQ ID NO: 1688271
uaaggugggcauuucaaca

SEQ ID NO: 1688273 - RNA, 19 nt, Artificial Sequence
  Description of Artificial Sequence: Synthetic oligonucleotide
  Sense strand starting at position 2740 of SEQ ID NO: 1561654
gaguccguguagucauuua

SEQ ID NO: 1688274 - RNA, 19 nt, Artificial Sequence
  Description of Artificial Sequence: Synthetic oligonucleotide
  Antisense strand to SEQ ID NO: 1688273
uaaaugacuacacggacuc

SEQ ID NO: 1688275 - RNA, 19 nt, Artificial Sequence
  Description of Artificial Sequence: Synthetic oligonucleotide
  Sense strand starting at position 2745 of SEQ ID NO: 1561654
cguguagucauuuauuagc

SEQ ID NO: 1688276 - RNA, 19 nt, Artificial Sequence
  Description of Artificial Sequence: Synthetic oligonucleotide
  Antisense strand to SEQ ID NO: 1688275
gcuaauaaaugacuacacg

SEQ ID NO: 1688277 - RNA, 19 nt, Artificial Sequence
  Description of Artificial Sequence: Synthetic oligonucleotide
  Sense strand starting at position 2892 of SEQ ID NO: 1561654
gucauauaaucacuguaua

SEQ ID NO: 1688278 - RNA, 19 nt, Artificial Sequence
  Description of Artificial Sequence: Synthetic oligonucleotide
  Antisense strand to SEQ ID NO: 1688277
uauacagugauuauaugac

SEQ ID NO: 1688279 - RNA, 19 nt, Artificial Sequence
  Description of Artificial Sequence: Synthetic oligonucleotide
  Sense strand starting at position 2945 of SEQ ID NO: 1561654
ugggaagugcugugagaag

SEQ ID NO: 1688280 - RNA, 19 nt, Artificial Sequence
  Description of Artificial Sequence: Synthetic oligonucleotide
  Antisense strand to SEQ ID NO: 1688279
cuucucacagcacuuccca

SEQ ID NO: 1688281 - RNA, 19 nt, Artificial Sequence
  Description of Artificial Sequence: Synthetic oligonucleotide
  Sense strand starting at position 3012 of SEQ ID NO: 1561654
gguggaaccuccuugggaa

SEQ ID NO: 1688282 - RNA, 19 nt, Artificial Sequence
  Description of Artificial Sequence: Synthetic oligonucleotide
  Antisense strand to SEQ ID NO: 1688281
uucccaaggagguuccacc

SEQ ID NO: 1688283 - RNA, 19 nt, Artificial Sequence
  Description of Artificial Sequence: Synthetic oligonucleotide
  Sense strand starting at position 3036 of SEQ ID NO: 1561654
cauuuagguugagaaacaa

SEQ ID NO: 1688284 - RNA, 19 nt, Artificial Sequence
  Description of Artificial Sequence: Synthetic oligonucleotide
  Antisense strand to SEQ ID NO: 1688283
uuguuucucaaccuaaaug

SEQ ID NO: 1688285 - RNA, 19 nt, Artificial Sequence
  Description of Artificial Sequence: Synthetic oligonucleotide
  Sense strand starting at position 3451 of SEQ ID NO: 1561654
uuuagccuugaguaaauga

SEQ ID NO: 1688286 - RNA, 19 nt, Artificial Sequence
  Description of Artificial Sequence: Synthetic oligonucleotide
  Antisense strand to SEQ ID NO: 1688285
ucauuuacucaaggcuaaa

SEQ ID NO: 1688287 - RNA, 19 nt, Artificial Sequence
  Description of Artificial Sequence: Synthetic oligonucleotide
  Sense strand starting at position 3546 of SEQ ID NO: 1561654
uugagaaguuaaguuugaa

SEQ ID NO: 1688288 - RNA, 19 nt, Artificial Sequence
  Description of Artificial Sequence: Synthetic oligonucleotide
  Antisense strand to SEQ ID NO: 1688287
uucaaacuuaacuucucaa

SEQ ID NO: 1688289 - RNA, 19 nt, Artificial Sequence
  Description of Artificial Sequence: Synthetic oligonucleotide
  Sense strand starting at position 3549 of SEQ ID NO: 1561654
agaaguuaaguuugaaaug

SEQ ID NO: 1688290 - RNA, 19 nt, Artificial Sequence
  Description of Artificial Sequence: Synthetic oligonucleotide
  Antisense strand to SEQ ID NO: 1688289
cauuucaaacuuaacuucu

SEQ ID NO: 1688291 - RNA, 19 nt, Artificial Sequence
  Description of Artificial Sequence: Synthetic oligonucleotide
  Sense strand starting at position 3840 of SEQ ID NO: 1561654
gcugaugcuguugagaaca

SEQ ID NO: 1688292 - RNA, 19 nt, Artificial Sequence
  Description of Artificial Sequence: Synthetic oligonucleotide
  Antisense strand to SEQ ID NO: 1688291
uguucucaacagcaucagc

SEQ ID NO: 1688293 - RNA, 19 nt, Artificial Sequence
  Description of Artificial Sequence: Synthetic oligonucleotide
  Sense strand starting at position 3981 of SEQ ID NO: 1561654
uaggcagugucaucaagga

SEQ ID NO: 1688294 - RNA, 19 nt, Artificial Sequence
  Description of Artificial Sequence: Synthetic oligonucleotide
  Antisense strand to SEQ ID NO: 1688293
uccuugaugacacugccua

SEQ ID NO: 1688295 - RNA, 19 nt, Artificial Sequence
  Description of Artificial Sequence: Synthetic oligonucleotide
  Sense strand starting at position 75 of SEQ ID NO: 1561655
gagcaaugcgaagaauuga

SEQ ID NO: 1688296 - RNA, 19 nt, Artificial Sequence
  Description of Artificial Sequence: Synthetic oligonucleotide
  Antisense strand to SEQ ID NO: 1688295
ucaauucuucgcauugcuc

SEQ ID NO: 1688297 - RNA, 19 nt, Artificial Sequence
  Description of Artificial Sequence: Synthetic oligonucleotide
  Sense strand starting at position 224 of SEQ ID NO: 1561655
ugggaauagcucuguggga

SEQ ID NO: 1688298 - RNA, 19 nt, Artificial Sequence
  Description of Artificial Sequence: Synthetic oligonucleotide
  Antisense strand to SEQ ID NO: 1688297
ucccacagagcuauuccca

SEQ ID NO: 1688299 - RNA, 19 nt, Artificial Sequence
  Description of Artificial Sequence: Synthetic oligonucleotide
  Sense strand starting at position 226 of SEQ ID NO: 1561655
ggaauagcucugugggacu

SEQ ID NO: 1688300 - RNA, 19 nt, Artificial Sequence
  Description of Artificial Sequence: Synthetic oligonucleotide
  Antisense strand to SEQ ID NO: 1688299
agucccacagagcuauucc

SEQ ID NO: 1688301 - RNA, 19 nt, Artificial Sequence
  Description of Artificial Sequence: Synthetic oligonucleotide
  Sense strand starting at position 255 of SEQ ID NO: 1561655
gugagagacccuugagacu

SEQ ID NO: 1688302 - RNA, 19 nt, Artificial Sequence
  Description of Artificial Sequence: Synthetic oligonucleotide
  Antisense strand to SEQ ID NO: 1688301
agucucaagggucucucac

SEQ ID NO: 1688303 - RNA, 19 nt, Artificial Sequence
  Description of Artificial Sequence: Synthetic oligonucleotide
  Sense strand starting at position 290 of SEQ ID NO: 1561655
aguuucuuagccuaacgaa

SEQ ID NO: 1688304 - RNA, 19 nt, Artificial Sequence
  Description of Artificial Sequence: Synthetic oligonucleotide
  Antisense strand to SEQ ID NO: 1688303
uucguuaggcuaagaaacu

SEQ ID NO: 1688305 - RNA, 19 nt, Artificial Sequence
  Description of Artificial Sequence: Synthetic oligonucleotide
  Sense strand starting at position 310 of SEQ ID NO: 1561655
ugaaguuaaguccagaggu

SEQ ID NO: 1688306 - RNA, 19 nt, Artificial Sequence
  Description of Artificial Sequence: Synthetic oligonucleotide
  Antisense strand to SEQ ID NO: 1688305
accucuggacuuaacuuca

SEQ ID NO: 1688307 - RNA, 19 nt, Artificial Sequence
  Description of Artificial Sequence: Synthetic oligonucleotide
  Sense strand starting at position 312 of SEQ ID NO: 1561655
aaguuaaguccagaggugu

SEQ ID NO: 1688308 - RNA, 19 nt, Artificial Sequence
  Description of Artificial Sequence: Synthetic oligonucleotide
  Antisense strand to SEQ ID NO: 1688307
acaccucuggacuuaacuu

SEQ ID NO: 1688309 - RNA, 19 nt, Artificial Sequence
  Description of Artificial Sequence: Synthetic oligonucleotide
  Sense strand starting at position 323 of SEQ ID NO: 1561655
agagguguuuagguaccau

SEQ ID NO: 1688310 - RNA, 19 nt, Artificial Sequence
  Description of Artificial Sequence: Synthetic oligonucleotide
  Antisense strand to SEQ ID NO: 1688309
augguaccuaaacaccucu

SEQ ID NO: 1688311 - RNA, 19 nt, Artificial Sequence
  Description of Artificial Sequence: Synthetic oligonucleotide
  Sense strand starting at position 376 of SEQ ID NO: 1561655
uuaccuuuaucuguggaau

SEQ ID NO: 1688312 - RNA, 19 nt, Artificial Sequence
  Description of Artificial Sequence: Synthetic oligonucleotide
  Antisense strand to SEQ ID NO: 1688311
auuccacagauaaagguaa

SEQ ID NO: 1688313 - RNA, 19 nt, Artificial Sequence
  Description of Artificial Sequence: Synthetic oligonucleotide
  Sense strand starting at position 379 of SEQ ID NO: 1561655
ccuuuaucuguggaauauu

SEQ ID NO: 1688314 - RNA, 19 nt, Artificial Sequence
  Description of Artificial Sequence: Synthetic oligonucleotide
  Antisense strand to SEQ ID NO: 1688313
aauauuccacagauaaagg

SEQ ID NO: 1688315 - RNA, 19 nt, Artificial Sequence
  Description of Artificial Sequence: Synthetic oligonucleotide
  Sense strand starting at position 396 of SEQ ID NO: 1561655
uuugaauugucacugaagg

SEQ ID NO: 1688316 - RNA, 19 nt, Artificial Sequence
  Description of Artificial Sequence: Synthetic oligonucleotide
  Antisense strand to SEQ ID NO: 1688315
ccuucagugacaauucaaa

SEQ ID NO: 1688317 - RNA, 19 nt, Artificial Sequence
  Description of Artificial Sequence: Synthetic oligonucleotide
  Sense strand starting at position 397 of SEQ ID NO: 1561655
uugaauugucacugaagga

SEQ ID NO: 1688318 - RNA, 19 nt, Artificial Sequence
  Description of Artificial Sequence: Synthetic oligonucleotide
  Antisense strand to SEQ ID NO: 1688317
uccuucagugacaauucaa

SEQ ID NO: 1688319 - RNA, 19 nt, Artificial Sequence
  Description of Artificial Sequence: Synthetic oligonucleotide
  Sense strand starting at position 528 of SEQ ID NO: 1561655
ugaaauguguaucuccuca

SEQ ID NO: 1688320 - RNA, 19 nt, Artificial Sequence
  Description of Artificial Sequence: Synthetic oligonucleotide
  Antisense strand to SEQ ID NO: 1688319
ugaggagauacacauuuca

SEQ ID NO: 1688321 - RNA, 19 nt, Artificial Sequence
  Description of Artificial Sequence: Synthetic oligonucleotide
  Sense strand starting at position 532 of SEQ ID NO: 1561655
auguguaucuccucaggag

SEQ ID NO: 1688322 - RNA, 19 nt, Artificial Sequence
  Description of Artificial Sequence: Synthetic oligonucleotide
  Antisense strand to SEQ ID NO: 1688321
cuccugaggagauacacau

SEQ ID NO: 1688323 - RNA, 19 nt, Artificial Sequence
  Description of Artificial Sequence: Synthetic oligonucleotide
  Sense strand starting at position 562 of SEQ ID NO: 1561655
aagggagauucugaauuug

SEQ ID NO: 1688324 - RNA, 19 nt, Artificial Sequence
  Description of Artificial Sequence: Synthetic oligonucleotide
  Antisense strand to SEQ ID NO: 1688323
caaauucagaaucucccuu

SEQ ID NO: 1688325 - RNA, 19 nt, Artificial Sequence
  Description of Artificial Sequence: Synthetic oligonucleotide
  Sense strand starting at position 620 of SEQ ID NO: 1561655
gagauuuaaacgugugcac

SEQ ID NO: 1688326 - RNA, 19 nt, Artificial Sequence
  Description of Artificial Sequence: Synthetic oligonucleotide
  Antisense strand to SEQ ID NO: 1688325
gugcacacguuuaaaucuc

SEQ ID NO: 1688327 - RNA, 19 nt, Artificial Sequence
  Description of Artificial Sequence: Synthetic oligonucleotide
  Sense strand starting at position 622 of SEQ ID NO: 1561655
gauuuaaacgugugcacuc

SEQ ID NO: 1688328 - RNA, 19 nt, Artificial Sequence
  Description of Artificial Sequence: Synthetic oligonucleotide
  Antisense strand to SEQ ID NO: 1688327
gagugcacacguuuaaauc

SEQ ID NO: 1688329 - RNA, 19 nt, Artificial Sequence
  Description of Artificial Sequence: Synthetic oligonucleotide
  Sense strand starting at position 732 of SEQ ID NO: 1561655
ccaucuucccugggaguga

SEQ ID NO: 1688330 - RNA, 19 nt, Artificial Sequence
  Description of Artificial Sequence: Synthetic oligonucleotide
  Antisense strand to SEQ ID NO: 1688329
ucacucccagggaagaugg

SEQ ID NO: 1688331 - RNA, 19 nt, Artificial Sequence
  Description of Artificial Sequence: Synthetic oligonucleotide
  Sense strand starting at position 884 of SEQ ID NO: 1561655
cagggacaggcuugaaaug

SEQ ID NO: 1688332 - RNA, 19 nt, Artificial Sequence
  Description of Artificial Sequence: Synthetic oligonucleotide
  Antisense strand to SEQ ID NO: 1688331
cauuucaagccugucccug

SEQ ID NO: 1688333 - RNA, 19 nt, Artificial Sequence
  Description of Artificial Sequence: Synthetic oligonucleotide
  Sense strand starting at position 1040 of SEQ ID NO: 1561655
uggaauugaccuggucacu

SEQ ID NO: 1688334 - RNA, 19 nt, Artificial Sequence
  Description of Artificial Sequence: Synthetic oligonucleotide
  Antisense strand to SEQ ID NO: 1688333
agugaccaggucaauucca

SEQ ID NO: 1688335 - RNA, 19 nt, Artificial Sequence
  Description of Artificial Sequence: Synthetic oligonucleotide
  Sense strand starting at position 1045 of SEQ ID NO: 1561655
uugaccuggucacuggaaa

SEQ ID NO: 1688336 - RNA, 19 nt, Artificial Sequence
  Description of Artificial Sequence: Synthetic oligonucleotide
  Antisense strand to SEQ ID NO: 1688335
uuuccagugaccaggucaa

SEQ ID NO: 1688337 - RNA, 19 nt, Artificial Sequence
  Description of Artificial Sequence: Synthetic oligonucleotide
  Sense strand starting at position 1069 of SEQ ID NO: 1561655
caggcuucccgugaucaaa

SEQ ID NO: 1688338 - RNA, 19 nt, Artificial Sequence
  Description of Artificial Sequence: Synthetic oligonucleotide
  Antisense strand to SEQ ID NO: 1688337
uuugaucacgggaagccug

SEQ ID NO: 1688339 - RNA, 19 nt, Artificial Sequence
  Description of Artificial Sequence: Synthetic oligonucleotide
  Sense strand starting at position 1167 of SEQ ID NO: 1561655
gcacuuaagcuggaacuuu

SEQ ID NO: 1688340 - RNA, 19 nt, Artificial Sequence
  Description of Artificial Sequence: Synthetic oligonucleotide
  Antisense strand to SEQ ID NO: 1688339
aaaguuccagcuuaagugc

SEQ ID NO: 1688341 - RNA, 19 nt, Artificial Sequence
  Description of Artificial Sequence: Synthetic oligonucleotide
  Sense strand starting at position 1325 of SEQ ID NO: 1561655
guuucuuuccgaggacaga

SEQ ID NO: 1688342 - RNA, 19 nt, Artificial Sequence
  Description of Artificial Sequence: Synthetic oligonucleotide
  Antisense strand to SEQ ID NO: 1688341
ucuguccucggaaagaaac

SEQ ID NO: 1688343 - RNA, 19 nt, Artificial Sequence
  Description of Artificial Sequence: Synthetic oligonucleotide
  Sense strand starting at position 1354 of SEQ ID NO: 1561655
ccaacauucggcgaugaaa

SEQ ID NO: 1688344 - RNA, 19 nt, Artificial Sequence
  Description of Artificial Sequence: Synthetic oligonucleotide
  Antisense strand to SEQ ID NO: 1688343
uuucaucgccgaauguugg

SEQ ID NO: 1688345 - RNA, 19 nt, Artificial Sequence
  Description of Artificial Sequence: Synthetic oligonucleotide
  Sense strand starting at position 1356 of SEQ ID NO: 1561655
aacauucggcgaugaaaug

SEQ ID NO: 1688346 - RNA, 19 nt, Artificial Sequence
  Description of Artificial Sequence: Synthetic oligonucleotide
  Antisense strand to SEQ ID NO: 1688345
cauuucaucgccgaauguu

SEQ ID NO: 1688347 - RNA, 19 nt, Artificial Sequence
  Description of Artificial Sequence: Synthetic oligonucleotide
  Sense strand starting at position 1544 of SEQ ID NO: 1561655
auguccacccuugauguaa

SEQ ID NO: 1688348 - RNA, 19 nt, Artificial Sequence
  Description of Artificial Sequence: Synthetic oligonucleotide
  Antisense strand to SEQ ID NO: 1688347
uuacaucaaggguggacau

SEQ ID NO: 1688349 - RNA, 19 nt, Artificial Sequence
  Description of Artificial Sequence: Synthetic oligonucleotide
  Sense strand starting at position 1558 of SEQ ID NO: 1561655
uguaaaguuggagggagua

SEQ ID NO: 1688350 - RNA, 19 nt, Artificial Sequence
  Description of Artificial Sequence: Synthetic oligonucleotide
  Antisense strand to SEQ ID NO: 1688349
uacucccuccaacuuuaca

SEQ ID NO: 1688351 - RNA, 19 nt, Artificial Sequence
  Description of Artificial Sequence: Synthetic oligonucleotide
  Sense strand starting at position 2470 of SEQ ID NO: 1561655
agcagauugugauccuuac

SEQ ID NO: 1688352 - RNA, 19 nt, Artificial Sequence
  Description of Artificial Sequence: Synthetic oligonucleotide
  Antisense strand to SEQ ID NO: 1688351
guaaggaucacaaucugcu

SEQ ID NO: 1688353 - RNA, 19 nt, Artificial Sequence
  Description of Artificial Sequence: Synthetic oligonucleotide
  Sense strand starting at position 2751 of SEQ ID NO: 1561655
uguugaaaugcccaccuua

SEQ ID NO: 1688354 - RNA, 19 nt, Artificial Sequence
  Description of Artificial Sequence: Synthetic oligonucleotide
  Antisense strand to SEQ ID NO: 1688353
uaaggugggcauuucaaca

SEQ ID NO: 1688355 - RNA, 19 nt, Artificial Sequence
  Description of Artificial Sequence: Synthetic oligonucleotide
  Sense strand starting at position 2791 of SEQ ID NO: 1561655
gaguccguguagucauuua

SEQ ID NO: 1688356 - RNA, 19 nt, Artificial Sequence
  Description of Artificial Sequence: Synthetic oligonucleotide
  Antisense strand to SEQ ID NO: 1688355
uaaaugacuacacggacuc

SEQ ID NO: 1688357 - RNA, 19 nt, Artificial Sequence
  Description of Artificial Sequence: Synthetic oligonucleotide
  Sense strand starting at position 2796 of SEQ ID NO: 1561655
cguguagucauuuauuagc

SEQ ID NO: 1688358 - RNA, 19 nt, Artificial Sequence
  Description of Artificial Sequence: Synthetic oligonucleotide
  Antisense strand to SEQ ID NO: 1688357
gcuaauaaaugacuacacg

SEQ ID NO: 1688359 - RNA, 19 nt, Artificial Sequence
  Description of Artificial Sequence: Synthetic oligonucleotide
  Sense strand starting at position 2943 of SEQ ID NO: 1561655
gucauauaaucacuguaua

SEQ ID NO: 1688360 - RNA, 19 nt, Artificial Sequence
  Description of Artificial Sequence: Synthetic oligonucleotide
  Antisense strand to SEQ ID NO: 1688359
uauacagugauuauaugac

SEQ ID NO: 1688361 - RNA, 19 nt, Artificial Sequence
  Description of Artificial Sequence: Synthetic oligonucleotide
  Sense strand starting at position 2996 of SEQ ID NO: 1561655
ugggaagugcugugagaag

SEQ ID NO: 1688362 - RNA, 19 nt, Artificial Sequence
  Description of Artificial Sequence: Synthetic oligonucleotide
  Antisense strand to SEQ ID NO: 1688361
cuucucacagcacuuccca

SEQ ID NO: 1688363 - RNA, 19 nt, Artificial Sequence
  Description of Artificial Sequence: Synthetic oligonucleotide
  Sense strand starting at position 3063 of SEQ ID NO: 1561655
gguggaaccuccuugggaa

SEQ ID NO: 1688364 - RNA, 19 nt, Artificial Sequence
  Description of Artificial Sequence: Synthetic oligonucleotide
  Antisense strand to SEQ ID NO: 1688363
uucccaaggagguuccacc

SEQ ID NO: 1688365 - RNA, 19 nt, Artificial Sequence
  Description of Artificial Sequence: Synthetic oligonucleotide
  Sense strand starting at position 3087 of SEQ ID NO: 1561655
cauuuagguugagaaacaa

SEQ ID NO: 1688366 - RNA, 19 nt, Artificial Sequence
  Description of Artificial Sequence: Synthetic oligonucleotide
  Antisense strand to SEQ ID NO: 1688365
uuguuucucaaccuaaaug

SEQ ID NO: 1688367 - RNA, 19 nt, Artificial Sequence
  Description of Artificial Sequence: Synthetic oligonucleotide
  Sense strand starting at position 3502 of SEQ ID NO: 1561655
uuuagccuugaguaaauga

SEQ ID NO: 1688368 - RNA, 19 nt, Artificial Sequence
  Description of Artificial Sequence: Synthetic oligonucleotide
  Antisense strand to SEQ ID NO: 1688367
ucauuuacucaaggcuaaa

SEQ ID NO: 1688369 - RNA, 19 nt, Artificial Sequence
  Description of Artificial Sequence: Synthetic oligonucleotide
  Sense strand starting at position 3597 of SEQ ID NO: 1561655
uugagaaguuaaguuugaa

SEQ ID NO: 1688370 - RNA, 19 nt, Artificial Sequence
  Description of Artificial Sequence: Synthetic oligonucleotide
  Antisense strand to SEQ ID NO: 1688369
uucaaacuuaacuucucaa

SEQ ID NO: 1688371 - RNA, 19 nt, Artificial Sequence
  Description of Artificial Sequence: Synthetic oligonucleotide
  Sense strand starting at position 3600 of SEQ ID NO: 1561655
agaaguuaaguuugaaaug

SEQ ID NO: 1688372 - RNA, 19 nt, Artificial Sequence
  Description of Artificial Sequence: Synthetic oligonucleotide
  Antisense strand to SEQ ID NO: 1688371
cauuucaaacuuaacuucu

SEQ ID NO: 1688373 - RNA, 19 nt, Artificial Sequence
  Description of Artificial Sequence: Synthetic oligonucleotide
  Sense strand starting at position 3891 of SEQ ID NO: 1561655
gcugaugcuguugagaaca

SEQ ID NO: 1688374 - RNA, 19 nt, Artificial Sequence
  Description of Artificial Sequence: Synthetic oligonucleotide
  Antisense strand to SEQ ID NO: 1688373
uguucucaacagcaucagc

SEQ ID NO: 1688375 - RNA, 19 nt, Artificial Sequence
  Description of Artificial Sequence: Synthetic oligonucleotide
  Sense strand starting at position 1151 of SEQ ID NO: 1561656
gugauuucuuuagcggcau

SEQ ID NO: 1688376 - RNA, 19 nt, Artificial Sequence
  Description of Artificial Sequence: Synthetic oligonucleotide
  Antisense strand to SEQ ID NO: 1688375
augccgcuaaagaaaucac

SEQ ID NO: 1688377 - RNA, 19 nt, Artificial Sequence
  Description of Artificial Sequence: Synthetic oligonucleotide
  Sense strand starting at position 1180 of SEQ ID NO: 1561656
uucuaagacucagcugaug

SEQ ID NO: 1688378 - RNA, 19 nt, Artificial Sequence
  Description of Artificial Sequence: Synthetic oligonucleotide
  Antisense strand to SEQ ID NO: 1688377
caucagcugagucuuagaa

SEQ ID NO: 1688379 - RNA, 19 nt, Artificial Sequence
  Description of Artificial Sequence: Synthetic oligonucleotide
  Sense strand starting at position 1298 of SEQ ID NO: 1561656
aaugcuguccugugauaaa

SEQ ID NO: 1688380 - RNA, 19 nt, Artificial Sequence
  Description of Artificial Sequence: Synthetic oligonucleotide
  Antisense strand to SEQ ID NO: 1688379
uuuaucacaggacagcauu

SEQ ID NO: 1688381 - RNA, 19 nt, Artificial Sequence
  Description of Artificial Sequence: Synthetic oligonucleotide
  Sense strand starting at position 1360 of SEQ ID NO: 1561656
acuugugguccuggaauaa

SEQ ID NO: 1688382 - RNA, 19 nt, Artificial Sequence
  Description of Artificial Sequence: Synthetic oligonucleotide
  Antisense strand to SEQ ID NO: 1688381
uuauuccaggaccacaagu

SEQ ID NO: 1688383 - RNA, 19 nt, Artificial Sequence
  Description of Artificial Sequence: Synthetic oligonucleotide
  Sense strand starting at position 1401 of SEQ ID NO: 1561656
agggauaggugcuuuacuu

SEQ ID NO: 1688384 - RNA, 19 nt, Artificial Sequence
  Description of Artificial Sequence: Synthetic oligonucleotide
  Antisense strand to SEQ ID NO: 1688383
aaguaaagcaccuaucccu

SEQ ID NO: 1688385 - RNA, 19 nt, Artificial Sequence
  Description of Artificial Sequence: Synthetic oligonucleotide
  Sense strand starting at position 1445 of SEQ ID NO: 1561656
caaguaucacuuugggaaa

SEQ ID NO: 1688386 - RNA, 19 nt, Artificial Sequence
  Description of Artificial Sequence: Synthetic oligonucleotide
  Antisense strand to SEQ ID NO: 1688385
uuucccaaagugauacuug

SEQ ID NO: 1688387 - RNA, 19 nt, Artificial Sequence
  Description of Artificial Sequence: Synthetic oligonucleotide
  Sense strand starting at position 1603 of SEQ ID NO: 1561656
uggcuuagacaaugaguau

SEQ ID NO: 1688388 - RNA, 19 nt, Artificial Sequence
  Description of Artificial Sequence: Synthetic oligonucleotide
  Antisense strand to SEQ ID NO: 1688387
auacucauugucuaagcca

SEQ ID NO: 1688389 - RNA, 19 nt, Artificial Sequence
  Description of Artificial Sequence: Synthetic oligonucleotide
  Sense strand starting at position 1992 of SEQ ID NO: 1561656
gcuuuaugugucccuguca

SEQ ID NO: 1688390 - RNA, 19 nt, Artificial Sequence
  Description of Artificial Sequence: Synthetic oligonucleotide
  Antisense strand to SEQ ID NO: 1688389
ugacagggacacauaaagc

SEQ ID NO: 1688391 - RNA, 19 nt, Artificial Sequence
  Description of Artificial Sequence: Synthetic oligonucleotide
  Sense strand starting at position 2048 of SEQ ID NO: 1561656
guuggagggccauaaaucu

SEQ ID NO: 1688392 - RNA, 19 nt, Artificial Sequence
  Description of Artificial Sequence: Synthetic oligonucleotide
  Antisense strand to SEQ ID NO: 1688391
agauuuauggcccuccaac

SEQ ID NO: 1688393 - RNA, 19 nt, Artificial Sequence
  Description of Artificial Sequence: Synthetic oligonucleotide
  Sense strand starting at position 2141 of SEQ ID NO: 1561656
ccuuaagccugaucauguu

SEQ ID NO: 1688394 - RNA, 19 nt, Artificial Sequence
  Description of Artificial Sequence: Synthetic oligonucleotide
  Antisense strand to SEQ ID NO: 1688393
aacaugaucaggcuuaagg

SEQ ID NO: 1688395 - RNA, 19 nt, Artificial Sequence
  Description of Artificial Sequence: Synthetic oligonucleotide
  Sense strand starting at position 2231 of SEQ ID NO: 1561656
uucgguaucagagaauuau

SEQ ID NO: 1688396 - RNA, 19 nt, Artificial Sequence
  Description of Artificial Sequence: Synthetic oligonucleotide
  Antisense strand to SEQ ID NO: 1688395
auaauucucugauaccgaa

SEQ ID NO: 1688397 - RNA, 19 nt, Artificial Sequence
  Description of Artificial Sequence: Synthetic oligonucleotide
  Sense strand starting at position 2284 of SEQ ID NO: 1561656
ugacuuugccaucaaucag

SEQ ID NO: 1688398 - RNA, 19 nt, Artificial Sequence
  Description of Artificial Sequence: Synthetic oligonucleotide
  Antisense strand to SEQ ID NO: 1688397
cugauugauggcaaaguca

SEQ ID NO: 1688399 - RNA, 19 nt, Artificial Sequence
  Description of Artificial Sequence: Synthetic oligonucleotide
  Sense strand starting at position 2313 of SEQ ID NO: 1561656
cuggacaugucaccuugua

SEQ ID NO: 1688400 - RNA, 19 nt, Artificial Sequence
  Description of Artificial Sequence: Synthetic oligonucleotide
  Antisense strand to SEQ ID NO: 1688399
uacaaggugacauguccag

SEQ ID NO: 1688401 - RNA, 19 nt, Artificial Sequence
  Description of Artificial Sequence: Synthetic oligonucleotide
  Sense strand starting at position 2442 of SEQ ID NO: 1561656
ggaugugcaaucugagacu

SEQ ID NO: 1688402 - RNA, 19 nt, Artificial Sequence
  Description of Artificial Sequence: Synthetic oligonucleotide
  Antisense strand to SEQ ID NO: 1688401
agucucagauugcacaucc

SEQ ID NO: 1688403 - RNA, 19 nt, Artificial Sequence
  Description of Artificial Sequence: Synthetic oligonucleotide
  Sense strand starting at position 2652 of SEQ ID NO: 1561656
accaacauguguucuccau

SEQ ID NO: 1688404 - RNA, 19 nt, Artificial Sequence
  Description of Artificial Sequence: Synthetic oligonucleotide
  Antisense strand to SEQ ID NO: 1688403
auggagaacacauguuggu

SEQ ID NO: 1688405 - RNA, 19 nt, Artificial Sequence
  Description of Artificial Sequence: Synthetic oligonucleotide
  Sense strand starting at position 2656 of SEQ ID NO: 1561656
acauguguucuccaugaag

SEQ ID NO: 1688406 - RNA, 19 nt, Artificial Sequence
  Description of Artificial Sequence: Synthetic oligonucleotide
  Antisense strand to SEQ ID NO: 1688405
cuucauggagaacacaugu

SEQ ID NO: 1688407 - RNA, 19 nt, Artificial Sequence
  Description of Artificial Sequence: Synthetic oligonucleotide
  Sense strand starting at position 2878 of SEQ ID NO: 1561656
ccauaucaucuuggcaaag

SEQ ID NO: 1688408 - RNA, 19 nt, Artificial Sequence
  Description of Artificial Sequence: Synthetic oligonucleotide
  Antisense strand to SEQ ID NO: 1688407
cuuugccaagaugauaugg

SEQ ID NO: 1688409 - RNA, 19 nt, Artificial Sequence
  Description of Artificial Sequence: Synthetic oligonucleotide
  Sense strand starting at position 3205 of SEQ ID NO: 1561656
gagcaaugcgaagaauuga

SEQ ID NO: 1688410 - RNA, 19 nt, Artificial Sequence
  Description of Artificial Sequence: Synthetic oligonucleotide
  Antisense strand to SEQ ID NO: 1688409
ucaauucuucgcauugcuc

SEQ ID NO: 1688411 - RNA, 19 nt, Artificial Sequence
  Description of Artificial Sequence: Synthetic oligonucleotide
  Sense strand starting at position 3354 of SEQ ID NO: 1561656
ugggaauagcucuguggga

SEQ ID NO: 1688412 - RNA, 19 nt, Artificial Sequence
  Description of Artificial Sequence: Synthetic oligonucleotide
  Antisense strand to SEQ ID NO: 1688411
ucccacagagcuauuccca

SEQ ID NO: 1688413 - RNA, 19 nt, Artificial Sequence
  Description of Artificial Sequence: Synthetic oligonucleotide
  Sense strand starting at position 3356 of SEQ ID NO: 1561656
ggaauagcucugugggacu

SEQ ID NO: 1688414 - RNA, 19 nt, Artificial Sequence
  Description of Artificial Sequence: Synthetic oligonucleotide
  Antisense strand to SEQ ID NO: 1688413
agucccacagagcuauucc

SEQ ID NO: 1688415 - RNA, 19 nt, Artificial Sequence
  Description of Artificial Sequence: Synthetic oligonucleotide
  Sense strand starting at position 3385 of SEQ ID NO: 1561656
gugagagacccuugagacu

SEQ ID NO: 1688416 - RNA, 19 nt, Artificial Sequence
  Description of Artificial Sequence: Synthetic oligonucleotide
  Antisense strand to SEQ ID NO: 1688415
agucucaagggucucucac

SEQ ID NO: 1688417 - RNA, 19 nt, Artificial Sequence
  Description of Artificial Sequence: Synthetic oligonucleotide
  Sense strand starting at position 3410 of SEQ ID NO: 1561656
ccaggauguuaguuucuua

SEQ ID NO: 1688418 - RNA, 19 nt, Artificial Sequence
  Description of Artificial Sequence: Synthetic oligonucleotide
  Antisense strand to SEQ ID NO: 1688417
uaagaaacuaacauccugg

SEQ ID NO: 1688419 - RNA, 19 nt, Artificial Sequence
  Description of Artificial Sequence: Synthetic oligonucleotide
  Sense strand starting at position 3420 of SEQ ID NO: 1561656
aguuucuuagccuaacgaa

SEQ ID NO: 1688420 - RNA, 19 nt, Artificial Sequence
  Description of Artificial Sequence: Synthetic oligonucleotide
  Antisense strand to SEQ ID NO: 1688419
uucguuaggcuaagaaacu

SEQ ID NO: 1688421 - RNA, 19 nt, Artificial Sequence
  Description of Artificial Sequence: Synthetic oligonucleotide
  Sense strand starting at position 3440 of SEQ ID NO: 1561656
ugaaguuaaguccagaggu

SEQ ID NO: 1688422 - RNA, 19 nt, Artificial Sequence
  Description of Artificial Sequence: Synthetic oligonucleotide
  Antisense strand to SEQ ID NO: 1688421
accucuggacuuaacuuca

SEQ ID NO: 1688423 - RNA, 19 nt, Artificial Sequence
  Description of Artificial Sequence: Synthetic oligonucleotide
  Sense strand starting at position 3442 of SEQ ID NO: 1561656
aaguuaaguccagaggugu

SEQ ID NO: 1688424 - RNA, 19 nt, Artificial Sequence
  Description of Artificial Sequence: Synthetic oligonucleotide
  Antisense strand to SEQ ID NO: 1688423
acaccucuggacuuaacuu

SEQ ID NO: 1688425 - RNA, 19 nt, Artificial Sequence
  Description of Artificial Sequence: Synthetic oligonucleotide
  Sense strand starting at position 3453 of SEQ ID NO: 1561656
agagguguuuagguaccau

SEQ ID NO: 1688426 - RNA, 19 nt, Artificial Sequence
  Description of Artificial Sequence: Synthetic oligonucleotide
  Antisense strand to SEQ ID NO: 1688425
augguaccuaaacaccucu

SEQ ID NO: 1688427 - RNA, 19 nt, Artificial Sequence
  Description of Artificial Sequence: Synthetic oligonucleotide
  Sense strand starting at position 3497 of SEQ ID NO: 1561656
gugacacuguuaccuuuau

SEQ ID NO: 1688428 - RNA, 19 nt, Artificial Sequence
  Description of Artificial Sequence: Synthetic oligonucleotide
  Antisense strand to SEQ ID NO: 1688427
auaaagguaacagugucac

SEQ ID NO: 1688429 - RNA, 19 nt, Artificial Sequence
  Description of Artificial Sequence: Synthetic oligonucleotide
  Sense strand starting at position 3506 of SEQ ID NO: 1561656
uuaccuuuaucuguggaau

SEQ ID NO: 1688430 - RNA, 19 nt, Artificial Sequence
  Description of Artificial Sequence: Synthetic oligonucleotide
  Antisense strand to SEQ ID NO: 1688429
auuccacagauaaagguaa

SEQ ID NO: 1688431 - RNA, 19 nt, Artificial Sequence
  Description of Artificial Sequence: Synthetic oligonucleotide
  Sense strand starting at position 3509 of SEQ ID NO: 1561656
ccuuuaucuguggaauauu

SEQ ID NO: 1688432 - RNA, 19 nt, Artificial Sequence
  Description of Artificial Sequence: Synthetic oligonucleotide
  Antisense strand to SEQ ID NO: 1688431
aauauuccacagauaaagg

SEQ ID NO: 1688433 - RNA, 19 nt, Artificial Sequence
  Description of Artificial Sequence: Synthetic oligonucleotide
  Sense strand starting at position 3517 of SEQ ID NO: 1561656
uguggaauauuugaauugu

SEQ ID NO: 1688434 - RNA, 19 nt, Artificial Sequence
  Description of Artificial Sequence: Synthetic oligonucleotide
  Antisense strand to SEQ ID NO: 1688433
acaauucaaauauuccaca

SEQ ID NO: 1688435 - RNA, 19 nt, Artificial Sequence
  Description of Artificial Sequence: Synthetic oligonucleotide
  Sense strand starting at position 3526 of SEQ ID NO: 1561656
uuugaauugucacugaagg

SEQ ID NO: 1688436 - RNA, 19 nt, Artificial Sequence
  Description of Artificial Sequence: Synthetic oligonucleotide
  Antisense strand to SEQ ID NO: 1688435
ccuucagugacaauucaaa

SEQ ID NO: 1688437 - RNA, 19 nt, Artificial Sequence
  Description of Artificial Sequence: Synthetic oligonucleotide
  Sense strand starting at position 3527 of SEQ ID NO: 1561656
uugaauugucacugaagga

SEQ ID NO: 1688438 - RNA, 19 nt, Artificial Sequence
  Description of Artificial Sequence: Synthetic oligonucleotide
  Antisense strand to SEQ ID NO: 1688437
uccuucagugacaauucaa

SEQ ID NO: 1688439 - RNA, 19 nt, Artificial Sequence
  Description of Artificial Sequence: Synthetic oligonucleotide
  Sense strand starting at position 3587 of SEQ ID NO: 1561656
gagcuugggcaacggauua

SEQ ID NO: 1688440 - RNA, 19 nt, Artificial Sequence
  Description of Artificial Sequence: Synthetic oligonucleotide
  Antisense strand to SEQ ID NO: 1688439
uaauccguugcccaagcuc

SEQ ID NO: 1688441 - RNA, 19 nt, Artificial Sequence
  Description of Artificial Sequence: Synthetic oligonucleotide
  Sense strand starting at position 3658 of SEQ ID NO: 1561656
ugaaauguguaucuccuca

SEQ ID NO: 1688442 - RNA, 19 nt, Artificial Sequence
  Description of Artificial Sequence: Synthetic oligonucleotide
  Antisense strand to SEQ ID NO: 1688441
ugaggagauacacauuuca

SEQ ID NO: 1688443 - RNA, 19 nt, Artificial Sequence
  Description of Artificial Sequence: Synthetic oligonucleotide
  Sense strand starting at position 3662 of SEQ ID NO: 1561656
auguguaucuccucaggag

SEQ ID NO: 1688444 - RNA, 19 nt, Artificial Sequence
  Description of Artificial Sequence: Synthetic oligonucleotide
  Antisense strand to SEQ ID NO: 1688443
cuccugaggagauacacau

SEQ ID NO: 1688445 - RNA, 19 nt, Artificial Sequence
  Description of Artificial Sequence: Synthetic oligonucleotide
  Sense strand starting at position 3692 of SEQ ID NO: 1561656
aagggagauucugaauuug

SEQ ID NO: 1688446 - RNA, 19 nt, Artificial Sequence
  Description of Artificial Sequence: Synthetic oligonucleotide
  Antisense strand to SEQ ID NO: 1688445
caaauucagaaucucccuu

SEQ ID NO: 1688447 - RNA, 19 nt, Artificial Sequence
  Description of Artificial Sequence: Synthetic oligonucleotide
  Sense strand starting at position 3750 of SEQ ID NO: 1561656
gagauuuaaacgugugcac

SEQ ID NO: 1688448 - RNA, 19 nt, Artificial Sequence
  Description of Artificial Sequence: Synthetic oligonucleotide
  Antisense strand to SEQ ID NO: 1688447
gugcacacguuuaaaucuc

SEQ ID NO: 1688449 - RNA, 19 nt, Artificial Sequence
  Description of Artificial Sequence: Synthetic oligonucleotide
  Sense strand starting at position 3752 of SEQ ID NO: 1561656
gauuuaaacgugugcacuc

SEQ ID NO: 1688450 - RNA, 19 nt, Artificial Sequence
  Description of Artificial Sequence: Synthetic oligonucleotide
  Antisense strand to SEQ ID NO: 1688449
gagugcacacguuuaaauc

SEQ ID NO: 1688451 - RNA, 19 nt, Artificial Sequence
  Description of Artificial Sequence: Synthetic oligonucleotide
  Sense strand starting at position 3862 of SEQ ID NO: 1561656
ccaucuucccugggaguga

SEQ ID NO: 1688452 - RNA, 19 nt, Artificial Sequence
  Description of Artificial Sequence: Synthetic oligonucleotide
  Antisense strand to SEQ ID NO: 1688451
ucacucccagggaagaugg

SEQ ID NO: 1688453 - RNA, 19 nt, Artificial Sequence
  Description of Artificial Sequence: Synthetic oligonucleotide
  Sense strand starting at position 3875 of SEQ ID NO: 1561656
gagugauccuguuuauccu

SEQ ID NO: 1688454 - RNA, 19 nt, Artificial Sequence
  Description of Artificial Sequence: Synthetic oligonucleotide
  Antisense strand to SEQ ID NO: 1688453
aggauaaacaggaucacuc

SEQ ID NO: 1688455 - RNA, 19 nt, Artificial Sequence
  Description of Artificial Sequence: Synthetic oligonucleotide
  Sense strand starting at position 131 of SEQ ID NO: 1561657
agcucaaacguuugggaua

SEQ ID NO: 1688456 - RNA, 19 nt, Artificial Sequence
  Description of Artificial Sequence: Synthetic oligonucleotide
  Antisense strand to SEQ ID NO: 1688455
uaucccaaacguuugagcu

SEQ ID NO: 1688457 - RNA, 19 nt, Artificial Sequence
  Description of Artificial Sequence: Synthetic oligonucleotide
  Sense strand starting at position 176 of SEQ ID NO: 1561657
gaugauuuaucgcucccau

SEQ ID NO: 1688458 - RNA, 19 nt, Artificial Sequence
  Description of Artificial Sequence: Synthetic oligonucleotide
  Antisense strand to SEQ ID NO: 1688457
augggagcgauaaaucauc

SEQ ID NO: 1688459 - RNA, 19 nt, Artificial Sequence
  Description of Artificial Sequence: Synthetic oligonucleotide
  Sense strand starting at position 199 of SEQ ID NO: 1561657
cgcuuagcucgucugacau

SEQ ID NO: 1688460 - RNA, 19 nt, Artificial Sequence
  Description of Artificial Sequence: Synthetic oligonucleotide
  Antisense strand to SEQ ID NO: 1688459
augucagacgagcuaagcg

SEQ ID NO: 1688461 - RNA, 19 nt, Artificial Sequence
  Description of Artificial Sequence: Synthetic oligonucleotide
  Sense strand starting at position 377 of SEQ ID NO: 1561657
gagcgcugucuggcauaua

SEQ ID NO: 1688462 - RNA, 19 nt, Artificial Sequence
  Description of Artificial Sequence: Synthetic oligonucleotide
  Antisense strand to SEQ ID NO: 1688461
uauaugccagacagcgcuc

SEQ ID NO: 1688463 - RNA, 19 nt, Artificial Sequence
  Description of Artificial Sequence: Synthetic oligonucleotide
  Sense strand starting at position 380 of SEQ ID NO: 1561657
cgcugucuggcauauaaac

SEQ ID NO: 1688464 - RNA, 19 nt, Artificial Sequence
  Description of Artificial Sequence: Synthetic oligonucleotide
  Antisense strand to SEQ ID NO: 1688463
guuuauaugccagacagcg

SEQ ID NO: 1688465 - RNA, 19 nt, Artificial Sequence
  Description of Artificial Sequence: Synthetic oligonucleotide
  Sense strand starting at position 401 of SEQ ID NO: 1561657
acauaaauggugcauguga

SEQ ID NO: 1688466 - RNA, 19 nt, Artificial Sequence
  Description of Artificial Sequence: Synthetic oligonucleotide
  Antisense strand to SEQ ID NO: 1688465
ucacaugcaccauuuaugu

SEQ ID NO: 1688467 - RNA, 19 nt, Artificial Sequence
  Description of Artificial Sequence: Synthetic oligonucleotide
  Sense strand starting at position 403 of SEQ ID NO: 1561657
auaaauggugcaugugacu

SEQ ID NO: 1688468 - RNA, 19 nt, Artificial Sequence
  Description of Artificial Sequence: Synthetic oligonucleotide
  Antisense strand to SEQ ID NO: 1688467
agucacaugcaccauuuau

SEQ ID NO: 1688469 - RNA, 19 nt, Artificial Sequence
  Description of Artificial Sequence: Synthetic oligonucleotide
  Sense strand starting at position 412 of SEQ ID NO: 1561657
gcaugugacuuccuuagag

SEQ ID NO: 1688470 - RNA, 19 nt, Artificial Sequence
  Description of Artificial Sequence: Synthetic oligonucleotide
  Antisense strand to SEQ ID NO: 1688469
cucuaaggaagucacaugc

SEQ ID NO: 1688471 - RNA, 19 nt, Artificial Sequence
  Description of Artificial Sequence: Synthetic oligonucleotide
  Sense strand starting at position 623 of SEQ ID NO: 1561657
acauguaucuucccgggau

SEQ ID NO: 1688472 - RNA, 19 nt, Artificial Sequence
  Description of Artificial Sequence: Synthetic oligonucleotide
  Antisense strand to SEQ ID NO: 1688471
aucccgggaagauacaugu

SEQ ID NO: 1688473 - RNA, 19 nt, Artificial Sequence
  Description of Artificial Sequence: Synthetic oligonucleotide
  Sense strand starting at position 625 of SEQ ID NO: 1561657
auguaucuucccgggauua

SEQ ID NO: 1688474 - RNA, 19 nt, Artificial Sequence
  Description of Artificial Sequence: Synthetic oligonucleotide
  Antisense strand to SEQ ID NO: 1688473
uaaucccgggaagauacau

SEQ ID NO: 1688475 - RNA, 19 nt, Artificial Sequence
  Description of Artificial Sequence: Synthetic oligonucleotide
  Sense strand starting at position 626 of SEQ ID NO: 1561657
uguaucuucccgggauuac

SEQ ID NO: 1688476 - RNA, 19 nt, Artificial Sequence
  Description of Artificial Sequence: Synthetic oligonucleotide
  Antisense strand to SEQ ID NO: 1688475
guaaucccgggaagauaca

SEQ ID NO: 1688477 - RNA, 19 nt, Artificial Sequence
  Description of Artificial Sequence: Synthetic oligonucleotide
  Sense strand starting at position 638 of SEQ ID NO: 1561657
ggauuacguaaauggugaa

SEQ ID NO: 1688478 - RNA, 19 nt, Artificial Sequence
  Description of Artificial Sequence: Synthetic oligonucleotide
  Antisense strand to SEQ ID NO: 1688477
uucaccauuuacguaaucc

SEQ ID NO: 1688479 - RNA, 19 nt, Artificial Sequence
  Description of Artificial Sequence: Synthetic oligonucleotide
  Sense strand starting at position 828 of SEQ ID NO: 1561657
uggagaucaccauggcaga

SEQ ID NO: 1688480 - RNA, 19 nt, Artificial Sequence
  Description of Artificial Sequence: Synthetic oligonucleotide
  Antisense strand to SEQ ID NO: 1688479
ucugccauggugaucucca

SEQ ID NO: 1688481 - RNA, 19 nt, Artificial Sequence
  Description of Artificial Sequence: Synthetic oligonucleotide
  Sense strand starting at position 896 of SEQ ID NO: 1561657
agggauuucuuugacccaa

SEQ ID NO: 1688482 - RNA, 19 nt, Artificial Sequence
  Description of Artificial Sequence: Synthetic oligonucleotide
  Antisense strand to SEQ ID NO: 1688481
uugggucaaagaaaucccu

SEQ ID NO: 1688483 - RNA, 19 nt, Artificial Sequence
  Description of Artificial Sequence: Synthetic oligonucleotide
  Sense strand starting at position 1215 of SEQ ID NO: 1561657
guccucuaccuuuaggaga

SEQ ID NO: 1688484 - RNA, 19 nt, Artificial Sequence
  Description of Artificial Sequence: Synthetic oligonucleotide
  Antisense strand to SEQ ID NO: 1688483
ucuccuaaagguagaggac

SEQ ID NO: 1688485 - RNA, 19 nt, Artificial Sequence
  Description of Artificial Sequence: Synthetic oligonucleotide
  Sense strand starting at position 2689 of SEQ ID NO: 1561657
aggcgaaauccaggacaaa

SEQ ID NO: 1688486 - RNA, 19 nt, Artificial Sequence
  Description of Artificial Sequence: Synthetic oligonucleotide
  Antisense strand to SEQ ID NO: 1688485
uuuguccuggauuucgccu

SEQ ID NO: 1688487 - RNA, 19 nt, Artificial Sequence
  Description of Artificial Sequence: Synthetic oligonucleotide
  Sense strand starting at position 2817 of SEQ ID NO: 1561657
ccucaauuacagcguauuu

SEQ ID NO: 1688488 - RNA, 19 nt, Artificial Sequence
  Description of Artificial Sequence: Synthetic oligonucleotide
  Antisense strand to SEQ ID NO: 1688487
aaauacgcuguaauugagg

SEQ ID NO: 1688489 - RNA, 19 nt, Artificial Sequence
  Description of Artificial Sequence: Synthetic oligonucleotide
  Sense strand starting at position 2961 of SEQ ID NO: 1561657
uauguaaaugcauguguac

SEQ ID NO: 1688490 - RNA, 19 nt, Artificial Sequence
  Description of Artificial Sequence: Synthetic oligonucleotide
  Antisense strand to SEQ ID NO: 1688489
guacacaugcauuuacaua

SEQ ID NO: 1688491 - RNA, 19 nt, Artificial Sequence
  Description of Artificial Sequence: Synthetic oligonucleotide
  Sense strand starting at position 2964 of SEQ ID NO: 1561657
guaaaugcauguguacaaa

SEQ ID NO: 1688492 - RNA, 19 nt, Artificial Sequence
  Description of Artificial Sequence: Synthetic oligonucleotide
  Antisense strand to SEQ ID NO: 1688491
uuuguacacaugcauuuac

SEQ ID NO: 1688493 - RNA, 19 nt, Artificial Sequence
  Description of Artificial Sequence: Synthetic oligonucleotide
  Sense strand starting at position 3125 of SEQ ID NO: 1561657
ggccacauuucgguuaaua

SEQ ID NO: 1688494 - RNA, 19 nt, Artificial Sequence
  Description of Artificial Sequence: Synthetic oligonucleotide
  Antisense strand to SEQ ID NO: 1688493
uauuaaccgaaauguggcc

SEQ ID NO: 1688495 - RNA, 19 nt, Artificial Sequence
  Description of Artificial Sequence: Synthetic oligonucleotide
  Sense strand starting at position 3135 of SEQ ID NO: 1561657
cgguuaauaugucuaugua

SEQ ID NO: 1688496 - RNA, 19 nt, Artificial Sequence
  Description of Artificial Sequence: Synthetic oligonucleotide
  Antisense strand to SEQ ID NO: 1688495
uacauagacauauuaaccg

SEQ ID NO: 1688497 - RNA, 19 nt, Artificial Sequence
  Description of Artificial Sequence: Synthetic oligonucleotide
  Sense strand starting at position 3136 of SEQ ID NO: 1561657
gguuaauaugucuauguau

SEQ ID NO: 1688498 - RNA, 19 nt, Artificial Sequence
  Description of Artificial Sequence: Synthetic oligonucleotide
  Antisense strand to SEQ ID NO: 1688497
auacauagacauauuaacc

SEQ ID NO: 1688499 - RNA, 19 nt, Artificial Sequence
  Description of Artificial Sequence: Synthetic oligonucleotide
  Sense strand starting at position 3142 of SEQ ID NO: 1561657
uaugucuauguaugugaca

SEQ ID NO: 1688500 - RNA, 19 nt, Artificial Sequence
  Description of Artificial Sequence: Synthetic oligonucleotide
  Antisense strand to SEQ ID NO: 1688499
ugucacauacauagacaua

SEQ ID NO: 1688501 - RNA, 19 nt, Artificial Sequence
  Description of Artificial Sequence: Synthetic oligonucleotide
  Sense strand starting at position 3143 of SEQ ID NO: 1561657
augucuauguaugugacau

SEQ ID NO: 1688502 - RNA, 19 nt, Artificial Sequence
  Description of Artificial Sequence: Synthetic oligonucleotide
  Antisense strand to SEQ ID NO: 1688501
augucacauacauagacau

SEQ ID NO: 1688503 - RNA, 19 nt, Artificial Sequence
  Description of Artificial Sequence: Synthetic oligonucleotide
  Sense strand starting at position 3144 of SEQ ID NO: 1561657
ugucuauguaugugacaug

SEQ ID NO: 1688504 - RNA, 19 nt, Artificial Sequence
  Description of Artificial Sequence: Synthetic oligonucleotide
  Antisense strand to SEQ ID NO: 1688503
caugucacauacauagaca

SEQ ID NO: 1688505 - RNA, 19 nt, Artificial Sequence
  Description of Artificial Sequence: Synthetic oligonucleotide
  Sense strand starting at position 3151 of SEQ ID NO: 1561657
guaugugacauggauguca

SEQ ID NO: 1688506 - RNA, 19 nt, Artificial Sequence
  Description of Artificial Sequence: Synthetic oligonucleotide
  Antisense strand to SEQ ID NO: 1688505
ugacauccaugucacauac

SEQ ID NO: 1688507 - RNA, 19 nt, Artificial Sequence
  Description of Artificial Sequence: Synthetic oligonucleotide
  Sense strand starting at position 3153 of SEQ ID NO: 1561657
augugacauggaugucauc

SEQ ID NO: 1688508 - RNA, 19 nt, Artificial Sequence
  Description of Artificial Sequence: Synthetic oligonucleotide
  Antisense strand to SEQ ID NO: 1688507
gaugacauccaugucacau

SEQ ID NO: 1688509 - RNA, 19 nt, Artificial Sequence
  Description of Artificial Sequence: Synthetic oligonucleotide
  Sense strand starting at position 3181 of SEQ ID NO: 1561657
gugacauguguguaacgua

SEQ ID NO: 1688510 - RNA, 19 nt, Artificial Sequence
  Description of Artificial Sequence: Synthetic oligonucleotide
  Antisense strand to SEQ ID NO: 1688509
uacguuacacacaugucac

SEQ ID NO: 1688511 - RNA, 19 nt, Artificial Sequence
  Description of Artificial Sequence: Synthetic oligonucleotide
  Sense strand starting at position 3261 of SEQ ID NO: 1561657
cacuuugugccuugugaua

SEQ ID NO: 1688512 - RNA, 19 nt, Artificial Sequence
  Description of Artificial Sequence: Synthetic oligonucleotide
  Antisense strand to SEQ ID NO: 1688511
uaucacaaggcacaaagug

SEQ ID NO: 1688513 - RNA, 19 nt, Artificial Sequence
  Description of Artificial Sequence: Synthetic oligonucleotide
  Sense strand starting at position 3446 of SEQ ID NO: 1561657
agucacuccucagcugaau

SEQ ID NO: 1688514 - RNA, 19 nt, Artificial Sequence
  Description of Artificial Sequence: Synthetic oligonucleotide
  Antisense strand to SEQ ID NO: 1688513
auucagcugaggagugacu

SEQ ID NO: 1688515 - RNA, 19 nt, Artificial Sequence
  Description of Artificial Sequence: Synthetic oligonucleotide
  Sense strand starting at position 3474 of SEQ ID NO: 1561657
agucacuccucagccgaaa

SEQ ID NO: 1688516 - RNA, 19 nt, Artificial Sequence
  Description of Artificial Sequence: Synthetic oligonucleotide
  Antisense strand to SEQ ID NO: 1688515
uuucggcugaggagugacu

SEQ ID NO: 1688517 - RNA, 19 nt, Artificial Sequence
  Description of Artificial Sequence: Synthetic oligonucleotide
  Sense strand starting at position 3488 of SEQ ID NO: 1561657
cgaaauacugcucagagcu

SEQ ID NO: 1688518 - RNA, 19 nt, Artificial Sequence
  Description of Artificial Sequence: Synthetic oligonucleotide
  Antisense strand to SEQ ID NO: 1688517
agcucugagcaguauuucg

SEQ ID NO: 1688519 - RNA, 19 nt, Artificial Sequence
  Description of Artificial Sequence: Synthetic oligonucleotide
  Sense strand starting at position 3638 of SEQ ID NO: 1561657
ucugcuuucccagagcuau

SEQ ID NO: 1688520 - RNA, 19 nt, Artificial Sequence
  Description of Artificial Sequence: Synthetic oligonucleotide
  Antisense strand to SEQ ID NO: 1688519
auagcucugggaaagcaga

SEQ ID NO: 1688521 - RNA, 19 nt, Artificial Sequence
  Description of Artificial Sequence: Synthetic oligonucleotide
  Sense strand starting at position 3687 of SEQ ID NO: 1561657
gaagcaggagcugguaaua

SEQ ID NO: 1688522 - RNA, 19 nt, Artificial Sequence
  Description of Artificial Sequence: Synthetic oligonucleotide
  Antisense strand to SEQ ID NO: 1688521
uauuaccagcuccugcuuc

SEQ ID NO: 1688523 - RNA, 19 nt, Artificial Sequence
  Description of Artificial Sequence: Synthetic oligonucleotide
  Sense strand starting at position 3805 of SEQ ID NO: 1561657
ggcacuugcuguuucuaaa

SEQ ID NO: 1688524 - RNA, 19 nt, Artificial Sequence
  Description of Artificial Sequence: Synthetic oligonucleotide
  Antisense strand to SEQ ID NO: 1688523
uuuagaaacagcaagugcc

SEQ ID NO: 1688525 - RNA, 19 nt, Artificial Sequence
  Description of Artificial Sequence: Synthetic oligonucleotide
  Sense strand starting at position 3943 of SEQ ID NO: 1561657
auagaaguugauugucacu

SEQ ID NO: 1688526 - RNA, 19 nt, Artificial Sequence
  Description of Artificial Sequence: Synthetic oligonucleotide
  Antisense strand to SEQ ID NO: 1688525
agugacaaucaacuucuau

SEQ ID NO: 1688527 - RNA, 19 nt, Artificial Sequence
  Description of Artificial Sequence: Synthetic oligonucleotide
  Sense strand starting at position 3945 of SEQ ID NO: 1561657
agaaguugauugucacuca

SEQ ID NO: 1688528 - RNA, 19 nt, Artificial Sequence
  Description of Artificial Sequence: Synthetic oligonucleotide
  Antisense strand to SEQ ID NO: 1688527
ugagugacaaucaacuucu

SEQ ID NO: 1688529 - RNA, 19 nt, Artificial Sequence
  Description of Artificial Sequence: Synthetic oligonucleotide
  Sense strand starting at position 3948 of SEQ ID NO: 1561657
aguugauugucacucagag

SEQ ID NO: 1688530 - RNA, 19 nt, Artificial Sequence
  Description of Artificial Sequence: Synthetic oligonucleotide
  Antisense strand to SEQ ID NO: 1688529
cucugagugacaaucaacu

SEQ ID NO: 1688531 - RNA, 19 nt, Artificial Sequence
  Description of Artificial Sequence: Synthetic oligonucleotide
  Sense strand starting at position 3964 of SEQ ID NO: 1561657
gagucauugcaccgcaaac

SEQ ID NO: 1688532 - RNA, 19 nt, Artificial Sequence
  Description of Artificial Sequence: Synthetic oligonucleotide
  Antisense strand to SEQ ID NO: 1688531
guuugcggugcaaugacuc

SEQ ID NO: 1688533 - RNA, 19 nt, Artificial Sequence
  Description of Artificial Sequence: Synthetic oligonucleotide
  Sense strand starting at position 3966 of SEQ ID NO: 1561657
gucauugcaccgcaaacaa

SEQ ID NO: 1688534 - RNA, 19 nt, Artificial Sequence
  Description of Artificial Sequence: Synthetic oligonucleotide
  Antisense strand to SEQ ID NO: 1688533
uuguuugcggugcaaugac

SEQ ID NO: 1688535 - RNA, 19 nt, Artificial Sequence
  Description of Artificial Sequence: Synthetic oligonucleotide
  Sense strand starting at position 1060 of SEQ ID NO: 1561658
ugacgaagcucaugaccau

SEQ ID NO: 1688536 - RNA, 19 nt, Artificial Sequence
  Description of Artificial Sequence: Synthetic oligonucleotide
  Antisense strand to SEQ ID NO: 1688535
auggucaugagcuucguca

SEQ ID NO: 1688537 - RNA, 19 nt, Artificial Sequence
  Description of Artificial Sequence: Synthetic oligonucleotide
  Sense strand starting at position 1294 of SEQ ID NO: 1561658
agaggaucucgcgcugcau

SEQ ID NO: 1688538 - RNA, 19 nt, Artificial Sequence
  Description of Artificial Sequence: Synthetic oligonucleotide
  Antisense strand to SEQ ID NO: 1688537
augcagcgcgagauccucu

SEQ ID NO: 1688539 - RNA, 19 nt, Artificial Sequence
  Description of Artificial Sequence: Synthetic oligonucleotide
  Sense strand starting at position 1363 of SEQ ID NO: 1561658
ccucguuguccaggcugaa

SEQ ID NO: 1688540 - RNA, 19 nt, Artificial Sequence
  Description of Artificial Sequence: Synthetic oligonucleotide
  Antisense strand to SEQ ID NO: 1688539
uucagccuggacaacgagg

SEQ ID NO: 1688541 - RNA, 19 nt, Artificial Sequence
  Description of Artificial Sequence: Synthetic oligonucleotide
  Sense strand starting at position 2127 of SEQ ID NO: 1561658
ucuagagcgcucgacaaau

SEQ ID NO: 1688542 - RNA, 19 nt, Artificial Sequence
  Description of Artificial Sequence: Synthetic oligonucleotide
  Antisense strand to SEQ ID NO: 1688541
auuugucgagcgcucuaga

SEQ ID NO: 1688543 - RNA, 19 nt, Artificial Sequence
  Description of Artificial Sequence: Synthetic oligonucleotide
  Sense strand starting at position 2129 of SEQ ID NO: 1561658
uagagcgcucgacaaaugu

SEQ ID NO: 1688544 - RNA, 19 nt, Artificial Sequence
  Description of Artificial Sequence: Synthetic oligonucleotide
  Antisense strand to SEQ ID NO: 1688543
acauuugucgagcgcucua

SEQ ID NO: 1688545 - RNA, 19 nt, Artificial Sequence
  Description of Artificial Sequence: Synthetic oligonucleotide
  Sense strand starting at position 2139 of SEQ ID NO: 1561658
gacaaauguuuacugagug

SEQ ID NO: 1688546 - RNA, 19 nt, Artificial Sequence
  Description of Artificial Sequence: Synthetic oligonucleotide
  Antisense strand to SEQ ID NO: 1688545
cacucaguaaacauuuguc

SEQ ID NO: 1688547 - RNA, 19 nt, Artificial Sequence
  Description of Artificial Sequence: Synthetic oligonucleotide
  Sense strand starting at position 2617 of SEQ ID NO: 1561658
uggaauugcuguuugaguu

SEQ ID NO: 1688548 - RNA, 19 nt, Artificial Sequence
  Description of Artificial Sequence: Synthetic oligonucleotide
  Antisense strand to SEQ ID NO: 1688547
aacucaaacagcaauucca

SEQ ID NO: 1688549 - RNA, 19 nt, Artificial Sequence
  Description of Artificial Sequence: Synthetic oligonucleotide
  Sense strand starting at position 2618 of SEQ ID NO: 1561658
ggaauugcuguuugaguua

SEQ ID NO: 1688550 - RNA, 19 nt, Artificial Sequence
  Description of Artificial Sequence: Synthetic oligonucleotide
  Antisense strand to SEQ ID NO: 1688549
uaacucaaacagcaauucc

SEQ ID NO: 1688551 - RNA, 19 nt, Artificial Sequence
  Description of Artificial Sequence: Synthetic oligonucleotide
  Sense strand starting at position 2629 of SEQ ID NO: 1561658
uugaguuacuccgugccuu

SEQ ID NO: 1688552 - RNA, 19 nt, Artificial Sequence
  Description of Artificial Sequence: Synthetic oligonucleotide
  Antisense strand to SEQ ID NO: 1688551
aaggcacggaguaacucaa

SEQ ID NO: 1688553 - RNA, 19 nt, Artificial Sequence
  Description of Artificial Sequence: Synthetic oligonucleotide
  Sense strand starting at position 2846 of SEQ ID NO: 1561658
cccuguaucuuuccagcca

SEQ ID NO: 1688554 - RNA, 19 nt, Artificial Sequence
  Description of Artificial Sequence: Synthetic oligonucleotide
  Antisense strand to SEQ ID NO: 1688553
uggcuggaaagauacaggg

SEQ ID NO: 1688555 - RNA, 19 nt, Artificial Sequence
  Description of Artificial Sequence: Synthetic oligonucleotide
  Sense strand starting at position 3117 of SEQ ID NO: 1561658
gugggaucucaagggaauu

SEQ ID NO: 1688556 - RNA, 19 nt, Artificial Sequence
  Description of Artificial Sequence: Synthetic oligonucleotide
  Antisense strand to SEQ ID NO: 1688555
aauucccuugagaucccac

SEQ ID NO: 1688557 - RNA, 19 nt, Artificial Sequence
  Description of Artificial Sequence: Synthetic oligonucleotide
  Sense strand starting at position 3343 of SEQ ID NO: 1561658
ggaagagaauuauggucuu

SEQ ID NO: 1688558 - RNA, 19 nt, Artificial Sequence
  Description of Artificial Sequence: Synthetic oligonucleotide
  Antisense strand to SEQ ID NO: 1688557
aagaccauaauucucuucc

SEQ ID NO: 1688559 - RNA, 19 nt, Artificial Sequence
  Description of Artificial Sequence: Synthetic oligonucleotide
  Sense strand starting at position 3346 of SEQ ID NO: 1561658
agagaauuauggucuucua

SEQ ID NO: 1688560 - RNA, 19 nt, Artificial Sequence
  Description of Artificial Sequence: Synthetic oligonucleotide
  Antisense strand to SEQ ID NO: 1688559
uagaagaccauaauucucu

SEQ ID NO: 1688561 - RNA, 19 nt, Artificial Sequence
  Description of Artificial Sequence: Synthetic oligonucleotide
  Sense strand starting at position 3349 of SEQ ID NO: 1561658
gaauuauggucuucuacag

SEQ ID NO: 1688562 - RNA, 19 nt, Artificial Sequence
  Description of Artificial Sequence: Synthetic oligonucleotide
  Antisense strand to SEQ ID NO: 1688561
cuguagaagaccauaauuc

SEQ ID NO: 1688563 - RNA, 19 nt, Artificial Sequence
  Description of Artificial Sequence: Synthetic oligonucleotide
  Sense strand starting at position 3377 of SEQ ID NO: 1561658
gcagaaguaguuuggccaa

SEQ ID NO: 1688564 - RNA, 19 nt, Artificial Sequence
  Description of Artificial Sequence: Synthetic oligonucleotide
  Antisense strand to SEQ ID NO: 1688563
uuggccaaacuacuucugc

SEQ ID NO: 1688565 - RNA, 19 nt, Artificial Sequence
  Description of Artificial Sequence: Synthetic oligonucleotide
  Sense strand starting at position 3379 of SEQ ID NO: 1561658
agaaguaguuuggccaagu

SEQ ID NO: 1688566 - RNA, 19 nt, Artificial Sequence
  Description of Artificial Sequence: Synthetic oligonucleotide
  Antisense strand to SEQ ID NO: 1688565
acuuggccaaacuacuucu

SEQ ID NO: 1688567 - RNA, 19 nt, Artificial Sequence
  Description of Artificial Sequence: Synthetic oligonucleotide
  Sense strand starting at position 3768 of SEQ ID NO: 1561658
cucugaggucaccauaugu

SEQ ID NO: 1688568 - RNA, 19 nt, Artificial Sequence
  Description of Artificial Sequence: Synthetic oligonucleotide
  Antisense strand to SEQ ID NO: 1688567
acauauggugaccucagag

SEQ ID NO: 1688569 - RNA, 19 nt, Artificial Sequence
  Description of Artificial Sequence: Synthetic oligonucleotide
  Sense strand starting at position 3772 of SEQ ID NO: 1561658
gaggucaccauaugugguu

SEQ ID NO: 1688570 - RNA, 19 nt, Artificial Sequence
  Description of Artificial Sequence: Synthetic oligonucleotide
  Antisense strand to SEQ ID NO: 1688569
aaccacauauggugaccuc

SEQ ID NO: 1688571 - RNA, 19 nt, Artificial Sequence
  Description of Artificial Sequence: Synthetic oligonucleotide
  Sense strand starting at position 3777 of SEQ ID NO: 1561658
caccauaugugguucugaa

SEQ ID NO: 1688572 - RNA, 19 nt, Artificial Sequence
  Description of Artificial Sequence: Synthetic oligonucleotide
  Antisense strand to SEQ ID NO: 1688571
uucagaaccacauauggug

SEQ ID NO: 1688573 - RNA, 19 nt, Artificial Sequence
  Description of Artificial Sequence: Synthetic oligonucleotide
  Sense strand starting at position 3787 of SEQ ID NO: 1561658
gguucugaaucaccuauga

SEQ ID NO: 1688574 - RNA, 19 nt, Artificial Sequence
  Description of Artificial Sequence: Synthetic oligonucleotide
  Antisense strand to SEQ ID NO: 1688573
ucauaggugauucagaacc

SEQ ID NO: 1688575 - RNA, 19 nt, Artificial Sequence
  Description of Artificial Sequence: Synthetic oligonucleotide
  Sense strand starting at position 3836 of SEQ ID NO: 1561658
gcaccuggcccagauauua

SEQ ID NO: 1688576 - RNA, 19 nt, Artificial Sequence
  Description of Artificial Sequence: Synthetic oligonucleotide
  Antisense strand to SEQ ID NO: 1688575
uaauaucugggccaggugc

SEQ ID NO: 1688577 - RNA, 19 nt, Artificial Sequence
  Description of Artificial Sequence: Synthetic oligonucleotide
  Sense strand starting at position 3846 of SEQ ID NO: 1561658
cagauauuauguggccagu

SEQ ID NO: 1688578 - RNA, 19 nt, Artificial Sequence
  Description of Artificial Sequence: Synthetic oligonucleotide
  Antisense strand to SEQ ID NO: 1688577
acuggccacauaauaucug

SEQ ID NO: 1688579 - RNA, 19 nt, Artificial Sequence
  Description of Artificial Sequence: Synthetic oligonucleotide
  Sense strand starting at position 142 of SEQ ID NO: 1561659
guccuaauggcaggaauuc

SEQ ID NO: 1688580 - RNA, 19 nt, Artificial Sequence
  Description of Artificial Sequence: Synthetic oligonucleotide
  Antisense strand to SEQ ID NO: 1688579
gaauuccugccauuaggac

SEQ ID NO: 1688581 - RNA, 19 nt, Artificial Sequence
  Description of Artificial Sequence: Synthetic oligonucleotide
  Sense strand starting at position 169 of SEQ ID NO: 1561659
guuauaauguggcuaacag

SEQ ID NO: 1688582 - RNA, 19 nt, Artificial Sequence
  Description of Artificial Sequence: Synthetic oligonucleotide
  Antisense strand to SEQ ID NO: 1688581
cuguuagccacauuauaac

SEQ ID NO: 1688583 - RNA, 19 nt, Artificial Sequence
  Description of Artificial Sequence: Synthetic oligonucleotide
  Sense strand starting at position 209 of SEQ ID NO: 1561659
gcagacacauuaccugaaa

SEQ ID NO: 1688584 - RNA, 19 nt, Artificial Sequence
  Description of Artificial Sequence: Synthetic oligonucleotide
  Antisense strand to SEQ ID NO: 1688583
uuucagguaaugugucugc

SEQ ID NO: 1688585 - RNA, 19 nt, Artificial Sequence
  Description of Artificial Sequence: Synthetic oligonucleotide
  Sense strand starting at position 300 of SEQ ID NO: 1561659
augaaauguaucgagcuuu

SEQ ID NO: 1688586 - RNA, 19 nt, Artificial Sequence
  Description of Artificial Sequence: Synthetic oligonucleotide
  Antisense strand to SEQ ID NO: 1688585
aaagcucgauacauuucau

SEQ ID NO: 1688587 - RNA, 19 nt, Artificial Sequence
  Description of Artificial Sequence: Synthetic oligonucleotide
  Sense strand starting at position 312 of SEQ ID NO: 1561659
gagcuuuacucugugccaa

SEQ ID NO: 1688588 - RNA, 19 nt, Artificial Sequence
  Description of Artificial Sequence: Synthetic oligonucleotide
  Antisense strand to SEQ ID NO: 1688587
uuggcacagaguaaagcuc

SEQ ID NO: 1688589 - RNA, 19 nt, Artificial Sequence
  Description of Artificial Sequence: Synthetic oligonucleotide
  Sense strand starting at position 339 of SEQ ID NO: 1561659
cuaggcuccguauauguau

SEQ ID NO: 1688590 - RNA, 19 nt, Artificial Sequence
  Description of Artificial Sequence: Synthetic oligonucleotide
  Antisense strand to SEQ ID NO: 1688589
auacauauacggagccuag

SEQ ID NO: 1688591 - RNA, 19 nt, Artificial Sequence
  Description of Artificial Sequence: Synthetic oligonucleotide
  Sense strand starting at position 345 of SEQ ID NO: 1561659
uccguauauguaugaauuu

SEQ ID NO: 1688592 - RNA, 19 nt, Artificial Sequence
  Description of Artificial Sequence: Synthetic oligonucleotide
  Antisense strand to SEQ ID NO: 1688591
aaauucauacauauacgga

SEQ ID NO: 1688593 - RNA, 19 nt, Artificial Sequence
  Description of Artificial Sequence: Synthetic oligonucleotide
  Sense strand starting at position 363 of SEQ ID NO: 1561659
uguacaauccuaggaagua

SEQ ID NO: 1688594 - RNA, 19 nt, Artificial Sequence
  Description of Artificial Sequence: Synthetic oligonucleotide
  Antisense strand to SEQ ID NO: 1688593
uacuuccuaggauuguaca

SEQ ID NO: 1688595 - RNA, 19 nt, Artificial Sequence
  Description of Artificial Sequence: Synthetic oligonucleotide
  Sense strand starting at position 502 of SEQ ID NO: 1561659
gagcccaugcccuagagaa

SEQ ID NO: 1688596 - RNA, 19 nt, Artificial Sequence
  Description of Artificial Sequence: Synthetic oligonucleotide
  Antisense strand to SEQ ID NO: 1688595
uucucuagggcaugggcuc

SEQ ID NO: 1688597 - RNA, 19 nt, Artificial Sequence
  Description of Artificial Sequence: Synthetic oligonucleotide
  Sense strand starting at position 548 of SEQ ID NO: 1561659
acacauaacuggucacugu

SEQ ID NO: 1688598 - RNA, 19 nt, Artificial Sequence
  Description of Artificial Sequence: Synthetic oligonucleotide
  Antisense strand to SEQ ID NO: 1688597
acagugaccaguuaugugu

SEQ ID NO: 1688599 - RNA, 19 nt, Artificial Sequence
  Description of Artificial Sequence: Synthetic oligonucleotide
  Sense strand starting at position 559 of SEQ ID NO: 1561659
gucacuguguggagggaaa

SEQ ID NO: 1688600 - RNA, 19 nt, Artificial Sequence
  Description of Artificial Sequence: Synthetic oligonucleotide
  Antisense strand to SEQ ID NO: 1688599
uuucccuccacacagugac

SEQ ID NO: 1688601 - RNA, 19 nt, Artificial Sequence
  Description of Artificial Sequence: Synthetic oligonucleotide
  Sense strand starting at position 590 of SEQ ID NO: 1561659
guggccaggaucuguaagu

SEQ ID NO: 1688602 - RNA, 19 nt, Artificial Sequence
  Description of Artificial Sequence: Synthetic oligonucleotide
  Antisense strand to SEQ ID NO: 1688601
acuuacagauccuggccac

SEQ ID NO: 1688603 - RNA, 19 nt, Artificial Sequence
  Description of Artificial Sequence: Synthetic oligonucleotide
  Sense strand starting at position 591 of SEQ ID NO: 1561659
uggccaggaucuguaaguu

SEQ ID NO: 1688604 - RNA, 19 nt, Artificial Sequence
  Description of Artificial Sequence: Synthetic oligonucleotide
  Antisense strand to SEQ ID NO: 1688603
aacuuacagauccuggcca

SEQ ID NO: 1688605 - RNA, 19 nt, Artificial Sequence
  Description of Artificial Sequence: Synthetic oligonucleotide
  Sense strand starting at position 595 of SEQ ID NO: 1561659
caggaucuguaaguugaca

SEQ ID NO: 1688606 - RNA, 19 nt, Artificial Sequence
  Description of Artificial Sequence: Synthetic oligonucleotide
  Antisense strand to SEQ ID NO: 1688605
ugucaacuuacagauccug

SEQ ID NO: 1688607 - RNA, 19 nt, Artificial Sequence
  Description of Artificial Sequence: Synthetic oligonucleotide
  Sense strand starting at position 1160 of SEQ ID NO: 1561659
acuucucacguguaaaugu

SEQ ID NO: 1688608 - RNA, 19 nt, Artificial Sequence
  Description of Artificial Sequence: Synthetic oligonucleotide
  Antisense strand to SEQ ID NO: 1688607
acauuuacacgugagaagu

SEQ ID NO: 1688609 - RNA, 19 nt, Artificial Sequence
  Description of Artificial Sequence: Synthetic oligonucleotide
  Sense strand starting at position 1168 of SEQ ID NO: 1561659
cguguaaauguggauagca

SEQ ID NO: 1688610 - RNA, 19 nt, Artificial Sequence
  Description of Artificial Sequence: Synthetic oligonucleotide
  Antisense strand to SEQ ID NO: 1688609
ugcuauccacauuuacacg

SEQ ID NO: 1688611 - RNA, 19 nt, Artificial Sequence
  Description of Artificial Sequence: Synthetic oligonucleotide
  Sense strand starting at position 1325 of SEQ ID NO: 1561659
cuuugugucacccagugga

SEQ ID NO: 1688612 - RNA, 19 nt, Artificial Sequence
  Description of Artificial Sequence: Synthetic oligonucleotide
  Antisense strand to SEQ ID NO: 1688611
uccacugggugacacaaag

SEQ ID NO: 1688613 - RNA, 19 nt, Artificial Sequence
  Description of Artificial Sequence: Synthetic oligonucleotide
  Sense strand starting at position 1467 of SEQ ID NO: 1561659
gagaacuggcuuuggaaag

SEQ ID NO: 1688614 - RNA, 19 nt, Artificial Sequence
  Description of Artificial Sequence: Synthetic oligonucleotide
  Antisense strand to SEQ ID NO: 1688613
cuuuccaaagccaguucuc

SEQ ID NO: 1688615 - RNA, 19 nt, Artificial Sequence
  Description of Artificial Sequence: Synthetic oligonucleotide
  Sense strand starting at position 1493 of SEQ ID NO: 1561659
gggcuuauaagucaaaggu

SEQ ID NO: 1688616 - RNA, 19 nt, Artificial Sequence
  Description of Artificial Sequence: Synthetic oligonucleotide
  Antisense strand to SEQ ID NO: 1688615
accuuugacuuauaagccc

SEQ ID NO: 1688617 - RNA, 19 nt, Artificial Sequence
  Description of Artificial Sequence: Synthetic oligonucleotide
  Sense strand starting at position 1555 of SEQ ID NO: 1561659
gggucugagcacuggacuu

SEQ ID NO: 1688618 - RNA, 19 nt, Artificial Sequence
  Description of Artificial Sequence: Synthetic oligonucleotide
  Antisense strand to SEQ ID NO: 1688617
aaguccagugcucagaccc

SEQ ID NO: 1688619 - RNA, 19 nt, Artificial Sequence
  Description of Artificial Sequence: Synthetic oligonucleotide
  Sense strand starting at position 1571 of SEQ ID NO: 1561659
cuuggaguccucuagacca

SEQ ID NO: 1688620 - RNA, 19 nt, Artificial Sequence
  Description of Artificial Sequence: Synthetic oligonucleotide
  Antisense strand to SEQ ID NO: 1688619
uggucuagaggacuccaag

SEQ ID NO: 1688621 - RNA, 19 nt, Artificial Sequence
  Description of Artificial Sequence: Synthetic oligonucleotide
  Sense strand starting at position 1573 of SEQ ID NO: 1561659
uggaguccucuagaccagu

SEQ ID NO: 1688622 - RNA, 19 nt, Artificial Sequence
  Description of Artificial Sequence: Synthetic oligonucleotide
  Antisense strand to SEQ ID NO: 1688621
acuggucuagaggacucca

SEQ ID NO: 1688623 - RNA, 19 nt, Artificial Sequence
  Description of Artificial Sequence: Synthetic oligonucleotide
  Sense strand starting at position 1783 of SEQ ID NO: 1561659
gaggcauccaguuaccgua

SEQ ID NO: 1688624 - RNA, 19 nt, Artificial Sequence
  Description of Artificial Sequence: Synthetic oligonucleotide
  Antisense strand to SEQ ID NO: 1688623
uacgguaacuggaugccuc

SEQ ID NO: 1688625 - RNA, 19 nt, Artificial Sequence
  Description of Artificial Sequence: Synthetic oligonucleotide
  Sense strand starting at position 2008 of SEQ ID NO: 1561659
aaaugcaagucaguagaau

SEQ ID NO: 1688626 - RNA, 19 nt, Artificial Sequence
  Description of Artificial Sequence: Synthetic oligonucleotide
  Antisense strand to SEQ ID NO: 1688625
auucuacugacuugcauuu

SEQ ID NO: 1688627 - RNA, 19 nt, Artificial Sequence
  Description of Artificial Sequence: Synthetic oligonucleotide
  Sense strand starting at position 2009 of SEQ ID NO: 1561659
aaugcaagucaguagaaug

SEQ ID NO: 1688628 - RNA, 19 nt, Artificial Sequence
  Description of Artificial Sequence: Synthetic oligonucleotide
  Antisense strand to SEQ ID NO: 1688627
cauucuacugacuugcauu

SEQ ID NO: 1688629 - RNA, 19 nt, Artificial Sequence
  Description of Artificial Sequence: Synthetic oligonucleotide
  Sense strand starting at position 2014 of SEQ ID NO: 1561659
aagucaguagaauguggaa

SEQ ID NO: 1688630 - RNA, 19 nt, Artificial Sequence
  Description of Artificial Sequence: Synthetic oligonucleotide
  Antisense strand to SEQ ID NO: 1688629
uuccacauucuacugacuu

SEQ ID NO: 1688631 - RNA, 19 nt, Artificial Sequence
  Description of Artificial Sequence: Synthetic oligonucleotide
  Sense strand starting at position 2277 of SEQ ID NO: 1561659
guggguggcacagacauaa

SEQ ID NO: 1688632 - RNA, 19 nt, Artificial Sequence
  Description of Artificial Sequence: Synthetic oligonucleotide
  Antisense strand to SEQ ID NO: 1688631
uuaugucugugccacccac

SEQ ID NO: 1688633 - RNA, 19 nt, Artificial Sequence
  Description of Artificial Sequence: Synthetic oligonucleotide
  Sense strand starting at position 2431 of SEQ ID NO: 1561659
cuaguaucuuggcuauggu

SEQ ID NO: 1688634 - RNA, 19 nt, Artificial Sequence
  Description of Artificial Sequence: Synthetic oligonucleotide
  Antisense strand to SEQ ID NO: 1688633
accauagccaagauacuag

SEQ ID NO: 1688635 - RNA, 19 nt, Artificial Sequence
  Description of Artificial Sequence: Synthetic oligonucleotide
  Sense strand starting at position 2523 of SEQ ID NO: 1561659
uucucuucugcagaagaga

SEQ ID NO: 1688636 - RNA, 19 nt, Artificial Sequence
  Description of Artificial Sequence: Synthetic oligonucleotide
  Antisense strand to SEQ ID NO: 1688635
ucucuucugcagaagagaa

SEQ ID NO: 1688637 - RNA, 19 nt, Artificial Sequence
  Description of Artificial Sequence: Synthetic oligonucleotide
  Sense strand starting at position 2737 of SEQ ID NO: 1561659
cucccucuuccggagacaa

SEQ ID NO: 1688638 - RNA, 19 nt, Artificial Sequence
  Description of Artificial Sequence: Synthetic oligonucleotide
  Antisense strand to SEQ ID NO: 1688637
uugucuccggaagagggag

SEQ ID NO: 1688639 - RNA, 19 nt, Artificial Sequence
  Description of Artificial Sequence: Synthetic oligonucleotide
  Sense strand starting at position 2841 of SEQ ID NO: 1561659
augggaucaccuggucagu

SEQ ID NO: 1688640 - RNA, 19 nt, Artificial Sequence
  Description of Artificial Sequence: Synthetic oligonucleotide
  Antisense strand to SEQ ID NO: 1688639
acugaccaggugaucccau

SEQ ID NO: 1688641 - RNA, 19 nt, Artificial Sequence
  Description of Artificial Sequence: Synthetic oligonucleotide
  Sense strand starting at position 2843 of SEQ ID NO: 1561659
gggaucaccuggucaguuu

SEQ ID NO: 1688642 - RNA, 19 nt, Artificial Sequence
  Description of Artificial Sequence: Synthetic oligonucleotide
  Antisense strand to SEQ ID NO: 1688641
aaacugaccaggugauccc

SEQ ID NO: 1688643 - RNA, 19 nt, Artificial Sequence
  Description of Artificial Sequence: Synthetic oligonucleotide
  Sense strand starting at position 2851 of SEQ ID NO: 1561659
cuggucaguuugguaaagu

SEQ ID NO: 1688644 - RNA, 19 nt, Artificial Sequence
  Description of Artificial Sequence: Synthetic oligonucleotide
  Antisense strand to SEQ ID NO: 1688643
acuuuaccaaacugaccag

SEQ ID NO: 1688645 - RNA, 19 nt, Artificial Sequence
  Description of Artificial Sequence: Synthetic oligonucleotide
  Sense strand starting at position 2988 of SEQ ID NO: 1561659
uccuuuggcagauguagaa

SEQ ID NO: 1688646 - RNA, 19 nt, Artificial Sequence
  Description of Artificial Sequence: Synthetic oligonucleotide
  Antisense strand to SEQ ID NO: 1688645
uucuacaucugccaaagga

SEQ ID NO: 1688647 - RNA, 19 nt, Artificial Sequence
  Description of Artificial Sequence: Synthetic oligonucleotide
  Sense strand starting at position 3464 of SEQ ID NO: 1561659
cucuucguuugguucuaaa

SEQ ID NO: 1688648 - RNA, 19 nt, Artificial Sequence
  Description of Artificial Sequence: Synthetic oligonucleotide
  Antisense strand to SEQ ID NO: 1688647
uuuagaaccaaacgaagag

SEQ ID NO: 1688649 - RNA, 19 nt, Artificial Sequence
  Description of Artificial Sequence: Synthetic oligonucleotide
  Sense strand starting at position 3683 of SEQ ID NO: 1561659
uuauuauugagaugagguc

SEQ ID NO: 1688650 - RNA, 19 nt, Artificial Sequence
  Description of Artificial Sequence: Synthetic oligonucleotide
  Antisense strand to SEQ ID NO: 1688649
gaccucaucucaauaauaa

SEQ ID NO: 1688651 - RNA, 19 nt, Artificial Sequence
  Description of Artificial Sequence: Synthetic oligonucleotide
  Sense strand starting at position 3833 of SEQ ID NO: 1561659
cugagaugcagcgaucaca

SEQ ID NO: 1688652 - RNA, 19 nt, Artificial Sequence
  Description of Artificial Sequence: Synthetic oligonucleotide
  Antisense strand to SEQ ID NO: 1688651
ugugaucgcugcaucucag

SEQ ID NO: 1688653 - RNA, 19 nt, Artificial Sequence
  Description of Artificial Sequence: Synthetic oligonucleotide
  Sense strand starting at position 3843 of SEQ ID NO: 1561659
gcgaucacaucacugucau

SEQ ID NO: 1688654 - RNA, 19 nt, Artificial Sequence
  Description of Artificial Sequence: Synthetic oligonucleotide
  Antisense strand to SEQ ID NO: 1688653
augacagugaugugaucgc

SEQ ID NO: 1688655 - RNA, 19 nt, Artificial Sequence
  Description of Artificial Sequence: Synthetic oligonucleotide
  Sense strand starting at position 3980 of SEQ ID NO: 1561659
gacucagaugucugcaucu

SEQ ID NO: 1688656 - RNA, 19 nt, Artificial Sequence
  Description of Artificial Sequence: Synthetic oligonucleotide
  Antisense strand to SEQ ID NO: 1688655
agaugcagacaucugaguc

SEQ ID NO: 1688657 - RNA, 19 nt, Artificial Sequence
  Description of Artificial Sequence: Synthetic oligonucleotide
  Sense strand starting at position 3982 of SEQ ID NO: 1561659
cucagaugucugcaucugu

SEQ ID NO: 1688658 - RNA, 19 nt, Artificial Sequence
  Description of Artificial Sequence: Synthetic oligonucleotide
  Antisense strand to SEQ ID NO: 1688657
acagaugcagacaucugag

SEQ ID NO: 1688659 - RNA, 19 nt, Artificial Sequence
  Description of Artificial Sequence: Synthetic oligonucleotide
  Sense strand starting at position 295 of SEQ ID NO: 1561660
uaguaucuguggccagaau

SEQ ID NO: 1688660 - RNA, 19 nt, Artificial Sequence
  Description of Artificial Sequence: Synthetic oligonucleotide
  Antisense strand to SEQ ID NO: 1688659
auucuggccacagauacua

SEQ ID NO: 1688661 - RNA, 19 nt, Artificial Sequence
  Description of Artificial Sequence: Synthetic oligonucleotide
  Sense strand starting at position 425 of SEQ ID NO: 1561660
gcuaauacugcugaacaau

SEQ ID NO: 1688662 - RNA, 19 nt, Artificial Sequence
  Description of Artificial Sequence: Synthetic oligonucleotide
  Antisense strand to SEQ ID NO: 1688661
auuguucagcaguauuagc

SEQ ID NO: 1688663 - RNA, 19 nt, Artificial Sequence
  Description of Artificial Sequence: Synthetic oligonucleotide
  Sense strand starting at position 838 of SEQ ID NO: 1561660
aggugaacccucgguuaaa

SEQ ID NO: 1688664 - RNA, 19 nt, Artificial Sequence
  Description of Artificial Sequence: Synthetic oligonucleotide
  Antisense strand to SEQ ID NO: 1688663
uuuaaccgaggguucaccu

SEQ ID NO: 1688665 - RNA, 19 nt, Artificial Sequence
  Description of Artificial Sequence: Synthetic oligonucleotide
  Sense strand starting at position 839 of SEQ ID NO: 1561660
ggugaacccucgguuaaau

SEQ ID NO: 1688666 - RNA, 19 nt, Artificial Sequence
  Description of Artificial Sequence: Synthetic oligonucleotide
  Antisense strand to SEQ ID NO: 1688665
auuuaaccgaggguucacc

SEQ ID NO: 1688667 - RNA, 19 nt, Artificial Sequence
  Description of Artificial Sequence: Synthetic oligonucleotide
  Sense strand starting at position 841 of SEQ ID NO: 1561660
ugaacccucgguuaaauua

SEQ ID NO: 1688668 - RNA, 19 nt, Artificial Sequence
  Description of Artificial Sequence: Synthetic oligonucleotide
  Antisense strand to SEQ ID NO: 1688667
uaauuuaaccgaggguuca

SEQ ID NO: 1688669 - RNA, 19 nt, Artificial Sequence
  Description of Artificial Sequence: Synthetic oligonucleotide
  Sense strand starting at position 849 of SEQ ID NO: 1561660
cgguuaaauuaaguaacca

SEQ ID NO: 1688670 - RNA, 19 nt, Artificial Sequence
  Description of Artificial Sequence: Synthetic oligonucleotide
  Antisense strand to SEQ ID NO: 1688669
ugguuacuuaauuuaaccg

SEQ ID NO: 1688671 - RNA, 19 nt, Artificial Sequence
  Description of Artificial Sequence: Synthetic oligonucleotide
  Sense strand starting at position 953 of SEQ ID NO: 1561660
gcaagugcugaagaauuga

SEQ ID NO: 1688672 - RNA, 19 nt, Artificial Sequence
  Description of Artificial Sequence: Synthetic oligonucleotide
  Antisense strand to SEQ ID NO: 1688671
ucaauucuucagcacuugc

SEQ ID NO: 1688673 - RNA, 19 nt, Artificial Sequence
  Description of Artificial Sequence: Synthetic oligonucleotide
  Sense strand starting at position 1028 of SEQ ID NO: 1561660
gguggaugcccuugaaagu

SEQ ID NO: 1688674 - RNA, 19 nt, Artificial Sequence
  Description of Artificial Sequence: Synthetic oligonucleotide
  Antisense strand to SEQ ID NO: 1688673
acuuucaagggcauccacc

SEQ ID NO: 1688675 - RNA, 19 nt, Artificial Sequence
  Description of Artificial Sequence: Synthetic oligonucleotide
  Sense strand starting at position 1414 of SEQ ID NO: 1561660
acuggugacuuugugcaaa

SEQ ID NO: 1688676 - RNA, 19 nt, Artificial Sequence
  Description of Artificial Sequence: Synthetic oligonucleotide
  Antisense strand to SEQ ID NO: 1688675
uuugcacaaagucaccagu

SEQ ID NO: 1688677 - RNA, 19 nt, Artificial Sequence
  Description of Artificial Sequence: Synthetic oligonucleotide
  Sense strand starting at position 1436 of SEQ ID NO: 1561660
ccaucuauuggcugacuca

SEQ ID NO: 1688678 - RNA, 19 nt, Artificial Sequence
  Description of Artificial Sequence: Synthetic oligonucleotide
  Antisense strand to SEQ ID NO: 1688677
ugagucagccaauagaugg

SEQ ID NO: 1688679 - RNA, 19 nt, Artificial Sequence
  Description of Artificial Sequence: Synthetic oligonucleotide
  Sense strand starting at position 1445 of SEQ ID NO: 1561660
ggcugacucagcuaaagcu

SEQ ID NO: 1688680 - RNA, 19 nt, Artificial Sequence
  Description of Artificial Sequence: Synthetic oligonucleotide
  Antisense strand to SEQ ID NO: 1688679
agcuuuagcugagucagcc

SEQ ID NO: 1688681 - RNA, 19 nt, Artificial Sequence
  Description of Artificial Sequence: Synthetic oligonucleotide
  Sense strand starting at position 1483 of SEQ ID NO: 1561660
cuggaaaugaaaggucuuu

SEQ ID NO: 1688682 - RNA, 19 nt, Artificial Sequence
  Description of Artificial Sequence: Synthetic oligonucleotide
  Antisense strand to SEQ ID NO: 1688681
aaagaccuuucauuuccag

SEQ ID NO: 1688683 - RNA, 19 nt, Artificial Sequence
  Description of Artificial Sequence: Synthetic oligonucleotide
  Sense strand starting at position 1489 of SEQ ID NO: 1561660
augaaaggucuuuggucca

SEQ ID NO: 1688684 - RNA, 19 nt, Artificial Sequence
  Description of Artificial Sequence: Synthetic oligonucleotide
  Antisense strand to SEQ ID NO: 1688683
uggaccaaagaccuuucau

SEQ ID NO: 1688685 - RNA, 19 nt, Artificial Sequence
  Description of Artificial Sequence: Synthetic oligonucleotide
  Sense strand starting at position 1492 of SEQ ID NO: 1561660
aaaggucuuugguccaaag

SEQ ID NO: 1688686 - RNA, 19 nt, Artificial Sequence
  Description of Artificial Sequence: Synthetic oligonucleotide
  Antisense strand to SEQ ID NO: 1688685
cuuuggaccaaagaccuuu

SEQ ID NO: 1688687 - RNA, 19 nt, Artificial Sequence
  Description of Artificial Sequence: Synthetic oligonucleotide
  Sense strand starting at position 1494 of SEQ ID NO: 1561660
aggucuuugguccaaagag

SEQ ID NO: 1688688 - RNA, 19 nt, Artificial Sequence
  Description of Artificial Sequence: Synthetic oligonucleotide
  Antisense strand to SEQ ID NO: 1688687
cucuuuggaccaaagaccu

SEQ ID NO: 1688689 - RNA, 19 nt, Artificial Sequence
  Description of Artificial Sequence: Synthetic oligonucleotide
  Sense strand starting at position 1512 of SEQ ID NO: 1561660
gccaguugugcccuucuua

SEQ ID NO: 1688690 - RNA, 19 nt, Artificial Sequence
  Description of Artificial Sequence: Synthetic oligonucleotide
  Antisense strand to SEQ ID NO: 1688689
uaagaagggcacaacuggc

SEQ ID NO: 1688691 - RNA, 19 nt, Artificial Sequence
  Description of Artificial Sequence: Synthetic oligonucleotide
  Sense strand starting at position 1521 of SEQ ID NO: 1561660
gcccuucuuagggagguaa

SEQ ID NO: 1688692 - RNA, 19 nt, Artificial Sequence
  Description of Artificial Sequence: Synthetic oligonucleotide
  Antisense strand to SEQ ID NO: 1688691
uuaccucccuaagaagggc

SEQ ID NO: 1688693 - RNA, 19 nt, Artificial Sequence
  Description of Artificial Sequence: Synthetic oligonucleotide
  Sense strand starting at position 1668 of SEQ ID NO: 1561660
uuuggaucaucuguaucca

SEQ ID NO: 1688694 - RNA, 19 nt, Artificial Sequence
  Description of Artificial Sequence: Synthetic oligonucleotide
  Antisense strand to SEQ ID NO: 1688693
uggauacagaugauccaaa

SEQ ID NO: 1688695 - RNA, 19 nt, Artificial Sequence
  Description of Artificial Sequence: Synthetic oligonucleotide
  Sense strand starting at position 1764 of SEQ ID NO: 1561660
uguuacuggucucuuagga

SEQ ID NO: 1688696 - RNA, 19 nt, Artificial Sequence
  Description of Artificial Sequence: Synthetic oligonucleotide
  Antisense strand to SEQ ID NO: 1688695
uccuaagagaccaguaaca

SEQ ID NO: 1688697 - RNA, 19 nt, Artificial Sequence
  Description of Artificial Sequence: Synthetic oligonucleotide
  Sense strand starting at position 1847 of SEQ ID NO: 1561660
cccagugagugaucaagau

SEQ ID NO: 1688698 - RNA, 19 nt, Artificial Sequence
  Description of Artificial Sequence: Synthetic oligonucleotide
  Antisense strand to SEQ ID NO: 1688697
aucuugaucacucacuggg

SEQ ID NO: 1688699 - RNA, 19 nt, Artificial Sequence
  Description of Artificial Sequence: Synthetic oligonucleotide
  Sense strand starting at position 1999 of SEQ ID NO: 1561660
cucacuucugccgaggagu

SEQ ID NO: 1688700 - RNA, 19 nt, Artificial Sequence
  Description of Artificial Sequence: Synthetic oligonucleotide
  Antisense strand to SEQ ID NO: 1688699
acuccucggcagaagugag

SEQ ID NO: 1688701 - RNA, 19 nt, Artificial Sequence
  Description of Artificial Sequence: Synthetic oligonucleotide
  Sense strand starting at position 2058 of SEQ ID NO: 1561660
ggugauggguuucuagaua

SEQ ID NO: 1688702 - RNA, 19 nt, Artificial Sequence
  Description of Artificial Sequence: Synthetic oligonucleotide
  Antisense strand to SEQ ID NO: 1688701
uaucuagaaacccaucacc

SEQ ID NO: 1688703 - RNA, 19 nt, Artificial Sequence
  Description of Artificial Sequence: Synthetic oligonucleotide
  Sense strand starting at position 2066 of SEQ ID NO: 1561660
guuucuagauaauugagaa

SEQ ID NO: 1688704 - RNA, 19 nt, Artificial Sequence
  Description of Artificial Sequence: Synthetic oligonucleotide
  Antisense strand to SEQ ID NO: 1688703
uucucaauuaucuagaaac

SEQ ID NO: 1688705 - RNA, 19 nt, Artificial Sequence
  Description of Artificial Sequence: Synthetic oligonucleotide
  Sense strand starting at position 2078 of SEQ ID NO: 1561660
uugagaauucugcaaucug

SEQ ID NO: 1688706 - RNA, 19 nt, Artificial Sequence
  Description of Artificial Sequence: Synthetic oligonucleotide
  Antisense strand to SEQ ID NO: 1688705
cagauugcagaauucucaa

SEQ ID NO: 1688707 - RNA, 19 nt, Artificial Sequence
  Description of Artificial Sequence: Synthetic oligonucleotide
  Sense strand starting at position 2136 of SEQ ID NO: 1561660
aucacauuagcaggugaga

SEQ ID NO: 1688708 - RNA, 19 nt, Artificial Sequence
  Description of Artificial Sequence: Synthetic oligonucleotide
  Antisense strand to SEQ ID NO: 1688707
ucucaccugcuaaugugau

SEQ ID NO: 1688709 - RNA, 19 nt, Artificial Sequence
  Description of Artificial Sequence: Synthetic oligonucleotide
  Sense strand starting at position 2147 of SEQ ID NO: 1561660
aggugagacaguuaagcua

SEQ ID NO: 1688710 - RNA, 19 nt, Artificial Sequence
  Description of Artificial Sequence: Synthetic oligonucleotide
  Antisense strand to SEQ ID NO: 1688709
uagcuuaacugucucaccu

SEQ ID NO: 1688711 - RNA, 19 nt, Artificial Sequence
  Description of Artificial Sequence: Synthetic oligonucleotide
  Sense strand starting at position 2155 of SEQ ID NO: 1561660
caguuaagcuauuugguca

SEQ ID NO: 1688712 - RNA, 19 nt, Artificial Sequence
  Description of Artificial Sequence: Synthetic oligonucleotide
  Antisense strand to SEQ ID NO: 1688711
ugaccaaauagcuuaacug

SEQ ID NO: 1688713 - RNA, 19 nt, Artificial Sequence
  Description of Artificial Sequence: Synthetic oligonucleotide
  Sense strand starting at position 2266 of SEQ ID NO: 1561660
gguagcuuggagcauugaa

SEQ ID NO: 1688714 - RNA, 19 nt, Artificial Sequence
  Description of Artificial Sequence: Synthetic oligonucleotide
  Antisense strand to SEQ ID NO: 1688713
uucaaugcuccaagcuacc

SEQ ID NO: 1688715 - RNA, 19 nt, Artificial Sequence
  Description of Artificial Sequence: Synthetic oligonucleotide
  Sense strand starting at position 2372 of SEQ ID NO: 1561660
ggaggauucuuucuccuaa

SEQ ID NO: 1688716 - RNA, 19 nt, Artificial Sequence
  Description of Artificial Sequence: Synthetic oligonucleotide
  Antisense strand to SEQ ID NO: 1688715
uuaggagaaagaauccucc

SEQ ID NO: 1688717 - RNA, 19 nt, Artificial Sequence
  Description of Artificial Sequence: Synthetic oligonucleotide
  Sense strand starting at position 2487 of SEQ ID NO: 1561660
gcucucuguccucacaaga

SEQ ID NO: 1688718 - RNA, 19 nt, Artificial Sequence
  Description of Artificial Sequence: Synthetic oligonucleotide
  Antisense strand to SEQ ID NO: 1688717
ucuugugaggacagagagc

SEQ ID NO: 1688719 - RNA, 19 nt, Artificial Sequence
  Description of Artificial Sequence: Synthetic oligonucleotide
  Sense strand starting at position 2518 of SEQ ID NO: 1561660
agaggugacuccuccucuu

SEQ ID NO: 1688720 - RNA, 19 nt, Artificial Sequence
  Description of Artificial Sequence: Synthetic oligonucleotide
  Antisense strand to SEQ ID NO: 1688719
aagaggaggagucaccucu

SEQ ID NO: 1688721 - RNA, 19 nt, Artificial Sequence
  Description of Artificial Sequence: Synthetic oligonucleotide
  Sense strand starting at position 2662 of SEQ ID NO: 1561660
ggccgagcuccugcuguau

SEQ ID NO: 1688722 - RNA, 19 nt, Artificial Sequence
  Description of Artificial Sequence: Synthetic oligonucleotide
  Antisense strand to SEQ ID NO: 1688721
auacagcaggagcucggcc

SEQ ID NO: 1688723 - RNA, 19 nt, Artificial Sequence
  Description of Artificial Sequence: Synthetic oligonucleotide
  Sense strand starting at position 2774 of SEQ ID NO: 1561660
gaggcaaguuguccagaga

SEQ ID NO: 1688724 - RNA, 19 nt, Artificial Sequence
  Description of Artificial Sequence: Synthetic oligonucleotide
  Antisense strand to SEQ ID NO: 1688723
ucucuggacaacuugccuc

SEQ ID NO: 1688725 - RNA, 19 nt, Artificial Sequence
  Description of Artificial Sequence: Synthetic oligonucleotide
  Sense strand starting at position 2775 of SEQ ID NO: 1561660
aggcaaguuguccagagau

SEQ ID NO: 1688726 - RNA, 19 nt, Artificial Sequence
  Description of Artificial Sequence: Synthetic oligonucleotide
  Antisense strand to SEQ ID NO: 1688725
aucucuggacaacuugccu

SEQ ID NO: 1688727 - RNA, 19 nt, Artificial Sequence
  Description of Artificial Sequence: Synthetic oligonucleotide
  Sense strand starting at position 2777 of SEQ ID NO: 1561660
gcaaguuguccagagaugc

SEQ ID NO: 1688728 - RNA, 19 nt, Artificial Sequence
  Description of Artificial Sequence: Synthetic oligonucleotide
  Antisense strand to SEQ ID NO: 1688727
gcaucucuggacaacuugc

SEQ ID NO: 1688729 - RNA, 19 nt, Artificial Sequence
  Description of Artificial Sequence: Synthetic oligonucleotide
  Sense strand starting at position 2840 of SEQ ID NO: 1561660
gaaucacugcacugagaga

SEQ ID NO: 1688730 - RNA, 19 nt, Artificial Sequence
  Description of Artificial Sequence: Synthetic oligonucleotide
  Antisense strand to SEQ ID NO: 1688729
ucucucagugcagugauuc

SEQ ID NO: 1688731 - RNA, 19 nt, Artificial Sequence
  Description of Artificial Sequence: Synthetic oligonucleotide
  Sense strand starting at position 3406 of SEQ ID NO: 1561660
ggagucuguucagcagaug

SEQ ID NO: 1688732 - RNA, 19 nt, Artificial Sequence
  Description of Artificial Sequence: Synthetic oligonucleotide
  Antisense strand to SEQ ID NO: 1688731
caucugcugaacagacucc

SEQ ID NO: 1688733 - RNA, 19 nt, Artificial Sequence
  Description of Artificial Sequence: Synthetic oligonucleotide
  Sense strand starting at position 3683 of SEQ ID NO: 1561660
gaguguuggagucaauuga

SEQ ID NO: 1688734 - RNA, 19 nt, Artificial Sequence
  Description of Artificial Sequence: Synthetic oligonucleotide
  Antisense strand to SEQ ID NO: 1688733
ucaauugacuccaacacuc

SEQ ID NO: 1688735 - RNA, 19 nt, Artificial Sequence
  Description of Artificial Sequence: Synthetic oligonucleotide
  Sense strand starting at position 3828 of SEQ ID NO: 1561660
gggccauggcuuugaacuu

SEQ ID NO: 1688736 - RNA, 19 nt, Artificial Sequence
  Description of Artificial Sequence: Synthetic oligonucleotide
  Antisense strand to SEQ ID NO: 1688735
aaguucaaagccauggccc

SEQ ID NO: 1688737 - RNA, 19 nt, Artificial Sequence
  Description of Artificial Sequence: Synthetic oligonucleotide
  Sense strand starting at position 3894 of SEQ ID NO: 1561660
uggcaaucauccucacagu

SEQ ID NO: 1688738 - RNA, 19 nt, Artificial Sequence
  Description of Artificial Sequence: Synthetic oligonucleotide
  Antisense strand to SEQ ID NO: 1688737
acugugaggaugauugcca

SEQ ID NO: 1688739 - RNA, 19 nt, Artificial Sequence
  Description of Artificial Sequence: Synthetic oligonucleotide
  Sense strand starting at position 45 of SEQ ID NO: 1561661
gugaaauuagagugugagu

SEQ ID NO: 1688740 - RNA, 19 nt, Artificial Sequence
  Description of Artificial Sequence: Synthetic oligonucleotide
  Antisense strand to SEQ ID NO: 1688739
acucacacucuaauuucac

SEQ ID NO: 1688741 - RNA, 19 nt, Artificial Sequence
  Description of Artificial Sequence: Synthetic oligonucleotide
  Sense strand starting at position 65 of SEQ ID NO: 1561661
cuuucugcaucuuugaaag

SEQ ID NO: 1688742 - RNA, 19 nt, Artificial Sequence
  Description of Artificial Sequence: Synthetic oligonucleotide
  Antisense strand to SEQ ID NO: 1688741
cuuucaaagaugcagaaag

SEQ ID NO: 1688743 - RNA, 19 nt, Artificial Sequence
  Description of Artificial Sequence: Synthetic oligonucleotide
  Sense strand starting at position 564 of SEQ ID NO: 1561661
aguguuaacauaggagauu

SEQ ID NO: 1688744 - RNA, 19 nt, Artificial Sequence
  Description of Artificial Sequence: Synthetic oligonucleotide
  Antisense strand to SEQ ID NO: 1688743
aaucuccuauguuaacacu

SEQ ID NO: 1688745 - RNA, 19 nt, Artificial Sequence
  Description of Artificial Sequence: Synthetic oligonucleotide
  Sense strand starting at position 617 of SEQ ID NO: 1561661
ucccacuuguaggaauuua

SEQ ID NO: 1688746 - RNA, 19 nt, Artificial Sequence
  Description of Artificial Sequence: Synthetic oligonucleotide
  Antisense strand to SEQ ID NO: 1688745
uaaauuccuacaaguggga

SEQ ID NO: 1688747 - RNA, 19 nt, Artificial Sequence
  Description of Artificial Sequence: Synthetic oligonucleotide
  Sense strand starting at position 627 of SEQ ID NO: 1561661
aggaauuuaucuuaugcac

SEQ ID NO: 1688748 - RNA, 19 nt, Artificial Sequence
  Description of Artificial Sequence: Synthetic oligonucleotide
  Antisense strand to SEQ ID NO: 1688747
gugcauaagauaaauuccu

SEQ ID NO: 1688749 - RNA, 19 nt, Artificial Sequence
  Description of Artificial Sequence: Synthetic oligonucleotide
  Sense strand starting at position 643 of SEQ ID NO: 1561661
cacguuuaucaggauauaa

SEQ ID NO: 1688750 - RNA, 19 nt, Artificial Sequence
  Description of Artificial Sequence: Synthetic oligonucleotide
  Antisense strand to SEQ ID NO: 1688749
uuauauccugauaaacgug

SEQ ID NO: 1688751 - RNA, 19 nt, Artificial Sequence
  Description of Artificial Sequence: Synthetic oligonucleotide
  Sense strand starting at position 645 of SEQ ID NO: 1561661
cguuuaucaggauauaaua

SEQ ID NO: 1688752 - RNA, 19 nt, Artificial Sequence
  Description of Artificial Sequence: Synthetic oligonucleotide
  Antisense strand to SEQ ID NO: 1688751
uauuauauccugauaaacg

SEQ ID NO: 1688753 - RNA, 19 nt, Artificial Sequence
  Description of Artificial Sequence: Synthetic oligonucleotide
  Sense strand starting at position 682 of SEQ ID NO: 1561661
guggcauugcuuguuucua

SEQ ID NO: 1688754 - RNA, 19 nt, Artificial Sequence
  Description of Artificial Sequence: Synthetic oligonucleotide
  Antisense strand to SEQ ID NO: 1688753
uagaaacaagcaaugccac

SEQ ID NO: 1688755 - RNA, 19 nt, Artificial Sequence
  Description of Artificial Sequence: Synthetic oligonucleotide
  Sense strand starting at position 799 of SEQ ID NO: 1561661
uaguguuuaggaggcuaau

SEQ ID NO: 1688756 - RNA, 19 nt, Artificial Sequence
  Description of Artificial Sequence: Synthetic oligonucleotide
  Antisense strand to SEQ ID NO: 1688755
auuagccuccuaaacacua

SEQ ID NO: 1688757 - RNA, 19 nt, Artificial Sequence
  Description of Artificial Sequence: Synthetic oligonucleotide
  Sense strand starting at position 1083 of SEQ ID NO: 1561661
gugaguucccaucacucuu

SEQ ID NO: 1688758 - RNA, 19 nt, Artificial Sequence
  Description of Artificial Sequence: Synthetic oligonucleotide
  Antisense strand to SEQ ID NO: 1688757
aagagugaugggaacucac

SEQ ID NO: 1688759 - RNA, 19 nt, Artificial Sequence
  Description of Artificial Sequence: Synthetic oligonucleotide
  Sense strand starting at position 1118 of SEQ ID NO: 1561661
uuaagauagaugugguuau

SEQ ID NO: 1688760 - RNA, 19 nt, Artificial Sequence
  Description of Artificial Sequence: Synthetic oligonucleotide
  Antisense strand to SEQ ID NO: 1688759
auaaccacaucuaucuuaa

SEQ ID NO: 1688761 - RNA, 19 nt, Artificial Sequence
  Description of Artificial Sequence: Synthetic oligonucleotide
  Sense strand starting at position 1332 of SEQ ID NO: 1561661
ggucaauuccuacaucaug

SEQ ID NO: 1688762 - RNA, 19 nt, Artificial Sequence
  Description of Artificial Sequence: Synthetic oligonucleotide
  Antisense strand to SEQ ID NO: 1688761
caugauguaggaauugacc

SEQ ID NO: 1688763 - RNA, 19 nt, Artificial Sequence
  Description of Artificial Sequence: Synthetic oligonucleotide
  Sense strand starting at position 1353 of SEQ ID NO: 1561661
cucugugaagccuacugua

SEQ ID NO: 1688764 - RNA, 19 nt, Artificial Sequence
  Description of Artificial Sequence: Synthetic oligonucleotide
  Antisense strand to SEQ ID NO: 1688763
uacaguaggcuucacagag

SEQ ID NO: 1688765 - RNA, 19 nt, Artificial Sequence
  Description of Artificial Sequence: Synthetic oligonucleotide
  Sense strand starting at position 1418 of SEQ ID NO: 1561661
ucauuauccugaucaaggu

SEQ ID NO: 1688766 - RNA, 19 nt, Artificial Sequence
  Description of Artificial Sequence: Synthetic oligonucleotide
  Antisense strand to SEQ ID NO: 1688765
accuugaucaggauaauga

SEQ ID NO: 1688767 - RNA, 19 nt, Artificial Sequence
  Description of Artificial Sequence: Synthetic oligonucleotide
  Sense strand starting at position 1428 of SEQ ID NO: 1561661
gaucaaggucuuggauaac

SEQ ID NO: 1688768 - RNA, 19 nt, Artificial Sequence
  Description of Artificial Sequence: Synthetic oligonucleotide
  Antisense strand to SEQ ID NO: 1688767
guuauccaagaccuugauc

SEQ ID NO: 1688769 - RNA, 19 nt, Artificial Sequence
  Description of Artificial Sequence: Synthetic oligonucleotide
  Sense strand starting at position 1440 of SEQ ID NO: 1561661
ggauaacacuucccugaug

SEQ ID NO: 1688770 - RNA, 19 nt, Artificial Sequence
  Description of Artificial Sequence: Synthetic oligonucleotide
  Antisense strand to SEQ ID NO: 1688769
caucagggaaguguuaucc

SEQ ID NO: 1688771 - RNA, 19 nt, Artificial Sequence
  Description of Artificial Sequence: Synthetic oligonucleotide
  Sense strand starting at position 1573 of SEQ ID NO: 1561661
acgaauaaaucuuuguuga

SEQ ID NO: 1688772 - RNA, 19 nt, Artificial Sequence
  Description of Artificial Sequence: Synthetic oligonucleotide
  Antisense strand to SEQ ID NO: 1688771
ucaacaaagauuuauucgu

SEQ ID NO: 1688773 - RNA, 19 nt, Artificial Sequence
  Description of Artificial Sequence: Synthetic oligonucleotide
  Sense strand starting at position 1574 of SEQ ID NO: 1561661
cgaauaaaucuuuguugaa

SEQ ID NO: 1688774 - RNA, 19 nt, Artificial Sequence
  Description of Artificial Sequence: Synthetic oligonucleotide
  Antisense strand to SEQ ID NO: 1688773
uucaacaaagauuuauucg

SEQ ID NO: 1688775 - RNA, 19 nt, Artificial Sequence
  Description of Artificial Sequence: Synthetic oligonucleotide
  Sense strand starting at position 1762 of SEQ ID NO: 1561661
auggaaucuuuagugagua

SEQ ID NO: 1688776 - RNA, 19 nt, Artificial Sequence
  Description of Artificial Sequence: Synthetic oligonucleotide
  Antisense strand to SEQ ID NO: 1688775
uacucacuaaagauuccau

SEQ ID NO: 1688777 - RNA, 19 nt, Artificial Sequence
  Description of Artificial Sequence: Synthetic oligonucleotide
  Sense strand starting at position 1764 of SEQ ID NO: 1561661
ggaaucuuuagugaguacu

SEQ ID NO: 1688778 - RNA, 19 nt, Artificial Sequence
  Description of Artificial Sequence: Synthetic oligonucleotide
  Antisense strand to SEQ ID NO: 1688777
aguacucacuaaagauucc

SEQ ID NO: 1688779 - RNA, 19 nt, Artificial Sequence
  Description of Artificial Sequence: Synthetic oligonucleotide
  Sense strand starting at position 1767 of SEQ ID NO: 1561661
aucuuuagugaguacucau

SEQ ID NO: 1688780 - RNA, 19 nt, Artificial Sequence
  Description of Artificial Sequence: Synthetic oligonucleotide
  Antisense strand to SEQ ID NO: 1688779
augaguacucacuaaagau

SEQ ID NO: 1688781 - RNA, 19 nt, Artificial Sequence
  Description of Artificial Sequence: Synthetic oligonucleotide
  Sense strand starting at position 1774 of SEQ ID NO: 1561661
gugaguacucaucacgaac

SEQ ID NO: 1688782 - RNA, 19 nt, Artificial Sequence
  Description of Artificial Sequence: Synthetic oligonucleotide
  Antisense strand to SEQ ID NO: 1688781
guucgugaugaguacucac

SEQ ID NO: 1688783 - RNA, 19 nt, Artificial Sequence
  Description of Artificial Sequence: Synthetic oligonucleotide
  Sense strand starting at position 1802 of SEQ ID NO: 1561661
agagcacauuuagagauau

SEQ ID NO: 1688784 - RNA, 19 nt, Artificial Sequence
  Description of Artificial Sequence: Synthetic oligonucleotide
  Antisense strand to SEQ ID NO: 1688783
auaucucuaaaugugcucu

SEQ ID NO: 1688785 - RNA, 19 nt, Artificial Sequence
  Description of Artificial Sequence: Synthetic oligonucleotide
  Sense strand starting at position 1996 of SEQ ID NO: 1561661
ugggauucugcugaauggu

SEQ ID NO: 1688786 - RNA, 19 nt, Artificial Sequence
  Description of Artificial Sequence: Synthetic oligonucleotide
  Antisense strand to SEQ ID NO: 1688785
accauucagcagaauccca

SEQ ID NO: 1688787 - RNA, 19 nt, Artificial Sequence
  Description of Artificial Sequence: Synthetic oligonucleotide
  Sense strand starting at position 2009 of SEQ ID NO: 1561661
aaugguggcggcuauuaua

SEQ ID NO: 1688788 - RNA, 19 nt, Artificial Sequence
  Description of Artificial Sequence: Synthetic oligonucleotide
  Antisense strand to SEQ ID NO: 1688787
uauaauagccgccaccauu

SEQ ID NO: 1688789 - RNA, 19 nt, Artificial Sequence
  Description of Artificial Sequence: Synthetic oligonucleotide
  Sense strand starting at position 2020 of SEQ ID NO: 1561661
cuauuauaugguggagaug

SEQ ID NO: 1688790 - RNA, 19 nt, Artificial Sequence
  Description of Artificial Sequence: Synthetic oligonucleotide
  Antisense strand to SEQ ID NO: 1688789
caucuccaccauauaauag

SEQ ID NO: 1688791 - RNA, 19 nt, Artificial Sequence
  Description of Artificial Sequence: Synthetic oligonucleotide
  Sense strand starting at position 2168 of SEQ ID NO: 1561661
aauugaaacggauggcuau

SEQ ID NO: 1688792 - RNA, 19 nt, Artificial Sequence
  Description of Artificial Sequence: Synthetic oligonucleotide
  Antisense strand to SEQ ID NO: 1688791
auagccauccguuucaauu

SEQ ID NO: 1688793 - RNA, 19 nt, Artificial Sequence
  Description of Artificial Sequence: Synthetic oligonucleotide
  Sense strand starting at position 2191 of SEQ ID NO: 1561661
agggcuuuccgccaagacu

SEQ ID NO: 1688794 - RNA, 19 nt, Artificial Sequence
  Description of Artificial Sequence: Synthetic oligonucleotide
  Antisense strand to SEQ ID NO: 1688793
agucuuggcggaaagcccu

SEQ ID NO: 1688795 - RNA, 19 nt, Artificial Sequence
  Description of Artificial Sequence: Synthetic oligonucleotide
  Sense strand starting at position 2278 of SEQ ID NO: 1561661
ggagaagacugagaaugaa

SEQ ID NO: 1688796 - RNA, 19 nt, Artificial Sequence
  Description of Artificial Sequence: Synthetic oligonucleotide
  Antisense strand to SEQ ID NO: 1688795
uucauucucagucuucucc

SEQ ID NO: 1688797 - RNA, 19 nt, Artificial Sequence
  Description of Artificial Sequence: Synthetic oligonucleotide
  Sense strand starting at position 2303 of SEQ ID NO: 1561661
ggagaauguccuggcagga

SEQ ID NO: 1688798 - RNA, 19 nt, Artificial Sequence
  Description of Artificial Sequence: Synthetic oligonucleotide
  Antisense strand to SEQ ID NO: 1688797
uccugccaggacauucucc

SEQ ID NO: 1688799 - RNA, 19 nt, Artificial Sequence
  Description of Artificial Sequence: Synthetic oligonucleotide
  Sense strand starting at position 2421 of SEQ ID NO: 1561661
ccgagaugggucuagaauu

SEQ ID NO: 1688800 - RNA, 19 nt, Artificial Sequence
  Description of Artificial Sequence: Synthetic oligonucleotide
  Antisense strand to SEQ ID NO: 1688799
aauucuagacccaucucgg

SEQ ID NO: 1688801 - RNA, 19 nt, Artificial Sequence
  Description of Artificial Sequence: Synthetic oligonucleotide
  Sense strand starting at position 2422 of SEQ ID NO: 1561661
cgagaugggucuagaauug

SEQ ID NO: 1688802 - RNA, 19 nt, Artificial Sequence
  Description of Artificial Sequence: Synthetic oligonucleotide
  Antisense strand to SEQ ID NO: 1688801
caauucuagacccaucucg

SEQ ID NO: 1688803 - RNA, 19 nt, Artificial Sequence
  Description of Artificial Sequence: Synthetic oligonucleotide
  Sense strand starting at position 2432 of SEQ ID NO: 1561661
cuagaauuguggcccacaa

SEQ ID NO: 1688804 - RNA, 19 nt, Artificial Sequence
  Description of Artificial Sequence: Synthetic oligonucleotide
  Antisense strand to SEQ ID NO: 1688803
uugugggccacaauucuag

SEQ ID NO: 1688805 - RNA, 19 nt, Artificial Sequence
  Description of Artificial Sequence: Synthetic oligonucleotide
  Sense strand starting at position 2577 of SEQ ID NO: 1561661
uucuguuagucuuuaugaa

SEQ ID NO: 1688806 - RNA, 19 nt, Artificial Sequence
  Description of Artificial Sequence: Synthetic oligonucleotide
  Antisense strand to SEQ ID NO: 1688805
uucauaaagacuaacagaa

SEQ ID NO: 1688807 - RNA, 19 nt, Artificial Sequence
  Description of Artificial Sequence: Synthetic oligonucleotide
  Sense strand starting at position 2578 of SEQ ID NO: 1561661
ucuguuagucuuuaugaaa

SEQ ID NO: 1688808 - RNA, 19 nt, Artificial Sequence
  Description of Artificial Sequence: Synthetic oligonucleotide
  Antisense strand to SEQ ID NO: 1688807
uuucauaaagacuaacaga

SEQ ID NO: 1688809 - RNA, 19 nt, Artificial Sequence
  Description of Artificial Sequence: Synthetic oligonucleotide
  Sense strand starting at position 3505 of SEQ ID NO: 1561661
ggcuguccugggcaugaau

SEQ ID NO: 1688810 - RNA, 19 nt, Artificial Sequence
  Description of Artificial Sequence: Synthetic oligonucleotide
  Antisense strand to SEQ ID NO: 1688809
auucaugcccaggacagcc

SEQ ID NO: 1688811 - RNA, 19 nt, Artificial Sequence
  Description of Artificial Sequence: Synthetic oligonucleotide
  Sense strand starting at position 3586 of SEQ ID NO: 1561661
caggcucuuuaucugugaa

SEQ ID NO: 1688812 - RNA, 19 nt, Artificial Sequence
  Description of Artificial Sequence: Synthetic oligonucleotide
  Antisense strand to SEQ ID NO: 1688811
uucacagauaaagagccug

SEQ ID NO: 1688813 - RNA, 19 nt, Artificial Sequence
  Description of Artificial Sequence: Synthetic oligonucleotide
  Sense strand starting at position 3588 of SEQ ID NO: 1561661
ggcucuuuaucugugaaau

SEQ ID NO: 1688814 - RNA, 19 nt, Artificial Sequence
  Description of Artificial Sequence: Synthetic oligonucleotide
  Antisense strand to SEQ ID NO: 1688813
auuucacagauaaagagcc

SEQ ID NO: 1688815 - RNA, 19 nt, Artificial Sequence
  Description of Artificial Sequence: Synthetic oligonucleotide
  Sense strand starting at position 3633 of SEQ ID NO: 1561661
gggcaugcugugaggucaa

SEQ ID NO: 1688816 - RNA, 19 nt, Artificial Sequence
  Description of Artificial Sequence: Synthetic oligonucleotide
  Antisense strand to SEQ ID NO: 1688815
uugaccucacagcaugccc

SEQ ID NO: 1688817 - RNA, 19 nt, Artificial Sequence
  Description of Artificial Sequence: Synthetic oligonucleotide
  Sense strand starting at position 3644 of SEQ ID NO: 1561661
gaggucaaauuaguguaau

SEQ ID NO: 1688818 - RNA, 19 nt, Artificial Sequence
  Description of Artificial Sequence: Synthetic oligonucleotide
  Antisense strand to SEQ ID NO: 1688817
auuacacuaauuugaccuc

SEQ ID NO: 1688819 - RNA, 19 nt, Artificial Sequence
  Description of Artificial Sequence: Synthetic oligonucleotide
  Sense strand starting at position 417 of SEQ ID NO: 1561662
aguauaagaugcucaaacu

SEQ ID NO: 1688820 - RNA, 19 nt, Artificial Sequence
  Description of Artificial Sequence: Synthetic oligonucleotide
  Antisense strand to SEQ ID NO: 1688819
aguuugagcaucuuauacu

SEQ ID NO: 1688821 - RNA, 19 nt, Artificial Sequence
  Description of Artificial Sequence: Synthetic oligonucleotide
  Sense strand starting at position 418 of SEQ ID NO: 1561662
guauaagaugcucaaacuu

SEQ ID NO: 1688822 - RNA, 19 nt, Artificial Sequence
  Description of Artificial Sequence: Synthetic oligonucleotide
  Antisense strand to SEQ ID NO: 1688821
aaguuugagcaucuuauac

SEQ ID NO: 1688823 - RNA, 19 nt, Artificial Sequence
  Description of Artificial Sequence: Synthetic oligonucleotide
  Sense strand starting at position 911 of SEQ ID NO: 1561662
gggagacagguaugcucau

SEQ ID NO: 1688824 - RNA, 19 nt, Artificial Sequence
  Description of Artificial Sequence: Synthetic oligonucleotide
  Antisense strand to SEQ ID NO: 1688823
augagcauaccugucuccc

SEQ ID NO: 1688825 - RNA, 19 nt, Artificial Sequence
  Description of Artificial Sequence: Synthetic oligonucleotide
  Sense strand starting at position 912 of SEQ ID NO: 1561662
ggagacagguaugcucauu

SEQ ID NO: 1688826 - RNA, 19 nt, Artificial Sequence
  Description of Artificial Sequence: Synthetic oligonucleotide
  Antisense strand to SEQ ID NO: 1688825
aaugagcauaccugucucc

SEQ ID NO: 1688827 - RNA, 19 nt, Artificial Sequence
  Description of Artificial Sequence: Synthetic oligonucleotide
  Sense strand starting at position 1036 of SEQ ID NO: 1561662
ggguuuaucccagggaaau

SEQ ID NO: 1688828 - RNA, 19 nt, Artificial Sequence
  Description of Artificial Sequence: Synthetic oligonucleotide
  Antisense strand to SEQ ID NO: 1688827
auuucccugggauaaaccc

SEQ ID NO: 1688829 - RNA, 19 nt, Artificial Sequence
  Description of Artificial Sequence: Synthetic oligonucleotide
  Sense strand starting at position 1037 of SEQ ID NO: 1561662
gguuuaucccagggaaauu

SEQ ID NO: 1688830 - RNA, 19 nt, Artificial Sequence
  Description of Artificial Sequence: Synthetic oligonucleotide
  Antisense strand to SEQ ID NO: 1688829
aauuucccugggauaaacc

SEQ ID NO: 1688831 - RNA, 19 nt, Artificial Sequence
  Description of Artificial Sequence: Synthetic oligonucleotide
  Sense strand starting at position 1097 of SEQ ID NO: 1561662
cucaguguaguuuauaauc

SEQ ID NO: 1688832 - RNA, 19 nt, Artificial Sequence
  Description of Artificial Sequence: Synthetic oligonucleotide
  Antisense strand to SEQ ID NO: 1688831
gauuauaaacuacacugag

SEQ ID NO: 1688833 - RNA, 19 nt, Artificial Sequence
  Description of Artificial Sequence: Synthetic oligonucleotide
  Sense strand starting at position 1102 of SEQ ID NO: 1561662
uguaguuuauaaucaugga

SEQ ID NO: 1688834 - RNA, 19 nt, Artificial Sequence
  Description of Artificial Sequence: Synthetic oligonucleotide
  Antisense strand to SEQ ID NO: 1688833
uccaugauuauaaacuaca

SEQ ID NO: 1688835 - RNA, 19 nt, Artificial Sequence
  Description of Artificial Sequence: Synthetic oligonucleotide
  Sense strand starting at position 1106 of SEQ ID NO: 1561662
guuuauaaucauggagagu

SEQ ID NO: 1688836 - RNA, 19 nt, Artificial Sequence
  Description of Artificial Sequence: Synthetic oligonucleotide
  Antisense strand to SEQ ID NO: 1688835
acucuccaugauuauaaac

SEQ ID NO: 1688837 - RNA, 19 nt, Artificial Sequence
  Description of Artificial Sequence: Synthetic oligonucleotide
  Sense strand starting at position 1228 of SEQ ID NO: 1561662
cagcauagugcugagugaa

SEQ ID NO: 1688838 - RNA, 19 nt, Artificial Sequence
  Description of Artificial Sequence: Synthetic oligonucleotide
  Antisense strand to SEQ ID NO: 1688837
uucacucagcacuaugcug

SEQ ID NO: 1688839 - RNA, 19 nt, Artificial Sequence
  Description of Artificial Sequence: Synthetic oligonucleotide
  Sense strand starting at position 1457 of SEQ ID NO: 1561662
caaugaggaugugcuagaa

SEQ ID NO: 1688840 - RNA, 19 nt, Artificial Sequence
  Description of Artificial Sequence: Synthetic oligonucleotide
  Antisense strand to SEQ ID NO: 1688839
uucuagcacauccucauug

SEQ ID NO: 1688841 - RNA, 19 nt, Artificial Sequence
  Description of Artificial Sequence: Synthetic oligonucleotide
  Sense strand starting at position 2042 of SEQ ID NO: 1561662
auuguugggucauccaaca

SEQ ID NO: 1688842 - RNA, 19 nt, Artificial Sequence
  Description of Artificial Sequence: Synthetic oligonucleotide
  Antisense strand to SEQ ID NO: 1688841
uguuggaugacccaacaau

SEQ ID NO: 1688843 - RNA, 19 nt, Artificial Sequence
  Description of Artificial Sequence: Synthetic oligonucleotide
  Sense strand starting at position 2091 of SEQ ID NO: 1561662
ggauguuagugacucuuua

SEQ ID NO: 1688844 - RNA, 19 nt, Artificial Sequence
  Description of Artificial Sequence: Synthetic oligonucleotide
  Antisense strand to SEQ ID NO: 1688843
uaaagagucacuaacaucc

SEQ ID NO: 1688845 - RNA, 19 nt, Artificial Sequence
  Description of Artificial Sequence: Synthetic oligonucleotide
  Sense strand starting at position 2216 of SEQ ID NO: 1561662
gauacuugcuugucagaaa

SEQ ID NO: 1688846 - RNA, 19 nt, Artificial Sequence
  Description of Artificial Sequence: Synthetic oligonucleotide
  Antisense strand to SEQ ID NO: 1688845
uuucugacaagcaaguauc

SEQ ID NO: 1688847 - RNA, 19 nt, Artificial Sequence
  Description of Artificial Sequence: Synthetic oligonucleotide
  Sense strand starting at position 2227 of SEQ ID NO: 1561662
gucagaaauugaguguuaa

SEQ ID NO: 1688848 - RNA, 19 nt, Artificial Sequence
  Description of Artificial Sequence: Synthetic oligonucleotide
  Antisense strand to SEQ ID NO: 1688847
uuaacacucaauuucugac

SEQ ID NO: 1688849 - RNA, 19 nt, Artificial Sequence
  Description of Artificial Sequence: Synthetic oligonucleotide
  Sense strand starting at position 2228 of SEQ ID NO: 1561662
ucagaaauugaguguuaau

SEQ ID NO: 1688850 - RNA, 19 nt, Artificial Sequence
  Description of Artificial Sequence: Synthetic oligonucleotide
  Antisense strand to SEQ ID NO: 1688849
auuaacacucaauuucuga

SEQ ID NO: 1688851 - RNA, 19 nt, Artificial Sequence
  Description of Artificial Sequence: Synthetic oligonucleotide
  Sense strand starting at position 2235 of SEQ ID NO: 1561662
uugaguguuaaugaauguu

SEQ ID NO: 1688852 - RNA, 19 nt, Artificial Sequence
  Description of Artificial Sequence: Synthetic oligonucleotide
  Antisense strand to SEQ ID NO: 1688851
aacauucauuaacacucaa

SEQ ID NO: 1688853 - RNA, 19 nt, Artificial Sequence
  Description of Artificial Sequence: Synthetic oligonucleotide
  Sense strand starting at position 2241 of SEQ ID NO: 1561662
guuaaugaauguuuguuga

SEQ ID NO: 1688854 - RNA, 19 nt, Artificial Sequence
  Description of Artificial Sequence: Synthetic oligonucleotide
  Antisense strand to SEQ ID NO: 1688853
ucaacaaacauucauuaac

SEQ ID NO: 1688855 - RNA, 19 nt, Artificial Sequence
  Description of Artificial Sequence: Synthetic oligonucleotide
  Sense strand starting at position 2248 of SEQ ID NO: 1561662
aauguuuguugagugacca

SEQ ID NO: 1688856 - RNA, 19 nt, Artificial Sequence
  Description of Artificial Sequence: Synthetic oligonucleotide
  Antisense strand to SEQ ID NO: 1688855
uggucacucaacaaacauu

SEQ ID NO: 1688857 - RNA, 19 nt, Artificial Sequence
  Description of Artificial Sequence: Synthetic oligonucleotide
  Sense strand starting at position 2286 of SEQ ID NO: 1561662
ggagaugguugaucucuga

SEQ ID NO: 1688858 - RNA, 19 nt, Artificial Sequence
  Description of Artificial Sequence: Synthetic oligonucleotide
  Antisense strand to SEQ ID NO: 1688857
ucagagaucaaccaucucc

SEQ ID NO: 1688859 - RNA, 19 nt, Artificial Sequence
  Description of Artificial Sequence: Synthetic oligonucleotide
  Sense strand starting at position 2289 of SEQ ID NO: 1561662
gaugguugaucucugaauc

SEQ ID NO: 1688860 - RNA, 19 nt, Artificial Sequence
  Description of Artificial Sequence: Synthetic oligonucleotide
  Antisense strand to SEQ ID NO: 1688859
gauucagagaucaaccauc

SEQ ID NO: 1688861 - RNA, 19 nt, Artificial Sequence
  Description of Artificial Sequence: Synthetic oligonucleotide
  Sense strand starting at position 2290 of SEQ ID NO: 1561662
augguugaucucugaaucu

SEQ ID NO: 1688862 - RNA, 19 nt, Artificial Sequence
  Description of Artificial Sequence: Synthetic oligonucleotide
  Antisense strand to SEQ ID NO: 1688861
agauucagagaucaaccau

SEQ ID NO: 1688863 - RNA, 19 nt, Artificial Sequence
  Description of Artificial Sequence: Synthetic oligonucleotide
  Sense strand starting at position 2311 of SEQ ID NO: 1561662
ucugaauuaugaguuucuu

SEQ ID NO: 1688864 - RNA, 19 nt, Artificial Sequence
  Description of Artificial Sequence: Synthetic oligonucleotide
  Antisense strand to SEQ ID NO: 1688863
aagaaacucauaauucaga

SEQ ID NO: 1688865 - RNA, 19 nt, Artificial Sequence
  Description of Artificial Sequence: Synthetic oligonucleotide
  Sense strand starting at position 2339 of SEQ ID NO: 1561662
guaugagucuaauuaaucc

SEQ ID NO: 1688866 - RNA, 19 nt, Artificial Sequence
  Description of Artificial Sequence: Synthetic oligonucleotide
  Antisense strand to SEQ ID NO: 1688865
ggauuaauuagacucauac

SEQ ID NO: 1688867 - RNA, 19 nt, Artificial Sequence
  Description of Artificial Sequence: Synthetic oligonucleotide
  Sense strand starting at position 2376 of SEQ ID NO: 1561662
ccauguuugccacauggua

SEQ ID NO: 1688868 - RNA, 19 nt, Artificial Sequence
  Description of Artificial Sequence: Synthetic oligonucleotide
  Antisense strand to SEQ ID NO: 1688867
uaccauguggcaaacaugg

SEQ ID NO: 1688869 - RNA, 19 nt, Artificial Sequence
  Description of Artificial Sequence: Synthetic oligonucleotide
  Sense strand starting at position 2389 of SEQ ID NO: 1561662
augguaaguacuggugaau

SEQ ID NO: 1688870 - RNA, 19 nt, Artificial Sequence
  Description of Artificial Sequence: Synthetic oligonucleotide
  Antisense strand to SEQ ID NO: 1688869
auucaccaguacuuaccau

SEQ ID NO: 1688871 - RNA, 19 nt, Artificial Sequence
  Description of Artificial Sequence: Synthetic oligonucleotide
  Sense strand starting at position 2392 of SEQ ID NO: 1561662
guaaguacuggugaauguu

SEQ ID NO: 1688872 - RNA, 19 nt, Artificial Sequence
  Description of Artificial Sequence: Synthetic oligonucleotide
  Antisense strand to SEQ ID NO: 1688871
aacauucaccaguacuuac

SEQ ID NO: 1688873 - RNA, 19 nt, Artificial Sequence
  Description of Artificial Sequence: Synthetic oligonucleotide
  Sense strand starting at position 2398 of SEQ ID NO: 1561662
acuggugaauguuuguuaa

SEQ ID NO: 1688874 - RNA, 19 nt, Artificial Sequence
  Description of Artificial Sequence: Synthetic oligonucleotide
  Antisense strand to SEQ ID NO: 1688873
uuaacaaacauucaccagu

SEQ ID NO: 1688875 - RNA, 19 nt, Artificial Sequence
  Description of Artificial Sequence: Synthetic oligonucleotide
  Sense strand starting at position 2410 of SEQ ID NO: 1561662
uuguuaaugcuacaaauga

SEQ ID NO: 1688876 - RNA, 19 nt, Artificial Sequence
  Description of Artificial Sequence: Synthetic oligonucleotide
  Antisense strand to SEQ ID NO: 1688875
ucauuuguagcauuaacaa

SEQ ID NO: 1688877 - RNA, 19 nt, Artificial Sequence
  Description of Artificial Sequence: Synthetic oligonucleotide
  Sense strand starting at position 2446 of SEQ ID NO: 1561662
uggaucuuaucuuucugga

SEQ ID NO: 1688878 - RNA, 19 nt, Artificial Sequence
  Description of Artificial Sequence: Synthetic oligonucleotide
  Antisense strand to SEQ ID NO: 1688877
uccagaaagauaagaucca

SEQ ID NO: 1688879 - RNA, 19 nt, Artificial Sequence
  Description of Artificial Sequence: Synthetic oligonucleotide
  Sense strand starting at position 2660 of SEQ ID NO: 1561662
ggagauccugcugacacuu

SEQ ID NO: 1688880 - RNA, 19 nt, Artificial Sequence
  Description of Artificial Sequence: Synthetic oligonucleotide
  Antisense strand to SEQ ID NO: 1688879
aagugucagcaggaucucc

SEQ ID NO: 1688881 - RNA, 19 nt, Artificial Sequence
  Description of Artificial Sequence: Synthetic oligonucleotide
  Sense strand starting at position 2717 of SEQ ID NO: 1561662
ccaucagcuugaucugaau

SEQ ID NO: 1688882 - RNA, 19 nt, Artificial Sequence
  Description of Artificial Sequence: Synthetic oligonucleotide
  Antisense strand to SEQ ID NO: 1688881
auucagaucaagcugaugg

SEQ ID NO: 1688883 - RNA, 19 nt, Artificial Sequence
  Description of Artificial Sequence: Synthetic oligonucleotide
  Sense strand starting at position 3516 of SEQ ID NO: 1561662
ugagaaagccuugguucag

SEQ ID NO: 1688884 - RNA, 19 nt, Artificial Sequence
  Description of Artificial Sequence: Synthetic oligonucleotide
  Antisense strand to SEQ ID NO: 1688883
cugaaccaaggcuuucuca

SEQ ID NO: 1688885 - RNA, 19 nt, Artificial Sequence
  Description of Artificial Sequence: Synthetic oligonucleotide
  Sense strand starting at position 3554 of SEQ ID NO: 1561662
ugagguccuuucucagagu

SEQ ID NO: 1688886 - RNA, 19 nt, Artificial Sequence
  Description of Artificial Sequence: Synthetic oligonucleotide
  Antisense strand to SEQ ID NO: 1688885
acucugagaaaggaccuca

SEQ ID NO: 1688887 - RNA, 19 nt, Artificial Sequence
  Description of Artificial Sequence: Synthetic oligonucleotide
  Sense strand starting at position 3590 of SEQ ID NO: 1561662
auguuuguagaauaucacu

SEQ ID NO: 1688888 - RNA, 19 nt, Artificial Sequence
  Description of Artificial Sequence: Synthetic oligonucleotide
  Antisense strand to SEQ ID NO: 1688887
agugauauucuacaaacau

SEQ ID NO: 1688889 - RNA, 19 nt, Artificial Sequence
  Description of Artificial Sequence: Synthetic oligonucleotide
  Sense strand starting at position 3643 of SEQ ID NO: 1561662
uuauguaagugguuggaau

SEQ ID NO: 1688890 - RNA, 19 nt, Artificial Sequence
  Description of Artificial Sequence: Synthetic oligonucleotide
  Antisense strand to SEQ ID NO: 1688889
auuccaaccacuuacauaa

SEQ ID NO: 1688891 - RNA, 19 nt, Artificial Sequence
  Description of Artificial Sequence: Synthetic oligonucleotide
  Sense strand starting at position 3644 of SEQ ID NO: 1561662
uauguaagugguuggaauu

SEQ ID NO: 1688892 - RNA, 19 nt, Artificial Sequence
  Description of Artificial Sequence: Synthetic oligonucleotide
  Antisense strand to SEQ ID NO: 1688891
aauuccaaccacuuacaua

SEQ ID NO: 1688893 - RNA, 19 nt, Artificial Sequence
  Description of Artificial Sequence: Synthetic oligonucleotide
  Sense strand starting at position 3696 of SEQ ID NO: 1561662
gggcauugucgggaggaac

SEQ ID NO: 1688894 - RNA, 19 nt, Artificial Sequence
  Description of Artificial Sequence: Synthetic oligonucleotide
  Antisense strand to SEQ ID NO: 1688893
guuccucccgacaaugccc

SEQ ID NO: 1688895 - RNA, 19 nt, Artificial Sequence
  Description of Artificial Sequence: Synthetic oligonucleotide
  Sense strand starting at position 3729 of SEQ ID NO: 1561662
uggcucuuuggacaucuua

SEQ ID NO: 1688896 - RNA, 19 nt, Artificial Sequence
  Description of Artificial Sequence: Synthetic oligonucleotide
  Antisense strand to SEQ ID NO: 1688895
uaagauguccaaagagcca

SEQ ID NO: 1688897 - RNA, 19 nt, Artificial Sequence
  Description of Artificial Sequence: Synthetic oligonucleotide
  Sense strand starting at position 3846 of SEQ ID NO: 1561662
gagcuugaugcaugacaag

SEQ ID NO: 1688898 - RNA, 19 nt, Artificial Sequence
  Description of Artificial Sequence: Synthetic oligonucleotide
  Antisense strand to SEQ ID NO: 1688897
cuugucaugcaucaagcuc

SEQ ID NO: 1688899 - RNA, 19 nt, Artificial Sequence
  Description of Artificial Sequence: Synthetic oligonucleotide
  Sense strand starting at position 2 of SEQ ID NO: 1561663
cugccaagauuugucacuu

SEQ ID NO: 1688900 - RNA, 19 nt, Artificial Sequence
  Description of Artificial Sequence: Synthetic oligonucleotide
  Antisense strand to SEQ ID NO: 1688899
aagugacaaaucuuggcag

SEQ ID NO: 1688901 - RNA, 19 nt, Artificial Sequence
  Description of Artificial Sequence: Synthetic oligonucleotide
  Sense strand starting at position 3 of SEQ ID NO: 1561663
ugccaagauuugucacuuu

SEQ ID NO: 1688902 - RNA, 19 nt, Artificial Sequence
  Description of Artificial Sequence: Synthetic oligonucleotide
  Antisense strand to SEQ ID NO: 1688901
aaagugacaaaucuuggca

SEQ ID NO: 1688903 - RNA, 19 nt, Artificial Sequence
  Description of Artificial Sequence: Synthetic oligonucleotide
  Sense strand starting at position 137 of SEQ ID NO: 1561663
aggacucaaaguugugaaa

SEQ ID NO: 1688904 - RNA, 19 nt, Artificial Sequence
  Description of Artificial Sequence: Synthetic oligonucleotide
  Antisense strand to SEQ ID NO: 1688903
uuucacaacuuugaguccu

SEQ ID NO: 1688905 - RNA, 19 nt, Artificial Sequence
  Description of Artificial Sequence: Synthetic oligonucleotide
  Sense strand starting at position 207 of SEQ ID NO: 1561663
gcuucuuggagccaggaaa

SEQ ID NO: 1688906 - RNA, 19 nt, Artificial Sequence
  Description of Artificial Sequence: Synthetic oligonucleotide
  Antisense strand to SEQ ID NO: 1688905
uuuccuggcuccaagaagc

SEQ ID NO: 1688907 - RNA, 19 nt, Artificial Sequence
  Description of Artificial Sequence: Synthetic oligonucleotide
  Sense strand starting at position 581 of SEQ ID NO: 1561663
uucugagacccuugcaaua

SEQ ID NO: 1688908 - RNA, 19 nt, Artificial Sequence
  Description of Artificial Sequence: Synthetic oligonucleotide
  Antisense strand to SEQ ID NO: 1688907
uauugcaagggucucagaa

SEQ ID NO: 1688909 - RNA, 19 nt, Artificial Sequence
  Description of Artificial Sequence: Synthetic oligonucleotide
  Sense strand starting at position 716 of SEQ ID NO: 1561663
uuaauaaauggcugcugaa

SEQ ID NO: 1688910 - RNA, 19 nt, Artificial Sequence
  Description of Artificial Sequence: Synthetic oligonucleotide
  Antisense strand to SEQ ID NO: 1688909
uucagcagccauuuauuaa

SEQ ID NO: 1688911 - RNA, 19 nt, Artificial Sequence
  Description of Artificial Sequence: Synthetic oligonucleotide
  Sense strand starting at position 770 of SEQ ID NO: 1561663
gaaaucugagccugcuaag

SEQ ID NO: 1688912 - RNA, 19 nt, Artificial Sequence
  Description of Artificial Sequence: Synthetic oligonucleotide
  Antisense strand to SEQ ID NO: 1688911
cuuagcaggcucagauuuc

SEQ ID NO: 1688913 - RNA, 19 nt, Artificial Sequence
  Description of Artificial Sequence: Synthetic oligonucleotide
  Sense strand starting at position 1028 of SEQ ID NO: 1561663
aagcguucaguagauggua

SEQ ID NO: 1688914 - RNA, 19 nt, Artificial Sequence
  Description of Artificial Sequence: Synthetic oligonucleotide
  Antisense strand to SEQ ID NO: 1688913
uaccaucuacugaacgcuu

SEQ ID NO: 1688915 - RNA, 19 nt, Artificial Sequence
  Description of Artificial Sequence: Synthetic oligonucleotide
  Sense strand starting at position 1043 of SEQ ID NO: 1561663
gguagcuuccacgauaauu

SEQ ID NO: 1688916 - RNA, 19 nt, Artificial Sequence
  Description of Artificial Sequence: Synthetic oligonucleotide
  Antisense strand to SEQ ID NO: 1688915
aauuaucguggaagcuacc

SEQ ID NO: 1688917 - RNA, 19 nt, Artificial Sequence
  Description of Artificial Sequence: Synthetic oligonucleotide
  Sense strand starting at position 1204 of SEQ ID NO: 1561663
cugcauuaucuguacacac

SEQ ID NO: 1688918 - RNA, 19 nt, Artificial Sequence
  Description of Artificial Sequence: Synthetic oligonucleotide
  Antisense strand to SEQ ID NO: 1688917
guguguacagauaaugcag

SEQ ID NO: 1688919 - RNA, 19 nt, Artificial Sequence
  Description of Artificial Sequence: Synthetic oligonucleotide
  Sense strand starting at position 1225 of SEQ ID NO: 1561663
cucaguccucuuuggauca

SEQ ID NO: 1688920 - RNA, 19 nt, Artificial Sequence
  Description of Artificial Sequence: Synthetic oligonucleotide
  Antisense strand to SEQ ID NO: 1688919
ugauccaaagaggacugag

SEQ ID NO: 1688921 - RNA, 19 nt, Artificial Sequence
  Description of Artificial Sequence: Synthetic oligonucleotide
  Sense strand starting at position 1533 of SEQ ID NO: 1561663
gggaguucuuugagggaca

SEQ ID NO: 1688922 - RNA, 19 nt, Artificial Sequence
  Description of Artificial Sequence: Synthetic oligonucleotide
  Antisense strand to SEQ ID NO: 1688921
ugucccucaaagaacuccc

SEQ ID NO: 1688923 - RNA, 19 nt, Artificial Sequence
  Description of Artificial Sequence: Synthetic oligonucleotide
  Sense strand starting at position 1535 of SEQ ID NO: 1561663
gaguucuuugagggacaga

SEQ ID NO: 1688924 - RNA, 19 nt, Artificial Sequence
  Description of Artificial Sequence: Synthetic oligonucleotide
  Antisense strand to SEQ ID NO: 1688923
ucugucccucaaagaacuc

SEQ ID NO: 1688925 - RNA, 19 nt, Artificial Sequence
  Description of Artificial Sequence: Synthetic oligonucleotide
  Sense strand starting at position 1629 of SEQ ID NO: 1561663
ggguuuaugucacuaggaa

SEQ ID NO: 1688926 - RNA, 19 nt, Artificial Sequence
  Description of Artificial Sequence: Synthetic oligonucleotide
  Antisense strand to SEQ ID NO: 1688925
uuccuagugacauaaaccc

SEQ ID NO: 1688927 - RNA, 19 nt, Artificial Sequence
  Description of Artificial Sequence: Synthetic oligonucleotide
  Sense strand starting at position 1630 of SEQ ID NO: 1561663
gguuuaugucacuaggaag

SEQ ID NO: 1688928 - RNA, 19 nt, Artificial Sequence
  Description of Artificial Sequence: Synthetic oligonucleotide
  Antisense strand to SEQ ID NO: 1688927
cuuccuagugacauaaacc

SEQ ID NO: 1688929 - RNA, 19 nt, Artificial Sequence
  Description of Artificial Sequence: Synthetic oligonucleotide
  Sense strand starting at position 1820 of SEQ ID NO: 1561663
agguaucucuagcucagaa

SEQ ID NO: 1688930 - RNA, 19 nt, Artificial Sequence
  Description of Artificial Sequence: Synthetic oligonucleotide
  Antisense strand to SEQ ID NO: 1688929
uucugagcuagagauaccu

SEQ ID NO: 1688931 - RNA, 19 nt, Artificial Sequence
  Description of Artificial Sequence: Synthetic oligonucleotide
  Sense strand starting at position 2003 of SEQ ID NO: 1561663
ggccgaggucuccaaggua

SEQ ID NO: 1688932 - RNA, 19 nt, Artificial Sequence
  Description of Artificial Sequence: Synthetic oligonucleotide
  Antisense strand to SEQ ID NO: 1688931
uaccuuggagaccucggcc

SEQ ID NO: 1688933 - RNA, 19 nt, Artificial Sequence
  Description of Artificial Sequence: Synthetic oligonucleotide
  Sense strand starting at position 2006 of SEQ ID NO: 1561663
cgaggucuccaagguaaau

SEQ ID NO: 1688934 - RNA, 19 nt, Artificial Sequence
  Description of Artificial Sequence: Synthetic oligonucleotide
  Antisense strand to SEQ ID NO: 1688933
auuuaccuuggagaccucg

SEQ ID NO: 1688935 - RNA, 19 nt, Artificial Sequence
  Description of Artificial Sequence: Synthetic oligonucleotide
  Sense strand starting at position 2080 of SEQ ID NO: 1561663
cuuccugagguuuggagaa

SEQ ID NO: 1688936 - RNA, 19 nt, Artificial Sequence
  Description of Artificial Sequence: Synthetic oligonucleotide
  Antisense strand to SEQ ID NO: 1688935
uucuccaaaccucaggaag

SEQ ID NO: 1688937 - RNA, 19 nt, Artificial Sequence
  Description of Artificial Sequence: Synthetic oligonucleotide
  Sense strand starting at position 2126 of SEQ ID NO: 1561663
gugcauauagcagaauaag

SEQ ID NO: 1688938 - RNA, 19 nt, Artificial Sequence
  Description of Artificial Sequence: Synthetic oligonucleotide
  Antisense strand to SEQ ID NO: 1688937
cuuauucugcuauaugcac

SEQ ID NO: 1688939 - RNA, 19 nt, Artificial Sequence
  Description of Artificial Sequence: Synthetic oligonucleotide
  Sense strand starting at position 2203 of SEQ ID NO: 1561663
agccuuuguagagggauua

SEQ ID NO: 1688940 - RNA, 19 nt, Artificial Sequence
  Description of Artificial Sequence: Synthetic oligonucleotide
  Antisense strand to SEQ ID NO: 1688939
uaaucccucuacaaaggcu

SEQ ID NO: 1688941 - RNA, 19 nt, Artificial Sequence
  Description of Artificial Sequence: Synthetic oligonucleotide
  Sense strand starting at position 2458 of SEQ ID NO: 1561663
gguuguuaagagcaugagu

SEQ ID NO: 1688942 - RNA, 19 nt, Artificial Sequence
  Description of Artificial Sequence: Synthetic oligonucleotide
  Antisense strand to SEQ ID NO: 1688941
acucaugcucuuaacaacc

SEQ ID NO: 1688943 - RNA, 19 nt, Artificial Sequence
  Description of Artificial Sequence: Synthetic oligonucleotide
  Sense strand starting at position 2460 of SEQ ID NO: 1561663
uuguuaagagcaugaguug

SEQ ID NO: 1688944 - RNA, 19 nt, Artificial Sequence
  Description of Artificial Sequence: Synthetic oligonucleotide
  Antisense strand to SEQ ID NO: 1688943
caacucaugcucuuaacaa

SEQ ID NO: 1688945 - RNA, 19 nt, Artificial Sequence
  Description of Artificial Sequence: Synthetic oligonucleotide
  Sense strand starting at position 2461 of SEQ ID NO: 1561663
uguuaagagcaugaguuga

SEQ ID NO: 1688946 - RNA, 19 nt, Artificial Sequence
  Description of Artificial Sequence: Synthetic oligonucleotide
  Antisense strand to SEQ ID NO: 1688945
ucaacucaugcucuuaaca

SEQ ID NO: 1688947 - RNA, 19 nt, Artificial Sequence
  Description of Artificial Sequence: Synthetic oligonucleotide
  Sense strand starting at position 2586 of SEQ ID NO: 1561663
ugagcacuuguggaccaaa

SEQ ID NO: 1688948 - RNA, 19 nt, Artificial Sequence
  Description of Artificial Sequence: Synthetic oligonucleotide
  Antisense strand to SEQ ID NO: 1688947
uuugguccacaagugcuca

SEQ ID NO: 1688949 - RNA, 19 nt, Artificial Sequence
  Description of Artificial Sequence: Synthetic oligonucleotide
  Sense strand starting at position 2725 of SEQ ID NO: 1561663
gcaucagcagcguuaaugu

SEQ ID NO: 1688950 - RNA, 19 nt, Artificial Sequence
  Description of Artificial Sequence: Synthetic oligonucleotide
  Antisense strand to SEQ ID NO: 1688949
acauuaacgcugcugaugc

SEQ ID NO: 1688951 - RNA, 19 nt, Artificial Sequence
  Description of Artificial Sequence: Synthetic oligonucleotide
  Sense strand starting at position 2736 of SEQ ID NO: 1561663
guuaauguuacagagggca

SEQ ID NO: 1688952 - RNA, 19 nt, Artificial Sequence
  Description of Artificial Sequence: Synthetic oligonucleotide
  Antisense strand to SEQ ID NO: 1688951
ugcccucuguaacauuaac

SEQ ID NO: 1688953 - RNA, 19 nt, Artificial Sequence
  Description of Artificial Sequence: Synthetic oligonucleotide
  Sense strand starting at position 2824 of SEQ ID NO: 1561663
acccgaucaucaguccaga

SEQ ID NO: 1688954 - RNA, 19 nt, Artificial Sequence
  Description of Artificial Sequence: Synthetic oligonucleotide
  Antisense strand to SEQ ID NO: 1688953
ucuggacugaugaucgggu

SEQ ID NO: 1688955 - RNA, 19 nt, Artificial Sequence
  Description of Artificial Sequence: Synthetic oligonucleotide
  Sense strand starting at position 2939 of SEQ ID NO: 1561663
gggaauuauccuugcuacc

SEQ ID NO: 1688956 - RNA, 19 nt, Artificial Sequence
  Description of Artificial Sequence: Synthetic oligonucleotide
  Antisense strand to SEQ ID NO: 1688955
gguagcaaggauaauuccc

SEQ ID NO: 1688957 - RNA, 19 nt, Artificial Sequence
  Description of Artificial Sequence: Synthetic oligonucleotide
  Sense strand starting at position 2971 of SEQ ID NO: 1561663
gaagaauggaauugugguu

SEQ ID NO: 1688958 - RNA, 19 nt, Artificial Sequence
  Description of Artificial Sequence: Synthetic oligonucleotide
  Antisense strand to SEQ ID NO: 1688957
aaccacaauuccauucuuc

SEQ ID NO: 1688959 - RNA, 19 nt, Artificial Sequence
  Description of Artificial Sequence: Synthetic oligonucleotide
  Sense strand starting at position 2976 of SEQ ID NO: 1561663
auggaauugugguuuagag

SEQ ID NO: 1688960 - RNA, 19 nt, Artificial Sequence
  Description of Artificial Sequence: Synthetic oligonucleotide
  Antisense strand to SEQ ID NO: 1688959
cucuaaaccacaauuccau

SEQ ID NO: 1688961 - RNA, 19 nt, Artificial Sequence
  Description of Artificial Sequence: Synthetic oligonucleotide
  Sense strand starting at position 2978 of SEQ ID NO: 1561663
ggaauugugguuuagagcu

SEQ ID NO: 1688962 - RNA, 19 nt, Artificial Sequence
  Description of Artificial Sequence: Synthetic oligonucleotide
  Antisense strand to SEQ ID NO: 1688961
agcucuaaaccacaauucc

SEQ ID NO: 1688963 - RNA, 19 nt, Artificial Sequence
  Description of Artificial Sequence: Synthetic oligonucleotide
  Sense strand starting at position 2984 of SEQ ID NO: 1561663
gugguuuagagcugggaug

SEQ ID NO: 1688964 - RNA, 19 nt, Artificial Sequence
  Description of Artificial Sequence: Synthetic oligonucleotide
  Antisense strand to SEQ ID NO: 1688963
caucccagcucuaaaccac

SEQ ID NO: 1688965 - RNA, 19 nt, Artificial Sequence
  Description of Artificial Sequence: Synthetic oligonucleotide
  Sense strand starting at position 2996 of SEQ ID NO: 1561663
ugggauggccauuguugaa

SEQ ID NO: 1688966 - RNA, 19 nt, Artificial Sequence
  Description of Artificial Sequence: Synthetic oligonucleotide
  Antisense strand to SEQ ID NO: 1688965
uucaacaauggccauccca

SEQ ID NO: 1688967 - RNA, 19 nt, Artificial Sequence
  Description of Artificial Sequence: Synthetic oligonucleotide
  Sense strand starting at position 3682 of SEQ ID NO: 1561663
uugcuucuucucuaugaga

SEQ ID NO: 1688968 - RNA, 19 nt, Artificial Sequence
  Description of Artificial Sequence: Synthetic oligonucleotide
  Antisense strand to SEQ ID NO: 1688967
ucucauagagaagaagcaa

SEQ ID NO: 1688969 - RNA, 19 nt, Artificial Sequence
  Description of Artificial Sequence: Synthetic oligonucleotide
  Sense strand starting at position 3695 of SEQ ID NO: 1561663
augagacuguuuccuccau

SEQ ID NO: 1688970 - RNA, 19 nt, Artificial Sequence
  Description of Artificial Sequence: Synthetic oligonucleotide
  Antisense strand to SEQ ID NO: 1688969
auggaggaaacagucucau

SEQ ID NO: 1688971 - RNA, 19 nt, Artificial Sequence
  Description of Artificial Sequence: Synthetic oligonucleotide
  Sense strand starting at position 3696 of SEQ ID NO: 1561663
ugagacuguuuccuccauu

SEQ ID NO: 1688972 - RNA, 19 nt, Artificial Sequence
  Description of Artificial Sequence: Synthetic oligonucleotide
  Antisense strand to SEQ ID NO: 1688971
aauggaggaaacagucuca

SEQ ID NO: 1688973 - RNA, 19 nt, Artificial Sequence
  Description of Artificial Sequence: Synthetic oligonucleotide
  Sense strand starting at position 3697 of SEQ ID NO: 1561663
gagacuguuuccuccauug

SEQ ID NO: 1688974 - RNA, 19 nt, Artificial Sequence
  Description of Artificial Sequence: Synthetic oligonucleotide
  Antisense strand to SEQ ID NO: 1688973
caauggaggaaacagucuc

SEQ ID NO: 1688975 - RNA, 19 nt, Artificial Sequence
  Description of Artificial Sequence: Synthetic oligonucleotide
  Sense strand starting at position 3740 of SEQ ID NO: 1561663
ucguaaggucaugagaaau

SEQ ID NO: 1688976 - RNA, 19 nt, Artificial Sequence
  Description of Artificial Sequence: Synthetic oligonucleotide
  Antisense strand to SEQ ID NO: 1688975
auuucucaugaccuuacga

SEQ ID NO: 1688977 - RNA, 19 nt, Artificial Sequence
  Description of Artificial Sequence: Synthetic oligonucleotide
  Sense strand starting at position 3820 of SEQ ID NO: 1561663
gaggcaaauacugguggau

SEQ ID NO: 1688978 - RNA, 19 nt, Artificial Sequence
  Description of Artificial Sequence: Synthetic oligonucleotide
  Antisense strand to SEQ ID NO: 1688977
auccaccaguauuugccuc

SEQ ID NO: 1688979 - RNA, 19 nt, Artificial Sequence
  Description of Artificial Sequence: Synthetic oligonucleotide
  Sense strand starting at position 170 of SEQ ID NO: 1561664
gaggcaacucgaggugaau

SEQ ID NO: 1688980 - RNA, 19 nt, Artificial Sequence
  Description of Artificial Sequence: Synthetic oligonucleotide
  Antisense strand to SEQ ID NO: 1688979
auucaccucgaguugccuc

SEQ ID NO: 1688981 - RNA, 19 nt, Artificial Sequence
  Description of Artificial Sequence: Synthetic oligonucleotide
  Sense strand starting at position 172 of SEQ ID NO: 1561664
ggcaacucgaggugaauaa

SEQ ID NO: 1688982 - RNA, 19 nt, Artificial Sequence
  Description of Artificial Sequence: Synthetic oligonucleotide
  Antisense strand to SEQ ID NO: 1688981
uuauucaccucgaguugcc

SEQ ID NO: 1688983 - RNA, 19 nt, Artificial Sequence
  Description of Artificial Sequence: Synthetic oligonucleotide
  Sense strand starting at position 173 of SEQ ID NO: 1561664
gcaacucgaggugaauaaa

SEQ ID NO: 1688984 - RNA, 19 nt, Artificial Sequence
  Description of Artificial Sequence: Synthetic oligonucleotide
  Antisense strand to SEQ ID NO: 1688983
uuuauucaccucgaguugc

SEQ ID NO: 1688985 - RNA, 19 nt, Artificial Sequence
  Description of Artificial Sequence: Synthetic oligonucleotide
  Sense strand starting at position 182 of SEQ ID NO: 1561664
ggugaauaaacauguuugu

SEQ ID NO: 1688986 - RNA, 19 nt, Artificial Sequence
  Description of Artificial Sequence: Synthetic oligonucleotide
  Antisense strand to SEQ ID NO: 1688985
acaaacauguuuauucacc

SEQ ID NO: 1688987 - RNA, 19 nt, Artificial Sequence
  Description of Artificial Sequence: Synthetic oligonucleotide
  Sense strand starting at position 185 of SEQ ID NO: 1561664
gaauaaacauguuugugcu

SEQ ID NO: 1688988 - RNA, 19 nt, Artificial Sequence
  Description of Artificial Sequence: Synthetic oligonucleotide
  Antisense strand to SEQ ID NO: 1688987
agcacaaacauguuuauuc

SEQ ID NO: 1688989 - RNA, 19 nt, Artificial Sequence
  Description of Artificial Sequence: Synthetic oligonucleotide
  Sense strand starting at position 278 of SEQ ID NO: 1561664
gggcaagacuuggaaggau

SEQ ID NO: 1688990 - RNA, 19 nt, Artificial Sequence
  Description of Artificial Sequence: Synthetic oligonucleotide
  Antisense strand to SEQ ID NO: 1688989
auccuuccaagucuugccc

SEQ ID NO: 1688991 - RNA, 19 nt, Artificial Sequence
  Description of Artificial Sequence: Synthetic oligonucleotide
  Sense strand starting at position 557 of SEQ ID NO: 1561664
ugggcacagcucuaugaaa

SEQ ID NO: 1688992 - RNA, 19 nt, Artificial Sequence
  Description of Artificial Sequence: Synthetic oligonucleotide
  Antisense strand to SEQ ID NO: 1688991
uuucauagagcugugccca

SEQ ID NO: 1688993 - RNA, 19 nt, Artificial Sequence
  Description of Artificial Sequence: Synthetic oligonucleotide
  Sense strand starting at position 559 of SEQ ID NO: 1561664
ggcacagcucuaugaaauu

SEQ ID NO: 1688994 - RNA, 19 nt, Artificial Sequence
  Description of Artificial Sequence: Synthetic oligonucleotide
  Antisense strand to SEQ ID NO: 1688993
aauuucauagagcugugcc

SEQ ID NO: 1688995 - RNA, 19 nt, Artificial Sequence
  Description of Artificial Sequence: Synthetic oligonucleotide
  Sense strand starting at position 1254 of SEQ ID NO: 1561664
ccgcaaugcccagagaaga

SEQ ID NO: 1688996 - RNA, 19 nt, Artificial Sequence
  Description of Artificial Sequence: Synthetic oligonucleotide
  Antisense strand to SEQ ID NO: 1688995
ucuucucugggcauugcgg

SEQ ID NO: 1688997 - RNA, 19 nt, Artificial Sequence
  Description of Artificial Sequence: Synthetic oligonucleotide
  Sense strand starting at position 1372 of SEQ ID NO: 1561664
guaguuuccugucccaaga

SEQ ID NO: 1688998 - RNA, 19 nt, Artificial Sequence
  Description of Artificial Sequence: Synthetic oligonucleotide
  Antisense strand to SEQ ID NO: 1688997
ucuugggacaggaaacuac

SEQ ID NO: 1688999 - RNA, 19 nt, Artificial Sequence
  Description of Artificial Sequence: Synthetic oligonucleotide
  Sense strand starting at position 1522 of SEQ ID NO: 1561664
ggugguaaauggccuaaga

SEQ ID NO: 1689000 - RNA, 19 nt, Artificial Sequence
  Description of Artificial Sequence: Synthetic oligonucleotide
  Antisense strand to SEQ ID NO: 1688999
ucuuaggccauuuaccacc

SEQ ID NO: 1689001 - RNA, 19 nt, Artificial Sequence
  Description of Artificial Sequence: Synthetic oligonucleotide
  Sense strand starting at position 1524 of SEQ ID NO: 1561664
ugguaaauggccuaagagu

SEQ ID NO: 1689002 - RNA, 19 nt, Artificial Sequence
  Description of Artificial Sequence: Synthetic oligonucleotide
  Antisense strand to SEQ ID NO: 1689001
acucuuaggccauuuacca

SEQ ID NO: 1689003 - RNA, 19 nt, Artificial Sequence
  Description of Artificial Sequence: Synthetic oligonucleotide
  Sense strand starting at position 1573 of SEQ ID NO: 1561664
gacucagucuggccaaaua

SEQ ID NO: 1689004 - RNA, 19 nt, Artificial Sequence
  Description of Artificial Sequence: Synthetic oligonucleotide
  Antisense strand to SEQ ID NO: 1689003
uauuuggccagacugaguc

SEQ ID NO: 1689005 - RNA, 19 nt, Artificial Sequence
  Description of Artificial Sequence: Synthetic oligonucleotide
  Sense strand starting at position 1584 of SEQ ID NO: 1561664
gccaaauaggcagaucugu

SEQ ID NO: 1689006 - RNA, 19 nt, Artificial Sequence
  Description of Artificial Sequence: Synthetic oligonucleotide
  Antisense strand to SEQ ID NO: 1689005
acagaucugccuauuuggc

SEQ ID NO: 1689007 - RNA, 19 nt, Artificial Sequence
  Description of Artificial Sequence: Synthetic oligonucleotide
  Sense strand starting at position 1590 of SEQ ID NO: 1561664
uaggcagaucugugucuga

SEQ ID NO: 1689008 - RNA, 19 nt, Artificial Sequence
  Description of Artificial Sequence: Synthetic oligonucleotide
  Antisense strand to SEQ ID NO: 1689007
ucagacacagaucugccua

SEQ ID NO: 1689009 - RNA, 19 nt, Artificial Sequence
  Description of Artificial Sequence: Synthetic oligonucleotide
  Sense strand starting at position 1594 of SEQ ID NO: 1561664
cagaucugugucugacuca

SEQ ID NO: 1689010 - RNA, 19 nt, Artificial Sequence
  Description of Artificial Sequence: Synthetic oligonucleotide
  Antisense strand to SEQ ID NO: 1689009
ugagucagacacagaucug

SEQ ID NO: 1689011 - RNA, 19 nt, Artificial Sequence
  Description of Artificial Sequence: Synthetic oligonucleotide
  Sense strand starting at position 2091 of SEQ ID NO: 1561664
cagcuauggccuuagugag

SEQ ID NO: 1689012 - RNA, 19 nt, Artificial Sequence
  Description of Artificial Sequence: Synthetic oligonucleotide
  Antisense strand to SEQ ID NO: 1689011
cucacuaaggccauagcug

SEQ ID NO: 1689013 - RNA, 19 nt, Artificial Sequence
  Description of Artificial Sequence: Synthetic oligonucleotide
  Sense strand starting at position 2141 of SEQ ID NO: 1561664
cuaggaggguaucuuauca

SEQ ID NO: 1689014 - RNA, 19 nt, Artificial Sequence
  Description of Artificial Sequence: Synthetic oligonucleotide
  Antisense strand to SEQ ID NO: 1689013
ugauaagauacccuccuag

SEQ ID NO: 1689015 - RNA, 19 nt, Artificial Sequence
  Description of Artificial Sequence: Synthetic oligonucleotide
  Sense strand starting at position 2258 of SEQ ID NO: 1561664
ccaagcucucucggaaaca

SEQ ID NO: 1689016 - RNA, 19 nt, Artificial Sequence
  Description of Artificial Sequence: Synthetic oligonucleotide
  Antisense strand to SEQ ID NO: 1689015
uguuuccgagagagcuugg

SEQ ID NO: 1689017 - RNA, 19 nt, Artificial Sequence
  Description of Artificial Sequence: Synthetic oligonucleotide
  Sense strand starting at position 2310 of SEQ ID NO: 1561664
gcaccauccucagucauug

SEQ ID NO: 1689018 - RNA, 19 nt, Artificial Sequence
  Description of Artificial Sequence: Synthetic oligonucleotide
  Antisense strand to SEQ ID NO: 1689017
caaugacugaggauggugc

SEQ ID NO: 1689019 - RNA, 19 nt, Artificial Sequence
  Description of Artificial Sequence: Synthetic oligonucleotide
  Sense strand starting at position 2315 of SEQ ID NO: 1561664
auccucagucauugacuga

SEQ ID NO: 1689020 - RNA, 19 nt, Artificial Sequence
  Description of Artificial Sequence: Synthetic oligonucleotide
  Antisense strand to SEQ ID NO: 1689019
ucagucaaugacugaggau

SEQ ID NO: 1689021 - RNA, 19 nt, Artificial Sequence
  Description of Artificial Sequence: Synthetic oligonucleotide
  Sense strand starting at position 2373 of SEQ ID NO: 1561664
cccaguuacugagcucuga

SEQ ID NO: 1689022 - RNA, 19 nt, Artificial Sequence
  Description of Artificial Sequence: Synthetic oligonucleotide
  Antisense strand to SEQ ID NO: 1689021
ucagagcucaguaacuggg

SEQ ID NO: 1689023 - RNA, 19 nt, Artificial Sequence
  Description of Artificial Sequence: Synthetic oligonucleotide
  Sense strand starting at position 2384 of SEQ ID NO: 1561664
agcucugacccugaucaca

SEQ ID NO: 1689024 - RNA, 19 nt, Artificial Sequence
  Description of Artificial Sequence: Synthetic oligonucleotide
  Antisense strand to SEQ ID NO: 1689023
ugugaucagggucagagcu

SEQ ID NO: 1689025 - RNA, 19 nt, Artificial Sequence
  Description of Artificial Sequence: Synthetic oligonucleotide
  Sense strand starting at position 2530 of SEQ ID NO: 1561664
ggauuaguccacggucucu

SEQ ID NO: 1689026 - RNA, 19 nt, Artificial Sequence
  Description of Artificial Sequence: Synthetic oligonucleotide
  Antisense strand to SEQ ID NO: 1689025
agagaccguggacuaaucc

SEQ ID NO: 1689027 - RNA, 19 nt, Artificial Sequence
  Description of Artificial Sequence: Synthetic oligonucleotide
  Sense strand starting at position 2542 of SEQ ID NO: 1561664
ggucucuuuccacauuaca

SEQ ID NO: 1689028 - RNA, 19 nt, Artificial Sequence
  Description of Artificial Sequence: Synthetic oligonucleotide
  Antisense strand to SEQ ID NO: 1689027
uguaauguggaaagagacc

SEQ ID NO: 1689029 - RNA, 19 nt, Artificial Sequence
  Description of Artificial Sequence: Synthetic oligonucleotide
  Sense strand starting at position 2644 of SEQ ID NO: 1561664
gaggguuguguugauacau

SEQ ID NO: 1689030 - RNA, 19 nt, Artificial Sequence
  Description of Artificial Sequence: Synthetic oligonucleotide
  Antisense strand to SEQ ID NO: 1689029
auguaucaacacaacccuc

SEQ ID NO: 1689031 - RNA, 19 nt, Artificial Sequence
  Description of Artificial Sequence: Synthetic oligonucleotide
  Sense strand starting at position 2652 of SEQ ID NO: 1561664
uguugauacaugcauguga

SEQ ID NO: 1689032 - RNA, 19 nt, Artificial Sequence
  Description of Artificial Sequence: Synthetic oligonucleotide
  Antisense strand to SEQ ID NO: 1689031
ucacaugcauguaucaaca

SEQ ID NO: 1689033 - RNA, 19 nt, Artificial Sequence
  Description of Artificial Sequence: Synthetic oligonucleotide
  Sense strand starting at position 2654 of SEQ ID NO: 1561664
uugauacaugcaugugagu

SEQ ID NO: 1689034 - RNA, 19 nt, Artificial Sequence
  Description of Artificial Sequence: Synthetic oligonucleotide
  Antisense strand to SEQ ID NO: 1689033
acucacaugcauguaucaa

SEQ ID NO: 1689035 - RNA, 19 nt, Artificial Sequence
  Description of Artificial Sequence: Synthetic oligonucleotide
  Sense strand starting at position 2656 of SEQ ID NO: 1561664
gauacaugcaugugagugu

SEQ ID NO: 1689036 - RNA, 19 nt, Artificial Sequence
  Description of Artificial Sequence: Synthetic oligonucleotide
  Antisense strand to SEQ ID NO: 1689035
acacucacaugcauguauc

SEQ ID NO: 1689037 - RNA, 19 nt, Artificial Sequence
  Description of Artificial Sequence: Synthetic oligonucleotide
  Sense strand starting at position 2901 of SEQ ID NO: 1561664
guggacuguuuccugggau

SEQ ID NO: 1689038 - RNA, 19 nt, Artificial Sequence
  Description of Artificial Sequence: Synthetic oligonucleotide
  Antisense strand to SEQ ID NO: 1689037
aucccaggaaacaguccac

SEQ ID NO: 1689039 - RNA, 19 nt, Artificial Sequence
  Description of Artificial Sequence: Synthetic oligonucleotide
  Sense strand starting at position 3458 of SEQ ID NO: 1561664
ggugacagccaguagacau

SEQ ID NO: 1689040 - RNA, 19 nt, Artificial Sequence
  Description of Artificial Sequence: Synthetic oligonucleotide
  Antisense strand to SEQ ID NO: 1689039
augucuacuggcugucacc

SEQ ID NO: 1689041 - RNA, 19 nt, Artificial Sequence
  Description of Artificial Sequence: Synthetic oligonucleotide
  Sense strand starting at position 3484 of SEQ ID NO: 1561664
ggagauucucaccagccca

SEQ ID NO: 1689042 - RNA, 19 nt, Artificial Sequence
  Description of Artificial Sequence: Synthetic oligonucleotide
  Antisense strand to SEQ ID NO: 1689041
ugggcuggugagaaucucc

SEQ ID NO: 1689043 - RNA, 19 nt, Artificial Sequence
  Description of Artificial Sequence: Synthetic oligonucleotide
  Sense strand starting at position 3557 of SEQ ID NO: 1561664
cugcuauaugcagaauguu

SEQ ID NO: 1689044 - RNA, 19 nt, Artificial Sequence
  Description of Artificial Sequence: Synthetic oligonucleotide
  Antisense strand to SEQ ID NO: 1689043
aacauucugcauauagcag

SEQ ID NO: 1689045 - RNA, 19 nt, Artificial Sequence
  Description of Artificial Sequence: Synthetic oligonucleotide
  Sense strand starting at position 3644 of SEQ ID NO: 1561664
ggaccauacuaggugcaua

SEQ ID NO: 1689046 - RNA, 19 nt, Artificial Sequence
  Description of Artificial Sequence: Synthetic oligonucleotide
  Antisense strand to SEQ ID NO: 1689045
uaugcaccuaguauggucc

SEQ ID NO: 1689047 - RNA, 19 nt, Artificial Sequence
  Description of Artificial Sequence: Synthetic oligonucleotide
  Sense strand starting at position 3647 of SEQ ID NO: 1561664
ccauacuaggugcauaaau

SEQ ID NO: 1689048 - RNA, 19 nt, Artificial Sequence
  Description of Artificial Sequence: Synthetic oligonucleotide
  Antisense strand to SEQ ID NO: 1689047
auuuaugcaccuaguaugg

SEQ ID NO: 1689049 - RNA, 19 nt, Artificial Sequence
  Description of Artificial Sequence: Synthetic oligonucleotide
  Sense strand starting at position 3649 of SEQ ID NO: 1561664
auacuaggugcauaaauau

SEQ ID NO: 1689050 - RNA, 19 nt, Artificial Sequence
  Description of Artificial Sequence: Synthetic oligonucleotide
  Antisense strand to SEQ ID NO: 1689049
auauuuaugcaccuaguau

SEQ ID NO: 1689051 - RNA, 19 nt, Artificial Sequence
  Description of Artificial Sequence: Synthetic oligonucleotide
  Sense strand starting at position 3689 of SEQ ID NO: 1561664
gaguauacauuugaaagac

SEQ ID NO: 1689052 - RNA, 19 nt, Artificial Sequence
  Description of Artificial Sequence: Synthetic oligonucleotide
  Antisense strand to SEQ ID NO: 1689051
gucuuucaaauguauacuc

SEQ ID NO: 1689053 - RNA, 19 nt, Artificial Sequence
  Description of Artificial Sequence: Synthetic oligonucleotide
  Sense strand starting at position 3699 of SEQ ID NO: 1561664
uugaaagacccuuguaaca

SEQ ID NO: 1689054 - RNA, 19 nt, Artificial Sequence
  Description of Artificial Sequence: Synthetic oligonucleotide
  Antisense strand to SEQ ID NO: 1689053
uguuacaagggucuuucaa

SEQ ID NO: 1689055 - RNA, 19 nt, Artificial Sequence
  Description of Artificial Sequence: Synthetic oligonucleotide
  Sense strand starting at position 3843 of SEQ ID NO: 1561664
uaccauucuggaggucuga

SEQ ID NO: 1689056 - RNA, 19 nt, Artificial Sequence
  Description of Artificial Sequence: Synthetic oligonucleotide
  Antisense strand to SEQ ID NO: 1689055
ucagaccuccagaauggua

SEQ ID NO: 1689057 - RNA, 19 nt, Artificial Sequence
  Description of Artificial Sequence: Synthetic oligonucleotide
  Sense strand starting at position 3967 of SEQ ID NO: 1561664
ucuagaagcugcccuuauu

SEQ ID NO: 1689058 - RNA, 19 nt, Artificial Sequence
  Description of Artificial Sequence: Synthetic oligonucleotide
  Antisense strand to SEQ ID NO: 1689057
aauaagggcagcuucuaga

SEQ ID NO: 1689059 - RNA, 19 nt, Artificial Sequence
  Description of Artificial Sequence: Synthetic oligonucleotide
  Sense strand starting at position 255 of SEQ ID NO: 1561665
cugugucccuauuuaugau

SEQ ID NO: 1689060 - RNA, 19 nt, Artificial Sequence
  Description of Artificial Sequence: Synthetic oligonucleotide
  Antisense strand to SEQ ID NO: 1689059
aucauaaauagggacacag

SEQ ID NO: 1689061 - RNA, 19 nt, Artificial Sequence
  Description of Artificial Sequence: Synthetic oligonucleotide
  Sense strand starting at position 326 of SEQ ID NO: 1561665
uuuauaaucuagcaaagga

SEQ ID NO: 1689062 - RNA, 19 nt, Artificial Sequence
  Description of Artificial Sequence: Synthetic oligonucleotide
  Antisense strand to SEQ ID NO: 1689061
uccuuugcuagauuauaaa

SEQ ID NO: 1689063 - RNA, 19 nt, Artificial Sequence
  Description of Artificial Sequence: Synthetic oligonucleotide
  Sense strand starting at position 444 of SEQ ID NO: 1561665
ccaugcugauagcuagauu

SEQ ID NO: 1689064 - RNA, 19 nt, Artificial Sequence
  Description of Artificial Sequence: Synthetic oligonucleotide
  Antisense strand to SEQ ID NO: 1689063
aaucuagcuaucagcaugg

SEQ ID NO: 1689065 - RNA, 19 nt, Artificial Sequence
  Description of Artificial Sequence: Synthetic oligonucleotide
  Sense strand starting at position 455 of SEQ ID NO: 1561665
gcuagauuagcccagagag

SEQ ID NO: 1689066 - RNA, 19 nt, Artificial Sequence
  Description of Artificial Sequence: Synthetic oligonucleotide
  Antisense strand to SEQ ID NO: 1689065
cucucugggcuaaucuagc

SEQ ID NO: 1689067 - RNA, 19 nt, Artificial Sequence
  Description of Artificial Sequence: Synthetic oligonucleotide
  Sense strand starting at position 490 of SEQ ID NO: 1561665
aaggucaaacagugaguaa

SEQ ID NO: 1689068 - RNA, 19 nt, Artificial Sequence
  Description of Artificial Sequence: Synthetic oligonucleotide
  Antisense strand to SEQ ID NO: 1689067
uuacucacuguuugaccuu

SEQ ID NO: 1689069 - RNA, 19 nt, Artificial Sequence
  Description of Artificial Sequence: Synthetic oligonucleotide
  Sense strand starting at position 493 of SEQ ID NO: 1561665
gucaaacagugaguaacua

SEQ ID NO: 1689070 - RNA, 19 nt, Artificial Sequence
  Description of Artificial Sequence: Synthetic oligonucleotide
  Antisense strand to SEQ ID NO: 1689069
uaguuacucacuguuugac

SEQ ID NO: 1689071 - RNA, 19 nt, Artificial Sequence
  Description of Artificial Sequence: Synthetic oligonucleotide
  Sense strand starting at position 632 of SEQ ID NO: 1561665
cugccuauuggacaaauua

SEQ ID NO: 1689072 - RNA, 19 nt, Artificial Sequence
  Description of Artificial Sequence: Synthetic oligonucleotide
  Antisense strand to SEQ ID NO: 1689071
uaauuuguccaauaggcag

SEQ ID NO: 1689073 - RNA, 19 nt, Artificial Sequence
  Description of Artificial Sequence: Synthetic oligonucleotide
  Sense strand starting at position 667 of SEQ ID NO: 1561665
ccucaauuccuggaagcaa

SEQ ID NO: 1689074 - RNA, 19 nt, Artificial Sequence
  Description of Artificial Sequence: Synthetic oligonucleotide
  Antisense strand to SEQ ID NO: 1689073
uugcuuccaggaauugagg

SEQ ID NO: 1689075 - RNA, 19 nt, Artificial Sequence
  Description of Artificial Sequence: Synthetic oligonucleotide
  Sense strand starting at position 948 of SEQ ID NO: 1561665
cugccuccuuccucugaga

SEQ ID NO: 1689076 - RNA, 19 nt, Artificial Sequence
  Description of Artificial Sequence: Synthetic oligonucleotide
  Antisense strand to SEQ ID NO: 1689075
ucucagaggaaggaggcag

SEQ ID NO: 1689077 - RNA, 19 nt, Artificial Sequence
  Description of Artificial Sequence: Synthetic oligonucleotide
  Sense strand starting at position 950 of SEQ ID NO: 1561665
gccuccuuccucugagauu

SEQ ID NO: 1689078 - RNA, 19 nt, Artificial Sequence
  Description of Artificial Sequence: Synthetic oligonucleotide
  Antisense strand to SEQ ID NO: 1689077
aaucucagaggaaggaggc

SEQ ID NO: 1689079 - RNA, 19 nt, Artificial Sequence
  Description of Artificial Sequence: Synthetic oligonucleotide
  Sense strand starting at position 963 of SEQ ID NO: 1561665
gagauugaguaggcuucuu

SEQ ID NO: 1689080 - RNA, 19 nt, Artificial Sequence
  Description of Artificial Sequence: Synthetic oligonucleotide
  Antisense strand to SEQ ID NO: 1689079
aagaagccuacucaaucuc

SEQ ID NO: 1689081 - RNA, 19 nt, Artificial Sequence
  Description of Artificial Sequence: Synthetic oligonucleotide
  Sense strand starting at position 1095 of SEQ ID NO: 1561665
ggagguacccaguaagugu

SEQ ID NO: 1689082 - RNA, 19 nt, Artificial Sequence
  Description of Artificial Sequence: Synthetic oligonucleotide
  Antisense strand to SEQ ID NO: 1689081
acacuuacuggguaccucc

SEQ ID NO: 1689083 - RNA, 19 nt, Artificial Sequence
  Description of Artificial Sequence: Synthetic oligonucleotide
  Sense strand starting at position 1102 of SEQ ID NO: 1561665
cccaguaaguguuuggaga

SEQ ID NO: 1689084 - RNA, 19 nt, Artificial Sequence
  Description of Artificial Sequence: Synthetic oligonucleotide
  Antisense strand to SEQ ID NO: 1689083
ucuccaaacacuuacuggg

SEQ ID NO: 1689085 - RNA, 19 nt, Artificial Sequence
  Description of Artificial Sequence: Synthetic oligonucleotide
  Sense strand starting at position 1103 of SEQ ID NO: 1561665
ccaguaaguguuuggagaa

SEQ ID NO: 1689086 - RNA, 19 nt, Artificial Sequence
  Description of Artificial Sequence: Synthetic oligonucleotide
  Antisense strand to SEQ ID NO: 1689085
uucuccaaacacuuacugg

SEQ ID NO: 1689087 - RNA, 19 nt, Artificial Sequence
  Description of Artificial Sequence: Synthetic oligonucleotide
  Sense strand starting at position 1110 of SEQ ID NO: 1561665
guguuuggagaaugaauga

SEQ ID NO: 1689088 - RNA, 19 nt, Artificial Sequence
  Description of Artificial Sequence: Synthetic oligonucleotide
  Antisense strand to SEQ ID NO: 1689087
ucauucauucuccaaacac

SEQ ID NO: 1689089 - RNA, 19 nt, Artificial Sequence
  Description of Artificial Sequence: Synthetic oligonucleotide
  Sense strand starting at position 1314 of SEQ ID NO: 1561665
gcucaaucaaguuggagga

SEQ ID NO: 1689090 - RNA, 19 nt, Artificial Sequence
  Description of Artificial Sequence: Synthetic oligonucleotide
  Antisense strand to SEQ ID NO: 1689089
uccuccaacuugauugagc

SEQ ID NO: 1689091 - RNA, 19 nt, Artificial Sequence
  Description of Artificial Sequence: Synthetic oligonucleotide
  Sense strand starting at position 1401 of SEQ ID NO: 1561665
gaggaauggcccuguagag

SEQ ID NO: 1689092 - RNA, 19 nt, Artificial Sequence
  Description of Artificial Sequence: Synthetic oligonucleotide
  Antisense strand to SEQ ID NO: 1689091
cucuacagggccauuccuc

SEQ ID NO: 1689093 - RNA, 19 nt, Artificial Sequence
  Description of Artificial Sequence: Synthetic oligonucleotide
  Sense strand starting at position 1534 of SEQ ID NO: 1561665
guucccuuacccuagugau

SEQ ID NO: 1689094 - RNA, 19 nt, Artificial Sequence
  Description of Artificial Sequence: Synthetic oligonucleotide
  Antisense strand to SEQ ID NO: 1689093
aucacuaggguaagggaac

SEQ ID NO: 1689095 - RNA, 19 nt, Artificial Sequence
  Description of Artificial Sequence: Synthetic oligonucleotide
  Sense strand starting at position 1744 of SEQ ID NO: 1561665
aggagaaugugcucucuaa

SEQ ID NO: 1689096 - RNA, 19 nt, Artificial Sequence
  Description of Artificial Sequence: Synthetic oligonucleotide
  Antisense strand to SEQ ID NO: 1689095
uuagagagcacauucuccu

SEQ ID NO: 1689097 - RNA, 19 nt, Artificial Sequence
  Description of Artificial Sequence: Synthetic oligonucleotide
  Sense strand starting at position 1748 of SEQ ID NO: 1561665
gaaugugcucucuaagcag

SEQ ID NO: 1689098 - RNA, 19 nt, Artificial Sequence
  Description of Artificial Sequence: Synthetic oligonucleotide
  Antisense strand to SEQ ID NO: 1689097
cugcuuagagagcacauuc

SEQ ID NO: 1689099 - RNA, 19 nt, Artificial Sequence
  Description of Artificial Sequence: Synthetic oligonucleotide
  Sense strand starting at position 1806 of SEQ ID NO: 1561665
augcucuaagcauauagau

SEQ ID NO: 1689100 - RNA, 19 nt, Artificial Sequence
  Description of Artificial Sequence: Synthetic oligonucleotide
  Antisense strand to SEQ ID NO: 1689099
aucuauaugcuuagagcau

SEQ ID NO: 1689101 - RNA, 19 nt, Artificial Sequence
  Description of Artificial Sequence: Synthetic oligonucleotide
  Sense strand starting at position 1818 of SEQ ID NO: 1561665
uauagauugagucguugac

SEQ ID NO: 1689102 - RNA, 19 nt, Artificial Sequence
  Description of Artificial Sequence: Synthetic oligonucleotide
  Antisense strand to SEQ ID NO: 1689101
gucaacgacucaaucuaua

SEQ ID NO: 1689103 - RNA, 19 nt, Artificial Sequence
  Description of Artificial Sequence: Synthetic oligonucleotide
  Sense strand starting at position 1820 of SEQ ID NO: 1561665
uagauugagucguugacau

SEQ ID NO: 1689104 - RNA, 19 nt, Artificial Sequence
  Description of Artificial Sequence: Synthetic oligonucleotide
  Antisense strand to SEQ ID NO: 1689103
augucaacgacucaaucua

SEQ ID NO: 1689105 - RNA, 19 nt, Artificial Sequence
  Description of Artificial Sequence: Synthetic oligonucleotide
  Sense strand starting at position 1822 of SEQ ID NO: 1561665
gauugagucguugacauug

SEQ ID NO: 1689106 - RNA, 19 nt, Artificial Sequence
  Description of Artificial Sequence: Synthetic oligonucleotide
  Antisense strand to SEQ ID NO: 1689105
caaugucaacgacucaauc

SEQ ID NO: 1689107 - RNA, 19 nt, Artificial Sequence
  Description of Artificial Sequence: Synthetic oligonucleotide
  Sense strand starting at position 2383 of SEQ ID NO: 1561665
ccgggugucuggagugaca

SEQ ID NO: 1689108 - RNA, 19 nt, Artificial Sequence
  Description of Artificial Sequence: Synthetic oligonucleotide
  Antisense strand to SEQ ID NO: 1689107
ugucacuccagacacccgg

SEQ ID NO: 1689109 - RNA, 19 nt, Artificial Sequence
  Description of Artificial Sequence: Synthetic oligonucleotide
  Sense strand starting at position 2474 of SEQ ID NO: 1561665
ggcucaugaggcuguuuca

SEQ ID NO: 1689110 - RNA, 19 nt, Artificial Sequence
  Description of Artificial Sequence: Synthetic oligonucleotide
  Antisense strand to SEQ ID NO: 1689109
ugaaacagccucaugagcc

SEQ ID NO: 1689111 - RNA, 19 nt, Artificial Sequence
  Description of Artificial Sequence: Synthetic oligonucleotide
  Sense strand starting at position 2794 of SEQ ID NO: 1561665
ugaccuccuugagcuuaaa

SEQ ID NO: 1689112 - RNA, 19 nt, Artificial Sequence
  Description of Artificial Sequence: Synthetic oligonucleotide
  Antisense strand to SEQ ID NO: 1689111
uuuaagcucaaggagguca

SEQ ID NO: 1689113 - RNA, 19 nt, Artificial Sequence
  Description of Artificial Sequence: Synthetic oligonucleotide
  Sense strand starting at position 2850 of SEQ ID NO: 1561665
ugcgguuccuuguuaggaa

SEQ ID NO: 1689114 - RNA, 19 nt, Artificial Sequence
  Description of Artificial Sequence: Synthetic oligonucleotide
  Antisense strand to SEQ ID NO: 1689113
uuccuaacaaggaaccgca

SEQ ID NO: 1689115 - RNA, 19 nt, Artificial Sequence
  Description of Artificial Sequence: Synthetic oligonucleotide
  Sense strand starting at position 2890 of SEQ ID NO: 1561665
auggcugacuccuuaucau

SEQ ID NO: 1689116 - RNA, 19 nt, Artificial Sequence
  Description of Artificial Sequence: Synthetic oligonucleotide
  Antisense strand to SEQ ID NO: 1689115
augauaaggagucagccau

SEQ ID NO: 1689117 - RNA, 19 nt, Artificial Sequence
  Description of Artificial Sequence: Synthetic oligonucleotide
  Sense strand starting at position 2893 of SEQ ID NO: 1561665
gcugacuccuuaucauuga

SEQ ID NO: 1689118 - RNA, 19 nt, Artificial Sequence
  Description of Artificial Sequence: Synthetic oligonucleotide
  Antisense strand to SEQ ID NO: 1689117
ucaaugauaaggagucagc

SEQ ID NO: 1689119 - RNA, 19 nt, Artificial Sequence
  Description of Artificial Sequence: Synthetic oligonucleotide
  Sense strand starting at position 2966 of SEQ ID NO: 1561665
aagaaauccgucugucacu

SEQ ID NO: 1689120 - RNA, 19 nt, Artificial Sequence
  Description of Artificial Sequence: Synthetic oligonucleotide
  Antisense strand to SEQ ID NO: 1689119
agugacagacggauuucuu

SEQ ID NO: 1689121 - RNA, 19 nt, Artificial Sequence
  Description of Artificial Sequence: Synthetic oligonucleotide
  Sense strand starting at position 2967 of SEQ ID NO: 1561665
agaaauccgucugucacua

SEQ ID NO: 1689122 - RNA, 19 nt, Artificial Sequence
  Description of Artificial Sequence: Synthetic oligonucleotide
  Antisense strand to SEQ ID NO: 1689121
uagugacagacggauuucu

SEQ ID NO: 1689123 - RNA, 19 nt, Artificial Sequence
  Description of Artificial Sequence: Synthetic oligonucleotide
  Sense strand starting at position 2971 of SEQ ID NO: 1561665
auccgucugucacuaaaca

SEQ ID NO: 1689124 - RNA, 19 nt, Artificial Sequence
  Description of Artificial Sequence: Synthetic oligonucleotide
  Antisense strand to SEQ ID NO: 1689123
uguuuagugacagacggau

SEQ ID NO: 1689125 - RNA, 19 nt, Artificial Sequence
  Description of Artificial Sequence: Synthetic oligonucleotide
  Sense strand starting at position 2972 of SEQ ID NO: 1561665
uccgucugucacuaaacau

SEQ ID NO: 1689126 - RNA, 19 nt, Artificial Sequence
  Description of Artificial Sequence: Synthetic oligonucleotide
  Antisense strand to SEQ ID NO: 1689125
auguuuagugacagacgga

SEQ ID NO: 1689127 - RNA, 19 nt, Artificial Sequence
  Description of Artificial Sequence: Synthetic oligonucleotide
  Sense strand starting at position 3037 of SEQ ID NO: 1561665
gcaucuguuuguguccuua

SEQ ID NO: 1689128 - RNA, 19 nt, Artificial Sequence
  Description of Artificial Sequence: Synthetic oligonucleotide
  Antisense strand to SEQ ID NO: 1689127
uaaggacacaaacagaugc

SEQ ID NO: 1689129 - RNA, 19 nt, Artificial Sequence
  Description of Artificial Sequence: Synthetic oligonucleotide
  Sense strand starting at position 3039 of SEQ ID NO: 1561665
aucuguuuguguccuuauu

SEQ ID NO: 1689130 - RNA, 19 nt, Artificial Sequence
  Description of Artificial Sequence: Synthetic oligonucleotide
  Antisense strand to SEQ ID NO: 1689129
aauaaggacacaaacagau

SEQ ID NO: 1689131 - RNA, 19 nt, Artificial Sequence
  Description of Artificial Sequence: Synthetic oligonucleotide
  Sense strand starting at position 3041 of SEQ ID NO: 1561665
cuguuuguguccuuauuuc

SEQ ID NO: 1689132 - RNA, 19 nt, Artificial Sequence
  Description of Artificial Sequence: Synthetic oligonucleotide
  Antisense strand to SEQ ID NO: 1689131
gaaauaaggacacaaacag

SEQ ID NO: 1689133 - RNA, 19 nt, Artificial Sequence
  Description of Artificial Sequence: Synthetic oligonucleotide
  Sense strand starting at position 3170 of SEQ ID NO: 1561665
ugucacuggccaggagaaa

SEQ ID NO: 1689134 - RNA, 19 nt, Artificial Sequence
  Description of Artificial Sequence: Synthetic oligonucleotide
  Antisense strand to SEQ ID NO: 1689133
uuucuccuggccagugaca

SEQ ID NO: 1689135 - RNA, 19 nt, Artificial Sequence
  Description of Artificial Sequence: Synthetic oligonucleotide
  Sense strand starting at position 3590 of SEQ ID NO: 1561665
ccagaaucccgucaauaug

SEQ ID NO: 1689136 - RNA, 19 nt, Artificial Sequence
  Description of Artificial Sequence: Synthetic oligonucleotide
  Antisense strand to SEQ ID NO: 1689135
cauauugacgggauucugg

SEQ ID NO: 1689137 - RNA, 19 nt, Artificial Sequence
  Description of Artificial Sequence: Synthetic oligonucleotide
  Sense strand starting at position 3593 of SEQ ID NO: 1561665
gaaucccgucaauauguca

SEQ ID NO: 1689138 - RNA, 19 nt, Artificial Sequence
  Description of Artificial Sequence: Synthetic oligonucleotide
  Antisense strand to SEQ ID NO: 1689137
ugacauauugacgggauuc

SEQ ID NO: 1689139 - RNA, 19 nt, Artificial Sequence
  Description of Artificial Sequence: Synthetic oligonucleotide
  Sense strand starting at position 710 of SEQ ID NO: 1561666
augacuucuccaggcugau

SEQ ID NO: 1689140 - RNA, 19 nt, Artificial Sequence
  Description of Artificial Sequence: Synthetic oligonucleotide
  Antisense strand to SEQ ID NO: 1689139
aucagccuggagaagucau

SEQ ID NO: 1689141 - RNA, 19 nt, Artificial Sequence
  Description of Artificial Sequence: Synthetic oligonucleotide
  Sense strand starting at position 1206 of SEQ ID NO: 1561666
cgcaacugauucuugggaa

SEQ ID NO: 1689142 - RNA, 19 nt, Artificial Sequence
  Description of Artificial Sequence: Synthetic oligonucleotide
  Antisense strand to SEQ ID NO: 1689141
uucccaagaaucaguugcg

SEQ ID NO: 1689143 - RNA, 19 nt, Artificial Sequence
  Description of Artificial Sequence: Synthetic oligonucleotide
  Sense strand starting at position 1221 of SEQ ID NO: 1561666
ggaaauagucaaggccaga

SEQ ID NO: 1689144 - RNA, 19 nt, Artificial Sequence
  Description of Artificial Sequence: Synthetic oligonucleotide
  Antisense strand to SEQ ID NO: 1689143
ucuggccuugacuauuucc

SEQ ID NO: 1689145 - RNA, 19 nt, Artificial Sequence
  Description of Artificial Sequence: Synthetic oligonucleotide
  Sense strand starting at position 1265 of SEQ ID NO: 1561666
gauugaggccugugaggua

SEQ ID NO: 1689146 - RNA, 19 nt, Artificial Sequence
  Description of Artificial Sequence: Synthetic oligonucleotide
  Antisense strand to SEQ ID NO: 1689145
uaccucacaggccucaauc

SEQ ID NO: 1689147 - RNA, 19 nt, Artificial Sequence
  Description of Artificial Sequence: Synthetic oligonucleotide
  Sense strand starting at position 1274 of SEQ ID NO: 1561666
cugugagguacucagagau

SEQ ID NO: 1689148 - RNA, 19 nt, Artificial Sequence
  Description of Artificial Sequence: Synthetic oligonucleotide
  Antisense strand to SEQ ID NO: 1689147
aucucugaguaccucacag

SEQ ID NO: 1689149 - RNA, 19 nt, Artificial Sequence
  Description of Artificial Sequence: Synthetic oligonucleotide
  Sense strand starting at position 1353 of SEQ ID NO: 1561666
gggagaaaguauguccuca

SEQ ID NO: 1689150 - RNA, 19 nt, Artificial Sequence
  Description of Artificial Sequence: Synthetic oligonucleotide
  Antisense strand to SEQ ID NO: 1689149
ugaggacauacuuucuccc

SEQ ID NO: 1689151 - RNA, 19 nt, Artificial Sequence
  Description of Artificial Sequence: Synthetic oligonucleotide
  Sense strand starting at position 1355 of SEQ ID NO: 1561666
gagaaaguauguccucaca

SEQ ID NO: 1689152 - RNA, 19 nt, Artificial Sequence
  Description of Artificial Sequence: Synthetic oligonucleotide
  Antisense strand to SEQ ID NO: 1689151
ugugaggacauacuuucuc

SEQ ID NO: 1689153 - RNA, 19 nt, Artificial Sequence
  Description of Artificial Sequence: Synthetic oligonucleotide
  Sense strand starting at position 1357 of SEQ ID NO: 1561666
gaaaguauguccucacaug

SEQ ID NO: 1689154 - RNA, 19 nt, Artificial Sequence
  Description of Artificial Sequence: Synthetic oligonucleotide
  Antisense strand to SEQ ID NO: 1689153
caugugaggacauacuuuc

SEQ ID NO: 1689155 - RNA, 19 nt, Artificial Sequence
  Description of Artificial Sequence: Synthetic oligonucleotide
  Sense strand starting at position 1497 of SEQ ID NO: 1561666
ucauaucaguucucugaga

SEQ ID NO: 1689156 - RNA, 19 nt, Artificial Sequence
  Description of Artificial Sequence: Synthetic oligonucleotide
  Antisense strand to SEQ ID NO: 1689155
ucucagagaacugauauga

SEQ ID NO: 1689157 - RNA, 19 nt, Artificial Sequence
  Description of Artificial Sequence: Synthetic oligonucleotide
  Sense strand starting at position 1499 of SEQ ID NO: 1561666
auaucaguucucugagaua

SEQ ID NO: 1689158 - RNA, 19 nt, Artificial Sequence
  Description of Artificial Sequence: Synthetic oligonucleotide
  Antisense strand to SEQ ID NO: 1689157
uaucucagagaacugauau

SEQ ID NO: 1689159 - RNA, 19 nt, Artificial Sequence
  Description of Artificial Sequence: Synthetic oligonucleotide
  Sense strand starting at position 1653 of SEQ ID NO: 1561666
gccucuaaagaaugagcau

SEQ ID NO: 1689160 - RNA, 19 nt, Artificial Sequence
  Description of Artificial Sequence: Synthetic oligonucleotide
  Antisense strand to SEQ ID NO: 1689159
augcucauucuuuagaggc

SEQ ID NO: 1689161 - RNA, 19 nt, Artificial Sequence
  Description of Artificial Sequence: Synthetic oligonucleotide
  Sense strand starting at position 1667 of SEQ ID NO: 1561666
agcauaaagucaccaguau

SEQ ID NO: 1689162 - RNA, 19 nt, Artificial Sequence
  Description of Artificial Sequence: Synthetic oligonucleotide
  Antisense strand to SEQ ID NO: 1689161
auacuggugacuuuaugcu

SEQ ID NO: 1689163 - RNA, 19 nt, Artificial Sequence
  Description of Artificial Sequence: Synthetic oligonucleotide
  Sense strand starting at position 1668 of SEQ ID NO: 1561666
gcauaaagucaccaguaug

SEQ ID NO: 1689164 - RNA, 19 nt, Artificial Sequence
  Description of Artificial Sequence: Synthetic oligonucleotide
  Antisense strand to SEQ ID NO: 1689163
cauacuggugacuuuaugc

SEQ ID NO: 1689165 - RNA, 19 nt, Artificial Sequence
  Description of Artificial Sequence: Synthetic oligonucleotide
  Sense strand starting at position 1872 of SEQ ID NO: 1561666
uggacucaccauugcucaa

SEQ ID NO: 1689166 - RNA, 19 nt, Artificial Sequence
  Description of Artificial Sequence: Synthetic oligonucleotide
  Antisense strand to SEQ ID NO: 1689165
uugagcaauggugagucca

SEQ ID NO: 1689167 - RNA, 19 nt, Artificial Sequence
  Description of Artificial Sequence: Synthetic oligonucleotide
  Sense strand starting at position 2433 of SEQ ID NO: 1561666
cuucguauuuauucuccua

SEQ ID NO: 1689168 - RNA, 19 nt, Artificial Sequence
  Description of Artificial Sequence: Synthetic oligonucleotide
  Antisense strand to SEQ ID NO: 1689167
uaggagaauaaauacgaag

SEQ ID NO: 1689169 - RNA, 19 nt, Artificial Sequence
  Description of Artificial Sequence: Synthetic oligonucleotide
  Sense strand starting at position 2435 of SEQ ID NO: 1561666
ucguauuuauucuccuauu

SEQ ID NO: 1689170 - RNA, 19 nt, Artificial Sequence
  Description of Artificial Sequence: Synthetic oligonucleotide
  Antisense strand to SEQ ID NO: 1689169
aauaggagaauaaauacga

SEQ ID NO: 1689171 - RNA, 19 nt, Artificial Sequence
  Description of Artificial Sequence: Synthetic oligonucleotide
  Sense strand starting at position 2436 of SEQ ID NO: 1561666
cguauuuauucuccuauuc

SEQ ID NO: 1689172 - RNA, 19 nt, Artificial Sequence
  Description of Artificial Sequence: Synthetic oligonucleotide
  Antisense strand to SEQ ID NO: 1689171
gaauaggagaauaaauacg

SEQ ID NO: 1689173 - RNA, 19 nt, Artificial Sequence
  Description of Artificial Sequence: Synthetic oligonucleotide
  Sense strand starting at position 2495 of SEQ ID NO: 1561666
cccaucugucauggaaaca

SEQ ID NO: 1689174 - RNA, 19 nt, Artificial Sequence
  Description of Artificial Sequence: Synthetic oligonucleotide
  Antisense strand to SEQ ID NO: 1689173
uguuuccaugacagauggg

SEQ ID NO: 1689175 - RNA, 19 nt, Artificial Sequence
  Description of Artificial Sequence: Synthetic oligonucleotide
  Sense strand starting at position 2836 of SEQ ID NO: 1561666
uucccaucucuuuggagga

SEQ ID NO: 1689176 - RNA, 19 nt, Artificial Sequence
  Description of Artificial Sequence: Synthetic oligonucleotide
  Antisense strand to SEQ ID NO: 1689175
uccuccaaagagaugggaa

SEQ ID NO: 1689177 - RNA, 19 nt, Artificial Sequence
  Description of Artificial Sequence: Synthetic oligonucleotide
  Sense strand starting at position 2840 of SEQ ID NO: 1561666
caucucuuuggaggaguca

SEQ ID NO: 1689178 - RNA, 19 nt, Artificial Sequence
  Description of Artificial Sequence: Synthetic oligonucleotide
  Antisense strand to SEQ ID NO: 1689177
ugacuccuccaaagagaug

SEQ ID NO: 1689179 - RNA, 19 nt, Artificial Sequence
  Description of Artificial Sequence: Synthetic oligonucleotide
  Sense strand starting at position 2863 of SEQ ID NO: 1561666
uacaccacgugguuaauau

SEQ ID NO: 1689180 - RNA, 19 nt, Artificial Sequence
  Description of Artificial Sequence: Synthetic oligonucleotide
  Antisense strand to SEQ ID NO: 1689179
auauuaaccacguggugua

SEQ ID NO: 1689181 - RNA, 19 nt, Artificial Sequence
  Description of Artificial Sequence: Synthetic oligonucleotide
  Sense strand starting at position 2864 of SEQ ID NO: 1561666
acaccacgugguuaauauu

SEQ ID NO: 1689182 - RNA, 19 nt, Artificial Sequence
  Description of Artificial Sequence: Synthetic oligonucleotide
  Antisense strand to SEQ ID NO: 1689181
aauauuaaccacguggugu

SEQ ID NO: 1689183 - RNA, 19 nt, Artificial Sequence
  Description of Artificial Sequence: Synthetic oligonucleotide
  Sense strand starting at position 2879 of SEQ ID NO: 1561666
uauuaauggcucuagguca

SEQ ID NO: 1689184 - RNA, 19 nt, Artificial Sequence
  Description of Artificial Sequence: Synthetic oligonucleotide
  Antisense strand to SEQ ID NO: 1689183
ugaccuagagccauuaaua

SEQ ID NO: 1689185 - RNA, 19 nt, Artificial Sequence
  Description of Artificial Sequence: Synthetic oligonucleotide
  Sense strand starting at position 2884 of SEQ ID NO: 1561666
auggcucuaggucagagau

SEQ ID NO: 1689186 - RNA, 19 nt, Artificial Sequence
  Description of Artificial Sequence: Synthetic oligonucleotide
  Antisense strand to SEQ ID NO: 1689185
aucucugaccuagagccau

SEQ ID NO: 1689187 - RNA, 19 nt, Artificial Sequence
  Description of Artificial Sequence: Synthetic oligonucleotide
  Sense strand starting at position 2894 of SEQ ID NO: 1561666
gucagagauaucugggucu

SEQ ID NO: 1689188 - RNA, 19 nt, Artificial Sequence
  Description of Artificial Sequence: Synthetic oligonucleotide
  Antisense strand to SEQ ID NO: 1689187
agacccagauaucucugac

SEQ ID NO: 1689189 - RNA, 19 nt, Artificial Sequence
  Description of Artificial Sequence: Synthetic oligonucleotide
  Sense strand starting at position 2896 of SEQ ID NO: 1561666
cagagauaucugggucuua

SEQ ID NO: 1689190 - RNA, 19 nt, Artificial Sequence
  Description of Artificial Sequence: Synthetic oligonucleotide
  Antisense strand to SEQ ID NO: 1689189
uaagacccagauaucucug

SEQ ID NO: 1689191 - RNA, 19 nt, Artificial Sequence
  Description of Artificial Sequence: Synthetic oligonucleotide
  Sense strand starting at position 2897 of SEQ ID NO: 1561666
agagauaucugggucuuaa

SEQ ID NO: 1689192 - RNA, 19 nt, Artificial Sequence
  Description of Artificial Sequence: Synthetic oligonucleotide
  Antisense strand to SEQ ID NO: 1689191
uuaagacccagauaucucu

SEQ ID NO: 1689193 - RNA, 19 nt, Artificial Sequence
  Description of Artificial Sequence: Synthetic oligonucleotide
  Sense strand starting at position 2907 of SEQ ID NO: 1561666
gggucuuaaugcuuaggaa

SEQ ID NO: 1689194 - RNA, 19 nt, Artificial Sequence
  Description of Artificial Sequence: Synthetic oligonucleotide
  Antisense strand to SEQ ID NO: 1689193
uuccuaagcauuaagaccc

SEQ ID NO: 1689195 - RNA, 19 nt, Artificial Sequence
  Description of Artificial Sequence: Synthetic oligonucleotide
  Sense strand starting at position 2908 of SEQ ID NO: 1561666
ggucuuaaugcuuaggaaa

SEQ ID NO: 1689196 - RNA, 19 nt, Artificial Sequence
  Description of Artificial Sequence: Synthetic oligonucleotide
  Antisense strand to SEQ ID NO: 1689195
uuuccuaagcauuaagacc

SEQ ID NO: 1689197 - RNA, 19 nt, Artificial Sequence
  Description of Artificial Sequence: Synthetic oligonucleotide
  Sense strand starting at position 3010 of SEQ ID NO: 1561666
uauuguuauuacuuuggga

SEQ ID NO: 1689198 - RNA, 19 nt, Artificial Sequence
  Description of Artificial Sequence: Synthetic oligonucleotide
  Antisense strand to SEQ ID NO: 1689197
ucccaaaguaauaacaaua

SEQ ID NO: 1689199 - RNA, 19 nt, Artificial Sequence
  Description of Artificial Sequence: Synthetic oligonucleotide
  Sense strand starting at position 3012 of SEQ ID NO: 1561666
uuguuauuacuuugggacu

SEQ ID NO: 1689200 - RNA, 19 nt, Artificial Sequence
  Description of Artificial Sequence: Synthetic oligonucleotide
  Antisense strand to SEQ ID NO: 1689199
agucccaaaguaauaacaa

SEQ ID NO: 1689201 - RNA, 19 nt, Artificial Sequence
  Description of Artificial Sequence: Synthetic oligonucleotide
  Sense strand starting at position 3018 of SEQ ID NO: 1561666
uuacuuugggacuguuauu

SEQ ID NO: 1689202 - RNA, 19 nt, Artificial Sequence
  Description of Artificial Sequence: Synthetic oligonucleotide
  Antisense strand to SEQ ID NO: 1689201
aauaacagucccaaaguaa

SEQ ID NO: 1689203 - RNA, 19 nt, Artificial Sequence
  Description of Artificial Sequence: Synthetic oligonucleotide
  Sense strand starting at position 3106 of SEQ ID NO: 1561666
cugcauagccucugggaaa

SEQ ID NO: 1689204 - RNA, 19 nt, Artificial Sequence
  Description of Artificial Sequence: Synthetic oligonucleotide
  Antisense strand to SEQ ID NO: 1689203
uuucccagaggcuaugcag

SEQ ID NO: 1689205 - RNA, 19 nt, Artificial Sequence
  Description of Artificial Sequence: Synthetic oligonucleotide
  Sense strand starting at position 3392 of SEQ ID NO: 1561666
ggacuacuauaugcaauaa

SEQ ID NO: 1689206 - RNA, 19 nt, Artificial Sequence
  Description of Artificial Sequence: Synthetic oligonucleotide
  Antisense strand to SEQ ID NO: 1689205
uuauugcauauaguagucc

SEQ ID NO: 1689207 - RNA, 19 nt, Artificial Sequence
  Description of Artificial Sequence: Synthetic oligonucleotide
  Sense strand starting at position 3570 of SEQ ID NO: 1561666
acccaacgucccugggaaa

SEQ ID NO: 1689208 - RNA, 19 nt, Artificial Sequence
  Description of Artificial Sequence: Synthetic oligonucleotide
  Antisense strand to SEQ ID NO: 1689207
uuucccagggacguugggu

SEQ ID NO: 1689209 - RNA, 19 nt, Artificial Sequence
  Description of Artificial Sequence: Synthetic oligonucleotide
  Sense strand starting at position 3612 of SEQ ID NO: 1561666
auguaauuggcauaaccca

SEQ ID NO: 1689210 - RNA, 19 nt, Artificial Sequence
  Description of Artificial Sequence: Synthetic oligonucleotide
  Antisense strand to SEQ ID NO: 1689209
uggguuaugccaauuacau

SEQ ID NO: 1689211 - RNA, 19 nt, Artificial Sequence
  Description of Artificial Sequence: Synthetic oligonucleotide
  Sense strand starting at position 3880 of SEQ ID NO: 1561666
ggucacagaucagucuuau

SEQ ID NO: 1689212 - RNA, 19 nt, Artificial Sequence
  Description of Artificial Sequence: Synthetic oligonucleotide
  Antisense strand to SEQ ID NO: 1689211
auaagacugaucugugacc

SEQ ID NO: 1689213 - RNA, 19 nt, Artificial Sequence
  Description of Artificial Sequence: Synthetic oligonucleotide
  Sense strand starting at position 3932 of SEQ ID NO: 1561666
agggaaacacuguguaauu

SEQ ID NO: 1689214 - RNA, 19 nt, Artificial Sequence
  Description of Artificial Sequence: Synthetic oligonucleotide
  Antisense strand to SEQ ID NO: 1689213
aauuacacaguguuucccu

SEQ ID NO: 1689215 - RNA, 19 nt, Artificial Sequence
  Description of Artificial Sequence: Synthetic oligonucleotide
  Sense strand starting at position 3933 of SEQ ID NO: 1561666
gggaaacacuguguaauua

SEQ ID NO: 1689216 - RNA, 19 nt, Artificial Sequence
  Description of Artificial Sequence: Synthetic oligonucleotide
  Antisense strand to SEQ ID NO: 1689215
uaauuacacaguguuuccc

SEQ ID NO: 1689217 - RNA, 19 nt, Artificial Sequence
  Description of Artificial Sequence: Synthetic oligonucleotide
  Sense strand starting at position 3966 of SEQ ID NO: 1561666
ucagauuugcucugcaaau

SEQ ID NO: 1689218 - RNA, 19 nt, Artificial Sequence
  Description of Artificial Sequence: Synthetic oligonucleotide
  Antisense strand to SEQ ID NO: 1689217
auuugcagagcaaaucuga

SEQ ID NO: 1689219 - RNA, 19 nt, Artificial Sequence
  Description of Artificial Sequence: Synthetic oligonucleotide
  Sense strand starting at position 192 of SEQ ID NO: 1561667
uuccucuugucauuagaug

SEQ ID NO: 1689220 - RNA, 19 nt, Artificial Sequence
  Description of Artificial Sequence: Synthetic oligonucleotide
  Antisense strand to SEQ ID NO: 1689219
caucuaaugacaagaggaa

SEQ ID NO: 1689221 - RNA, 19 nt, Artificial Sequence
  Description of Artificial Sequence: Synthetic oligonucleotide
  Sense strand starting at position 193 of SEQ ID NO: 1561667
uccucuugucauuagauga

SEQ ID NO: 1689222 - RNA, 19 nt, Artificial Sequence
  Description of Artificial Sequence: Synthetic oligonucleotide
  Antisense strand to SEQ ID NO: 1689221
ucaucuaaugacaagagga

SEQ ID NO: 1689223 - RNA, 19 nt, Artificial Sequence
  Description of Artificial Sequence: Synthetic oligonucleotide
  Sense strand starting at position 198 of SEQ ID NO: 1561667
uugucauuagaugauuguu

SEQ ID NO: 1689224 - RNA, 19 nt, Artificial Sequence
  Description of Artificial Sequence: Synthetic oligonucleotide
  Antisense strand to SEQ ID NO: 1689223
aacaaucaucuaaugacaa

SEQ ID NO: 1689225 - RNA, 19 nt, Artificial Sequence
  Description of Artificial Sequence: Synthetic oligonucleotide
  Sense strand starting at position 200 of SEQ ID NO: 1561667
gucauuagaugauuguuga

SEQ ID NO: 1689226 - RNA, 19 nt, Artificial Sequence
  Description of Artificial Sequence: Synthetic oligonucleotide
  Antisense strand to SEQ ID NO: 1689225
ucaacaaucaucuaaugac

SEQ ID NO: 1689227 - RNA, 19 nt, Artificial Sequence
  Description of Artificial Sequence: Synthetic oligonucleotide
  Sense strand starting at position 201 of SEQ ID NO: 1561667
ucauuagaugauuguugau

SEQ ID NO: 1689228 - RNA, 19 nt, Artificial Sequence
  Description of Artificial Sequence: Synthetic oligonucleotide
  Antisense strand to SEQ ID NO: 1689227
aucaacaaucaucuaauga

SEQ ID NO: 1689229 - RNA, 19 nt, Artificial Sequence
  Description of Artificial Sequence: Synthetic oligonucleotide
  Sense strand starting at position 210 of SEQ ID NO: 1561667
gauuguugaugccuuucca

SEQ ID NO: 1689230 - RNA, 19 nt, Artificial Sequence
  Description of Artificial Sequence: Synthetic oligonucleotide
  Antisense strand to SEQ ID NO: 1689229
uggaaaggcaucaacaauc

SEQ ID NO: 1689231 - RNA, 19 nt, Artificial Sequence
  Description of Artificial Sequence: Synthetic oligonucleotide
  Sense strand starting at position 280 of SEQ ID NO: 1561667
ucauguugcaugcagaguu

SEQ ID NO: 1689232 - RNA, 19 nt, Artificial Sequence
  Description of Artificial Sequence: Synthetic oligonucleotide
  Antisense strand to SEQ ID NO: 1689231
aacucugcaugcaacauga

SEQ ID NO: 1689233 - RNA, 19 nt, Artificial Sequence
  Description of Artificial Sequence: Synthetic oligonucleotide
  Sense strand starting at position 401 of SEQ ID NO: 1561667
ggagcagugaccuacccaa

SEQ ID NO: 1689234 - RNA, 19 nt, Artificial Sequence
  Description of Artificial Sequence: Synthetic oligonucleotide
  Antisense strand to SEQ ID NO: 1689233
uuggguaggucacugcucc

SEQ ID NO: 1689235 - RNA, 19 nt, Artificial Sequence
  Description of Artificial Sequence: Synthetic oligonucleotide
  Sense strand starting at position 489 of SEQ ID NO: 1561667
ugcuaagaucuugggcaca

SEQ ID NO: 1689236 - RNA, 19 nt, Artificial Sequence
  Description of Artificial Sequence: Synthetic oligonucleotide
  Antisense strand to SEQ ID NO: 1689235
ugugcccaagaucuuagca

SEQ ID NO: 1689237 - RNA, 19 nt, Artificial Sequence
  Description of Artificial Sequence: Synthetic oligonucleotide
  Sense strand starting at position 494 of SEQ ID NO: 1561667
agaucuugggcacagcaau

SEQ ID NO: 1689238 - RNA, 19 nt, Artificial Sequence
  Description of Artificial Sequence: Synthetic oligonucleotide
  Antisense strand to SEQ ID NO: 1689237
auugcugugcccaagaucu

SEQ ID NO: 1689239 - RNA, 19 nt, Artificial Sequence
  Description of Artificial Sequence: Synthetic oligonucleotide
  Sense strand starting at position 676 of SEQ ID NO: 1561667
gacacuuaguuggagagau

SEQ ID NO: 1689240 - RNA, 19 nt, Artificial Sequence
  Description of Artificial Sequence: Synthetic oligonucleotide
  Antisense strand to SEQ ID NO: 1689239
aucucuccaacuaaguguc

SEQ ID NO: 1689241 - RNA, 19 nt, Artificial Sequence
  Description of Artificial Sequence: Synthetic oligonucleotide
  Sense strand starting at position 702 of SEQ ID NO: 1561667
gggccaaucacucagguau

SEQ ID NO: 1689242 - RNA, 19 nt, Artificial Sequence
  Description of Artificial Sequence: Synthetic oligonucleotide
  Antisense strand to SEQ ID NO: 1689241
auaccugagugauuggccc

SEQ ID NO: 1689243 - RNA, 19 nt, Artificial Sequence
  Description of Artificial Sequence: Synthetic oligonucleotide
  Sense strand starting at position 907 of SEQ ID NO: 1561667
ggugacagaucaguuggua

SEQ ID NO: 1689244 - RNA, 19 nt, Artificial Sequence
  Description of Artificial Sequence: Synthetic oligonucleotide
  Antisense strand to SEQ ID NO: 1689243
uaccaacugaucugucacc

SEQ ID NO: 1689245 - RNA, 19 nt, Artificial Sequence
  Description of Artificial Sequence: Synthetic oligonucleotide
  Sense strand starting at position 910 of SEQ ID NO: 1561667
gacagaucaguugguacuu

SEQ ID NO: 1689246 - RNA, 19 nt, Artificial Sequence
  Description of Artificial Sequence: Synthetic oligonucleotide
  Antisense strand to SEQ ID NO: 1689245
aaguaccaacugaucuguc

SEQ ID NO: 1689247 - RNA, 19 nt, Artificial Sequence
  Description of Artificial Sequence: Synthetic oligonucleotide
  Sense strand starting at position 1124 of SEQ ID NO: 1561667
gcucuugaacccuagggua

SEQ ID NO: 1689248 - RNA, 19 nt, Artificial Sequence
  Description of Artificial Sequence: Synthetic oligonucleotide
  Antisense strand to SEQ ID NO: 1689247
uacccuaggguucaagagc

SEQ ID NO: 1689249 - RNA, 19 nt, Artificial Sequence
  Description of Artificial Sequence: Synthetic oligonucleotide
  Sense strand starting at position 1145 of SEQ ID NO: 1561667
gacuuuauccuguggacca

SEQ ID NO: 1689250 - RNA, 19 nt, Artificial Sequence
  Description of Artificial Sequence: Synthetic oligonucleotide
  Antisense strand to SEQ ID NO: 1689249
ugguccacaggauaaaguc

SEQ ID NO: 1689251 - RNA, 19 nt, Artificial Sequence
  Description of Artificial Sequence: Synthetic oligonucleotide
  Sense strand starting at position 1168 of SEQ ID NO: 1561667
cucccaagccuaggugauu

SEQ ID NO: 1689252 - RNA, 19 nt, Artificial Sequence
  Description of Artificial Sequence: Synthetic oligonucleotide
  Antisense strand to SEQ ID NO: 1689251
aaucaccuaggcuugggag

SEQ ID NO: 1689253 - RNA, 19 nt, Artificial Sequence
  Description of Artificial Sequence: Synthetic oligonucleotide
  Sense strand starting at position 1169 of SEQ ID NO: 1561667
ucccaagccuaggugauua

SEQ ID NO: 1689254 - RNA, 19 nt, Artificial Sequence
  Description of Artificial Sequence: Synthetic oligonucleotide
  Antisense strand to SEQ ID NO: 1689253
uaaucaccuaggcuuggga

SEQ ID NO: 1689255 - RNA, 19 nt, Artificial Sequence
  Description of Artificial Sequence: Synthetic oligonucleotide
  Sense strand starting at position 1214 of SEQ ID NO: 1561667
agacuuugggccugaagca

SEQ ID NO: 1689256 - RNA, 19 nt, Artificial Sequence
  Description of Artificial Sequence: Synthetic oligonucleotide
  Antisense strand to SEQ ID NO: 1689255
ugcuucaggcccaaagucu

SEQ ID NO: 1689257 - RNA, 19 nt, Artificial Sequence
  Description of Artificial Sequence: Synthetic oligonucleotide
  Sense strand starting at position 1294 of SEQ ID NO: 1561667
ccuccauuauggucacaag

SEQ ID NO: 1689258 - RNA, 19 nt, Artificial Sequence
  Description of Artificial Sequence: Synthetic oligonucleotide
  Antisense strand to SEQ ID NO: 1689257
cuugugaccauaauggagg

SEQ ID NO: 1689259 - RNA, 19 nt, Artificial Sequence
  Description of Artificial Sequence: Synthetic oligonucleotide
  Sense strand starting at position 1312 of SEQ ID NO: 1561667
gcuaauuccagagagggca

SEQ ID NO: 1689260 - RNA, 19 nt, Artificial Sequence
  Description of Artificial Sequence: Synthetic oligonucleotide
  Antisense strand to SEQ ID NO: 1689259
ugcccucucuggaauuagc

SEQ ID NO: 1689261 - RNA, 19 nt, Artificial Sequence
  Description of Artificial Sequence: Synthetic oligonucleotide
  Sense strand starting at position 1345 of SEQ ID NO: 1561667
guagaacagucauuagccu

SEQ ID NO: 1689262 - RNA, 19 nt, Artificial Sequence
  Description of Artificial Sequence: Synthetic oligonucleotide
  Antisense strand to SEQ ID NO: 1689261
aggcuaaugacuguucuac

SEQ ID NO: 1689263 - RNA, 19 nt, Artificial Sequence
  Description of Artificial Sequence: Synthetic oligonucleotide
  Sense strand starting at position 1474 of SEQ ID NO: 1561667
acagacuggucacccuauu

SEQ ID NO: 1689264 - RNA, 19 nt, Artificial Sequence
  Description of Artificial Sequence: Synthetic oligonucleotide
  Antisense strand to SEQ ID NO: 1689263
aauagggugaccagucugu

SEQ ID NO: 1689265 - RNA, 19 nt, Artificial Sequence
  Description of Artificial Sequence: Synthetic oligonucleotide
  Sense strand starting at position 1574 of SEQ ID NO: 1561667
caaguuguugcugggauuu

SEQ ID NO: 1689266 - RNA, 19 nt, Artificial Sequence
  Description of Artificial Sequence: Synthetic oligonucleotide
  Antisense strand to SEQ ID NO: 1689265
aaaucccagcaacaacuug

SEQ ID NO: 1689267 - RNA, 19 nt, Artificial Sequence
  Description of Artificial Sequence: Synthetic oligonucleotide
  Sense strand starting at position 1751 of SEQ ID NO: 1561667
cucuguaaagugggagaau

SEQ ID NO: 1689268 - RNA, 19 nt, Artificial Sequence
  Description of Artificial Sequence: Synthetic oligonucleotide
  Antisense strand to SEQ ID NO: 1689267
auucucccacuuuacagag

SEQ ID NO: 1689269 - RNA, 19 nt, Artificial Sequence
  Description of Artificial Sequence: Synthetic oligonucleotide
  Sense strand starting at position 1760 of SEQ ID NO: 1561667
gugggagaauaauaauaac

SEQ ID NO: 1689270 - RNA, 19 nt, Artificial Sequence
  Description of Artificial Sequence: Synthetic oligonucleotide
  Antisense strand to SEQ ID NO: 1689269
guuauuauuauucucccac

SEQ ID NO: 1689271 - RNA, 19 nt, Artificial Sequence
  Description of Artificial Sequence: Synthetic oligonucleotide
  Sense strand starting at position 1763 of SEQ ID NO: 1561667
ggagaauaauaauaacacu

SEQ ID NO: 1689272 - RNA, 19 nt, Artificial Sequence
  Description of Artificial Sequence: Synthetic oligonucleotide
  Antisense strand to SEQ ID NO: 1689271
aguguuauuauuauucucc

SEQ ID NO: 1689273 - RNA, 19 nt, Artificial Sequence
  Description of Artificial Sequence: Synthetic oligonucleotide
  Sense strand starting at position 2460 of SEQ ID NO: 1561667
agcucacuuccauguggaa

SEQ ID NO: 1689274 - RNA, 19 nt, Artificial Sequence
  Description of Artificial Sequence: Synthetic oligonucleotide
  Antisense strand to SEQ ID NO: 1689273
uuccacauggaagugagcu

SEQ ID NO: 1689275 - RNA, 19 nt, Artificial Sequence
  Description of Artificial Sequence: Synthetic oligonucleotide
  Sense strand starting at position 2522 of SEQ ID NO: 1561667
ucgccucuccgauagagaa

SEQ ID NO: 1689276 - RNA, 19 nt, Artificial Sequence
  Description of Artificial Sequence: Synthetic oligonucleotide
  Antisense strand to SEQ ID NO: 1689275
uucucuaucggagaggcga

SEQ ID NO: 1689277 - RNA, 19 nt, Artificial Sequence
  Description of Artificial Sequence: Synthetic oligonucleotide
  Sense strand starting at position 2552 of SEQ ID NO: 1561667
gacauuaggucuccuagca

SEQ ID NO: 1689278 - RNA, 19 nt, Artificial Sequence
  Description of Artificial Sequence: Synthetic oligonucleotide
  Antisense strand to SEQ ID NO: 1689277
ugcuaggagaccuaauguc

SEQ ID NO: 1689279 - RNA, 19 nt, Artificial Sequence
  Description of Artificial Sequence: Synthetic oligonucleotide
  Sense strand starting at position 3040 of SEQ ID NO: 1561667
gaagcaauagggugggaua

SEQ ID NO: 1689280 - RNA, 19 nt, Artificial Sequence
  Description of Artificial Sequence: Synthetic oligonucleotide
  Antisense strand to SEQ ID NO: 1689279
uaucccacccuauugcuuc

SEQ ID NO: 1689281 - RNA, 19 nt, Artificial Sequence
  Description of Artificial Sequence: Synthetic oligonucleotide
  Sense strand starting at position 3041 of SEQ ID NO: 1561667
aagcaauagggugggauau

SEQ ID NO: 1689282 - RNA, 19 nt, Artificial Sequence
  Description of Artificial Sequence: Synthetic oligonucleotide
  Antisense strand to SEQ ID NO: 1689281
auaucccacccuauugcuu

SEQ ID NO: 1689283 - RNA, 19 nt, Artificial Sequence
  Description of Artificial Sequence: Synthetic oligonucleotide
  Sense strand starting at position 3130 of SEQ ID NO: 1561667
agcuuaaguaucgagaagu

SEQ ID NO: 1689284 - RNA, 19 nt, Artificial Sequence
  Description of Artificial Sequence: Synthetic oligonucleotide
  Antisense strand to SEQ ID NO: 1689283
acuucucgauacuuaagcu

SEQ ID NO: 1689285 - RNA, 19 nt, Artificial Sequence
  Description of Artificial Sequence: Synthetic oligonucleotide
  Sense strand starting at position 3140 of SEQ ID NO: 1561667
ucgagaaguguucaagcca

SEQ ID NO: 1689286 - RNA, 19 nt, Artificial Sequence
  Description of Artificial Sequence: Synthetic oligonucleotide
  Antisense strand to SEQ ID NO: 1689285
uggcuugaacacuucucga

SEQ ID NO: 1689287 - RNA, 19 nt, Artificial Sequence
  Description of Artificial Sequence: Synthetic oligonucleotide
  Sense strand starting at position 3179 of SEQ ID NO: 1561667
ggaagauauaucugggcuu

SEQ ID NO: 1689288 - RNA, 19 nt, Artificial Sequence
  Description of Artificial Sequence: Synthetic oligonucleotide
  Antisense strand to SEQ ID NO: 1689287
aagcccagauauaucuucc

SEQ ID NO: 1689289 - RNA, 19 nt, Artificial Sequence
  Description of Artificial Sequence: Synthetic oligonucleotide
  Sense strand starting at position 3182 of SEQ ID NO: 1561667
agauauaucugggcuuaaa

SEQ ID NO: 1689290 - RNA, 19 nt, Artificial Sequence
  Description of Artificial Sequence: Synthetic oligonucleotide
  Antisense strand to SEQ ID NO: 1689289
uuuaagcccagauauaucu

SEQ ID NO: 1689291 - RNA, 19 nt, Artificial Sequence
  Description of Artificial Sequence: Synthetic oligonucleotide
  Sense strand starting at position 3217 of SEQ ID NO: 1561667
cuucucgaccacugugaau

SEQ ID NO: 1689292 - RNA, 19 nt, Artificial Sequence
  Description of Artificial Sequence: Synthetic oligonucleotide
  Antisense strand to SEQ ID NO: 1689291
auucacaguggucgagaag

SEQ ID NO: 1689293 - RNA, 19 nt, Artificial Sequence
  Description of Artificial Sequence: Synthetic oligonucleotide
  Sense strand starting at position 3726 of SEQ ID NO: 1561667
ugaaccugaccgugcaaau

SEQ ID NO: 1689294 - RNA, 19 nt, Artificial Sequence
  Description of Artificial Sequence: Synthetic oligonucleotide
  Antisense strand to SEQ ID NO: 1689293
auuugcacggucagguuca

SEQ ID NO: 1689295 - RNA, 19 nt, Artificial Sequence
  Description of Artificial Sequence: Synthetic oligonucleotide
  Sense strand starting at position 3760 of SEQ ID NO: 1561667
ugaugaguguuuccugcua

SEQ ID NO: 1689296 - RNA, 19 nt, Artificial Sequence
  Description of Artificial Sequence: Synthetic oligonucleotide
  Antisense strand to SEQ ID NO: 1689295
uagcaggaaacacucauca

SEQ ID NO: 1689297 - RNA, 19 nt, Artificial Sequence
  Description of Artificial Sequence: Synthetic oligonucleotide
  Sense strand starting at position 3970 of SEQ ID NO: 1561667
ugcugucuccuugaucuuu

SEQ ID NO: 1689298 - RNA, 19 nt, Artificial Sequence
  Description of Artificial Sequence: Synthetic oligonucleotide
  Antisense strand to SEQ ID NO: 1689297
aaagaucaaggagacagca

SEQ ID NO: 1689299 - RNA, 19 nt, Artificial Sequence
  Description of Artificial Sequence: Synthetic oligonucleotide
  Sense strand starting at position 101 of SEQ ID NO: 1561668
ucuguaagggaauguuaug

SEQ ID NO: 1689300 - RNA, 19 nt, Artificial Sequence
  Description of Artificial Sequence: Synthetic oligonucleotide
  Antisense strand to SEQ ID NO: 1689299
cauaacauucccuuacaga

SEQ ID NO: 1689301 - RNA, 19 nt, Artificial Sequence
  Description of Artificial Sequence: Synthetic oligonucleotide
  Sense strand starting at position 260 of SEQ ID NO: 1561668
guguguccacucuuacgua

SEQ ID NO: 1689302 - RNA, 19 nt, Artificial Sequence
  Description of Artificial Sequence: Synthetic oligonucleotide
  Antisense strand to SEQ ID NO: 1689301
uacguaagaguggacacac

SEQ ID NO: 1689303 - RNA, 19 nt, Artificial Sequence
  Description of Artificial Sequence: Synthetic oligonucleotide
  Sense strand starting at position 368 of SEQ ID NO: 1561668
cccuuauuccaaggaaaug

SEQ ID NO: 1689304 - RNA, 19 nt, Artificial Sequence
  Description of Artificial Sequence: Synthetic oligonucleotide
  Antisense strand to SEQ ID NO: 1689303
cauuuccuuggaauaaggg

SEQ ID NO: 1689305 - RNA, 19 nt, Artificial Sequence
  Description of Artificial Sequence: Synthetic oligonucleotide
  Sense strand starting at position 385 of SEQ ID NO: 1561668
ugcgauuaaagagguaauu

SEQ ID NO: 1689306 - RNA, 19 nt, Artificial Sequence
  Description of Artificial Sequence: Synthetic oligonucleotide
  Antisense strand to SEQ ID NO: 1689305
aauuaccucuuuaaucgca

SEQ ID NO: 1689307 - RNA, 19 nt, Artificial Sequence
  Description of Artificial Sequence: Synthetic oligonucleotide
  Sense strand starting at position 399 of SEQ ID NO: 1561668
uaauuaaggucacuuagga

SEQ ID NO: 1689308 - RNA, 19 nt, Artificial Sequence
  Description of Artificial Sequence: Synthetic oligonucleotide
  Antisense strand to SEQ ID NO: 1689307
uccuaagugaccuuaauua

SEQ ID NO: 1689309 - RNA, 19 nt, Artificial Sequence
  Description of Artificial Sequence: Synthetic oligonucleotide
  Sense strand starting at position 447 of SEQ ID NO: 1561668
gguuuaauacuguauucuc

SEQ ID NO: 1689310 - RNA, 19 nt, Artificial Sequence
  Description of Artificial Sequence: Synthetic oligonucleotide
  Antisense strand to SEQ ID NO: 1689309
gagaauacaguauuaaacc

SEQ ID NO: 1689311 - RNA, 19 nt, Artificial Sequence
  Description of Artificial Sequence: Synthetic oligonucleotide
  Sense strand starting at position 513 of SEQ ID NO: 1561668
caauaaacuuggguguauu

SEQ ID NO: 1689312 - RNA, 19 nt, Artificial Sequence
  Description of Artificial Sequence: Synthetic oligonucleotide
  Antisense strand to SEQ ID NO: 1689311
aauacacccaaguuuauug

SEQ ID NO: 1689313 - RNA, 19 nt, Artificial Sequence
  Description of Artificial Sequence: Synthetic oligonucleotide
  Sense strand starting at position 571 of SEQ ID NO: 1561668
aggaaacgucucuaauauu

SEQ ID NO: 1689314 - RNA, 19 nt, Artificial Sequence
  Description of Artificial Sequence: Synthetic oligonucleotide
  Antisense strand to SEQ ID NO: 1689313
aauauuagagacguuuccu

SEQ ID NO: 1689315 - RNA, 19 nt, Artificial Sequence
  Description of Artificial Sequence: Synthetic oligonucleotide
  Sense strand starting at position 656 of SEQ ID NO: 1561668
aaaguaugucuaugcagac

SEQ ID NO: 1689316 - RNA, 19 nt, Artificial Sequence
  Description of Artificial Sequence: Synthetic oligonucleotide
  Antisense strand to SEQ ID NO: 1689315
gucugcauagacauacuuu

SEQ ID NO: 1689317 - RNA, 19 nt, Artificial Sequence
  Description of Artificial Sequence: Synthetic oligonucleotide
  Sense strand starting at position 657 of SEQ ID NO: 1561668
aaguaugucuaugcagaca

SEQ ID NO: 1689318 - RNA, 19 nt, Artificial Sequence
  Description of Artificial Sequence: Synthetic oligonucleotide
  Antisense strand to SEQ ID NO: 1689317
ugucugcauagacauacuu

SEQ ID NO: 1689319 - RNA, 19 nt, Artificial Sequence
  Description of Artificial Sequence: Synthetic oligonucleotide
  Sense strand starting at position 689 of SEQ ID NO: 1561668
ggaagcacaucaucuaauu

SEQ ID NO: 1689320 - RNA, 19 nt, Artificial Sequence
  Description of Artificial Sequence: Synthetic oligonucleotide
  Antisense strand to SEQ ID NO: 1689319
aauuagaugaugugcuucc

SEQ ID NO: 1689321 - RNA, 19 nt, Artificial Sequence
  Description of Artificial Sequence: Synthetic oligonucleotide
  Sense strand starting at position 725 of SEQ ID NO: 1561668
agaugauaugacggugauu

SEQ ID NO: 1689322 - RNA, 19 nt, Artificial Sequence
  Description of Artificial Sequence: Synthetic oligonucleotide
  Antisense strand to SEQ ID NO: 1689321
aaucaccgucauaucaucu

SEQ ID NO: 1689323 - RNA, 19 nt, Artificial Sequence
  Description of Artificial Sequence: Synthetic oligonucleotide
  Sense strand starting at position 874 of SEQ ID NO: 1561668
aggacaugucgauaaaugu

SEQ ID NO: 1689324 - RNA, 19 nt, Artificial Sequence
  Description of Artificial Sequence: Synthetic oligonucleotide
  Antisense strand to SEQ ID NO: 1689323
acauuuaucgacauguccu

SEQ ID NO: 1689325 - RNA, 19 nt, Artificial Sequence
  Description of Artificial Sequence: Synthetic oligonucleotide
  Sense strand starting at position 924 of SEQ ID NO: 1561668
cuggacaacuaugcugaaa

SEQ ID NO: 1689326 - RNA, 19 nt, Artificial Sequence
  Description of Artificial Sequence: Synthetic oligonucleotide
  Antisense strand to SEQ ID NO: 1689325
uuucagcauaguuguccag

SEQ ID NO: 1689327 - RNA, 19 nt, Artificial Sequence
  Description of Artificial Sequence: Synthetic oligonucleotide
  Sense strand starting at position 1034 of SEQ ID NO: 1561668
agcaucacugcuggaacua

SEQ ID NO: 1689328 - RNA, 19 nt, Artificial Sequence
  Description of Artificial Sequence: Synthetic oligonucleotide
  Antisense strand to SEQ ID NO: 1689327
uaguuccagcagugaugcu

SEQ ID NO: 1689329 - RNA, 19 nt, Artificial Sequence
  Description of Artificial Sequence: Synthetic oligonucleotide
  Sense strand starting at position 1133 of SEQ ID NO: 1561668
cuugauagcucaguuaaca

SEQ ID NO: 1689330 - RNA, 19 nt, Artificial Sequence
  Description of Artificial Sequence: Synthetic oligonucleotide
  Antisense strand to SEQ ID NO: 1689329
uguuaacugagcuaucaag

SEQ ID NO: 1689331 - RNA, 19 nt, Artificial Sequence
  Description of Artificial Sequence: Synthetic oligonucleotide
  Sense strand starting at position 1252 of SEQ ID NO: 1561668
uugacuaaagucugauaac

SEQ ID NO: 1689332 - RNA, 19 nt, Artificial Sequence
  Description of Artificial Sequence: Synthetic oligonucleotide
  Antisense strand to SEQ ID NO: 1689331
guuaucagacuuuagucaa

SEQ ID NO: 1689333 - RNA, 19 nt, Artificial Sequence
  Description of Artificial Sequence: Synthetic oligonucleotide
  Sense strand starting at position 1385 of SEQ ID NO: 1561668
ggaauuagaugucuauagc

SEQ ID NO: 1689334 - RNA, 19 nt, Artificial Sequence
  Description of Artificial Sequence: Synthetic oligonucleotide
  Antisense strand to SEQ ID NO: 1689333
gcuauagacaucuaauucc

SEQ ID NO: 1689335 - RNA, 19 nt, Artificial Sequence
  Description of Artificial Sequence: Synthetic oligonucleotide
  Sense strand starting at position 1386 of SEQ ID NO: 1561668
gaauuagaugucuauagca

SEQ ID NO: 1689336 - RNA, 19 nt, Artificial Sequence
  Description of Artificial Sequence: Synthetic oligonucleotide
  Antisense strand to SEQ ID NO: 1689335
ugcuauagacaucuaauuc

SEQ ID NO: 1689337 - RNA, 19 nt, Artificial Sequence
  Description of Artificial Sequence: Synthetic oligonucleotide
  Sense strand starting at position 1388 of SEQ ID NO: 1561668
auuagaugucuauagcaua

SEQ ID NO: 1689338 - RNA, 19 nt, Artificial Sequence
  Description of Artificial Sequence: Synthetic oligonucleotide
  Antisense strand to SEQ ID NO: 1689337
uaugcuauagacaucuaau

SEQ ID NO: 1689339 - RNA, 19 nt, Artificial Sequence
  Description of Artificial Sequence: Synthetic oligonucleotide
  Sense strand starting at position 1444 of SEQ ID NO: 1561668
ucaaauugaucuuuggaug

SEQ ID NO: 1689340 - RNA, 19 nt, Artificial Sequence
  Description of Artificial Sequence: Synthetic oligonucleotide
  Antisense strand to SEQ ID NO: 1689339
cauccaaagaucaauuuga

SEQ ID NO: 1689341 - RNA, 19 nt, Artificial Sequence
  Description of Artificial Sequence: Synthetic oligonucleotide
  Sense strand starting at position 1488 of SEQ ID NO: 1561668
gaauguguagacuaauugu

SEQ ID NO: 1689342 - RNA, 19 nt, Artificial Sequence
  Description of Artificial Sequence: Synthetic oligonucleotide
  Antisense strand to SEQ ID NO: 1689341
acaauuagucuacacauuc

SEQ ID NO: 1689343 - RNA, 19 nt, Artificial Sequence
  Description of Artificial Sequence: Synthetic oligonucleotide
  Sense strand starting at position 1554 of SEQ ID NO: 1561668
uaaagaauguuggcagagu

SEQ ID NO: 1689344 - RNA, 19 nt, Artificial Sequence
  Description of Artificial Sequence: Synthetic oligonucleotide
  Antisense strand to SEQ ID NO: 1689343
acucugccaacauucuuua

SEQ ID NO: 1689345 - RNA, 19 nt, Artificial Sequence
  Description of Artificial Sequence: Synthetic oligonucleotide
  Sense strand starting at position 1569 of SEQ ID NO: 1561668
gaguacuuucuaggaacaa

SEQ ID NO: 1689346 - RNA, 19 nt, Artificial Sequence
  Description of Artificial Sequence: Synthetic oligonucleotide
  Antisense strand to SEQ ID NO: 1689345
uuguuccuagaaaguacuc

SEQ ID NO: 1689347 - RNA, 19 nt, Artificial Sequence
  Description of Artificial Sequence: Synthetic oligonucleotide
  Sense strand starting at position 1642 of SEQ ID NO: 1561668
cgcacagauguggaguuau

SEQ ID NO: 1689348 - RNA, 19 nt, Artificial Sequence
  Description of Artificial Sequence: Synthetic oligonucleotide
  Antisense strand to SEQ ID NO: 1689347
auaacuccacaucugugcg

SEQ ID NO: 1689349 - RNA, 19 nt, Artificial Sequence
  Description of Artificial Sequence: Synthetic oligonucleotide
  Sense strand starting at position 1699 of SEQ ID NO: 1561668
gcuuuagagaaauagugca

SEQ ID NO: 1689350 - RNA, 19 nt, Artificial Sequence
  Description of Artificial Sequence: Synthetic oligonucleotide
  Antisense strand to SEQ ID NO: 1689349
ugcacuauuucucuaaagc

SEQ ID NO: 1689351 - RNA, 19 nt, Artificial Sequence
  Description of Artificial Sequence: Synthetic oligonucleotide
  Sense strand starting at position 1791 of SEQ ID NO: 1561668
uuuggaaguuuguuaaaca

SEQ ID NO: 1689352 - RNA, 19 nt, Artificial Sequence
  Description of Artificial Sequence: Synthetic oligonucleotide
  Antisense strand to SEQ ID NO: 1689351
uguuuaacaaacuuccaaa

SEQ ID NO: 1689353 - RNA, 19 nt, Artificial Sequence
  Description of Artificial Sequence: Synthetic oligonucleotide
  Sense strand starting at position 1807 of SEQ ID NO: 1561668
acaaguuaucagugcaagg

SEQ ID NO: 1689354 - RNA, 19 nt, Artificial Sequence
  Description of Artificial Sequence: Synthetic oligonucleotide
  Antisense strand to SEQ ID NO: 1689353
ccuugcacugauaacuugu

SEQ ID NO: 1689355 - RNA, 19 nt, Artificial Sequence
  Description of Artificial Sequence: Synthetic oligonucleotide
  Sense strand starting at position 1809 of SEQ ID NO: 1561668
aaguuaucagugcaaggau

SEQ ID NO: 1689356 - RNA, 19 nt, Artificial Sequence
  Description of Artificial Sequence: Synthetic oligonucleotide
  Antisense strand to SEQ ID NO: 1689355
auccuugcacugauaacuu

SEQ ID NO: 1689357 - RNA, 19 nt, Artificial Sequence
  Description of Artificial Sequence: Synthetic oligonucleotide
  Sense strand starting at position 1816 of SEQ ID NO: 1561668
cagugcaaggauugggaaa

SEQ ID NO: 1689358 - RNA, 19 nt, Artificial Sequence
  Description of Artificial Sequence: Synthetic oligonucleotide
  Antisense strand to SEQ ID NO: 1689357
uuucccaauccuugcacug

SEQ ID NO: 1689359 - RNA, 19 nt, Artificial Sequence
  Description of Artificial Sequence: Synthetic oligonucleotide
  Sense strand starting at position 1829 of SEQ ID NO: 1561668
gggaaagaaugagaaauca

SEQ ID NO: 1689360 - RNA, 19 nt, Artificial Sequence
  Description of Artificial Sequence: Synthetic oligonucleotide
  Antisense strand to SEQ ID NO: 1689359
ugauuucucauucuuuccc

SEQ ID NO: 1689361 - RNA, 19 nt, Artificial Sequence
  Description of Artificial Sequence: Synthetic oligonucleotide
  Sense strand starting at position 1881 of SEQ ID NO: 1561668
auacaacggcguuaauaau

SEQ ID NO: 1689362 - RNA, 19 nt, Artificial Sequence
  Description of Artificial Sequence: Synthetic oligonucleotide
  Antisense strand to SEQ ID NO: 1689361
auuauuaacgccguuguau

SEQ ID NO: 1689363 - RNA, 19 nt, Artificial Sequence
  Description of Artificial Sequence: Synthetic oligonucleotide
  Sense strand starting at position 1898 of SEQ ID NO: 1561668
aucuguaaguaucucagaa

SEQ ID NO: 1689364 - RNA, 19 nt, Artificial Sequence
  Description of Artificial Sequence: Synthetic oligonucleotide
  Antisense strand to SEQ ID NO: 1689363
uucugagauacuuacagau

SEQ ID NO: 1689365 - RNA, 19 nt, Artificial Sequence
  Description of Artificial Sequence: Synthetic oligonucleotide
  Sense strand starting at position 2113 of SEQ ID NO: 1561668
ggaagauccucccucaggu

SEQ ID NO: 1689366 - RNA, 19 nt, Artificial Sequence
  Description of Artificial Sequence: Synthetic oligonucleotide
  Antisense strand to SEQ ID NO: 1689365
accugagggaggaucuucc

SEQ ID NO: 1689367 - RNA, 19 nt, Artificial Sequence
  Description of Artificial Sequence: Synthetic oligonucleotide
  Sense strand starting at position 2370 of SEQ ID NO: 1561668
gugaguuccugucuaggaa

SEQ ID NO: 1689368 - RNA, 19 nt, Artificial Sequence
  Description of Artificial Sequence: Synthetic oligonucleotide
  Antisense strand to SEQ ID NO: 1689367
uuccuagacaggaacucac

SEQ ID NO: 1689369 - RNA, 19 nt, Artificial Sequence
  Description of Artificial Sequence: Synthetic oligonucleotide
  Sense strand starting at position 2371 of SEQ ID NO: 1561668
ugaguuccugucuaggaaa

SEQ ID NO: 1689370 - RNA, 19 nt, Artificial Sequence
  Description of Artificial Sequence: Synthetic oligonucleotide
  Antisense strand to SEQ ID NO: 1689369
uuuccuagacaggaacuca

SEQ ID NO: 1689371 - RNA, 19 nt, Artificial Sequence
  Description of Artificial Sequence: Synthetic oligonucleotide
  Sense strand starting at position 2426 of SEQ ID NO: 1561668
augcuacuacuaugugaaa

SEQ ID NO: 1689372 - RNA, 19 nt, Artificial Sequence
  Description of Artificial Sequence: Synthetic oligonucleotide
  Antisense strand to SEQ ID NO: 1689371
uuucacauaguaguagcau

SEQ ID NO: 1689373 - RNA, 19 nt, Artificial Sequence
  Description of Artificial Sequence: Synthetic oligonucleotide
  Sense strand starting at position 2546 of SEQ ID NO: 1561668
gcgauugggcuuuaagagu

SEQ ID NO: 1689374 - RNA, 19 nt, Artificial Sequence
  Description of Artificial Sequence: Synthetic oligonucleotide
  Antisense strand to SEQ ID NO: 1689373
acucuuaaagcccaaucgc

SEQ ID NO: 1689375 - RNA, 19 nt, Artificial Sequence
  Description of Artificial Sequence: Synthetic oligonucleotide
  Sense strand starting at position 2731 of SEQ ID NO: 1561668
gacaauggguugcuugaua

SEQ ID NO: 1689376 - RNA, 19 nt, Artificial Sequence
  Description of Artificial Sequence: Synthetic oligonucleotide
  Antisense strand to SEQ ID NO: 1689375
uaucaagcaacccauuguc

SEQ ID NO: 1689377 - RNA, 19 nt, Artificial Sequence
  Description of Artificial Sequence: Synthetic oligonucleotide
  Sense strand starting at position 3949 of SEQ ID NO: 1561668
gaacacuugcacuggcaga

SEQ ID NO: 1689378 - RNA, 19 nt, Artificial Sequence
  Description of Artificial Sequence: Synthetic oligonucleotide
  Antisense strand to SEQ ID NO: 1689377
ucugccagugcaaguguuc

SEQ ID NO: 1689379 - RNA, 19 nt, Artificial Sequence
  Description of Artificial Sequence: Synthetic oligonucleotide
  Sense strand starting at position 197 of SEQ ID NO: 1561669
ccagcaaaucaaugcagaa

SEQ ID NO: 1689380 - RNA, 19 nt, Artificial Sequence
  Description of Artificial Sequence: Synthetic oligonucleotide
  Antisense strand to SEQ ID NO: 1689379
uucugcauugauuugcugg

SEQ ID NO: 1689381 - RNA, 19 nt, Artificial Sequence
  Description of Artificial Sequence: Synthetic oligonucleotide
  Sense strand starting at position 227 of SEQ ID NO: 1561669
ggcaaucagguuuaguaaa

SEQ ID NO: 1689382 - RNA, 19 nt, Artificial Sequence
  Description of Artificial Sequence: Synthetic oligonucleotide
  Antisense strand to SEQ ID NO: 1689381
uuuacuaaaccugauugcc

SEQ ID NO: 1689383 - RNA, 19 nt, Artificial Sequence
  Description of Artificial Sequence: Synthetic oligonucleotide
  Sense strand starting at position 241 of SEQ ID NO: 1561669
guaaacauagcguaccuaa

SEQ ID NO: 1689384 - RNA, 19 nt, Artificial Sequence
  Description of Artificial Sequence: Synthetic oligonucleotide
  Antisense strand to SEQ ID NO: 1689383
uuagguacgcuauguuuac

SEQ ID NO: 1689385 - RNA, 19 nt, Artificial Sequence
  Description of Artificial Sequence: Synthetic oligonucleotide
  Sense strand starting at position 340 of SEQ ID NO: 1561669
gcuuuaagagauuaaugca

SEQ ID NO: 1689386 - RNA, 19 nt, Artificial Sequence
  Description of Artificial Sequence: Synthetic oligonucleotide
  Antisense strand to SEQ ID NO: 1689385
ugcauuaaucucuuaaagc

SEQ ID NO: 1689387 - RNA, 19 nt, Artificial Sequence
  Description of Artificial Sequence: Synthetic oligonucleotide
  Sense strand starting at position 399 of SEQ ID NO: 1561669
auaacuaauuucuaggaga

SEQ ID NO: 1689388 - RNA, 19 nt, Artificial Sequence
  Description of Artificial Sequence: Synthetic oligonucleotide
  Antisense strand to SEQ ID NO: 1689387
ucuccuagaaauuaguuau

SEQ ID NO: 1689389 - RNA, 19 nt, Artificial Sequence
  Description of Artificial Sequence: Synthetic oligonucleotide
  Sense strand starting at position 418 of SEQ ID NO: 1561669
aggguaaacauacgacuuu

SEQ ID NO: 1689390 - RNA, 19 nt, Artificial Sequence
  Description of Artificial Sequence: Synthetic oligonucleotide
  Antisense strand to SEQ ID NO: 1689389
aaagucguauguuuacccu

SEQ ID NO: 1689391 - RNA, 19 nt, Artificial Sequence
  Description of Artificial Sequence: Synthetic oligonucleotide
  Sense strand starting at position 456 of SEQ ID NO: 1561669
uucccaugucuggagaguu

SEQ ID NO: 1689392 - RNA, 19 nt, Artificial Sequence
  Description of Artificial Sequence: Synthetic oligonucleotide
  Antisense strand to SEQ ID NO: 1689391
aacucuccagacaugggaa

SEQ ID NO: 1689393 - RNA, 19 nt, Artificial Sequence
  Description of Artificial Sequence: Synthetic oligonucleotide
  Sense strand starting at position 483 of SEQ ID NO: 1561669
augugugagauauaaagca

SEQ ID NO: 1689394 - RNA, 19 nt, Artificial Sequence
  Description of Artificial Sequence: Synthetic oligonucleotide
  Antisense strand to SEQ ID NO: 1689393
ugcuuuauaucucacacau

SEQ ID NO: 1689395 - RNA, 19 nt, Artificial Sequence
  Description of Artificial Sequence: Synthetic oligonucleotide
  Sense strand starting at position 565 of SEQ ID NO: 1561669
ucccuaaucgagugaaaca

SEQ ID NO: 1689396 - RNA, 19 nt, Artificial Sequence
  Description of Artificial Sequence: Synthetic oligonucleotide
  Antisense strand to SEQ ID NO: 1689395
uguuucacucgauuaggga

SEQ ID NO: 1689397 - RNA, 19 nt, Artificial Sequence
  Description of Artificial Sequence: Synthetic oligonucleotide
  Sense strand starting at position 635 of SEQ ID NO: 1561669
aagggucccucuuuguaaa

SEQ ID NO: 1689398 - RNA, 19 nt, Artificial Sequence
  Description of Artificial Sequence: Synthetic oligonucleotide
  Antisense strand to SEQ ID NO: 1689397
uuuacaaagagggacccuu

SEQ ID NO: 1689399 - RNA, 19 nt, Artificial Sequence
  Description of Artificial Sequence: Synthetic oligonucleotide
  Sense strand starting at position 645 of SEQ ID NO: 1561669
cuuuguaaacgucaggacu

SEQ ID NO: 1689400 - RNA, 19 nt, Artificial Sequence
  Description of Artificial Sequence: Synthetic oligonucleotide
  Antisense strand to SEQ ID NO: 1689399
aguccugacguuuacaaag

SEQ ID NO: 1689401 - RNA, 19 nt, Artificial Sequence
  Description of Artificial Sequence: Synthetic oligonucleotide
  Sense strand starting at position 648 of SEQ ID NO: 1561669
uguaaacgucaggacuaaa

SEQ ID NO: 1689402 - RNA, 19 nt, Artificial Sequence
  Description of Artificial Sequence: Synthetic oligonucleotide
  Antisense strand to SEQ ID NO: 1689401
uuuaguccugacguuuaca

SEQ ID NO: 1689403 - RNA, 19 nt, Artificial Sequence
  Description of Artificial Sequence: Synthetic oligonucleotide
  Sense strand starting at position 789 of SEQ ID NO: 1561669
agaggcaacucauuaauuc

SEQ ID NO: 1689404 - RNA, 19 nt, Artificial Sequence
  Description of Artificial Sequence: Synthetic oligonucleotide
  Antisense strand to SEQ ID NO: 1689403
gaauuaaugaguugccucu

SEQ ID NO: 1689405 - RNA, 19 nt, Artificial Sequence
  Description of Artificial Sequence: Synthetic oligonucleotide
  Sense strand starting at position 875 of SEQ ID NO: 1561669
gcaacaguccaguaacuuc

SEQ ID NO: 1689406 - RNA, 19 nt, Artificial Sequence
  Description of Artificial Sequence: Synthetic oligonucleotide
  Antisense strand to SEQ ID NO: 1689405
gaaguuacuggacuguugc

SEQ ID NO: 1689407 - RNA, 19 nt, Artificial Sequence
  Description of Artificial Sequence: Synthetic oligonucleotide
  Sense strand starting at position 1027 of SEQ ID NO: 1561669
uucuauggcccauagacaa

SEQ ID NO: 1689408 - RNA, 19 nt, Artificial Sequence
  Description of Artificial Sequence: Synthetic oligonucleotide
  Antisense strand to SEQ ID NO: 1689407
uugucuaugggccauagaa

SEQ ID NO: 1689409 - RNA, 19 nt, Artificial Sequence
  Description of Artificial Sequence: Synthetic oligonucleotide
  Sense strand starting at position 2044 of SEQ ID NO: 1561669
agcugaagucaccaaucau

SEQ ID NO: 1689410 - RNA, 19 nt, Artificial Sequence
  Description of Artificial Sequence: Synthetic oligonucleotide
  Antisense strand to SEQ ID NO: 1689409
augauuggugacuucagcu

SEQ ID NO: 1689411 - RNA, 19 nt, Artificial Sequence
  Description of Artificial Sequence: Synthetic oligonucleotide
  Sense strand starting at position 2199 of SEQ ID NO: 1561669
ggaggaguuuaugcccaca

SEQ ID NO: 1689412 - RNA, 19 nt, Artificial Sequence
  Description of Artificial Sequence: Synthetic oligonucleotide
  Antisense strand to SEQ ID NO: 1689411
ugugggcauaaacuccucc

SEQ ID NO: 1689413 - RNA, 19 nt, Artificial Sequence
  Description of Artificial Sequence: Synthetic oligonucleotide
  Sense strand starting at position 2201 of SEQ ID NO: 1561669
aggaguuuaugcccacaga

SEQ ID NO: 1689414 - RNA, 19 nt, Artificial Sequence
  Description of Artificial Sequence: Synthetic oligonucleotide
  Antisense strand to SEQ ID NO: 1689413
ucugugggcauaaacuccu

SEQ ID NO: 1689415 - RNA, 19 nt, Artificial Sequence
  Description of Artificial Sequence: Synthetic oligonucleotide
  Sense strand starting at position 2202 of SEQ ID NO: 1561669
ggaguuuaugcccacagau

SEQ ID NO: 1689416 - RNA, 19 nt, Artificial Sequence
  Description of Artificial Sequence: Synthetic oligonucleotide
  Antisense strand to SEQ ID NO: 1689415
aucugugggcauaaacucc

SEQ ID NO: 1689417 - RNA, 19 nt, Artificial Sequence
  Description of Artificial Sequence: Synthetic oligonucleotide
  Sense strand starting at position 2248 of SEQ ID NO: 1561669
cccaguuaagcaggaucaa

SEQ ID NO: 1689418 - RNA, 19 nt, Artificial Sequence
  Description of Artificial Sequence: Synthetic oligonucleotide
  Antisense strand to SEQ ID NO: 1689417
uugauccugcuuaacuggg

SEQ ID NO: 1689419 - RNA, 19 nt, Artificial Sequence
  Description of Artificial Sequence: Synthetic oligonucleotide
  Sense strand starting at position 2249 of SEQ ID NO: 1561669
ccaguuaagcaggaucaau

SEQ ID NO: 1689420 - RNA, 19 nt, Artificial Sequence
  Description of Artificial Sequence: Synthetic oligonucleotide
  Antisense strand to SEQ ID NO: 1689419
auugauccugcuuaacugg

SEQ ID NO: 1689421 - RNA, 19 nt, Artificial Sequence
  Description of Artificial Sequence: Synthetic oligonucleotide
  Sense strand starting at position 2525 of SEQ ID NO: 1561669
cuucuauaauggucuuuga

SEQ ID NO: 1689422 - RNA, 19 nt, Artificial Sequence
  Description of Artificial Sequence: Synthetic oligonucleotide
  Antisense strand to SEQ ID NO: 1689421
ucaaagaccauuauagaag

SEQ ID NO: 1689423 - RNA, 19 nt, Artificial Sequence
  Description of Artificial Sequence: Synthetic oligonucleotide
  Sense strand starting at position 2528 of SEQ ID NO: 1561669
cuauaauggucuuugacag

SEQ ID NO: 1689424 - RNA, 19 nt, Artificial Sequence
  Description of Artificial Sequence: Synthetic oligonucleotide
  Antisense strand to SEQ ID NO: 1689423
cugucaaagaccauuauag

SEQ ID NO: 1689425 - RNA, 19 nt, Artificial Sequence
  Description of Artificial Sequence: Synthetic oligonucleotide
  Sense strand starting at position 2579 of SEQ ID NO: 1561669
uuaagauuauacccguaca

SEQ ID NO: 1689426 - RNA, 19 nt, Artificial Sequence
  Description of Artificial Sequence: Synthetic oligonucleotide
  Antisense strand to SEQ ID NO: 1689425
uguacggguauaaucuuaa

SEQ ID NO: 1689427 - RNA, 19 nt, Artificial Sequence
  Description of Artificial Sequence: Synthetic oligonucleotide
  Sense strand starting at position 2582 of SEQ ID NO: 1561669
agauuauacccguacaccu

SEQ ID NO: 1689428 - RNA, 19 nt, Artificial Sequence
  Description of Artificial Sequence: Synthetic oligonucleotide
  Antisense strand to SEQ ID NO: 1689427
agguguacggguauaaucu

SEQ ID NO: 1689429 - RNA, 19 nt, Artificial Sequence
  Description of Artificial Sequence: Synthetic oligonucleotide
  Sense strand starting at position 2830 of SEQ ID NO: 1561669
aaugauaaauguucggauu

SEQ ID NO: 1689430 - RNA, 19 nt, Artificial Sequence
  Description of Artificial Sequence: Synthetic oligonucleotide
  Antisense strand to SEQ ID NO: 1689429
aauccgaacauuuaucauu

SEQ ID NO: 1689431 - RNA, 19 nt, Artificial Sequence
  Description of Artificial Sequence: Synthetic oligonucleotide
  Sense strand starting at position 2831 of SEQ ID NO: 1561669
augauaaauguucggauuc

SEQ ID NO: 1689432 - RNA, 19 nt, Artificial Sequence
  Description of Artificial Sequence: Synthetic oligonucleotide
  Antisense strand to SEQ ID NO: 1689431
gaauccgaacauuuaucau

SEQ ID NO: 1689433 - RNA, 19 nt, Artificial Sequence
  Description of Artificial Sequence: Synthetic oligonucleotide
  Sense strand starting at position 2924 of SEQ ID NO: 1561669
gugugaauccuccaaccau

SEQ ID NO: 1689434 - RNA, 19 nt, Artificial Sequence
  Description of Artificial Sequence: Synthetic oligonucleotide
  Antisense strand to SEQ ID NO: 1689433
augguuggaggauucacac

SEQ ID NO: 1689435 - RNA, 19 nt, Artificial Sequence
  Description of Artificial Sequence: Synthetic oligonucleotide
  Sense strand starting at position 2991 of SEQ ID NO: 1561669
gcauaugcuuauuuauugu

SEQ ID NO: 1689436 - RNA, 19 nt, Artificial Sequence
  Description of Artificial Sequence: Synthetic oligonucleotide
  Antisense strand to SEQ ID NO: 1689435
acaauaaauaagcauaugc

SEQ ID NO: 1689437 - RNA, 19 nt, Artificial Sequence
  Description of Artificial Sequence: Synthetic oligonucleotide
  Sense strand starting at position 3177 of SEQ ID NO: 1561669
gggcucagcaaauaagagu

SEQ ID NO: 1689438 - RNA, 19 nt, Artificial Sequence
  Description of Artificial Sequence: Synthetic oligonucleotide
  Antisense strand to SEQ ID NO: 1689437
acucuuauuugcugagccc

SEQ ID NO: 1689439 - RNA, 19 nt, Artificial Sequence
  Description of Artificial Sequence: Synthetic oligonucleotide
  Sense strand starting at position 3184 of SEQ ID NO: 1561669
gcaaauaagaguuacgauu

SEQ ID NO: 1689440 - RNA, 19 nt, Artificial Sequence
  Description of Artificial Sequence: Synthetic oligonucleotide
  Antisense strand to SEQ ID NO: 1689439
aaucguaacucuuauuugc

SEQ ID NO: 1689441 - RNA, 19 nt, Artificial Sequence
  Description of Artificial Sequence: Synthetic oligonucleotide
  Sense strand starting at position 3421 of SEQ ID NO: 1561669
ucauguucucaacagcaga

SEQ ID NO: 1689442 - RNA, 19 nt, Artificial Sequence
  Description of Artificial Sequence: Synthetic oligonucleotide
  Antisense strand to SEQ ID NO: 1689441
ucugcuguugagaacauga

SEQ ID NO: 1689443 - RNA, 19 nt, Artificial Sequence
  Description of Artificial Sequence: Synthetic oligonucleotide
  Sense strand starting at position 3672 of SEQ ID NO: 1561669
aggccuuucugacugggau

SEQ ID NO: 1689444 - RNA, 19 nt, Artificial Sequence
  Description of Artificial Sequence: Synthetic oligonucleotide
  Antisense strand to SEQ ID NO: 1689443
aucccagucagaaaggccu

SEQ ID NO: 1689445 - RNA, 19 nt, Artificial Sequence
  Description of Artificial Sequence: Synthetic oligonucleotide
  Sense strand starting at position 3674 of SEQ ID NO: 1561669
gccuuucugacugggauua

SEQ ID NO: 1689446 - RNA, 19 nt, Artificial Sequence
  Description of Artificial Sequence: Synthetic oligonucleotide
  Antisense strand to SEQ ID NO: 1689445
uaaucccagucagaaaggc

SEQ ID NO: 1689447 - RNA, 19 nt, Artificial Sequence
  Description of Artificial Sequence: Synthetic oligonucleotide
  Sense strand starting at position 3675 of SEQ ID NO: 1561669
ccuuucugacugggauuaa

SEQ ID NO: 1689448 - RNA, 19 nt, Artificial Sequence
  Description of Artificial Sequence: Synthetic oligonucleotide
  Antisense strand to SEQ ID NO: 1689447
uuaaucccagucagaaagg

SEQ ID NO: 1689449 - RNA, 19 nt, Artificial Sequence
  Description of Artificial Sequence: Synthetic oligonucleotide
  Sense strand starting at position 3852 of SEQ ID NO: 1561669
cuuagaaggguuugugauc

SEQ ID NO: 1689450 - RNA, 19 nt, Artificial Sequence
  Description of Artificial Sequence: Synthetic oligonucleotide
  Antisense strand to SEQ ID NO: 1689449
gaucacaaacccuucuaag

SEQ ID NO: 1689451 - RNA, 19 nt, Artificial Sequence
  Description of Artificial Sequence: Synthetic oligonucleotide
  Sense strand starting at position 3857 of SEQ ID NO: 1561669
aaggguuugugaucuuuac

SEQ ID NO: 1689452 - RNA, 19 nt, Artificial Sequence
  Description of Artificial Sequence: Synthetic oligonucleotide
  Antisense strand to SEQ ID NO: 1689451
guaaagaucacaaacccuu

SEQ ID NO: 1689453 - RNA, 19 nt, Artificial Sequence
  Description of Artificial Sequence: Synthetic oligonucleotide
  Sense strand starting at position 3861 of SEQ ID NO: 1561669
guuugugaucuuuacucau

SEQ ID NO: 1689454 - RNA, 19 nt, Artificial Sequence
  Description of Artificial Sequence: Synthetic oligonucleotide
  Antisense strand to SEQ ID NO: 1689453
augaguaaagaucacaaac

SEQ ID NO: 1689455 - RNA, 19 nt, Artificial Sequence
  Description of Artificial Sequence: Synthetic oligonucleotide
  Sense strand starting at position 3956 of SEQ ID NO: 1561669
aaguaaaguggauguaaca

SEQ ID NO: 1689456 - RNA, 19 nt, Artificial Sequence
  Description of Artificial Sequence: Synthetic oligonucleotide
  Antisense strand to SEQ ID NO: 1689455
uguuacauccacuuuacuu

SEQ ID NO: 1689457 - RNA, 19 nt, Artificial Sequence
  Description of Artificial Sequence: Synthetic oligonucleotide
  Sense strand starting at position 3966 of SEQ ID NO: 1561669
gauguaacaguuugagaaa

SEQ ID NO: 1689458 - RNA, 19 nt, Artificial Sequence
  Description of Artificial Sequence: Synthetic oligonucleotide
  Antisense strand to SEQ ID NO: 1689457
uuucucaaacuguuacauc

SEQ ID NO: 1689459 - RNA, 19 nt, Artificial Sequence
  Description of Artificial Sequence: Synthetic oligonucleotide
  Sense strand starting at position 21 of SEQ ID NO: 1561670
uuuggaaguuuguuaaaca

SEQ ID NO: 1689460 - RNA, 19 nt, Artificial Sequence
  Description of Artificial Sequence: Synthetic oligonucleotide
  Antisense strand to SEQ ID NO: 1689459
uguuuaacaaacuuccaaa

SEQ ID NO: 1689461 - RNA, 19 nt, Artificial Sequence
  Description of Artificial Sequence: Synthetic oligonucleotide
  Sense strand starting at position 39 of SEQ ID NO: 1561670
aaguuaucagugcaaggau

SEQ ID NO: 1689462 - RNA, 19 nt, Artificial Sequence
  Description of Artificial Sequence: Synthetic oligonucleotide
  Antisense strand to SEQ ID NO: 1689461
auccuugcacugauaacuu

SEQ ID NO: 1689463 - RNA, 19 nt, Artificial Sequence
  Description of Artificial Sequence: Synthetic oligonucleotide
  Sense strand starting at position 46 of SEQ ID NO: 1561670
cagugcaaggauugggaaa

SEQ ID NO: 1689464 - RNA, 19 nt, Artificial Sequence
  Description of Artificial Sequence: Synthetic oligonucleotide
  Antisense strand to SEQ ID NO: 1689463
uuucccaauccuugcacug

SEQ ID NO: 1689465 - RNA, 19 nt, Artificial Sequence
  Description of Artificial Sequence: Synthetic oligonucleotide
  Sense strand starting at position 59 of SEQ ID NO: 1561670
gggaaagaaugagaaauca

SEQ ID NO: 1689466 - RNA, 19 nt, Artificial Sequence
  Description of Artificial Sequence: Synthetic oligonucleotide
  Antisense strand to SEQ ID NO: 1689465
ugauuucucauucuuuccc

SEQ ID NO: 1689467 - RNA, 19 nt, Artificial Sequence
  Description of Artificial Sequence: Synthetic oligonucleotide
  Sense strand starting at position 111 of SEQ ID NO: 1561670
auacaacggcguuaauaau

SEQ ID NO: 1689468 - RNA, 19 nt, Artificial Sequence
  Description of Artificial Sequence: Synthetic oligonucleotide
  Antisense strand to SEQ ID NO: 1689467
auuauuaacgccguuguau

SEQ ID NO: 1689469 - RNA, 19 nt, Artificial Sequence
  Description of Artificial Sequence: Synthetic oligonucleotide
  Sense strand starting at position 128 of SEQ ID NO: 1561670
aucuguaaguaucucagaa

SEQ ID NO: 1689470 - RNA, 19 nt, Artificial Sequence
  Description of Artificial Sequence: Synthetic oligonucleotide
  Antisense strand to SEQ ID NO: 1689469
uucugagauacuuacagau

SEQ ID NO: 1689471 - RNA, 19 nt, Artificial Sequence
  Description of Artificial Sequence: Synthetic oligonucleotide
  Sense strand starting at position 343 of SEQ ID NO: 1561670
ggaagauccucccucaggu

SEQ ID NO: 1689472 - RNA, 19 nt, Artificial Sequence
  Description of Artificial Sequence: Synthetic oligonucleotide
  Antisense strand to SEQ ID NO: 1689471
accugagggaggaucuucc

SEQ ID NO: 1689473 - RNA, 19 nt, Artificial Sequence
  Description of Artificial Sequence: Synthetic oligonucleotide
  Sense strand starting at position 601 of SEQ ID NO: 1561670
ugaguuccugucuaggaaa

SEQ ID NO: 1689474 - RNA, 19 nt, Artificial Sequence
  Description of Artificial Sequence: Synthetic oligonucleotide
  Antisense strand to SEQ ID NO: 1689473
uuuccuagacaggaacuca

SEQ ID NO: 1689475 - RNA, 19 nt, Artificial Sequence
  Description of Artificial Sequence: Synthetic oligonucleotide
  Sense strand starting at position 656 of SEQ ID NO: 1561670
augcuacuacuaugugaaa

SEQ ID NO: 1689476 - RNA, 19 nt, Artificial Sequence
  Description of Artificial Sequence: Synthetic oligonucleotide
  Antisense strand to SEQ ID NO: 1689475
uuucacauaguaguagcau

SEQ ID NO: 1689477 - RNA, 19 nt, Artificial Sequence
  Description of Artificial Sequence: Synthetic oligonucleotide
  Sense strand starting at position 961 of SEQ ID NO: 1561670
gacaauggguugcuugaua

SEQ ID NO: 1689478 - RNA, 19 nt, Artificial Sequence
  Description of Artificial Sequence: Synthetic oligonucleotide
  Antisense strand to SEQ ID NO: 1689477
uaucaagcaacccauuguc

SEQ ID NO: 1689479 - RNA, 19 nt, Artificial Sequence
  Description of Artificial Sequence: Synthetic oligonucleotide
  Sense strand starting at position 2217 of SEQ ID NO: 1561670
ggcauccuccgguaauaga

SEQ ID NO: 1689480 - RNA, 19 nt, Artificial Sequence
  Description of Artificial Sequence: Synthetic oligonucleotide
  Antisense strand to SEQ ID NO: 1689479
ucuauuaccggaggaugcc

SEQ ID NO: 1689481 - RNA, 19 nt, Artificial Sequence
  Description of Artificial Sequence: Synthetic oligonucleotide
  Sense strand starting at position 2384 of SEQ ID NO: 1561670
uggguugaucauggaaacu

SEQ ID NO: 1689482 - RNA, 19 nt, Artificial Sequence
  Description of Artificial Sequence: Synthetic oligonucleotide
  Antisense strand to SEQ ID NO: 1689481
aguuuccaugaucaaccca

SEQ ID NO: 1689483 - RNA, 19 nt, Artificial Sequence
  Description of Artificial Sequence: Synthetic oligonucleotide
  Sense strand starting at position 2393 of SEQ ID NO: 1561670
cauggaaacuucguugaga

SEQ ID NO: 1689484 - RNA, 19 nt, Artificial Sequence
  Description of Artificial Sequence: Synthetic oligonucleotide
  Antisense strand to SEQ ID NO: 1689483
ucucaacgaaguuuccaug

SEQ ID NO: 1689485 - RNA, 19 nt, Artificial Sequence
  Description of Artificial Sequence: Synthetic oligonucleotide
  Sense strand starting at position 2394 of SEQ ID NO: 1561670
auggaaacuucguugagaa

SEQ ID NO: 1689486 - RNA, 19 nt, Artificial Sequence
  Description of Artificial Sequence: Synthetic oligonucleotide
  Antisense strand to SEQ ID NO: 1689485
uucucaacgaaguuuccau

SEQ ID NO: 1689487 - RNA, 19 nt, Artificial Sequence
  Description of Artificial Sequence: Synthetic oligonucleotide
  Sense strand starting at position 2395 of SEQ ID NO: 1561670
uggaaacuucguugagaag

SEQ ID NO: 1689488 - RNA, 19 nt, Artificial Sequence
  Description of Artificial Sequence: Synthetic oligonucleotide
  Antisense strand to SEQ ID NO: 1689487
cuucucaacgaaguuucca

SEQ ID NO: 1689489 - RNA, 19 nt, Artificial Sequence
  Description of Artificial Sequence: Synthetic oligonucleotide
  Sense strand starting at position 2502 of SEQ ID NO: 1561670
ggacaaguuuaaucugagu

SEQ ID NO: 1689490 - RNA, 19 nt, Artificial Sequence
  Description of Artificial Sequence: Synthetic oligonucleotide
  Antisense strand to SEQ ID NO: 1689489
acucagauuaaacuugucc

SEQ ID NO: 1689491 - RNA, 19 nt, Artificial Sequence
  Description of Artificial Sequence: Synthetic oligonucleotide
  Sense strand starting at position 2563 of SEQ ID NO: 1561670
aguugaagcucaucuggaa

SEQ ID NO: 1689492 - RNA, 19 nt, Artificial Sequence
  Description of Artificial Sequence: Synthetic oligonucleotide
  Antisense strand to SEQ ID NO: 1689491
uuccagaugagcuucaacu

SEQ ID NO: 1689493 - RNA, 19 nt, Artificial Sequence
  Description of Artificial Sequence: Synthetic oligonucleotide
  Sense strand starting at position 2611 of SEQ ID NO: 1561670
cuuuauuccguggauaauu

SEQ ID NO: 1689494 - RNA, 19 nt, Artificial Sequence
  Description of Artificial Sequence: Synthetic oligonucleotide
  Antisense strand to SEQ ID NO: 1689493
aauuauccacggaauaaag

SEQ ID NO: 1689495 - RNA, 19 nt, Artificial Sequence
  Description of Artificial Sequence: Synthetic oligonucleotide
  Sense strand starting at position 2730 of SEQ ID NO: 1561670
auauauguucuagguaaga

SEQ ID NO: 1689496 - RNA, 19 nt, Artificial Sequence
  Description of Artificial Sequence: Synthetic oligonucleotide
  Antisense strand to SEQ ID NO: 1689495
ucuuaccuagaacauauau

SEQ ID NO: 1689497 - RNA, 19 nt, Artificial Sequence
  Description of Artificial Sequence: Synthetic oligonucleotide
  Sense strand starting at position 2851 of SEQ ID NO: 1561670
gccucuuggguagagagau

SEQ ID NO: 1689498 - RNA, 19 nt, Artificial Sequence
  Description of Artificial Sequence: Synthetic oligonucleotide
  Antisense strand to SEQ ID NO: 1689497
aucucucuacccaagaggc

SEQ ID NO: 1689499 - RNA, 19 nt, Artificial Sequence
  Description of Artificial Sequence: Synthetic oligonucleotide
  Sense strand starting at position 2857 of SEQ ID NO: 1561670
uggguagagagauguuuau

SEQ ID NO: 1689500 - RNA, 19 nt, Artificial Sequence
  Description of Artificial Sequence: Synthetic oligonucleotide
  Antisense strand to SEQ ID NO: 1689499
auaaacaucucucuaccca

SEQ ID NO: 1689501 - RNA, 19 nt, Artificial Sequence
  Description of Artificial Sequence: Synthetic oligonucleotide
  Sense strand starting at position 2863 of SEQ ID NO: 1561670
gagagauguuuaucaugac

SEQ ID NO: 1689502 - RNA, 19 nt, Artificial Sequence
  Description of Artificial Sequence: Synthetic oligonucleotide
  Antisense strand to SEQ ID NO: 1689501
gucaugauaaacaucucuc

SEQ ID NO: 1689503 - RNA, 19 nt, Artificial Sequence
  Description of Artificial Sequence: Synthetic oligonucleotide
  Sense strand starting at position 2903 of SEQ ID NO: 1561670
agaucaucauccuuggcaa

SEQ ID NO: 1689504 - RNA, 19 nt, Artificial Sequence
  Description of Artificial Sequence: Synthetic oligonucleotide
  Antisense strand to SEQ ID NO: 1689503
uugccaaggaugaugaucu

SEQ ID NO: 1689505 - RNA, 19 nt, Artificial Sequence
  Description of Artificial Sequence: Synthetic oligonucleotide
  Sense strand starting at position 2921 of SEQ ID NO: 1561670
aaauguauaucgguggaua

SEQ ID NO: 1689506 - RNA, 19 nt, Artificial Sequence
  Description of Artificial Sequence: Synthetic oligonucleotide
  Antisense strand to SEQ ID NO: 1689505
uauccaccgauauacauuu

SEQ ID NO: 1689507 - RNA, 19 nt, Artificial Sequence
  Description of Artificial Sequence: Synthetic oligonucleotide
  Sense strand starting at position 2922 of SEQ ID NO: 1561670
aauguauaucgguggauaa

SEQ ID NO: 1689508 - RNA, 19 nt, Artificial Sequence
  Description of Artificial Sequence: Synthetic oligonucleotide
  Antisense strand to SEQ ID NO: 1689507
uuauccaccgauauacauu

SEQ ID NO: 1689509 - RNA, 19 nt, Artificial Sequence
  Description of Artificial Sequence: Synthetic oligonucleotide
  Sense strand starting at position 2923 of SEQ ID NO: 1561670
auguauaucgguggauaaa

SEQ ID NO: 1689510 - RNA, 19 nt, Artificial Sequence
  Description of Artificial Sequence: Synthetic oligonucleotide
  Antisense strand to SEQ ID NO: 1689509
uuuauccaccgauauacau

SEQ ID NO: 1689511 - RNA, 19 nt, Artificial Sequence
  Description of Artificial Sequence: Synthetic oligonucleotide
  Sense strand starting at position 2924 of SEQ ID NO: 1561670
uguauaucgguggauaaau

SEQ ID NO: 1689512 - RNA, 19 nt, Artificial Sequence
  Description of Artificial Sequence: Synthetic oligonucleotide
  Antisense strand to SEQ ID NO: 1689511
auuuauccaccgauauaca

SEQ ID NO: 1689513 - RNA, 19 nt, Artificial Sequence
  Description of Artificial Sequence: Synthetic oligonucleotide
  Sense strand starting at position 2989 of SEQ ID NO: 1561670
agaguuuggcccugggaga

SEQ ID NO: 1689514 - RNA, 19 nt, Artificial Sequence
  Description of Artificial Sequence: Synthetic oligonucleotide
  Antisense strand to SEQ ID NO: 1689513
ucucccagggccaaacucu

SEQ ID NO: 1689515 - RNA, 19 nt, Artificial Sequence
  Description of Artificial Sequence: Synthetic oligonucleotide
  Sense strand starting at position 2990 of SEQ ID NO: 1561670
gaguuuggcccugggagaa

SEQ ID NO: 1689516 - RNA, 19 nt, Artificial Sequence
  Description of Artificial Sequence: Synthetic oligonucleotide
  Antisense strand to SEQ ID NO: 1689515
uucucccagggccaaacuc

SEQ ID NO: 1689517 - RNA, 19 nt, Artificial Sequence
  Description of Artificial Sequence: Synthetic oligonucleotide
  Sense strand starting at position 3006 of SEQ ID NO: 1561670
gaacguauuucugcucaga

SEQ ID NO: 1689518 - RNA, 19 nt, Artificial Sequence
  Description of Artificial Sequence: Synthetic oligonucleotide
  Antisense strand to SEQ ID NO: 1689517
ucugagcagaaauacguuc

SEQ ID NO: 1689519 - RNA, 19 nt, Artificial Sequence
  Description of Artificial Sequence: Synthetic oligonucleotide
  Sense strand starting at position 3008 of SEQ ID NO: 1561670
acguauuucugcucagaug

SEQ ID NO: 1689520 - RNA, 19 nt, Artificial Sequence
  Description of Artificial Sequence: Synthetic oligonucleotide
  Antisense strand to SEQ ID NO: 1689519
caucugagcagaaauacgu

SEQ ID NO: 1689521 - RNA, 19 nt, Artificial Sequence
  Description of Artificial Sequence: Synthetic oligonucleotide
  Sense strand starting at position 3032 of SEQ ID NO: 1561670
ccauuaauuugagagacag

SEQ ID NO: 1689522 - RNA, 19 nt, Artificial Sequence
  Description of Artificial Sequence: Synthetic oligonucleotide
  Antisense strand to SEQ ID NO: 1689521
cugucucucaaauuaaugg

SEQ ID NO: 1689523 - RNA, 19 nt, Artificial Sequence
  Description of Artificial Sequence: Synthetic oligonucleotide
  Sense strand starting at position 3179 of SEQ ID NO: 1561670
augggaucauaauauuuac

SEQ ID NO: 1689524 - RNA, 19 nt, Artificial Sequence
  Description of Artificial Sequence: Synthetic oligonucleotide
  Antisense strand to SEQ ID NO: 1689523
guaaauauuaugaucccau

SEQ ID NO: 1689525 - RNA, 19 nt, Artificial Sequence
  Description of Artificial Sequence: Synthetic oligonucleotide
  Sense strand starting at position 3234 of SEQ ID NO: 1561670
aggucaugguauccagaua

SEQ ID NO: 1689526 - RNA, 19 nt, Artificial Sequence
  Description of Artificial Sequence: Synthetic oligonucleotide
  Antisense strand to SEQ ID NO: 1689525
uaucuggauaccaugaccu

SEQ ID NO: 1689527 - RNA, 19 nt, Artificial Sequence
  Description of Artificial Sequence: Synthetic oligonucleotide
  Sense strand starting at position 3235 of SEQ ID NO: 1561670
ggucaugguauccagauau

SEQ ID NO: 1689528 - RNA, 19 nt, Artificial Sequence
  Description of Artificial Sequence: Synthetic oligonucleotide
  Antisense strand to SEQ ID NO: 1689527
auaucuggauaccaugacc

SEQ ID NO: 1689529 - RNA, 19 nt, Artificial Sequence
  Description of Artificial Sequence: Synthetic oligonucleotide
  Sense strand starting at position 3245 of SEQ ID NO: 1561670
uccagauauuuggacaaac

SEQ ID NO: 1689530 - RNA, 19 nt, Artificial Sequence
  Description of Artificial Sequence: Synthetic oligonucleotide
  Antisense strand to SEQ ID NO: 1689529
guuuguccaaauaucugga

SEQ ID NO: 1689531 - RNA, 19 nt, Artificial Sequence
  Description of Artificial Sequence: Synthetic oligonucleotide
  Sense strand starting at position 3324 of SEQ ID NO: 1561670
gaggaaagcugauuacucu

SEQ ID NO: 1689532 - RNA, 19 nt, Artificial Sequence
  Description of Artificial Sequence: Synthetic oligonucleotide
  Antisense strand to SEQ ID NO: 1689531
agaguaaucagcuuuccuc

SEQ ID NO: 1689533 - RNA, 19 nt, Artificial Sequence
  Description of Artificial Sequence: Synthetic oligonucleotide
  Sense strand starting at position 3474 of SEQ ID NO: 1561670
gccuaccuacucugaagau

SEQ ID NO: 1689534 - RNA, 19 nt, Artificial Sequence
  Description of Artificial Sequence: Synthetic oligonucleotide
  Antisense strand to SEQ ID NO: 1689533
aucuucagaguagguaggc

SEQ ID NO: 1689535 - RNA, 19 nt, Artificial Sequence
  Description of Artificial Sequence: Synthetic oligonucleotide
  Sense strand starting at position 3658 of SEQ ID NO: 1561670
gcguuauuuacuugcaaga

SEQ ID NO: 1689536 - RNA, 19 nt, Artificial Sequence
  Description of Artificial Sequence: Synthetic oligonucleotide
  Antisense strand to SEQ ID NO: 1689535
ucuugcaaguaaauaacgc

SEQ ID NO: 1689537 - RNA, 19 nt, Artificial Sequence
  Description of Artificial Sequence: Synthetic oligonucleotide
  Sense strand starting at position 3676 of SEQ ID NO: 1561670
auuugaccuugugagaaau

SEQ ID NO: 1689538 - RNA, 19 nt, Artificial Sequence
  Description of Artificial Sequence: Synthetic oligonucleotide
  Antisense strand to SEQ ID NO: 1689537
auuucucacaaggucaaau

SEQ ID NO: 1689539 - RNA, 19 nt, Artificial Sequence
  Description of Artificial Sequence: Synthetic oligonucleotide
  Sense strand starting at position 466 of SEQ ID NO: 1561671
ugaagaugccugggaccuu

SEQ ID NO: 1689540 - RNA, 19 nt, Artificial Sequence
  Description of Artificial Sequence: Synthetic oligonucleotide
  Antisense strand to SEQ ID NO: 1689539
aaggucccaggcaucuuca

SEQ ID NO: 1689541 - RNA, 19 nt, Artificial Sequence
  Description of Artificial Sequence: Synthetic oligonucleotide
  Sense strand starting at position 1048 of SEQ ID NO: 1561671
gacucagauccagguaucu

SEQ ID NO: 1689542 - RNA, 19 nt, Artificial Sequence
  Description of Artificial Sequence: Synthetic oligonucleotide
  Antisense strand to SEQ ID NO: 1689541
agauaccuggaucugaguc

SEQ ID NO: 1689543 - RNA, 19 nt, Artificial Sequence
  Description of Artificial Sequence: Synthetic oligonucleotide
  Sense strand starting at position 1060 of SEQ ID NO: 1561671
gguaucugauaccuauauu

SEQ ID NO: 1689544 - RNA, 19 nt, Artificial Sequence
  Description of Artificial Sequence: Synthetic oligonucleotide
  Antisense strand to SEQ ID NO: 1689543
aauauagguaucagauacc

SEQ ID NO: 1689545 - RNA, 19 nt, Artificial Sequence
  Description of Artificial Sequence: Synthetic oligonucleotide
  Sense strand starting at position 1076 of SEQ ID NO: 1561671
auuauaggacugugagguu

SEQ ID NO: 1689546 - RNA, 19 nt, Artificial Sequence
  Description of Artificial Sequence: Synthetic oligonucleotide
  Antisense strand to SEQ ID NO: 1689545
aaccucacaguccuauaau

SEQ ID NO: 1689547 - RNA, 19 nt, Artificial Sequence
  Description of Artificial Sequence: Synthetic oligonucleotide
  Sense strand starting at position 1156 of SEQ ID NO: 1561671
gaugaagaaggguggucau

SEQ ID NO: 1689548 - RNA, 19 nt, Artificial Sequence
  Description of Artificial Sequence: Synthetic oligonucleotide
  Antisense strand to SEQ ID NO: 1689547
augaccacccuucuucauc

SEQ ID NO: 1689549 - RNA, 19 nt, Artificial Sequence
  Description of Artificial Sequence: Synthetic oligonucleotide
  Sense strand starting at position 2193 of SEQ ID NO: 1561671
ggaucugaguugucaggaa

SEQ ID NO: 1689550 - RNA, 19 nt, Artificial Sequence
  Description of Artificial Sequence: Synthetic oligonucleotide
  Antisense strand to SEQ ID NO: 1689549
uuccugacaacucagaucc

SEQ ID NO: 1689551 - RNA, 19 nt, Artificial Sequence
  Description of Artificial Sequence: Synthetic oligonucleotide
  Sense strand starting at position 2197 of SEQ ID NO: 1561671
cugaguugucaggaaggca

SEQ ID NO: 1689552 - RNA, 19 nt, Artificial Sequence
  Description of Artificial Sequence: Synthetic oligonucleotide
  Antisense strand to SEQ ID NO: 1689551
ugccuuccugacaacucag

SEQ ID NO: 1689553 - RNA, 19 nt, Artificial Sequence
  Description of Artificial Sequence: Synthetic oligonucleotide
  Sense strand starting at position 2235 of SEQ ID NO: 1561671
ugggcaucuguccaaggga

SEQ ID NO: 1689554 - RNA, 19 nt, Artificial Sequence
  Description of Artificial Sequence: Synthetic oligonucleotide
  Antisense strand to SEQ ID NO: 1689553
ucccuuggacagaugccca

SEQ ID NO: 1689555 - RNA, 19 nt, Artificial Sequence
  Description of Artificial Sequence: Synthetic oligonucleotide
  Sense strand starting at position 2585 of SEQ ID NO: 1561671
cuuauuagagguuaagguu

SEQ ID NO: 1689556 - RNA, 19 nt, Artificial Sequence
  Description of Artificial Sequence: Synthetic oligonucleotide
  Antisense strand to SEQ ID NO: 1689555
aaccuuaaccucuaauaag

SEQ ID NO: 1689557 - RNA, 19 nt, Artificial Sequence
  Description of Artificial Sequence: Synthetic oligonucleotide
  Sense strand starting at position 2598 of SEQ ID NO: 1561671
aagguuacagucugagaau

SEQ ID NO: 1689558 - RNA, 19 nt, Artificial Sequence
  Description of Artificial Sequence: Synthetic oligonucleotide
  Antisense strand to SEQ ID NO: 1689557
auucucagacuguaaccuu

SEQ ID NO: 1689559 - RNA, 19 nt, Artificial Sequence
  Description of Artificial Sequence: Synthetic oligonucleotide
  Sense strand starting at position 2605 of SEQ ID NO: 1561671
cagucugagaauggaguua

SEQ ID NO: 1689560 - RNA, 19 nt, Artificial Sequence
  Description of Artificial Sequence: Synthetic oligonucleotide
  Antisense strand to SEQ ID NO: 1689559
uaacuccauucucagacug

SEQ ID NO: 1689561 - RNA, 19 nt, Artificial Sequence
  Description of Artificial Sequence: Synthetic oligonucleotide
  Sense strand starting at position 2652 of SEQ ID NO: 1561671
agucacuuggauuaucagu

SEQ ID NO: 1689562 - RNA, 19 nt, Artificial Sequence
  Description of Artificial Sequence: Synthetic oligonucleotide
  Antisense strand to SEQ ID NO: 1689561
acugauaauccaagugacu

SEQ ID NO: 1689563 - RNA, 19 nt, Artificial Sequence
  Description of Artificial Sequence: Synthetic oligonucleotide
  Sense strand starting at position 2654 of SEQ ID NO: 1561671
ucacuuggauuaucaguau

SEQ ID NO: 1689564 - RNA, 19 nt, Artificial Sequence
  Description of Artificial Sequence: Synthetic oligonucleotide
  Antisense strand to SEQ ID NO: 1689563
auacugauaauccaaguga

SEQ ID NO: 1689565 - RNA, 19 nt, Artificial Sequence
  Description of Artificial Sequence: Synthetic oligonucleotide
  Sense strand starting at position 2657 of SEQ ID NO: 1561671
cuuggauuaucaguauauc

SEQ ID NO: 1689566 - RNA, 19 nt, Artificial Sequence
  Description of Artificial Sequence: Synthetic oligonucleotide
  Antisense strand to SEQ ID NO: 1689565
gauauacugauaauccaag

SEQ ID NO: 1689567 - RNA, 19 nt, Artificial Sequence
  Description of Artificial Sequence: Synthetic oligonucleotide
  Sense strand starting at position 2729 of SEQ ID NO: 1561671
ucaguuuagugacuugaga

SEQ ID NO: 1689568 - RNA, 19 nt, Artificial Sequence
  Description of Artificial Sequence: Synthetic oligonucleotide
  Antisense strand to SEQ ID NO: 1689567
ucucaagucacuaaacuga

SEQ ID NO: 1689569 - RNA, 19 nt, Artificial Sequence
  Description of Artificial Sequence: Synthetic oligonucleotide
  Sense strand starting at position 2731 of SEQ ID NO: 1561671
aguuuagugacuugagagg

SEQ ID NO: 1689570 - RNA, 19 nt, Artificial Sequence
  Description of Artificial Sequence: Synthetic oligonucleotide
  Antisense strand to SEQ ID NO: 1689569
ccucucaagucacuaaacu

SEQ ID NO: 1689571 - RNA, 19 nt, Artificial Sequence
  Description of Artificial Sequence: Synthetic oligonucleotide
  Sense strand starting at position 3005 of SEQ ID NO: 1561671
acgaguagauuuguccgua

SEQ ID NO: 1689572 - RNA, 19 nt, Artificial Sequence
  Description of Artificial Sequence: Synthetic oligonucleotide
  Antisense strand to SEQ ID NO: 1689571
uacggacaaaucuacucgu

SEQ ID NO: 1689573 - RNA, 19 nt, Artificial Sequence
  Description of Artificial Sequence: Synthetic oligonucleotide
  Sense strand starting at position 3006 of SEQ ID NO: 1561671
cgaguagauuuguccguaa

SEQ ID NO: 1689574 - RNA, 19 nt, Artificial Sequence
  Description of Artificial Sequence: Synthetic oligonucleotide
  Antisense strand to SEQ ID NO: 1689573
uuacggacaaaucuacucg

SEQ ID NO: 1689575 - RNA, 19 nt, Artificial Sequence
  Description of Artificial Sequence: Synthetic oligonucleotide
  Sense strand starting at position 3008 of SEQ ID NO: 1561671
aguagauuuguccguaaug

SEQ ID NO: 1689576 - RNA, 19 nt, Artificial Sequence
  Description of Artificial Sequence: Synthetic oligonucleotide
  Antisense strand to SEQ ID NO: 1689575
cauuacggacaaaucuacu

SEQ ID NO: 1689577 - RNA, 19 nt, Artificial Sequence
  Description of Artificial Sequence: Synthetic oligonucleotide
  Sense strand starting at position 3009 of SEQ ID NO: 1561671
guagauuuguccguaaugg

SEQ ID NO: 1689578 - RNA, 19 nt, Artificial Sequence
  Description of Artificial Sequence: Synthetic oligonucleotide
  Antisense strand to SEQ ID NO: 1689577
ccauuacggacaaaucuac

SEQ ID NO: 1689579 - RNA, 19 nt, Artificial Sequence
  Description of Artificial Sequence: Synthetic oligonucleotide
  Sense strand starting at position 3018 of SEQ ID NO: 1561671
uccguaaugggauagggua

SEQ ID NO: 1689580 - RNA, 19 nt, Artificial Sequence
  Description of Artificial Sequence: Synthetic oligonucleotide
  Antisense strand to SEQ ID NO: 1689579
uacccuaucccauuacgga

SEQ ID NO: 1689581 - RNA, 19 nt, Artificial Sequence
  Description of Artificial Sequence: Synthetic oligonucleotide
  Sense strand starting at position 3020 of SEQ ID NO: 1561671
cguaaugggauaggguaua

SEQ ID NO: 1689582 - RNA, 19 nt, Artificial Sequence
  Description of Artificial Sequence: Synthetic oligonucleotide
  Antisense strand to SEQ ID NO: 1689581
uauacccuaucccauuacg

SEQ ID NO: 1689583 - RNA, 19 nt, Artificial Sequence
  Description of Artificial Sequence: Synthetic oligonucleotide
  Sense strand starting at position 3104 of SEQ ID NO: 1561671
aagguuuaagauuggcaau

SEQ ID NO: 1689584 - RNA, 19 nt, Artificial Sequence
  Description of Artificial Sequence: Synthetic oligonucleotide
  Antisense strand to SEQ ID NO: 1689583
auugccaaucuuaaaccuu

SEQ ID NO: 1689585 - RNA, 19 nt, Artificial Sequence
  Description of Artificial Sequence: Synthetic oligonucleotide
  Sense strand starting at position 3105 of SEQ ID NO: 1561671
agguuuaagauuggcaauu

SEQ ID NO: 1689586 - RNA, 19 nt, Artificial Sequence
  Description of Artificial Sequence: Synthetic oligonucleotide
  Antisense strand to SEQ ID NO: 1689585
aauugccaaucuuaaaccu

SEQ ID NO: 1689587 - RNA, 19 nt, Artificial Sequence
  Description of Artificial Sequence: Synthetic oligonucleotide
  Sense strand starting at position 3106 of SEQ ID NO: 1561671
gguuuaagauuggcaauuc

SEQ ID NO: 1689588 - RNA, 19 nt, Artificial Sequence
  Description of Artificial Sequence: Synthetic oligonucleotide
  Antisense strand to SEQ ID NO: 1689587
gaauugccaaucuuaaacc

SEQ ID NO: 1689589 - RNA, 19 nt, Artificial Sequence
  Description of Artificial Sequence: Synthetic oligonucleotide
  Sense strand starting at position 3122 of SEQ ID NO: 1561671
uucccugagccugaucaau

SEQ ID NO: 1689590 - RNA, 19 nt, Artificial Sequence
  Description of Artificial Sequence: Synthetic oligonucleotide
  Antisense strand to SEQ ID NO: 1689589
auugaucaggcucagggaa

SEQ ID NO: 1689591 - RNA, 19 nt, Artificial Sequence
  Description of Artificial Sequence: Synthetic oligonucleotide
  Sense strand starting at position 3132 of SEQ ID NO: 1561671
cugaucaauccuggaugca

SEQ ID NO: 1689592 - RNA, 19 nt, Artificial Sequence
  Description of Artificial Sequence: Synthetic oligonucleotide
  Antisense strand to SEQ ID NO: 1689591
ugcauccaggauugaucag

SEQ ID NO: 1689593 - RNA, 19 nt, Artificial Sequence
  Description of Artificial Sequence: Synthetic oligonucleotide
  Sense strand starting at position 3133 of SEQ ID NO: 1561671
ugaucaauccuggaugcau

SEQ ID NO: 1689594 - RNA, 19 nt, Artificial Sequence
  Description of Artificial Sequence: Synthetic oligonucleotide
  Antisense strand to SEQ ID NO: 1689593
augcauccaggauugauca

SEQ ID NO: 1689595 - RNA, 19 nt, Artificial Sequence
  Description of Artificial Sequence: Synthetic oligonucleotide
  Sense strand starting at position 3156 of SEQ ID NO: 1561671
acaauugcauuccuggaca

SEQ ID NO: 1689596 - RNA, 19 nt, Artificial Sequence
  Description of Artificial Sequence: Synthetic oligonucleotide
  Antisense strand to SEQ ID NO: 1689595
uguccaggaaugcaauugu

SEQ ID NO: 1689597 - RNA, 19 nt, Artificial Sequence
  Description of Artificial Sequence: Synthetic oligonucleotide
  Sense strand starting at position 3159 of SEQ ID NO: 1561671
auugcauuccuggacauac

SEQ ID NO: 1689598 - RNA, 19 nt, Artificial Sequence
  Description of Artificial Sequence: Synthetic oligonucleotide
  Antisense strand to SEQ ID NO: 1689597
guauguccaggaaugcaau

SEQ ID NO: 1689599 - RNA, 19 nt, Artificial Sequence
  Description of Artificial Sequence: Synthetic oligonucleotide
  Sense strand starting at position 3186 of SEQ ID NO: 1561671
ggagcauguccugaugagu

SEQ ID NO: 1689600 - RNA, 19 nt, Artificial Sequence
  Description of Artificial Sequence: Synthetic oligonucleotide
  Antisense strand to SEQ ID NO: 1689599
acucaucaggacaugcucc

SEQ ID NO: 1689601 - RNA, 19 nt, Artificial Sequence
  Description of Artificial Sequence: Synthetic oligonucleotide
  Sense strand starting at position 3211 of SEQ ID NO: 1561671
agaugaggcuacuccauau

SEQ ID NO: 1689602 - RNA, 19 nt, Artificial Sequence
  Description of Artificial Sequence: Synthetic oligonucleotide
  Antisense strand to SEQ ID NO: 1689601
auauggaguagccucaucu

SEQ ID NO: 1689603 - RNA, 19 nt, Artificial Sequence
  Description of Artificial Sequence: Synthetic oligonucleotide
  Sense strand starting at position 3215 of SEQ ID NO: 1561671
gaggcuacuccauauugca

SEQ ID NO: 1689604 - RNA, 19 nt, Artificial Sequence
  Description of Artificial Sequence: Synthetic oligonucleotide
  Antisense strand to SEQ ID NO: 1689603
ugcaauauggaguagccuc

SEQ ID NO: 1689605 - RNA, 19 nt, Artificial Sequence
  Description of Artificial Sequence: Synthetic oligonucleotide
  Sense strand starting at position 3254 of SEQ ID NO: 1561671
gucuaaagcuccuuaaaga

SEQ ID NO: 1689606 - RNA, 19 nt, Artificial Sequence
  Description of Artificial Sequence: Synthetic oligonucleotide
  Antisense strand to SEQ ID NO: 1689605
ucuuuaaggagcuuuagac

SEQ ID NO: 1689607 - RNA, 19 nt, Artificial Sequence
  Description of Artificial Sequence: Synthetic oligonucleotide
  Sense strand starting at position 3292 of SEQ ID NO: 1561671
ucuguaugcauguauagga

SEQ ID NO: 1689608 - RNA, 19 nt, Artificial Sequence
  Description of Artificial Sequence: Synthetic oligonucleotide
  Antisense strand to SEQ ID NO: 1689607
uccuauacaugcauacaga

SEQ ID NO: 1689609 - RNA, 19 nt, Artificial Sequence
  Description of Artificial Sequence: Synthetic oligonucleotide
  Sense strand starting at position 3299 of SEQ ID NO: 1561671
gcauguauaggagaguucu

SEQ ID NO: 1689610 - RNA, 19 nt, Artificial Sequence
  Description of Artificial Sequence: Synthetic oligonucleotide
  Antisense strand to SEQ ID NO: 1689609
agaacucuccuauacaugc

SEQ ID NO: 1689611 - RNA, 19 nt, Artificial Sequence
  Description of Artificial Sequence: Synthetic oligonucleotide
  Sense strand starting at position 3310 of SEQ ID NO: 1561671
agaguucugucugugauuu

SEQ ID NO: 1689612 - RNA, 19 nt, Artificial Sequence
  Description of Artificial Sequence: Synthetic oligonucleotide
  Antisense strand to SEQ ID NO: 1689611
aaaucacagacagaacucu

SEQ ID NO: 1689613 - RNA, 19 nt, Artificial Sequence
  Description of Artificial Sequence: Synthetic oligonucleotide
  Sense strand starting at position 3750 of SEQ ID NO: 1561671
acuugagauuuggacaaau

SEQ ID NO: 1689614 - RNA, 19 nt, Artificial Sequence
  Description of Artificial Sequence: Synthetic oligonucleotide
  Antisense strand to SEQ ID NO: 1689613
auuuguccaaaucucaagu

SEQ ID NO: 1689615 - RNA, 19 nt, Artificial Sequence
  Description of Artificial Sequence: Synthetic oligonucleotide
  Sense strand starting at position 3773 of SEQ ID NO: 1561671
agacuauaucaauggguca

SEQ ID NO: 1689616 - RNA, 19 nt, Artificial Sequence
  Description of Artificial Sequence: Synthetic oligonucleotide
  Antisense strand to SEQ ID NO: 1689615
ugacccauugauauagucu

SEQ ID NO: 1689617 - RNA, 19 nt, Artificial Sequence
  Description of Artificial Sequence: Synthetic oligonucleotide
  Sense strand starting at position 3776 of SEQ ID NO: 1561671
cuauaucaaugggucauaa

SEQ ID NO: 1689618 - RNA, 19 nt, Artificial Sequence
  Description of Artificial Sequence: Synthetic oligonucleotide
  Antisense strand to SEQ ID NO: 1689617
uuaugacccauugauauag

SEQ ID NO: 1689619 - RNA, 19 nt, Artificial Sequence
  Description of Artificial Sequence: Synthetic oligonucleotide
  Sense strand starting at position 490 of SEQ ID NO: 1561672
ugaagaugccugggaccuu

SEQ ID NO: 1689620 - RNA, 19 nt, Artificial Sequence
  Description of Artificial Sequence: Synthetic oligonucleotide
  Antisense strand to SEQ ID NO: 1689619
aaggucccaggcaucuuca

SEQ ID NO: 1689621 - RNA, 19 nt, Artificial Sequence
  Description of Artificial Sequence: Synthetic oligonucleotide
  Sense strand starting at position 1072 of SEQ ID NO: 1561672
gacucagauccagguaucu

SEQ ID NO: 1689622 - RNA, 19 nt, Artificial Sequence
  Description of Artificial Sequence: Synthetic oligonucleotide
  Antisense strand to SEQ ID NO: 1689621
agauaccuggaucugaguc

SEQ ID NO: 1689623 - RNA, 19 nt, Artificial Sequence
  Description of Artificial Sequence: Synthetic oligonucleotide
  Sense strand starting at position 1084 of SEQ ID NO: 1561672
gguaucugauaccuauauu

SEQ ID NO: 1689624 - RNA, 19 nt, Artificial Sequence
  Description of Artificial Sequence: Synthetic oligonucleotide
  Antisense strand to SEQ ID NO: 1689623
aauauagguaucagauacc

SEQ ID NO: 1689625 - RNA, 19 nt, Artificial Sequence
  Description of Artificial Sequence: Synthetic oligonucleotide
  Sense strand starting at position 1100 of SEQ ID NO: 1561672
auuauaggacugugagguu

SEQ ID NO: 1689626 - RNA, 19 nt, Artificial Sequence
  Description of Artificial Sequence: Synthetic oligonucleotide
  Antisense strand to SEQ ID NO: 1689625
aaccucacaguccuauaau

SEQ ID NO: 1689627 - RNA, 19 nt, Artificial Sequence
  Description of Artificial Sequence: Synthetic oligonucleotide
  Sense strand starting at position 1180 of SEQ ID NO: 1561672
gaugaagaaggguggucau

SEQ ID NO: 1689628 - RNA, 19 nt, Artificial Sequence
  Description of Artificial Sequence: Synthetic oligonucleotide
  Antisense strand to SEQ ID NO: 1689627
augaccacccuucuucauc

SEQ ID NO: 1689629 - RNA, 19 nt, Artificial Sequence
  Description of Artificial Sequence: Synthetic oligonucleotide
  Sense strand starting at position 2217 of SEQ ID NO: 1561672
ggaucugaguugucaggaa

SEQ ID NO: 1689630 - RNA, 19 nt, Artificial Sequence
  Description of Artificial Sequence: Synthetic oligonucleotide
  Antisense strand to SEQ ID NO: 1689629
uuccugacaacucagaucc

SEQ ID NO: 1689631 - RNA, 19 nt, Artificial Sequence
  Description of Artificial Sequence: Synthetic oligonucleotide
  Sense strand starting at position 2221 of SEQ ID NO: 1561672
cugaguugucaggaaggca

SEQ ID NO: 1689632 - RNA, 19 nt, Artificial Sequence
  Description of Artificial Sequence: Synthetic oligonucleotide
  Antisense strand to SEQ ID NO: 1689631
ugccuuccugacaacucag

SEQ ID NO: 1689633 - RNA, 19 nt, Artificial Sequence
  Description of Artificial Sequence: Synthetic oligonucleotide
  Sense strand starting at position 2259 of SEQ ID NO: 1561672
ugggcaucuguccaaggga

SEQ ID NO: 1689634 - RNA, 19 nt, Artificial Sequence
  Description of Artificial Sequence: Synthetic oligonucleotide
  Antisense strand to SEQ ID NO: 1689633
ucccuuggacagaugccca

SEQ ID NO: 1689635 - RNA, 19 nt, Artificial Sequence
  Description of Artificial Sequence: Synthetic oligonucleotide
  Sense strand starting at position 2609 of SEQ ID NO: 1561672
cuuauuagagguuaagguu

SEQ ID NO: 1689636 - RNA, 19 nt, Artificial Sequence
  Description of Artificial Sequence: Synthetic oligonucleotide
  Antisense strand to SEQ ID NO: 1689635
aaccuuaaccucuaauaag

SEQ ID NO: 1689637 - RNA, 19 nt, Artificial Sequence
  Description of Artificial Sequence: Synthetic oligonucleotide
  Sense strand starting at position 2622 of SEQ ID NO: 1561672
aagguuacagucugagaau

SEQ ID NO: 1689638 - RNA, 19 nt, Artificial Sequence
  Description of Artificial Sequence: Synthetic oligonucleotide
  Antisense strand to SEQ ID NO: 1689637
auucucagacuguaaccuu

SEQ ID NO: 1689639 - RNA, 19 nt, Artificial Sequence
  Description of Artificial Sequence: Synthetic oligonucleotide
  Sense strand starting at position 2629 of SEQ ID NO: 1561672
cagucugagaauggaguua

SEQ ID NO: 1689640 - RNA, 19 nt, Artificial Sequence
  Description of Artificial Sequence: Synthetic oligonucleotide
  Antisense strand to SEQ ID NO: 1689639
uaacuccauucucagacug

SEQ ID NO: 1689641 - RNA, 19 nt, Artificial Sequence
  Description of Artificial Sequence: Synthetic oligonucleotide
  Sense strand starting at position 2676 of SEQ ID NO: 1561672
agucacuuggauuaucagu

SEQ ID NO: 1689642 - RNA, 19 nt, Artificial Sequence
  Description of Artificial Sequence: Synthetic oligonucleotide
  Antisense strand to SEQ ID NO: 1689641
acugauaauccaagugacu

SEQ ID NO: 1689643 - RNA, 19 nt, Artificial Sequence
  Description of Artificial Sequence: Synthetic oligonucleotide
  Sense strand starting at position 2678 of SEQ ID NO: 1561672
ucacuuggauuaucaguau

SEQ ID NO: 1689644 - RNA, 19 nt, Artificial Sequence
  Description of Artificial Sequence: Synthetic oligonucleotide
  Antisense strand to SEQ ID NO: 1689643
auacugauaauccaaguga

SEQ ID NO: 1689645 - RNA, 19 nt, Artificial Sequence
  Description of Artificial Sequence: Synthetic oligonucleotide
  Sense strand starting at position 2681 of SEQ ID NO: 1561672
cuuggauuaucaguauauc

SEQ ID NO: 1689646 - RNA, 19 nt, Artificial Sequence
  Description of Artificial Sequence: Synthetic oligonucleotide
  Antisense strand to SEQ ID NO: 1689645
gauauacugauaauccaag

SEQ ID NO: 1689647 - RNA, 19 nt, Artificial Sequence
  Description of Artificial Sequence: Synthetic oligonucleotide
  Sense strand starting at position 2753 of SEQ ID NO: 1561672
ucaguuuagugacuugaga

SEQ ID NO: 1689648 - RNA, 19 nt, Artificial Sequence
  Description of Artificial Sequence: Synthetic oligonucleotide
  Antisense strand to SEQ ID NO: 1689647
ucucaagucacuaaacuga

SEQ ID NO: 1689649 - RNA, 19 nt, Artificial Sequence
  Description of Artificial Sequence: Synthetic oligonucleotide
  Sense strand starting at position 2755 of SEQ ID NO: 1561672
aguuuagugacuugagagg

SEQ ID NO: 1689650 - RNA, 19 nt, Artificial Sequence
  Description of Artificial Sequence: Synthetic oligonucleotide
  Antisense strand to SEQ ID NO: 1689649
ccucucaagucacuaaacu

SEQ ID NO: 1689651 - RNA, 19 nt, Artificial Sequence
  Description of Artificial Sequence: Synthetic oligonucleotide
  Sense strand starting at position 3029 of SEQ ID NO: 1561672
acgaguagauuuguccgua

SEQ ID NO: 1689652 - RNA, 19 nt, Artificial Sequence
  Description of Artificial Sequence: Synthetic oligonucleotide
  Antisense strand to SEQ ID NO: 1689651
uacggacaaaucuacucgu

SEQ ID NO: 1689653 - RNA, 19 nt, Artificial Sequence
  Description of Artificial Sequence: Synthetic oligonucleotide
  Sense strand starting at position 3030 of SEQ ID NO: 1561672
cgaguagauuuguccguaa

SEQ ID NO: 1689654 - RNA, 19 nt, Artificial Sequence
  Description of Artificial Sequence: Synthetic oligonucleotide
  Antisense strand to SEQ ID NO: 1689653
uuacggacaaaucuacucg

SEQ ID NO: 1689655 - RNA, 19 nt, Artificial Sequence
  Description of Artificial Sequence: Synthetic oligonucleotide
  Sense strand starting at position 3032 of SEQ ID NO: 1561672
aguagauuuguccguaaug

SEQ ID NO: 1689656 - RNA, 19 nt, Artificial Sequence
  Description of Artificial Sequence: Synthetic oligonucleotide
  Antisense strand to SEQ ID NO: 1689655
cauuacggacaaaucuacu

SEQ ID NO: 1689657 - RNA, 19 nt, Artificial Sequence
  Description of Artificial Sequence: Synthetic oligonucleotide
  Sense strand starting at position 3033 of SEQ ID NO: 1561672
guagauuuguccguaaugg

SEQ ID NO: 1689658 - RNA, 19 nt, Artificial Sequence
  Description of Artificial Sequence: Synthetic oligonucleotide
  Antisense strand to SEQ ID NO: 1689657
ccauuacggacaaaucuac

SEQ ID NO: 1689659 - RNA, 19 nt, Artificial Sequence
  Description of Artificial Sequence: Synthetic oligonucleotide
  Sense strand starting at position 3042 of SEQ ID NO: 1561672
uccguaaugggauagggua

SEQ ID NO: 1689660 - RNA, 19 nt, Artificial Sequence
  Description of Artificial Sequence: Synthetic oligonucleotide
  Antisense strand to SEQ ID NO: 1689659
uacccuaucccauuacgga

SEQ ID NO: 1689661 - RNA, 19 nt, Artificial Sequence
  Description of Artificial Sequence: Synthetic oligonucleotide
  Sense strand starting at position 3044 of SEQ ID NO: 1561672
cguaaugggauaggguaua

SEQ ID NO: 1689662 - RNA, 19 nt, Artificial Sequence
  Description of Artificial Sequence: Synthetic oligonucleotide
  Antisense strand to SEQ ID NO: 1689661
uauacccuaucccauuacg

SEQ ID NO: 1689663 - RNA, 19 nt, Artificial Sequence
  Description of Artificial Sequence: Synthetic oligonucleotide
  Sense strand starting at position 3128 of SEQ ID NO: 1561672
aagguuuaagauuggcaau

SEQ ID NO: 1689664 - RNA, 19 nt, Artificial Sequence
  Description of Artificial Sequence: Synthetic oligonucleotide
  Antisense strand to SEQ ID NO: 1689663
auugccaaucuuaaaccuu

SEQ ID NO: 1689665 - RNA, 19 nt, Artificial Sequence
  Description of Artificial Sequence: Synthetic oligonucleotide
  Sense strand starting at position 3129 of SEQ ID NO: 1561672
agguuuaagauuggcaauu

SEQ ID NO: 1689666 - RNA, 19 nt, Artificial Sequence
  Description of Artificial Sequence: Synthetic oligonucleotide
  Antisense strand to SEQ ID NO: 1689665
aauugccaaucuuaaaccu

SEQ ID NO: 1689667 - RNA, 19 nt, Artificial Sequence
  Description of Artificial Sequence: Synthetic oligonucleotide
  Sense strand starting at position 3130 of SEQ ID NO: 1561672
gguuuaagauuggcaauuc

SEQ ID NO: 1689668 - RNA, 19 nt, Artificial Sequence
  Description of Artificial Sequence: Synthetic oligonucleotide
  Antisense strand to SEQ ID NO: 1689667
gaauugccaaucuuaaacc

SEQ ID NO: 1689669 - RNA, 19 nt, Artificial Sequence
  Description of Artificial Sequence: Synthetic oligonucleotide
  Sense strand starting at position 3146 of SEQ ID NO: 1561672
uucccugagccugaucaau

SEQ ID NO: 1689670 - RNA, 19 nt, Artificial Sequence
  Description of Artificial Sequence: Synthetic oligonucleotide
  Antisense strand to SEQ ID NO: 1689669
auugaucaggcucagggaa

SEQ ID NO: 1689671 - RNA, 19 nt, Artificial Sequence
  Description of Artificial Sequence: Synthetic oligonucleotide
  Sense strand starting at position 3156 of SEQ ID NO: 1561672
cugaucaauccuggaugca

SEQ ID NO: 1689672 - RNA, 19 nt, Artificial Sequence
  Description of Artificial Sequence: Synthetic oligonucleotide
  Antisense strand to SEQ ID NO: 1689671
ugcauccaggauugaucag

SEQ ID NO: 1689673 - RNA, 19 nt, Artificial Sequence
  Description of Artificial Sequence: Synthetic oligonucleotide
  Sense strand starting at position 3157 of SEQ ID NO: 1561672
ugaucaauccuggaugcau

SEQ ID NO: 1689674 - RNA, 19 nt, Artificial Sequence
  Description of Artificial Sequence: Synthetic oligonucleotide
  Antisense strand to SEQ ID NO: 1689673
augcauccaggauugauca

SEQ ID NO: 1689675 - RNA, 19 nt, Artificial Sequence
  Description of Artificial Sequence: Synthetic oligonucleotide
  Sense strand starting at position 3180 of SEQ ID NO: 1561672
acaauugcauuccuggaca

SEQ ID NO: 1689676 - RNA, 19 nt, Artificial Sequence
  Description of Artificial Sequence: Synthetic oligonucleotide
  Antisense strand to SEQ ID NO: 1689675
uguccaggaaugcaauugu

SEQ ID NO: 1689677 - RNA, 19 nt, Artificial Sequence
  Description of Artificial Sequence: Synthetic oligonucleotide
  Sense strand starting at position 3183 of SEQ ID NO: 1561672
auugcauuccuggacauac

SEQ ID NO: 1689678 - RNA, 19 nt, Artificial Sequence
  Description of Artificial Sequence: Synthetic oligonucleotide
  Antisense strand to SEQ ID NO: 1689677
guauguccaggaaugcaau

SEQ ID NO: 1689679 - RNA, 19 nt, Artificial Sequence
  Description of Artificial Sequence: Synthetic oligonucleotide
  Sense strand starting at position 3210 of SEQ ID NO: 1561672
ggagcauguccugaugagu

SEQ ID NO: 1689680 - RNA, 19 nt, Artificial Sequence
  Description of Artificial Sequence: Synthetic oligonucleotide
  Antisense strand to SEQ ID NO: 1689679
acucaucaggacaugcucc

SEQ ID NO: 1689681 - RNA, 19 nt, Artificial Sequence
  Description of Artificial Sequence: Synthetic oligonucleotide
  Sense strand starting at position 3235 of SEQ ID NO: 1561672
agaugaggcuacuccauau

SEQ ID NO: 1689682 - RNA, 19 nt, Artificial Sequence
  Description of Artificial Sequence: Synthetic oligonucleotide
  Antisense strand to SEQ ID NO: 1689681
auauggaguagccucaucu

SEQ ID NO: 1689683 - RNA, 19 nt, Artificial Sequence
  Description of Artificial Sequence: Synthetic oligonucleotide
  Sense strand starting at position 3239 of SEQ ID NO: 1561672
gaggcuacuccauauugca

SEQ ID NO: 1689684 - RNA, 19 nt, Artificial Sequence
  Description of Artificial Sequence: Synthetic oligonucleotide
  Antisense strand to SEQ ID NO: 1689683
ugcaauauggaguagccuc

SEQ ID NO: 1689685 - RNA, 19 nt, Artificial Sequence
  Description of Artificial Sequence: Synthetic oligonucleotide
  Sense strand starting at position 3278 of SEQ ID NO: 1561672
gucuaaagcuccuuaaaga

SEQ ID NO: 1689686 - RNA, 19 nt, Artificial Sequence
  Description of Artificial Sequence: Synthetic oligonucleotide
  Antisense strand to SEQ ID NO: 1689685
ucuuuaaggagcuuuagac

SEQ ID NO: 1689687 - RNA, 19 nt, Artificial Sequence
  Description of Artificial Sequence: Synthetic oligonucleotide
  Sense strand starting at position 3316 of SEQ ID NO: 1561672
ucuguaugcauguauagga

SEQ ID NO: 1689688 - RNA, 19 nt, Artificial Sequence
  Description of Artificial Sequence: Synthetic oligonucleotide
  Antisense strand to SEQ ID NO: 1689687
uccuauacaugcauacaga

SEQ ID NO: 1689689 - RNA, 19 nt, Artificial Sequence
  Description of Artificial Sequence: Synthetic oligonucleotide
  Sense strand starting at position 3323 of SEQ ID NO: 1561672
gcauguauaggagaguucu

SEQ ID NO: 1689690 - RNA, 19 nt, Artificial Sequence
  Description of Artificial Sequence: Synthetic oligonucleotide
  Antisense strand to SEQ ID NO: 1689689
agaacucuccuauacaugc

SEQ ID NO: 1689691 - RNA, 19 nt, Artificial Sequence
  Description of Artificial Sequence: Synthetic oligonucleotide
  Sense strand starting at position 3334 of SEQ ID NO: 1561672
agaguucugucugugauuu

SEQ ID NO: 1689692 - RNA, 19 nt, Artificial Sequence
  Description of Artificial Sequence: Synthetic oligonucleotide
  Antisense strand to SEQ ID NO: 1689691
aaaucacagacagaacucu

SEQ ID NO: 1689693 - RNA, 19 nt, Artificial Sequence
  Description of Artificial Sequence: Synthetic oligonucleotide
  Sense strand starting at position 3774 of SEQ ID NO: 1561672
acuugagauuuggacaaau

SEQ ID NO: 1689694 - RNA, 19 nt, Artificial Sequence
  Description of Artificial Sequence: Synthetic oligonucleotide
  Antisense strand to SEQ ID NO: 1689693
auuuguccaaaucucaagu

SEQ ID NO: 1689695 - RNA, 19 nt, Artificial Sequence
  Description of Artificial Sequence: Synthetic oligonucleotide
  Sense strand starting at position 3797 of SEQ ID NO: 1561672
agacuauaucaauggguca

SEQ ID NO: 1689696 - RNA, 19 nt, Artificial Sequence
  Description of Artificial Sequence: Synthetic oligonucleotide
  Antisense strand to SEQ ID NO: 1689695
ugacccauugauauagucu

SEQ ID NO: 1689697 - RNA, 19 nt, Artificial Sequence
  Description of Artificial Sequence: Synthetic oligonucleotide
  Sense strand starting at position 3800 of SEQ ID NO: 1561672
cuauaucaaugggucauaa

SEQ ID NO: 1689698 - RNA, 19 nt, Artificial Sequence
  Description of Artificial Sequence: Synthetic oligonucleotide
  Antisense strand to SEQ ID NO: 1689697
uuaugacccauugauauag

SEQ ID NO: 1689699 - RNA, 19 nt, Artificial Sequence
  Description of Artificial Sequence: Synthetic oligonucleotide
  Sense strand starting at position 1000 of SEQ ID NO: 1561673
ggcugacuuccugagacca

SEQ ID NO: 1689700 - RNA, 19 nt, Artificial Sequence
  Description of Artificial Sequence: Synthetic oligonucleotide
  Antisense strand to SEQ ID NO: 1689699
uggucucaggaagucagcc

SEQ ID NO: 1689701 - RNA, 19 nt, Artificial Sequence
  Description of Artificial Sequence: Synthetic oligonucleotide
  Sense strand starting at position 1015 of SEQ ID NO: 1561673
accagcuccgucuaaguuu

SEQ ID NO: 1689702 - RNA, 19 nt, Artificial Sequence
  Description of Artificial Sequence: Synthetic oligonucleotide
  Antisense strand to SEQ ID NO: 1689701
aaacuuagacggagcuggu

SEQ ID NO: 1689703 - RNA, 19 nt, Artificial Sequence
  Description of Artificial Sequence: Synthetic oligonucleotide
  Sense strand starting at position 1021 of SEQ ID NO: 1561673
uccgucuaaguuuaugaga

SEQ ID NO: 1689704 - RNA, 19 nt, Artificial Sequence
  Description of Artificial Sequence: Synthetic oligonucleotide
  Antisense strand to SEQ ID NO: 1689703
ucucauaaacuuagacgga

SEQ ID NO: 1689705 - RNA, 19 nt, Artificial Sequence
  Description of Artificial Sequence: Synthetic oligonucleotide
  Sense strand starting at position 1097 of SEQ ID NO: 1561673
ggcuucugcucauuugaga

SEQ ID NO: 1689706 - RNA, 19 nt, Artificial Sequence
  Description of Artificial Sequence: Synthetic oligonucleotide
  Antisense strand to SEQ ID NO: 1689705
ucucaaaugagcagaagcc

SEQ ID NO: 1689707 - RNA, 19 nt, Artificial Sequence
  Description of Artificial Sequence: Synthetic oligonucleotide
  Sense strand starting at position 1200 of SEQ ID NO: 1561673
agaacugauucuccguguu

SEQ ID NO: 1689708 - RNA, 19 nt, Artificial Sequence
  Description of Artificial Sequence: Synthetic oligonucleotide
  Antisense strand to SEQ ID NO: 1689707
aacacggagaaucaguucu

SEQ ID NO: 1689709 - RNA, 19 nt, Artificial Sequence
  Description of Artificial Sequence: Synthetic oligonucleotide
  Sense strand starting at position 1246 of SEQ ID NO: 1561673
gggagagaaucccacucau

SEQ ID NO: 1689710 - RNA, 19 nt, Artificial Sequence
  Description of Artificial Sequence: Synthetic oligonucleotide
  Antisense strand to SEQ ID NO: 1689709
augagugggauucucuccc

SEQ ID NO: 1689711 - RNA, 19 nt, Artificial Sequence
  Description of Artificial Sequence: Synthetic oligonucleotide
  Sense strand starting at position 1338 of SEQ ID NO: 1561673
uuuguuuaagacugaguca

SEQ ID NO: 1689712 - RNA, 19 nt, Artificial Sequence
  Description of Artificial Sequence: Synthetic oligonucleotide
  Antisense strand to SEQ ID NO: 1689711
ugacucagucuuaaacaaa

SEQ ID NO: 1689713 - RNA, 19 nt, Artificial Sequence
  Description of Artificial Sequence: Synthetic oligonucleotide
  Sense strand starting at position 1341 of SEQ ID NO: 1561673
guuuaagacugagucaaac

SEQ ID NO: 1689714 - RNA, 19 nt, Artificial Sequence
  Description of Artificial Sequence: Synthetic oligonucleotide
  Antisense strand to SEQ ID NO: 1689713
guuugacucagucuuaaac

SEQ ID NO: 1689715 - RNA, 19 nt, Artificial Sequence
  Description of Artificial Sequence: Synthetic oligonucleotide
  Sense strand starting at position 1658 of SEQ ID NO: 1561673
gauccucauccuugggaga

SEQ ID NO: 1689716 - RNA, 19 nt, Artificial Sequence
  Description of Artificial Sequence: Synthetic oligonucleotide
  Antisense strand to SEQ ID NO: 1689715
ucucccaaggaugaggauc

SEQ ID NO: 1689717 - RNA, 19 nt, Artificial Sequence
  Description of Artificial Sequence: Synthetic oligonucleotide
  Sense strand starting at position 1661 of SEQ ID NO: 1561673
ccucauccuugggagagau

SEQ ID NO: 1689718 - RNA, 19 nt, Artificial Sequence
  Description of Artificial Sequence: Synthetic oligonucleotide
  Antisense strand to SEQ ID NO: 1689717
aucucucccaaggaugagg

SEQ ID NO: 1689719 - RNA, 19 nt, Artificial Sequence
  Description of Artificial Sequence: Synthetic oligonucleotide
  Sense strand starting at position 1702 of SEQ ID NO: 1561673
cuaggacuucugcauacaa

SEQ ID NO: 1689720 - RNA, 19 nt, Artificial Sequence
  Description of Artificial Sequence: Synthetic oligonucleotide
  Antisense strand to SEQ ID NO: 1689719
uuguaugcagaaguccuag

SEQ ID NO: 1689721 - RNA, 19 nt, Artificial Sequence
  Description of Artificial Sequence: Synthetic oligonucleotide
  Sense strand starting at position 2108 of SEQ ID NO: 1561673
cuugguuucucagcuguaa

SEQ ID NO: 1689722 - RNA, 19 nt, Artificial Sequence
  Description of Artificial Sequence: Synthetic oligonucleotide
  Antisense strand to SEQ ID NO: 1689721
uuacagcugagaaaccaag

SEQ ID NO: 1689723 - RNA, 19 nt, Artificial Sequence
  Description of Artificial Sequence: Synthetic oligonucleotide
  Sense strand starting at position 2129 of SEQ ID NO: 1561673
cugggcuaaugaucauaaa

SEQ ID NO: 1689724 - RNA, 19 nt, Artificial Sequence
  Description of Artificial Sequence: Synthetic oligonucleotide
  Antisense strand to SEQ ID NO: 1689723
uuuaugaucauuagcccag

SEQ ID NO: 1689725 - RNA, 19 nt, Artificial Sequence
  Description of Artificial Sequence: Synthetic oligonucleotide
  Sense strand starting at position 2132 of SEQ ID NO: 1561673
ggcuaaugaucauaaauga

SEQ ID NO: 1689726 - RNA, 19 nt, Artificial Sequence
  Description of Artificial Sequence: Synthetic oligonucleotide
  Antisense strand to SEQ ID NO: 1689725
ucauuuaugaucauuagcc

SEQ ID NO: 1689727 - RNA, 19 nt, Artificial Sequence
  Description of Artificial Sequence: Synthetic oligonucleotide
  Sense strand starting at position 2166 of SEQ ID NO: 1561673
gugcuuaguggugaauaga

SEQ ID NO: 1689728 - RNA, 19 nt, Artificial Sequence
  Description of Artificial Sequence: Synthetic oligonucleotide
  Antisense strand to SEQ ID NO: 1689727
ucuauucaccacuaagcac

SEQ ID NO: 1689729 - RNA, 19 nt, Artificial Sequence
  Description of Artificial Sequence: Synthetic oligonucleotide
  Sense strand starting at position 2188 of SEQ ID NO: 1561673
ggauuucugugguuugggu

SEQ ID NO: 1689730 - RNA, 19 nt, Artificial Sequence
  Description of Artificial Sequence: Synthetic oligonucleotide
  Antisense strand to SEQ ID NO: 1689729
acccaaaccacagaaaucc

SEQ ID NO: 1689731 - RNA, 19 nt, Artificial Sequence
  Description of Artificial Sequence: Synthetic oligonucleotide
  Sense strand starting at position 2240 of SEQ ID NO: 1561673
gaccuuagcccagguaauc

SEQ ID NO: 1689732 - RNA, 19 nt, Artificial Sequence
  Description of Artificial Sequence: Synthetic oligonucleotide
  Antisense strand to SEQ ID NO: 1689731
gauuaccugggcuaagguc

SEQ ID NO: 1689733 - RNA, 19 nt, Artificial Sequence
  Description of Artificial Sequence: Synthetic oligonucleotide
  Sense strand starting at position 2295 of SEQ ID NO: 1561673
ggucaauuaugguuccugu

SEQ ID NO: 1689734 - RNA, 19 nt, Artificial Sequence
  Description of Artificial Sequence: Synthetic oligonucleotide
  Antisense strand to SEQ ID NO: 1689733
acaggaaccauaauugacc

SEQ ID NO: 1689735 - RNA, 19 nt, Artificial Sequence
  Description of Artificial Sequence: Synthetic oligonucleotide
  Sense strand starting at position 2308 of SEQ ID NO: 1561673
uccuguaaauuguuacaaa

SEQ ID NO: 1689736 - RNA, 19 nt, Artificial Sequence
  Description of Artificial Sequence: Synthetic oligonucleotide
  Antisense strand to SEQ ID NO: 1689735
uuuguaacaauuuacagga

SEQ ID NO: 1689737 - RNA, 19 nt, Artificial Sequence
  Description of Artificial Sequence: Synthetic oligonucleotide
  Sense strand starting at position 2637 of SEQ ID NO: 1561673
augaaauucuucuugcagu

SEQ ID NO: 1689738 - RNA, 19 nt, Artificial Sequence
  Description of Artificial Sequence: Synthetic oligonucleotide
  Antisense strand to SEQ ID NO: 1689737
acugcaagaagaauuucau

SEQ ID NO: 1689739 - RNA, 19 nt, Artificial Sequence
  Description of Artificial Sequence: Synthetic oligonucleotide
  Sense strand starting at position 2681 of SEQ ID NO: 1561673
cugucuguucucugguuga

SEQ ID NO: 1689740 - RNA, 19 nt, Artificial Sequence
  Description of Artificial Sequence: Synthetic oligonucleotide
  Antisense strand to SEQ ID NO: 1689739
ucaaccagagaacagacag

SEQ ID NO: 1689741 - RNA, 19 nt, Artificial Sequence
  Description of Artificial Sequence: Synthetic oligonucleotide
  Sense strand starting at position 2684 of SEQ ID NO: 1561673
ucuguucucugguugaaag

SEQ ID NO: 1689742 - RNA, 19 nt, Artificial Sequence
  Description of Artificial Sequence: Synthetic oligonucleotide
  Antisense strand to SEQ ID NO: 1689741
cuuucaaccagagaacaga

SEQ ID NO: 1689743 - RNA, 19 nt, Artificial Sequence
  Description of Artificial Sequence: Synthetic oligonucleotide
  Sense strand starting at position 2686 of SEQ ID NO: 1561673
uguucucugguugaaagca

SEQ ID NO: 1689744 - RNA, 19 nt, Artificial Sequence
  Description of Artificial Sequence: Synthetic oligonucleotide
  Antisense strand to SEQ ID NO: 1689743
ugcuuucaaccagagaaca

SEQ ID NO: 1689745 - RNA, 19 nt, Artificial Sequence
  Description of Artificial Sequence: Synthetic oligonucleotide
  Sense strand starting at position 2912 of SEQ ID NO: 1561673
ucuggagucuccucggaga

SEQ ID NO: 1689746 - RNA, 19 nt, Artificial Sequence
  Description of Artificial Sequence: Synthetic oligonucleotide
  Antisense strand to SEQ ID NO: 1689745
ucuccgaggagacuccaga

SEQ ID NO: 1689747 - RNA, 19 nt, Artificial Sequence
  Description of Artificial Sequence: Synthetic oligonucleotide
  Sense strand starting at position 3002 of SEQ ID NO: 1561673
ggcaauucucaggacaucu

SEQ ID NO: 1689748 - RNA, 19 nt, Artificial Sequence
  Description of Artificial Sequence: Synthetic oligonucleotide
  Antisense strand to SEQ ID NO: 1689747
agauguccugagaauugcc

SEQ ID NO: 1689749 - RNA, 19 nt, Artificial Sequence
  Description of Artificial Sequence: Synthetic oligonucleotide
  Sense strand starting at position 3021 of SEQ ID NO: 1561673
gugacuccuggguguacaa

SEQ ID NO: 1689750 - RNA, 19 nt, Artificial Sequence
  Description of Artificial Sequence: Synthetic oligonucleotide
  Antisense strand to SEQ ID NO: 1689749
uuguacacccaggagucac

SEQ ID NO: 1689751 - RNA, 19 nt, Artificial Sequence
  Description of Artificial Sequence: Synthetic oligonucleotide
  Sense strand starting at position 3057 of SEQ ID NO: 1561673
uguauuacacuugacgaua

SEQ ID NO: 1689752 - RNA, 19 nt, Artificial Sequence
  Description of Artificial Sequence: Synthetic oligonucleotide
  Antisense strand to SEQ ID NO: 1689751
uaucgucaaguguaauaca

SEQ ID NO: 1689753 - RNA, 19 nt, Artificial Sequence
  Description of Artificial Sequence: Synthetic oligonucleotide
  Sense strand starting at position 3121 of SEQ ID NO: 1561673
ggcugaguccuaugcagga

SEQ ID NO: 1689754 - RNA, 19 nt, Artificial Sequence
  Description of Artificial Sequence: Synthetic oligonucleotide
  Antisense strand to SEQ ID NO: 1689753
uccugcauaggacucagcc

SEQ ID NO: 1689755 - RNA, 19 nt, Artificial Sequence
  Description of Artificial Sequence: Synthetic oligonucleotide
  Sense strand starting at position 3123 of SEQ ID NO: 1561673
cugaguccuaugcaggaau

SEQ ID NO: 1689756 - RNA, 19 nt, Artificial Sequence
  Description of Artificial Sequence: Synthetic oligonucleotide
  Antisense strand to SEQ ID NO: 1689755
auuccugcauaggacucag

SEQ ID NO: 1689757 - RNA, 19 nt, Artificial Sequence
  Description of Artificial Sequence: Synthetic oligonucleotide
  Sense strand starting at position 3125 of SEQ ID NO: 1561673
gaguccuaugcaggaauua

SEQ ID NO: 1689758 - RNA, 19 nt, Artificial Sequence
  Description of Artificial Sequence: Synthetic oligonucleotide
  Antisense strand to SEQ ID NO: 1689757
uaauuccugcauaggacuc

SEQ ID NO: 1689759 - RNA, 19 nt, Artificial Sequence
  Description of Artificial Sequence: Synthetic oligonucleotide
  Sense strand starting at position 3126 of SEQ ID NO: 1561673
aguccuaugcaggaauuaa

SEQ ID NO: 1689760 - RNA, 19 nt, Artificial Sequence
  Description of Artificial Sequence: Synthetic oligonucleotide
  Antisense strand to SEQ ID NO: 1689759
uuaauuccugcauaggacu

SEQ ID NO: 1689761 - RNA, 19 nt, Artificial Sequence
  Description of Artificial Sequence: Synthetic oligonucleotide
  Sense strand starting at position 3138 of SEQ ID NO: 1561673
gaauuaacuccugggacgu

SEQ ID NO: 1689762 - RNA, 19 nt, Artificial Sequence
  Description of Artificial Sequence: Synthetic oligonucleotide
  Antisense strand to SEQ ID NO: 1689761
acgucccaggaguuaauuc

SEQ ID NO: 1689763 - RNA, 19 nt, Artificial Sequence
  Description of Artificial Sequence: Synthetic oligonucleotide
  Sense strand starting at position 3139 of SEQ ID NO: 1561673
aauuaacuccugggacguu

SEQ ID NO: 1689764 - RNA, 19 nt, Artificial Sequence
  Description of Artificial Sequence: Synthetic oligonucleotide
  Antisense strand to SEQ ID NO: 1689763
aacgucccaggaguuaauu

SEQ ID NO: 1689765 - RNA, 19 nt, Artificial Sequence
  Description of Artificial Sequence: Synthetic oligonucleotide
  Sense strand starting at position 3183 of SEQ ID NO: 1561673
aucuuuccuguuugauaga

SEQ ID NO: 1689766 - RNA, 19 nt, Artificial Sequence
  Description of Artificial Sequence: Synthetic oligonucleotide
  Antisense strand to SEQ ID NO: 1689765
ucuaucaaacaggaaagau

SEQ ID NO: 1689767 - RNA, 19 nt, Artificial Sequence
  Description of Artificial Sequence: Synthetic oligonucleotide
  Sense strand starting at position 3363 of SEQ ID NO: 1561673
gugugucugagugagaaug

SEQ ID NO: 1689768 - RNA, 19 nt, Artificial Sequence
  Description of Artificial Sequence: Synthetic oligonucleotide
  Antisense strand to SEQ ID NO: 1689767
cauucucacucagacacac

SEQ ID NO: 1689769 - RNA, 19 nt, Artificial Sequence
  Description of Artificial Sequence: Synthetic oligonucleotide
  Sense strand starting at position 3426 of SEQ ID NO: 1561673
caguguuguguguaugagu

SEQ ID NO: 1689770 - RNA, 19 nt, Artificial Sequence
  Description of Artificial Sequence: Synthetic oligonucleotide
  Antisense strand to SEQ ID NO: 1689769
acucauacacacaacacug

SEQ ID NO: 1689771 - RNA, 19 nt, Artificial Sequence
  Description of Artificial Sequence: Synthetic oligonucleotide
  Sense strand starting at position 3433 of SEQ ID NO: 1561673
guguguaugagugaaugaa

SEQ ID NO: 1689772 - RNA, 19 nt, Artificial Sequence
  Description of Artificial Sequence: Synthetic oligonucleotide
  Antisense strand to SEQ ID NO: 1689771
uucauucacucauacacac

SEQ ID NO: 1689773 - RNA, 19 nt, Artificial Sequence
  Description of Artificial Sequence: Synthetic oligonucleotide
  Sense strand starting at position 3455 of SEQ ID NO: 1561673
augagugaauacguagauu

SEQ ID NO: 1689774 - RNA, 19 nt, Artificial Sequence
  Description of Artificial Sequence: Synthetic oligonucleotide
  Antisense strand to SEQ ID NO: 1689773
aaucuacguauucacucau

SEQ ID NO: 1689775 - RNA, 19 nt, Artificial Sequence
  Description of Artificial Sequence: Synthetic oligonucleotide
  Sense strand starting at position 3461 of SEQ ID NO: 1561673
gaauacguagauugugagu

SEQ ID NO: 1689776 - RNA, 19 nt, Artificial Sequence
  Description of Artificial Sequence: Synthetic oligonucleotide
  Antisense strand to SEQ ID NO: 1689775
acucacaaucuacguauuc

SEQ ID NO: 1689777 - RNA, 19 nt, Artificial Sequence
  Description of Artificial Sequence: Synthetic oligonucleotide
  Sense strand starting at position 3669 of SEQ ID NO: 1561673
gugaguuggccucacaccu

SEQ ID NO: 1689778 - RNA, 19 nt, Artificial Sequence
  Description of Artificial Sequence: Synthetic oligonucleotide
  Antisense strand to SEQ ID NO: 1689777
aggugugaggccaacucac

SEQ ID NO: 1689779 - RNA, 19 nt, Artificial Sequence
  Description of Artificial Sequence: Synthetic oligonucleotide
  Sense strand starting at position 302 of SEQ ID NO: 1561674
cauguagagucuugaaagc

SEQ ID NO: 1689780 - RNA, 19 nt, Artificial Sequence
  Description of Artificial Sequence: Synthetic oligonucleotide
  Antisense strand to SEQ ID NO: 1689779
gcuuucaagacucuacaug

SEQ ID NO: 1689781 - RNA, 19 nt, Artificial Sequence
  Description of Artificial Sequence: Synthetic oligonucleotide
  Sense strand starting at position 406 of SEQ ID NO: 1561674
ggcacaguugugcaagaca

SEQ ID NO: 1689782 - RNA, 19 nt, Artificial Sequence
  Description of Artificial Sequence: Synthetic oligonucleotide
  Antisense strand to SEQ ID NO: 1689781
ugucuugcacaacugugcc

SEQ ID NO: 1689783 - RNA, 19 nt, Artificial Sequence
  Description of Artificial Sequence: Synthetic oligonucleotide
  Sense strand starting at position 452 of SEQ ID NO: 1561674
gacccugacccugguaaga

SEQ ID NO: 1689784 - RNA, 19 nt, Artificial Sequence
  Description of Artificial Sequence: Synthetic oligonucleotide
  Antisense strand to SEQ ID NO: 1689783
ucuuaccagggucaggguc

SEQ ID NO: 1689785 - RNA, 19 nt, Artificial Sequence
  Description of Artificial Sequence: Synthetic oligonucleotide
  Sense strand starting at position 473 of SEQ ID NO: 1561674
gccaguuguccugguugca

SEQ ID NO: 1689786 - RNA, 19 nt, Artificial Sequence
  Description of Artificial Sequence: Synthetic oligonucleotide
  Antisense strand to SEQ ID NO: 1689785
ugcaaccaggacaacuggc

SEQ ID NO: 1689787 - RNA, 19 nt, Artificial Sequence
  Description of Artificial Sequence: Synthetic oligonucleotide
  Sense strand starting at position 707 of SEQ ID NO: 1561674
aauagaaggucuucccaga

SEQ ID NO: 1689788 - RNA, 19 nt, Artificial Sequence
  Description of Artificial Sequence: Synthetic oligonucleotide
  Antisense strand to SEQ ID NO: 1689787
ucugggaagaccuucuauu

SEQ ID NO: 1689789 - RNA, 19 nt, Artificial Sequence
  Description of Artificial Sequence: Synthetic oligonucleotide
  Sense strand starting at position 837 of SEQ ID NO: 1561674
agagcuuccgcaguagcau

SEQ ID NO: 1689790 - RNA, 19 nt, Artificial Sequence
  Description of Artificial Sequence: Synthetic oligonucleotide
  Antisense strand to SEQ ID NO: 1689789
augcuacugcggaagcucu

SEQ ID NO: 1689791 - RNA, 19 nt, Artificial Sequence
  Description of Artificial Sequence: Synthetic oligonucleotide
  Sense strand starting at position 883 of SEQ ID NO: 1561674
gcuggcauuccugggauag

SEQ ID NO: 1689792 - RNA, 19 nt, Artificial Sequence
  Description of Artificial Sequence: Synthetic oligonucleotide
  Antisense strand to SEQ ID NO: 1689791
cuaucccaggaaugccagc

SEQ ID NO: 1689793 - RNA, 19 nt, Artificial Sequence
  Description of Artificial Sequence: Synthetic oligonucleotide
  Sense strand starting at position 884 of SEQ ID NO: 1561674
cuggcauuccugggauaga

SEQ ID NO: 1689794 - RNA, 19 nt, Artificial Sequence
  Description of Artificial Sequence: Synthetic oligonucleotide
  Antisense strand to SEQ ID NO: 1689793
ucuaucccaggaaugccag

SEQ ID NO: 1689795 - RNA, 19 nt, Artificial Sequence
  Description of Artificial Sequence: Synthetic oligonucleotide
  Sense strand starting at position 885 of SEQ ID NO: 1561674
uggcauuccugggauagau

SEQ ID NO: 1689796 - RNA, 19 nt, Artificial Sequence
  Description of Artificial Sequence: Synthetic oligonucleotide
  Antisense strand to SEQ ID NO: 1689795
aucuaucccaggaaugcca

SEQ ID NO: 1689797 - RNA, 19 nt, Artificial Sequence
  Description of Artificial Sequence: Synthetic oligonucleotide
  Sense strand starting at position 982 of SEQ ID NO: 1561674
agcagaaacugauggaacu

SEQ ID NO: 1689798 - RNA, 19 nt, Artificial Sequence
  Description of Artificial Sequence: Synthetic oligonucleotide
  Antisense strand to SEQ ID NO: 1689797
aguuccaucaguuucugcu

SEQ ID NO: 1689799 - RNA, 19 nt, Artificial Sequence
  Description of Artificial Sequence: Synthetic oligonucleotide
  Sense strand starting at position 1061 of SEQ ID NO: 1561674
ggguauuggucgaugucgu

SEQ ID NO: 1689800 - RNA, 19 nt, Artificial Sequence
  Description of Artificial Sequence: Synthetic oligonucleotide
  Antisense strand to SEQ ID NO: 1689799
acgacaucgaccaauaccc

SEQ ID NO: 1689801 - RNA, 19 nt, Artificial Sequence
  Description of Artificial Sequence: Synthetic oligonucleotide
  Sense strand starting at position 1062 of SEQ ID NO: 1561674
gguauuggucgaugucguu

SEQ ID NO: 1689802 - RNA, 19 nt, Artificial Sequence
  Description of Artificial Sequence: Synthetic oligonucleotide
  Antisense strand to SEQ ID NO: 1689801
aacgacaucgaccaauacc

SEQ ID NO: 1689803 - RNA, 19 nt, Artificial Sequence
  Description of Artificial Sequence: Synthetic oligonucleotide
  Sense strand starting at position 1068 of SEQ ID NO: 1561674
ggucgaugucguugccaag

SEQ ID NO: 1689804 - RNA, 19 nt, Artificial Sequence
  Description of Artificial Sequence: Synthetic oligonucleotide
  Antisense strand to SEQ ID NO: 1689803
cuuggcaacgacaucgacc

SEQ ID NO: 1689805 - RNA, 19 nt, Artificial Sequence
  Description of Artificial Sequence: Synthetic oligonucleotide
  Sense strand starting at position 1397 of SEQ ID NO: 1561674
aguguugaccacugaccaa

SEQ ID NO: 1689806 - RNA, 19 nt, Artificial Sequence
  Description of Artificial Sequence: Synthetic oligonucleotide
  Antisense strand to SEQ ID NO: 1689805
uuggucaguggucaacacu

SEQ ID NO: 1689807 - RNA, 19 nt, Artificial Sequence
  Description of Artificial Sequence: Synthetic oligonucleotide
  Sense strand starting at position 1627 of SEQ ID NO: 1561674
ggugcugauucagguguca

SEQ ID NO: 1689808 - RNA, 19 nt, Artificial Sequence
  Description of Artificial Sequence: Synthetic oligonucleotide
  Antisense strand to SEQ ID NO: 1689807
ugacaccugaaucagcacc

SEQ ID NO: 1689809 - RNA, 19 nt, Artificial Sequence
  Description of Artificial Sequence: Synthetic oligonucleotide
  Sense strand starting at position 1764 of SEQ ID NO: 1561674
cuucucuaccuguaaggau

SEQ ID NO: 1689810 - RNA, 19 nt, Artificial Sequence
  Description of Artificial Sequence: Synthetic oligonucleotide
  Antisense strand to SEQ ID NO: 1689809
auccuuacagguagagaag

SEQ ID NO: 1689811 - RNA, 19 nt, Artificial Sequence
  Description of Artificial Sequence: Synthetic oligonucleotide
  Sense strand starting at position 2019 of SEQ ID NO: 1561674
ccaguuauaucauagaucu

SEQ ID NO: 1689812 - RNA, 19 nt, Artificial Sequence
  Description of Artificial Sequence: Synthetic oligonucleotide
  Antisense strand to SEQ ID NO: 1689811
agaucuaugauauaacugg

SEQ ID NO: 1689813 - RNA, 19 nt, Artificial Sequence
  Description of Artificial Sequence: Synthetic oligonucleotide
  Sense strand starting at position 2936 of SEQ ID NO: 1561674
ccucucuggaguuguguga

SEQ ID NO: 1689814 - RNA, 19 nt, Artificial Sequence
  Description of Artificial Sequence: Synthetic oligonucleotide
  Antisense strand to SEQ ID NO: 1689813
ucacacaacuccagagagg

SEQ ID NO: 1689815 - RNA, 19 nt, Artificial Sequence
  Description of Artificial Sequence: Synthetic oligonucleotide
  Sense strand starting at position 2940 of SEQ ID NO: 1561674
ucuggaguugugugacauc

SEQ ID NO: 1689816 - RNA, 19 nt, Artificial Sequence
  Description of Artificial Sequence: Synthetic oligonucleotide
  Antisense strand to SEQ ID NO: 1689815
gaugucacacaacuccaga

SEQ ID NO: 1689817 - RNA, 19 nt, Artificial Sequence
  Description of Artificial Sequence: Synthetic oligonucleotide
  Sense strand starting at position 2943 of SEQ ID NO: 1561674
ggaguugugugacaucaac

SEQ ID NO: 1689818 - RNA, 19 nt, Artificial Sequence
  Description of Artificial Sequence: Synthetic oligonucleotide
  Antisense strand to SEQ ID NO: 1689817
guugaugucacacaacucc

SEQ ID NO: 1689819 - RNA, 19 nt, Artificial Sequence
  Description of Artificial Sequence: Synthetic oligonucleotide
  Sense strand starting at position 3018 of SEQ ID NO: 1561674
uuagauggcucagagacau

SEQ ID NO: 1689820 - RNA, 19 nt, Artificial Sequence
  Description of Artificial Sequence: Synthetic oligonucleotide
  Antisense strand to SEQ ID NO: 1689819
augucucugagccaucuaa

SEQ ID NO: 1689821 - RNA, 19 nt, Artificial Sequence
  Description of Artificial Sequence: Synthetic oligonucleotide
  Sense strand starting at position 3041 of SEQ ID NO: 1561674
ccugaauaagccugagacu

SEQ ID NO: 1689822 - RNA, 19 nt, Artificial Sequence
  Description of Artificial Sequence: Synthetic oligonucleotide
  Antisense strand to SEQ ID NO: 1689821
agucucaggcuuauucagg

SEQ ID NO: 1689823 - RNA, 19 nt, Artificial Sequence
  Description of Artificial Sequence: Synthetic oligonucleotide
  Sense strand starting at position 3044 of SEQ ID NO: 1561674
gaauaagccugagacugaa

SEQ ID NO: 1689824 - RNA, 19 nt, Artificial Sequence
  Description of Artificial Sequence: Synthetic oligonucleotide
  Antisense strand to SEQ ID NO: 1689823
uucagucucaggcuuauuc

SEQ ID NO: 1689825 - RNA, 19 nt, Artificial Sequence
  Description of Artificial Sequence: Synthetic oligonucleotide
  Sense strand starting at position 3468 of SEQ ID NO: 1561674
acucauguguuauuaauuc

SEQ ID NO: 1689826 - RNA, 19 nt, Artificial Sequence
  Description of Artificial Sequence: Synthetic oligonucleotide
  Antisense strand to SEQ ID NO: 1689825
gaauuaauaacacaugagu

SEQ ID NO: 1689827 - RNA, 19 nt, Artificial Sequence
  Description of Artificial Sequence: Synthetic oligonucleotide
  Sense strand starting at position 3667 of SEQ ID NO: 1561674
ccacgcuaggcuuauuuau

SEQ ID NO: 1689828 - RNA, 19 nt, Artificial Sequence
  Description of Artificial Sequence: Synthetic oligonucleotide
  Antisense strand to SEQ ID NO: 1689827
auaaauaagccuagcgugg

SEQ ID NO: 1689829 - RNA, 19 nt, Artificial Sequence
  Description of Artificial Sequence: Synthetic oligonucleotide
  Sense strand starting at position 69 of SEQ ID NO: 1561675
agagacagauucuaaggua

SEQ ID NO: 1689830 - RNA, 19 nt, Artificial Sequence
  Description of Artificial Sequence: Synthetic oligonucleotide
  Antisense strand to SEQ ID NO: 1689829
uaccuuagaaucugucucu

SEQ ID NO: 1689831 - RNA, 19 nt, Artificial Sequence
  Description of Artificial Sequence: Synthetic oligonucleotide
  Sense strand starting at position 192 of SEQ ID NO: 1561675
acggauggcuguucuaaag

SEQ ID NO: 1689832 - RNA, 19 nt, Artificial Sequence
  Description of Artificial Sequence: Synthetic oligonucleotide
  Antisense strand to SEQ ID NO: 1689831
cuuuagaacagccauccgu

SEQ ID NO: 1689833 - RNA, 19 nt, Artificial Sequence
  Description of Artificial Sequence: Synthetic oligonucleotide
  Sense strand starting at position 217 of SEQ ID NO: 1561675
augcaaugucuauacaagu

SEQ ID NO: 1689834 - RNA, 19 nt, Artificial Sequence
  Description of Artificial Sequence: Synthetic oligonucleotide
  Antisense strand to SEQ ID NO: 1689833
acuuguauagacauugcau

SEQ ID NO: 1689835 - RNA, 19 nt, Artificial Sequence
  Description of Artificial Sequence: Synthetic oligonucleotide
  Sense strand starting at position 259 of SEQ ID NO: 1561675
gugaaacuggcagaaaugu

SEQ ID NO: 1689836 - RNA, 19 nt, Artificial Sequence
  Description of Artificial Sequence: Synthetic oligonucleotide
  Antisense strand to SEQ ID NO: 1689835
acauuucugccaguuucac

SEQ ID NO: 1689837 - RNA, 19 nt, Artificial Sequence
  Description of Artificial Sequence: Synthetic oligonucleotide
  Sense strand starting at position 276 of SEQ ID NO: 1561675
guugcaaaggauuggagau

SEQ ID NO: 1689838 - RNA, 19 nt, Artificial Sequence
  Description of Artificial Sequence: Synthetic oligonucleotide
  Antisense strand to SEQ ID NO: 1689837
aucuccaauccuuugcaac

SEQ ID NO: 1689839 - RNA, 19 nt, Artificial Sequence
  Description of Artificial Sequence: Synthetic oligonucleotide
  Sense strand starting at position 282 of SEQ ID NO: 1561675
aaggauuggagaugcguua

SEQ ID NO: 1689840 - RNA, 19 nt, Artificial Sequence
  Description of Artificial Sequence: Synthetic oligonucleotide
  Antisense strand to SEQ ID NO: 1689839
uaacgcaucuccaauccuu

SEQ ID NO: 1689841 - RNA, 19 nt, Artificial Sequence
  Description of Artificial Sequence: Synthetic oligonucleotide
  Sense strand starting at position 289 of SEQ ID NO: 1561675
ggagaugcguuacuauaag

SEQ ID NO: 1689842 - RNA, 19 nt, Artificial Sequence
  Description of Artificial Sequence: Synthetic oligonucleotide
  Antisense strand to SEQ ID NO: 1689841
cuuauaguaacgcaucucc

SEQ ID NO: 1689843 - RNA, 19 nt, Artificial Sequence
  Description of Artificial Sequence: Synthetic oligonucleotide
  Sense strand starting at position 478 of SEQ ID NO: 1561675
uggauucuggguuguggaa

SEQ ID NO: 1689844 - RNA, 19 nt, Artificial Sequence
  Description of Artificial Sequence: Synthetic oligonucleotide
  Antisense strand to SEQ ID NO: 1689843
uuccacaacccagaaucca

SEQ ID NO: 1689845 - RNA, 19 nt, Artificial Sequence
  Description of Artificial Sequence: Synthetic oligonucleotide
  Sense strand starting at position 539 of SEQ ID NO: 1561675
aguuucuuguucuccaaua

SEQ ID NO: 1689846 - RNA, 19 nt, Artificial Sequence
  Description of Artificial Sequence: Synthetic oligonucleotide
  Antisense strand to SEQ ID NO: 1689845
uauuggagaacaagaaacu

SEQ ID NO: 1689847 - RNA, 19 nt, Artificial Sequence
  Description of Artificial Sequence: Synthetic oligonucleotide
  Sense strand starting at position 540 of SEQ ID NO: 1561675
guuucuuguucuccaauaa

SEQ ID NO: 1689848 - RNA, 19 nt, Artificial Sequence
  Description of Artificial Sequence: Synthetic oligonucleotide
  Antisense strand to SEQ ID NO: 1689847
uuauuggagaacaagaaac

SEQ ID NO: 1689849 - RNA, 19 nt, Artificial Sequence
  Description of Artificial Sequence: Synthetic oligonucleotide
  Sense strand starting at position 709 of SEQ ID NO: 1561675
uugcuauguggcuagaaua

SEQ ID NO: 1689850 - RNA, 19 nt, Artificial Sequence
  Description of Artificial Sequence: Synthetic oligonucleotide
  Antisense strand to SEQ ID NO: 1689849
uauucuagccacauagcaa

SEQ ID NO: 1689851 - RNA, 19 nt, Artificial Sequence
  Description of Artificial Sequence: Synthetic oligonucleotide
  Sense strand starting at position 769 of SEQ ID NO: 1561675
acaguuuagcaguaccaaa

SEQ ID NO: 1689852 - RNA, 19 nt, Artificial Sequence
  Description of Artificial Sequence: Synthetic oligonucleotide
  Antisense strand to SEQ ID NO: 1689851
uuugguacugcuaaacugu

SEQ ID NO: 1689853 - RNA, 19 nt, Artificial Sequence
  Description of Artificial Sequence: Synthetic oligonucleotide
  Sense strand starting at position 931 of SEQ ID NO: 1561675
acgcauagggcacagaaau

SEQ ID NO: 1689854 - RNA, 19 nt, Artificial Sequence
  Description of Artificial Sequence: Synthetic oligonucleotide
  Antisense strand to SEQ ID NO: 1689853
auuucugugcccuaugcgu

SEQ ID NO: 1689855 - RNA, 19 nt, Artificial Sequence
  Description of Artificial Sequence: Synthetic oligonucleotide
  Sense strand starting at position 951 of SEQ ID NO: 1561675
ggaaacggaucuuccuaua

SEQ ID NO: 1689856 - RNA, 19 nt, Artificial Sequence
  Description of Artificial Sequence: Synthetic oligonucleotide
  Antisense strand to SEQ ID NO: 1689855
uauaggaagauccguuucc

SEQ ID NO: 1689857 - RNA, 19 nt, Artificial Sequence
  Description of Artificial Sequence: Synthetic oligonucleotide
  Sense strand starting at position 956 of SEQ ID NO: 1561675
cggaucuuccuauaucuaa

SEQ ID NO: 1689858 - RNA, 19 nt, Artificial Sequence
  Description of Artificial Sequence: Synthetic oligonucleotide
  Antisense strand to SEQ ID NO: 1689857
uuagauauaggaagauccg

SEQ ID NO: 1689859 - RNA, 19 nt, Artificial Sequence
  Description of Artificial Sequence: Synthetic oligonucleotide
  Sense strand starting at position 1267 of SEQ ID NO: 1561675
uaaggaagccguugucaag

SEQ ID NO: 1689860 - RNA, 19 nt, Artificial Sequence
  Description of Artificial Sequence: Synthetic oligonucleotide
  Antisense strand to SEQ ID NO: 1689859
cuugacaacggcuuccuua

SEQ ID NO: 1689861 - RNA, 19 nt, Artificial Sequence
  Description of Artificial Sequence: Synthetic oligonucleotide
  Sense strand starting at position 1314 of SEQ ID NO: 1561675
gggcuuucuagguaaucca

SEQ ID NO: 1689862 - RNA, 19 nt, Artificial Sequence
  Description of Artificial Sequence: Synthetic oligonucleotide
  Antisense strand to SEQ ID NO: 1689861
uggauuaccuagaaagccc

SEQ ID NO: 1689863 - RNA, 19 nt, Artificial Sequence
  Description of Artificial Sequence: Synthetic oligonucleotide
  Sense strand starting at position 1373 of SEQ ID NO: 1561675
gugugaggucuguagagua

SEQ ID NO: 1689864 - RNA, 19 nt, Artificial Sequence
  Description of Artificial Sequence: Synthetic oligonucleotide
  Antisense strand to SEQ ID NO: 1689863
uacucuacagaccucacac

SEQ ID NO: 1689865 - RNA, 19 nt, Artificial Sequence
  Description of Artificial Sequence: Synthetic oligonucleotide
  Sense strand starting at position 1392 of SEQ ID NO: 1561675
gcaguuucugagggaaaca

SEQ ID NO: 1689866 - RNA, 19 nt, Artificial Sequence
  Description of Artificial Sequence: Synthetic oligonucleotide
  Antisense strand to SEQ ID NO: 1689865
uguuucccucagaaacugc

SEQ ID NO: 1689867 - RNA, 19 nt, Artificial Sequence
  Description of Artificial Sequence: Synthetic oligonucleotide
  Sense strand starting at position 1424 of SEQ ID NO: 1561675
gcgagugaguuauucauag

SEQ ID NO: 1689868 - RNA, 19 nt, Artificial Sequence
  Description of Artificial Sequence: Synthetic oligonucleotide
  Antisense strand to SEQ ID NO: 1689867
cuaugaauaacucacucgc

SEQ ID NO: 1689869 - RNA, 19 nt, Artificial Sequence
  Description of Artificial Sequence: Synthetic oligonucleotide
  Sense strand starting at position 1456 of SEQ ID NO: 1561675
ggguucuguguagaagaau

SEQ ID NO: 1689870 - RNA, 19 nt, Artificial Sequence
  Description of Artificial Sequence: Synthetic oligonucleotide
  Antisense strand to SEQ ID NO: 1689869
auucuucuacacagaaccc

SEQ ID NO: 1689871 - RNA, 19 nt, Artificial Sequence
  Description of Artificial Sequence: Synthetic oligonucleotide
  Sense strand starting at position 1500 of SEQ ID NO: 1561675
gggugaggacgucauaaca

SEQ ID NO: 1689872 - RNA, 19 nt, Artificial Sequence
  Description of Artificial Sequence: Synthetic oligonucleotide
  Antisense strand to SEQ ID NO: 1689871
uguuaugacguccucaccc

SEQ ID NO: 1689873 - RNA, 19 nt, Artificial Sequence
  Description of Artificial Sequence: Synthetic oligonucleotide
  Sense strand starting at position 1533 of SEQ ID NO: 1561675
aaucgcugucccuagggaa

SEQ ID NO: 1689874 - RNA, 19 nt, Artificial Sequence
  Description of Artificial Sequence: Synthetic oligonucleotide
  Antisense strand to SEQ ID NO: 1689873
uucccuagggacagcgauu

SEQ ID NO: 1689875 - RNA, 19 nt, Artificial Sequence
  Description of Artificial Sequence: Synthetic oligonucleotide
  Sense strand starting at position 2474 of SEQ ID NO: 1561675
ccgcuuccuggucaucaau

SEQ ID NO: 1689876 - RNA, 19 nt, Artificial Sequence
  Description of Artificial Sequence: Synthetic oligonucleotide
  Antisense strand to SEQ ID NO: 1689875
auugaugaccaggaagcgg

SEQ ID NO: 1689877 - RNA, 19 nt, Artificial Sequence
  Description of Artificial Sequence: Synthetic oligonucleotide
  Sense strand starting at position 2664 of SEQ ID NO: 1561675
acaagaaacuugggaaaua

SEQ ID NO: 1689878 - RNA, 19 nt, Artificial Sequence
  Description of Artificial Sequence: Synthetic oligonucleotide
  Antisense strand to SEQ ID NO: 1689877
uauuucccaaguuucuugu

SEQ ID NO: 1689879 - RNA, 19 nt, Artificial Sequence
  Description of Artificial Sequence: Synthetic oligonucleotide
  Sense strand starting at position 2677 of SEQ ID NO: 1561675
gaaauacugcacugauagu

SEQ ID NO: 1689880 - RNA, 19 nt, Artificial Sequence
  Description of Artificial Sequence: Synthetic oligonucleotide
  Antisense strand to SEQ ID NO: 1689879
acuaucagugcaguauuuc

SEQ ID NO: 1689881 - RNA, 19 nt, Artificial Sequence
  Description of Artificial Sequence: Synthetic oligonucleotide
  Sense strand starting at position 2698 of SEQ ID NO: 1561675
ccaggaguccuguauauac

SEQ ID NO: 1689882 - RNA, 19 nt, Artificial Sequence
  Description of Artificial Sequence: Synthetic oligonucleotide
  Antisense strand to SEQ ID NO: 1689881
guauauacaggacuccugg

SEQ ID NO: 1689883 - RNA, 19 nt, Artificial Sequence
  Description of Artificial Sequence: Synthetic oligonucleotide
  Sense strand starting at position 2761 of SEQ ID NO: 1561675
gucggaaugccuuaaaugu

SEQ ID NO: 1689884 - RNA, 19 nt, Artificial Sequence
  Description of Artificial Sequence: Synthetic oligonucleotide
  Antisense strand to SEQ ID NO: 1689883
acauuuaaggcauuccgac

SEQ ID NO: 1689885 - RNA, 19 nt, Artificial Sequence
  Description of Artificial Sequence: Synthetic oligonucleotide
  Sense strand starting at position 2842 of SEQ ID NO: 1561675
ggugcuagaucacuuaaau

SEQ ID NO: 1689886 - RNA, 19 nt, Artificial Sequence
  Description of Artificial Sequence: Synthetic oligonucleotide
  Antisense strand to SEQ ID NO: 1689885
auuuaagugaucuagcacc

SEQ ID NO: 1689887 - RNA, 19 nt, Artificial Sequence
  Description of Artificial Sequence: Synthetic oligonucleotide
  Sense strand starting at position 2903 of SEQ ID NO: 1561675
ggacaaucccuaugguguc

SEQ ID NO: 1689888 - RNA, 19 nt, Artificial Sequence
  Description of Artificial Sequence: Synthetic oligonucleotide
  Antisense strand to SEQ ID NO: 1689887
gacaccauagggauugucc

SEQ ID NO: 1689889 - RNA, 19 nt, Artificial Sequence
  Description of Artificial Sequence: Synthetic oligonucleotide
  Sense strand starting at position 2926 of SEQ ID NO: 1561675
ucagguuuggcugagggaa

SEQ ID NO: 1689890 - RNA, 19 nt, Artificial Sequence
  Description of Artificial Sequence: Synthetic oligonucleotide
  Antisense strand to SEQ ID NO: 1689889
uucccucagccaaaccuga

SEQ ID NO: 1689891 - RNA, 19 nt, Artificial Sequence
  Description of Artificial Sequence: Synthetic oligonucleotide
  Sense strand starting at position 2962 of SEQ ID NO: 1561675
aauuuaaagugcucgucuu

SEQ ID NO: 1689892 - RNA, 19 nt, Artificial Sequence
  Description of Artificial Sequence: Synthetic oligonucleotide
  Antisense strand to SEQ ID NO: 1689891
aagacgagcacuuuaaauu

SEQ ID NO: 1689893 - RNA, 19 nt, Artificial Sequence
  Description of Artificial Sequence: Synthetic oligonucleotide
  Sense strand starting at position 2963 of SEQ ID NO: 1561675
auuuaaagugcucgucuuu

SEQ ID NO: 1689894 - RNA, 19 nt, Artificial Sequence
  Description of Artificial Sequence: Synthetic oligonucleotide
  Antisense strand to SEQ ID NO: 1689893
aaagacgagcacuuuaaau

SEQ ID NO: 1689895 - RNA, 19 nt, Artificial Sequence
  Description of Artificial Sequence: Synthetic oligonucleotide
  Sense strand starting at position 3020 of SEQ ID NO: 1561675
cggagucgugaacaaauaa

SEQ ID NO: 1689896 - RNA, 19 nt, Artificial Sequence
  Description of Artificial Sequence: Synthetic oligonucleotide
  Antisense strand to SEQ ID NO: 1689895
uuauuuguucacgacuccg

SEQ ID NO: 1689897 - RNA, 19 nt, Artificial Sequence
  Description of Artificial Sequence: Synthetic oligonucleotide
  Sense strand starting at position 3104 of SEQ ID NO: 1561675
gccucacuccgguaacuau

SEQ ID NO: 1689898 - RNA, 19 nt, Artificial Sequence
  Description of Artificial Sequence: Synthetic oligonucleotide
  Antisense strand to SEQ ID NO: 1689897
auaguuaccggagugaggc

SEQ ID NO: 1689899 - RNA, 19 nt, Artificial Sequence
  Description of Artificial Sequence: Synthetic oligonucleotide
  Sense strand starting at position 3235 of SEQ ID NO: 1561675
uuccgaaagucagugggua

SEQ ID NO: 1689900 - RNA, 19 nt, Artificial Sequence
  Description of Artificial Sequence: Synthetic oligonucleotide
  Antisense strand to SEQ ID NO: 1689899
uacccacugacuuucggaa

SEQ ID NO: 1689901 - RNA, 19 nt, Artificial Sequence
  Description of Artificial Sequence: Synthetic oligonucleotide
  Sense strand starting at position 3267 of SEQ ID NO: 1561675
cuccacuucugauucggaa

SEQ ID NO: 1689902 - RNA, 19 nt, Artificial Sequence
  Description of Artificial Sequence: Synthetic oligonucleotide
  Antisense strand to SEQ ID NO: 1689901
uuccgaaucagaaguggag

SEQ ID NO: 1689903 - RNA, 19 nt, Artificial Sequence
  Description of Artificial Sequence: Synthetic oligonucleotide
  Sense strand starting at position 3269 of SEQ ID NO: 1561675
ccacuucugauucggaaag

SEQ ID NO: 1689904 - RNA, 19 nt, Artificial Sequence
  Description of Artificial Sequence: Synthetic oligonucleotide
  Antisense strand to SEQ ID NO: 1689903
cuuuccgaaucagaagugg

SEQ ID NO: 1689905 - RNA, 19 nt, Artificial Sequence
  Description of Artificial Sequence: Synthetic oligonucleotide
  Sense strand starting at position 3295 of SEQ ID NO: 1561675
aucccugaaggcgaauauu

SEQ ID NO: 1689906 - RNA, 19 nt, Artificial Sequence
  Description of Artificial Sequence: Synthetic oligonucleotide
  Antisense strand to SEQ ID NO: 1689905
aauauucgccuucagggau

SEQ ID NO: 1689907 - RNA, 19 nt, Artificial Sequence
  Description of Artificial Sequence: Synthetic oligonucleotide
  Sense strand starting at position 3966 of SEQ ID NO: 1561675
gaggcuguaccuuacaagu

SEQ ID NO: 1689908 - RNA, 19 nt, Artificial Sequence
  Description of Artificial Sequence: Synthetic oligonucleotide
  Antisense strand to SEQ ID NO: 1689907
acuuguaagguacagccuc

SEQ ID NO: 1689909 - RNA, 19 nt, Artificial Sequence
  Description of Artificial Sequence: Synthetic oligonucleotide
  Sense strand starting at position 196 of SEQ ID NO: 1561676
gagaucucagguugucaca

SEQ ID NO: 1689910 - RNA, 19 nt, Artificial Sequence
  Description of Artificial Sequence: Synthetic oligonucleotide
  Antisense strand to SEQ ID NO: 1689909
ugugacaaccugagaucuc

SEQ ID NO: 1689911 - RNA, 19 nt, Artificial Sequence
  Description of Artificial Sequence: Synthetic oligonucleotide
  Sense strand starting at position 294 of SEQ ID NO: 1561676
agucauaucugcccgggaa

SEQ ID NO: 1689912 - RNA, 19 nt, Artificial Sequence
  Description of Artificial Sequence: Synthetic oligonucleotide
  Antisense strand to SEQ ID NO: 1689911
uucccgggcagauaugacu

SEQ ID NO: 1689913 - RNA, 19 nt, Artificial Sequence
  Description of Artificial Sequence: Synthetic oligonucleotide
  Sense strand starting at position 295 of SEQ ID NO: 1561676
gucauaucugcccgggaag

SEQ ID NO: 1689914 - RNA, 19 nt, Artificial Sequence
  Description of Artificial Sequence: Synthetic oligonucleotide
  Antisense strand to SEQ ID NO: 1689913
cuucccgggcagauaugac

SEQ ID NO: 1689915 - RNA, 19 nt, Artificial Sequence
  Description of Artificial Sequence: Synthetic oligonucleotide
  Sense strand starting at position 326 of SEQ ID NO: 1561676
gggcgugaggcagauauga

SEQ ID NO: 1689916 - RNA, 19 nt, Artificial Sequence
  Description of Artificial Sequence: Synthetic oligonucleotide
  Antisense strand to SEQ ID NO: 1689915
ucauaucugccucacgccc

SEQ ID NO: 1689917 - RNA, 19 nt, Artificial Sequence
  Description of Artificial Sequence: Synthetic oligonucleotide
  Sense strand starting at position 328 of SEQ ID NO: 1561676
gcgugaggcagauaugacu

SEQ ID NO: 1689918 - RNA, 19 nt, Artificial Sequence
  Description of Artificial Sequence: Synthetic oligonucleotide
  Antisense strand to SEQ ID NO: 1689917
agucauaucugccucacgc

SEQ ID NO: 1689919 - RNA, 19 nt, Artificial Sequence
  Description of Artificial Sequence: Synthetic oligonucleotide
  Sense strand starting at position 362 of SEQ ID NO: 1561676
ucgggaaucccucgagaac

SEQ ID NO: 1689920 - RNA, 19 nt, Artificial Sequence
  Description of Artificial Sequence: Synthetic oligonucleotide
  Antisense strand to SEQ ID NO: 1689919
guucucgagggauucccga

SEQ ID NO: 1689921 - RNA, 19 nt, Artificial Sequence
  Description of Artificial Sequence: Synthetic oligonucleotide
  Sense strand starting at position 481 of SEQ ID NO: 1561676
ggcggauuucaccgcugga

SEQ ID NO: 1689922 - RNA, 19 nt, Artificial Sequence
  Description of Artificial Sequence: Synthetic oligonucleotide
  Antisense strand to SEQ ID NO: 1689921
uccagcggugaaauccgcc

SEQ ID NO: 1689923 - RNA, 19 nt, Artificial Sequence
  Description of Artificial Sequence: Synthetic oligonucleotide
  Sense strand starting at position 517 of SEQ ID NO: 1561676
ugacgugugagggauguuu

SEQ ID NO: 1689924 - RNA, 19 nt, Artificial Sequence
  Description of Artificial Sequence: Synthetic oligonucleotide
  Antisense strand to SEQ ID NO: 1689923
aaacaucccucacacguca

SEQ ID NO: 1689925 - RNA, 19 nt, Artificial Sequence
  Description of Artificial Sequence: Synthetic oligonucleotide
  Sense strand starting at position 580 of SEQ ID NO: 1561676
gucgugaacccggaaaggu

SEQ ID NO: 1689926 - RNA, 19 nt, Artificial Sequence
  Description of Artificial Sequence: Synthetic oligonucleotide
  Antisense strand to SEQ ID NO: 1689925
accuuuccggguucacgac

SEQ ID NO: 1689927 - RNA, 19 nt, Artificial Sequence
  Description of Artificial Sequence: Synthetic oligonucleotide
  Sense strand starting at position 1185 of SEQ ID NO: 1561676
gagcgcacuccucgggaau

SEQ ID NO: 1689928 - RNA, 19 nt, Artificial Sequence
  Description of Artificial Sequence: Synthetic oligonucleotide
  Antisense strand to SEQ ID NO: 1689927
auucccgaggagugcgcuc

SEQ ID NO: 1689929 - RNA, 19 nt, Artificial Sequence
  Description of Artificial Sequence: Synthetic oligonucleotide
  Sense strand starting at position 1196 of SEQ ID NO: 1561676
ucgggaaucccucggagga

SEQ ID NO: 1689930 - RNA, 19 nt, Artificial Sequence
  Description of Artificial Sequence: Synthetic oligonucleotide
  Antisense strand to SEQ ID NO: 1689929
uccuccgagggauucccga

SEQ ID NO: 1689931 - RNA, 19 nt, Artificial Sequence
  Description of Artificial Sequence: Synthetic oligonucleotide
  Sense strand starting at position 1197 of SEQ ID NO: 1561676
cgggaaucccucggaggaa

SEQ ID NO: 1689932 - RNA, 19 nt, Artificial Sequence
  Description of Artificial Sequence: Synthetic oligonucleotide
  Antisense strand to SEQ ID NO: 1689931
uuccuccgagggauucccg

SEQ ID NO: 1689933 - RNA, 19 nt, Artificial Sequence
  Description of Artificial Sequence: Synthetic oligonucleotide
  Sense strand starting at position 1198 of SEQ ID NO: 1561676
gggaaucccucggaggaau

SEQ ID NO: 1689934 - RNA, 19 nt, Artificial Sequence
  Description of Artificial Sequence: Synthetic oligonucleotide
  Antisense strand to SEQ ID NO: 1689933
auuccuccgagggauuccc

SEQ ID NO: 1689935 - RNA, 19 nt, Artificial Sequence
  Description of Artificial Sequence: Synthetic oligonucleotide
  Sense strand starting at position 1208 of SEQ ID NO: 1561676
cggaggaauuugggagaga

SEQ ID NO: 1689936 - RNA, 19 nt, Artificial Sequence
  Description of Artificial Sequence: Synthetic oligonucleotide
  Antisense strand to SEQ ID NO: 1689935
ucucucccaaauuccuccg

SEQ ID NO: 1689937 - RNA, 19 nt, Artificial Sequence
  Description of Artificial Sequence: Synthetic oligonucleotide
  Sense strand starting at position 1719 of SEQ ID NO: 1561676
ccgaccugacucuggauaa

SEQ ID NO: 1689938 - RNA, 19 nt, Artificial Sequence
  Description of Artificial Sequence: Synthetic oligonucleotide
  Antisense strand to SEQ ID NO: 1689937
uuauccagagucaggucgg

SEQ ID NO: 1689939 - RNA, 19 nt, Artificial Sequence
  Description of Artificial Sequence: Synthetic oligonucleotide
  Sense strand starting at position 1720 of SEQ ID NO: 1561676
cgaccugacucuggauaaa

SEQ ID NO: 1689940 - RNA, 19 nt, Artificial Sequence
  Description of Artificial Sequence: Synthetic oligonucleotide
  Antisense strand to SEQ ID NO: 1689939
uuuauccagagucaggucg

SEQ ID NO: 1689941 - RNA, 19 nt, Artificial Sequence
  Description of Artificial Sequence: Synthetic oligonucleotide
  Sense strand starting at position 1796 of SEQ ID NO: 1561676
gucuguaucuguucaguug

SEQ ID NO: 1689942 - RNA, 19 nt, Artificial Sequence
  Description of Artificial Sequence: Synthetic oligonucleotide
  Antisense strand to SEQ ID NO: 1689941
caacugaacagauacagac

SEQ ID NO: 1689943 - RNA, 19 nt, Artificial Sequence
  Description of Artificial Sequence: Synthetic oligonucleotide
  Sense strand starting at position 2023 of SEQ ID NO: 1561676
cuaccaggcuguucuguaa

SEQ ID NO: 1689944 - RNA, 19 nt, Artificial Sequence
  Description of Artificial Sequence: Synthetic oligonucleotide
  Antisense strand to SEQ ID NO: 1689943
uuacagaacagccugguag

SEQ ID NO: 1689945 - RNA, 19 nt, Artificial Sequence
  Description of Artificial Sequence: Synthetic oligonucleotide
  Sense strand starting at position 2026 of SEQ ID NO: 1561676
ccaggcuguucuguaacuu

SEQ ID NO: 1689946 - RNA, 19 nt, Artificial Sequence
  Description of Artificial Sequence: Synthetic oligonucleotide
  Antisense strand to SEQ ID NO: 1689945
aaguuacagaacagccugg

SEQ ID NO: 1689947 - RNA, 19 nt, Artificial Sequence
  Description of Artificial Sequence: Synthetic oligonucleotide
  Sense strand starting at position 2078 of SEQ ID NO: 1561676
ggaagagcuuucccuuggu

SEQ ID NO: 1689948 - RNA, 19 nt, Artificial Sequence
  Description of Artificial Sequence: Synthetic oligonucleotide
  Antisense strand to SEQ ID NO: 1689947
accaagggaaagcucuucc

SEQ ID NO: 1689949 - RNA, 19 nt, Artificial Sequence
  Description of Artificial Sequence: Synthetic oligonucleotide
  Sense strand starting at position 2081 of SEQ ID NO: 1561676
agagcuuucccuuggugca

SEQ ID NO: 1689950 - RNA, 19 nt, Artificial Sequence
  Description of Artificial Sequence: Synthetic oligonucleotide
  Antisense strand to SEQ ID NO: 1689949
ugcaccaagggaaagcucu

SEQ ID NO: 1689951 - RNA, 19 nt, Artificial Sequence
  Description of Artificial Sequence: Synthetic oligonucleotide
  Sense strand starting at position 2082 of SEQ ID NO: 1561676
gagcuuucccuuggugcau

SEQ ID NO: 1689952 - RNA, 19 nt, Artificial Sequence
  Description of Artificial Sequence: Synthetic oligonucleotide
  Antisense strand to SEQ ID NO: 1689951
augcaccaagggaaagcuc

SEQ ID NO: 1689953 - RNA, 19 nt, Artificial Sequence
  Description of Artificial Sequence: Synthetic oligonucleotide
  Sense strand starting at position 2234 of SEQ ID NO: 1561676
uucugauccuuccggauua

SEQ ID NO: 1689954 - RNA, 19 nt, Artificial Sequence
  Description of Artificial Sequence: Synthetic oligonucleotide
  Antisense strand to SEQ ID NO: 1689953
uaauccggaaggaucagaa

SEQ ID NO: 1689955 - RNA, 19 nt, Artificial Sequence
  Description of Artificial Sequence: Synthetic oligonucleotide
  Sense strand starting at position 2236 of SEQ ID NO: 1561676
cugauccuuccggauuaca

SEQ ID NO: 1689956 - RNA, 19 nt, Artificial Sequence
  Description of Artificial Sequence: Synthetic oligonucleotide
  Antisense strand to SEQ ID NO: 1689955
uguaauccggaaggaucag

SEQ ID NO: 1689957 - RNA, 19 nt, Artificial Sequence
  Description of Artificial Sequence: Synthetic oligonucleotide
  Sense strand starting at position 2332 of SEQ ID NO: 1561676
gccagcuauuguuauuguu

SEQ ID NO: 1689958 - RNA, 19 nt, Artificial Sequence
  Description of Artificial Sequence: Synthetic oligonucleotide
  Antisense strand to SEQ ID NO: 1689957
aacaauaacaauagcuggc

SEQ ID NO: 1689959 - RNA, 19 nt, Artificial Sequence
  Description of Artificial Sequence: Synthetic oligonucleotide
  Sense strand starting at position 2884 of SEQ ID NO: 1561676
gagacccugugucucuaaa

SEQ ID NO: 1689960 - RNA, 19 nt, Artificial Sequence
  Description of Artificial Sequence: Synthetic oligonucleotide
  Antisense strand to SEQ ID NO: 1689959
uuuagagacacagggucuc

SEQ ID NO: 1689961 - RNA, 19 nt, Artificial Sequence
  Description of Artificial Sequence: Synthetic oligonucleotide
  Sense strand starting at position 3577 of SEQ ID NO: 1561676
ggaccuugacgucgauaca

SEQ ID NO: 1689962 - RNA, 19 nt, Artificial Sequence
  Description of Artificial Sequence: Synthetic oligonucleotide
  Antisense strand to SEQ ID NO: 1689961
uguaucgacgucaaggucc

SEQ ID NO: 1689963 - RNA, 19 nt, Artificial Sequence
  Description of Artificial Sequence: Synthetic oligonucleotide
  Sense strand starting at position 3693 of SEQ ID NO: 1561676
ccggcucugucuggucauu

SEQ ID NO: 1689964 - RNA, 19 nt, Artificial Sequence
  Description of Artificial Sequence: Synthetic oligonucleotide
  Antisense strand to SEQ ID NO: 1689963
aaugaccagacagagccgg

SEQ ID NO: 1689965 - RNA, 19 nt, Artificial Sequence
  Description of Artificial Sequence: Synthetic oligonucleotide
  Sense strand starting at position 3761 of SEQ ID NO: 1561676
gcuucuugcgcucagcaua

SEQ ID NO: 1689966 - RNA, 19 nt, Artificial Sequence
  Description of Artificial Sequence: Synthetic oligonucleotide
  Antisense strand to SEQ ID NO: 1689965
uaugcugagcgcaagaagc

SEQ ID NO: 1689967 - RNA, 19 nt, Artificial Sequence
  Description of Artificial Sequence: Synthetic oligonucleotide
  Sense strand starting at position 3833 of SEQ ID NO: 1561676
gccaguuugugcucagucu

SEQ ID NO: 1689968 - RNA, 19 nt, Artificial Sequence
  Description of Artificial Sequence: Synthetic oligonucleotide
  Antisense strand to SEQ ID NO: 1689967
agacugagcacaaacuggc

SEQ ID NO: 1689969 - RNA, 19 nt, Artificial Sequence
  Description of Artificial Sequence: Synthetic oligonucleotide
  Sense strand starting at position 3834 of SEQ ID NO: 1561676
ccaguuugugcucagucuu

SEQ ID NO: 1689970 - RNA, 19 nt, Artificial Sequence
  Description of Artificial Sequence: Synthetic oligonucleotide
  Antisense strand to SEQ ID NO: 1689969
aagacugagcacaaacugg

SEQ ID NO: 1689971 - RNA, 19 nt, Artificial Sequence
  Description of Artificial Sequence: Synthetic oligonucleotide
  Sense strand starting at position 3840 of SEQ ID NO: 1561676
ugugcucagucuugcucaa

SEQ ID NO: 1689972 - RNA, 19 nt, Artificial Sequence
  Description of Artificial Sequence: Synthetic oligonucleotide
  Antisense strand to SEQ ID NO: 1689971
uugagcaagacugagcaca

SEQ ID NO: 1689973 - RNA, 19 nt, Artificial Sequence
  Description of Artificial Sequence: Synthetic oligonucleotide
  Sense strand starting at position 3886 of SEQ ID NO: 1561676
cagugaacacuuuggaucu

SEQ ID NO: 1689974 - RNA, 19 nt, Artificial Sequence
  Description of Artificial Sequence: Synthetic oligonucleotide
  Antisense strand to SEQ ID NO: 1689973
agauccaaaguguucacug

SEQ ID NO: 1689975 - RNA, 19 nt, Artificial Sequence
  Description of Artificial Sequence: Synthetic oligonucleotide
  Sense strand starting at position 308 of SEQ ID NO: 1561677
ccaucuauucucugaggcu

SEQ ID NO: 1689976 - RNA, 19 nt, Artificial Sequence
  Description of Artificial Sequence: Synthetic oligonucleotide
  Antisense strand to SEQ ID NO: 1689975
agccucagagaauagaugg

SEQ ID NO: 1689977 - RNA, 19 nt, Artificial Sequence
  Description of Artificial Sequence: Synthetic oligonucleotide
  Sense strand starting at position 516 of SEQ ID NO: 1561677
gggucuaaccaauguauac

SEQ ID NO: 1689978 - RNA, 19 nt, Artificial Sequence
  Description of Artificial Sequence: Synthetic oligonucleotide
  Antisense strand to SEQ ID NO: 1689977
guauacauugguuagaccc

SEQ ID NO: 1689979 - RNA, 19 nt, Artificial Sequence
  Description of Artificial Sequence: Synthetic oligonucleotide
  Sense strand starting at position 550 of SEQ ID NO: 1561677
uuaugucuuugccuguuaa

SEQ ID NO: 1689980 - RNA, 19 nt, Artificial Sequence
  Description of Artificial Sequence: Synthetic oligonucleotide
  Antisense strand to SEQ ID NO: 1689979
uuaacaggcaaagacauaa

SEQ ID NO: 1689981 - RNA, 19 nt, Artificial Sequence
  Description of Artificial Sequence: Synthetic oligonucleotide
  Sense strand starting at position 618 of SEQ ID NO: 1561677
cgggaucacuuacuaaaga

SEQ ID NO: 1689982 - RNA, 19 nt, Artificial Sequence
  Description of Artificial Sequence: Synthetic oligonucleotide
  Antisense strand to SEQ ID NO: 1689981
ucuuuaguaagugaucccg

SEQ ID NO: 1689983 - RNA, 19 nt, Artificial Sequence
  Description of Artificial Sequence: Synthetic oligonucleotide
  Sense strand starting at position 728 of SEQ ID NO: 1561677
uugcuaacagucugacaca

SEQ ID NO: 1689984 - RNA, 19 nt, Artificial Sequence
  Description of Artificial Sequence: Synthetic oligonucleotide
  Antisense strand to SEQ ID NO: 1689983
ugugucagacuguuagcaa

SEQ ID NO: 1689985 - RNA, 19 nt, Artificial Sequence
  Description of Artificial Sequence: Synthetic oligonucleotide
  Sense strand starting at position 731 of SEQ ID NO: 1561677
cuaacagucugacacauga

SEQ ID NO: 1689986 - RNA, 19 nt, Artificial Sequence
  Description of Artificial Sequence: Synthetic oligonucleotide
  Antisense strand to SEQ ID NO: 1689985
ucaugugucagacuguuag

SEQ ID NO: 1689987 - RNA, 19 nt, Artificial Sequence
  Description of Artificial Sequence: Synthetic oligonucleotide
  Sense strand starting at position 1057 of SEQ ID NO: 1561677
gagugagagucaugagacu

SEQ ID NO: 1689988 - RNA, 19 nt, Artificial Sequence
  Description of Artificial Sequence: Synthetic oligonucleotide
  Antisense strand to SEQ ID NO: 1689987
agucucaugacucucacuc

SEQ ID NO: 1689989 - RNA, 19 nt, Artificial Sequence
  Description of Artificial Sequence: Synthetic oligonucleotide
  Sense strand starting at position 1066 of SEQ ID NO: 1561677
ucaugagacuccguuuaaa

SEQ ID NO: 1689990 - RNA, 19 nt, Artificial Sequence
  Description of Artificial Sequence: Synthetic oligonucleotide
  Antisense strand to SEQ ID NO: 1689989
uuuaaacggagucucauga

SEQ ID NO: 1689991 - RNA, 19 nt, Artificial Sequence
  Description of Artificial Sequence: Synthetic oligonucleotide
  Sense strand starting at position 1150 of SEQ ID NO: 1561677
ccagcugcacuguaugauu

SEQ ID NO: 1689992 - RNA, 19 nt, Artificial Sequence
  Description of Artificial Sequence: Synthetic oligonucleotide
  Antisense strand to SEQ ID NO: 1689991
aaucauacagugcagcugg

SEQ ID NO: 1689993 - RNA, 19 nt, Artificial Sequence
  Description of Artificial Sequence: Synthetic oligonucleotide
  Sense strand starting at position 1171 of SEQ ID NO: 1561677
auuuauaucaaacgugcga

SEQ ID NO: 1689994 - RNA, 19 nt, Artificial Sequence
  Description of Artificial Sequence: Synthetic oligonucleotide
  Antisense strand to SEQ ID NO: 1689993
ucgcacguuugauauaaau

SEQ ID NO: 1689995 - RNA, 19 nt, Artificial Sequence
  Description of Artificial Sequence: Synthetic oligonucleotide
  Sense strand starting at position 1173 of SEQ ID NO: 1561677
uuauaucaaacgugcgaau

SEQ ID NO: 1689996 - RNA, 19 nt, Artificial Sequence
  Description of Artificial Sequence: Synthetic oligonucleotide
  Antisense strand to SEQ ID NO: 1689995
auucgcacguuugauauaa

SEQ ID NO: 1689997 - RNA, 19 nt, Artificial Sequence
  Description of Artificial Sequence: Synthetic oligonucleotide
  Sense strand starting at position 1186 of SEQ ID NO: 1561677
gcgaauuggcaaggcuaua

SEQ ID NO: 1689998 - RNA, 19 nt, Artificial Sequence
  Description of Artificial Sequence: Synthetic oligonucleotide
  Antisense strand to SEQ ID NO: 1689997
uauagccuugccaauucgc

SEQ ID NO: 1689999 - RNA, 19 nt, Artificial Sequence
  Description of Artificial Sequence: Synthetic oligonucleotide
  Sense strand starting at position 1223 of SEQ ID NO: 1561677
gcaauugucuaggacuuga

SEQ ID NO: 1690000 - RNA, 19 nt, Artificial Sequence
  Description of Artificial Sequence: Synthetic oligonucleotide
  Antisense strand to SEQ ID NO: 1689999
ucaaguccuagacaauugc

SEQ ID NO: 1690001 - RNA, 19 nt, Artificial Sequence
  Description of Artificial Sequence: Synthetic oligonucleotide
  Sense strand starting at position 1244 of SEQ ID NO: 1561677
cggaguggacguggugaau

SEQ ID NO: 1690002 - RNA, 19 nt, Artificial Sequence
  Description of Artificial Sequence: Synthetic oligonucleotide
  Antisense strand to SEQ ID NO: 1690001
auucaccacguccacuccg

SEQ ID NO: 1690003 - RNA, 19 nt, Artificial Sequence
  Description of Artificial Sequence: Synthetic oligonucleotide
  Sense strand starting at position 1250 of SEQ ID NO: 1561677
ggacguggugaauguagaa

SEQ ID NO: 1690004 - RNA, 19 nt, Artificial Sequence
  Description of Artificial Sequence: Synthetic oligonucleotide
  Antisense strand to SEQ ID NO: 1690003
uucuacauucaccacgucc

SEQ ID NO: 1690005 - RNA, 19 nt, Artificial Sequence
  Description of Artificial Sequence: Synthetic oligonucleotide
  Sense strand starting at position 1253 of SEQ ID NO: 1561677
cguggugaauguagaauga

SEQ ID NO: 1690006 - RNA, 19 nt, Artificial Sequence
  Description of Artificial Sequence: Synthetic oligonucleotide
  Antisense strand to SEQ ID NO: 1690005
ucauucuacauucaccacg

SEQ ID NO: 1690007 - RNA, 19 nt, Artificial Sequence
  Description of Artificial Sequence: Synthetic oligonucleotide
  Sense strand starting at position 1264 of SEQ ID NO: 1561677
uagaaugacugcuacugga

SEQ ID NO: 1690008 - RNA, 19 nt, Artificial Sequence
  Description of Artificial Sequence: Synthetic oligonucleotide
  Antisense strand to SEQ ID NO: 1690007
uccaguagcagucauucua

SEQ ID NO: 1690009 - RNA, 19 nt, Artificial Sequence
  Description of Artificial Sequence: Synthetic oligonucleotide
  Sense strand starting at position 1332 of SEQ ID NO: 1561677
guaauagaugcacaauucu

SEQ ID NO: 1690010 - RNA, 19 nt, Artificial Sequence
  Description of Artificial Sequence: Synthetic oligonucleotide
  Antisense strand to SEQ ID NO: 1690009
agaauugugcaucuauuac

SEQ ID NO: 1690011 - RNA, 19 nt, Artificial Sequence
  Description of Artificial Sequence: Synthetic oligonucleotide
  Sense strand starting at position 1526 of SEQ ID NO: 1561677
ggcgaaugccacuaugcua

SEQ ID NO: 1690012 - RNA, 19 nt, Artificial Sequence
  Description of Artificial Sequence: Synthetic oligonucleotide
  Antisense strand to SEQ ID NO: 1690011
uagcauaguggcauucgcc

SEQ ID NO: 1690013 - RNA, 19 nt, Artificial Sequence
  Description of Artificial Sequence: Synthetic oligonucleotide
  Sense strand starting at position 1534 of SEQ ID NO: 1561677
ccacuaugcuaggcuugau

SEQ ID NO: 1690014 - RNA, 19 nt, Artificial Sequence
  Description of Artificial Sequence: Synthetic oligonucleotide
  Antisense strand to SEQ ID NO: 1690013
aucaagccuagcauagugg

SEQ ID NO: 1690015 - RNA, 19 nt, Artificial Sequence
  Description of Artificial Sequence: Synthetic oligonucleotide
  Sense strand starting at position 1562 of SEQ ID NO: 1561677
cgcuuuaaaugggcaaauu

SEQ ID NO: 1690016 - RNA, 19 nt, Artificial Sequence
  Description of Artificial Sequence: Synthetic oligonucleotide
  Antisense strand to SEQ ID NO: 1690015
aauuugcccauuuaaagcg

SEQ ID NO: 1690017 - RNA, 19 nt, Artificial Sequence
  Description of Artificial Sequence: Synthetic oligonucleotide
  Sense strand starting at position 1580 of SEQ ID NO: 1561677
uuuacuuaguaggugaaua

SEQ ID NO: 1690018 - RNA, 19 nt, Artificial Sequence
  Description of Artificial Sequence: Synthetic oligonucleotide
  Antisense strand to SEQ ID NO: 1690017
uauucaccuacuaaguaaa

SEQ ID NO: 1690019 - RNA, 19 nt, Artificial Sequence
  Description of Artificial Sequence: Synthetic oligonucleotide
  Sense strand starting at position 1581 of SEQ ID NO: 1561677
uuacuuaguaggugaauag

SEQ ID NO: 1690020 - RNA, 19 nt, Artificial Sequence
  Description of Artificial Sequence: Synthetic oligonucleotide
  Antisense strand to SEQ ID NO: 1690019
cuauucaccuacuaaguaa

SEQ ID NO: 1690021 - RNA, 19 nt, Artificial Sequence
  Description of Artificial Sequence: Synthetic oligonucleotide
  Sense strand starting at position 1796 of SEQ ID NO: 1561677
aggaaauccugacaugccu

SEQ ID NO: 1690022 - RNA, 19 nt, Artificial Sequence
  Description of Artificial Sequence: Synthetic oligonucleotide
  Antisense strand to SEQ ID NO: 1690021
aggcaugucaggauuuccu

SEQ ID NO: 1690023 - RNA, 19 nt, Artificial Sequence
  Description of Artificial Sequence: Synthetic oligonucleotide
  Sense strand starting at position 1844 of SEQ ID NO: 1561677
agagaacgaucagaugcau

SEQ ID NO: 1690024 - RNA, 19 nt, Artificial Sequence
  Description of Artificial Sequence: Synthetic oligonucleotide
  Antisense strand to SEQ ID NO: 1690023
augcaucugaucguucucu

SEQ ID NO: 1690025 - RNA, 19 nt, Artificial Sequence
  Description of Artificial Sequence: Synthetic oligonucleotide
  Sense strand starting at position 1911 of SEQ ID NO: 1561677
gcgcuuaccucuccuccaa

SEQ ID NO: 1690026 - RNA, 19 nt, Artificial Sequence
  Description of Artificial Sequence: Synthetic oligonucleotide
  Antisense strand to SEQ ID NO: 1690025
uuggaggagagguaagcgc

SEQ ID NO: 1690027 - RNA, 19 nt, Artificial Sequence
  Description of Artificial Sequence: Synthetic oligonucleotide
  Sense strand starting at position 2029 of SEQ ID NO: 1561677
aaaugugagguucgaagga

SEQ ID NO: 1690028 - RNA, 19 nt, Artificial Sequence
  Description of Artificial Sequence: Synthetic oligonucleotide
  Antisense strand to SEQ ID NO: 1690027
uccuucgaaccucacauuu

SEQ ID NO: 1690029 - RNA, 19 nt, Artificial Sequence
  Description of Artificial Sequence: Synthetic oligonucleotide
  Sense strand starting at position 2031 of SEQ ID NO: 1561677
augugagguucgaaggaag

SEQ ID NO: 1690030 - RNA, 19 nt, Artificial Sequence
  Description of Artificial Sequence: Synthetic oligonucleotide
  Antisense strand to SEQ ID NO: 1690029
cuuccuucgaaccucacau

SEQ ID NO: 1690031 - RNA, 19 nt, Artificial Sequence
  Description of Artificial Sequence: Synthetic oligonucleotide
  Sense strand starting at position 2129 of SEQ ID NO: 1561677
gucaaugaggcuugccaca

SEQ ID NO: 1690032 - RNA, 19 nt, Artificial Sequence
  Description of Artificial Sequence: Synthetic oligonucleotide
  Antisense strand to SEQ ID NO: 1690031
uguggcaagccucauugac

SEQ ID NO: 1690033 - RNA, 19 nt, Artificial Sequence
  Description of Artificial Sequence: Synthetic oligonucleotide
  Sense strand starting at position 2159 of SEQ ID NO: 1561677
ugggcaauuuccugaggag

SEQ ID NO: 1690034 - RNA, 19 nt, Artificial Sequence
  Description of Artificial Sequence: Synthetic oligonucleotide
  Antisense strand to SEQ ID NO: 1690033
cuccucaggaaauugccca

SEQ ID NO: 1690035 - RNA, 19 nt, Artificial Sequence
  Description of Artificial Sequence: Synthetic oligonucleotide
  Sense strand starting at position 2162 of SEQ ID NO: 1561677
gcaauuuccugaggaggcu

SEQ ID NO: 1690036 - RNA, 19 nt, Artificial Sequence
  Description of Artificial Sequence: Synthetic oligonucleotide
  Antisense strand to SEQ ID NO: 1690035
agccuccucaggaaauugc

SEQ ID NO: 1690037 - RNA, 19 nt, Artificial Sequence
  Description of Artificial Sequence: Synthetic oligonucleotide
  Sense strand starting at position 2171 of SEQ ID NO: 1561677
ugaggaggcuugucgauaa

SEQ ID NO: 1690038 - RNA, 19 nt, Artificial Sequence
  Description of Artificial Sequence: Synthetic oligonucleotide
  Antisense strand to SEQ ID NO: 1690037
uuaucgacaagccuccuca

SEQ ID NO: 1690039 - RNA, 19 nt, Artificial Sequence
  Description of Artificial Sequence: Synthetic oligonucleotide
  Sense strand starting at position 2175 of SEQ ID NO: 1561677
gaggcuugucgauaaaugu

SEQ ID NO: 1690040 - RNA, 19 nt, Artificial Sequence
  Description of Artificial Sequence: Synthetic oligonucleotide
  Antisense strand to SEQ ID NO: 1690039
acauuuaucgacaagccuc

SEQ ID NO: 1690041 - RNA, 19 nt, Artificial Sequence
  Description of Artificial Sequence: Synthetic oligonucleotide
  Sense strand starting at position 2184 of SEQ ID NO: 1561677
cgauaaaugugcuugguaa

SEQ ID NO: 1690042 - RNA, 19 nt, Artificial Sequence
  Description of Artificial Sequence: Synthetic oligonucleotide
  Antisense strand to SEQ ID NO: 1690041
uuaccaagcacauuuaucg

SEQ ID NO: 1690043 - RNA, 19 nt, Artificial Sequence
  Description of Artificial Sequence: Synthetic oligonucleotide
  Sense strand starting at position 2185 of SEQ ID NO: 1561677
gauaaaugugcuugguaaa

SEQ ID NO: 1690044 - RNA, 19 nt, Artificial Sequence
  Description of Artificial Sequence: Synthetic oligonucleotide
  Antisense strand to SEQ ID NO: 1690043
uuuaccaagcacauuuauc

SEQ ID NO: 1690045 - RNA, 19 nt, Artificial Sequence
  Description of Artificial Sequence: Synthetic oligonucleotide
  Sense strand starting at position 2186 of SEQ ID NO: 1561677
auaaaugugcuugguaaac

SEQ ID NO: 1690046 - RNA, 19 nt, Artificial Sequence
  Description of Artificial Sequence: Synthetic oligonucleotide
  Antisense strand to SEQ ID NO: 1690045
guuuaccaagcacauuuau

SEQ ID NO: 1690047 - RNA, 19 nt, Artificial Sequence
  Description of Artificial Sequence: Synthetic oligonucleotide
  Sense strand starting at position 3377 of SEQ ID NO: 1561677
uauucugaugcaugcagau

SEQ ID NO: 1690048 - RNA, 19 nt, Artificial Sequence
  Description of Artificial Sequence: Synthetic oligonucleotide
  Antisense strand to SEQ ID NO: 1690047
aucugcaugcaucagaaua

SEQ ID NO: 1690049 - RNA, 19 nt, Artificial Sequence
  Description of Artificial Sequence: Synthetic oligonucleotide
  Sense strand starting at position 3386 of SEQ ID NO: 1561677
gcaugcagauaacuacaua

SEQ ID NO: 1690050 - RNA, 19 nt, Artificial Sequence
  Description of Artificial Sequence: Synthetic oligonucleotide
  Antisense strand to SEQ ID NO: 1690049
uauguaguuaucugcaugc

SEQ ID NO: 1690051 - RNA, 19 nt, Artificial Sequence
  Description of Artificial Sequence: Synthetic oligonucleotide
  Sense strand starting at position 3533 of SEQ ID NO: 1561677
gauugaauguuccaaugag

SEQ ID NO: 1690052 - RNA, 19 nt, Artificial Sequence
  Description of Artificial Sequence: Synthetic oligonucleotide
  Antisense strand to SEQ ID NO: 1690051
cucauuggaacauucaauc

SEQ ID NO: 1690053 - RNA, 19 nt, Artificial Sequence
  Description of Artificial Sequence: Synthetic oligonucleotide
  Sense strand starting at position 3620 of SEQ ID NO: 1561677
aagcaaauugaucguccuu

SEQ ID NO: 1690054 - RNA, 19 nt, Artificial Sequence
  Description of Artificial Sequence: Synthetic oligonucleotide
  Antisense strand to SEQ ID NO: 1690053
aaggacgaucaauuugcuu

SEQ ID NO: 1690055 - RNA, 19 nt, Artificial Sequence
  Description of Artificial Sequence: Synthetic oligonucleotide
  Sense strand starting at position 1 of SEQ ID NO: 1561678
gccuuaugggauuauuauc

SEQ ID NO: 1690056 - RNA, 19 nt, Artificial Sequence
  Description of Artificial Sequence: Synthetic oligonucleotide
  Antisense strand to SEQ ID NO: 1690055
gauaauaaucccauaaggc

SEQ ID NO: 1690057 - RNA, 19 nt, Artificial Sequence
  Description of Artificial Sequence: Synthetic oligonucleotide
  Sense strand starting at position 7 of SEQ ID NO: 1561678
ugggauuauuaucaagaac

SEQ ID NO: 1690058 - RNA, 19 nt, Artificial Sequence
  Description of Artificial Sequence: Synthetic oligonucleotide
  Antisense strand to SEQ ID NO: 1690057
guucuugauaauaauccca

SEQ ID NO: 1690059 - RNA, 19 nt, Artificial Sequence
  Description of Artificial Sequence: Synthetic oligonucleotide
  Sense strand starting at position 223 of SEQ ID NO: 1561678
ucagaauccugcuuagaau

SEQ ID NO: 1690060 - RNA, 19 nt, Artificial Sequence
  Description of Artificial Sequence: Synthetic oligonucleotide
  Antisense strand to SEQ ID NO: 1690059
auucuaagcaggauucuga

SEQ ID NO: 1690061 - RNA, 19 nt, Artificial Sequence
  Description of Artificial Sequence: Synthetic oligonucleotide
  Sense strand starting at position 468 of SEQ ID NO: 1561678
agaccugucccauaaguag

SEQ ID NO: 1690062 - RNA, 19 nt, Artificial Sequence
  Description of Artificial Sequence: Synthetic oligonucleotide
  Antisense strand to SEQ ID NO: 1690061
cuacuuaugggacaggucu

SEQ ID NO: 1690063 - RNA, 19 nt, Artificial Sequence
  Description of Artificial Sequence: Synthetic oligonucleotide
  Sense strand starting at position 496 of SEQ ID NO: 1561678
ggaagauccuaggccucuu

SEQ ID NO: 1690064 - RNA, 19 nt, Artificial Sequence
  Description of Artificial Sequence: Synthetic oligonucleotide
  Antisense strand to SEQ ID NO: 1690063
aagaggccuaggaucuucc

SEQ ID NO: 1690065 - RNA, 19 nt, Artificial Sequence
  Description of Artificial Sequence: Synthetic oligonucleotide
  Sense strand starting at position 588 of SEQ ID NO: 1561678
augugaaaccuaggaguaa

SEQ ID NO: 1690066 - RNA, 19 nt, Artificial Sequence
  Description of Artificial Sequence: Synthetic oligonucleotide
  Antisense strand to SEQ ID NO: 1690065
uuacuccuagguuucacau

SEQ ID NO: 1690067 - RNA, 19 nt, Artificial Sequence
  Description of Artificial Sequence: Synthetic oligonucleotide
  Sense strand starting at position 589 of SEQ ID NO: 1561678
ugugaaaccuaggaguaag

SEQ ID NO: 1690068 - RNA, 19 nt, Artificial Sequence
  Description of Artificial Sequence: Synthetic oligonucleotide
  Antisense strand to SEQ ID NO: 1690067
cuuacuccuagguuucaca

SEQ ID NO: 1690069 - RNA, 19 nt, Artificial Sequence
  Description of Artificial Sequence: Synthetic oligonucleotide
  Sense strand starting at position 650 of SEQ ID NO: 1561678
cagagaggcucaguacauu

SEQ ID NO: 1690070 - RNA, 19 nt, Artificial Sequence
  Description of Artificial Sequence: Synthetic oligonucleotide
  Antisense strand to SEQ ID NO: 1690069
aauguacugagccucucug

SEQ ID NO: 1690071 - RNA, 19 nt, Artificial Sequence
  Description of Artificial Sequence: Synthetic oligonucleotide
  Sense strand starting at position 656 of SEQ ID NO: 1561678
ggcucaguacauugugcaa

SEQ ID NO: 1690072 - RNA, 19 nt, Artificial Sequence
  Description of Artificial Sequence: Synthetic oligonucleotide
  Antisense strand to SEQ ID NO: 1690071
uugcacaauguacugagcc

SEQ ID NO: 1690073 - RNA, 19 nt, Artificial Sequence
  Description of Artificial Sequence: Synthetic oligonucleotide
  Sense strand starting at position 682 of SEQ ID NO: 1561678
cagcuacagaguugugaag

SEQ ID NO: 1690074 - RNA, 19 nt, Artificial Sequence
  Description of Artificial Sequence: Synthetic oligonucleotide
  Antisense strand to SEQ ID NO: 1690073
cuucacaacucuguagcug

SEQ ID NO: 1690075 - RNA, 19 nt, Artificial Sequence
  Description of Artificial Sequence: Synthetic oligonucleotide
  Sense strand starting at position 693 of SEQ ID NO: 1561678
uugugaagccgagauugga

SEQ ID NO: 1690076 - RNA, 19 nt, Artificial Sequence
  Description of Artificial Sequence: Synthetic oligonucleotide
  Antisense strand to SEQ ID NO: 1690075
uccaaucucggcuucacaa

SEQ ID NO: 1690077 - RNA, 19 nt, Artificial Sequence
  Description of Artificial Sequence: Synthetic oligonucleotide
  Sense strand starting at position 876 of SEQ ID NO: 1561678
agaggacacgugcaucuaa

SEQ ID NO: 1690078 - RNA, 19 nt, Artificial Sequence
  Description of Artificial Sequence: Synthetic oligonucleotide
  Antisense strand to SEQ ID NO: 1690077
uuagaugcacguguccucu

SEQ ID NO: 1690079 - RNA, 19 nt, Artificial Sequence
  Description of Artificial Sequence: Synthetic oligonucleotide
  Sense strand starting at position 1054 of SEQ ID NO: 1561678
gucagacagaacuggguua

SEQ ID NO: 1690080 - RNA, 19 nt, Artificial Sequence
  Description of Artificial Sequence: Synthetic oligonucleotide
  Antisense strand to SEQ ID NO: 1690079
uaacccaguucugucugac

SEQ ID NO: 1690081 - RNA, 19 nt, Artificial Sequence
  Description of Artificial Sequence: Synthetic oligonucleotide
  Sense strand starting at position 1068 of SEQ ID NO: 1561678
gguuaaagaucagacacgu

SEQ ID NO: 1690082 - RNA, 19 nt, Artificial Sequence
  Description of Artificial Sequence: Synthetic oligonucleotide
  Antisense strand to SEQ ID NO: 1690081
acgugucugaucuuuaacc

SEQ ID NO: 1690083 - RNA, 19 nt, Artificial Sequence
  Description of Artificial Sequence: Synthetic oligonucleotide
  Sense strand starting at position 1103 of SEQ ID NO: 1561678
aguccauaucuguaagccu

SEQ ID NO: 1690084 - RNA, 19 nt, Artificial Sequence
  Description of Artificial Sequence: Synthetic oligonucleotide
  Antisense strand to SEQ ID NO: 1690083
aggcuuacagauauggacu

SEQ ID NO: 1690085 - RNA, 19 nt, Artificial Sequence
  Description of Artificial Sequence: Synthetic oligonucleotide
  Sense strand starting at position 1575 of SEQ ID NO: 1561678
uggcuucuacagugcuuau

SEQ ID NO: 1690086 - RNA, 19 nt, Artificial Sequence
  Description of Artificial Sequence: Synthetic oligonucleotide
  Antisense strand to SEQ ID NO: 1690085
auaagcacuguagaagcca

SEQ ID NO: 1690087 - RNA, 19 nt, Artificial Sequence
  Description of Artificial Sequence: Synthetic oligonucleotide
  Sense strand starting at position 1585 of SEQ ID NO: 1561678
agugcuuauuugucaguuu

SEQ ID NO: 1690088 - RNA, 19 nt, Artificial Sequence
  Description of Artificial Sequence: Synthetic oligonucleotide
  Antisense strand to SEQ ID NO: 1690087
aaacugacaaauaagcacu

SEQ ID NO: 1690089 - RNA, 19 nt, Artificial Sequence
  Description of Artificial Sequence: Synthetic oligonucleotide
  Sense strand starting at position 1752 of SEQ ID NO: 1561678
aaguuugccguccgccaaa

SEQ ID NO: 1690090 - RNA, 19 nt, Artificial Sequence
  Description of Artificial Sequence: Synthetic oligonucleotide
  Antisense strand to SEQ ID NO: 1690089
uuuggcggacggcaaacuu

SEQ ID NO: 1690091 - RNA, 19 nt, Artificial Sequence
  Description of Artificial Sequence: Synthetic oligonucleotide
  Sense strand starting at position 2212 of SEQ ID NO: 1561678
cauugaaaguccuugaaag

SEQ ID NO: 1690092 - RNA, 19 nt, Artificial Sequence
  Description of Artificial Sequence: Synthetic oligonucleotide
  Antisense strand to SEQ ID NO: 1690091
cuuucaaggacuuucaaug

SEQ ID NO: 1690093 - RNA, 19 nt, Artificial Sequence
  Description of Artificial Sequence: Synthetic oligonucleotide
  Sense strand starting at position 2288 of SEQ ID NO: 1561678
cuugauaaccgucauaguu

SEQ ID NO: 1690094 - RNA, 19 nt, Artificial Sequence
  Description of Artificial Sequence: Synthetic oligonucleotide
  Antisense strand to SEQ ID NO: 1690093
aacuaugacgguuaucaag

SEQ ID NO: 1690095 - RNA, 19 nt, Artificial Sequence
  Description of Artificial Sequence: Synthetic oligonucleotide
  Sense strand starting at position 2290 of SEQ ID NO: 1561678
ugauaaccgucauaguuac

SEQ ID NO: 1690096 - RNA, 19 nt, Artificial Sequence
  Description of Artificial Sequence: Synthetic oligonucleotide
  Antisense strand to SEQ ID NO: 1690095
guaacuaugacgguuauca

SEQ ID NO: 1690097 - RNA, 19 nt, Artificial Sequence
  Description of Artificial Sequence: Synthetic oligonucleotide
  Sense strand starting at position 2296 of SEQ ID NO: 1561678
ccgucauaguuaccaauga

SEQ ID NO: 1690098 - RNA, 19 nt, Artificial Sequence
  Description of Artificial Sequence: Synthetic oligonucleotide
  Antisense strand to SEQ ID NO: 1690097
ucauugguaacuaugacgg

SEQ ID NO: 1690099 - RNA, 19 nt, Artificial Sequence
  Description of Artificial Sequence: Synthetic oligonucleotide
  Sense strand starting at position 2415 of SEQ ID NO: 1561678
ggacaucccuauuacuaug

SEQ ID NO: 1690100 - RNA, 19 nt, Artificial Sequence
  Description of Artificial Sequence: Synthetic oligonucleotide
  Antisense strand to SEQ ID NO: 1690099
cauaguaauagggaugucc

SEQ ID NO: 1690101 - RNA, 19 nt, Artificial Sequence
  Description of Artificial Sequence: Synthetic oligonucleotide
  Sense strand starting at position 2484 of SEQ ID NO: 1561678
cgcugaggaacuugucuga

SEQ ID NO: 1690102 - RNA, 19 nt, Artificial Sequence
  Description of Artificial Sequence: Synthetic oligonucleotide
  Antisense strand to SEQ ID NO: 1690101
ucagacaaguuccucagcg

SEQ ID NO: 1690103 - RNA, 19 nt, Artificial Sequence
  Description of Artificial Sequence: Synthetic oligonucleotide
  Sense strand starting at position 2487 of SEQ ID NO: 1561678
ugaggaacuugucugaagu

SEQ ID NO: 1690104 - RNA, 19 nt, Artificial Sequence
  Description of Artificial Sequence: Synthetic oligonucleotide
  Antisense strand to SEQ ID NO: 1690103
acuucagacaaguuccuca

SEQ ID NO: 1690105 - RNA, 19 nt, Artificial Sequence
  Description of Artificial Sequence: Synthetic oligonucleotide
  Sense strand starting at position 2488 of SEQ ID NO: 1561678
gaggaacuugucugaaguu

SEQ ID NO: 1690106 - RNA, 19 nt, Artificial Sequence
  Description of Artificial Sequence: Synthetic oligonucleotide
  Antisense strand to SEQ ID NO: 1690105
aacuucagacaaguuccuc

SEQ ID NO: 1690107 - RNA, 19 nt, Artificial Sequence
  Description of Artificial Sequence: Synthetic oligonucleotide
  Sense strand starting at position 2489 of SEQ ID NO: 1561678
aggaacuugucugaaguua

SEQ ID NO: 1690108 - RNA, 19 nt, Artificial Sequence
  Description of Artificial Sequence: Synthetic oligonucleotide
  Antisense strand to SEQ ID NO: 1690107
uaacuucagacaaguuccu

SEQ ID NO: 1690109 - RNA, 19 nt, Artificial Sequence
  Description of Artificial Sequence: Synthetic oligonucleotide
  Sense strand starting at position 2766 of SEQ ID NO: 1561678
gcugcaagccuuuguguuu

SEQ ID NO: 1690110 - RNA, 19 nt, Artificial Sequence
  Description of Artificial Sequence: Synthetic oligonucleotide
  Antisense strand to SEQ ID NO: 1690109
aaacacaaaggcuugcagc

SEQ ID NO: 1690111 - RNA, 19 nt, Artificial Sequence
  Description of Artificial Sequence: Synthetic oligonucleotide
  Sense strand starting at position 2959 of SEQ ID NO: 1561678
gugucuuaugccuaauggu

SEQ ID NO: 1690112 - RNA, 19 nt, Artificial Sequence
  Description of Artificial Sequence: Synthetic oligonucleotide
  Antisense strand to SEQ ID NO: 1690111
accauuaggcauaagacac

SEQ ID NO: 1690113 - RNA, 19 nt, Artificial Sequence
  Description of Artificial Sequence: Synthetic oligonucleotide
  Sense strand starting at position 3190 of SEQ ID NO: 1561678
gggcauuaguaugaaacga

SEQ ID NO: 1690114 - RNA, 19 nt, Artificial Sequence
  Description of Artificial Sequence: Synthetic oligonucleotide
  Antisense strand to SEQ ID NO: 1690113
ucguuucauacuaaugccc

SEQ ID NO: 1690115 - RNA, 19 nt, Artificial Sequence
  Description of Artificial Sequence: Synthetic oligonucleotide
  Sense strand starting at position 3354 of SEQ ID NO: 1561678
ucugacuauggagguaaua

SEQ ID NO: 1690116 - RNA, 19 nt, Artificial Sequence
  Description of Artificial Sequence: Synthetic oligonucleotide
  Antisense strand to SEQ ID NO: 1690115
uauuaccuccauagucaga

SEQ ID NO: 1690117 - RNA, 19 nt, Artificial Sequence
  Description of Artificial Sequence: Synthetic oligonucleotide
  Sense strand starting at position 3367 of SEQ ID NO: 1561678
guaauacauccucagggca

SEQ ID NO: 1690118 - RNA, 19 nt, Artificial Sequence
  Description of Artificial Sequence: Synthetic oligonucleotide
  Antisense strand to SEQ ID NO: 1690117
ugcccugaggauguauuac

SEQ ID NO: 1690119 - RNA, 19 nt, Artificial Sequence
  Description of Artificial Sequence: Synthetic oligonucleotide
  Sense strand starting at position 3473 of SEQ ID NO: 1561678
gucauuuaucuaggcucau

SEQ ID NO: 1690120 - RNA, 19 nt, Artificial Sequence
  Description of Artificial Sequence: Synthetic oligonucleotide
  Antisense strand to SEQ ID NO: 1690119
augagccuagauaaaugac

SEQ ID NO: 1690121 - RNA, 19 nt, Artificial Sequence
  Description of Artificial Sequence: Synthetic oligonucleotide
  Sense strand starting at position 3542 of SEQ ID NO: 1561678
auucuaauauugucucgau

SEQ ID NO: 1690122 - RNA, 19 nt, Artificial Sequence
  Description of Artificial Sequence: Synthetic oligonucleotide
  Antisense strand to SEQ ID NO: 1690121
aucgagacaauauuagaau

SEQ ID NO: 1690123 - RNA, 19 nt, Artificial Sequence
  Description of Artificial Sequence: Synthetic oligonucleotide
  Sense strand starting at position 3543 of SEQ ID NO: 1561678
uucuaauauugucucgauu

SEQ ID NO: 1690124 - RNA, 19 nt, Artificial Sequence
  Description of Artificial Sequence: Synthetic oligonucleotide
  Antisense strand to SEQ ID NO: 1690123
aaucgagacaauauuagaa

SEQ ID NO: 1690125 - RNA, 19 nt, Artificial Sequence
  Description of Artificial Sequence: Synthetic oligonucleotide
  Sense strand starting at position 3609 of SEQ ID NO: 1561678
gacagcguauuauuccauu

SEQ ID NO: 1690126 - RNA, 19 nt, Artificial Sequence
  Description of Artificial Sequence: Synthetic oligonucleotide
  Antisense strand to SEQ ID NO: 1690125
aauggaauaauacgcuguc

SEQ ID NO: 1690127 - RNA, 19 nt, Artificial Sequence
  Description of Artificial Sequence: Synthetic oligonucleotide
  Sense strand starting at position 3722 of SEQ ID NO: 1561678
auggcagacuagguugaau

SEQ ID NO: 1690128 - RNA, 19 nt, Artificial Sequence
  Description of Artificial Sequence: Synthetic oligonucleotide
  Antisense strand to SEQ ID NO: 1690127
auucaaccuagucugccau

SEQ ID NO: 1690129 - RNA, 19 nt, Artificial Sequence
  Description of Artificial Sequence: Synthetic oligonucleotide
  Sense strand starting at position 3734 of SEQ ID NO: 1561678
guugaauacagccgagguu

SEQ ID NO: 1690130 - RNA, 19 nt, Artificial Sequence
  Description of Artificial Sequence: Synthetic oligonucleotide
  Antisense strand to SEQ ID NO: 1690129
aaccucggcuguauucaac

SEQ ID NO: 1690131 - RNA, 19 nt, Artificial Sequence
  Description of Artificial Sequence: Synthetic oligonucleotide
  Sense strand starting at position 3793 of SEQ ID NO: 1561678
ggauguuggccauggagag

SEQ ID NO: 1690132 - RNA, 19 nt, Artificial Sequence
  Description of Artificial Sequence: Synthetic oligonucleotide
  Antisense strand to SEQ ID NO: 1690131
cucuccauggccaacaucc

SEQ ID NO: 1690133 - RNA, 19 nt, Artificial Sequence
  Description of Artificial Sequence: Synthetic oligonucleotide
  Sense strand starting at position 3794 of SEQ ID NO: 1561678
gauguuggccauggagaga

SEQ ID NO: 1690134 - RNA, 19 nt, Artificial Sequence
  Description of Artificial Sequence: Synthetic oligonucleotide
  Antisense strand to SEQ ID NO: 1690133
ucucuccauggccaacauc

SEQ ID NO: 1690135 - RNA, 19 nt, Artificial Sequence
  Description of Artificial Sequence: Synthetic oligonucleotide
  Sense strand starting at position 18 of SEQ ID NO: 1561679
gagaauauguagcuagaaa

SEQ ID NO: 1690136 - RNA, 19 nt, Artificial Sequence
  Description of Artificial Sequence: Synthetic oligonucleotide
  Antisense strand to SEQ ID NO: 1690135
uuucuagcuacauauucuc

SEQ ID NO: 1690137 - RNA, 19 nt, Artificial Sequence
  Description of Artificial Sequence: Synthetic oligonucleotide
  Sense strand starting at position 507 of SEQ ID NO: 1561679
uggguaugcgccuacaaga

SEQ ID NO: 1690138 - RNA, 19 nt, Artificial Sequence
  Description of Artificial Sequence: Synthetic oligonucleotide
  Antisense strand to SEQ ID NO: 1690137
ucuuguaggcgcauaccca

SEQ ID NO: 1690139 - RNA, 19 nt, Artificial Sequence
  Description of Artificial Sequence: Synthetic oligonucleotide
  Sense strand starting at position 790 of SEQ ID NO: 1561679
caggaugagagguguguau

SEQ ID NO: 1690140 - RNA, 19 nt, Artificial Sequence
  Description of Artificial Sequence: Synthetic oligonucleotide
  Antisense strand to SEQ ID NO: 1690139
auacacaccucucauccug

SEQ ID NO: 1690141 - RNA, 19 nt, Artificial Sequence
  Description of Artificial Sequence: Synthetic oligonucleotide
  Sense strand starting at position 792 of SEQ ID NO: 1561679
ggaugagagguguguauau

SEQ ID NO: 1690142 - RNA, 19 nt, Artificial Sequence
  Description of Artificial Sequence: Synthetic oligonucleotide
  Antisense strand to SEQ ID NO: 1690141
auauacacaccucucaucc

SEQ ID NO: 1690143 - RNA, 19 nt, Artificial Sequence
  Description of Artificial Sequence: Synthetic oligonucleotide
  Sense strand starting at position 794 of SEQ ID NO: 1561679
augagagguguguauauug

SEQ ID NO: 1690144 - RNA, 19 nt, Artificial Sequence
  Description of Artificial Sequence: Synthetic oligonucleotide
  Antisense strand to SEQ ID NO: 1690143
caauauacacaccucucau

SEQ ID NO: 1690145 - RNA, 19 nt, Artificial Sequence
  Description of Artificial Sequence: Synthetic oligonucleotide
  Sense strand starting at position 1010 of SEQ ID NO: 1561679
ggcccuugccaaugggaaa

SEQ ID NO: 1690146 - RNA, 19 nt, Artificial Sequence
  Description of Artificial Sequence: Synthetic oligonucleotide
  Antisense strand to SEQ ID NO: 1690145
uuucccauuggcaagggcc

SEQ ID NO: 1690147 - RNA, 19 nt, Artificial Sequence
  Description of Artificial Sequence: Synthetic oligonucleotide
  Sense strand starting at position 1041 of SEQ ID NO: 1561679
acgagcugggcagaugaau

SEQ ID NO: 1690148 - RNA, 19 nt, Artificial Sequence
  Description of Artificial Sequence: Synthetic oligonucleotide
  Antisense strand to SEQ ID NO: 1690147
auucaucugcccagcucgu

SEQ ID NO: 1690149 - RNA, 19 nt, Artificial Sequence
  Description of Artificial Sequence: Synthetic oligonucleotide
  Sense strand starting at position 1258 of SEQ ID NO: 1561679
cuuggcuuguacuuccaaa

SEQ ID NO: 1690150 - RNA, 19 nt, Artificial Sequence
  Description of Artificial Sequence: Synthetic oligonucleotide
  Antisense strand to SEQ ID NO: 1690149
uuuggaaguacaagccaag

SEQ ID NO: 1690151 - RNA, 19 nt, Artificial Sequence
  Description of Artificial Sequence: Synthetic oligonucleotide
  Sense strand starting at position 1330 of SEQ ID NO: 1561679
ggcuaagacauugggugua

SEQ ID NO: 1690152 - RNA, 19 nt, Artificial Sequence
  Description of Artificial Sequence: Synthetic oligonucleotide
  Antisense strand to SEQ ID NO: 1690151
uacacccaaugucuuagcc

SEQ ID NO: 1690153 - RNA, 19 nt, Artificial Sequence
  Description of Artificial Sequence: Synthetic oligonucleotide
  Sense strand starting at position 1360 of SEQ ID NO: 1561679
cugggucaggguuauaaua

SEQ ID NO: 1690154 - RNA, 19 nt, Artificial Sequence
  Description of Artificial Sequence: Synthetic oligonucleotide
  Antisense strand to SEQ ID NO: 1690153
uauuauaacccugacccag

SEQ ID NO: 1690155 - RNA, 19 nt, Artificial Sequence
  Description of Artificial Sequence: Synthetic oligonucleotide
  Sense strand starting at position 1620 of SEQ ID NO: 1561679
cgaccuacuuaucccugaa

SEQ ID NO: 1690156 - RNA, 19 nt, Artificial Sequence
  Description of Artificial Sequence: Synthetic oligonucleotide
  Antisense strand to SEQ ID NO: 1690155
uucagggauaaguaggucg

SEQ ID NO: 1690157 - RNA, 19 nt, Artificial Sequence
  Description of Artificial Sequence: Synthetic oligonucleotide
  Sense strand starting at position 2063 of SEQ ID NO: 1561679
uagugcucugaacagaaca

SEQ ID NO: 1690158 - RNA, 19 nt, Artificial Sequence
  Description of Artificial Sequence: Synthetic oligonucleotide
  Antisense strand to SEQ ID NO: 1690157
uguucuguucagagcacua

SEQ ID NO: 1690159 - RNA, 19 nt, Artificial Sequence
  Description of Artificial Sequence: Synthetic oligonucleotide
  Sense strand starting at position 2100 of SEQ ID NO: 1561679
ccauuauggguccgaguac

SEQ ID NO: 1690160 - RNA, 19 nt, Artificial Sequence
  Description of Artificial Sequence: Synthetic oligonucleotide
  Antisense strand to SEQ ID NO: 1690159
guacucggacccauaaugg

SEQ ID NO: 1690161 - RNA, 19 nt, Artificial Sequence
  Description of Artificial Sequence: Synthetic oligonucleotide
  Sense strand starting at position 2122 of SEQ ID NO: 1561679
ggagccugcuguuccagaa

SEQ ID NO: 1690162 - RNA, 19 nt, Artificial Sequence
  Description of Artificial Sequence: Synthetic oligonucleotide
  Antisense strand to SEQ ID NO: 1690161
uucuggaacagcaggcucc

SEQ ID NO: 1690163 - RNA, 19 nt, Artificial Sequence
  Description of Artificial Sequence: Synthetic oligonucleotide
  Sense strand starting at position 2193 of SEQ ID NO: 1561679
gcaacaauaugguuauuau

SEQ ID NO: 1690164 - RNA, 19 nt, Artificial Sequence
  Description of Artificial Sequence: Synthetic oligonucleotide
  Antisense strand to SEQ ID NO: 1690163
auaauaaccauauuguugc

SEQ ID NO: 1690165 - RNA, 19 nt, Artificial Sequence
  Description of Artificial Sequence: Synthetic oligonucleotide
  Sense strand starting at position 2236 of SEQ ID NO: 1561679
guuugcuuugugcuuuaca

SEQ ID NO: 1690166 - RNA, 19 nt, Artificial Sequence
  Description of Artificial Sequence: Synthetic oligonucleotide
  Antisense strand to SEQ ID NO: 1690165
uguaaagcacaaagcaaac

SEQ ID NO: 1690167 - RNA, 19 nt, Artificial Sequence
  Description of Artificial Sequence: Synthetic oligonucleotide
  Sense strand starting at position 2239 of SEQ ID NO: 1561679
ugcuuugugcuuuacauau

SEQ ID NO: 1690168 - RNA, 19 nt, Artificial Sequence
  Description of Artificial Sequence: Synthetic oligonucleotide
  Antisense strand to SEQ ID NO: 1690167
auauguaaagcacaaagca

SEQ ID NO: 1690169 - RNA, 19 nt, Artificial Sequence
  Description of Artificial Sequence: Synthetic oligonucleotide
  Sense strand starting at position 2265 of SEQ ID NO: 1561679
guauaugucucauuuggca

SEQ ID NO: 1690170 - RNA, 19 nt, Artificial Sequence
  Description of Artificial Sequence: Synthetic oligonucleotide
  Antisense strand to SEQ ID NO: 1690169
ugccaaaugagacauauac

SEQ ID NO: 1690171 - RNA, 19 nt, Artificial Sequence
  Description of Artificial Sequence: Synthetic oligonucleotide
  Sense strand starting at position 2319 of SEQ ID NO: 1561679
uuuacuuaucuauagaguc

SEQ ID NO: 1690172 - RNA, 19 nt, Artificial Sequence
  Description of Artificial Sequence: Synthetic oligonucleotide
  Antisense strand to SEQ ID NO: 1690171
gacucuauagauaaguaaa

SEQ ID NO: 1690173 - RNA, 19 nt, Artificial Sequence
  Description of Artificial Sequence: Synthetic oligonucleotide
  Sense strand starting at position 2365 of SEQ ID NO: 1561679
guuuccuuguuucuggaau

SEQ ID NO: 1690174 - RNA, 19 nt, Artificial Sequence
  Description of Artificial Sequence: Synthetic oligonucleotide
  Antisense strand to SEQ ID NO: 1690173
auuccagaaacaaggaaac

SEQ ID NO: 1690175 - RNA, 19 nt, Artificial Sequence
  Description of Artificial Sequence: Synthetic oligonucleotide
  Sense strand starting at position 2526 of SEQ ID NO: 1561679
cuugaauguggauguaaug

SEQ ID NO: 1690176 - RNA, 19 nt, Artificial Sequence
  Description of Artificial Sequence: Synthetic oligonucleotide
  Antisense strand to SEQ ID NO: 1690175
cauuacauccacauucaag

SEQ ID NO: 1690177 - RNA, 19 nt, Artificial Sequence
  Description of Artificial Sequence: Synthetic oligonucleotide
  Sense strand starting at position 2535 of SEQ ID NO: 1561679
ggauguaaugucuggagcu

SEQ ID NO: 1690178 - RNA, 19 nt, Artificial Sequence
  Description of Artificial Sequence: Synthetic oligonucleotide
  Antisense strand to SEQ ID NO: 1690177
agcuccagacauuacaucc

SEQ ID NO: 1690179 - RNA, 19 nt, Artificial Sequence
  Description of Artificial Sequence: Synthetic oligonucleotide
  Sense strand starting at position 2537 of SEQ ID NO: 1561679
auguaaugucuggagcuau

SEQ ID NO: 1690180 - RNA, 19 nt, Artificial Sequence
  Description of Artificial Sequence: Synthetic oligonucleotide
  Antisense strand to SEQ ID NO: 1690179
auagcuccagacauuacau

SEQ ID NO: 1690181 - RNA, 19 nt, Artificial Sequence
  Description of Artificial Sequence: Synthetic oligonucleotide
  Sense strand starting at position 2541 of SEQ ID NO: 1561679
aaugucuggagcuauggua

SEQ ID NO: 1690182 - RNA, 19 nt, Artificial Sequence
  Description of Artificial Sequence: Synthetic oligonucleotide
  Antisense strand to SEQ ID NO: 1690181
uaccauagcuccagacauu

SEQ ID NO: 1690183 - RNA, 19 nt, Artificial Sequence
  Description of Artificial Sequence: Synthetic oligonucleotide
  Sense strand starting at position 2549 of SEQ ID NO: 1561679
gagcuaugguaacugucuu

SEQ ID NO: 1690184 - RNA, 19 nt, Artificial Sequence
  Description of Artificial Sequence: Synthetic oligonucleotide
  Antisense strand to SEQ ID NO: 1690183
aagacaguuaccauagcuc

SEQ ID NO: 1690185 - RNA, 19 nt, Artificial Sequence
  Description of Artificial Sequence: Synthetic oligonucleotide
  Sense strand starting at position 2561 of SEQ ID NO: 1561679
cugucuugcgaccauaaga

SEQ ID NO: 1690186 - RNA, 19 nt, Artificial Sequence
  Description of Artificial Sequence: Synthetic oligonucleotide
  Antisense strand to SEQ ID NO: 1690185
ucuuauggucgcaagacag

SEQ ID NO: 1690187 - RNA, 19 nt, Artificial Sequence
  Description of Artificial Sequence: Synthetic oligonucleotide
  Sense strand starting at position 2661 of SEQ ID NO: 1561679
cgaugucuaauggaacacu

SEQ ID NO: 1690188 - RNA, 19 nt, Artificial Sequence
  Description of Artificial Sequence: Synthetic oligonucleotide
  Antisense strand to SEQ ID NO: 1690187
aguguuccauuagacaucg

SEQ ID NO: 1690189 - RNA, 19 nt, Artificial Sequence
  Description of Artificial Sequence: Synthetic oligonucleotide
  Sense strand starting at position 2995 of SEQ ID NO: 1561679
guugucaucgcaucuguaa

SEQ ID NO: 1690190 - RNA, 19 nt, Artificial Sequence
  Description of Artificial Sequence: Synthetic oligonucleotide
  Antisense strand to SEQ ID NO: 1690189
uuacagaugcgaugacaac

SEQ ID NO: 1690191 - RNA, 19 nt, Artificial Sequence
  Description of Artificial Sequence: Synthetic oligonucleotide
  Sense strand starting at position 3144 of SEQ ID NO: 1561679
guaucuuguguugaucuca

SEQ ID NO: 1690192 - RNA, 19 nt, Artificial Sequence
  Description of Artificial Sequence: Synthetic oligonucleotide
  Antisense strand to SEQ ID NO: 1690191
ugagaucaacacaagauac

SEQ ID NO: 1690193 - RNA, 19 nt, Artificial Sequence
  Description of Artificial Sequence: Synthetic oligonucleotide
  Sense strand starting at position 3314 of SEQ ID NO: 1561679
gcuaaacacuuauugaaug

SEQ ID NO: 1690194 - RNA, 19 nt, Artificial Sequence
  Description of Artificial Sequence: Synthetic oligonucleotide
  Antisense strand to SEQ ID NO: 1690193
cauucaauaaguguuuagc

SEQ ID NO: 1690195 - RNA, 19 nt, Artificial Sequence
  Description of Artificial Sequence: Synthetic oligonucleotide
  Sense strand starting at position 3345 of SEQ ID NO: 1561679
cgaguucugcucuagacac

SEQ ID NO: 1690196 - RNA, 19 nt, Artificial Sequence
  Description of Artificial Sequence: Synthetic oligonucleotide
  Antisense strand to SEQ ID NO: 1690195
gugucuagagcagaacucg

SEQ ID NO: 1690197 - RNA, 19 nt, Artificial Sequence
  Description of Artificial Sequence: Synthetic oligonucleotide
  Sense strand starting at position 3398 of SEQ ID NO: 1561679
ccugcuuuccuggagcuga

SEQ ID NO: 1690198 - RNA, 19 nt, Artificial Sequence
  Description of Artificial Sequence: Synthetic oligonucleotide
  Antisense strand to SEQ ID NO: 1690197
ucagcuccaggaaagcagg

SEQ ID NO: 1690199 - RNA, 19 nt, Artificial Sequence
  Description of Artificial Sequence: Synthetic oligonucleotide
  Sense strand starting at position 3420 of SEQ ID NO: 1561679
ccuaguagucauuggaaac

SEQ ID NO: 1690200 - RNA, 19 nt, Artificial Sequence
  Description of Artificial Sequence: Synthetic oligonucleotide
  Antisense strand to SEQ ID NO: 1690199
guuuccaaugacuacuagg

SEQ ID NO: 1690201 - RNA, 19 nt, Artificial Sequence
  Description of Artificial Sequence: Synthetic oligonucleotide
  Sense strand starting at position 3470 of SEQ ID NO: 1561679
uguagacucuauucucaca

SEQ ID NO: 1690202 - RNA, 19 nt, Artificial Sequence
  Description of Artificial Sequence: Synthetic oligonucleotide
  Antisense strand to SEQ ID NO: 1690201
ugugagaauagagucuaca

SEQ ID NO: 1690203 - RNA, 19 nt, Artificial Sequence
  Description of Artificial Sequence: Synthetic oligonucleotide
  Sense strand starting at position 3740 of SEQ ID NO: 1561679
gugaacugagacugcaaau

SEQ ID NO: 1690204 - RNA, 19 nt, Artificial Sequence
  Description of Artificial Sequence: Synthetic oligonucleotide
  Antisense strand to SEQ ID NO: 1690203
auuugcagucucaguucac

SEQ ID NO: 1690205 - RNA, 19 nt, Artificial Sequence
  Description of Artificial Sequence: Synthetic oligonucleotide
  Sense strand starting at position 3828 of SEQ ID NO: 1561679
agauaaagaugugaaauga

SEQ ID NO: 1690206 - RNA, 19 nt, Artificial Sequence
  Description of Artificial Sequence: Synthetic oligonucleotide
  Antisense strand to SEQ ID NO: 1690205
ucauuucacaucuuuaucu

SEQ ID NO: 1690207 - RNA, 19 nt, Artificial Sequence
  Description of Artificial Sequence: Synthetic oligonucleotide
  Sense strand starting at position 3836 of SEQ ID NO: 1561679
augugaaaugacuggcaaa

SEQ ID NO: 1690208 - RNA, 19 nt, Artificial Sequence
  Description of Artificial Sequence: Synthetic oligonucleotide
  Antisense strand to SEQ ID NO: 1690207
uuugccagucauuucacau

SEQ ID NO: 1690209 - RNA, 19 nt, Artificial Sequence
  Description of Artificial Sequence: Synthetic oligonucleotide
  Sense strand starting at position 3837 of SEQ ID NO: 1561679
ugugaaaugacuggcaaag

SEQ ID NO: 1690210 - RNA, 19 nt, Artificial Sequence
  Description of Artificial Sequence: Synthetic oligonucleotide
  Antisense strand to SEQ ID NO: 1690209
cuuugccagucauuucaca

SEQ ID NO: 1690211 - RNA, 19 nt, Artificial Sequence
  Description of Artificial Sequence: Synthetic oligonucleotide
  Sense strand starting at position 3855 of SEQ ID NO: 1561679
gcaaacucagccgaguuua

SEQ ID NO: 1690212 - RNA, 19 nt, Artificial Sequence
  Description of Artificial Sequence: Synthetic oligonucleotide
  Antisense strand to SEQ ID NO: 1690211
uaaacucggcugaguuugc

SEQ ID NO: 1690213 - RNA, 19 nt, Artificial Sequence
  Description of Artificial Sequence: Synthetic oligonucleotide
  Sense strand starting at position 3873 of SEQ ID NO: 1561679
agggaaacuugcccucaau

SEQ ID NO: 1690214 - RNA, 19 nt, Artificial Sequence
  Description of Artificial Sequence: Synthetic oligonucleotide
  Antisense strand to SEQ ID NO: 1690213
auugagggcaaguuucccu

SEQ ID NO: 1690215 - RNA, 19 nt, Artificial Sequence
  Description of Artificial Sequence: Synthetic oligonucleotide
  Sense strand starting at position 12 of SEQ ID NO: 1561680
cuuucugggcucuggaaga

SEQ ID NO: 1690216 - RNA, 19 nt, Artificial Sequence
  Description of Artificial Sequence: Synthetic oligonucleotide
  Antisense strand to SEQ ID NO: 1690215
ucuuccagagcccagaaag

SEQ ID NO: 1690217 - RNA, 19 nt, Artificial Sequence
  Description of Artificial Sequence: Synthetic oligonucleotide
  Sense strand starting at position 239 of SEQ ID NO: 1561680
agccucggucccuaaucau

SEQ ID NO: 1690218 - RNA, 19 nt, Artificial Sequence
  Description of Artificial Sequence: Synthetic oligonucleotide
  Antisense strand to SEQ ID NO: 1690217
augauuagggaccgaggcu

SEQ ID NO: 1690219 - RNA, 19 nt, Artificial Sequence
  Description of Artificial Sequence: Synthetic oligonucleotide
  Sense strand starting at position 249 of SEQ ID NO: 1561680
ccuaaucauguuugcugaa

SEQ ID NO: 1690220 - RNA, 19 nt, Artificial Sequence
  Description of Artificial Sequence: Synthetic oligonucleotide
  Antisense strand to SEQ ID NO: 1690219
uucagcaaacaugauuagg

SEQ ID NO: 1690221 - RNA, 19 nt, Artificial Sequence
  Description of Artificial Sequence: Synthetic oligonucleotide
  Sense strand starting at position 250 of SEQ ID NO: 1561680
cuaaucauguuugcugaau

SEQ ID NO: 1690222 - RNA, 19 nt, Artificial Sequence
  Description of Artificial Sequence: Synthetic oligonucleotide
  Antisense strand to SEQ ID NO: 1690221
auucagcaaacaugauuag

SEQ ID NO: 1690223 - RNA, 19 nt, Artificial Sequence
  Description of Artificial Sequence: Synthetic oligonucleotide
  Sense strand starting at position 251 of SEQ ID NO: 1561680
uaaucauguuugcugaaug

SEQ ID NO: 1690224 - RNA, 19 nt, Artificial Sequence
  Description of Artificial Sequence: Synthetic oligonucleotide
  Antisense strand to SEQ ID NO: 1690223
cauucagcaaacaugauua

SEQ ID NO: 1690225 - RNA, 19 nt, Artificial Sequence
  Description of Artificial Sequence: Synthetic oligonucleotide
  Sense strand starting at position 261 of SEQ ID NO: 1561680
ugcugaaugccuugaauac

SEQ ID NO: 1690226 - RNA, 19 nt, Artificial Sequence
  Description of Artificial Sequence: Synthetic oligonucleotide
  Antisense strand to SEQ ID NO: 1690225
guauucaaggcauucagca

SEQ ID NO: 1690227 - RNA, 19 nt, Artificial Sequence
  Description of Artificial Sequence: Synthetic oligonucleotide
  Sense strand starting at position 262 of SEQ ID NO: 1561680
gcugaaugccuugaauaca

SEQ ID NO: 1690228 - RNA, 19 nt, Artificial Sequence
  Description of Artificial Sequence: Synthetic oligonucleotide
  Antisense strand to SEQ ID NO: 1690227
uguauucaaggcauucagc

SEQ ID NO: 1690229 - RNA, 19 nt, Artificial Sequence
  Description of Artificial Sequence: Synthetic oligonucleotide
  Sense strand starting at position 291 of SEQ ID NO: 1561680
cccagaaucuccuugaggu

SEQ ID NO: 1690230 - RNA, 19 nt, Artificial Sequence
  Description of Artificial Sequence: Synthetic oligonucleotide
  Antisense strand to SEQ ID NO: 1690229
accucaaggagauucuggg

SEQ ID NO: 1690231 - RNA, 19 nt, Artificial Sequence
  Description of Artificial Sequence: Synthetic oligonucleotide
  Sense strand starting at position 292 of SEQ ID NO: 1561680
ccagaaucuccuugagguu

SEQ ID NO: 1690232 - RNA, 19 nt, Artificial Sequence
  Description of Artificial Sequence: Synthetic oligonucleotide
  Antisense strand to SEQ ID NO: 1690231
aaccucaaggagauucugg

SEQ ID NO: 1690233 - RNA, 19 nt, Artificial Sequence
  Description of Artificial Sequence: Synthetic oligonucleotide
  Sense strand starting at position 293 of SEQ ID NO: 1561680
cagaaucuccuugagguuu

SEQ ID NO: 1690234 - RNA, 19 nt, Artificial Sequence
  Description of Artificial Sequence: Synthetic oligonucleotide
  Antisense strand to SEQ ID NO: 1690233
aaaccucaaggagauucug

SEQ ID NO: 1690235 - RNA, 19 nt, Artificial Sequence
  Description of Artificial Sequence: Synthetic oligonucleotide
  Sense strand starting at position 443 of SEQ ID NO: 1561680
gggcucggcuaauuaaaca

SEQ ID NO: 1690236 - RNA, 19 nt, Artificial Sequence
  Description of Artificial Sequence: Synthetic oligonucleotide
  Antisense strand to SEQ ID NO: 1690235
uguuuaauuagccgagccc

SEQ ID NO: 1690237 - RNA, 19 nt, Artificial Sequence
  Description of Artificial Sequence: Synthetic oligonucleotide
  Sense strand starting at position 458 of SEQ ID NO: 1561680
aacagcgaccgugaugaau

SEQ ID NO: 1690238 - RNA, 19 nt, Artificial Sequence
  Description of Artificial Sequence: Synthetic oligonucleotide
  Antisense strand to SEQ ID NO: 1690237
auucaucacggucgcuguu

SEQ ID NO: 1690239 - RNA, 19 nt, Artificial Sequence
  Description of Artificial Sequence: Synthetic oligonucleotide
  Sense strand starting at position 466 of SEQ ID NO: 1561680
ccgugaugaauuggagaga

SEQ ID NO: 1690240 - RNA, 19 nt, Artificial Sequence
  Description of Artificial Sequence: Synthetic oligonucleotide
  Antisense strand to SEQ ID NO: 1690239
ucucuccaauucaucacgg

SEQ ID NO: 1690241 - RNA, 19 nt, Artificial Sequence
  Description of Artificial Sequence: Synthetic oligonucleotide
  Sense strand starting at position 537 of SEQ ID NO: 1561680
ggcagaaguccuggaaaca

SEQ ID NO: 1690242 - RNA, 19 nt, Artificial Sequence
  Description of Artificial Sequence: Synthetic oligonucleotide
  Antisense strand to SEQ ID NO: 1690241
uguuuccaggacuucugcc

SEQ ID NO: 1690243 - RNA, 19 nt, Artificial Sequence
  Description of Artificial Sequence: Synthetic oligonucleotide
  Sense strand starting at position 578 of SEQ ID NO: 1561680
gacagagcuuggccaaagu

SEQ ID NO: 1690244 - RNA, 19 nt, Artificial Sequence
  Description of Artificial Sequence: Synthetic oligonucleotide
  Antisense strand to SEQ ID NO: 1690243
acuuuggccaagcucuguc

SEQ ID NO: 1690245 - RNA, 19 nt, Artificial Sequence
  Description of Artificial Sequence: Synthetic oligonucleotide
  Sense strand starting at position 919 of SEQ ID NO: 1561680
ccaagaagaucauagaauc

SEQ ID NO: 1690246 - RNA, 19 nt, Artificial Sequence
  Description of Artificial Sequence: Synthetic oligonucleotide
  Antisense strand to SEQ ID NO: 1690245
gauucuaugaucuucuugg

SEQ ID NO: 1690247 - RNA, 19 nt, Artificial Sequence
  Description of Artificial Sequence: Synthetic oligonucleotide
  Sense strand starting at position 933 of SEQ ID NO: 1561680
gaaucuuaguaccugagac

SEQ ID NO: 1690248 - RNA, 19 nt, Artificial Sequence
  Description of Artificial Sequence: Synthetic oligonucleotide
  Antisense strand to SEQ ID NO: 1690247
gucucagguacuaagauuc

SEQ ID NO: 1690249 - RNA, 19 nt, Artificial Sequence
  Description of Artificial Sequence: Synthetic oligonucleotide
  Sense strand starting at position 1397 of SEQ ID NO: 1561680
uggagcaaaugaucucuga

SEQ ID NO: 1690250 - RNA, 19 nt, Artificial Sequence
  Description of Artificial Sequence: Synthetic oligonucleotide
  Antisense strand to SEQ ID NO: 1690249
ucagagaucauuugcucca

SEQ ID NO: 1690251 - RNA, 19 nt, Artificial Sequence
  Description of Artificial Sequence: Synthetic oligonucleotide
  Sense strand starting at position 1408 of SEQ ID NO: 1561680
aucucugagccuugaagau

SEQ ID NO: 1690252 - RNA, 19 nt, Artificial Sequence
  Description of Artificial Sequence: Synthetic oligonucleotide
  Antisense strand to SEQ ID NO: 1690251
aucuucaaggcucagagau

SEQ ID NO: 1690253 - RNA, 19 nt, Artificial Sequence
  Description of Artificial Sequence: Synthetic oligonucleotide
  Sense strand starting at position 1425 of SEQ ID NO: 1561680
auucuuacaggguggacaa

SEQ ID NO: 1690254 - RNA, 19 nt, Artificial Sequence
  Description of Artificial Sequence: Synthetic oligonucleotide
  Antisense strand to SEQ ID NO: 1690253
uuguccacccuguaagaau

SEQ ID NO: 1690255 - RNA, 19 nt, Artificial Sequence
  Description of Artificial Sequence: Synthetic oligonucleotide
  Sense strand starting at position 1537 of SEQ ID NO: 1561680
aagggagcucauugucaca

SEQ ID NO: 1690256 - RNA, 19 nt, Artificial Sequence
  Description of Artificial Sequence: Synthetic oligonucleotide
  Antisense strand to SEQ ID NO: 1690255
ugugacaaugagcucccuu

SEQ ID NO: 1690257 - RNA, 19 nt, Artificial Sequence
  Description of Artificial Sequence: Synthetic oligonucleotide
  Sense strand starting at position 1604 of SEQ ID NO: 1561680
cucaaagggucucugagaa

SEQ ID NO: 1690258 - RNA, 19 nt, Artificial Sequence
  Description of Artificial Sequence: Synthetic oligonucleotide
  Antisense strand to SEQ ID NO: 1690257
uucucagagacccuuugag

SEQ ID NO: 1690259 - RNA, 19 nt, Artificial Sequence
  Description of Artificial Sequence: Synthetic oligonucleotide
  Sense strand starting at position 1641 of SEQ ID NO: 1561680
aggugaaguguccagcaca

SEQ ID NO: 1690260 - RNA, 19 nt, Artificial Sequence
  Description of Artificial Sequence: Synthetic oligonucleotide
  Antisense strand to SEQ ID NO: 1690259
ugugcuggacacuucaccu

SEQ ID NO: 1690261 - RNA, 19 nt, Artificial Sequence
  Description of Artificial Sequence: Synthetic oligonucleotide
  Sense strand starting at position 1663 of SEQ ID NO: 1561680
acuggucugaccugaauag

SEQ ID NO: 1690262 - RNA, 19 nt, Artificial Sequence
  Description of Artificial Sequence: Synthetic oligonucleotide
  Antisense strand to SEQ ID NO: 1690261
cuauucaggucagaccagu

SEQ ID NO: 1690263 - RNA, 19 nt, Artificial Sequence
  Description of Artificial Sequence: Synthetic oligonucleotide
  Sense strand starting at position 1881 of SEQ ID NO: 1561680
ggaccuggauuccuauguu

SEQ ID NO: 1690264 - RNA, 19 nt, Artificial Sequence
  Description of Artificial Sequence: Synthetic oligonucleotide
  Antisense strand to SEQ ID NO: 1690263
aacauaggaauccaggucc

SEQ ID NO: 1690265 - RNA, 19 nt, Artificial Sequence
  Description of Artificial Sequence: Synthetic oligonucleotide
  Sense strand starting at position 1884 of SEQ ID NO: 1561680
ccuggauuccuauguugac

SEQ ID NO: 1690266 - RNA, 19 nt, Artificial Sequence
  Description of Artificial Sequence: Synthetic oligonucleotide
  Antisense strand to SEQ ID NO: 1690265
gucaacauaggaauccagg

SEQ ID NO: 1690267 - RNA, 19 nt, Artificial Sequence
  Description of Artificial Sequence: Synthetic oligonucleotide
  Sense strand starting at position 1896 of SEQ ID NO: 1561680
uguugacauuuguugagca

SEQ ID NO: 1690268 - RNA, 19 nt, Artificial Sequence
  Description of Artificial Sequence: Synthetic oligonucleotide
  Antisense strand to SEQ ID NO: 1690267
ugcucaacaaaugucaaca

SEQ ID NO: 1690269 - RNA, 19 nt, Artificial Sequence
  Description of Artificial Sequence: Synthetic oligonucleotide
  Sense strand starting at position 2208 of SEQ ID NO: 1561680
guaccaacuacuugggaga

SEQ ID NO: 1690270 - RNA, 19 nt, Artificial Sequence
  Description of Artificial Sequence: Synthetic oligonucleotide
  Antisense strand to SEQ ID NO: 1690269
ucucccaaguaguugguac

SEQ ID NO: 1690271 - RNA, 19 nt, Artificial Sequence
  Description of Artificial Sequence: Synthetic oligonucleotide
  Sense strand starting at position 2614 of SEQ ID NO: 1561680
gggaucuauccuggaggua

SEQ ID NO: 1690272 - RNA, 19 nt, Artificial Sequence
  Description of Artificial Sequence: Synthetic oligonucleotide
  Antisense strand to SEQ ID NO: 1690271
uaccuccaggauagauccc

SEQ ID NO: 1690273 - RNA, 19 nt, Artificial Sequence
  Description of Artificial Sequence: Synthetic oligonucleotide
  Sense strand starting at position 2623 of SEQ ID NO: 1561680
ccuggagguaucuaggagu

SEQ ID NO: 1690274 - RNA, 19 nt, Artificial Sequence
  Description of Artificial Sequence: Synthetic oligonucleotide
  Antisense strand to SEQ ID NO: 1690273
acuccuagauaccuccagg

SEQ ID NO: 1690275 - RNA, 19 nt, Artificial Sequence
  Description of Artificial Sequence: Synthetic oligonucleotide
  Sense strand starting at position 2834 of SEQ ID NO: 1561680
gccucucaaggcugagaga

SEQ ID NO: 1690276 - RNA, 19 nt, Artificial Sequence
  Description of Artificial Sequence: Synthetic oligonucleotide
  Antisense strand to SEQ ID NO: 1690275
ucucucagccuugagaggc

SEQ ID NO: 1690277 - RNA, 19 nt, Artificial Sequence
  Description of Artificial Sequence: Synthetic oligonucleotide
  Sense strand starting at position 3180 of SEQ ID NO: 1561680
gggcagagauggucagagu

SEQ ID NO: 1690278 - RNA, 19 nt, Artificial Sequence
  Description of Artificial Sequence: Synthetic oligonucleotide
  Antisense strand to SEQ ID NO: 1690277
acucugaccaucucugccc

SEQ ID NO: 1690279 - RNA, 19 nt, Artificial Sequence
  Description of Artificial Sequence: Synthetic oligonucleotide
  Sense strand starting at position 3181 of SEQ ID NO: 1561680
ggcagagauggucagaguu

SEQ ID NO: 1690280 - RNA, 19 nt, Artificial Sequence
  Description of Artificial Sequence: Synthetic oligonucleotide
  Antisense strand to SEQ ID NO: 1690279
aacucugaccaucucugcc

SEQ ID NO: 1690281 - RNA, 19 nt, Artificial Sequence
  Description of Artificial Sequence: Synthetic oligonucleotide
  Sense strand starting at position 3262 of SEQ ID NO: 1561680
aagugaccugccuacaguu

SEQ ID NO: 1690282 - RNA, 19 nt, Artificial Sequence
  Description of Artificial Sequence: Synthetic oligonucleotide
  Antisense strand to SEQ ID NO: 1690281
aacuguaggcaggucacuu

SEQ ID NO: 1690283 - RNA, 19 nt, Artificial Sequence
  Description of Artificial Sequence: Synthetic oligonucleotide
  Sense strand starting at position 3311 of SEQ ID NO: 1561680
cccagaaguuccucuguac

SEQ ID NO: 1690284 - RNA, 19 nt, Artificial Sequence
  Description of Artificial Sequence: Synthetic oligonucleotide
  Antisense strand to SEQ ID NO: 1690283
guacagaggaacuucuggg

SEQ ID NO: 1690285 - RNA, 19 nt, Artificial Sequence
  Description of Artificial Sequence: Synthetic oligonucleotide
  Sense strand starting at position 3314 of SEQ ID NO: 1561680
agaaguuccucuguaccaa

SEQ ID NO: 1690286 - RNA, 19 nt, Artificial Sequence
  Description of Artificial Sequence: Synthetic oligonucleotide
  Antisense strand to SEQ ID NO: 1690285
uugguacagaggaacuucu

SEQ ID NO: 1690287 - RNA, 19 nt, Artificial Sequence
  Description of Artificial Sequence: Synthetic oligonucleotide
  Sense strand starting at position 3436 of SEQ ID NO: 1561680
ugaguaucugugugacaua

SEQ ID NO: 1690288 - RNA, 19 nt, Artificial Sequence
  Description of Artificial Sequence: Synthetic oligonucleotide
  Antisense strand to SEQ ID NO: 1690287
uaugucacacagauacuca

SEQ ID NO: 1690289 - RNA, 19 nt, Artificial Sequence
  Description of Artificial Sequence: Synthetic oligonucleotide
  Sense strand starting at position 3554 of SEQ ID NO: 1561680
gcuagaacugaggguguaa

SEQ ID NO: 1690290 - RNA, 19 nt, Artificial Sequence
  Description of Artificial Sequence: Synthetic oligonucleotide
  Antisense strand to SEQ ID NO: 1690289
uuacacccucaguucuagc

SEQ ID NO: 1690291 - RNA, 19 nt, Artificial Sequence
  Description of Artificial Sequence: Synthetic oligonucleotide
  Sense strand starting at position 3591 of SEQ ID NO: 1561680
gaguucuaagaagaguguu

SEQ ID NO: 1690292 - RNA, 19 nt, Artificial Sequence
  Description of Artificial Sequence: Synthetic oligonucleotide
  Antisense strand to SEQ ID NO: 1690291
aacacucuucuuagaacuc

SEQ ID NO: 1690293 - RNA, 19 nt, Artificial Sequence
  Description of Artificial Sequence: Synthetic oligonucleotide
  Sense strand starting at position 3683 of SEQ ID NO: 1561680
ccacucuuacggcaaaguu

SEQ ID NO: 1690294 - RNA, 19 nt, Artificial Sequence
  Description of Artificial Sequence: Synthetic oligonucleotide
  Antisense strand to SEQ ID NO: 1690293
aacuuugccguaagagugg

SEQ ID NO: 1690295 - RNA, 19 nt, Artificial Sequence
  Description of Artificial Sequence: Synthetic oligonucleotide
  Sense strand starting at position 41 of SEQ ID NO: 1561681
gcaagaauuaucuggagug

SEQ ID NO: 1690296 - RNA, 19 nt, Artificial Sequence
  Description of Artificial Sequence: Synthetic oligonucleotide
  Antisense strand to SEQ ID NO: 1690295
cacuccagauaauucuugc

SEQ ID NO: 1690297 - RNA, 19 nt, Artificial Sequence
  Description of Artificial Sequence: Synthetic oligonucleotide
  Sense strand starting at position 482 of SEQ ID NO: 1561681
uuuagacaucauuaagcga

SEQ ID NO: 1690298 - RNA, 19 nt, Artificial Sequence
  Description of Artificial Sequence: Synthetic oligonucleotide
  Antisense strand to SEQ ID NO: 1690297
ucgcuuaaugaugucuaaa

SEQ ID NO: 1690299 - RNA, 19 nt, Artificial Sequence
  Description of Artificial Sequence: Synthetic oligonucleotide
  Sense strand starting at position 485 of SEQ ID NO: 1561681
agacaucauuaagcgauca

SEQ ID NO: 1690300 - RNA, 19 nt, Artificial Sequence
  Description of Artificial Sequence: Synthetic oligonucleotide
  Antisense strand to SEQ ID NO: 1690299
ugaucgcuuaaugaugucu

SEQ ID NO: 1690301 - RNA, 19 nt, Artificial Sequence
  Description of Artificial Sequence: Synthetic oligonucleotide
  Sense strand starting at position 498 of SEQ ID NO: 1561681
cgaucacuuccagaaucug

SEQ ID NO: 1690302 - RNA, 19 nt, Artificial Sequence
  Description of Artificial Sequence: Synthetic oligonucleotide
  Antisense strand to SEQ ID NO: 1690301
cagauucuggaagugaucg

SEQ ID NO: 1690303 - RNA, 19 nt, Artificial Sequence
  Description of Artificial Sequence: Synthetic oligonucleotide
  Sense strand starting at position 506 of SEQ ID NO: 1561681
uccagaaucugugcucuaa

SEQ ID NO: 1690304 - RNA, 19 nt, Artificial Sequence
  Description of Artificial Sequence: Synthetic oligonucleotide
  Antisense strand to SEQ ID NO: 1690303
uuagagcacagauucugga

SEQ ID NO: 1690305 - RNA, 19 nt, Artificial Sequence
  Description of Artificial Sequence: Synthetic oligonucleotide
  Sense strand starting at position 533 of SEQ ID NO: 1561681
ucuagaggugcauauauaa

SEQ ID NO: 1690306 - RNA, 19 nt, Artificial Sequence
  Description of Artificial Sequence: Synthetic oligonucleotide
  Antisense strand to SEQ ID NO: 1690305
uuauauaugcaccucuaga

SEQ ID NO: 1690307 - RNA, 19 nt, Artificial Sequence
  Description of Artificial Sequence: Synthetic oligonucleotide
  Sense strand starting at position 547 of SEQ ID NO: 1561681
uauaauauggccuguaaug

SEQ ID NO: 1690308 - RNA, 19 nt, Artificial Sequence
  Description of Artificial Sequence: Synthetic oligonucleotide
  Antisense strand to SEQ ID NO: 1690307
cauuacaggccauauuaua

SEQ ID NO: 1690309 - RNA, 19 nt, Artificial Sequence
  Description of Artificial Sequence: Synthetic oligonucleotide
  Sense strand starting at position 564 of SEQ ID NO: 1561681
ugaaaugacugugauaaua

SEQ ID NO: 1690310 - RNA, 19 nt, Artificial Sequence
  Description of Artificial Sequence: Synthetic oligonucleotide
  Antisense strand to SEQ ID NO: 1690309
uauuaucacagucauuuca

SEQ ID NO: 1690311 - RNA, 19 nt, Artificial Sequence
  Description of Artificial Sequence: Synthetic oligonucleotide
  Sense strand starting at position 634 of SEQ ID NO: 1561681
gugccacuauauuuaaguu

SEQ ID NO: 1690312 - RNA, 19 nt, Artificial Sequence
  Description of Artificial Sequence: Synthetic oligonucleotide
  Antisense strand to SEQ ID NO: 1690311
aacuuaaauauaguggcac

SEQ ID NO: 1690313 - RNA, 19 nt, Artificial Sequence
  Description of Artificial Sequence: Synthetic oligonucleotide
  Sense strand starting at position 681 of SEQ ID NO: 1561681
ucugaucugcccuagauuc

SEQ ID NO: 1690314 - RNA, 19 nt, Artificial Sequence
  Description of Artificial Sequence: Synthetic oligonucleotide
  Antisense strand to SEQ ID NO: 1690313
gaaucuagggcagaucaga

SEQ ID NO: 1690315 - RNA, 19 nt, Artificial Sequence
  Description of Artificial Sequence: Synthetic oligonucleotide
  Sense strand starting at position 914 of SEQ ID NO: 1561681
cuggaaucaagcuguuugu

SEQ ID NO: 1690316 - RNA, 19 nt, Artificial Sequence
  Description of Artificial Sequence: Synthetic oligonucleotide
  Antisense strand to SEQ ID NO: 1690315
acaaacagcuugauuccag

SEQ ID NO: 1690317 - RNA, 19 nt, Artificial Sequence
  Description of Artificial Sequence: Synthetic oligonucleotide
  Sense strand starting at position 917 of SEQ ID NO: 1561681
gaaucaagcuguuugugau

SEQ ID NO: 1690318 - RNA, 19 nt, Artificial Sequence
  Description of Artificial Sequence: Synthetic oligonucleotide
  Antisense strand to SEQ ID NO: 1690317
aucacaaacagcuugauuc

SEQ ID NO: 1690319 - RNA, 19 nt, Artificial Sequence
  Description of Artificial Sequence: Synthetic oligonucleotide
  Sense strand starting at position 918 of SEQ ID NO: 1561681
aaucaagcuguuugugaug

SEQ ID NO: 1690320 - RNA, 19 nt, Artificial Sequence
  Description of Artificial Sequence: Synthetic oligonucleotide
  Antisense strand to SEQ ID NO: 1690319
caucacaaacagcuugauu

SEQ ID NO: 1690321 - RNA, 19 nt, Artificial Sequence
  Description of Artificial Sequence: Synthetic oligonucleotide
  Sense strand starting at position 963 of SEQ ID NO: 1561681
uacgaagcauccuccgaau

SEQ ID NO: 1690322 - RNA, 19 nt, Artificial Sequence
  Description of Artificial Sequence: Synthetic oligonucleotide
  Antisense strand to SEQ ID NO: 1690321
auucggaggaugcuucgua

SEQ ID NO: 1690323 - RNA, 19 nt, Artificial Sequence
  Description of Artificial Sequence: Synthetic oligonucleotide
  Sense strand starting at position 974 of SEQ ID NO: 1561681
cuccgaaugggacgaguaa

SEQ ID NO: 1690324 - RNA, 19 nt, Artificial Sequence
  Description of Artificial Sequence: Synthetic oligonucleotide
  Antisense strand to SEQ ID NO: 1690323
uuacucgucccauucggag

SEQ ID NO: 1690325 - RNA, 19 nt, Artificial Sequence
  Description of Artificial Sequence: Synthetic oligonucleotide
  Sense strand starting at position 1110 of SEQ ID NO: 1561681
aguauucgguccuuuacau

SEQ ID NO: 1690326 - RNA, 19 nt, Artificial Sequence
  Description of Artificial Sequence: Synthetic oligonucleotide
  Antisense strand to SEQ ID NO: 1690325
auguaaaggaccgaauacu

SEQ ID NO: 1690327 - RNA, 19 nt, Artificial Sequence
  Description of Artificial Sequence: Synthetic oligonucleotide
  Sense strand starting at position 1136 of SEQ ID NO: 1561681
gcaacagcagcucaagauu

SEQ ID NO: 1690328 - RNA, 19 nt, Artificial Sequence
  Description of Artificial Sequence: Synthetic oligonucleotide
  Antisense strand to SEQ ID NO: 1690327
aaucuugagcugcuguugc

SEQ ID NO: 1690329 - RNA, 19 nt, Artificial Sequence
  Description of Artificial Sequence: Synthetic oligonucleotide
  Sense strand starting at position 1208 of SEQ ID NO: 1561681
gaguuauucugaguuaaac

SEQ ID NO: 1690330 - RNA, 19 nt, Artificial Sequence
  Description of Artificial Sequence: Synthetic oligonucleotide
  Antisense strand to SEQ ID NO: 1690329
guuuaacucagaauaacuc

SEQ ID NO: 1690331 - RNA, 19 nt, Artificial Sequence
  Description of Artificial Sequence: Synthetic oligonucleotide
  Sense strand starting at position 1210 of SEQ ID NO: 1561681
guuauucugaguuaaacga

SEQ ID NO: 1690332 - RNA, 19 nt, Artificial Sequence
  Description of Artificial Sequence: Synthetic oligonucleotide
  Antisense strand to SEQ ID NO: 1690331
ucguuuaacucagaauaac

SEQ ID NO: 1690333 - RNA, 19 nt, Artificial Sequence
  Description of Artificial Sequence: Synthetic oligonucleotide
  Sense strand starting at position 1214 of SEQ ID NO: 1561681
uucugaguuaaacgagauu

SEQ ID NO: 1690334 - RNA, 19 nt, Artificial Sequence
  Description of Artificial Sequence: Synthetic oligonucleotide
  Antisense strand to SEQ ID NO: 1690333
aaucucguuuaacucagaa

SEQ ID NO: 1690335 - RNA, 19 nt, Artificial Sequence
  Description of Artificial Sequence: Synthetic oligonucleotide
  Sense strand starting at position 1260 of SEQ ID NO: 1561681
aagcauucucagcagaagu

SEQ ID NO: 1690336 - RNA, 19 nt, Artificial Sequence
  Description of Artificial Sequence: Synthetic oligonucleotide
  Antisense strand to SEQ ID NO: 1690335
acuucugcugagaaugcuu

SEQ ID NO: 1690337 - RNA, 19 nt, Artificial Sequence
  Description of Artificial Sequence: Synthetic oligonucleotide
  Sense strand starting at position 1262 of SEQ ID NO: 1561681
gcauucucagcagaagucu

SEQ ID NO: 1690338 - RNA, 19 nt, Artificial Sequence
  Description of Artificial Sequence: Synthetic oligonucleotide
  Antisense strand to SEQ ID NO: 1690337
agacuucugcugagaaugc

SEQ ID NO: 1690339 - RNA, 19 nt, Artificial Sequence
  Description of Artificial Sequence: Synthetic oligonucleotide
  Sense strand starting at position 1268 of SEQ ID NO: 1561681
ucagcagaagucuguuacu

SEQ ID NO: 1690340 - RNA, 19 nt, Artificial Sequence
  Description of Artificial Sequence: Synthetic oligonucleotide
  Antisense strand to SEQ ID NO: 1690339
aguaacagacuucugcuga

SEQ ID NO: 1690341 - RNA, 19 nt, Artificial Sequence
  Description of Artificial Sequence: Synthetic oligonucleotide
  Sense strand starting at position 1273 of SEQ ID NO: 1561681
agaagucuguuacuguuaa

SEQ ID NO: 1690342 - RNA, 19 nt, Artificial Sequence
  Description of Artificial Sequence: Synthetic oligonucleotide
  Antisense strand to SEQ ID NO: 1690341
uuaacaguaacagacuucu

SEQ ID NO: 1690343 - RNA, 19 nt, Artificial Sequence
  Description of Artificial Sequence: Synthetic oligonucleotide
  Sense strand starting at position 1296 of SEQ ID NO: 1561681
ugugcuacuuaauucgaaa

SEQ ID NO: 1690344 - RNA, 19 nt, Artificial Sequence
  Description of Artificial Sequence: Synthetic oligonucleotide
  Antisense strand to SEQ ID NO: 1690343
uuucgaauuaaguagcaca

SEQ ID NO: 1690345 - RNA, 19 nt, Artificial Sequence
  Description of Artificial Sequence: Synthetic oligonucleotide
  Sense strand starting at position 2040 of SEQ ID NO: 1561681
aagccauccgagugaaaca

SEQ ID NO: 1690346 - RNA, 19 nt, Artificial Sequence
  Description of Artificial Sequence: Synthetic oligonucleotide
  Antisense strand to SEQ ID NO: 1690345
uguuucacucggauggcuu

SEQ ID NO: 1690347 - RNA, 19 nt, Artificial Sequence
  Description of Artificial Sequence: Synthetic oligonucleotide
  Sense strand starting at position 2082 of SEQ ID NO: 1561681
gcgcuacucguggcggaaa

SEQ ID NO: 1690348 - RNA, 19 nt, Artificial Sequence
  Description of Artificial Sequence: Synthetic oligonucleotide
  Antisense strand to SEQ ID NO: 1690347
uuuccgccacgaguagcgc

SEQ ID NO: 1690349 - RNA, 19 nt, Artificial Sequence
  Description of Artificial Sequence: Synthetic oligonucleotide
  Sense strand starting at position 2095 of SEQ ID NO: 1561681
cggaaaugacgucagcauc

SEQ ID NO: 1690350 - RNA, 19 nt, Artificial Sequence
  Description of Artificial Sequence: Synthetic oligonucleotide
  Antisense strand to SEQ ID NO: 1690349
gaugcugacgucauuuccg

SEQ ID NO: 1690351 - RNA, 19 nt, Artificial Sequence
  Description of Artificial Sequence: Synthetic oligonucleotide
  Sense strand starting at position 2355 of SEQ ID NO: 1561681
caggauuuagcccgcuuau

SEQ ID NO: 1690352 - RNA, 19 nt, Artificial Sequence
  Description of Artificial Sequence: Synthetic oligonucleotide
  Antisense strand to SEQ ID NO: 1690351
auaagcgggcuaaauccug

SEQ ID NO: 1690353 - RNA, 19 nt, Artificial Sequence
  Description of Artificial Sequence: Synthetic oligonucleotide
  Sense strand starting at position 2396 of SEQ ID NO: 1561681
ucuguagggccuuguugaa

SEQ ID NO: 1690354 - RNA, 19 nt, Artificial Sequence
  Description of Artificial Sequence: Synthetic oligonucleotide
  Antisense strand to SEQ ID NO: 1690353
uucaacaaggcccuacaga

SEQ ID NO: 1690355 - RNA, 19 nt, Artificial Sequence
  Description of Artificial Sequence: Synthetic oligonucleotide
  Sense strand starting at position 2403 of SEQ ID NO: 1561681
ggccuuguugaagauguua

SEQ ID NO: 1690356 - RNA, 19 nt, Artificial Sequence
  Description of Artificial Sequence: Synthetic oligonucleotide
  Antisense strand to SEQ ID NO: 1690355
uaacaucuucaacaaggcc

SEQ ID NO: 1690357 - RNA, 19 nt, Artificial Sequence
  Description of Artificial Sequence: Synthetic oligonucleotide
  Sense strand starting at position 2411 of SEQ ID NO: 1561681
ugaagauguuaacucuucu

SEQ ID NO: 1690358 - RNA, 19 nt, Artificial Sequence
  Description of Artificial Sequence: Synthetic oligonucleotide
  Antisense strand to SEQ ID NO: 1690357
agaagaguuaacaucuuca

SEQ ID NO: 1690359 - RNA, 19 nt, Artificial Sequence
  Description of Artificial Sequence: Synthetic oligonucleotide
  Sense strand starting at position 2626 of SEQ ID NO: 1561681
gcgucagugguucacaaag

SEQ ID NO: 1690360 - RNA, 19 nt, Artificial Sequence
  Description of Artificial Sequence: Synthetic oligonucleotide
  Antisense strand to SEQ ID NO: 1690359
cuuugugaaccacugacgc

SEQ ID NO: 1690361 - RNA, 19 nt, Artificial Sequence
  Description of Artificial Sequence: Synthetic oligonucleotide
  Sense strand starting at position 3129 of SEQ ID NO: 1561681
caaguaauguaucugguac

SEQ ID NO: 1690362 - RNA, 19 nt, Artificial Sequence
  Description of Artificial Sequence: Synthetic oligonucleotide
  Antisense strand to SEQ ID NO: 1690361
guaccagauacauuacuug

SEQ ID NO: 1690363 - RNA, 19 nt, Artificial Sequence
  Description of Artificial Sequence: Synthetic oligonucleotide
  Sense strand starting at position 3150 of SEQ ID NO: 1561681
gggugugucugacuccaga

SEQ ID NO: 1690364 - RNA, 19 nt, Artificial Sequence
  Description of Artificial Sequence: Synthetic oligonucleotide
  Antisense strand to SEQ ID NO: 1690363
ucuggagucagacacaccc

SEQ ID NO: 1690365 - RNA, 19 nt, Artificial Sequence
  Description of Artificial Sequence: Synthetic oligonucleotide
  Sense strand starting at position 3175 of SEQ ID NO: 1561681
gcucuuaaccguuaaacuu

SEQ ID NO: 1690366 - RNA, 19 nt, Artificial Sequence
  Description of Artificial Sequence: Synthetic oligonucleotide
  Antisense strand to SEQ ID NO: 1690365
aaguuuaacgguuaagagc

SEQ ID NO: 1690367 - RNA, 19 nt, Artificial Sequence
  Description of Artificial Sequence: Synthetic oligonucleotide
  Sense strand starting at position 3725 of SEQ ID NO: 1561681
aacauacugugaucacguu

SEQ ID NO: 1690368 - RNA, 19 nt, Artificial Sequence
  Description of Artificial Sequence: Synthetic oligonucleotide
  Antisense strand to SEQ ID NO: 1690367
aacgugaucacaguauguu

SEQ ID NO: 1690369 - RNA, 19 nt, Artificial Sequence
  Description of Artificial Sequence: Synthetic oligonucleotide
  Sense strand starting at position 3726 of SEQ ID NO: 1561681
acauacugugaucacguua

SEQ ID NO: 1690370 - RNA, 19 nt, Artificial Sequence
  Description of Artificial Sequence: Synthetic oligonucleotide
  Antisense strand to SEQ ID NO: 1690369
uaacgugaucacaguaugu

SEQ ID NO: 1690371 - RNA, 19 nt, Artificial Sequence
  Description of Artificial Sequence: Synthetic oligonucleotide
  Sense strand starting at position 3738 of SEQ ID NO: 1561681
cacguuacugucuggaacu

SEQ ID NO: 1690372 - RNA, 19 nt, Artificial Sequence
  Description of Artificial Sequence: Synthetic oligonucleotide
  Antisense strand to SEQ ID NO: 1690371
aguuccagacaguaacgug

SEQ ID NO: 1690373 - RNA, 19 nt, Artificial Sequence
  Description of Artificial Sequence: Synthetic oligonucleotide
  Sense strand starting at position 3975 of SEQ ID NO: 1561681
ucuguugcccgugcucaaa

SEQ ID NO: 1690374 - RNA, 19 nt, Artificial Sequence
  Description of Artificial Sequence: Synthetic oligonucleotide
  Antisense strand to SEQ ID NO: 1690373
uuugagcacgggcaacaga

SEQ ID NO: 1690375 - RNA, 19 nt, Artificial Sequence
  Description of Artificial Sequence: Synthetic oligonucleotide
  Sense strand starting at position 12 of SEQ ID NO: 1561682
caaggaagaugugcagaau

SEQ ID NO: 1690376 - RNA, 19 nt, Artificial Sequence
  Description of Artificial Sequence: Synthetic oligonucleotide
  Antisense strand to SEQ ID NO: 1690375
auucugcacaucuuccuug

SEQ ID NO: 1690377 - RNA, 19 nt, Artificial Sequence
  Description of Artificial Sequence: Synthetic oligonucleotide
  Sense strand starting at position 18 of SEQ ID NO: 1561682
agaugugcagaaugaacau

SEQ ID NO: 1690378 - RNA, 19 nt, Artificial Sequence
  Description of Artificial Sequence: Synthetic oligonucleotide
  Antisense strand to SEQ ID NO: 1690377
auguucauucugcacaucu

SEQ ID NO: 1690379 - RNA, 19 nt, Artificial Sequence
  Description of Artificial Sequence: Synthetic oligonucleotide
  Sense strand starting at position 27 of SEQ ID NO: 1561682
gaaugaacauccugggaaa

SEQ ID NO: 1690380 - RNA, 19 nt, Artificial Sequence
  Description of Artificial Sequence: Synthetic oligonucleotide
  Antisense strand to SEQ ID NO: 1690379
uuucccaggauguucauuc

SEQ ID NO: 1690381 - RNA, 19 nt, Artificial Sequence
  Description of Artificial Sequence: Synthetic oligonucleotide
  Sense strand starting at position 49 of SEQ ID NO: 1561682
ggaaaugacuagggaggaa

SEQ ID NO: 1690382 - RNA, 19 nt, Artificial Sequence
  Description of Artificial Sequence: Synthetic oligonucleotide
  Antisense strand to SEQ ID NO: 1690381
uuccucccuagucauuucc

SEQ ID NO: 1690383 - RNA, 19 nt, Artificial Sequence
  Description of Artificial Sequence: Synthetic oligonucleotide
  Sense strand starting at position 257 of SEQ ID NO: 1561682
ggucuuucucucugagcca

SEQ ID NO: 1690384 - RNA, 19 nt, Artificial Sequence
  Description of Artificial Sequence: Synthetic oligonucleotide
  Antisense strand to SEQ ID NO: 1690383
uggcucagagagaaagacc

SEQ ID NO: 1690385 - RNA, 19 nt, Artificial Sequence
  Description of Artificial Sequence: Synthetic oligonucleotide
  Sense strand starting at position 329 of SEQ ID NO: 1561682
gggcucaguccuggcucaa

SEQ ID NO: 1690386 - RNA, 19 nt, Artificial Sequence
  Description of Artificial Sequence: Synthetic oligonucleotide
  Antisense strand to SEQ ID NO: 1690385
uugagccaggacugagccc

SEQ ID NO: 1690387 - RNA, 19 nt, Artificial Sequence
  Description of Artificial Sequence: Synthetic oligonucleotide
  Sense strand starting at position 370 of SEQ ID NO: 1561682
uguguagccucccauuaaa

SEQ ID NO: 1690388 - RNA, 19 nt, Artificial Sequence
  Description of Artificial Sequence: Synthetic oligonucleotide
  Antisense strand to SEQ ID NO: 1690387
uuuaaugggaggcuacaca

SEQ ID NO: 1690389 - RNA, 19 nt, Artificial Sequence
  Description of Artificial Sequence: Synthetic oligonucleotide
  Sense strand starting at position 386 of SEQ ID NO: 1561682
aaagcucacgccugugaaa

SEQ ID NO: 1690390 - RNA, 19 nt, Artificial Sequence
  Description of Artificial Sequence: Synthetic oligonucleotide
  Antisense strand to SEQ ID NO: 1690389
uuucacaggcgugagcuuu

SEQ ID NO: 1690391 - RNA, 19 nt, Artificial Sequence
  Description of Artificial Sequence: Synthetic oligonucleotide
  Sense strand starting at position 761 of SEQ ID NO: 1561682
gugcuuagccuccagauag

SEQ ID NO: 1690392 - RNA, 19 nt, Artificial Sequence
  Description of Artificial Sequence: Synthetic oligonucleotide
  Antisense strand to SEQ ID NO: 1690391
cuaucuggaggcuaagcac

SEQ ID NO: 1690393 - RNA, 19 nt, Artificial Sequence
  Description of Artificial Sequence: Synthetic oligonucleotide
  Sense strand starting at position 808 of SEQ ID NO: 1561682
cugugauccagagguccca

SEQ ID NO: 1690394 - RNA, 19 nt, Artificial Sequence
  Description of Artificial Sequence: Synthetic oligonucleotide
  Antisense strand to SEQ ID NO: 1690393
ugggaccucuggaucacag

SEQ ID NO: 1690395 - RNA, 19 nt, Artificial Sequence
  Description of Artificial Sequence: Synthetic oligonucleotide
  Sense strand starting at position 884 of SEQ ID NO: 1561682
aggauuaucucccagggac

SEQ ID NO: 1690396 - RNA, 19 nt, Artificial Sequence
  Description of Artificial Sequence: Synthetic oligonucleotide
  Antisense strand to SEQ ID NO: 1690395
gucccugggagauaauccu

SEQ ID NO: 1690397 - RNA, 19 nt, Artificial Sequence
  Description of Artificial Sequence: Synthetic oligonucleotide
  Sense strand starting at position 914 of SEQ ID NO: 1561682
cucguagcucaggauggau

SEQ ID NO: 1690398 - RNA, 19 nt, Artificial Sequence
  Description of Artificial Sequence: Synthetic oligonucleotide
  Antisense strand to SEQ ID NO: 1690397
auccauccugagcuacgag

SEQ ID NO: 1690399 - RNA, 19 nt, Artificial Sequence
  Description of Artificial Sequence: Synthetic oligonucleotide
  Sense strand starting at position 1107 of SEQ ID NO: 1561682
ccugcuuacuaauggaaac

SEQ ID NO: 1690400 - RNA, 19 nt, Artificial Sequence
  Description of Artificial Sequence: Synthetic oligonucleotide
  Antisense strand to SEQ ID NO: 1690399
guuuccauuaguaagcagg

SEQ ID NO: 1690401 - RNA, 19 nt, Artificial Sequence
  Description of Artificial Sequence: Synthetic oligonucleotide
  Sense strand starting at position 1301 of SEQ ID NO: 1561682
gggaaauguaaucggacau

SEQ ID NO: 1690402 - RNA, 19 nt, Artificial Sequence
  Description of Artificial Sequence: Synthetic oligonucleotide
  Antisense strand to SEQ ID NO: 1690401
auguccgauuacauuuccc

SEQ ID NO: 1690403 - RNA, 19 nt, Artificial Sequence
  Description of Artificial Sequence: Synthetic oligonucleotide
  Sense strand starting at position 1302 of SEQ ID NO: 1561682
ggaaauguaaucggacauc

SEQ ID NO: 1690404 - RNA, 19 nt, Artificial Sequence
  Description of Artificial Sequence: Synthetic oligonucleotide
  Antisense strand to SEQ ID NO: 1690403
gauguccgauuacauuucc

SEQ ID NO: 1690405 - RNA, 19 nt, Artificial Sequence
  Description of Artificial Sequence: Synthetic oligonucleotide
  Sense strand starting at position 1358 of SEQ ID NO: 1561682
cucugucccucggagauaa

SEQ ID NO: 1690406 - RNA, 19 nt, Artificial Sequence
  Description of Artificial Sequence: Synthetic oligonucleotide
  Antisense strand to SEQ ID NO: 1690405
uuaucuccgagggacagag

SEQ ID NO: 1690407 - RNA, 19 nt, Artificial Sequence
  Description of Artificial Sequence: Synthetic oligonucleotide
  Sense strand starting at position 1368 of SEQ ID NO: 1561682
cggagauaauccugugcac

SEQ ID NO: 1690408 - RNA, 19 nt, Artificial Sequence
  Description of Artificial Sequence: Synthetic oligonucleotide
  Antisense strand to SEQ ID NO: 1690407
gugcacaggauuaucuccg

SEQ ID NO: 1690409 - RNA, 19 nt, Artificial Sequence
  Description of Artificial Sequence: Synthetic oligonucleotide
  Sense strand starting at position 1370 of SEQ ID NO: 1561682
gagauaauccugugcacuc

SEQ ID NO: 1690410 - RNA, 19 nt, Artificial Sequence
  Description of Artificial Sequence: Synthetic oligonucleotide
  Antisense strand to SEQ ID NO: 1690409
gagugcacaggauuaucuc

SEQ ID NO: 1690411 - RNA, 19 nt, Artificial Sequence
  Description of Artificial Sequence: Synthetic oligonucleotide
  Sense strand starting at position 1487 of SEQ ID NO: 1561682
agagaugcuacugguccaa

SEQ ID NO: 1690412 - RNA, 19 nt, Artificial Sequence
  Description of Artificial Sequence: Synthetic oligonucleotide
  Antisense strand to SEQ ID NO: 1690411
uuggaccaguagcaucucu

SEQ ID NO: 1690413 - RNA, 19 nt, Artificial Sequence
  Description of Artificial Sequence: Synthetic oligonucleotide
  Sense strand starting at position 1603 of SEQ ID NO: 1561682
ggacaaucgcuucgcggaa

SEQ ID NO: 1690414 - RNA, 19 nt, Artificial Sequence
  Description of Artificial Sequence: Synthetic oligonucleotide
  Antisense strand to SEQ ID NO: 1690413
uuccgcgaagcgauugucc

SEQ ID NO: 1690415 - RNA, 19 nt, Artificial Sequence
  Description of Artificial Sequence: Synthetic oligonucleotide
  Sense strand starting at position 1604 of SEQ ID NO: 1561682
gacaaucgcuucgcggaaa

SEQ ID NO: 1690416 - RNA, 19 nt, Artificial Sequence
  Description of Artificial Sequence: Synthetic oligonucleotide
  Antisense strand to SEQ ID NO: 1690415
uuuccgcgaagcgauuguc

SEQ ID NO: 1690417 - RNA, 19 nt, Artificial Sequence
  Description of Artificial Sequence: Synthetic oligonucleotide
  Sense strand starting at position 1995 of SEQ ID NO: 1561682
cccauugguugaucuggga

SEQ ID NO: 1690418 - RNA, 19 nt, Artificial Sequence
  Description of Artificial Sequence: Synthetic oligonucleotide
  Antisense strand to SEQ ID NO: 1690417
ucccagaucaaccaauggg

SEQ ID NO: 1690419 - RNA, 19 nt, Artificial Sequence
  Description of Artificial Sequence: Synthetic oligonucleotide
  Sense strand starting at position 2135 of SEQ ID NO: 1561682
ggcgagcucucgcgaggaa

SEQ ID NO: 1690420 - RNA, 19 nt, Artificial Sequence
  Description of Artificial Sequence: Synthetic oligonucleotide
  Antisense strand to SEQ ID NO: 1690419
uuccucgcgagagcucgcc

SEQ ID NO: 1690421 - RNA, 19 nt, Artificial Sequence
  Description of Artificial Sequence: Synthetic oligonucleotide
  Sense strand starting at position 2137 of SEQ ID NO: 1561682
cgagcucucgcgaggaaga

SEQ ID NO: 1690422 - RNA, 19 nt, Artificial Sequence
  Description of Artificial Sequence: Synthetic oligonucleotide
  Antisense strand to SEQ ID NO: 1690421
ucuuccucgcgagagcucg

SEQ ID NO: 1690423 - RNA, 19 nt, Artificial Sequence
  Description of Artificial Sequence: Synthetic oligonucleotide
  Sense strand starting at position 2567 of SEQ ID NO: 1561682
ggagaagcaucagaacaaa

SEQ ID NO: 1690424 - RNA, 19 nt, Artificial Sequence
  Description of Artificial Sequence: Synthetic oligonucleotide
  Antisense strand to SEQ ID NO: 1690423
uuuguucugaugcuucucc

SEQ ID NO: 1690425 - RNA, 19 nt, Artificial Sequence
  Description of Artificial Sequence: Synthetic oligonucleotide
  Sense strand starting at position 2681 of SEQ ID NO: 1561682
gcgagaugcgccucgcuca

SEQ ID NO: 1690426 - RNA, 19 nt, Artificial Sequence
  Description of Artificial Sequence: Synthetic oligonucleotide
  Antisense strand to SEQ ID NO: 1690425
ugagcgaggcgcaucucgc

SEQ ID NO: 1690427 - RNA, 19 nt, Artificial Sequence
  Description of Artificial Sequence: Synthetic oligonucleotide
  Sense strand starting at position 2994 of SEQ ID NO: 1561682
ccauaaccugucugcugau

SEQ ID NO: 1690428 - RNA, 19 nt, Artificial Sequence
  Description of Artificial Sequence: Synthetic oligonucleotide
  Antisense strand to SEQ ID NO: 1690427
aucagcagacagguuaugg

SEQ ID NO: 1690429 - RNA, 19 nt, Artificial Sequence
  Description of Artificial Sequence: Synthetic oligonucleotide
  Sense strand starting at position 3021 of SEQ ID NO: 1561682
ugcacacuguuggcaaauu

SEQ ID NO: 1690430 - RNA, 19 nt, Artificial Sequence
  Description of Artificial Sequence: Synthetic oligonucleotide
  Antisense strand to SEQ ID NO: 1690429
aauuugccaacagugugca

SEQ ID NO: 1690431 - RNA, 19 nt, Artificial Sequence
  Description of Artificial Sequence: Synthetic oligonucleotide
  Sense strand starting at position 3022 of SEQ ID NO: 1561682
gcacacuguuggcaaauua

SEQ ID NO: 1690432 - RNA, 19 nt, Artificial Sequence
  Description of Artificial Sequence: Synthetic oligonucleotide
  Antisense strand to SEQ ID NO: 1690431
uaauuugccaacagugugc

SEQ ID NO: 1690433 - RNA, 19 nt, Artificial Sequence
  Description of Artificial Sequence: Synthetic oligonucleotide
  Sense strand starting at position 3129 of SEQ ID NO: 1561682
agcacuuugggugacucau

SEQ ID NO: 1690434 - RNA, 19 nt, Artificial Sequence
  Description of Artificial Sequence: Synthetic oligonucleotide
  Antisense strand to SEQ ID NO: 1690433
augagucacccaaagugcu

SEQ ID NO: 1690435 - RNA, 19 nt, Artificial Sequence
  Description of Artificial Sequence: Synthetic oligonucleotide
  Sense strand starting at position 3149 of SEQ ID NO: 1561682
ugcccucgcguuugagaga

SEQ ID NO: 1690436 - RNA, 19 nt, Artificial Sequence
  Description of Artificial Sequence: Synthetic oligonucleotide
  Antisense strand to SEQ ID NO: 1690435
ucucucaaacgcgagggca

SEQ ID NO: 1690437 - RNA, 19 nt, Artificial Sequence
  Description of Artificial Sequence: Synthetic oligonucleotide
  Sense strand starting at position 3171 of SEQ ID NO: 1561682
cgcuuacauugagagcuuu

SEQ ID NO: 1690438 - RNA, 19 nt, Artificial Sequence
  Description of Artificial Sequence: Synthetic oligonucleotide
  Antisense strand to SEQ ID NO: 1690437
aaagcucucaauguaagcg

SEQ ID NO: 1690439 - RNA, 19 nt, Artificial Sequence
  Description of Artificial Sequence: Synthetic oligonucleotide
  Sense strand starting at position 3250 of SEQ ID NO: 1561682
uuuagaccuugucuugaaa

SEQ ID NO: 1690440 - RNA, 19 nt, Artificial Sequence
  Description of Artificial Sequence: Synthetic oligonucleotide
  Antisense strand to SEQ ID NO: 1690439
uuucaagacaaggucuaaa

SEQ ID NO: 1690441 - RNA, 19 nt, Artificial Sequence
  Description of Artificial Sequence: Synthetic oligonucleotide
  Sense strand starting at position 3252 of SEQ ID NO: 1561682
uagaccuugucuugaaagu

SEQ ID NO: 1690442 - RNA, 19 nt, Artificial Sequence
  Description of Artificial Sequence: Synthetic oligonucleotide
  Antisense strand to SEQ ID NO: 1690441
acuuucaagacaaggucua

SEQ ID NO: 1690443 - RNA, 19 nt, Artificial Sequence
  Description of Artificial Sequence: Synthetic oligonucleotide
  Sense strand starting at position 3253 of SEQ ID NO: 1561682
agaccuugucuugaaaguc

SEQ ID NO: 1690444 - RNA, 19 nt, Artificial Sequence
  Description of Artificial Sequence: Synthetic oligonucleotide
  Antisense strand to SEQ ID NO: 1690443
gacuuucaagacaaggucu

SEQ ID NO: 1690445 - RNA, 19 nt, Artificial Sequence
  Description of Artificial Sequence: Synthetic oligonucleotide
  Sense strand starting at position 3370 of SEQ ID NO: 1561682
ccgccucuuucuggaauca

SEQ ID NO: 1690446 - RNA, 19 nt, Artificial Sequence
  Description of Artificial Sequence: Synthetic oligonucleotide
  Antisense strand to SEQ ID NO: 1690445
ugauuccagaaagaggcgg

SEQ ID NO: 1690447 - RNA, 19 nt, Artificial Sequence
  Description of Artificial Sequence: Synthetic oligonucleotide
  Sense strand starting at position 3386 of SEQ ID NO: 1561682
ucaggaaucugguuucgug

SEQ ID NO: 1690448 - RNA, 19 nt, Artificial Sequence
  Description of Artificial Sequence: Synthetic oligonucleotide
  Antisense strand to SEQ ID NO: 1690447
cacgaaaccagauuccuga

SEQ ID NO: 1690449 - RNA, 19 nt, Artificial Sequence
  Description of Artificial Sequence: Synthetic oligonucleotide
  Sense strand starting at position 3408 of SEQ ID NO: 1561682
uuugaaauaucagaagauc

SEQ ID NO: 1690450 - RNA, 19 nt, Artificial Sequence
  Description of Artificial Sequence: Synthetic oligonucleotide
  Antisense strand to SEQ ID NO: 1690449
gaucuucugauauuucaaa

SEQ ID NO: 1690451 - RNA, 19 nt, Artificial Sequence
  Description of Artificial Sequence: Synthetic oligonucleotide
  Sense strand starting at position 3507 of SEQ ID NO: 1561682
ccuguuucucacgguuagu

SEQ ID NO: 1690452 - RNA, 19 nt, Artificial Sequence
  Description of Artificial Sequence: Synthetic oligonucleotide
  Antisense strand to SEQ ID NO: 1690451
acuaaccgugagaaacagg

SEQ ID NO: 1690453 - RNA, 19 nt, Artificial Sequence
  Description of Artificial Sequence: Synthetic oligonucleotide
  Sense strand starting at position 3539 of SEQ ID NO: 1561682
ugugcagacauuugugauc

SEQ ID NO: 1690454 - RNA, 19 nt, Artificial Sequence
  Description of Artificial Sequence: Synthetic oligonucleotide
  Antisense strand to SEQ ID NO: 1690453
gaucacaaaugucugcaca

SEQ ID NO: 1690455 - RNA, 19 nt, Artificial Sequence
  Description of Artificial Sequence: Synthetic oligonucleotide
  Sense strand starting at position 326 of SEQ ID NO: 1561683
uguucaugucuuugagagg

SEQ ID NO: 1690456 - RNA, 19 nt, Artificial Sequence
  Description of Artificial Sequence: Synthetic oligonucleotide
  Antisense strand to SEQ ID NO: 1690455
ccucucaaagacaugaaca

SEQ ID NO: 1690457 - RNA, 19 nt, Artificial Sequence
  Description of Artificial Sequence: Synthetic oligonucleotide
  Sense strand starting at position 370 of SEQ ID NO: 1561683
acaauugcuggucacauaa

SEQ ID NO: 1690458 - RNA, 19 nt, Artificial Sequence
  Description of Artificial Sequence: Synthetic oligonucleotide
  Antisense strand to SEQ ID NO: 1690457
uuaugugaccagcaauugu

SEQ ID NO: 1690459 - RNA, 19 nt, Artificial Sequence
  Description of Artificial Sequence: Synthetic oligonucleotide
  Sense strand starting at position 485 of SEQ ID NO: 1561683
gaucuaauagaugguuucu

SEQ ID NO: 1690460 - RNA, 19 nt, Artificial Sequence
  Description of Artificial Sequence: Synthetic oligonucleotide
  Antisense strand to SEQ ID NO: 1690459
agaaaccaucuauuagauc

SEQ ID NO: 1690461 - RNA, 19 nt, Artificial Sequence
  Description of Artificial Sequence: Synthetic oligonucleotide
  Sense strand starting at position 487 of SEQ ID NO: 1561683
ucuaauagaugguuucuua

SEQ ID NO: 1690462 - RNA, 19 nt, Artificial Sequence
  Description of Artificial Sequence: Synthetic oligonucleotide
  Antisense strand to SEQ ID NO: 1690461
uaagaaaccaucuauuaga

SEQ ID NO: 1690463 - RNA, 19 nt, Artificial Sequence
  Description of Artificial Sequence: Synthetic oligonucleotide
  Sense strand starting at position 490 of SEQ ID NO: 1561683
aauagaugguuucuuagac

SEQ ID NO: 1690464 - RNA, 19 nt, Artificial Sequence
  Description of Artificial Sequence: Synthetic oligonucleotide
  Antisense strand to SEQ ID NO: 1690463
gucuaagaaaccaucuauu

SEQ ID NO: 1690465 - RNA, 19 nt, Artificial Sequence
  Description of Artificial Sequence: Synthetic oligonucleotide
  Sense strand starting at position 491 of SEQ ID NO: 1561683
auagaugguuucuuagacu

SEQ ID NO: 1690466 - RNA, 19 nt, Artificial Sequence
  Description of Artificial Sequence: Synthetic oligonucleotide
  Antisense strand to SEQ ID NO: 1690465
agucuaagaaaccaucuau

SEQ ID NO: 1690467 - RNA, 19 nt, Artificial Sequence
  Description of Artificial Sequence: Synthetic oligonucleotide
  Sense strand starting at position 988 of SEQ ID NO: 1561683
ucucgugcaguguugcaau

SEQ ID NO: 1690468 - RNA, 19 nt, Artificial Sequence
  Description of Artificial Sequence: Synthetic oligonucleotide
  Antisense strand to SEQ ID NO: 1690467
auugcaacacugcacgaga

SEQ ID NO: 1690469 - RNA, 19 nt, Artificial Sequence
  Description of Artificial Sequence: Synthetic oligonucleotide
  Sense strand starting at position 1457 of SEQ ID NO: 1561683
caguguuugccuucuguau

SEQ ID NO: 1690470 - RNA, 19 nt, Artificial Sequence
  Description of Artificial Sequence: Synthetic oligonucleotide
  Antisense strand to SEQ ID NO: 1690469
auacagaaggcaaacacug

SEQ ID NO: 1690471 - RNA, 19 nt, Artificial Sequence
  Description of Artificial Sequence: Synthetic oligonucleotide
  Sense strand starting at position 1493 of SEQ ID NO: 1561683
ggauguaguaacuagucau

SEQ ID NO: 1690472 - RNA, 19 nt, Artificial Sequence
  Description of Artificial Sequence: Synthetic oligonucleotide
  Antisense strand to SEQ ID NO: 1690471
augacuaguuacuacaucc

SEQ ID NO: 1690473 - RNA, 19 nt, Artificial Sequence
  Description of Artificial Sequence: Synthetic oligonucleotide
  Sense strand starting at position 1500 of SEQ ID NO: 1561683
guaacuagucauuggccaa

SEQ ID NO: 1690474 - RNA, 19 nt, Artificial Sequence
  Description of Artificial Sequence: Synthetic oligonucleotide
  Antisense strand to SEQ ID NO: 1690473
uuggccaaugacuaguuac

SEQ ID NO: 1690475 - RNA, 19 nt, Artificial Sequence
  Description of Artificial Sequence: Synthetic oligonucleotide
  Sense strand starting at position 1541 of SEQ ID NO: 1561683
ggugcugugauuugaaucu

SEQ ID NO: 1690476 - RNA, 19 nt, Artificial Sequence
  Description of Artificial Sequence: Synthetic oligonucleotide
  Antisense strand to SEQ ID NO: 1690475
agauucaaaucacagcacc

SEQ ID NO: 1690477 - RNA, 19 nt, Artificial Sequence
  Description of Artificial Sequence: Synthetic oligonucleotide
  Sense strand starting at position 1554 of SEQ ID NO: 1561683
gaaucuauguaguuugauu

SEQ ID NO: 1690478 - RNA, 19 nt, Artificial Sequence
  Description of Artificial Sequence: Synthetic oligonucleotide
  Antisense strand to SEQ ID NO: 1690477
aaucaaacuacauagauuc

SEQ ID NO: 1690479 - RNA, 19 nt, Artificial Sequence
  Description of Artificial Sequence: Synthetic oligonucleotide
  Sense strand starting at position 1595 of SEQ ID NO: 1561683
uggauuaccuagcucagaa

SEQ ID NO: 1690480 - RNA, 19 nt, Artificial Sequence
  Description of Artificial Sequence: Synthetic oligonucleotide
  Antisense strand to SEQ ID NO: 1690479
uucugagcuagguaaucca

SEQ ID NO: 1690481 - RNA, 19 nt, Artificial Sequence
  Description of Artificial Sequence: Synthetic oligonucleotide
  Sense strand starting at position 1777 of SEQ ID NO: 1561683
uguggucucagguaaaguc

SEQ ID NO: 1690482 - RNA, 19 nt, Artificial Sequence
  Description of Artificial Sequence: Synthetic oligonucleotide
  Antisense strand to SEQ ID NO: 1690481
gacuuuaccugagaccaca

SEQ ID NO: 1690483 - RNA, 19 nt, Artificial Sequence
  Description of Artificial Sequence: Synthetic oligonucleotide
  Sense strand starting at position 1784 of SEQ ID NO: 1561683
ucagguaaagucuagcaaa

SEQ ID NO: 1690484 - RNA, 19 nt, Artificial Sequence
  Description of Artificial Sequence: Synthetic oligonucleotide
  Antisense strand to SEQ ID NO: 1690483
uuugcuagacuuuaccuga

SEQ ID NO: 1690485 - RNA, 19 nt, Artificial Sequence
  Description of Artificial Sequence: Synthetic oligonucleotide
  Sense strand starting at position 1901 of SEQ ID NO: 1561683
ggcaguucuccguagaaau

SEQ ID NO: 1690486 - RNA, 19 nt, Artificial Sequence
  Description of Artificial Sequence: Synthetic oligonucleotide
  Antisense strand to SEQ ID NO: 1690485
auuucuacggagaacugcc

SEQ ID NO: 1690487 - RNA, 19 nt, Artificial Sequence
  Description of Artificial Sequence: Synthetic oligonucleotide
  Sense strand starting at position 1908 of SEQ ID NO: 1561683
cuccguagaaauggaaaua

SEQ ID NO: 1690488 - RNA, 19 nt, Artificial Sequence
  Description of Artificial Sequence: Synthetic oligonucleotide
  Antisense strand to SEQ ID NO: 1690487
uauuuccauuucuacggag

SEQ ID NO: 1690489 - RNA, 19 nt, Artificial Sequence
  Description of Artificial Sequence: Synthetic oligonucleotide
  Sense strand starting at position 2084 of SEQ ID NO: 1561683
ggagaauccuccuucucac

SEQ ID NO: 1690490 - RNA, 19 nt, Artificial Sequence
  Description of Artificial Sequence: Synthetic oligonucleotide
  Antisense strand to SEQ ID NO: 1690489
gugagaaggaggauucucc

SEQ ID NO: 1690491 - RNA, 19 nt, Artificial Sequence
  Description of Artificial Sequence: Synthetic oligonucleotide
  Sense strand starting at position 2102 of SEQ ID NO: 1561683
cugagaccagcauguugaa

SEQ ID NO: 1690492 - RNA, 19 nt, Artificial Sequence
  Description of Artificial Sequence: Synthetic oligonucleotide
  Antisense strand to SEQ ID NO: 1690491
uucaacaugcuggucucag

SEQ ID NO: 1690493 - RNA, 19 nt, Artificial Sequence
  Description of Artificial Sequence: Synthetic oligonucleotide
  Sense strand starting at position 2183 of SEQ ID NO: 1561683
agauguauuugguagagaa

SEQ ID NO: 1690494 - RNA, 19 nt, Artificial Sequence
  Description of Artificial Sequence: Synthetic oligonucleotide
  Antisense strand to SEQ ID NO: 1690493
uucucuaccaaauacaucu

SEQ ID NO: 1690495 - RNA, 19 nt, Artificial Sequence
  Description of Artificial Sequence: Synthetic oligonucleotide
  Sense strand starting at position 2245 of SEQ ID NO: 1561683
gcuuguucugaggaaacag

SEQ ID NO: 1690496 - RNA, 19 nt, Artificial Sequence
  Description of Artificial Sequence: Synthetic oligonucleotide
  Antisense strand to SEQ ID NO: 1690495
cuguuuccucagaacaagc

SEQ ID NO: 1690497 - RNA, 19 nt, Artificial Sequence
  Description of Artificial Sequence: Synthetic oligonucleotide
  Sense strand starting at position 2309 of SEQ ID NO: 1561683
aaaugagaauguccaguca

SEQ ID NO: 1690498 - RNA, 19 nt, Artificial Sequence
  Description of Artificial Sequence: Synthetic oligonucleotide
  Antisense strand to SEQ ID NO: 1690497
ugacuggacauucucauuu

SEQ ID NO: 1690499 - RNA, 19 nt, Artificial Sequence
  Description of Artificial Sequence: Synthetic oligonucleotide
  Sense strand starting at position 2346 of SEQ ID NO: 1561683
ccaauuugauuuggguuua

SEQ ID NO: 1690500 - RNA, 19 nt, Artificial Sequence
  Description of Artificial Sequence: Synthetic oligonucleotide
  Antisense strand to SEQ ID NO: 1690499
uaaacccaaaucaaauugg

SEQ ID NO: 1690501 - RNA, 19 nt, Artificial Sequence
  Description of Artificial Sequence: Synthetic oligonucleotide
  Sense strand starting at position 2347 of SEQ ID NO: 1561683
caauuugauuuggguuuaa

SEQ ID NO: 1690502 - RNA, 19 nt, Artificial Sequence
  Description of Artificial Sequence: Synthetic oligonucleotide
  Antisense strand to SEQ ID NO: 1690501
uuaaacccaaaucaaauug

SEQ ID NO: 1690503 - RNA, 19 nt, Artificial Sequence
  Description of Artificial Sequence: Synthetic oligonucleotide
  Sense strand starting at position 2410 of SEQ ID NO: 1561683
ggugacuccuucucuaucu

SEQ ID NO: 1690504 - RNA, 19 nt, Artificial Sequence
  Description of Artificial Sequence: Synthetic oligonucleotide
  Antisense strand to SEQ ID NO: 1690503
agauagagaaggagucacc

SEQ ID NO: 1690505 - RNA, 19 nt, Artificial Sequence
  Description of Artificial Sequence: Synthetic oligonucleotide
  Sense strand starting at position 2558 of SEQ ID NO: 1561683
ggagauggccacugucaca

SEQ ID NO: 1690506 - RNA, 19 nt, Artificial Sequence
  Description of Artificial Sequence: Synthetic oligonucleotide
  Antisense strand to SEQ ID NO: 1690505
ugugacaguggccaucucc

SEQ ID NO: 1690507 - RNA, 19 nt, Artificial Sequence
  Description of Artificial Sequence: Synthetic oligonucleotide
  Sense strand starting at position 2603 of SEQ ID NO: 1561683
ggaugcaucucuccucaua

SEQ ID NO: 1690508 - RNA, 19 nt, Artificial Sequence
  Description of Artificial Sequence: Synthetic oligonucleotide
  Antisense strand to SEQ ID NO: 1690507
uaugaggagagaugcaucc

SEQ ID NO: 1690509 - RNA, 19 nt, Artificial Sequence
  Description of Artificial Sequence: Synthetic oligonucleotide
  Sense strand starting at position 2801 of SEQ ID NO: 1561683
uccgaaaguccugggaaug

SEQ ID NO: 1690510 - RNA, 19 nt, Artificial Sequence
  Description of Artificial Sequence: Synthetic oligonucleotide
  Antisense strand to SEQ ID NO: 1690509
cauucccaggacuuucgga

SEQ ID NO: 1690511 - RNA, 19 nt, Artificial Sequence
  Description of Artificial Sequence: Synthetic oligonucleotide
  Sense strand starting at position 2802 of SEQ ID NO: 1561683
ccgaaaguccugggaaugu

SEQ ID NO: 1690512 - RNA, 19 nt, Artificial Sequence
  Description of Artificial Sequence: Synthetic oligonucleotide
  Antisense strand to SEQ ID NO: 1690511
acauucccaggacuuucgg

SEQ ID NO: 1690513 - RNA, 19 nt, Artificial Sequence
  Description of Artificial Sequence: Synthetic oligonucleotide
  Sense strand starting at position 2813 of SEQ ID NO: 1561683
gggaauguggcuuaccuua

SEQ ID NO: 1690514 - RNA, 19 nt, Artificial Sequence
  Description of Artificial Sequence: Synthetic oligonucleotide
  Antisense strand to SEQ ID NO: 1690513
uaagguaagccacauuccc

SEQ ID NO: 1690515 - RNA, 19 nt, Artificial Sequence
  Description of Artificial Sequence: Synthetic oligonucleotide
  Sense strand starting at position 2894 of SEQ ID NO: 1561683
uguccaugcccacaugaga

SEQ ID NO: 1690516 - RNA, 19 nt, Artificial Sequence
  Description of Artificial Sequence: Synthetic oligonucleotide
  Antisense strand to SEQ ID NO: 1690515
ucucaugugggcauggaca

SEQ ID NO: 1690517 - RNA, 19 nt, Artificial Sequence
  Description of Artificial Sequence: Synthetic oligonucleotide
  Sense strand starting at position 3039 of SEQ ID NO: 1561683
cuucccauccuaggagaau

SEQ ID NO: 1690518 - RNA, 19 nt, Artificial Sequence
  Description of Artificial Sequence: Synthetic oligonucleotide
  Antisense strand to SEQ ID NO: 1690517
auucuccuaggaugggaag

SEQ ID NO: 1690519 - RNA, 19 nt, Artificial Sequence
  Description of Artificial Sequence: Synthetic oligonucleotide
  Sense strand starting at position 3051 of SEQ ID NO: 1561683
ggagaaugugguggguaua

SEQ ID NO: 1690520 - RNA, 19 nt, Artificial Sequence
  Description of Artificial Sequence: Synthetic oligonucleotide
  Antisense strand to SEQ ID NO: 1690519
uauacccaccacauucucc

SEQ ID NO: 1690521 - RNA, 19 nt, Artificial Sequence
  Description of Artificial Sequence: Synthetic oligonucleotide
  Sense strand starting at position 3179 of SEQ ID NO: 1561683
uuuauuacaggccagugau

SEQ ID NO: 1690522 - RNA, 19 nt, Artificial Sequence
  Description of Artificial Sequence: Synthetic oligonucleotide
  Antisense strand to SEQ ID NO: 1690521
aucacuggccuguaauaaa

SEQ ID NO: 1690523 - RNA, 19 nt, Artificial Sequence
  Description of Artificial Sequence: Synthetic oligonucleotide
  Sense strand starting at position 3525 of SEQ ID NO: 1561683
gagaguuggacugggcuuu

SEQ ID NO: 1690524 - RNA, 19 nt, Artificial Sequence
  Description of Artificial Sequence: Synthetic oligonucleotide
  Antisense strand to SEQ ID NO: 1690523
aaagcccaguccaacucuc

SEQ ID NO: 1690525 - RNA, 19 nt, Artificial Sequence
  Description of Artificial Sequence: Synthetic oligonucleotide
  Sense strand starting at position 3675 of SEQ ID NO: 1561683
gugagggcugagugaagua

SEQ ID NO: 1690526 - RNA, 19 nt, Artificial Sequence
  Description of Artificial Sequence: Synthetic oligonucleotide
  Antisense strand to SEQ ID NO: 1690525
uacuucacucagcccucac

SEQ ID NO: 1690527 - RNA, 19 nt, Artificial Sequence
  Description of Artificial Sequence: Synthetic oligonucleotide
  Sense strand starting at position 3680 of SEQ ID NO: 1561683
ggcugagugaaguagugaa

SEQ ID NO: 1690528 - RNA, 19 nt, Artificial Sequence
  Description of Artificial Sequence: Synthetic oligonucleotide
  Antisense strand to SEQ ID NO: 1690527
uucacuacuucacucagcc

SEQ ID NO: 1690529 - RNA, 19 nt, Artificial Sequence
  Description of Artificial Sequence: Synthetic oligonucleotide
  Sense strand starting at position 3829 of SEQ ID NO: 1561683
auugcaucucuguaagguu

SEQ ID NO: 1690530 - RNA, 19 nt, Artificial Sequence
  Description of Artificial Sequence: Synthetic oligonucleotide
  Antisense strand to SEQ ID NO: 1690529
aaccuuacagagaugcaau

SEQ ID NO: 1690531 - RNA, 19 nt, Artificial Sequence
  Description of Artificial Sequence: Synthetic oligonucleotide
  Sense strand starting at position 3842 of SEQ ID NO: 1561683
aagguuaguuaagugaaua

SEQ ID NO: 1690532 - RNA, 19 nt, Artificial Sequence
  Description of Artificial Sequence: Synthetic oligonucleotide
  Antisense strand to SEQ ID NO: 1690531
uauucacuuaacuaaccuu

SEQ ID NO: 1690533 - RNA, 19 nt, Artificial Sequence
  Description of Artificial Sequence: Synthetic oligonucleotide
  Sense strand starting at position 3843 of SEQ ID NO: 1561683
agguuaguuaagugaauac

SEQ ID NO: 1690534 - RNA, 19 nt, Artificial Sequence
  Description of Artificial Sequence: Synthetic oligonucleotide
  Antisense strand to SEQ ID NO: 1690533
guauucacuuaacuaaccu

SEQ ID NO: 1690535 - RNA, 19 nt, Artificial Sequence
  Description of Artificial Sequence: Synthetic oligonucleotide
  Sense strand starting at position 13 of SEQ ID NO: 1561684
ggugauacugcaugacuuu

SEQ ID NO: 1690536 - RNA, 19 nt, Artificial Sequence
  Description of Artificial Sequence: Synthetic oligonucleotide
  Antisense strand to SEQ ID NO: 1690535
aaagucaugcaguaucacc

SEQ ID NO: 1690537 - RNA, 19 nt, Artificial Sequence
  Description of Artificial Sequence: Synthetic oligonucleotide
  Sense strand starting at position 134 of SEQ ID NO: 1561684
ccggauucccagugaggaa

SEQ ID NO: 1690538 - RNA, 19 nt, Artificial Sequence
  Description of Artificial Sequence: Synthetic oligonucleotide
  Antisense strand to SEQ ID NO: 1690537
uuccucacugggaauccgg

SEQ ID NO: 1690539 - RNA, 19 nt, Artificial Sequence
  Description of Artificial Sequence: Synthetic oligonucleotide
  Sense strand starting at position 135 of SEQ ID NO: 1561684
cggauucccagugaggaau

SEQ ID NO: 1690540 - RNA, 19 nt, Artificial Sequence
  Description of Artificial Sequence: Synthetic oligonucleotide
  Antisense strand to SEQ ID NO: 1690539
auuccucacugggaauccg

SEQ ID NO: 1690541 - RNA, 19 nt, Artificial Sequence
  Description of Artificial Sequence: Synthetic oligonucleotide
  Sense strand starting at position 197 of SEQ ID NO: 1561684
gggagucccugagcaagaa

SEQ ID NO: 1690542 - RNA, 19 nt, Artificial Sequence
  Description of Artificial Sequence: Synthetic oligonucleotide
  Antisense strand to SEQ ID NO: 1690541
uucuugcucagggacuccc

SEQ ID NO: 1690543 - RNA, 19 nt, Artificial Sequence
  Description of Artificial Sequence: Synthetic oligonucleotide
  Sense strand starting at position 294 of SEQ ID NO: 1561684
cucauuaugcaguauuaga

SEQ ID NO: 1690544 - RNA, 19 nt, Artificial Sequence
  Description of Artificial Sequence: Synthetic oligonucleotide
  Antisense strand to SEQ ID NO: 1690543
ucuaauacugcauaaugag

SEQ ID NO: 1690545 - RNA, 19 nt, Artificial Sequence
  Description of Artificial Sequence: Synthetic oligonucleotide
  Sense strand starting at position 391 of SEQ ID NO: 1561684
gguugugaccuuggauaag

SEQ ID NO: 1690546 - RNA, 19 nt, Artificial Sequence
  Description of Artificial Sequence: Synthetic oligonucleotide
  Antisense strand to SEQ ID NO: 1690545
cuuauccaaggucacaacc

SEQ ID NO: 1690547 - RNA, 19 nt, Artificial Sequence
  Description of Artificial Sequence: Synthetic oligonucleotide
  Sense strand starting at position 401 of SEQ ID NO: 1561684
uuggauaagugcucugaug

SEQ ID NO: 1690548 - RNA, 19 nt, Artificial Sequence
  Description of Artificial Sequence: Synthetic oligonucleotide
  Antisense strand to SEQ ID NO: 1690547
caucagagcacuuauccaa

SEQ ID NO: 1690549 - RNA, 19 nt, Artificial Sequence
  Description of Artificial Sequence: Synthetic oligonucleotide
  Sense strand starting at position 519 of SEQ ID NO: 1561684
cggguacucagucaauauu

SEQ ID NO: 1690550 - RNA, 19 nt, Artificial Sequence
  Description of Artificial Sequence: Synthetic oligonucleotide
  Antisense strand to SEQ ID NO: 1690549
aauauugacugaguacccg

SEQ ID NO: 1690551 - RNA, 19 nt, Artificial Sequence
  Description of Artificial Sequence: Synthetic oligonucleotide
  Sense strand starting at position 522 of SEQ ID NO: 1561684
guacucagucaauauugau

SEQ ID NO: 1690552 - RNA, 19 nt, Artificial Sequence
  Description of Artificial Sequence: Synthetic oligonucleotide
  Antisense strand to SEQ ID NO: 1690551
aucaauauugacugaguac

SEQ ID NO: 1690553 - RNA, 19 nt, Artificial Sequence
  Description of Artificial Sequence: Synthetic oligonucleotide
  Sense strand starting at position 529 of SEQ ID NO: 1561684
gucaauauugauggaguaa

SEQ ID NO: 1690554 - RNA, 19 nt, Artificial Sequence
  Description of Artificial Sequence: Synthetic oligonucleotide
  Antisense strand to SEQ ID NO: 1690553
uuacuccaucaauauugac

SEQ ID NO: 1690555 - RNA, 19 nt, Artificial Sequence
  Description of Artificial Sequence: Synthetic oligonucleotide
  Sense strand starting at position 540 of SEQ ID NO: 1561684
uggaguaaauaacugcuua

SEQ ID NO: 1690556 - RNA, 19 nt, Artificial Sequence
  Description of Artificial Sequence: Synthetic oligonucleotide
  Antisense strand to SEQ ID NO: 1690555
uaagcaguuauuuacucca

SEQ ID NO: 1690557 - RNA, 19 nt, Artificial Sequence
  Description of Artificial Sequence: Synthetic oligonucleotide
  Sense strand starting at position 663 of SEQ ID NO: 1561684
acaaauuauggcuguuaga

SEQ ID NO: 1690558 - RNA, 19 nt, Artificial Sequence
  Description of Artificial Sequence: Synthetic oligonucleotide
  Antisense strand to SEQ ID NO: 1690557
ucuaacagccauaauuugu

SEQ ID NO: 1690559 - RNA, 19 nt, Artificial Sequence
  Description of Artificial Sequence: Synthetic oligonucleotide
  Sense strand starting at position 1041 of SEQ ID NO: 1561684
cuuuguagucuugauugau

SEQ ID NO: 1690560 - RNA, 19 nt, Artificial Sequence
  Description of Artificial Sequence: Synthetic oligonucleotide
  Antisense strand to SEQ ID NO: 1690559
aucaaucaagacuacaaag

SEQ ID NO: 1690561 - RNA, 19 nt, Artificial Sequence
  Description of Artificial Sequence: Synthetic oligonucleotide
  Sense strand starting at position 1170 of SEQ ID NO: 1561684
cuuugagcaggcugauaaa

SEQ ID NO: 1690562 - RNA, 19 nt, Artificial Sequence
  Description of Artificial Sequence: Synthetic oligonucleotide
  Antisense strand to SEQ ID NO: 1690561
uuuaucagccugcucaaag

SEQ ID NO: 1690563 - RNA, 19 nt, Artificial Sequence
  Description of Artificial Sequence: Synthetic oligonucleotide
  Sense strand starting at position 1631 of SEQ ID NO: 1561684
ccacacugucucuguaaca

SEQ ID NO: 1690564 - RNA, 19 nt, Artificial Sequence
  Description of Artificial Sequence: Synthetic oligonucleotide
  Antisense strand to SEQ ID NO: 1690563
uguuacagagacagugugg

SEQ ID NO: 1690565 - RNA, 19 nt, Artificial Sequence
  Description of Artificial Sequence: Synthetic oligonucleotide
  Sense strand starting at position 1655 of SEQ ID NO: 1561684
gcauuuguugcacaucuuu

SEQ ID NO: 1690566 - RNA, 19 nt, Artificial Sequence
  Description of Artificial Sequence: Synthetic oligonucleotide
  Antisense strand to SEQ ID NO: 1690565
aaagaugugcaacaaaugc

SEQ ID NO: 1690567 - RNA, 19 nt, Artificial Sequence
  Description of Artificial Sequence: Synthetic oligonucleotide
  Sense strand starting at position 1762 of SEQ ID NO: 1561684
ccagauuugugucccaucu

SEQ ID NO: 1690568 - RNA, 19 nt, Artificial Sequence
  Description of Artificial Sequence: Synthetic oligonucleotide
  Antisense strand to SEQ ID NO: 1690567
agaugggacacaaaucugg

SEQ ID NO: 1690569 - RNA, 19 nt, Artificial Sequence
  Description of Artificial Sequence: Synthetic oligonucleotide
  Sense strand starting at position 1783 of SEQ ID NO: 1561684
cugucucuccagcaugaaa

SEQ ID NO: 1690570 - RNA, 19 nt, Artificial Sequence
  Description of Artificial Sequence: Synthetic oligonucleotide
  Antisense strand to SEQ ID NO: 1690569
uuucaugcuggagagacag

SEQ ID NO: 1690571 - RNA, 19 nt, Artificial Sequence
  Description of Artificial Sequence: Synthetic oligonucleotide
  Sense strand starting at position 1785 of SEQ ID NO: 1561684
gucucuccagcaugaaacu

SEQ ID NO: 1690572 - RNA, 19 nt, Artificial Sequence
  Description of Artificial Sequence: Synthetic oligonucleotide
  Antisense strand to SEQ ID NO: 1690571
aguuucaugcuggagagac

SEQ ID NO: 1690573 - RNA, 19 nt, Artificial Sequence
  Description of Artificial Sequence: Synthetic oligonucleotide
  Sense strand starting at position 1821 of SEQ ID NO: 1561684
cagcauguggcuuaaauac

SEQ ID NO: 1690574 - RNA, 19 nt, Artificial Sequence
  Description of Artificial Sequence: Synthetic oligonucleotide
  Antisense strand to SEQ ID NO: 1690573
guauuuaagccacaugcug

SEQ ID NO: 1690575 - RNA, 19 nt, Artificial Sequence
  Description of Artificial Sequence: Synthetic oligonucleotide
  Sense strand starting at position 1870 of SEQ ID NO: 1561684
gaaggcagguucuuuauaa

SEQ ID NO: 1690576 - RNA, 19 nt, Artificial Sequence
  Description of Artificial Sequence: Synthetic oligonucleotide
  Antisense strand to SEQ ID NO: 1690575
uuauaaagaaccugccuuc

SEQ ID NO: 1690577 - RNA, 19 nt, Artificial Sequence
  Description of Artificial Sequence: Synthetic oligonucleotide
  Sense strand starting at position 1871 of SEQ ID NO: 1561684
aaggcagguucuuuauaaa

SEQ ID NO: 1690578 - RNA, 19 nt, Artificial Sequence
  Description of Artificial Sequence: Synthetic oligonucleotide
  Antisense strand to SEQ ID NO: 1690577
uuuauaaagaaccugccuu

SEQ ID NO: 1690579 - RNA, 19 nt, Artificial Sequence
  Description of Artificial Sequence: Synthetic oligonucleotide
  Sense strand starting at position 2413 of SEQ ID NO: 1561684
agacauguucuccaaagug

SEQ ID NO: 1690580 - RNA, 19 nt, Artificial Sequence
  Description of Artificial Sequence: Synthetic oligonucleotide
  Antisense strand to SEQ ID NO: 1690579
cacuuuggagaacaugucu

SEQ ID NO: 1690581 - RNA, 19 nt, Artificial Sequence
  Description of Artificial Sequence: Synthetic oligonucleotide
  Sense strand starting at position 2442 of SEQ ID NO: 1561684
gucacuugucccgaaagaa

SEQ ID NO: 1690582 - RNA, 19 nt, Artificial Sequence
  Description of Artificial Sequence: Synthetic oligonucleotide
  Antisense strand to SEQ ID NO: 1690581
uucuuucgggacaagugac

SEQ ID NO: 1690583 - RNA, 19 nt, Artificial Sequence
  Description of Artificial Sequence: Synthetic oligonucleotide
  Sense strand starting at position 2473 of SEQ ID NO: 1561684
agacuuccugauugauaac

SEQ ID NO: 1690584 - RNA, 19 nt, Artificial Sequence
  Description of Artificial Sequence: Synthetic oligonucleotide
  Antisense strand to SEQ ID NO: 1690583
guuaucaaucaggaagucu

SEQ ID NO: 1690585 - RNA, 19 nt, Artificial Sequence
  Description of Artificial Sequence: Synthetic oligonucleotide
  Sense strand starting at position 2515 of SEQ ID NO: 1561684
gcacuugaugucugaggga

SEQ ID NO: 1690586 - RNA, 19 nt, Artificial Sequence
  Description of Artificial Sequence: Synthetic oligonucleotide
  Antisense strand to SEQ ID NO: 1690585
ucccucagacaucaagugc

SEQ ID NO: 1690587 - RNA, 19 nt, Artificial Sequence
  Description of Artificial Sequence: Synthetic oligonucleotide
  Sense strand starting at position 2655 of SEQ ID NO: 1561684
gcgauugaagcaggagauu

SEQ ID NO: 1690588 - RNA, 19 nt, Artificial Sequence
  Description of Artificial Sequence: Synthetic oligonucleotide
  Antisense strand to SEQ ID NO: 1690587
aaucuccugcuucaaucgc

SEQ ID NO: 1690589 - RNA, 19 nt, Artificial Sequence
  Description of Artificial Sequence: Synthetic oligonucleotide
  Sense strand starting at position 2669 of SEQ ID NO: 1561684
agauuagauuugggaccuu

SEQ ID NO: 1690590 - RNA, 19 nt, Artificial Sequence
  Description of Artificial Sequence: Synthetic oligonucleotide
  Antisense strand to SEQ ID NO: 1690589
aaggucccaaaucuaaucu

SEQ ID NO: 1690591 - RNA, 19 nt, Artificial Sequence
  Description of Artificial Sequence: Synthetic oligonucleotide
  Sense strand starting at position 2841 of SEQ ID NO: 1561684
aauauaguacuugggugaa

SEQ ID NO: 1690592 - RNA, 19 nt, Artificial Sequence
  Description of Artificial Sequence: Synthetic oligonucleotide
  Antisense strand to SEQ ID NO: 1690591
uucacccaaguacuauauu

SEQ ID NO: 1690593 - RNA, 19 nt, Artificial Sequence
  Description of Artificial Sequence: Synthetic oligonucleotide
  Sense strand starting at position 2843 of SEQ ID NO: 1561684
uauaguacuugggugaaua

SEQ ID NO: 1690594 - RNA, 19 nt, Artificial Sequence
  Description of Artificial Sequence: Synthetic oligonucleotide
  Antisense strand to SEQ ID NO: 1690593
uauucacccaaguacuaua

SEQ ID NO: 1690595 - RNA, 19 nt, Artificial Sequence
  Description of Artificial Sequence: Synthetic oligonucleotide
  Sense strand starting at position 2844 of SEQ ID NO: 1561684
auaguacuugggugaauau

SEQ ID NO: 1690596 - RNA, 19 nt, Artificial Sequence
  Description of Artificial Sequence: Synthetic oligonucleotide
  Antisense strand to SEQ ID NO: 1690595
auauucacccaaguacuau

SEQ ID NO: 1690597 - RNA, 19 nt, Artificial Sequence
  Description of Artificial Sequence: Synthetic oligonucleotide
  Sense strand starting at position 2997 of SEQ ID NO: 1561684
uccugagugccaugaagag

SEQ ID NO: 1690598 - RNA, 19 nt, Artificial Sequence
  Description of Artificial Sequence: Synthetic oligonucleotide
  Antisense strand to SEQ ID NO: 1690597
cucuucauggcacucagga

SEQ ID NO: 1690599 - RNA, 19 nt, Artificial Sequence
  Description of Artificial Sequence: Synthetic oligonucleotide
  Sense strand starting at position 3009 of SEQ ID NO: 1561684
ugaagagccuugguaauac

SEQ ID NO: 1690600 - RNA, 19 nt, Artificial Sequence
  Description of Artificial Sequence: Synthetic oligonucleotide
  Antisense strand to SEQ ID NO: 1690599
guauuaccaaggcucuuca

SEQ ID NO: 1690601 - RNA, 19 nt, Artificial Sequence
  Description of Artificial Sequence: Synthetic oligonucleotide
  Sense strand starting at position 3021 of SEQ ID NO: 1561684
guaauacaguaauucuguu

SEQ ID NO: 1690602 - RNA, 19 nt, Artificial Sequence
  Description of Artificial Sequence: Synthetic oligonucleotide
  Antisense strand to SEQ ID NO: 1690601
aacagaauuacuguauuac

SEQ ID NO: 1690603 - RNA, 19 nt, Artificial Sequence
  Description of Artificial Sequence: Synthetic oligonucleotide
  Sense strand starting at position 3220 of SEQ ID NO: 1561684
ugaaauauacaaugcuaug

SEQ ID NO: 1690604 - RNA, 19 nt, Artificial Sequence
  Description of Artificial Sequence: Synthetic oligonucleotide
  Antisense strand to SEQ ID NO: 1690603
cauagcauuguauauuuca

SEQ ID NO: 1690605 - RNA, 19 nt, Artificial Sequence
  Description of Artificial Sequence: Synthetic oligonucleotide
  Sense strand starting at position 3287 of SEQ ID NO: 1561684
cucugccuggcugaauauu

SEQ ID NO: 1690606 - RNA, 19 nt, Artificial Sequence
  Description of Artificial Sequence: Synthetic oligonucleotide
  Antisense strand to SEQ ID NO: 1690605
aauauucagccaggcagag

SEQ ID NO: 1690607 - RNA, 19 nt, Artificial Sequence
  Description of Artificial Sequence: Synthetic oligonucleotide
  Sense strand starting at position 3466 of SEQ ID NO: 1561684
ucugauuccugcuuugaag

SEQ ID NO: 1690608 - RNA, 19 nt, Artificial Sequence
  Description of Artificial Sequence: Synthetic oligonucleotide
  Antisense strand to SEQ ID NO: 1690607
cuucaaagcaggaaucaga

SEQ ID NO: 1690609 - RNA, 19 nt, Artificial Sequence
  Description of Artificial Sequence: Synthetic oligonucleotide
  Sense strand starting at position 3468 of SEQ ID NO: 1561684
ugauuccugcuuugaagag

SEQ ID NO: 1690610 - RNA, 19 nt, Artificial Sequence
  Description of Artificial Sequence: Synthetic oligonucleotide
  Antisense strand to SEQ ID NO: 1690609
cucuucaaagcaggaauca

SEQ ID NO: 1690611 - RNA, 19 nt, Artificial Sequence
  Description of Artificial Sequence: Synthetic oligonucleotide
  Sense strand starting at position 3876 of SEQ ID NO: 1561684
cuggaaagacuguacguaa

SEQ ID NO: 1690612 - RNA, 19 nt, Artificial Sequence
  Description of Artificial Sequence: Synthetic oligonucleotide
  Antisense strand to SEQ ID NO: 1690611
uuacguacagucuuuccag

SEQ ID NO: 1690613 - RNA, 19 nt, Artificial Sequence
  Description of Artificial Sequence: Synthetic oligonucleotide
  Sense strand starting at position 3879 of SEQ ID NO: 1561684
gaaagacuguacguaaacu

SEQ ID NO: 1690614 - RNA, 19 nt, Artificial Sequence
  Description of Artificial Sequence: Synthetic oligonucleotide
  Antisense strand to SEQ ID NO: 1690613
aguuuacguacagucuuuc

SEQ ID NO: 1690615 - RNA, 19 nt, Artificial Sequence
  Description of Artificial Sequence: Synthetic oligonucleotide
  Sense strand starting at position 59 of SEQ ID NO: 1561685
gcaucuaaggcagagucua

SEQ ID NO: 1690616 - RNA, 19 nt, Artificial Sequence
  Description of Artificial Sequence: Synthetic oligonucleotide
  Antisense strand to SEQ ID NO: 1690615
uagacucugccuuagaugc

SEQ ID NO: 1690617 - RNA, 19 nt, Artificial Sequence
  Description of Artificial Sequence: Synthetic oligonucleotide
  Sense strand starting at position 466 of SEQ ID NO: 1561685
ggcugacagucacuuaaau

SEQ ID NO: 1690618 - RNA, 19 nt, Artificial Sequence
  Description of Artificial Sequence: Synthetic oligonucleotide
  Antisense strand to SEQ ID NO: 1690617
auuuaagugacugucagcc

SEQ ID NO: 1690619 - RNA, 19 nt, Artificial Sequence
  Description of Artificial Sequence: Synthetic oligonucleotide
  Sense strand starting at position 785 of SEQ ID NO: 1561685
uucuauuuaugagagugau

SEQ ID NO: 1690620 - RNA, 19 nt, Artificial Sequence
  Description of Artificial Sequence: Synthetic oligonucleotide
  Antisense strand to SEQ ID NO: 1690619
aucacucucauaaauagaa

SEQ ID NO: 1690621 - RNA, 19 nt, Artificial Sequence
  Description of Artificial Sequence: Synthetic oligonucleotide
  Sense strand starting at position 793 of SEQ ID NO: 1561685
augagagugauaugaaguu

SEQ ID NO: 1690622 - RNA, 19 nt, Artificial Sequence
  Description of Artificial Sequence: Synthetic oligonucleotide
  Antisense strand to SEQ ID NO: 1690621
aacuucauaucacucucau

SEQ ID NO: 1690623 - RNA, 19 nt, Artificial Sequence
  Description of Artificial Sequence: Synthetic oligonucleotide
  Sense strand starting at position 918 of SEQ ID NO: 1561685
ugaaguuuagaagguaaac

SEQ ID NO: 1690624 - RNA, 19 nt, Artificial Sequence
  Description of Artificial Sequence: Synthetic oligonucleotide
  Antisense strand to SEQ ID NO: 1690623
guuuaccuucuaaacuuca

SEQ ID NO: 1690625 - RNA, 19 nt, Artificial Sequence
  Description of Artificial Sequence: Synthetic oligonucleotide
  Sense strand starting at position 1014 of SEQ ID NO: 1561685
ugcaauaauacguagcaga

SEQ ID NO: 1690626 - RNA, 19 nt, Artificial Sequence
  Description of Artificial Sequence: Synthetic oligonucleotide
  Antisense strand to SEQ ID NO: 1690625
ucugcuacguauuauugca

SEQ ID NO: 1690627 - RNA, 19 nt, Artificial Sequence
  Description of Artificial Sequence: Synthetic oligonucleotide
  Sense strand starting at position 1091 of SEQ ID NO: 1561685
auggauguaucuuuaaagu

SEQ ID NO: 1690628 - RNA, 19 nt, Artificial Sequence
  Description of Artificial Sequence: Synthetic oligonucleotide
  Antisense strand to SEQ ID NO: 1690627
acuuuaaagauacauccau

SEQ ID NO: 1690629 - RNA, 19 nt, Artificial Sequence
  Description of Artificial Sequence: Synthetic oligonucleotide
  Sense strand starting at position 1591 of SEQ ID NO: 1561685
ugaacauguuaguuggauu

SEQ ID NO: 1690630 - RNA, 19 nt, Artificial Sequence
  Description of Artificial Sequence: Synthetic oligonucleotide
  Antisense strand to SEQ ID NO: 1690629
aauccaacuaacauguuca

SEQ ID NO: 1690631 - RNA, 19 nt, Artificial Sequence
  Description of Artificial Sequence: Synthetic oligonucleotide
  Sense strand starting at position 2227 of SEQ ID NO: 1561685
ccuagacuucuuugaaagu

SEQ ID NO: 1690632 - RNA, 19 nt, Artificial Sequence
  Description of Artificial Sequence: Synthetic oligonucleotide
  Antisense strand to SEQ ID NO: 1690631
acuuucaaagaagucuagg

SEQ ID NO: 1690633 - RNA, 19 nt, Artificial Sequence
  Description of Artificial Sequence: Synthetic oligonucleotide
  Sense strand starting at position 2243 of SEQ ID NO: 1561685
aguuuaaauccgcagugga

SEQ ID NO: 1690634 - RNA, 19 nt, Artificial Sequence
  Description of Artificial Sequence: Synthetic oligonucleotide
  Antisense strand to SEQ ID NO: 1690633
uccacugcggauuuaaacu

SEQ ID NO: 1690635 - RNA, 19 nt, Artificial Sequence
  Description of Artificial Sequence: Synthetic oligonucleotide
  Sense strand starting at position 2295 of SEQ ID NO: 1561685
guguacagagcuuaauuga

SEQ ID NO: 1690636 - RNA, 19 nt, Artificial Sequence
  Description of Artificial Sequence: Synthetic oligonucleotide
  Antisense strand to SEQ ID NO: 1690635
ucaauuaagcucuguacac

SEQ ID NO: 1690637 - RNA, 19 nt, Artificial Sequence
  Description of Artificial Sequence: Synthetic oligonucleotide
  Sense strand starting at position 2298 of SEQ ID NO: 1561685
uacagagcuuaauugagua

SEQ ID NO: 1690638 - RNA, 19 nt, Artificial Sequence
  Description of Artificial Sequence: Synthetic oligonucleotide
  Antisense strand to SEQ ID NO: 1690637
uacucaauuaagcucugua

SEQ ID NO: 1690639 - RNA, 19 nt, Artificial Sequence
  Description of Artificial Sequence: Synthetic oligonucleotide
  Sense strand starting at position 2303 of SEQ ID NO: 1561685
agcuuaauugaguauguca

SEQ ID NO: 1690640 - RNA, 19 nt, Artificial Sequence
  Description of Artificial Sequence: Synthetic oligonucleotide
  Antisense strand to SEQ ID NO: 1690639
ugacauacucaauuaagcu

SEQ ID NO: 1690641 - RNA, 19 nt, Artificial Sequence
  Description of Artificial Sequence: Synthetic oligonucleotide
  Sense strand starting at position 2305 of SEQ ID NO: 1561685
cuuaauugaguaugucaaa

SEQ ID NO: 1690642 - RNA, 19 nt, Artificial Sequence
  Description of Artificial Sequence: Synthetic oligonucleotide
  Antisense strand to SEQ ID NO: 1690641
uuugacauacucaauuaag

SEQ ID NO: 1690643 - RNA, 19 nt, Artificial Sequence
  Description of Artificial Sequence: Synthetic oligonucleotide
  Sense strand starting at position 2306 of SEQ ID NO: 1561685
uuaauugaguaugucaaag

SEQ ID NO: 1690644 - RNA, 19 nt, Artificial Sequence
  Description of Artificial Sequence: Synthetic oligonucleotide
  Antisense strand to SEQ ID NO: 1690643
cuuugacauacucaauuaa

SEQ ID NO: 1690645 - RNA, 19 nt, Artificial Sequence
  Description of Artificial Sequence: Synthetic oligonucleotide
  Sense strand starting at position 2340 of SEQ ID NO: 1561685
aaccgucaccuggagauua

SEQ ID NO: 1690646 - RNA, 19 nt, Artificial Sequence
  Description of Artificial Sequence: Synthetic oligonucleotide
  Antisense strand to SEQ ID NO: 1690645
uaaucuccaggugacgguu

SEQ ID NO: 1690647 - RNA, 19 nt, Artificial Sequence
  Description of Artificial Sequence: Synthetic oligonucleotide
  Sense strand starting at position 2342 of SEQ ID NO: 1561685
ccgucaccuggagauuaga

SEQ ID NO: 1690648 - RNA, 19 nt, Artificial Sequence
  Description of Artificial Sequence: Synthetic oligonucleotide
  Antisense strand to SEQ ID NO: 1690647
ucuaaucuccaggugacgg

SEQ ID NO: 1690649 - RNA, 19 nt, Artificial Sequence
  Description of Artificial Sequence: Synthetic oligonucleotide
  Sense strand starting at position 2423 of SEQ ID NO: 1561685
ugacuucccucugcaaaga

SEQ ID NO: 1690650 - RNA, 19 nt, Artificial Sequence
  Description of Artificial Sequence: Synthetic oligonucleotide
  Antisense strand to SEQ ID NO: 1690649
ucuuugcagagggaaguca

SEQ ID NO: 1690651 - RNA, 19 nt, Artificial Sequence
  Description of Artificial Sequence: Synthetic oligonucleotide
  Sense strand starting at position 2442 of SEQ ID NO: 1561685
uuagcuuugcugugauuug

SEQ ID NO: 1690652 - RNA, 19 nt, Artificial Sequence
  Description of Artificial Sequence: Synthetic oligonucleotide
  Antisense strand to SEQ ID NO: 1690651
caaaucacagcaaagcuaa

SEQ ID NO: 1690653 - RNA, 19 nt, Artificial Sequence
  Description of Artificial Sequence: Synthetic oligonucleotide
  Sense strand starting at position 2508 of SEQ ID NO: 1561685
ugccuuugcccagugucau

SEQ ID NO: 1690654 - RNA, 19 nt, Artificial Sequence
  Description of Artificial Sequence: Synthetic oligonucleotide
  Antisense strand to SEQ ID NO: 1690653
augacacugggcaaaggca

SEQ ID NO: 1690655 - RNA, 19 nt, Artificial Sequence
  Description of Artificial Sequence: Synthetic oligonucleotide
  Sense strand starting at position 2566 of SEQ ID NO: 1561685
guccauuucugcuccugaa

SEQ ID NO: 1690656 - RNA, 19 nt, Artificial Sequence
  Description of Artificial Sequence: Synthetic oligonucleotide
  Antisense strand to SEQ ID NO: 1690655
uucaggagcagaaauggac

SEQ ID NO: 1690657 - RNA, 19 nt, Artificial Sequence
  Description of Artificial Sequence: Synthetic oligonucleotide
  Sense strand starting at position 2592 of SEQ ID NO: 1561685
ugcugaugggcguugcauu

SEQ ID NO: 1690658 - RNA, 19 nt, Artificial Sequence
  Description of Artificial Sequence: Synthetic oligonucleotide
  Antisense strand to SEQ ID NO: 1690657
aaugcaacgcccaucagca

SEQ ID NO: 1690659 - RNA, 19 nt, Artificial Sequence
  Description of Artificial Sequence: Synthetic oligonucleotide
  Sense strand starting at position 2650 of SEQ ID NO: 1561685
ugcacaugucuuuggagaa

SEQ ID NO: 1690660 - RNA, 19 nt, Artificial Sequence
  Description of Artificial Sequence: Synthetic oligonucleotide
  Antisense strand to SEQ ID NO: 1690659
uucuccaaagacaugugca

SEQ ID NO: 1690661 - RNA, 19 nt, Artificial Sequence
  Description of Artificial Sequence: Synthetic oligonucleotide
  Sense strand starting at position 2724 of SEQ ID NO: 1561685
ggauaauguuaccuccaga

SEQ ID NO: 1690662 - RNA, 19 nt, Artificial Sequence
  Description of Artificial Sequence: Synthetic oligonucleotide
  Antisense strand to SEQ ID NO: 1690661
ucuggagguaacauuaucc

SEQ ID NO: 1690663 - RNA, 19 nt, Artificial Sequence
  Description of Artificial Sequence: Synthetic oligonucleotide
  Sense strand starting at position 2908 of SEQ ID NO: 1561685
ggaucaucuacacgaugua

SEQ ID NO: 1690664 - RNA, 19 nt, Artificial Sequence
  Description of Artificial Sequence: Synthetic oligonucleotide
  Antisense strand to SEQ ID NO: 1690663
uacaucguguagaugaucc

SEQ ID NO: 1690665 - RNA, 19 nt, Artificial Sequence
  Description of Artificial Sequence: Synthetic oligonucleotide
  Sense strand starting at position 3000 of SEQ ID NO: 1561685
gaggaagcaugacucaguu

SEQ ID NO: 1690666 - RNA, 19 nt, Artificial Sequence
  Description of Artificial Sequence: Synthetic oligonucleotide
  Antisense strand to SEQ ID NO: 1690665
aacugagucaugcuuccuc

SEQ ID NO: 1690667 - RNA, 19 nt, Artificial Sequence
  Description of Artificial Sequence: Synthetic oligonucleotide
  Sense strand starting at position 3027 of SEQ ID NO: 1561685
ggucaccuccuagauaauu

SEQ ID NO: 1690668 - RNA, 19 nt, Artificial Sequence
  Description of Artificial Sequence: Synthetic oligonucleotide
  Antisense strand to SEQ ID NO: 1690667
aauuaucuaggaggugacc

SEQ ID NO: 1690669 - RNA, 19 nt, Artificial Sequence
  Description of Artificial Sequence: Synthetic oligonucleotide
  Sense strand starting at position 3038 of SEQ ID NO: 1561685
agauaauuaccagggcacu

SEQ ID NO: 1690670 - RNA, 19 nt, Artificial Sequence
  Description of Artificial Sequence: Synthetic oligonucleotide
  Antisense strand to SEQ ID NO: 1690669
agugcccugguaauuaucu

SEQ ID NO: 1690671 - RNA, 19 nt, Artificial Sequence
  Description of Artificial Sequence: Synthetic oligonucleotide
  Sense strand starting at position 3051 of SEQ ID NO: 1561685
ggcacuggucugggaggau

SEQ ID NO: 1690672 - RNA, 19 nt, Artificial Sequence
  Description of Artificial Sequence: Synthetic oligonucleotide
  Antisense strand to SEQ ID NO: 1690671
auccucccagaccagugcc

SEQ ID NO: 1690673 - RNA, 19 nt, Artificial Sequence
  Description of Artificial Sequence: Synthetic oligonucleotide
  Sense strand starting at position 3080 of SEQ ID NO: 1561685
guauccaccaguuagguau

SEQ ID NO: 1690674 - RNA, 19 nt, Artificial Sequence
  Description of Artificial Sequence: Synthetic oligonucleotide
  Antisense strand to SEQ ID NO: 1690673
auaccuaacugguggauac

SEQ ID NO: 1690675 - RNA, 19 nt, Artificial Sequence
  Description of Artificial Sequence: Synthetic oligonucleotide
  Sense strand starting at position 3087 of SEQ ID NO: 1561685
ccaguuagguaucugagac

SEQ ID NO: 1690676 - RNA, 19 nt, Artificial Sequence
  Description of Artificial Sequence: Synthetic oligonucleotide
  Antisense strand to SEQ ID NO: 1690675
gucucagauaccuaacugg

SEQ ID NO: 1690677 - RNA, 19 nt, Artificial Sequence
  Description of Artificial Sequence: Synthetic oligonucleotide
  Sense strand starting at position 3282 of SEQ ID NO: 1561685
uggauuagugagugggcaa

SEQ ID NO: 1690678 - RNA, 19 nt, Artificial Sequence
  Description of Artificial Sequence: Synthetic oligonucleotide
  Antisense strand to SEQ ID NO: 1690677
uugcccacucacuaaucca

SEQ ID NO: 1690679 - RNA, 19 nt, Artificial Sequence
  Description of Artificial Sequence: Synthetic oligonucleotide
  Sense strand starting at position 3283 of SEQ ID NO: 1561685
ggauuagugagugggcaag

SEQ ID NO: 1690680 - RNA, 19 nt, Artificial Sequence
  Description of Artificial Sequence: Synthetic oligonucleotide
  Antisense strand to SEQ ID NO: 1690679
cuugcccacucacuaaucc

SEQ ID NO: 1690681 - RNA, 19 nt, Artificial Sequence
  Description of Artificial Sequence: Synthetic oligonucleotide
  Sense strand starting at position 3315 of SEQ ID NO: 1561685
cggagcugaauugauuaau

SEQ ID NO: 1690682 - RNA, 19 nt, Artificial Sequence
  Description of Artificial Sequence: Synthetic oligonucleotide
  Antisense strand to SEQ ID NO: 1690681
auuaaucaauucagcuccg

SEQ ID NO: 1690683 - RNA, 19 nt, Artificial Sequence
  Description of Artificial Sequence: Synthetic oligonucleotide
  Sense strand starting at position 3402 of SEQ ID NO: 1561685
gacagaucucuaggcagga

SEQ ID NO: 1690684 - RNA, 19 nt, Artificial Sequence
  Description of Artificial Sequence: Synthetic oligonucleotide
  Antisense strand to SEQ ID NO: 1690683
uccugccuagagaucuguc

SEQ ID NO: 1690685 - RNA, 19 nt, Artificial Sequence
  Description of Artificial Sequence: Synthetic oligonucleotide
  Sense strand starting at position 3403 of SEQ ID NO: 1561685
acagaucucuaggcaggaa

SEQ ID NO: 1690686 - RNA, 19 nt, Artificial Sequence
  Description of Artificial Sequence: Synthetic oligonucleotide
  Antisense strand to SEQ ID NO: 1690685
uuccugccuagagaucugu

SEQ ID NO: 1690687 - RNA, 19 nt, Artificial Sequence
  Description of Artificial Sequence: Synthetic oligonucleotide
  Sense strand starting at position 3478 of SEQ ID NO: 1561685
aagauauucugggaggaaa

SEQ ID NO: 1690688 - RNA, 19 nt, Artificial Sequence
  Description of Artificial Sequence: Synthetic oligonucleotide
  Antisense strand to SEQ ID NO: 1690687
uuuccucccagaauaucuu

SEQ ID NO: 1690689 - RNA, 19 nt, Artificial Sequence
  Description of Artificial Sequence: Synthetic oligonucleotide
  Sense strand starting at position 3499 of SEQ ID NO: 1561685
aguggauggcuaggaagaa

SEQ ID NO: 1690690 - RNA, 19 nt, Artificial Sequence
  Description of Artificial Sequence: Synthetic oligonucleotide
  Antisense strand to SEQ ID NO: 1690689
uucuuccuagccauccacu

SEQ ID NO: 1690691 - RNA, 19 nt, Artificial Sequence
  Description of Artificial Sequence: Synthetic oligonucleotide
  Sense strand starting at position 3912 of SEQ ID NO: 1561685
gagacaugugggugcagau

SEQ ID NO: 1690692 - RNA, 19 nt, Artificial Sequence
  Description of Artificial Sequence: Synthetic oligonucleotide
  Antisense strand to SEQ ID NO: 1690691
aucugcacccacaugucuc

SEQ ID NO: 1690693 - RNA, 19 nt, Artificial Sequence
  Description of Artificial Sequence: Synthetic oligonucleotide
  Sense strand starting at position 3925 of SEQ ID NO: 1561685
gcagaucugguguggaaga

SEQ ID NO: 1690694 - RNA, 19 nt, Artificial Sequence
  Description of Artificial Sequence: Synthetic oligonucleotide
  Antisense strand to SEQ ID NO: 1690693
ucuuccacaccagaucugc

SEQ ID NO: 1690695 - RNA, 19 nt, Artificial Sequence
  Description of Artificial Sequence: Synthetic oligonucleotide
  Sense strand starting at position 2 of SEQ ID NO: 1561686
auacauaaguaugcuagau

SEQ ID NO: 1690696 - RNA, 19 nt, Artificial Sequence
  Description of Artificial Sequence: Synthetic oligonucleotide
  Antisense strand to SEQ ID NO: 1690695
aucuagcauacuuauguau

SEQ ID NO: 1690697 - RNA, 19 nt, Artificial Sequence
  Description of Artificial Sequence: Synthetic oligonucleotide
  Sense strand starting at position 6 of SEQ ID NO: 1561686
auaaguaugcuagauuguc

SEQ ID NO: 1690698 - RNA, 19 nt, Artificial Sequence
  Description of Artificial Sequence: Synthetic oligonucleotide
  Antisense strand to SEQ ID NO: 1690697
gacaaucuagcauacuuau

SEQ ID NO: 1690699 - RNA, 19 nt, Artificial Sequence
  Description of Artificial Sequence: Synthetic oligonucleotide
  Sense strand starting at position 12 of SEQ ID NO: 1561686
augcuagauugucuaugaa

SEQ ID NO: 1690700 - RNA, 19 nt, Artificial Sequence
  Description of Artificial Sequence: Synthetic oligonucleotide
  Antisense strand to SEQ ID NO: 1690699
uucauagacaaucuagcau

SEQ ID NO: 1690701 - RNA, 19 nt, Artificial Sequence
  Description of Artificial Sequence: Synthetic oligonucleotide
  Sense strand starting at position 15 of SEQ ID NO: 1561686
cuagauugucuaugaaguu

SEQ ID NO: 1690702 - RNA, 19 nt, Artificial Sequence
  Description of Artificial Sequence: Synthetic oligonucleotide
  Antisense strand to SEQ ID NO: 1690701
aacuucauagacaaucuag

SEQ ID NO: 1690703 - RNA, 19 nt, Artificial Sequence
  Description of Artificial Sequence: Synthetic oligonucleotide
  Sense strand starting at position 83 of SEQ ID NO: 1561686
acaacaauccuagguggua

SEQ ID NO: 1690704 - RNA, 19 nt, Artificial Sequence
  Description of Artificial Sequence: Synthetic oligonucleotide
  Antisense strand to SEQ ID NO: 1690703
uaccaccuaggauuguugu

SEQ ID NO: 1690705 - RNA, 19 nt, Artificial Sequence
  Description of Artificial Sequence: Synthetic oligonucleotide
  Sense strand starting at position 84 of SEQ ID NO: 1561686
caacaauccuaggugguau

SEQ ID NO: 1690706 - RNA, 19 nt, Artificial Sequence
  Description of Artificial Sequence: Synthetic oligonucleotide
  Antisense strand to SEQ ID NO: 1690705
auaccaccuaggauuguug

SEQ ID NO: 1690707 - RNA, 19 nt, Artificial Sequence
  Description of Artificial Sequence: Synthetic oligonucleotide
  Sense strand starting at position 231 of SEQ ID NO: 1561686
cccuguaaagcaugauaau

SEQ ID NO: 1690708 - RNA, 19 nt, Artificial Sequence
  Description of Artificial Sequence: Synthetic oligonucleotide
  Antisense strand to SEQ ID NO: 1690707
auuaucaugcuuuacaggg

SEQ ID NO: 1690709 - RNA, 19 nt, Artificial Sequence
  Description of Artificial Sequence: Synthetic oligonucleotide
  Sense strand starting at position 232 of SEQ ID NO: 1561686
ccuguaaagcaugauaaug

SEQ ID NO: 1690710 - RNA, 19 nt, Artificial Sequence
  Description of Artificial Sequence: Synthetic oligonucleotide
  Antisense strand to SEQ ID NO: 1690709
cauuaucaugcuuuacagg

SEQ ID NO: 1690711 - RNA, 19 nt, Artificial Sequence
  Description of Artificial Sequence: Synthetic oligonucleotide
  Sense strand starting at position 242 of SEQ ID NO: 1561686
augauaaugauguggcaga

SEQ ID NO: 1690712 - RNA, 19 nt, Artificial Sequence
  Description of Artificial Sequence: Synthetic oligonucleotide
  Antisense strand to SEQ ID NO: 1690711
ucugccacaucauuaucau

SEQ ID NO: 1690713 - RNA, 19 nt, Artificial Sequence
  Description of Artificial Sequence: Synthetic oligonucleotide
  Sense strand starting at position 247 of SEQ ID NO: 1561686
aaugauguggcagaguuua

SEQ ID NO: 1690714 - RNA, 19 nt, Artificial Sequence
  Description of Artificial Sequence: Synthetic oligonucleotide
  Antisense strand to SEQ ID NO: 1690713
uaaacucugccacaucauu

SEQ ID NO: 1690715 - RNA, 19 nt, Artificial Sequence
  Description of Artificial Sequence: Synthetic oligonucleotide
  Sense strand starting at position 611 of SEQ ID NO: 1561686
uguacuguggcauaaauga

SEQ ID NO: 1690716 - RNA, 19 nt, Artificial Sequence
  Description of Artificial Sequence: Synthetic oligonucleotide
  Antisense strand to SEQ ID NO: 1690715
ucauuuaugccacaguaca

SEQ ID NO: 1690717 - RNA, 19 nt, Artificial Sequence
  Description of Artificial Sequence: Synthetic oligonucleotide
  Sense strand starting at position 660 of SEQ ID NO: 1561686
uugggcauuguuuauuaca

SEQ ID NO: 1690718 - RNA, 19 nt, Artificial Sequence
  Description of Artificial Sequence: Synthetic oligonucleotide
  Antisense strand to SEQ ID NO: 1690717
uguaauaaacaaugcccaa

SEQ ID NO: 1690719 - RNA, 19 nt, Artificial Sequence
  Description of Artificial Sequence: Synthetic oligonucleotide
  Sense strand starting at position 668 of SEQ ID NO: 1561686
uguuuauuacaucaguuag

SEQ ID NO: 1690720 - RNA, 19 nt, Artificial Sequence
  Description of Artificial Sequence: Synthetic oligonucleotide
  Antisense strand to SEQ ID NO: 1690719
cuaacugauguaauaaaca

SEQ ID NO: 1690721 - RNA, 19 nt, Artificial Sequence
  Description of Artificial Sequence: Synthetic oligonucleotide
  Sense strand starting at position 781 of SEQ ID NO: 1561686
cugguuggacccuagucaa

SEQ ID NO: 1690722 - RNA, 19 nt, Artificial Sequence
  Description of Artificial Sequence: Synthetic oligonucleotide
  Antisense strand to SEQ ID NO: 1690721
uugacuaggguccaaccag

SEQ ID NO: 1690723 - RNA, 19 nt, Artificial Sequence
  Description of Artificial Sequence: Synthetic oligonucleotide
  Sense strand starting at position 917 of SEQ ID NO: 1561686
gucacauagcaccaugagu

SEQ ID NO: 1690724 - RNA, 19 nt, Artificial Sequence
  Description of Artificial Sequence: Synthetic oligonucleotide
  Antisense strand to SEQ ID NO: 1690723
acucauggugcuaugugac

SEQ ID NO: 1690725 - RNA, 19 nt, Artificial Sequence
  Description of Artificial Sequence: Synthetic oligonucleotide
  Sense strand starting at position 922 of SEQ ID NO: 1561686
auagcaccaugaguuuaua

SEQ ID NO: 1690726 - RNA, 19 nt, Artificial Sequence
  Description of Artificial Sequence: Synthetic oligonucleotide
  Antisense strand to SEQ ID NO: 1690725
uauaaacucauggugcuau

SEQ ID NO: 1690727 - RNA, 19 nt, Artificial Sequence
  Description of Artificial Sequence: Synthetic oligonucleotide
  Sense strand starting at position 1073 of SEQ ID NO: 1561686
agagauauuuaugaagcau

SEQ ID NO: 1690728 - RNA, 19 nt, Artificial Sequence
  Description of Artificial Sequence: Synthetic oligonucleotide
  Antisense strand to SEQ ID NO: 1690727
augcuucauaaauaucucu

SEQ ID NO: 1690729 - RNA, 19 nt, Artificial Sequence
  Description of Artificial Sequence: Synthetic oligonucleotide
  Sense strand starting at position 1081 of SEQ ID NO: 1561686
uuaugaagcaugugguaag

SEQ ID NO: 1690730 - RNA, 19 nt, Artificial Sequence
  Description of Artificial Sequence: Synthetic oligonucleotide
  Antisense strand to SEQ ID NO: 1690729
cuuaccacaugcuucauaa

SEQ ID NO: 1690731 - RNA, 19 nt, Artificial Sequence
  Description of Artificial Sequence: Synthetic oligonucleotide
  Sense strand starting at position 1172 of SEQ ID NO: 1561686
ggugcuaagaacugugaga

SEQ ID NO: 1690732 - RNA, 19 nt, Artificial Sequence
  Description of Artificial Sequence: Synthetic oligonucleotide
  Antisense strand to SEQ ID NO: 1690731
ucucacaguucuuagcacc

SEQ ID NO: 1690733 - RNA, 19 nt, Artificial Sequence
  Description of Artificial Sequence: Synthetic oligonucleotide
  Sense strand starting at position 1174 of SEQ ID NO: 1561686
ugcuaagaacugugagaaa

SEQ ID NO: 1690734 - RNA, 19 nt, Artificial Sequence
  Description of Artificial Sequence: Synthetic oligonucleotide
  Antisense strand to SEQ ID NO: 1690733
uuucucacaguucuuagca

SEQ ID NO: 1690735 - RNA, 19 nt, Artificial Sequence
  Description of Artificial Sequence: Synthetic oligonucleotide
  Sense strand starting at position 1486 of SEQ ID NO: 1561686
ccuggaacuccuggacuau

SEQ ID NO: 1690736 - RNA, 19 nt, Artificial Sequence
  Description of Artificial Sequence: Synthetic oligonucleotide
  Antisense strand to SEQ ID NO: 1690735
auaguccaggaguuccagg

SEQ ID NO: 1690737 - RNA, 19 nt, Artificial Sequence
  Description of Artificial Sequence: Synthetic oligonucleotide
  Sense strand starting at position 1752 of SEQ ID NO: 1561686
ugaaguacgcaugcguauu

SEQ ID NO: 1690738 - RNA, 19 nt, Artificial Sequence
  Description of Artificial Sequence: Synthetic oligonucleotide
  Antisense strand to SEQ ID NO: 1690737
aauacgcaugcguacuuca

SEQ ID NO: 1690739 - RNA, 19 nt, Artificial Sequence
  Description of Artificial Sequence: Synthetic oligonucleotide
  Sense strand starting at position 1846 of SEQ ID NO: 1561686
agagaaguugcgagucugu

SEQ ID NO: 1690740 - RNA, 19 nt, Artificial Sequence
  Description of Artificial Sequence: Synthetic oligonucleotide
  Antisense strand to SEQ ID NO: 1690739
acagacucgcaacuucucu

SEQ ID NO: 1690741 - RNA, 19 nt, Artificial Sequence
  Description of Artificial Sequence: Synthetic oligonucleotide
  Sense strand starting at position 1861 of SEQ ID NO: 1561686
cugugagacccugaucuuc

SEQ ID NO: 1690742 - RNA, 19 nt, Artificial Sequence
  Description of Artificial Sequence: Synthetic oligonucleotide
  Antisense strand to SEQ ID NO: 1690741
gaagaucagggucucacag

SEQ ID NO: 1690743 - RNA, 19 nt, Artificial Sequence
  Description of Artificial Sequence: Synthetic oligonucleotide
  Sense strand starting at position 1917 of SEQ ID NO: 1561686
aguguagaucgcgcgguaa

SEQ ID NO: 1690744 - RNA, 19 nt, Artificial Sequence
  Description of Artificial Sequence: Synthetic oligonucleotide
  Antisense strand to SEQ ID NO: 1690743
uuaccgcgcgaucuacacu

SEQ ID NO: 1690745 - RNA, 19 nt, Artificial Sequence
  Description of Artificial Sequence: Synthetic oligonucleotide
  Sense strand starting at position 2240 of SEQ ID NO: 1561686
ggcaucauuuacucgccua

SEQ ID NO: 1690746 - RNA, 19 nt, Artificial Sequence
  Description of Artificial Sequence: Synthetic oligonucleotide
  Antisense strand to SEQ ID NO: 1690745
uaggcgaguaaaugaugcc

SEQ ID NO: 1690747 - RNA, 19 nt, Artificial Sequence
  Description of Artificial Sequence: Synthetic oligonucleotide
  Sense strand starting at position 2281 of SEQ ID NO: 1561686
guauaaacugccuacuaag

SEQ ID NO: 1690748 - RNA, 19 nt, Artificial Sequence
  Description of Artificial Sequence: Synthetic oligonucleotide
  Antisense strand to SEQ ID NO: 1690747
cuuaguaggcaguuuauac

SEQ ID NO: 1690749 - RNA, 19 nt, Artificial Sequence
  Description of Artificial Sequence: Synthetic oligonucleotide
  Sense strand starting at position 2349 of SEQ ID NO: 1561686
aagauauuggccgagcagu

SEQ ID NO: 1690750 - RNA, 19 nt, Artificial Sequence
  Description of Artificial Sequence: Synthetic oligonucleotide
  Antisense strand to SEQ ID NO: 1690749
acugcucggccaauaucuu

SEQ ID NO: 1690751 - RNA, 19 nt, Artificial Sequence
  Description of Artificial Sequence: Synthetic oligonucleotide
  Sense strand starting at position 2402 of SEQ ID NO: 1561686
uuguaucaucaguauacca

SEQ ID NO: 1690752 - RNA, 19 nt, Artificial Sequence
  Description of Artificial Sequence: Synthetic oligonucleotide
  Antisense strand to SEQ ID NO: 1690751
ugguauacugaugauacaa

SEQ ID NO: 1690753 - RNA, 19 nt, Artificial Sequence
  Description of Artificial Sequence: Synthetic oligonucleotide
  Sense strand starting at position 2404 of SEQ ID NO: 1561686
guaucaucaguauaccaac

SEQ ID NO: 1690754 - RNA, 19 nt, Artificial Sequence
  Description of Artificial Sequence: Synthetic oligonucleotide
  Antisense strand to SEQ ID NO: 1690753
guugguauacugaugauac

SEQ ID NO: 1690755 - RNA, 19 nt, Artificial Sequence
  Description of Artificial Sequence: Synthetic oligonucleotide
  Sense strand starting at position 2410 of SEQ ID NO: 1561686
ucaguauaccaacguauuu

SEQ ID NO: 1690756 - RNA, 19 nt, Artificial Sequence
  Description of Artificial Sequence: Synthetic oligonucleotide
  Antisense strand to SEQ ID NO: 1690755
aaauacguugguauacuga

SEQ ID NO: 1690757 - RNA, 19 nt, Artificial Sequence
  Description of Artificial Sequence: Synthetic oligonucleotide
  Sense strand starting at position 2481 of SEQ ID NO: 1561686
gcauauaagcaugagagca

SEQ ID NO: 1690758 - RNA, 19 nt, Artificial Sequence
  Description of Artificial Sequence: Synthetic oligonucleotide
  Antisense strand to SEQ ID NO: 1690757
ugcucucaugcuuauaugc

SEQ ID NO: 1690759 - RNA, 19 nt, Artificial Sequence
  Description of Artificial Sequence: Synthetic oligonucleotide
  Sense strand starting at position 2827 of SEQ ID NO: 1561686
gccugucugcagcauuuga

SEQ ID NO: 1690760 - RNA, 19 nt, Artificial Sequence
  Description of Artificial Sequence: Synthetic oligonucleotide
  Antisense strand to SEQ ID NO: 1690759
ucaaaugcugcagacaggc

SEQ ID NO: 1690761 - RNA, 19 nt, Artificial Sequence
  Description of Artificial Sequence: Synthetic oligonucleotide
  Sense strand starting at position 2880 of SEQ ID NO: 1561686
uuaacuuaguauccaggaa

SEQ ID NO: 1690762 - RNA, 19 nt, Artificial Sequence
  Description of Artificial Sequence: Synthetic oligonucleotide
  Antisense strand to SEQ ID NO: 1690761
uuccuggauacuaaguuaa

SEQ ID NO: 1690763 - RNA, 19 nt, Artificial Sequence
  Description of Artificial Sequence: Synthetic oligonucleotide
  Sense strand starting at position 2970 of SEQ ID NO: 1561686
uguaguaucccaggacuca

SEQ ID NO: 1690764 - RNA, 19 nt, Artificial Sequence
  Description of Artificial Sequence: Synthetic oligonucleotide
  Antisense strand to SEQ ID NO: 1690763
ugaguccugggauacuaca

SEQ ID NO: 1690765 - RNA, 19 nt, Artificial Sequence
  Description of Artificial Sequence: Synthetic oligonucleotide
  Sense strand starting at position 3418 of SEQ ID NO: 1561686
gauaauugggcgggagcaa

SEQ ID NO: 1690766 - RNA, 19 nt, Artificial Sequence
  Description of Artificial Sequence: Synthetic oligonucleotide
  Antisense strand to SEQ ID NO: 1690765
uugcucccgcccaauuauc

SEQ ID NO: 1690767 - RNA, 19 nt, Artificial Sequence
  Description of Artificial Sequence: Synthetic oligonucleotide
  Sense strand starting at position 3419 of SEQ ID NO: 1561686
auaauugggcgggagcaau

SEQ ID NO: 1690768 - RNA, 19 nt, Artificial Sequence
  Description of Artificial Sequence: Synthetic oligonucleotide
  Antisense strand to SEQ ID NO: 1690767
auugcucccgcccaauuau

SEQ ID NO: 1690769 - RNA, 19 nt, Artificial Sequence
  Description of Artificial Sequence: Synthetic oligonucleotide
  Sense strand starting at position 3525 of SEQ ID NO: 1561686
acaggagaauguguuuaaa

SEQ ID NO: 1690770 - RNA, 19 nt, Artificial Sequence
  Description of Artificial Sequence: Synthetic oligonucleotide
  Antisense strand to SEQ ID NO: 1690769
uuuaaacacauucuccugu

SEQ ID NO: 1690771 - RNA, 19 nt, Artificial Sequence
  Description of Artificial Sequence: Synthetic oligonucleotide
  Sense strand starting at position 3527 of SEQ ID NO: 1561686
aggagaauguguuuaaaug

SEQ ID NO: 1690772 - RNA, 19 nt, Artificial Sequence
  Description of Artificial Sequence: Synthetic oligonucleotide
  Antisense strand to SEQ ID NO: 1690771
cauuuaaacacauucuccu

SEQ ID NO: 1690773 - RNA, 19 nt, Artificial Sequence
  Description of Artificial Sequence: Synthetic oligonucleotide
  Sense strand starting at position 3528 of SEQ ID NO: 1561686
ggagaauguguuuaaaugc

SEQ ID NO: 1690774 - RNA, 19 nt, Artificial Sequence
  Description of Artificial Sequence: Synthetic oligonucleotide
  Antisense strand to SEQ ID NO: 1690773
gcauuuaaacacauucucc

SEQ ID NO: 1690775 - RNA, 19 nt, Artificial Sequence
  Description of Artificial Sequence: Synthetic oligonucleotide
  Sense strand starting at position 282 of SEQ ID NO: 1561687
accugcaugugacgucaua

SEQ ID NO: 1690776 - RNA, 19 nt, Artificial Sequence
  Description of Artificial Sequence: Synthetic oligonucleotide
  Antisense strand to SEQ ID NO: 1690775
uaugacgucacaugcaggu

SEQ ID NO: 1690777 - RNA, 19 nt, Artificial Sequence
  Description of Artificial Sequence: Synthetic oligonucleotide
  Sense strand starting at position 293 of SEQ ID NO: 1561687
acgucauagucuuugagga

SEQ ID NO: 1690778 - RNA, 19 nt, Artificial Sequence
  Description of Artificial Sequence: Synthetic oligonucleotide
  Antisense strand to SEQ ID NO: 1690777
uccucaaagacuaugacgu

SEQ ID NO: 1690779 - RNA, 19 nt, Artificial Sequence
  Description of Artificial Sequence: Synthetic oligonucleotide
  Sense strand starting at position 294 of SEQ ID NO: 1561687
cgucauagucuuugaggac

SEQ ID NO: 1690780 - RNA, 19 nt, Artificial Sequence
  Description of Artificial Sequence: Synthetic oligonucleotide
  Antisense strand to SEQ ID NO: 1690779
guccucaaagacuaugacg

SEQ ID NO: 1690781 - RNA, 19 nt, Artificial Sequence
  Description of Artificial Sequence: Synthetic oligonucleotide
  Sense strand starting at position 295 of SEQ ID NO: 1561687
gucauagucuuugaggaca

SEQ ID NO: 1690782 - RNA, 19 nt, Artificial Sequence
  Description of Artificial Sequence: Synthetic oligonucleotide
  Antisense strand to SEQ ID NO: 1690781
uguccucaaagacuaugac

SEQ ID NO: 1690783 - RNA, 19 nt, Artificial Sequence
  Description of Artificial Sequence: Synthetic oligonucleotide
  Sense strand starting at position 297 of SEQ ID NO: 1561687
cauagucuuugaggacaga

SEQ ID NO: 1690784 - RNA, 19 nt, Artificial Sequence
  Description of Artificial Sequence: Synthetic oligonucleotide
  Antisense strand to SEQ ID NO: 1690783
ucuguccucaaagacuaug

SEQ ID NO: 1690785 - RNA, 19 nt, Artificial Sequence
  Description of Artificial Sequence: Synthetic oligonucleotide
  Sense strand starting at position 310 of SEQ ID NO: 1561687
gacagagugcuguguucug

SEQ ID NO: 1690786 - RNA, 19 nt, Artificial Sequence
  Description of Artificial Sequence: Synthetic oligonucleotide
  Antisense strand to SEQ ID NO: 1690785
cagaacacagcacucuguc

SEQ ID NO: 1690787 - RNA, 19 nt, Artificial Sequence
  Description of Artificial Sequence: Synthetic oligonucleotide
  Sense strand starting at position 317 of SEQ ID NO: 1561687
ugcuguguucugggcccaa

SEQ ID NO: 1690788 - RNA, 19 nt, Artificial Sequence
  Description of Artificial Sequence: Synthetic oligonucleotide
  Antisense strand to SEQ ID NO: 1690787
uugggcccagaacacagca

SEQ ID NO: 1690789 - RNA, 19 nt, Artificial Sequence
  Description of Artificial Sequence: Synthetic oligonucleotide
  Sense strand starting at position 321 of SEQ ID NO: 1561687
guguucugggcccaaacuu

SEQ ID NO: 1690790 - RNA, 19 nt, Artificial Sequence
  Description of Artificial Sequence: Synthetic oligonucleotide
  Antisense strand to SEQ ID NO: 1690789
aaguuugggcccagaacac

SEQ ID NO: 1690791 - RNA, 19 nt, Artificial Sequence
  Description of Artificial Sequence: Synthetic oligonucleotide
  Sense strand starting at position 539 of SEQ ID NO: 1561687
aguggcucccuuugagaag

SEQ ID NO: 1690792 - RNA, 19 nt, Artificial Sequence
  Description of Artificial Sequence: Synthetic oligonucleotide
  Antisense strand to SEQ ID NO: 1690791
cuucucaaagggagccacu

SEQ ID NO: 1690793 - RNA, 19 nt, Artificial Sequence
  Description of Artificial Sequence: Synthetic oligonucleotide
  Sense strand starting at position 642 of SEQ ID NO: 1561687
uccuguggucucugggaga

SEQ ID NO: 1690794 - RNA, 19 nt, Artificial Sequence
  Description of Artificial Sequence: Synthetic oligonucleotide
  Antisense strand to SEQ ID NO: 1690793
ucucccagagaccacagga

SEQ ID NO: 1690795 - RNA, 19 nt, Artificial Sequence
  Description of Artificial Sequence: Synthetic oligonucleotide
  Sense strand starting at position 754 of SEQ ID NO: 1561687
ugaggugguucccagaaau

SEQ ID NO: 1690796 - RNA, 19 nt, Artificial Sequence
  Description of Artificial Sequence: Synthetic oligonucleotide
  Antisense strand to SEQ ID NO: 1690795
auuucugggaaccaccuca

SEQ ID NO: 1690797 - RNA, 19 nt, Artificial Sequence
  Description of Artificial Sequence: Synthetic oligonucleotide
  Sense strand starting at position 1013 of SEQ ID NO: 1561687
cgguguggcccgguucaaa

SEQ ID NO: 1690798 - RNA, 19 nt, Artificial Sequence
  Description of Artificial Sequence: Synthetic oligonucleotide
  Antisense strand to SEQ ID NO: 1690797
uuugaaccgggccacaccg

SEQ ID NO: 1690799 - RNA, 19 nt, Artificial Sequence
  Description of Artificial Sequence: Synthetic oligonucleotide
  Sense strand starting at position 1232 of SEQ ID NO: 1561687
gacaaugaacccuaugugu

SEQ ID NO: 1690800 - RNA, 19 nt, Artificial Sequence
  Description of Artificial Sequence: Synthetic oligonucleotide
  Antisense strand to SEQ ID NO: 1690799
acacauaggguucauuguc

SEQ ID NO: 1690801 - RNA, 19 nt, Artificial Sequence
  Description of Artificial Sequence: Synthetic oligonucleotide
  Sense strand starting at position 1341 of SEQ ID NO: 1561687
cccuguguccugggcugau

SEQ ID NO: 1690802 - RNA, 19 nt, Artificial Sequence
  Description of Artificial Sequence: Synthetic oligonucleotide
  Antisense strand to SEQ ID NO: 1690801
aucagcccaggacacaggg

SEQ ID NO: 1690803 - RNA, 19 nt, Artificial Sequence
  Description of Artificial Sequence: Synthetic oligonucleotide
  Sense strand starting at position 1824 of SEQ ID NO: 1561687
agggagauguuguugagga

SEQ ID NO: 1690804 - RNA, 19 nt, Artificial Sequence
  Description of Artificial Sequence: Synthetic oligonucleotide
  Antisense strand to SEQ ID NO: 1690803
uccucaacaacaucucccu

SEQ ID NO: 1690805 - RNA, 19 nt, Artificial Sequence
  Description of Artificial Sequence: Synthetic oligonucleotide
  Sense strand starting at position 2475 of SEQ ID NO: 1561687
cgagggucugaguggagaa

SEQ ID NO: 1690806 - RNA, 19 nt, Artificial Sequence
  Description of Artificial Sequence: Synthetic oligonucleotide
  Antisense strand to SEQ ID NO: 1690805
uucuccacucagacccucg

SEQ ID NO: 1690807 - RNA, 19 nt, Artificial Sequence
  Description of Artificial Sequence: Synthetic oligonucleotide
  Sense strand starting at position 2495 of SEQ ID NO: 1561687
gcaccugcuugggaucaaa

SEQ ID NO: 1690808 - RNA, 19 nt, Artificial Sequence
  Description of Artificial Sequence: Synthetic oligonucleotide
  Antisense strand to SEQ ID NO: 1690807
uuugaucccaagcaggugc

SEQ ID NO: 1690809 - RNA, 19 nt, Artificial Sequence
  Description of Artificial Sequence: Synthetic oligonucleotide
  Sense strand starting at position 2518 of SEQ ID NO: 1561687
caggcagaguccugcacuu

SEQ ID NO: 1690810 - RNA, 19 nt, Artificial Sequence
  Description of Artificial Sequence: Synthetic oligonucleotide
  Antisense strand to SEQ ID NO: 1690809
aagugcaggacucugccug

SEQ ID NO: 1690811 - RNA, 19 nt, Artificial Sequence
  Description of Artificial Sequence: Synthetic oligonucleotide
  Sense strand starting at position 2699 of SEQ ID NO: 1561687
cuguaucuuuguggaggga

SEQ ID NO: 1690812 - RNA, 19 nt, Artificial Sequence
  Description of Artificial Sequence: Synthetic oligonucleotide
  Antisense strand to SEQ ID NO: 1690811
ucccuccacaaagauacag

SEQ ID NO: 1690813 - RNA, 19 nt, Artificial Sequence
  Description of Artificial Sequence: Synthetic oligonucleotide
  Sense strand starting at position 2776 of SEQ ID NO: 1561687
ggguuuacguaucuuuaaa

SEQ ID NO: 1690814 - RNA, 19 nt, Artificial Sequence
  Description of Artificial Sequence: Synthetic oligonucleotide
  Antisense strand to SEQ ID NO: 1690813
uuuaaagauacguaaaccc

SEQ ID NO: 1690815 - RNA, 19 nt, Artificial Sequence
  Description of Artificial Sequence: Synthetic oligonucleotide
  Sense strand starting at position 2778 of SEQ ID NO: 1561687
guuuacguaucuuuaaaga

SEQ ID NO: 1690816 - RNA, 19 nt, Artificial Sequence
  Description of Artificial Sequence: Synthetic oligonucleotide
  Antisense strand to SEQ ID NO: 1690815
ucuuuaaagauacguaaac

SEQ ID NO: 1690817 - RNA, 19 nt, Artificial Sequence
  Description of Artificial Sequence: Synthetic oligonucleotide
  Sense strand starting at position 2818 of SEQ ID NO: 1561687
aggguacugucaggaugaa

SEQ ID NO: 1690818 - RNA, 19 nt, Artificial Sequence
  Description of Artificial Sequence: Synthetic oligonucleotide
  Antisense strand to SEQ ID NO: 1690817
uucauccugacaguacccu

SEQ ID NO: 1690819 - RNA, 19 nt, Artificial Sequence
  Description of Artificial Sequence: Synthetic oligonucleotide
  Sense strand starting at position 3258 of SEQ ID NO: 1561687
agcuguccugucuaggaga

SEQ ID NO: 1690820 - RNA, 19 nt, Artificial Sequence
  Description of Artificial Sequence: Synthetic oligonucleotide
  Antisense strand to SEQ ID NO: 1690819
ucuccuagacaggacagcu

SEQ ID NO: 1690821 - RNA, 19 nt, Artificial Sequence
  Description of Artificial Sequence: Synthetic oligonucleotide
  Sense strand starting at position 3377 of SEQ ID NO: 1561687
gaguguguccagcgcugua

SEQ ID NO: 1690822 - RNA, 19 nt, Artificial Sequence
  Description of Artificial Sequence: Synthetic oligonucleotide
  Antisense strand to SEQ ID NO: 1690821
uacagcgcuggacacacuc

SEQ ID NO: 1690823 - RNA, 19 nt, Artificial Sequence
  Description of Artificial Sequence: Synthetic oligonucleotide
  Sense strand starting at position 3499 of SEQ ID NO: 1561687
ugcagagaaucugguguca

SEQ ID NO: 1690824 - RNA, 19 nt, Artificial Sequence
  Description of Artificial Sequence: Synthetic oligonucleotide
  Antisense strand to SEQ ID NO: 1690823
ugacaccagauucucugca

SEQ ID NO: 1690825 - RNA, 19 nt, Artificial Sequence
  Description of Artificial Sequence: Synthetic oligonucleotide
  Sense strand starting at position 3501 of SEQ ID NO: 1561687
cagagaaucuggugucaga

SEQ ID NO: 1690826 - RNA, 19 nt, Artificial Sequence
  Description of Artificial Sequence: Synthetic oligonucleotide
  Antisense strand to SEQ ID NO: 1690825
ucugacaccagauucucug

SEQ ID NO: 1690827 - RNA, 19 nt, Artificial Sequence
  Description of Artificial Sequence: Synthetic oligonucleotide
  Sense strand starting at position 3504 of SEQ ID NO: 1561687
agaaucuggugucagauga

SEQ ID NO: 1690828 - RNA, 19 nt, Artificial Sequence
  Description of Artificial Sequence: Synthetic oligonucleotide
  Antisense strand to SEQ ID NO: 1690827
ucaucugacaccagauucu

SEQ ID NO: 1690829 - RNA, 19 nt, Artificial Sequence
  Description of Artificial Sequence: Synthetic oligonucleotide
  Sense strand starting at position 3508 of SEQ ID NO: 1561687
ucuggugucagaugagaac

SEQ ID NO: 1690830 - RNA, 19 nt, Artificial Sequence
  Description of Artificial Sequence: Synthetic oligonucleotide
  Antisense strand to SEQ ID NO: 1690829
guucucaucugacaccaga

SEQ ID NO: 1690831 - RNA, 19 nt, Artificial Sequence
  Description of Artificial Sequence: Synthetic oligonucleotide
  Sense strand starting at position 3660 of SEQ ID NO: 1561687
uaagcuagacuuugaggga

SEQ ID NO: 1690832 - RNA, 19 nt, Artificial Sequence
  Description of Artificial Sequence: Synthetic oligonucleotide
  Antisense strand to SEQ ID NO: 1690831
ucccucaaagucuagcuua

SEQ ID NO: 1690833 - RNA, 19 nt, Artificial Sequence
  Description of Artificial Sequence: Synthetic oligonucleotide
  Sense strand starting at position 3663 of SEQ ID NO: 1561687
gcuagacuuugagggacaa

SEQ ID NO: 1690834 - RNA, 19 nt, Artificial Sequence
  Description of Artificial Sequence: Synthetic oligonucleotide
  Antisense strand to SEQ ID NO: 1690833
uugucccucaaagucuagc

SEQ ID NO: 1690835 - RNA, 19 nt, Artificial Sequence
  Description of Artificial Sequence: Synthetic oligonucleotide
  Sense strand starting at position 3882 of SEQ ID NO: 1561687
ggacuucccucuugggagu

SEQ ID NO: 1690836 - RNA, 19 nt, Artificial Sequence
  Description of Artificial Sequence: Synthetic oligonucleotide
  Antisense strand to SEQ ID NO: 1690835
acucccaagagggaagucc

SEQ ID NO: 1690837 - RNA, 19 nt, Artificial Sequence
  Description of Artificial Sequence: Synthetic oligonucleotide
  Sense strand starting at position 68 of SEQ ID NO: 1561688
gugaauguggacugaauag

SEQ ID NO: 1690838 - RNA, 19 nt, Artificial Sequence
  Description of Artificial Sequence: Synthetic oligonucleotide
  Antisense strand to SEQ ID NO: 1690837
cuauucaguccacauucac

SEQ ID NO: 1690839 - RNA, 19 nt, Artificial Sequence
  Description of Artificial Sequence: Synthetic oligonucleotide
  Sense strand starting at position 80 of SEQ ID NO: 1561688
ugaauaguagaauggcauu

SEQ ID NO: 1690840 - RNA, 19 nt, Artificial Sequence
  Description of Artificial Sequence: Synthetic oligonucleotide
  Antisense strand to SEQ ID NO: 1690839
aaugccauucuacuauuca

SEQ ID NO: 1690841 - RNA, 19 nt, Artificial Sequence
  Description of Artificial Sequence: Synthetic oligonucleotide
  Sense strand starting at position 109 of SEQ ID NO: 1561688
cgugaauuagacugaauag

SEQ ID NO: 1690842 - RNA, 19 nt, Artificial Sequence
  Description of Artificial Sequence: Synthetic oligonucleotide
  Antisense strand to SEQ ID NO: 1690841
cuauucagucuaauucacg

SEQ ID NO: 1690843 - RNA, 19 nt, Artificial Sequence
  Description of Artificial Sequence: Synthetic oligonucleotide
  Sense strand starting at position 150 of SEQ ID NO: 1561688
ugugaaauguucuugggua

SEQ ID NO: 1690844 - RNA, 19 nt, Artificial Sequence
  Description of Artificial Sequence: Synthetic oligonucleotide
  Antisense strand to SEQ ID NO: 1690843
uacccaagaacauuucaca

SEQ ID NO: 1690845 - RNA, 19 nt, Artificial Sequence
  Description of Artificial Sequence: Synthetic oligonucleotide
  Sense strand starting at position 152 of SEQ ID NO: 1561688
ugaaauguucuuggguaug

SEQ ID NO: 1690846 - RNA, 19 nt, Artificial Sequence
  Description of Artificial Sequence: Synthetic oligonucleotide
  Antisense strand to SEQ ID NO: 1690845
cauacccaagaacauuuca

SEQ ID NO: 1690847 - RNA, 19 nt, Artificial Sequence
  Description of Artificial Sequence: Synthetic oligonucleotide
  Sense strand starting at position 154 of SEQ ID NO: 1561688
aaauguucuuggguaugau

SEQ ID NO: 1690848 - RNA, 19 nt, Artificial Sequence
  Description of Artificial Sequence: Synthetic oligonucleotide
  Antisense strand to SEQ ID NO: 1690847
aucauacccaagaacauuu

SEQ ID NO: 1690849 - RNA, 19 nt, Artificial Sequence
  Description of Artificial Sequence: Synthetic oligonucleotide
  Sense strand starting at position 155 of SEQ ID NO: 1561688
aauguucuuggguaugaug

SEQ ID NO: 1690850 - RNA, 19 nt, Artificial Sequence
  Description of Artificial Sequence: Synthetic oligonucleotide
  Antisense strand to SEQ ID NO: 1690849
caucauacccaagaacauu

SEQ ID NO: 1690851 - RNA, 19 nt, Artificial Sequence
  Description of Artificial Sequence: Synthetic oligonucleotide
  Sense strand starting at position 157 of SEQ ID NO: 1561688
uguucuuggguaugaugau

SEQ ID NO: 1690852 - RNA, 19 nt, Artificial Sequence
  Description of Artificial Sequence: Synthetic oligonucleotide
  Antisense strand to SEQ ID NO: 1690851
aucaucauacccaagaaca

SEQ ID NO: 1690853 - RNA, 19 nt, Artificial Sequence
  Description of Artificial Sequence: Synthetic oligonucleotide
  Sense strand starting at position 166 of SEQ ID NO: 1561688
guaugaugauauguagaua

SEQ ID NO: 1690854 - RNA, 19 nt, Artificial Sequence
  Description of Artificial Sequence: Synthetic oligonucleotide
  Antisense strand to SEQ ID NO: 1690853
uaucuacauaucaucauac

SEQ ID NO: 1690855 - RNA, 19 nt, Artificial Sequence
  Description of Artificial Sequence: Synthetic oligonucleotide
  Sense strand starting at position 188 of SEQ ID NO: 1561688
uucuacguucuguagauga

SEQ ID NO: 1690856 - RNA, 19 nt, Artificial Sequence
  Description of Artificial Sequence: Synthetic oligonucleotide
  Antisense strand to SEQ ID NO: 1690855
ucaucuacagaacguagaa

SEQ ID NO: 1690857 - RNA, 19 nt, Artificial Sequence
  Description of Artificial Sequence: Synthetic oligonucleotide
  Sense strand starting at position 190 of SEQ ID NO: 1561688
cuacguucuguagaugaau

SEQ ID NO: 1690858 - RNA, 19 nt, Artificial Sequence
  Description of Artificial Sequence: Synthetic oligonucleotide
  Antisense strand to SEQ ID NO: 1690857
auucaucuacagaacguag

SEQ ID NO: 1690859 - RNA, 19 nt, Artificial Sequence
  Description of Artificial Sequence: Synthetic oligonucleotide
  Sense strand starting at position 199 of SEQ ID NO: 1561688
guagaugaauguccuuguu

SEQ ID NO: 1690860 - RNA, 19 nt, Artificial Sequence
  Description of Artificial Sequence: Synthetic oligonucleotide
  Antisense strand to SEQ ID NO: 1690859
aacaaggacauucaucuac

SEQ ID NO: 1690861 - RNA, 19 nt, Artificial Sequence
  Description of Artificial Sequence: Synthetic oligonucleotide
  Sense strand starting at position 201 of SEQ ID NO: 1561688
agaugaauguccuuguucu

SEQ ID NO: 1690862 - RNA, 19 nt, Artificial Sequence
  Description of Artificial Sequence: Synthetic oligonucleotide
  Antisense strand to SEQ ID NO: 1690861
agaacaaggacauucaucu

SEQ ID NO: 1690863 - RNA, 19 nt, Artificial Sequence
  Description of Artificial Sequence: Synthetic oligonucleotide
  Sense strand starting at position 202 of SEQ ID NO: 1561688
gaugaauguccuuguucuu

SEQ ID NO: 1690864 - RNA, 19 nt, Artificial Sequence
  Description of Artificial Sequence: Synthetic oligonucleotide
  Antisense strand to SEQ ID NO: 1690863
aagaacaaggacauucauc

SEQ ID NO: 1690865 - RNA, 19 nt, Artificial Sequence
  Description of Artificial Sequence: Synthetic oligonucleotide
  Sense strand starting at position 302 of SEQ ID NO: 1561688
aaugaaguguguuccagug

SEQ ID NO: 1690866 - RNA, 19 nt, Artificial Sequence
  Description of Artificial Sequence: Synthetic oligonucleotide
  Antisense strand to SEQ ID NO: 1690865
cacuggaacacacuucauu

SEQ ID NO: 1690867 - RNA, 19 nt, Artificial Sequence
  Description of Artificial Sequence: Synthetic oligonucleotide
  Sense strand starting at position 311 of SEQ ID NO: 1561688
uguuccagugucuaaauau

SEQ ID NO: 1690868 - RNA, 19 nt, Artificial Sequence
  Description of Artificial Sequence: Synthetic oligonucleotide
  Antisense strand to SEQ ID NO: 1690867
auauuuagacacuggaaca

SEQ ID NO: 1690869 - RNA, 19 nt, Artificial Sequence
  Description of Artificial Sequence: Synthetic oligonucleotide
  Sense strand starting at position 431 of SEQ ID NO: 1561688
uuuccaaugguuugaaauu

SEQ ID NO: 1690870 - RNA, 19 nt, Artificial Sequence
  Description of Artificial Sequence: Synthetic oligonucleotide
  Antisense strand to SEQ ID NO: 1690869
aauuucaaaccauuggaaa

SEQ ID NO: 1690871 - RNA, 19 nt, Artificial Sequence
  Description of Artificial Sequence: Synthetic oligonucleotide
  Sense strand starting at position 432 of SEQ ID NO: 1561688
uuccaaugguuugaaauuu

SEQ ID NO: 1690872 - RNA, 19 nt, Artificial Sequence
  Description of Artificial Sequence: Synthetic oligonucleotide
  Antisense strand to SEQ ID NO: 1690871
aaauuucaaaccauuggaa

SEQ ID NO: 1690873 - RNA, 19 nt, Artificial Sequence
  Description of Artificial Sequence: Synthetic oligonucleotide
  Sense strand starting at position 480 of SEQ ID NO: 1561688
uaggguagcuaagauauuu

SEQ ID NO: 1690874 - RNA, 19 nt, Artificial Sequence
  Description of Artificial Sequence: Synthetic oligonucleotide
  Antisense strand to SEQ ID NO: 1690873
aaauaucuuagcuacccua

SEQ ID NO: 1690875 - RNA, 19 nt, Artificial Sequence
  Description of Artificial Sequence: Synthetic oligonucleotide
  Sense strand starting at position 518 of SEQ ID NO: 1561688
gagacugucauggguuacu

SEQ ID NO: 1690876 - RNA, 19 nt, Artificial Sequence
  Description of Artificial Sequence: Synthetic oligonucleotide
  Antisense strand to SEQ ID NO: 1690875
aguaacccaugacagucuc

SEQ ID NO: 1690877 - RNA, 19 nt, Artificial Sequence
  Description of Artificial Sequence: Synthetic oligonucleotide
  Sense strand starting at position 527 of SEQ ID NO: 1561688
auggguuacucagucacaa

SEQ ID NO: 1690878 - RNA, 19 nt, Artificial Sequence
  Description of Artificial Sequence: Synthetic oligonucleotide
  Antisense strand to SEQ ID NO: 1690877
uugugacugaguaacccau

SEQ ID NO: 1690879 - RNA, 19 nt, Artificial Sequence
  Description of Artificial Sequence: Synthetic oligonucleotide
  Sense strand starting at position 615 of SEQ ID NO: 1561688
ccggaaugcagugguauaa

SEQ ID NO: 1690880 - RNA, 19 nt, Artificial Sequence
  Description of Artificial Sequence: Synthetic oligonucleotide
  Antisense strand to SEQ ID NO: 1690879
uuauaccacugcauuccgg

SEQ ID NO: 1690881 - RNA, 19 nt, Artificial Sequence
  Description of Artificial Sequence: Synthetic oligonucleotide
  Sense strand starting at position 1016 of SEQ ID NO: 1561688
uuucuuuaugucuggguaa

SEQ ID NO: 1690882 - RNA, 19 nt, Artificial Sequence
  Description of Artificial Sequence: Synthetic oligonucleotide
  Antisense strand to SEQ ID NO: 1690881
uuacccagacauaaagaaa

SEQ ID NO: 1690883 - RNA, 19 nt, Artificial Sequence
  Description of Artificial Sequence: Synthetic oligonucleotide
  Sense strand starting at position 1018 of SEQ ID NO: 1561688
ucuuuaugucuggguaaau

SEQ ID NO: 1690884 - RNA, 19 nt, Artificial Sequence
  Description of Artificial Sequence: Synthetic oligonucleotide
  Antisense strand to SEQ ID NO: 1690883
auuuacccagacauaaaga

SEQ ID NO: 1690885 - RNA, 19 nt, Artificial Sequence
  Description of Artificial Sequence: Synthetic oligonucleotide
  Sense strand starting at position 1019 of SEQ ID NO: 1561688
cuuuaugucuggguaaauu

SEQ ID NO: 1690886 - RNA, 19 nt, Artificial Sequence
  Description of Artificial Sequence: Synthetic oligonucleotide
  Antisense strand to SEQ ID NO: 1690885
aauuuacccagacauaaag

SEQ ID NO: 1690887 - RNA, 19 nt, Artificial Sequence
  Description of Artificial Sequence: Synthetic oligonucleotide
  Sense strand starting at position 1249 of SEQ ID NO: 1561688
caugaagucugucugaaag

SEQ ID NO: 1690888 - RNA, 19 nt, Artificial Sequence
  Description of Artificial Sequence: Synthetic oligonucleotide
  Antisense strand to SEQ ID NO: 1690887
cuuucagacagacuucaug

SEQ ID NO: 1690889 - RNA, 19 nt, Artificial Sequence
  Description of Artificial Sequence: Synthetic oligonucleotide
  Sense strand starting at position 1259 of SEQ ID NO: 1561688
gucugaaagcuccagcuuu

SEQ ID NO: 1690890 - RNA, 19 nt, Artificial Sequence
  Description of Artificial Sequence: Synthetic oligonucleotide
  Antisense strand to SEQ ID NO: 1690889
aaagcuggagcuuucagac

SEQ ID NO: 1690891 - RNA, 19 nt, Artificial Sequence
  Description of Artificial Sequence: Synthetic oligonucleotide
  Sense strand starting at position 1485 of SEQ ID NO: 1561688
aggaguuugcuggacgcaa

SEQ ID NO: 1690892 - RNA, 19 nt, Artificial Sequence
  Description of Artificial Sequence: Synthetic oligonucleotide
  Antisense strand to SEQ ID NO: 1690891
uugcguccagcaaacuccu

SEQ ID NO: 1690893 - RNA, 19 nt, Artificial Sequence
  Description of Artificial Sequence: Synthetic oligonucleotide
  Sense strand starting at position 1533 of SEQ ID NO: 1561688
gcugauuucuacuacaaag

SEQ ID NO: 1690894 - RNA, 19 nt, Artificial Sequence
  Description of Artificial Sequence: Synthetic oligonucleotide
  Antisense strand to SEQ ID NO: 1690893
cuuuguaguagaaaucagc

SEQ ID NO: 1690895 - RNA, 19 nt, Artificial Sequence
  Description of Artificial Sequence: Synthetic oligonucleotide
  Sense strand starting at position 2171 of SEQ ID NO: 1561688
cuucgaagagcucagugua

SEQ ID NO: 1690896 - RNA, 19 nt, Artificial Sequence
  Description of Artificial Sequence: Synthetic oligonucleotide
  Antisense strand to SEQ ID NO: 1690895
uacacugagcucuucgaag

SEQ ID NO: 1690897 - RNA, 19 nt, Artificial Sequence
  Description of Artificial Sequence: Synthetic oligonucleotide
  Sense strand starting at position 2174 of SEQ ID NO: 1561688
cgaagagcucaguguauga

SEQ ID NO: 1690898 - RNA, 19 nt, Artificial Sequence
  Description of Artificial Sequence: Synthetic oligonucleotide
  Antisense strand to SEQ ID NO: 1690897
ucauacacugagcucuucg

SEQ ID NO: 1690899 - RNA, 19 nt, Artificial Sequence
  Description of Artificial Sequence: Synthetic oligonucleotide
  Sense strand starting at position 2209 of SEQ ID NO: 1561688
uccuuugaacucuguggaa

SEQ ID NO: 1690900 - RNA, 19 nt, Artificial Sequence
  Description of Artificial Sequence: Synthetic oligonucleotide
  Antisense strand to SEQ ID NO: 1690899
uuccacagaguucaaagga

SEQ ID NO: 1690901 - RNA, 19 nt, Artificial Sequence
  Description of Artificial Sequence: Synthetic oligonucleotide
  Sense strand starting at position 2211 of SEQ ID NO: 1561688
cuuugaacucuguggaaca

SEQ ID NO: 1690902 - RNA, 19 nt, Artificial Sequence
  Description of Artificial Sequence: Synthetic oligonucleotide
  Antisense strand to SEQ ID NO: 1690901
uguuccacagaguucaaag

SEQ ID NO: 1690903 - RNA, 19 nt, Artificial Sequence
  Description of Artificial Sequence: Synthetic oligonucleotide
  Sense strand starting at position 2252 of SEQ ID NO: 1561688
ucauuucccugaugagagg

SEQ ID NO: 1690904 - RNA, 19 nt, Artificial Sequence
  Description of Artificial Sequence: Synthetic oligonucleotide
  Antisense strand to SEQ ID NO: 1690903
ccucucaucagggaaauga

SEQ ID NO: 1690905 - RNA, 19 nt, Artificial Sequence
  Description of Artificial Sequence: Synthetic oligonucleotide
  Sense strand starting at position 2446 of SEQ ID NO: 1561688
cuggucuuugcucauggua

SEQ ID NO: 1690906 - RNA, 19 nt, Artificial Sequence
  Description of Artificial Sequence: Synthetic oligonucleotide
  Antisense strand to SEQ ID NO: 1690905
uaccaugagcaaagaccag

SEQ ID NO: 1690907 - RNA, 19 nt, Artificial Sequence
  Description of Artificial Sequence: Synthetic oligonucleotide
  Sense strand starting at position 2470 of SEQ ID NO: 1561688
ugaauaacaucuucugggu

SEQ ID NO: 1690908 - RNA, 19 nt, Artificial Sequence
  Description of Artificial Sequence: Synthetic oligonucleotide
  Antisense strand to SEQ ID NO: 1690907
acccagaagauguuauuca

SEQ ID NO: 1690909 - RNA, 19 nt, Artificial Sequence
  Description of Artificial Sequence: Synthetic oligonucleotide
  Sense strand starting at position 3087 of SEQ ID NO: 1561688
gcuaucuucuugucagaca

SEQ ID NO: 1690910 - RNA, 19 nt, Artificial Sequence
  Description of Artificial Sequence: Synthetic oligonucleotide
  Antisense strand to SEQ ID NO: 1690909
ugucugacaagaagauagc

SEQ ID NO: 1690911 - RNA, 19 nt, Artificial Sequence
  Description of Artificial Sequence: Synthetic oligonucleotide
  Sense strand starting at position 3976 of SEQ ID NO: 1561688
gucugaaauucucuguaau

SEQ ID NO: 1690912 - RNA, 19 nt, Artificial Sequence
  Description of Artificial Sequence: Synthetic oligonucleotide
  Antisense strand to SEQ ID NO: 1690911
auuacagagaauuucagac

SEQ ID NO: 1690913 - RNA, 19 nt, Artificial Sequence
  Description of Artificial Sequence: Synthetic oligonucleotide
  Sense strand starting at position 3977 of SEQ ID NO: 1561688
ucugaaauucucuguaaug

SEQ ID NO: 1690914 - RNA, 19 nt, Artificial Sequence
  Description of Artificial Sequence: Synthetic oligonucleotide
  Antisense strand to SEQ ID NO: 1690913
cauuacagagaauuucaga

SEQ ID NO: 1690915 - RNA, 19 nt, Artificial Sequence
  Description of Artificial Sequence: Synthetic oligonucleotide
  Sense strand starting at position 3978 of SEQ ID NO: 1561688
cugaaauucucuguaauga

SEQ ID NO: 1690916 - RNA, 19 nt, Artificial Sequence
  Description of Artificial Sequence: Synthetic oligonucleotide
  Antisense strand to SEQ ID NO: 1690915
ucauuacagagaauuucag

SEQ ID NO: 1690917 - RNA, 19 nt, Artificial Sequence
  Description of Artificial Sequence: Synthetic oligonucleotide
  Sense strand starting at position 4 of SEQ ID NO: 1561689
ugugaaauguucuugggua

SEQ ID NO: 1690918 - RNA, 19 nt, Artificial Sequence
  Description of Artificial Sequence: Synthetic oligonucleotide
  Antisense strand to SEQ ID NO: 1690917
uacccaagaacauuucaca

SEQ ID NO: 1690919 - RNA, 19 nt, Artificial Sequence
  Description of Artificial Sequence: Synthetic oligonucleotide
  Sense strand starting at position 6 of SEQ ID NO: 1561689
ugaaauguucuuggguaug

SEQ ID NO: 1690920 - RNA, 19 nt, Artificial Sequence
  Description of Artificial Sequence: Synthetic oligonucleotide
  Antisense strand to SEQ ID NO: 1690919
cauacccaagaacauuuca

SEQ ID NO: 1690921 - RNA, 19 nt, Artificial Sequence
  Description of Artificial Sequence: Synthetic oligonucleotide
  Sense strand starting at position 8 of SEQ ID NO: 1561689
aaauguucuuggguaugau

SEQ ID NO: 1690922 - RNA, 19 nt, Artificial Sequence
  Description of Artificial Sequence: Synthetic oligonucleotide
  Antisense strand to SEQ ID NO: 1690921
aucauacccaagaacauuu

SEQ ID NO: 1690923 - RNA, 19 nt, Artificial Sequence
  Description of Artificial Sequence: Synthetic oligonucleotide
  Sense strand starting at position 9 of SEQ ID NO: 1561689
aauguucuuggguaugaug

SEQ ID NO: 1690924 - RNA, 19 nt, Artificial Sequence
  Description of Artificial Sequence: Synthetic oligonucleotide
  Antisense strand to SEQ ID NO: 1690923
caucauacccaagaacauu

SEQ ID NO: 1690925 - RNA, 19 nt, Artificial Sequence
  Description of Artificial Sequence: Synthetic oligonucleotide
  Sense strand starting at position 11 of SEQ ID NO: 1561689
uguucuuggguaugaugau

SEQ ID NO: 1690926 - RNA, 19 nt, Artificial Sequence
  Description of Artificial Sequence: Synthetic oligonucleotide
  Antisense strand to SEQ ID NO: 1690925
aucaucauacccaagaaca

SEQ ID NO: 1690927 - RNA, 19 nt, Artificial Sequence
  Description of Artificial Sequence: Synthetic oligonucleotide
  Sense strand starting at position 20 of SEQ ID NO: 1561689
guaugaugauauguagaua

SEQ ID NO: 1690928 - RNA, 19 nt, Artificial Sequence
  Description of Artificial Sequence: Synthetic oligonucleotide
  Antisense strand to SEQ ID NO: 1690927
uaucuacauaucaucauac

SEQ ID NO: 1690929 - RNA, 19 nt, Artificial Sequence
  Description of Artificial Sequence: Synthetic oligonucleotide
  Sense strand starting at position 42 of SEQ ID NO: 1561689
uucuacguucuguagauga

SEQ ID NO: 1690930 - RNA, 19 nt, Artificial Sequence
  Description of Artificial Sequence: Synthetic oligonucleotide
  Antisense strand to SEQ ID NO: 1690929
ucaucuacagaacguagaa

SEQ ID NO: 1690931 - RNA, 19 nt, Artificial Sequence
  Description of Artificial Sequence: Synthetic oligonucleotide
  Sense strand starting at position 44 of SEQ ID NO: 1561689
cuacguucuguagaugaau

SEQ ID NO: 1690932 - RNA, 19 nt, Artificial Sequence
  Description of Artificial Sequence: Synthetic oligonucleotide
  Antisense strand to SEQ ID NO: 1690931
auucaucuacagaacguag

SEQ ID NO: 1690933 - RNA, 19 nt, Artificial Sequence
  Description of Artificial Sequence: Synthetic oligonucleotide
  Sense strand starting at position 53 of SEQ ID NO: 1561689
guagaugaauguccuuguu

SEQ ID NO: 1690934 - RNA, 19 nt, Artificial Sequence
  Description of Artificial Sequence: Synthetic oligonucleotide
  Antisense strand to SEQ ID NO: 1690933
aacaaggacauucaucuac

SEQ ID NO: 1690935 - RNA, 19 nt, Artificial Sequence
  Description of Artificial Sequence: Synthetic oligonucleotide
  Sense strand starting at position 55 of SEQ ID NO: 1561689
agaugaauguccuuguucu

SEQ ID NO: 1690936 - RNA, 19 nt, Artificial Sequence
  Description of Artificial Sequence: Synthetic oligonucleotide
  Antisense strand to SEQ ID NO: 1690935
agaacaaggacauucaucu

SEQ ID NO: 1690937 - RNA, 19 nt, Artificial Sequence
  Description of Artificial Sequence: Synthetic oligonucleotide
  Sense strand starting at position 56 of SEQ ID NO: 1561689
gaugaauguccuuguucuu

SEQ ID NO: 1690938 - RNA, 19 nt, Artificial Sequence
  Description of Artificial Sequence: Synthetic oligonucleotide
  Antisense strand to SEQ ID NO: 1690937
aagaacaaggacauucauc

SEQ ID NO: 1690939 - RNA, 19 nt, Artificial Sequence
  Description of Artificial Sequence: Synthetic oligonucleotide
  Sense strand starting at position 156 of SEQ ID NO: 1561689
aaugaaguguguuccagug

SEQ ID NO: 1690940 - RNA, 19 nt, Artificial Sequence
  Description of Artificial Sequence: Synthetic oligonucleotide
  Antisense strand to SEQ ID NO: 1690939
cacuggaacacacuucauu

SEQ ID NO: 1690941 - RNA, 19 nt, Artificial Sequence
  Description of Artificial Sequence: Synthetic oligonucleotide
  Sense strand starting at position 165 of SEQ ID NO: 1561689
uguuccagugucuaaauau

SEQ ID NO: 1690942 - RNA, 19 nt, Artificial Sequence
  Description of Artificial Sequence: Synthetic oligonucleotide
  Antisense strand to SEQ ID NO: 1690941
auauuuagacacuggaaca

SEQ ID NO: 1690943 - RNA, 19 nt, Artificial Sequence
  Description of Artificial Sequence: Synthetic oligonucleotide
  Sense strand starting at position 285 of SEQ ID NO: 1561689
uuuccaaugguuugaaauu

SEQ ID NO: 1690944 - RNA, 19 nt, Artificial Sequence
  Description of Artificial Sequence: Synthetic oligonucleotide
  Antisense strand to SEQ ID NO: 1690943
aauuucaaaccauuggaaa

SEQ ID NO: 1690945 - RNA, 19 nt, Artificial Sequence
  Description of Artificial Sequence: Synthetic oligonucleotide
  Sense strand starting at position 286 of SEQ ID NO: 1561689
uuccaaugguuugaaauuu

SEQ ID NO: 1690946 - RNA, 19 nt, Artificial Sequence
  Description of Artificial Sequence: Synthetic oligonucleotide
  Antisense strand to SEQ ID NO: 1690945
aaauuucaaaccauuggaa

SEQ ID NO: 1690947 - RNA, 19 nt, Artificial Sequence
  Description of Artificial Sequence: Synthetic oligonucleotide
  Sense strand starting at position 334 of SEQ ID NO: 1561689
uaggguagcuaagauauuu

SEQ ID NO: 1690948 - RNA, 19 nt, Artificial Sequence
  Description of Artificial Sequence: Synthetic oligonucleotide
  Antisense strand to SEQ ID NO: 1690947
aaauaucuuagcuacccua

SEQ ID NO: 1690949 - RNA, 19 nt, Artificial Sequence
  Description of Artificial Sequence: Synthetic oligonucleotide
  Sense strand starting at position 372 of SEQ ID NO: 1561689
gagacugucauggguuacu

SEQ ID NO: 1690950 - RNA, 19 nt, Artificial Sequence
  Description of Artificial Sequence: Synthetic oligonucleotide
  Antisense strand to SEQ ID NO: 1690949
aguaacccaugacagucuc

SEQ ID NO: 1690951 - RNA, 19 nt, Artificial Sequence
  Description of Artificial Sequence: Synthetic oligonucleotide
  Sense strand starting at position 381 of SEQ ID NO: 1561689
auggguuacucagucacaa

SEQ ID NO: 1690952 - RNA, 19 nt, Artificial Sequence
  Description of Artificial Sequence: Synthetic oligonucleotide
  Antisense strand to SEQ ID NO: 1690951
uugugacugaguaacccau

SEQ ID NO: 1690953 - RNA, 19 nt, Artificial Sequence
  Description of Artificial Sequence: Synthetic oligonucleotide
  Sense strand starting at position 469 of SEQ ID NO: 1561689
ccggaaugcagugguauaa

SEQ ID NO: 1690954 - RNA, 19 nt, Artificial Sequence
  Description of Artificial Sequence: Synthetic oligonucleotide
  Antisense strand to SEQ ID NO: 1690953
uuauaccacugcauuccgg

SEQ ID NO: 1690955 - RNA, 19 nt, Artificial Sequence
  Description of Artificial Sequence: Synthetic oligonucleotide
  Sense strand starting at position 870 of SEQ ID NO: 1561689
uuucuuuaugucuggguaa

SEQ ID NO: 1690956 - RNA, 19 nt, Artificial Sequence
  Description of Artificial Sequence: Synthetic oligonucleotide
  Antisense strand to SEQ ID NO: 1690955
uuacccagacauaaagaaa

SEQ ID NO: 1690957 - RNA, 19 nt, Artificial Sequence
  Description of Artificial Sequence: Synthetic oligonucleotide
  Sense strand starting at position 872 of SEQ ID NO: 1561689
ucuuuaugucuggguaaau

SEQ ID NO: 1690958 - RNA, 19 nt, Artificial Sequence
  Description of Artificial Sequence: Synthetic oligonucleotide
  Antisense strand to SEQ ID NO: 1690957
auuuacccagacauaaaga

SEQ ID NO: 1690959 - RNA, 19 nt, Artificial Sequence
  Description of Artificial Sequence: Synthetic oligonucleotide
  Sense strand starting at position 873 of SEQ ID NO: 1561689
cuuuaugucuggguaaauu

SEQ ID NO: 1690960 - RNA, 19 nt, Artificial Sequence
  Description of Artificial Sequence: Synthetic oligonucleotide
  Antisense strand to SEQ ID NO: 1690959
aauuuacccagacauaaag

SEQ ID NO: 1690961 - RNA, 19 nt, Artificial Sequence
  Description of Artificial Sequence: Synthetic oligonucleotide
  Sense strand starting at position 1103 of SEQ ID NO: 1561689
caugaagucugucugaaag

SEQ ID NO: 1690962 - RNA, 19 nt, Artificial Sequence
  Description of Artificial Sequence: Synthetic oligonucleotide
  Antisense strand to SEQ ID NO: 1690961
cuuucagacagacuucaug

SEQ ID NO: 1690963 - RNA, 19 nt, Artificial Sequence
  Description of Artificial Sequence: Synthetic oligonucleotide
  Sense strand starting at position 1113 of SEQ ID NO: 1561689
gucugaaagcuccagcuuu

SEQ ID NO: 1690964 - RNA, 19 nt, Artificial Sequence
  Description of Artificial Sequence: Synthetic oligonucleotide
  Antisense strand to SEQ ID NO: 1690963
aaagcuggagcuuucagac

SEQ ID NO: 1690965 - RNA, 19 nt, Artificial Sequence
  Description of Artificial Sequence: Synthetic oligonucleotide
  Sense strand starting at position 1339 of SEQ ID NO: 1561689
aggaguuugcuggacgcaa

SEQ ID NO: 1690966 - RNA, 19 nt, Artificial Sequence
  Description of Artificial Sequence: Synthetic oligonucleotide
  Antisense strand to SEQ ID NO: 1690965
uugcguccagcaaacuccu

SEQ ID NO: 1690967 - RNA, 19 nt, Artificial Sequence
  Description of Artificial Sequence: Synthetic oligonucleotide
  Sense strand starting at position 1387 of SEQ ID NO: 1561689
gcugauuucuacuacaaag

SEQ ID NO: 1690968 - RNA, 19 nt, Artificial Sequence
  Description of Artificial Sequence: Synthetic oligonucleotide
  Antisense strand to SEQ ID NO: 1690967
cuuuguaguagaaaucagc

SEQ ID NO: 1690969 - RNA, 19 nt, Artificial Sequence
  Description of Artificial Sequence: Synthetic oligonucleotide
  Sense strand starting at position 2003 of SEQ ID NO: 1561689
gcuuuauagggcgaaguuc

SEQ ID NO: 1690970 - RNA, 19 nt, Artificial Sequence
  Description of Artificial Sequence: Synthetic oligonucleotide
  Antisense strand to SEQ ID NO: 1690969
gaacuucgcccuauaaagc

SEQ ID NO: 1690971 - RNA, 19 nt, Artificial Sequence
  Description of Artificial Sequence: Synthetic oligonucleotide
  Sense strand starting at position 2025 of SEQ ID NO: 1561689
cuucgaagagcucagugua

SEQ ID NO: 1690972 - RNA, 19 nt, Artificial Sequence
  Description of Artificial Sequence: Synthetic oligonucleotide
  Antisense strand to SEQ ID NO: 1690971
uacacugagcucuucgaag

SEQ ID NO: 1690973 - RNA, 19 nt, Artificial Sequence
  Description of Artificial Sequence: Synthetic oligonucleotide
  Sense strand starting at position 2028 of SEQ ID NO: 1561689
cgaagagcucaguguauga

SEQ ID NO: 1690974 - RNA, 19 nt, Artificial Sequence
  Description of Artificial Sequence: Synthetic oligonucleotide
  Antisense strand to SEQ ID NO: 1690973
ucauacacugagcucuucg

SEQ ID NO: 1690975 - RNA, 19 nt, Artificial Sequence
  Description of Artificial Sequence: Synthetic oligonucleotide
  Sense strand starting at position 2063 of SEQ ID NO: 1561689
uccuuugaacucuguggaa

SEQ ID NO: 1690976 - RNA, 19 nt, Artificial Sequence
  Description of Artificial Sequence: Synthetic oligonucleotide
  Antisense strand to SEQ ID NO: 1690975
uuccacagaguucaaagga

SEQ ID NO: 1690977 - RNA, 19 nt, Artificial Sequence
  Description of Artificial Sequence: Synthetic oligonucleotide
  Sense strand starting at position 2065 of SEQ ID NO: 1561689
cuuugaacucuguggaaca

SEQ ID NO: 1690978 - RNA, 19 nt, Artificial Sequence
  Description of Artificial Sequence: Synthetic oligonucleotide
  Antisense strand to SEQ ID NO: 1690977
uguuccacagaguucaaag

SEQ ID NO: 1690979 - RNA, 19 nt, Artificial Sequence
  Description of Artificial Sequence: Synthetic oligonucleotide
  Sense strand starting at position 2106 of SEQ ID NO: 1561689
ucauuucccugaugagagg

SEQ ID NO: 1690980 - RNA, 19 nt, Artificial Sequence
  Description of Artificial Sequence: Synthetic oligonucleotide
  Antisense strand to SEQ ID NO: 1690979
ccucucaucagggaaauga

SEQ ID NO: 1690981 - RNA, 19 nt, Artificial Sequence
  Description of Artificial Sequence: Synthetic oligonucleotide
  Sense strand starting at position 2300 of SEQ ID NO: 1561689
cuggucuuugcucauggua

SEQ ID NO: 1690982 - RNA, 19 nt, Artificial Sequence
  Description of Artificial Sequence: Synthetic oligonucleotide
  Antisense strand to SEQ ID NO: 1690981
uaccaugagcaaagaccag

SEQ ID NO: 1690983 - RNA, 19 nt, Artificial Sequence
  Description of Artificial Sequence: Synthetic oligonucleotide
  Sense strand starting at position 2324 of SEQ ID NO: 1561689
ugaauaacaucuucugggu

SEQ ID NO: 1690984 - RNA, 19 nt, Artificial Sequence
  Description of Artificial Sequence: Synthetic oligonucleotide
  Antisense strand to SEQ ID NO: 1690983
acccagaagauguuauuca

SEQ ID NO: 1690985 - RNA, 19 nt, Artificial Sequence
  Description of Artificial Sequence: Synthetic oligonucleotide
  Sense strand starting at position 2941 of SEQ ID NO: 1561689
gcuaucuucuugucagaca

SEQ ID NO: 1690986 - RNA, 19 nt, Artificial Sequence
  Description of Artificial Sequence: Synthetic oligonucleotide
  Antisense strand to SEQ ID NO: 1690985
ugucugacaagaagauagc

SEQ ID NO: 1690987 - RNA, 19 nt, Artificial Sequence
  Description of Artificial Sequence: Synthetic oligonucleotide
  Sense strand starting at position 3830 of SEQ ID NO: 1561689
gucugaaauucucuguaau

SEQ ID NO: 1690988 - RNA, 19 nt, Artificial Sequence
  Description of Artificial Sequence: Synthetic oligonucleotide
  Antisense strand to SEQ ID NO: 1690987
auuacagagaauuucagac

SEQ ID NO: 1690989 - RNA, 19 nt, Artificial Sequence
  Description of Artificial Sequence: Synthetic oligonucleotide
  Sense strand starting at position 3831 of SEQ ID NO: 1561689
ucugaaauucucuguaaug

SEQ ID NO: 1690990 - RNA, 19 nt, Artificial Sequence
  Description of Artificial Sequence: Synthetic oligonucleotide
  Antisense strand to SEQ ID NO: 1690989
cauuacagagaauuucaga

SEQ ID NO: 1690991 - RNA, 19 nt, Artificial Sequence
  Description of Artificial Sequence: Synthetic oligonucleotide
  Sense strand starting at position 3832 of SEQ ID NO: 1561689
cugaaauucucuguaauga

SEQ ID NO: 1690992 - RNA, 19 nt, Artificial Sequence
  Description of Artificial Sequence: Synthetic oligonucleotide
  Antisense strand to SEQ ID NO: 1690991
ucauuacagagaauuucag

SEQ ID NO: 1690993 - RNA, 19 nt, Artificial Sequence
  Description of Artificial Sequence: Synthetic oligonucleotide
  Sense strand starting at position 3862 of SEQ ID NO: 1561689
ggauaaacuugcccaaggu

SEQ ID NO: 1690994 - RNA, 19 nt, Artificial Sequence
  Description of Artificial Sequence: Synthetic oligonucleotide
  Antisense strand to SEQ ID NO: 1690993
accuugggcaaguuuaucc

SEQ ID NO: 1690995 - RNA, 19 nt, Artificial Sequence
  Description of Artificial Sequence: Synthetic oligonucleotide
  Sense strand starting at position 3954 of SEQ ID NO: 1561689
gaugguuuccaucaacuug

SEQ ID NO: 1690996 - RNA, 19 nt, Artificial Sequence
  Description of Artificial Sequence: Synthetic oligonucleotide
  Antisense strand to SEQ ID NO: 1690995
caaguugauggaaaccauc

SEQ ID NO: 1690997 - RNA, 19 nt, Artificial Sequence
  Description of Artificial Sequence: Synthetic oligonucleotide
  Sense strand starting at position 172 of SEQ ID NO: 1561690
ccgauauuguacuacugca

SEQ ID NO: 1690998 - RNA, 19 nt, Artificial Sequence
  Description of Artificial Sequence: Synthetic oligonucleotide
  Antisense strand to SEQ ID NO: 1690997
ugcaguaguacaauaucgg

SEQ ID NO: 1690999 - RNA, 19 nt, Artificial Sequence
  Description of Artificial Sequence: Synthetic oligonucleotide
  Sense strand starting at position 472 of SEQ ID NO: 1561690
ccgccucuuuaguuggaaa

SEQ ID NO: 1691000 - RNA, 19 nt, Artificial Sequence
  Description of Artificial Sequence: Synthetic oligonucleotide
  Antisense strand to SEQ ID NO: 1690999
uuuccaacuaaagaggcgg

SEQ ID NO: 1691001 - RNA, 19 nt, Artificial Sequence
  Description of Artificial Sequence: Synthetic oligonucleotide
  Sense strand starting at position 473 of SEQ ID NO: 1561690
cgccucuuuaguuggaaau

SEQ ID NO: 1691002 - RNA, 19 nt, Artificial Sequence
  Description of Artificial Sequence: Synthetic oligonucleotide
  Antisense strand to SEQ ID NO: 1691001
auuuccaacuaaagaggcg

SEQ ID NO: 1691003 - RNA, 19 nt, Artificial Sequence
  Description of Artificial Sequence: Synthetic oligonucleotide
  Sense strand starting at position 474 of SEQ ID NO: 1561690
gccucuuuaguuggaaauu

SEQ ID NO: 1691004 - RNA, 19 nt, Artificial Sequence
  Description of Artificial Sequence: Synthetic oligonucleotide
  Antisense strand to SEQ ID NO: 1691003
aauuuccaacuaaagaggc

SEQ ID NO: 1691005 - RNA, 19 nt, Artificial Sequence
  Description of Artificial Sequence: Synthetic oligonucleotide
  Sense strand starting at position 475 of SEQ ID NO: 1561690
ccucuuuaguuggaaauuu

SEQ ID NO: 1691006 - RNA, 19 nt, Artificial Sequence
  Description of Artificial Sequence: Synthetic oligonucleotide
  Antisense strand to SEQ ID NO: 1691005
aaauuuccaacuaaagagg

SEQ ID NO: 1691007 - RNA, 19 nt, Artificial Sequence
  Description of Artificial Sequence: Synthetic oligonucleotide
  Sense strand starting at position 623 of SEQ ID NO: 1561690
ggacaucagcucugagacu

SEQ ID NO: 1691008 - RNA, 19 nt, Artificial Sequence
  Description of Artificial Sequence: Synthetic oligonucleotide
  Antisense strand to SEQ ID NO: 1691007
agucucagagcugaugucc

SEQ ID NO: 1691009 - RNA, 19 nt, Artificial Sequence
  Description of Artificial Sequence: Synthetic oligonucleotide
  Sense strand starting at position 624 of SEQ ID NO: 1561690
gacaucagcucugagacua

SEQ ID NO: 1691010 - RNA, 19 nt, Artificial Sequence
  Description of Artificial Sequence: Synthetic oligonucleotide
  Antisense strand to SEQ ID NO: 1691009
uagucucagagcugauguc

SEQ ID NO: 1691011 - RNA, 19 nt, Artificial Sequence
  Description of Artificial Sequence: Synthetic oligonucleotide
  Sense strand starting at position 635 of SEQ ID NO: 1561690
ugagacuaguacucagagu

SEQ ID NO: 1691012 - RNA, 19 nt, Artificial Sequence
  Description of Artificial Sequence: Synthetic oligonucleotide
  Antisense strand to SEQ ID NO: 1691011
acucugaguacuagucuca

SEQ ID NO: 1691013 - RNA, 19 nt, Artificial Sequence
  Description of Artificial Sequence: Synthetic oligonucleotide
  Sense strand starting at position 704 of SEQ ID NO: 1561690
ugucuuacuuaggauguca

SEQ ID NO: 1691014 - RNA, 19 nt, Artificial Sequence
  Description of Artificial Sequence: Synthetic oligonucleotide
  Antisense strand to SEQ ID NO: 1691013
ugacauccuaaguaagaca

SEQ ID NO: 1691015 - RNA, 19 nt, Artificial Sequence
  Description of Artificial Sequence: Synthetic oligonucleotide
  Sense strand starting at position 756 of SEQ ID NO: 1561690
auguuuaucuguuuccuca

SEQ ID NO: 1691016 - RNA, 19 nt, Artificial Sequence
  Description of Artificial Sequence: Synthetic oligonucleotide
  Antisense strand to SEQ ID NO: 1691015
ugaggaaacagauaaacau

SEQ ID NO: 1691017 - RNA, 19 nt, Artificial Sequence
  Description of Artificial Sequence: Synthetic oligonucleotide
  Sense strand starting at position 758 of SEQ ID NO: 1561690
guuuaucuguuuccucauu

SEQ ID NO: 1691018 - RNA, 19 nt, Artificial Sequence
  Description of Artificial Sequence: Synthetic oligonucleotide
  Antisense strand to SEQ ID NO: 1691017
aaugaggaaacagauaaac

SEQ ID NO: 1691019 - RNA, 19 nt, Artificial Sequence
  Description of Artificial Sequence: Synthetic oligonucleotide
  Sense strand starting at position 818 of SEQ ID NO: 1561690
uucggucuaucuuguuuau

SEQ ID NO: 1691020 - RNA, 19 nt, Artificial Sequence
  Description of Artificial Sequence: Synthetic oligonucleotide
  Antisense strand to SEQ ID NO: 1691019
auaaacaagauagaccgaa

SEQ ID NO: 1691021 - RNA, 19 nt, Artificial Sequence
  Description of Artificial Sequence: Synthetic oligonucleotide
  Sense strand starting at position 820 of SEQ ID NO: 1561690
cggucuaucuuguuuauug

SEQ ID NO: 1691022 - RNA, 19 nt, Artificial Sequence
  Description of Artificial Sequence: Synthetic oligonucleotide
  Antisense strand to SEQ ID NO: 1691021
caauaaacaagauagaccg

SEQ ID NO: 1691023 - RNA, 19 nt, Artificial Sequence
  Description of Artificial Sequence: Synthetic oligonucleotide
  Sense strand starting at position 821 of SEQ ID NO: 1561690
ggucuaucuuguuuauugu

SEQ ID NO: 1691024 - RNA, 19 nt, Artificial Sequence
  Description of Artificial Sequence: Synthetic oligonucleotide
  Antisense strand to SEQ ID NO: 1691023
acaauaaacaagauagacc

SEQ ID NO: 1691025 - RNA, 19 nt, Artificial Sequence
  Description of Artificial Sequence: Synthetic oligonucleotide
  Sense strand starting at position 822 of SEQ ID NO: 1561690
gucuaucuuguuuauugua

SEQ ID NO: 1691026 - RNA, 19 nt, Artificial Sequence
  Description of Artificial Sequence: Synthetic oligonucleotide
  Antisense strand to SEQ ID NO: 1691025
uacaauaaacaagauagac

SEQ ID NO: 1691027 - RNA, 19 nt, Artificial Sequence
  Description of Artificial Sequence: Synthetic oligonucleotide
  Sense strand starting at position 1037 of SEQ ID NO: 1561690
cuagauaaauacuggaaug

SEQ ID NO: 1691028 - RNA, 19 nt, Artificial Sequence
  Description of Artificial Sequence: Synthetic oligonucleotide
  Antisense strand to SEQ ID NO: 1691027
cauuccaguauuuaucuag

SEQ ID NO: 1691029 - RNA, 19 nt, Artificial Sequence
  Description of Artificial Sequence: Synthetic oligonucleotide
  Sense strand starting at position 1076 of SEQ ID NO: 1561690
acaauuagaucauggagca

SEQ ID NO: 1691030 - RNA, 19 nt, Artificial Sequence
  Description of Artificial Sequence: Synthetic oligonucleotide
  Antisense strand to SEQ ID NO: 1691029
ugcuccaugaucuaauugu

SEQ ID NO: 1691031 - RNA, 19 nt, Artificial Sequence
  Description of Artificial Sequence: Synthetic oligonucleotide
  Sense strand starting at position 1129 of SEQ ID NO: 1561690
gcuagagccuaauuucgga

SEQ ID NO: 1691032 - RNA, 19 nt, Artificial Sequence
  Description of Artificial Sequence: Synthetic oligonucleotide
  Antisense strand to SEQ ID NO: 1691031
uccgaaauuaggcucuagc

SEQ ID NO: 1691033 - RNA, 19 nt, Artificial Sequence
  Description of Artificial Sequence: Synthetic oligonucleotide
  Sense strand starting at position 1133 of SEQ ID NO: 1561690
gagccuaauuucggacuuu

SEQ ID NO: 1691034 - RNA, 19 nt, Artificial Sequence
  Description of Artificial Sequence: Synthetic oligonucleotide
  Antisense strand to SEQ ID NO: 1691033
aaaguccgaaauuaggcuc

SEQ ID NO: 1691035 - RNA, 19 nt, Artificial Sequence
  Description of Artificial Sequence: Synthetic oligonucleotide
  Sense strand starting at position 1171 of SEQ ID NO: 1561690
ggaucagauuaauaaagga

SEQ ID NO: 1691036 - RNA, 19 nt, Artificial Sequence
  Description of Artificial Sequence: Synthetic oligonucleotide
  Antisense strand to SEQ ID NO: 1691035
uccuuuauuaaucugaucc

SEQ ID NO: 1691037 - RNA, 19 nt, Artificial Sequence
  Description of Artificial Sequence: Synthetic oligonucleotide
  Sense strand starting at position 1190 of SEQ ID NO: 1561690
cgauuacaauaaugacagu

SEQ ID NO: 1691038 - RNA, 19 nt, Artificial Sequence
  Description of Artificial Sequence: Synthetic oligonucleotide
  Antisense strand to SEQ ID NO: 1691037
acugucauuauuguaaucg

SEQ ID NO: 1691039 - RNA, 19 nt, Artificial Sequence
  Description of Artificial Sequence: Synthetic oligonucleotide
  Sense strand starting at position 2373 of SEQ ID NO: 1561690
accugaguucuccagguac

SEQ ID NO: 1691040 - RNA, 19 nt, Artificial Sequence
  Description of Artificial Sequence: Synthetic oligonucleotide
  Antisense strand to SEQ ID NO: 1691039
guaccuggagaacucaggu

SEQ ID NO: 1691041 - RNA, 19 nt, Artificial Sequence
  Description of Artificial Sequence: Synthetic oligonucleotide
  Sense strand starting at position 2375 of SEQ ID NO: 1561690
cugaguucuccagguacag

SEQ ID NO: 1691042 - RNA, 19 nt, Artificial Sequence
  Description of Artificial Sequence: Synthetic oligonucleotide
  Antisense strand to SEQ ID NO: 1691041
cuguaccuggagaacucag

SEQ ID NO: 1691043 - RNA, 19 nt, Artificial Sequence
  Description of Artificial Sequence: Synthetic oligonucleotide
  Sense strand starting at position 2582 of SEQ ID NO: 1561690
agacuagcgucucuauuaa

SEQ ID NO: 1691044 - RNA, 19 nt, Artificial Sequence
  Description of Artificial Sequence: Synthetic oligonucleotide
  Antisense strand to SEQ ID NO: 1691043
uuaauagagacgcuagucu

SEQ ID NO: 1691045 - RNA, 19 nt, Artificial Sequence
  Description of Artificial Sequence: Synthetic oligonucleotide
  Sense strand starting at position 2699 of SEQ ID NO: 1561690
ucagaacuucgaggcuagu

SEQ ID NO: 1691046 - RNA, 19 nt, Artificial Sequence
  Description of Artificial Sequence: Synthetic oligonucleotide
  Antisense strand to SEQ ID NO: 1691045
acuagccucgaaguucuga

SEQ ID NO: 1691047 - RNA, 19 nt, Artificial Sequence
  Description of Artificial Sequence: Synthetic oligonucleotide
  Sense strand starting at position 2846 of SEQ ID NO: 1561690
agaccagucuggccuauaa

SEQ ID NO: 1691048 - RNA, 19 nt, Artificial Sequence
  Description of Artificial Sequence: Synthetic oligonucleotide
  Antisense strand to SEQ ID NO: 1691047
uuauaggccagacuggucu

SEQ ID NO: 1691049 - RNA, 19 nt, Artificial Sequence
  Description of Artificial Sequence: Synthetic oligonucleotide
  Sense strand starting at position 3520 of SEQ ID NO: 1561690
gagggaagcuccgucugaa

SEQ ID NO: 1691050 - RNA, 19 nt, Artificial Sequence
  Description of Artificial Sequence: Synthetic oligonucleotide
  Antisense strand to SEQ ID NO: 1691049
uucagacggagcuucccuc

SEQ ID NO: 1691051 - RNA, 19 nt, Artificial Sequence
  Description of Artificial Sequence: Synthetic oligonucleotide
  Sense strand starting at position 3557 of SEQ ID NO: 1561690
agacucuuguuucucagua

SEQ ID NO: 1691052 - RNA, 19 nt, Artificial Sequence
  Description of Artificial Sequence: Synthetic oligonucleotide
  Antisense strand to SEQ ID NO: 1691051
uacugagaaacaagagucu

SEQ ID NO: 1691053 - RNA, 19 nt, Artificial Sequence
  Description of Artificial Sequence: Synthetic oligonucleotide
  Sense strand starting at position 3559 of SEQ ID NO: 1561690
acucuuguuucucaguauu

SEQ ID NO: 1691054 - RNA, 19 nt, Artificial Sequence
  Description of Artificial Sequence: Synthetic oligonucleotide
  Antisense strand to SEQ ID NO: 1691053
aauacugagaaacaagagu

SEQ ID NO: 1691055 - RNA, 19 nt, Artificial Sequence
  Description of Artificial Sequence: Synthetic oligonucleotide
  Sense strand starting at position 3561 of SEQ ID NO: 1561690
ucuuguuucucaguauuau

SEQ ID NO: 1691056 - RNA, 19 nt, Artificial Sequence
  Description of Artificial Sequence: Synthetic oligonucleotide
  Antisense strand to SEQ ID NO: 1691055
auaauacugagaaacaaga

SEQ ID NO: 1691057 - RNA, 19 nt, Artificial Sequence
  Description of Artificial Sequence: Synthetic oligonucleotide
  Sense strand starting at position 3562 of SEQ ID NO: 1561690
cuuguuucucaguauuauu

SEQ ID NO: 1691058 - RNA, 19 nt, Artificial Sequence
  Description of Artificial Sequence: Synthetic oligonucleotide
  Antisense strand to SEQ ID NO: 1691057
aauaauacugagaaacaag

SEQ ID NO: 1691059 - RNA, 19 nt, Artificial Sequence
  Description of Artificial Sequence: Synthetic oligonucleotide
  Sense strand starting at position 3914 of SEQ ID NO: 1561690
uguacucuggccugaucua

SEQ ID NO: 1691060 - RNA, 19 nt, Artificial Sequence
  Description of Artificial Sequence: Synthetic oligonucleotide
  Antisense strand to SEQ ID NO: 1691059
uagaucaggccagaguaca

SEQ ID NO: 1691061 - RNA, 19 nt, Artificial Sequence
  Description of Artificial Sequence: Synthetic oligonucleotide
  Sense strand starting at position 3915 of SEQ ID NO: 1561690
guacucuggccugaucuaa

SEQ ID NO: 1691062 - RNA, 19 nt, Artificial Sequence
  Description of Artificial Sequence: Synthetic oligonucleotide
  Antisense strand to SEQ ID NO: 1691061
uuagaucaggccagaguac

SEQ ID NO: 1691063 - RNA, 19 nt, Artificial Sequence
  Description of Artificial Sequence: Synthetic oligonucleotide
  Sense strand starting at position 3933 of SEQ ID NO: 1561690
acagaucaggcgugaguaa

SEQ ID NO: 1691064 - RNA, 19 nt, Artificial Sequence
  Description of Artificial Sequence: Synthetic oligonucleotide
  Antisense strand to SEQ ID NO: 1691063
uuacucacgccugaucugu

SEQ ID NO: 1691065 - RNA, 19 nt, Artificial Sequence
  Description of Artificial Sequence: Synthetic oligonucleotide
  Sense strand starting at position 171 of SEQ ID NO: 1561691
guacuauacuguccacuua

SEQ ID NO: 1691066 - RNA, 19 nt, Artificial Sequence
  Description of Artificial Sequence: Synthetic oligonucleotide
  Antisense strand to SEQ ID NO: 1691065
uaaguggacaguauaguac

SEQ ID NO: 1691067 - RNA, 19 nt, Artificial Sequence
  Description of Artificial Sequence: Synthetic oligonucleotide
  Sense strand starting at position 347 of SEQ ID NO: 1561691
ucaacagugucgucacaaa

SEQ ID NO: 1691068 - RNA, 19 nt, Artificial Sequence
  Description of Artificial Sequence: Synthetic oligonucleotide
  Antisense strand to SEQ ID NO: 1691067
uuugugacgacacuguuga

SEQ ID NO: 1691069 - RNA, 19 nt, Artificial Sequence
  Description of Artificial Sequence: Synthetic oligonucleotide
  Sense strand starting at position 358 of SEQ ID NO: 1561691
gucacaaagcaguacaauu

SEQ ID NO: 1691070 - RNA, 19 nt, Artificial Sequence
  Description of Artificial Sequence: Synthetic oligonucleotide
  Antisense strand to SEQ ID NO: 1691069
aauuguacugcuuugugac

SEQ ID NO: 1691071 - RNA, 19 nt, Artificial Sequence
  Description of Artificial Sequence: Synthetic oligonucleotide
  Sense strand starting at position 421 of SEQ ID NO: 1561691
ucugguauaguuuggcaaa

SEQ ID NO: 1691072 - RNA, 19 nt, Artificial Sequence
  Description of Artificial Sequence: Synthetic oligonucleotide
  Antisense strand to SEQ ID NO: 1691071
uuugccaaacuauaccaga

SEQ ID NO: 1691073 - RNA, 19 nt, Artificial Sequence
  Description of Artificial Sequence: Synthetic oligonucleotide
  Sense strand starting at position 423 of SEQ ID NO: 1561691
ugguauaguuuggcaaaua

SEQ ID NO: 1691074 - RNA, 19 nt, Artificial Sequence
  Description of Artificial Sequence: Synthetic oligonucleotide
  Antisense strand to SEQ ID NO: 1691073
uauuugccaaacuauacca

SEQ ID NO: 1691075 - RNA, 19 nt, Artificial Sequence
  Description of Artificial Sequence: Synthetic oligonucleotide
  Sense strand starting at position 569 of SEQ ID NO: 1561691
gguuuaggaaucuaucgca

SEQ ID NO: 1691076 - RNA, 19 nt, Artificial Sequence
  Description of Artificial Sequence: Synthetic oligonucleotide
  Antisense strand to SEQ ID NO: 1691075
ugcgauagauuccuaaacc

SEQ ID NO: 1691077 - RNA, 19 nt, Artificial Sequence
  Description of Artificial Sequence: Synthetic oligonucleotide
  Sense strand starting at position 634 of SEQ ID NO: 1561691
uucuaugugccagacaaau

SEQ ID NO: 1691078 - RNA, 19 nt, Artificial Sequence
  Description of Artificial Sequence: Synthetic oligonucleotide
  Antisense strand to SEQ ID NO: 1691077
auuugucuggcacauagaa

SEQ ID NO: 1691079 - RNA, 19 nt, Artificial Sequence
  Description of Artificial Sequence: Synthetic oligonucleotide
  Sense strand starting at position 705 of SEQ ID NO: 1561691
aacaguggcuugcuugaga

SEQ ID NO: 1691080 - RNA, 19 nt, Artificial Sequence
  Description of Artificial Sequence: Synthetic oligonucleotide
  Antisense strand to SEQ ID NO: 1691079
ucucaagcaagccacuguu

SEQ ID NO: 1691081 - RNA, 19 nt, Artificial Sequence
  Description of Artificial Sequence: Synthetic oligonucleotide
  Sense strand starting at position 708 of SEQ ID NO: 1561691
aguggcuugcuugagauua

SEQ ID NO: 1691082 - RNA, 19 nt, Artificial Sequence
  Description of Artificial Sequence: Synthetic oligonucleotide
  Antisense strand to SEQ ID NO: 1691081
uaaucucaagcaagccacu

SEQ ID NO: 1691083 - RNA, 19 nt, Artificial Sequence
  Description of Artificial Sequence: Synthetic oligonucleotide
  Sense strand starting at position 939 of SEQ ID NO: 1561691
aagagacuagucugggcaa

SEQ ID NO: 1691084 - RNA, 19 nt, Artificial Sequence
  Description of Artificial Sequence: Synthetic oligonucleotide
  Antisense strand to SEQ ID NO: 1691083
uugcccagacuagucucuu

SEQ ID NO: 1691085 - RNA, 19 nt, Artificial Sequence
  Description of Artificial Sequence: Synthetic oligonucleotide
  Sense strand starting at position 1050 of SEQ ID NO: 1561691
cguaguuauaugcacauga

SEQ ID NO: 1691086 - RNA, 19 nt, Artificial Sequence
  Description of Artificial Sequence: Synthetic oligonucleotide
  Antisense strand to SEQ ID NO: 1691085
ucaugugcauauaacuacg

SEQ ID NO: 1691087 - RNA, 19 nt, Artificial Sequence
  Description of Artificial Sequence: Synthetic oligonucleotide
  Sense strand starting at position 1246 of SEQ ID NO: 1561691
aguuauaauuugccugcau

SEQ ID NO: 1691088 - RNA, 19 nt, Artificial Sequence
  Description of Artificial Sequence: Synthetic oligonucleotide
  Antisense strand to SEQ ID NO: 1691087
augcaggcaaauuauaacu

SEQ ID NO: 1691089 - RNA, 19 nt, Artificial Sequence
  Description of Artificial Sequence: Synthetic oligonucleotide
  Sense strand starting at position 1247 of SEQ ID NO: 1561691
guuauaauuugccugcaua

SEQ ID NO: 1691090 - RNA, 19 nt, Artificial Sequence
  Description of Artificial Sequence: Synthetic oligonucleotide
  Antisense strand to SEQ ID NO: 1691089
uaugcaggcaaauuauaac

SEQ ID NO: 1691091 - RNA, 19 nt, Artificial Sequence
  Description of Artificial Sequence: Synthetic oligonucleotide
  Sense strand starting at position 1377 of SEQ ID NO: 1561691
agaacaauccaacguggaa

SEQ ID NO: 1691092 - RNA, 19 nt, Artificial Sequence
  Description of Artificial Sequence: Synthetic oligonucleotide
  Antisense strand to SEQ ID NO: 1691091
uuccacguuggauuguucu

SEQ ID NO: 1691093 - RNA, 19 nt, Artificial Sequence
  Description of Artificial Sequence: Synthetic oligonucleotide
  Sense strand starting at position 1404 of SEQ ID NO: 1561691
agaaauauuugugggacua

SEQ ID NO: 1691094 - RNA, 19 nt, Artificial Sequence
  Description of Artificial Sequence: Synthetic oligonucleotide
  Antisense strand to SEQ ID NO: 1691093
uagucccacaaauauuucu

SEQ ID NO: 1691095 - RNA, 19 nt, Artificial Sequence
  Description of Artificial Sequence: Synthetic oligonucleotide
  Sense strand starting at position 1406 of SEQ ID NO: 1561691
aaauauuugugggacuacu

SEQ ID NO: 1691096 - RNA, 19 nt, Artificial Sequence
  Description of Artificial Sequence: Synthetic oligonucleotide
  Antisense strand to SEQ ID NO: 1691095
aguagucccacaaauauuu

SEQ ID NO: 1691097 - RNA, 19 nt, Artificial Sequence
  Description of Artificial Sequence: Synthetic oligonucleotide
  Sense strand starting at position 1643 of SEQ ID NO: 1561691
cagagaauugugcacuuua

SEQ ID NO: 1691098 - RNA, 19 nt, Artificial Sequence
  Description of Artificial Sequence: Synthetic oligonucleotide
  Antisense strand to SEQ ID NO: 1691097
uaaagugcacaauucucug

SEQ ID NO: 1691099 - RNA, 19 nt, Artificial Sequence
  Description of Artificial Sequence: Synthetic oligonucleotide
  Sense strand starting at position 2062 of SEQ ID NO: 1561691
agcugaugucacuaaguac

SEQ ID NO: 1691100 - RNA, 19 nt, Artificial Sequence
  Description of Artificial Sequence: Synthetic oligonucleotide
  Antisense strand to SEQ ID NO: 1691099
guacuuagugacaucagcu

SEQ ID NO: 1691101 - RNA, 19 nt, Artificial Sequence
  Description of Artificial Sequence: Synthetic oligonucleotide
  Sense strand starting at position 2065 of SEQ ID NO: 1561691
ugaugucacuaaguacaca

SEQ ID NO: 1691102 - RNA, 19 nt, Artificial Sequence
  Description of Artificial Sequence: Synthetic oligonucleotide
  Antisense strand to SEQ ID NO: 1691101
uguguacuuagugacauca

SEQ ID NO: 1691103 - RNA, 19 nt, Artificial Sequence
  Description of Artificial Sequence: Synthetic oligonucleotide
  Sense strand starting at position 2129 of SEQ ID NO: 1561691
guguaauuuguuuauggcu

SEQ ID NO: 1691104 - RNA, 19 nt, Artificial Sequence
  Description of Artificial Sequence: Synthetic oligonucleotide
  Antisense strand to SEQ ID NO: 1691103
agccauaaacaaauuacac

SEQ ID NO: 1691105 - RNA, 19 nt, Artificial Sequence
  Description of Artificial Sequence: Synthetic oligonucleotide
  Sense strand starting at position 2135 of SEQ ID NO: 1561691
uuuguuuauggcugacaau

SEQ ID NO: 1691106 - RNA, 19 nt, Artificial Sequence
  Description of Artificial Sequence: Synthetic oligonucleotide
  Antisense strand to SEQ ID NO: 1691105
auugucagccauaaacaaa

SEQ ID NO: 1691107 - RNA, 19 nt, Artificial Sequence
  Description of Artificial Sequence: Synthetic oligonucleotide
  Sense strand starting at position 2136 of SEQ ID NO: 1561691
uuguuuauggcugacaaua

SEQ ID NO: 1691108 - RNA, 19 nt, Artificial Sequence
  Description of Artificial Sequence: Synthetic oligonucleotide
  Antisense strand to SEQ ID NO: 1691107
uauugucagccauaaacaa

SEQ ID NO: 1691109 - RNA, 19 nt, Artificial Sequence
  Description of Artificial Sequence: Synthetic oligonucleotide
  Sense strand starting at position 2183 of SEQ ID NO: 1561691
ugugcaaaucccuagugga

SEQ ID NO: 1691110 - RNA, 19 nt, Artificial Sequence
  Description of Artificial Sequence: Synthetic oligonucleotide
  Antisense strand to SEQ ID NO: 1691109
uccacuagggauuugcaca

SEQ ID NO: 1691111 - RNA, 19 nt, Artificial Sequence
  Description of Artificial Sequence: Synthetic oligonucleotide
  Sense strand starting at position 2664 of SEQ ID NO: 1561691
cugcuaauauaagugucaa

SEQ ID NO: 1691112 - RNA, 19 nt, Artificial Sequence
  Description of Artificial Sequence: Synthetic oligonucleotide
  Antisense strand to SEQ ID NO: 1691111
uugacacuuauauuagcag

SEQ ID NO: 1691113 - RNA, 19 nt, Artificial Sequence
  Description of Artificial Sequence: Synthetic oligonucleotide
  Sense strand starting at position 2759 of SEQ ID NO: 1561691
gucagaguuuaauccuuua

SEQ ID NO: 1691114 - RNA, 19 nt, Artificial Sequence
  Description of Artificial Sequence: Synthetic oligonucleotide
  Antisense strand to SEQ ID NO: 1691113
uaaaggauuaaacucugac

SEQ ID NO: 1691115 - RNA, 19 nt, Artificial Sequence
  Description of Artificial Sequence: Synthetic oligonucleotide
  Sense strand starting at position 2797 of SEQ ID NO: 1561691
auaauagcugcucagucaa

SEQ ID NO: 1691116 - RNA, 19 nt, Artificial Sequence
  Description of Artificial Sequence: Synthetic oligonucleotide
  Antisense strand to SEQ ID NO: 1691115
uugacugagcagcuauuau

SEQ ID NO: 1691117 - RNA, 19 nt, Artificial Sequence
  Description of Artificial Sequence: Synthetic oligonucleotide
  Sense strand starting at position 2886 of SEQ ID NO: 1561691
ggcaaauugagugaagggu

SEQ ID NO: 1691118 - RNA, 19 nt, Artificial Sequence
  Description of Artificial Sequence: Synthetic oligonucleotide
  Antisense strand to SEQ ID NO: 1691117
acccuucacucaauuugcc

SEQ ID NO: 1691119 - RNA, 19 nt, Artificial Sequence
  Description of Artificial Sequence: Synthetic oligonucleotide
  Sense strand starting at position 3580 of SEQ ID NO: 1561691
aauacagauucggcaugaa

SEQ ID NO: 1691120 - RNA, 19 nt, Artificial Sequence
  Description of Artificial Sequence: Synthetic oligonucleotide
  Antisense strand to SEQ ID NO: 1691119
uucaugccgaaucuguauu

SEQ ID NO: 1691121 - RNA, 19 nt, Artificial Sequence
  Description of Artificial Sequence: Synthetic oligonucleotide
  Sense strand starting at position 3583 of SEQ ID NO: 1561691
acagauucggcaugaaaga

SEQ ID NO: 1691122 - RNA, 19 nt, Artificial Sequence
  Description of Artificial Sequence: Synthetic oligonucleotide
  Antisense strand to SEQ ID NO: 1691121
ucuuucaugccgaaucugu

SEQ ID NO: 1691123 - RNA, 19 nt, Artificial Sequence
  Description of Artificial Sequence: Synthetic oligonucleotide
  Sense strand starting at position 3664 of SEQ ID NO: 1561691
ucuaccauacuugggauau

SEQ ID NO: 1691124 - RNA, 19 nt, Artificial Sequence
  Description of Artificial Sequence: Synthetic oligonucleotide
  Antisense strand to SEQ ID NO: 1691123
auaucccaaguaugguaga

SEQ ID NO: 1691125 - RNA, 19 nt, Artificial Sequence
  Description of Artificial Sequence: Synthetic oligonucleotide
  Sense strand starting at position 3675 of SEQ ID NO: 1561691
ugggauauaucugcaaucu

SEQ ID NO: 1691126 - RNA, 19 nt, Artificial Sequence
  Description of Artificial Sequence: Synthetic oligonucleotide
  Antisense strand to SEQ ID NO: 1691125
agauugcagauauauccca

SEQ ID NO: 1691127 - RNA, 19 nt, Artificial Sequence
  Description of Artificial Sequence: Synthetic oligonucleotide
  Sense strand starting at position 3793 of SEQ ID NO: 1561691
accagugauggugguaaua

SEQ ID NO: 1691128 - RNA, 19 nt, Artificial Sequence
  Description of Artificial Sequence: Synthetic oligonucleotide
  Antisense strand to SEQ ID NO: 1691127
uauuaccaccaucacuggu

SEQ ID NO: 1691129 - RNA, 19 nt, Artificial Sequence
  Description of Artificial Sequence: Synthetic oligonucleotide
  Sense strand starting at position 3838 of SEQ ID NO: 1561691
ugucauguguacucacuaa

SEQ ID NO: 1691130 - RNA, 19 nt, Artificial Sequence
  Description of Artificial Sequence: Synthetic oligonucleotide
  Antisense strand to SEQ ID NO: 1691129
uuagugaguacacaugaca

SEQ ID NO: 1691131 - RNA, 19 nt, Artificial Sequence
  Description of Artificial Sequence: Synthetic oligonucleotide
  Sense strand starting at position 3842 of SEQ ID NO: 1561691
auguguacucacuaagugu

SEQ ID NO: 1691132 - RNA, 19 nt, Artificial Sequence
  Description of Artificial Sequence: Synthetic oligonucleotide
  Antisense strand to SEQ ID NO: 1691131
acacuuagugaguacacau

SEQ ID NO: 1691133 - RNA, 19 nt, Artificial Sequence
  Description of Artificial Sequence: Synthetic oligonucleotide
  Sense strand starting at position 3846 of SEQ ID NO: 1561691
guacucacuaagugucaga

SEQ ID NO: 1691134 - RNA, 19 nt, Artificial Sequence
  Description of Artificial Sequence: Synthetic oligonucleotide
  Antisense strand to SEQ ID NO: 1691133
ucugacacuuagugaguac

SEQ ID NO: 1691135 - RNA, 19 nt, Artificial Sequence
  Description of Artificial Sequence: Synthetic oligonucleotide
  Sense strand starting at position 3856 of SEQ ID NO: 1561691
agugucagagacuauucua

SEQ ID NO: 1691136 - RNA, 19 nt, Artificial Sequence
  Description of Artificial Sequence: Synthetic oligonucleotide
  Antisense strand to SEQ ID NO: 1691135
uagaauagucucugacacu

SEQ ID NO: 1691137 - RNA, 19 nt, Artificial Sequence
  Description of Artificial Sequence: Synthetic oligonucleotide
  Sense strand starting at position 3859 of SEQ ID NO: 1561691
gucagagacuauucuaguu

SEQ ID NO: 1691138 - RNA, 19 nt, Artificial Sequence
  Description of Artificial Sequence: Synthetic oligonucleotide
  Antisense strand to SEQ ID NO: 1691137
aacuagaauagucucugac

SEQ ID NO: 1691139 - RNA, 19 nt, Artificial Sequence
  Description of Artificial Sequence: Synthetic oligonucleotide
  Sense strand starting at position 3909 of SEQ ID NO: 1561691
gggccuauaagguagguau

SEQ ID NO: 1691140 - RNA, 19 nt, Artificial Sequence
  Description of Artificial Sequence: Synthetic oligonucleotide
  Antisense strand to SEQ ID NO: 1691139
auaccuaccuuauaggccc

SEQ ID NO: 1691141 - RNA, 19 nt, Artificial Sequence
  Description of Artificial Sequence: Synthetic oligonucleotide
  Sense strand starting at position 3940 of SEQ ID NO: 1561691
guuauagcuaaggaaagua

SEQ ID NO: 1691142 - RNA, 19 nt, Artificial Sequence
  Description of Artificial Sequence: Synthetic oligonucleotide
  Antisense strand to SEQ ID NO: 1691141
uacuuuccuuagcuauaac

SEQ ID NO: 1691143 - RNA, 19 nt, Artificial Sequence
  Description of Artificial Sequence: Synthetic oligonucleotide
  Sense strand starting at position 3945 of SEQ ID NO: 1561691
agcuaaggaaaguaauguu

SEQ ID NO: 1691144 - RNA, 19 nt, Artificial Sequence
  Description of Artificial Sequence: Synthetic oligonucleotide
  Antisense strand to SEQ ID NO: 1691143
aacauuacuuuccuuagcu

SEQ ID NO: 1691145 - RNA, 19 nt, Artificial Sequence
  Description of Artificial Sequence: Synthetic oligonucleotide
  Sense strand starting at position 30 of SEQ ID NO: 1561692
cgcagaggagucugagcaa

SEQ ID NO: 1691146 - RNA, 19 nt, Artificial Sequence
  Description of Artificial Sequence: Synthetic oligonucleotide
  Antisense strand to SEQ ID NO: 1691145
uugcucagacuccucugcg

SEQ ID NO: 1691147 - RNA, 19 nt, Artificial Sequence
  Description of Artificial Sequence: Synthetic oligonucleotide
  Sense strand starting at position 280 of SEQ ID NO: 1561692
ugggaaggcgagugcuuua

SEQ ID NO: 1691148 - RNA, 19 nt, Artificial Sequence
  Description of Artificial Sequence: Synthetic oligonucleotide
  Antisense strand to SEQ ID NO: 1691147
uaaagcacucgccuuccca

SEQ ID NO: 1691149 - RNA, 19 nt, Artificial Sequence
  Description of Artificial Sequence: Synthetic oligonucleotide
  Sense strand starting at position 283 of SEQ ID NO: 1561692
gaaggcgagugcuuuacau

SEQ ID NO: 1691150 - RNA, 19 nt, Artificial Sequence
  Description of Artificial Sequence: Synthetic oligonucleotide
  Antisense strand to SEQ ID NO: 1691149
auguaaagcacucgccuuc

SEQ ID NO: 1691151 - RNA, 19 nt, Artificial Sequence
  Description of Artificial Sequence: Synthetic oligonucleotide
  Sense strand starting at position 285 of SEQ ID NO: 1561692
aggcgagugcuuuacauga

SEQ ID NO: 1691152 - RNA, 19 nt, Artificial Sequence
  Description of Artificial Sequence: Synthetic oligonucleotide
  Antisense strand to SEQ ID NO: 1691151
ucauguaaagcacucgccu

SEQ ID NO: 1691153 - RNA, 19 nt, Artificial Sequence
  Description of Artificial Sequence: Synthetic oligonucleotide
  Sense strand starting at position 399 of SEQ ID NO: 1561692
cgggucugaccugaucgaa

SEQ ID NO: 1691154 - RNA, 19 nt, Artificial Sequence
  Description of Artificial Sequence: Synthetic oligonucleotide
  Antisense strand to SEQ ID NO: 1691153
uucgaucaggucagacccg

SEQ ID NO: 1691155 - RNA, 19 nt, Artificial Sequence
  Description of Artificial Sequence: Synthetic oligonucleotide
  Sense strand starting at position 402 of SEQ ID NO: 1561692
gucugaccugaucgaagua

SEQ ID NO: 1691156 - RNA, 19 nt, Artificial Sequence
  Description of Artificial Sequence: Synthetic oligonucleotide
  Antisense strand to SEQ ID NO: 1691155
uacuucgaucaggucagac

SEQ ID NO: 1691157 - RNA, 19 nt, Artificial Sequence
  Description of Artificial Sequence: Synthetic oligonucleotide
  Sense strand starting at position 420 of SEQ ID NO: 1561692
aaaugaugcgcgucuuguu

SEQ ID NO: 1691158 - RNA, 19 nt, Artificial Sequence
  Description of Artificial Sequence: Synthetic oligonucleotide
  Antisense strand to SEQ ID NO: 1691157
aacaagacgcgcaucauuu

SEQ ID NO: 1691159 - RNA, 19 nt, Artificial Sequence
  Description of Artificial Sequence: Synthetic oligonucleotide
  Sense strand starting at position 847 of SEQ ID NO: 1561692
ccaauucuguggcuugaag

SEQ ID NO: 1691160 - RNA, 19 nt, Artificial Sequence
  Description of Artificial Sequence: Synthetic oligonucleotide
  Antisense strand to SEQ ID NO: 1691159
cuucaagccacagaauugg

SEQ ID NO: 1691161 - RNA, 19 nt, Artificial Sequence
  Description of Artificial Sequence: Synthetic oligonucleotide
  Sense strand starting at position 903 of SEQ ID NO: 1561692
accuuuguccuuuaaggag

SEQ ID NO: 1691162 - RNA, 19 nt, Artificial Sequence
  Description of Artificial Sequence: Synthetic oligonucleotide
  Antisense strand to SEQ ID NO: 1691161
cuccuuaaaggacaaaggu

SEQ ID NO: 1691163 - RNA, 19 nt, Artificial Sequence
  Description of Artificial Sequence: Synthetic oligonucleotide
  Sense strand starting at position 945 of SEQ ID NO: 1561692
cucuccuccgcccaagaau

SEQ ID NO: 1691164 - RNA, 19 nt, Artificial Sequence
  Description of Artificial Sequence: Synthetic oligonucleotide
  Antisense strand to SEQ ID NO: 1691163
auucuugggcggaggagag

SEQ ID NO: 1691165 - RNA, 19 nt, Artificial Sequence
  Description of Artificial Sequence: Synthetic oligonucleotide
  Sense strand starting at position 988 of SEQ ID NO: 1561692
ccacucugguuccuagaca

SEQ ID NO: 1691166 - RNA, 19 nt, Artificial Sequence
  Description of Artificial Sequence: Synthetic oligonucleotide
  Antisense strand to SEQ ID NO: 1691165
ugucuaggaaccagagugg

SEQ ID NO: 1691167 - RNA, 19 nt, Artificial Sequence
  Description of Artificial Sequence: Synthetic oligonucleotide
  Sense strand starting at position 1200 of SEQ ID NO: 1561692
acgaguuacagaggcagaa

SEQ ID NO: 1691168 - RNA, 19 nt, Artificial Sequence
  Description of Artificial Sequence: Synthetic oligonucleotide
  Antisense strand to SEQ ID NO: 1691167
uucugccucuguaacucgu

SEQ ID NO: 1691169 - RNA, 19 nt, Artificial Sequence
  Description of Artificial Sequence: Synthetic oligonucleotide
  Sense strand starting at position 1518 of SEQ ID NO: 1561692
gcacacgcgcucuauuuau

SEQ ID NO: 1691170 - RNA, 19 nt, Artificial Sequence
  Description of Artificial Sequence: Synthetic oligonucleotide
  Antisense strand to SEQ ID NO: 1691169
auaaauagagcgcgugugc

SEQ ID NO: 1691171 - RNA, 19 nt, Artificial Sequence
  Description of Artificial Sequence: Synthetic oligonucleotide
  Sense strand starting at position 1522 of SEQ ID NO: 1561692
acgcgcucuauuuauagga

SEQ ID NO: 1691172 - RNA, 19 nt, Artificial Sequence
  Description of Artificial Sequence: Synthetic oligonucleotide
  Antisense strand to SEQ ID NO: 1691171
uccuauaaauagagcgcgu

SEQ ID NO: 1691173 - RNA, 19 nt, Artificial Sequence
  Description of Artificial Sequence: Synthetic oligonucleotide
  Sense strand starting at position 1679 of SEQ ID NO: 1561692
ggugauuggcaagguucga

SEQ ID NO: 1691174 - RNA, 19 nt, Artificial Sequence
  Description of Artificial Sequence: Synthetic oligonucleotide
  Antisense strand to SEQ ID NO: 1691173
ucgaaccuugccaaucacc

SEQ ID NO: 1691175 - RNA, 19 nt, Artificial Sequence
  Description of Artificial Sequence: Synthetic oligonucleotide
  Sense strand starting at position 2190 of SEQ ID NO: 1561692
ggaguuaacucagcaagaa

SEQ ID NO: 1691176 - RNA, 19 nt, Artificial Sequence
  Description of Artificial Sequence: Synthetic oligonucleotide
  Antisense strand to SEQ ID NO: 1691175
uucuugcugaguuaacucc

SEQ ID NO: 1691177 - RNA, 19 nt, Artificial Sequence
  Description of Artificial Sequence: Synthetic oligonucleotide
  Sense strand starting at position 2347 of SEQ ID NO: 1561692
cuuggccucugauuugcaa

SEQ ID NO: 1691178 - RNA, 19 nt, Artificial Sequence
  Description of Artificial Sequence: Synthetic oligonucleotide
  Antisense strand to SEQ ID NO: 1691177
uugcaaaucagaggccaag

SEQ ID NO: 1691179 - RNA, 19 nt, Artificial Sequence
  Description of Artificial Sequence: Synthetic oligonucleotide
  Sense strand starting at position 2404 of SEQ ID NO: 1561692
agguuugucucugucugga

SEQ ID NO: 1691180 - RNA, 19 nt, Artificial Sequence
  Description of Artificial Sequence: Synthetic oligonucleotide
  Antisense strand to SEQ ID NO: 1691179
uccagacagagacaaaccu

SEQ ID NO: 1691181 - RNA, 19 nt, Artificial Sequence
  Description of Artificial Sequence: Synthetic oligonucleotide
  Sense strand starting at position 2514 of SEQ ID NO: 1561692
uuuccaauucugugaugcu

SEQ ID NO: 1691182 - RNA, 19 nt, Artificial Sequence
  Description of Artificial Sequence: Synthetic oligonucleotide
  Antisense strand to SEQ ID NO: 1691181
agcaucacagaauuggaaa

SEQ ID NO: 1691183 - RNA, 19 nt, Artificial Sequence
  Description of Artificial Sequence: Synthetic oligonucleotide
  Sense strand starting at position 2584 of SEQ ID NO: 1561692
agggcagacacguauggua

SEQ ID NO: 1691184 - RNA, 19 nt, Artificial Sequence
  Description of Artificial Sequence: Synthetic oligonucleotide
  Antisense strand to SEQ ID NO: 1691183
uaccauacgugucugcccu

SEQ ID NO: 1691185 - RNA, 19 nt, Artificial Sequence
  Description of Artificial Sequence: Synthetic oligonucleotide
  Sense strand starting at position 2592 of SEQ ID NO: 1561692
cacguaugguaucuuuaac

SEQ ID NO: 1691186 - RNA, 19 nt, Artificial Sequence
  Description of Artificial Sequence: Synthetic oligonucleotide
  Antisense strand to SEQ ID NO: 1691185
guuaaagauaccauacgug

SEQ ID NO: 1691187 - RNA, 19 nt, Artificial Sequence
  Description of Artificial Sequence: Synthetic oligonucleotide
  Sense strand starting at position 2648 of SEQ ID NO: 1561692
aauggcauuggcuaguuau

SEQ ID NO: 1691188 - RNA, 19 nt, Artificial Sequence
  Description of Artificial Sequence: Synthetic oligonucleotide
  Antisense strand to SEQ ID NO: 1691187
auaacuagccaaugccauu

SEQ ID NO: 1691189 - RNA, 19 nt, Artificial Sequence
  Description of Artificial Sequence: Synthetic oligonucleotide
  Sense strand starting at position 2651 of SEQ ID NO: 1561692
ggcauuggcuaguuaugaa

SEQ ID NO: 1691190 - RNA, 19 nt, Artificial Sequence
  Description of Artificial Sequence: Synthetic oligonucleotide
  Antisense strand to SEQ ID NO: 1691189
uucauaacuagccaaugcc

SEQ ID NO: 1691191 - RNA, 19 nt, Artificial Sequence
  Description of Artificial Sequence: Synthetic oligonucleotide
  Sense strand starting at position 2687 of SEQ ID NO: 1561692
gagggagguccuugggaug

SEQ ID NO: 1691192 - RNA, 19 nt, Artificial Sequence
  Description of Artificial Sequence: Synthetic oligonucleotide
  Antisense strand to SEQ ID NO: 1691191
caucccaaggaccucccuc

SEQ ID NO: 1691193 - RNA, 19 nt, Artificial Sequence
  Description of Artificial Sequence: Synthetic oligonucleotide
  Sense strand starting at position 2714 of SEQ ID NO: 1561692
ccauuccuuccugagugaa

SEQ ID NO: 1691194 - RNA, 19 nt, Artificial Sequence
  Description of Artificial Sequence: Synthetic oligonucleotide
  Antisense strand to SEQ ID NO: 1691193
uucacucaggaaggaaugg

SEQ ID NO: 1691195 - RNA, 19 nt, Artificial Sequence
  Description of Artificial Sequence: Synthetic oligonucleotide
  Sense strand starting at position 2717 of SEQ ID NO: 1561692
uuccuuccugagugaagga

SEQ ID NO: 1691196 - RNA, 19 nt, Artificial Sequence
  Description of Artificial Sequence: Synthetic oligonucleotide
  Antisense strand to SEQ ID NO: 1691195
uccuucacucaggaaggaa

SEQ ID NO: 1691197 - RNA, 19 nt, Artificial Sequence
  Description of Artificial Sequence: Synthetic oligonucleotide
  Sense strand starting at position 2821 of SEQ ID NO: 1561692
ggcauugagcuauaagcac

SEQ ID NO: 1691198 - RNA, 19 nt, Artificial Sequence
  Description of Artificial Sequence: Synthetic oligonucleotide
  Antisense strand to SEQ ID NO: 1691197
gugcuuauagcucaaugcc

SEQ ID NO: 1691199 - RNA, 19 nt, Artificial Sequence
  Description of Artificial Sequence: Synthetic oligonucleotide
  Sense strand starting at position 3134 of SEQ ID NO: 1561692
guaccaugcuauuuguuaa

SEQ ID NO: 1691200 - RNA, 19 nt, Artificial Sequence
  Description of Artificial Sequence: Synthetic oligonucleotide
  Antisense strand to SEQ ID NO: 1691199
uuaacaaauagcaugguac

SEQ ID NO: 1691201 - RNA, 19 nt, Artificial Sequence
  Description of Artificial Sequence: Synthetic oligonucleotide
  Sense strand starting at position 3155 of SEQ ID NO: 1561692
uguugaaaguuaccuaucu

SEQ ID NO: 1691202 - RNA, 19 nt, Artificial Sequence
  Description of Artificial Sequence: Synthetic oligonucleotide
  Antisense strand to SEQ ID NO: 1691201
agauagguaacuuucaaca

SEQ ID NO: 1691203 - RNA, 19 nt, Artificial Sequence
  Description of Artificial Sequence: Synthetic oligonucleotide
  Sense strand starting at position 3156 of SEQ ID NO: 1561692
guugaaaguuaccuaucua

SEQ ID NO: 1691204 - RNA, 19 nt, Artificial Sequence
  Description of Artificial Sequence: Synthetic oligonucleotide
  Antisense strand to SEQ ID NO: 1691203
uagauagguaacuuucaac

SEQ ID NO: 1691205 - RNA, 19 nt, Artificial Sequence
  Description of Artificial Sequence: Synthetic oligonucleotide
  Sense strand starting at position 3192 of SEQ ID NO: 1561692
gugaacuagugccuucuga

SEQ ID NO: 1691206 - RNA, 19 nt, Artificial Sequence
  Description of Artificial Sequence: Synthetic oligonucleotide
  Antisense strand to SEQ ID NO: 1691205
ucagaaggcacuaguucac

SEQ ID NO: 1691207 - RNA, 19 nt, Artificial Sequence
  Description of Artificial Sequence: Synthetic oligonucleotide
  Sense strand starting at position 3309 of SEQ ID NO: 1561692
agggaugucugccugguua

SEQ ID NO: 1691208 - RNA, 19 nt, Artificial Sequence
  Description of Artificial Sequence: Synthetic oligonucleotide
  Antisense strand to SEQ ID NO: 1691207
uaaccaggcagacaucccu

SEQ ID NO: 1691209 - RNA, 19 nt, Artificial Sequence
  Description of Artificial Sequence: Synthetic oligonucleotide
  Sense strand starting at position 3311 of SEQ ID NO: 1561692
ggaugucugccugguuaac

SEQ ID NO: 1691210 - RNA, 19 nt, Artificial Sequence
  Description of Artificial Sequence: Synthetic oligonucleotide
  Antisense strand to SEQ ID NO: 1691209
guuaaccaggcagacaucc

SEQ ID NO: 1691211 - RNA, 19 nt, Artificial Sequence
  Description of Artificial Sequence: Synthetic oligonucleotide
  Sense strand starting at position 3367 of SEQ ID NO: 1561692
ggugggugcugaguugaau

SEQ ID NO: 1691212 - RNA, 19 nt, Artificial Sequence
  Description of Artificial Sequence: Synthetic oligonucleotide
  Antisense strand to SEQ ID NO: 1691211
auucaacucagcacccacc

SEQ ID NO: 1691213 - RNA, 19 nt, Artificial Sequence
  Description of Artificial Sequence: Synthetic oligonucleotide
  Sense strand starting at position 3615 of SEQ ID NO: 1561692
gcacgcaagaacugagauu

SEQ ID NO: 1691214 - RNA, 19 nt, Artificial Sequence
  Description of Artificial Sequence: Synthetic oligonucleotide
  Antisense strand to SEQ ID NO: 1691213
aaucucaguucuugcgugc

SEQ ID NO: 1691215 - RNA, 19 nt, Artificial Sequence
  Description of Artificial Sequence: Synthetic oligonucleotide
  Sense strand starting at position 3687 of SEQ ID NO: 1561692
cugcauagugaccauagua

SEQ ID NO: 1691216 - RNA, 19 nt, Artificial Sequence
  Description of Artificial Sequence: Synthetic oligonucleotide
  Antisense strand to SEQ ID NO: 1691215
uacuauggucacuaugcag

SEQ ID NO: 1691217 - RNA, 19 nt, Artificial Sequence
  Description of Artificial Sequence: Synthetic oligonucleotide
  Sense strand starting at position 3710 of SEQ ID NO: 1561692
cucaauaauugagaaauga

SEQ ID NO: 1691218 - RNA, 19 nt, Artificial Sequence
  Description of Artificial Sequence: Synthetic oligonucleotide
  Antisense strand to SEQ ID NO: 1691217
ucauuucucaauuauugag

SEQ ID NO: 1691219 - RNA, 19 nt, Artificial Sequence
  Description of Artificial Sequence: Synthetic oligonucleotide
  Sense strand starting at position 3728 of SEQ ID NO: 1561692
acugaaugcuuccuaauag

SEQ ID NO: 1691220 - RNA, 19 nt, Artificial Sequence
  Description of Artificial Sequence: Synthetic oligonucleotide
  Antisense strand to SEQ ID NO: 1691219
cuauuaggaagcauucagu

SEQ ID NO: 1691221 - RNA, 19 nt, Artificial Sequence
  Description of Artificial Sequence: Synthetic oligonucleotide
  Sense strand starting at position 3737 of SEQ ID NO: 1561692
uuccuaauagaagguaauu

SEQ ID NO: 1691222 - RNA, 19 nt, Artificial Sequence
  Description of Artificial Sequence: Synthetic oligonucleotide
  Antisense strand to SEQ ID NO: 1691221
aauuaccuucuauuaggaa

SEQ ID NO: 1691223 - RNA, 19 nt, Artificial Sequence
  Description of Artificial Sequence: Synthetic oligonucleotide
  Sense strand starting at position 3843 of SEQ ID NO: 1561692
ggucucgguuccuuacuaa

SEQ ID NO: 1691224 - RNA, 19 nt, Artificial Sequence
  Description of Artificial Sequence: Synthetic oligonucleotide
  Antisense strand to SEQ ID NO: 1691223
uuaguaaggaaccgagacc

SEQ ID NO: 1691225 - RNA, 19 nt, Artificial Sequence
  Description of Artificial Sequence: Synthetic oligonucleotide
  Sense strand starting at position 197 of SEQ ID NO: 1561693
ggccuauuggcccagaaac

SEQ ID NO: 1691226 - RNA, 19 nt, Artificial Sequence
  Description of Artificial Sequence: Synthetic oligonucleotide
  Antisense strand to SEQ ID NO: 1691225
guuucugggccaauaggcc

SEQ ID NO: 1691227 - RNA, 19 nt, Artificial Sequence
  Description of Artificial Sequence: Synthetic oligonucleotide
  Sense strand starting at position 221 of SEQ ID NO: 1561693
guaagacccagugaucugu

SEQ ID NO: 1691228 - RNA, 19 nt, Artificial Sequence
  Description of Artificial Sequence: Synthetic oligonucleotide
  Antisense strand to SEQ ID NO: 1691227
acagaucacugggucuuac

SEQ ID NO: 1691229 - RNA, 19 nt, Artificial Sequence
  Description of Artificial Sequence: Synthetic oligonucleotide
  Sense strand starting at position 258 of SEQ ID NO: 1561693
gugauucuuauggguacuc

SEQ ID NO: 1691230 - RNA, 19 nt, Artificial Sequence
  Description of Artificial Sequence: Synthetic oligonucleotide
  Antisense strand to SEQ ID NO: 1691229
gaguacccauaagaaucac

SEQ ID NO: 1691231 - RNA, 19 nt, Artificial Sequence
  Description of Artificial Sequence: Synthetic oligonucleotide
  Sense strand starting at position 259 of SEQ ID NO: 1561693
ugauucuuauggguacuca

SEQ ID NO: 1691232 - RNA, 19 nt, Artificial Sequence
  Description of Artificial Sequence: Synthetic oligonucleotide
  Antisense strand to SEQ ID NO: 1691231
ugaguacccauaagaauca

SEQ ID NO: 1691233 - RNA, 19 nt, Artificial Sequence
  Description of Artificial Sequence: Synthetic oligonucleotide
  Sense strand starting at position 269 of SEQ ID NO: 1561693
ggguacucagcuuauguua

SEQ ID NO: 1691234 - RNA, 19 nt, Artificial Sequence
  Description of Artificial Sequence: Synthetic oligonucleotide
  Antisense strand to SEQ ID NO: 1691233
uaacauaagcugaguaccc

SEQ ID NO: 1691235 - RNA, 19 nt, Artificial Sequence
  Description of Artificial Sequence: Synthetic oligonucleotide
  Sense strand starting at position 340 of SEQ ID NO: 1561693
aagaaacuaucugggagaa

SEQ ID NO: 1691236 - RNA, 19 nt, Artificial Sequence
  Description of Artificial Sequence: Synthetic oligonucleotide
  Antisense strand to SEQ ID NO: 1691235
uucucccagauaguuucuu

SEQ ID NO: 1691237 - RNA, 19 nt, Artificial Sequence
  Description of Artificial Sequence: Synthetic oligonucleotide
  Sense strand starting at position 342 of SEQ ID NO: 1561693
gaaacuaucugggagaaag

SEQ ID NO: 1691238 - RNA, 19 nt, Artificial Sequence
  Description of Artificial Sequence: Synthetic oligonucleotide
  Antisense strand to SEQ ID NO: 1691237
cuuucucccagauaguuuc

SEQ ID NO: 1691239 - RNA, 19 nt, Artificial Sequence
  Description of Artificial Sequence: Synthetic oligonucleotide
  Sense strand starting at position 748 of SEQ ID NO: 1561693
ccgucaguucucgacucaa

SEQ ID NO: 1691240 - RNA, 19 nt, Artificial Sequence
  Description of Artificial Sequence: Synthetic oligonucleotide
  Antisense strand to SEQ ID NO: 1691239
uugagucgagaacugacgg

SEQ ID NO: 1691241 - RNA, 19 nt, Artificial Sequence
  Description of Artificial Sequence: Synthetic oligonucleotide
  Sense strand starting at position 769 of SEQ ID NO: 1561693
ugaucaguuuccuccagca

SEQ ID NO: 1691242 - RNA, 19 nt, Artificial Sequence
  Description of Artificial Sequence: Synthetic oligonucleotide
  Antisense strand to SEQ ID NO: 1691241
ugcuggaggaaacugauca

SEQ ID NO: 1691243 - RNA, 19 nt, Artificial Sequence
  Description of Artificial Sequence: Synthetic oligonucleotide
  Sense strand starting at position 771 of SEQ ID NO: 1561693
aucaguuuccuccagcacu

SEQ ID NO: 1691244 - RNA, 19 nt, Artificial Sequence
  Description of Artificial Sequence: Synthetic oligonucleotide
  Antisense strand to SEQ ID NO: 1691243
agugcuggaggaaacugau

SEQ ID NO: 1691245 - RNA, 19 nt, Artificial Sequence
  Description of Artificial Sequence: Synthetic oligonucleotide
  Sense strand starting at position 1162 of SEQ ID NO: 1561693
aaagaaauaccuggugcau

SEQ ID NO: 1691246 - RNA, 19 nt, Artificial Sequence
  Description of Artificial Sequence: Synthetic oligonucleotide
  Antisense strand to SEQ ID NO: 1691245
augcaccagguauuucuuu

SEQ ID NO: 1691247 - RNA, 19 nt, Artificial Sequence
  Description of Artificial Sequence: Synthetic oligonucleotide
  Sense strand starting at position 1474 of SEQ ID NO: 1561693
uacauacgcccuuguagaa

SEQ ID NO: 1691248 - RNA, 19 nt, Artificial Sequence
  Description of Artificial Sequence: Synthetic oligonucleotide
  Antisense strand to SEQ ID NO: 1691247
uucuacaagggcguaugua

SEQ ID NO: 1691249 - RNA, 19 nt, Artificial Sequence
  Description of Artificial Sequence: Synthetic oligonucleotide
  Sense strand starting at position 1682 of SEQ ID NO: 1561693
uggagaaucucccaaacug

SEQ ID NO: 1691250 - RNA, 19 nt, Artificial Sequence
  Description of Artificial Sequence: Synthetic oligonucleotide
  Antisense strand to SEQ ID NO: 1691249
caguuugggagauucucca

SEQ ID NO: 1691251 - RNA, 19 nt, Artificial Sequence
  Description of Artificial Sequence: Synthetic oligonucleotide
  Sense strand starting at position 1709 of SEQ ID NO: 1561693
uggccagguuuccugagaa

SEQ ID NO: 1691252 - RNA, 19 nt, Artificial Sequence
  Description of Artificial Sequence: Synthetic oligonucleotide
  Antisense strand to SEQ ID NO: 1691251
uucucaggaaaccuggcca

SEQ ID NO: 1691253 - RNA, 19 nt, Artificial Sequence
  Description of Artificial Sequence: Synthetic oligonucleotide
  Sense strand starting at position 1735 of SEQ ID NO: 1561693
gucuguccacguuagggau

SEQ ID NO: 1691254 - RNA, 19 nt, Artificial Sequence
  Description of Artificial Sequence: Synthetic oligonucleotide
  Antisense strand to SEQ ID NO: 1691253
aucccuaacguggacagac

SEQ ID NO: 1691255 - RNA, 19 nt, Artificial Sequence
  Description of Artificial Sequence: Synthetic oligonucleotide
  Sense strand starting at position 1741 of SEQ ID NO: 1561693
ccacguuagggaugccaga

SEQ ID NO: 1691256 - RNA, 19 nt, Artificial Sequence
  Description of Artificial Sequence: Synthetic oligonucleotide
  Antisense strand to SEQ ID NO: 1691255
ucuggcaucccuaacgugg

SEQ ID NO: 1691257 - RNA, 19 nt, Artificial Sequence
  Description of Artificial Sequence: Synthetic oligonucleotide
  Sense strand starting at position 1784 of SEQ ID NO: 1561693
gaguuuagagccugacugu

SEQ ID NO: 1691258 - RNA, 19 nt, Artificial Sequence
  Description of Artificial Sequence: Synthetic oligonucleotide
  Antisense strand to SEQ ID NO: 1691257
acagucaggcucuaaacuc

SEQ ID NO: 1691259 - RNA, 19 nt, Artificial Sequence
  Description of Artificial Sequence: Synthetic oligonucleotide
  Sense strand starting at position 2437 of SEQ ID NO: 1561693
ggcugcuguggugagaaau

SEQ ID NO: 1691260 - RNA, 19 nt, Artificial Sequence
  Description of Artificial Sequence: Synthetic oligonucleotide
  Antisense strand to SEQ ID NO: 1691259
auuucucaccacagcagcc

SEQ ID NO: 1691261 - RNA, 19 nt, Artificial Sequence
  Description of Artificial Sequence: Synthetic oligonucleotide
  Sense strand starting at position 2438 of SEQ ID NO: 1561693
gcugcuguggugagaaaug

SEQ ID NO: 1691262 - RNA, 19 nt, Artificial Sequence
  Description of Artificial Sequence: Synthetic oligonucleotide
  Antisense strand to SEQ ID NO: 1691261
cauuucucaccacagcagc

SEQ ID NO: 1691263 - RNA, 19 nt, Artificial Sequence
  Description of Artificial Sequence: Synthetic oligonucleotide
  Sense strand starting at position 2473 of SEQ ID NO: 1561693
gugccuuauagagaguauu

SEQ ID NO: 1691264 - RNA, 19 nt, Artificial Sequence
  Description of Artificial Sequence: Synthetic oligonucleotide
  Antisense strand to SEQ ID NO: 1691263
aauacucucuauaaggcac

SEQ ID NO: 1691265 - RNA, 19 nt, Artificial Sequence
  Description of Artificial Sequence: Synthetic oligonucleotide
  Sense strand starting at position 2476 of SEQ ID NO: 1561693
ccuuauagagaguauugua

SEQ ID NO: 1691266 - RNA, 19 nt, Artificial Sequence
  Description of Artificial Sequence: Synthetic oligonucleotide
  Antisense strand to SEQ ID NO: 1691265
uacaauacucucuauaagg

SEQ ID NO: 1691267 - RNA, 19 nt, Artificial Sequence
  Description of Artificial Sequence: Synthetic oligonucleotide
  Sense strand starting at position 2484 of SEQ ID NO: 1561693
agaguauuguagccaagca

SEQ ID NO: 1691268 - RNA, 19 nt, Artificial Sequence
  Description of Artificial Sequence: Synthetic oligonucleotide
  Antisense strand to SEQ ID NO: 1691267
ugcuuggcuacaauacucu

SEQ ID NO: 1691269 - RNA, 19 nt, Artificial Sequence
  Description of Artificial Sequence: Synthetic oligonucleotide
  Sense strand starting at position 2562 of SEQ ID NO: 1561693
aagauaggcugcuugaauu

SEQ ID NO: 1691270 - RNA, 19 nt, Artificial Sequence
  Description of Artificial Sequence: Synthetic oligonucleotide
  Antisense strand to SEQ ID NO: 1691269
aauucaagcagccuaucuu

SEQ ID NO: 1691271 - RNA, 19 nt, Artificial Sequence
  Description of Artificial Sequence: Synthetic oligonucleotide
  Sense strand starting at position 2607 of SEQ ID NO: 1561693
gguuaugaccuuugggaag

SEQ ID NO: 1691272 - RNA, 19 nt, Artificial Sequence
  Description of Artificial Sequence: Synthetic oligonucleotide
  Antisense strand to SEQ ID NO: 1691271
cuucccaaaggucauaacc

SEQ ID NO: 1691273 - RNA, 19 nt, Artificial Sequence
  Description of Artificial Sequence: Synthetic oligonucleotide
  Sense strand starting at position 2677 of SEQ ID NO: 1561693
cuaguuuaaccucauagug

SEQ ID NO: 1691274 - RNA, 19 nt, Artificial Sequence
  Description of Artificial Sequence: Synthetic oligonucleotide
  Antisense strand to SEQ ID NO: 1691273
cacuaugagguuaaacuag

SEQ ID NO: 1691275 - RNA, 19 nt, Artificial Sequence
  Description of Artificial Sequence: Synthetic oligonucleotide
  Sense strand starting at position 2740 of SEQ ID NO: 1561693
uuaaguacucaguaaggcu

SEQ ID NO: 1691276 - RNA, 19 nt, Artificial Sequence
  Description of Artificial Sequence: Synthetic oligonucleotide
  Antisense strand to SEQ ID NO: 1691275
agccuuacugaguacuuaa

SEQ ID NO: 1691277 - RNA, 19 nt, Artificial Sequence
  Description of Artificial Sequence: Synthetic oligonucleotide
  Sense strand starting at position 3168 of SEQ ID NO: 1561693
ggaauuaagcauugcagug

SEQ ID NO: 1691278 - RNA, 19 nt, Artificial Sequence
  Description of Artificial Sequence: Synthetic oligonucleotide
  Antisense strand to SEQ ID NO: 1691277
cacugcaaugcuuaauucc

SEQ ID NO: 1691279 - RNA, 19 nt, Artificial Sequence
  Description of Artificial Sequence: Synthetic oligonucleotide
  Sense strand starting at position 3173 of SEQ ID NO: 1561693
uaagcauugcagugggaau

SEQ ID NO: 1691280 - RNA, 19 nt, Artificial Sequence
  Description of Artificial Sequence: Synthetic oligonucleotide
  Antisense strand to SEQ ID NO: 1691279
auucccacugcaaugcuua

SEQ ID NO: 1691281 - RNA, 19 nt, Artificial Sequence
  Description of Artificial Sequence: Synthetic oligonucleotide
  Sense strand starting at position 3175 of SEQ ID NO: 1561693
agcauugcagugggaauua

SEQ ID NO: 1691282 - RNA, 19 nt, Artificial Sequence
  Description of Artificial Sequence: Synthetic oligonucleotide
  Antisense strand to SEQ ID NO: 1691281
uaauucccacugcaaugcu

SEQ ID NO: 1691283 - RNA, 19 nt, Artificial Sequence
  Description of Artificial Sequence: Synthetic oligonucleotide
  Sense strand starting at position 3193 of SEQ ID NO: 1561693
acccauaugccauaguaag

SEQ ID NO: 1691284 - RNA, 19 nt, Artificial Sequence
  Description of Artificial Sequence: Synthetic oligonucleotide
  Antisense strand to SEQ ID NO: 1691283
cuuacuauggcauaugggu

SEQ ID NO: 1691285 - RNA, 19 nt, Artificial Sequence
  Description of Artificial Sequence: Synthetic oligonucleotide
  Sense strand starting at position 3205 of SEQ ID NO: 1561693
uaguaagcgaugugcauuu

SEQ ID NO: 1691286 - RNA, 19 nt, Artificial Sequence
  Description of Artificial Sequence: Synthetic oligonucleotide
  Antisense strand to SEQ ID NO: 1691285
aaaugcacaucgcuuacua

SEQ ID NO: 1691287 - RNA, 19 nt, Artificial Sequence
  Description of Artificial Sequence: Synthetic oligonucleotide
  Sense strand starting at position 3295 of SEQ ID NO: 1561693
auuauucuugauugcaaag

SEQ ID NO: 1691288 - RNA, 19 nt, Artificial Sequence
  Description of Artificial Sequence: Synthetic oligonucleotide
  Antisense strand to SEQ ID NO: 1691287
cuuugcaaucaagaauaau

SEQ ID NO: 1691289 - RNA, 19 nt, Artificial Sequence
  Description of Artificial Sequence: Synthetic oligonucleotide
  Sense strand starting at position 3366 of SEQ ID NO: 1561693
gauguccuugcggaaguau

SEQ ID NO: 1691290 - RNA, 19 nt, Artificial Sequence
  Description of Artificial Sequence: Synthetic oligonucleotide
  Antisense strand to SEQ ID NO: 1691289
auacuuccgcaaggacauc

SEQ ID NO: 1691291 - RNA, 19 nt, Artificial Sequence
  Description of Artificial Sequence: Synthetic oligonucleotide
  Sense strand starting at position 3479 of SEQ ID NO: 1561693
cuuauuuguuaugcaagca

SEQ ID NO: 1691292 - RNA, 19 nt, Artificial Sequence
  Description of Artificial Sequence: Synthetic oligonucleotide
  Antisense strand to SEQ ID NO: 1691291
ugcuugcauaacaaauaag

SEQ ID NO: 1691293 - RNA, 19 nt, Artificial Sequence
  Description of Artificial Sequence: Synthetic oligonucleotide
  Sense strand starting at position 3603 of SEQ ID NO: 1561693
cucucuugggaguauauua

SEQ ID NO: 1691294 - RNA, 19 nt, Artificial Sequence
  Description of Artificial Sequence: Synthetic oligonucleotide
  Antisense strand to SEQ ID NO: 1691293
uaauauacucccaagagag

SEQ ID NO: 1691295 - RNA, 19 nt, Artificial Sequence
  Description of Artificial Sequence: Synthetic oligonucleotide
  Sense strand starting at position 3685 of SEQ ID NO: 1561693
uguugaguaccaugauagu

SEQ ID NO: 1691296 - RNA, 19 nt, Artificial Sequence
  Description of Artificial Sequence: Synthetic oligonucleotide
  Antisense strand to SEQ ID NO: 1691295
acuaucaugguacucaaca

SEQ ID NO: 1691297 - RNA, 19 nt, Artificial Sequence
  Description of Artificial Sequence: Synthetic oligonucleotide
  Sense strand starting at position 3694 of SEQ ID NO: 1561693
ccaugauaguaccuauuau

SEQ ID NO: 1691298 - RNA, 19 nt, Artificial Sequence
  Description of Artificial Sequence: Synthetic oligonucleotide
  Antisense strand to SEQ ID NO: 1691297
auaauagguacuaucaugg

SEQ ID NO: 1691299 - RNA, 19 nt, Artificial Sequence
  Description of Artificial Sequence: Synthetic oligonucleotide
  Sense strand starting at position 3757 of SEQ ID NO: 1561693
gaggucacacagugaguaa

SEQ ID NO: 1691300 - RNA, 19 nt, Artificial Sequence
  Description of Artificial Sequence: Synthetic oligonucleotide
  Antisense strand to SEQ ID NO: 1691299
uuacucacugugugaccuc

SEQ ID NO: 1691301 - RNA, 19 nt, Artificial Sequence
  Description of Artificial Sequence: Synthetic oligonucleotide
  Sense strand starting at position 3923 of SEQ ID NO: 1561693
agaccuaagcucuggaacu

SEQ ID NO: 1691302 - RNA, 19 nt, Artificial Sequence
  Description of Artificial Sequence: Synthetic oligonucleotide
  Antisense strand to SEQ ID NO: 1691301
aguuccagagcuuaggucu

SEQ ID NO: 1691303 - RNA, 19 nt, Artificial Sequence
  Description of Artificial Sequence: Synthetic oligonucleotide
  Sense strand starting at position 3964 of SEQ ID NO: 1561693
ccagguugcucauuguaac

SEQ ID NO: 1691304 - RNA, 19 nt, Artificial Sequence
  Description of Artificial Sequence: Synthetic oligonucleotide
  Antisense strand to SEQ ID NO: 1691303
guuacaaugagcaaccugg

SEQ ID NO: 1691305 - RNA, 19 nt, Artificial Sequence
  Description of Artificial Sequence: Synthetic oligonucleotide
  Sense strand starting at position 52 of SEQ ID NO: 1561694
ucauuuguuucugcuugca

SEQ ID NO: 1691306 - RNA, 19 nt, Artificial Sequence
  Description of Artificial Sequence: Synthetic oligonucleotide
  Antisense strand to SEQ ID NO: 1691305
ugcaagcagaaacaaauga

SEQ ID NO: 1691307 - RNA, 19 nt, Artificial Sequence
  Description of Artificial Sequence: Synthetic oligonucleotide
  Sense strand starting at position 60 of SEQ ID NO: 1561694
uucugcuugcaugauauau

SEQ ID NO: 1691308 - RNA, 19 nt, Artificial Sequence
  Description of Artificial Sequence: Synthetic oligonucleotide
  Antisense strand to SEQ ID NO: 1691307
auauaucaugcaagcagaa

SEQ ID NO: 1691309 - RNA, 19 nt, Artificial Sequence
  Description of Artificial Sequence: Synthetic oligonucleotide
  Sense strand starting at position 64 of SEQ ID NO: 1561694
gcuugcaugauauauggca

SEQ ID NO: 1691310 - RNA, 19 nt, Artificial Sequence
  Description of Artificial Sequence: Synthetic oligonucleotide
  Antisense strand to SEQ ID NO: 1691309
ugccauauaucaugcaagc

SEQ ID NO: 1691311 - RNA, 19 nt, Artificial Sequence
  Description of Artificial Sequence: Synthetic oligonucleotide
  Sense strand starting at position 144 of SEQ ID NO: 1561694
cuggguaucucagcaaauu

SEQ ID NO: 1691312 - RNA, 19 nt, Artificial Sequence
  Description of Artificial Sequence: Synthetic oligonucleotide
  Antisense strand to SEQ ID NO: 1691311
aauuugcugagauacccag

SEQ ID NO: 1691313 - RNA, 19 nt, Artificial Sequence
  Description of Artificial Sequence: Synthetic oligonucleotide
  Sense strand starting at position 145 of SEQ ID NO: 1561694
uggguaucucagcaaauua

SEQ ID NO: 1691314 - RNA, 19 nt, Artificial Sequence
  Description of Artificial Sequence: Synthetic oligonucleotide
  Antisense strand to SEQ ID NO: 1691313
uaauuugcugagauaccca

SEQ ID NO: 1691315 - RNA, 19 nt, Artificial Sequence
  Description of Artificial Sequence: Synthetic oligonucleotide
  Sense strand starting at position 221 of SEQ ID NO: 1561694
ccaccagcucauugcaaga

SEQ ID NO: 1691316 - RNA, 19 nt, Artificial Sequence
  Description of Artificial Sequence: Synthetic oligonucleotide
  Antisense strand to SEQ ID NO: 1691315
ucuugcaaugagcuggugg

SEQ ID NO: 1691317 - RNA, 19 nt, Artificial Sequence
  Description of Artificial Sequence: Synthetic oligonucleotide
  Sense strand starting at position 238 of SEQ ID NO: 1561694
gacaccauccugugaacgu

SEQ ID NO: 1691318 - RNA, 19 nt, Artificial Sequence
  Description of Artificial Sequence: Synthetic oligonucleotide
  Antisense strand to SEQ ID NO: 1691317
acguucacaggaugguguc

SEQ ID NO: 1691319 - RNA, 19 nt, Artificial Sequence
  Description of Artificial Sequence: Synthetic oligonucleotide
  Sense strand starting at position 278 of SEQ ID NO: 1561694
auaggaaaguccuugauac

SEQ ID NO: 1691320 - RNA, 19 nt, Artificial Sequence
  Description of Artificial Sequence: Synthetic oligonucleotide
  Antisense strand to SEQ ID NO: 1691319
guaucaaggacuuuccuau

SEQ ID NO: 1691321 - RNA, 19 nt, Artificial Sequence
  Description of Artificial Sequence: Synthetic oligonucleotide
  Sense strand starting at position 279 of SEQ ID NO: 1561694
uaggaaaguccuugauacc

SEQ ID NO: 1691322 - RNA, 19 nt, Artificial Sequence
  Description of Artificial Sequence: Synthetic oligonucleotide
  Antisense strand to SEQ ID NO: 1691321
gguaucaaggacuuuccua

SEQ ID NO: 1691323 - RNA, 19 nt, Artificial Sequence
  Description of Artificial Sequence: Synthetic oligonucleotide
  Sense strand starting at position 437 of SEQ ID NO: 1561694
ucgggaaucaugcagaugu

SEQ ID NO: 1691324 - RNA, 19 nt, Artificial Sequence
  Description of Artificial Sequence: Synthetic oligonucleotide
  Antisense strand to SEQ ID NO: 1691323
acaucugcaugauucccga

SEQ ID NO: 1691325 - RNA, 19 nt, Artificial Sequence
  Description of Artificial Sequence: Synthetic oligonucleotide
  Sense strand starting at position 487 of SEQ ID NO: 1561694
cuaugagaccuuuggcaag

SEQ ID NO: 1691326 - RNA, 19 nt, Artificial Sequence
  Description of Artificial Sequence: Synthetic oligonucleotide
  Antisense strand to SEQ ID NO: 1691325
cuugccaaaggucucauag

SEQ ID NO: 1691327 - RNA, 19 nt, Artificial Sequence
  Description of Artificial Sequence: Synthetic oligonucleotide
  Sense strand starting at position 581 of SEQ ID NO: 1561694
ggcaguguuuggcucagag

SEQ ID NO: 1691328 - RNA, 19 nt, Artificial Sequence
  Description of Artificial Sequence: Synthetic oligonucleotide
  Antisense strand to SEQ ID NO: 1691327
cucugagccaaacacugcc

SEQ ID NO: 1691329 - RNA, 19 nt, Artificial Sequence
  Description of Artificial Sequence: Synthetic oligonucleotide
  Sense strand starting at position 618 of SEQ ID NO: 1561694
cucaauagauagcuucuga

SEQ ID NO: 1691330 - RNA, 19 nt, Artificial Sequence
  Description of Artificial Sequence: Synthetic oligonucleotide
  Antisense strand to SEQ ID NO: 1691329
ucagaagcuaucuauugag

SEQ ID NO: 1691331 - RNA, 19 nt, Artificial Sequence
  Description of Artificial Sequence: Synthetic oligonucleotide
  Sense strand starting at position 677 of SEQ ID NO: 1561694
gggaguuaugagggcaaac

SEQ ID NO: 1691332 - RNA, 19 nt, Artificial Sequence
  Description of Artificial Sequence: Synthetic oligonucleotide
  Antisense strand to SEQ ID NO: 1691331
guuugcccucauaacuccc

SEQ ID NO: 1691333 - RNA, 19 nt, Artificial Sequence
  Description of Artificial Sequence: Synthetic oligonucleotide
  Sense strand starting at position 701 of SEQ ID NO: 1561694
ucuugagaagccuggauca

SEQ ID NO: 1691334 - RNA, 19 nt, Artificial Sequence
  Description of Artificial Sequence: Synthetic oligonucleotide
  Antisense strand to SEQ ID NO: 1691333
ugauccaggcuucucaaga

SEQ ID NO: 1691335 - RNA, 19 nt, Artificial Sequence
  Description of Artificial Sequence: Synthetic oligonucleotide
  Sense strand starting at position 909 of SEQ ID NO: 1561694
ccuugauaccaugggucau

SEQ ID NO: 1691336 - RNA, 19 nt, Artificial Sequence
  Description of Artificial Sequence: Synthetic oligonucleotide
  Antisense strand to SEQ ID NO: 1691335
augacccaugguaucaagg

SEQ ID NO: 1691337 - RNA, 19 nt, Artificial Sequence
  Description of Artificial Sequence: Synthetic oligonucleotide
  Sense strand starting at position 1097 of SEQ ID NO: 1561694
gagauaugcuugguuggcu

SEQ ID NO: 1691338 - RNA, 19 nt, Artificial Sequence
  Description of Artificial Sequence: Synthetic oligonucleotide
  Antisense strand to SEQ ID NO: 1691337
agccaaccaagcauaucuc

SEQ ID NO: 1691339 - RNA, 19 nt, Artificial Sequence
  Description of Artificial Sequence: Synthetic oligonucleotide
  Sense strand starting at position 1122 of SEQ ID NO: 1561694
cccucuggugccuggagaa

SEQ ID NO: 1691340 - RNA, 19 nt, Artificial Sequence
  Description of Artificial Sequence: Synthetic oligonucleotide
  Antisense strand to SEQ ID NO: 1691339
uucuccaggcaccagaggg

SEQ ID NO: 1691341 - RNA, 19 nt, Artificial Sequence
  Description of Artificial Sequence: Synthetic oligonucleotide
  Sense strand starting at position 1188 of SEQ ID NO: 1561694
ccagaacucuggucuccua

SEQ ID NO: 1691342 - RNA, 19 nt, Artificial Sequence
  Description of Artificial Sequence: Synthetic oligonucleotide
  Antisense strand to SEQ ID NO: 1691341
uaggagaccagaguucugg

SEQ ID NO: 1691343 - RNA, 19 nt, Artificial Sequence
  Description of Artificial Sequence: Synthetic oligonucleotide
  Sense strand starting at position 1209 of SEQ ID NO: 1561694
ccuuuauugugucccauaa

SEQ ID NO: 1691344 - RNA, 19 nt, Artificial Sequence
  Description of Artificial Sequence: Synthetic oligonucleotide
  Antisense strand to SEQ ID NO: 1691343
uuaugggacacaauaaagg

SEQ ID NO: 1691345 - RNA, 19 nt, Artificial Sequence
  Description of Artificial Sequence: Synthetic oligonucleotide
  Sense strand starting at position 1294 of SEQ ID NO: 1561694
gauuccuccuagguuggaa

SEQ ID NO: 1691346 - RNA, 19 nt, Artificial Sequence
  Description of Artificial Sequence: Synthetic oligonucleotide
  Antisense strand to SEQ ID NO: 1691345
uuccaaccuaggaggaauc

SEQ ID NO: 1691347 - RNA, 19 nt, Artificial Sequence
  Description of Artificial Sequence: Synthetic oligonucleotide
  Sense strand starting at position 1332 of SEQ ID NO: 1561694
gguggaaggcgauguuaaa

SEQ ID NO: 1691348 - RNA, 19 nt, Artificial Sequence
  Description of Artificial Sequence: Synthetic oligonucleotide
  Antisense strand to SEQ ID NO: 1691347
uuuaacaucgccuuccacc

SEQ ID NO: 1691349 - RNA, 19 nt, Artificial Sequence
  Description of Artificial Sequence: Synthetic oligonucleotide
  Sense strand starting at position 1466 of SEQ ID NO: 1561694
gcuggcaucuguccacaau

SEQ ID NO: 1691350 - RNA, 19 nt, Artificial Sequence
  Description of Artificial Sequence: Synthetic oligonucleotide
  Antisense strand to SEQ ID NO: 1691349
auuguggacagaugccagc

SEQ ID NO: 1691351 - RNA, 19 nt, Artificial Sequence
  Description of Artificial Sequence: Synthetic oligonucleotide
  Sense strand starting at position 1467 of SEQ ID NO: 1561694
cuggcaucuguccacaaua

SEQ ID NO: 1691352 - RNA, 19 nt, Artificial Sequence
  Description of Artificial Sequence: Synthetic oligonucleotide
  Antisense strand to SEQ ID NO: 1691351
uauuguggacagaugccag

SEQ ID NO: 1691353 - RNA, 19 nt, Artificial Sequence
  Description of Artificial Sequence: Synthetic oligonucleotide
  Sense strand starting at position 1469 of SEQ ID NO: 1561694
ggcaucuguccacaauaag

SEQ ID NO: 1691354 - RNA, 19 nt, Artificial Sequence
  Description of Artificial Sequence: Synthetic oligonucleotide
  Antisense strand to SEQ ID NO: 1691353
cuuauuguggacagaugcc

SEQ ID NO: 1691355 - RNA, 19 nt, Artificial Sequence
  Description of Artificial Sequence: Synthetic oligonucleotide
  Sense strand starting at position 2161 of SEQ ID NO: 1561694
agagacagcucuucuucuu

SEQ ID NO: 1691356 - RNA, 19 nt, Artificial Sequence
  Description of Artificial Sequence: Synthetic oligonucleotide
  Antisense strand to SEQ ID NO: 1691355
aagaagaagagcugucucu

SEQ ID NO: 1691357 - RNA, 19 nt, Artificial Sequence
  Description of Artificial Sequence: Synthetic oligonucleotide
  Sense strand starting at position 2246 of SEQ ID NO: 1561694
gagagaucccaugggugcu

SEQ ID NO: 1691358 - RNA, 19 nt, Artificial Sequence
  Description of Artificial Sequence: Synthetic oligonucleotide
  Antisense strand to SEQ ID NO: 1691357
agcacccaugggaucucuc

SEQ ID NO: 1691359 - RNA, 19 nt, Artificial Sequence
  Description of Artificial Sequence: Synthetic oligonucleotide
  Sense strand starting at position 2441 of SEQ ID NO: 1561694
ggaagaguuucccaacuca

SEQ ID NO: 1691360 - RNA, 19 nt, Artificial Sequence
  Description of Artificial Sequence: Synthetic oligonucleotide
  Antisense strand to SEQ ID NO: 1691359
ugaguugggaaacucuucc

SEQ ID NO: 1691361 - RNA, 19 nt, Artificial Sequence
  Description of Artificial Sequence: Synthetic oligonucleotide
  Sense strand starting at position 2456 of SEQ ID NO: 1561694
cucagaauuucgcucucuu

SEQ ID NO: 1691362 - RNA, 19 nt, Artificial Sequence
  Description of Artificial Sequence: Synthetic oligonucleotide
  Antisense strand to SEQ ID NO: 1691361
aagagagcgaaauucugag

SEQ ID NO: 1691363 - RNA, 19 nt, Artificial Sequence
  Description of Artificial Sequence: Synthetic oligonucleotide
  Sense strand starting at position 2477 of SEQ ID NO: 1561694
aaaggaaauucccucgugu

SEQ ID NO: 1691364 - RNA, 19 nt, Artificial Sequence
  Description of Artificial Sequence: Synthetic oligonucleotide
  Antisense strand to SEQ ID NO: 1691363
acacgagggaauuuccuuu

SEQ ID NO: 1691365 - RNA, 19 nt, Artificial Sequence
  Description of Artificial Sequence: Synthetic oligonucleotide
  Sense strand starting at position 2590 of SEQ ID NO: 1561694
acaggcauuuauuaagagu

SEQ ID NO: 1691366 - RNA, 19 nt, Artificial Sequence
  Description of Artificial Sequence: Synthetic oligonucleotide
  Antisense strand to SEQ ID NO: 1691365
acucuuaauaaaugccugu

SEQ ID NO: 1691367 - RNA, 19 nt, Artificial Sequence
  Description of Artificial Sequence: Synthetic oligonucleotide
  Sense strand starting at position 2755 of SEQ ID NO: 1561694
aguggcguucgccuguaau

SEQ ID NO: 1691368 - RNA, 19 nt, Artificial Sequence
  Description of Artificial Sequence: Synthetic oligonucleotide
  Antisense strand to SEQ ID NO: 1691367
auuacaggcgaacgccacu

SEQ ID NO: 1691369 - RNA, 19 nt, Artificial Sequence
  Description of Artificial Sequence: Synthetic oligonucleotide
  Sense strand starting at position 3140 of SEQ ID NO: 1561694
gcuugagcucaagaaguca

SEQ ID NO: 1691370 - RNA, 19 nt, Artificial Sequence
  Description of Artificial Sequence: Synthetic oligonucleotide
  Antisense strand to SEQ ID NO: 1691369
ugacuucuugagcucaagc

SEQ ID NO: 1691371 - RNA, 19 nt, Artificial Sequence
  Description of Artificial Sequence: Synthetic oligonucleotide
  Sense strand starting at position 3148 of SEQ ID NO: 1561694
ucaagaagucaagguugca

SEQ ID NO: 1691372 - RNA, 19 nt, Artificial Sequence
  Description of Artificial Sequence: Synthetic oligonucleotide
  Antisense strand to SEQ ID NO: 1691371
ugcaaccuugacuucuuga

SEQ ID NO: 1691373 - RNA, 19 nt, Artificial Sequence
  Description of Artificial Sequence: Synthetic oligonucleotide
  Sense strand starting at position 3172 of SEQ ID NO: 1561694
ccaugauugcaaugauuac

SEQ ID NO: 1691374 - RNA, 19 nt, Artificial Sequence
  Description of Artificial Sequence: Synthetic oligonucleotide
  Antisense strand to SEQ ID NO: 1691373
guaaucauugcaaucaugg

SEQ ID NO: 1691375 - RNA, 19 nt, Artificial Sequence
  Description of Artificial Sequence: Synthetic oligonucleotide
  Sense strand starting at position 3278 of SEQ ID NO: 1561694
cacuuuaaguauguuagga

SEQ ID NO: 1691376 - RNA, 19 nt, Artificial Sequence
  Description of Artificial Sequence: Synthetic oligonucleotide
  Antisense strand to SEQ ID NO: 1691375
uccuaacauacuuaaagug

SEQ ID NO: 1691377 - RNA, 19 nt, Artificial Sequence
  Description of Artificial Sequence: Synthetic oligonucleotide
  Sense strand starting at position 3328 of SEQ ID NO: 1561694
acacacuugugccuacauu

SEQ ID NO: 1691378 - RNA, 19 nt, Artificial Sequence
  Description of Artificial Sequence: Synthetic oligonucleotide
  Antisense strand to SEQ ID NO: 1691377
aauguaggcacaagugugu

SEQ ID NO: 1691379 - RNA, 19 nt, Artificial Sequence
  Description of Artificial Sequence: Synthetic oligonucleotide
  Sense strand starting at position 3808 of SEQ ID NO: 1561694
gaaggacuguguucccuua

SEQ ID NO: 1691380 - RNA, 19 nt, Artificial Sequence
  Description of Artificial Sequence: Synthetic oligonucleotide
  Antisense strand to SEQ ID NO: 1691379
uaagggaacacaguccuuc

SEQ ID NO: 1691381 - RNA, 19 nt, Artificial Sequence
  Description of Artificial Sequence: Synthetic oligonucleotide
  Sense strand starting at position 3897 of SEQ ID NO: 1561694
gcucucaauuucuggaaga

SEQ ID NO: 1691382 - RNA, 19 nt, Artificial Sequence
  Description of Artificial Sequence: Synthetic oligonucleotide
  Antisense strand to SEQ ID NO: 1691381
ucuuccagaaauugagagc

SEQ ID NO: 1691383 - RNA, 19 nt, Artificial Sequence
  Description of Artificial Sequence: Synthetic oligonucleotide
  Sense strand starting at position 3898 of SEQ ID NO: 1561694
cucucaauuucuggaagag

SEQ ID NO: 1691384 - RNA, 19 nt, Artificial Sequence
  Description of Artificial Sequence: Synthetic oligonucleotide
  Antisense strand to SEQ ID NO: 1691383
cucuuccagaaauugagag

SEQ ID NO: 1691385 - RNA, 19 nt, Artificial Sequence
  Description of Artificial Sequence: Synthetic oligonucleotide
  Sense strand starting at position 19 of SEQ ID NO: 1561695
ucgcucuccgcuugcgaua

SEQ ID NO: 1691386 - RNA, 19 nt, Artificial Sequence
  Description of Artificial Sequence: Synthetic oligonucleotide
  Antisense strand to SEQ ID NO: 1691385
uaucgcaagcggagagcga

SEQ ID NO: 1691387 - RNA, 19 nt, Artificial Sequence
  Description of Artificial Sequence: Synthetic oligonucleotide
  Sense strand starting at position 87 of SEQ ID NO: 1561695
gugccuaggauguagaaua

SEQ ID NO: 1691388 - RNA, 19 nt, Artificial Sequence
  Description of Artificial Sequence: Synthetic oligonucleotide
  Antisense strand to SEQ ID NO: 1691387
uauucuacauccuaggcac

SEQ ID NO: 1691389 - RNA, 19 nt, Artificial Sequence
  Description of Artificial Sequence: Synthetic oligonucleotide
  Sense strand starting at position 122 of SEQ ID NO: 1561695
gucagugccaucguuguuu

SEQ ID NO: 1691390 - RNA, 19 nt, Artificial Sequence
  Description of Artificial Sequence: Synthetic oligonucleotide
  Antisense strand to SEQ ID NO: 1691389
aaacaacgauggcacugac

SEQ ID NO: 1691391 - RNA, 19 nt, Artificial Sequence
  Description of Artificial Sequence: Synthetic oligonucleotide
  Sense strand starting at position 628 of SEQ ID NO: 1561695
agugaaaugagccaucugu

SEQ ID NO: 1691392 - RNA, 19 nt, Artificial Sequence
  Description of Artificial Sequence: Synthetic oligonucleotide
  Antisense strand to SEQ ID NO: 1691391
acagauggcucauuucacu

SEQ ID NO: 1691393 - RNA, 19 nt, Artificial Sequence
  Description of Artificial Sequence: Synthetic oligonucleotide
  Sense strand starting at position 1288 of SEQ ID NO: 1561695
ggcacaugccuuugaagcu

SEQ ID NO: 1691394 - RNA, 19 nt, Artificial Sequence
  Description of Artificial Sequence: Synthetic oligonucleotide
  Antisense strand to SEQ ID NO: 1691393
agcuucaaaggcaugugcc

SEQ ID NO: 1691395 - RNA, 19 nt, Artificial Sequence
  Description of Artificial Sequence: Synthetic oligonucleotide
  Sense strand starting at position 1315 of SEQ ID NO: 1561695
acacgaagcccucaauguu

SEQ ID NO: 1691396 - RNA, 19 nt, Artificial Sequence
  Description of Artificial Sequence: Synthetic oligonucleotide
  Antisense strand to SEQ ID NO: 1691395
aacauugagggcuucgugu

SEQ ID NO: 1691397 - RNA, 19 nt, Artificial Sequence
  Description of Artificial Sequence: Synthetic oligonucleotide
  Sense strand starting at position 1462 of SEQ ID NO: 1561695
ccuugugccaguuagagua

SEQ ID NO: 1691398 - RNA, 19 nt, Artificial Sequence
  Description of Artificial Sequence: Synthetic oligonucleotide
  Antisense strand to SEQ ID NO: 1691397
uacucuaacuggcacaagg

SEQ ID NO: 1691399 - RNA, 19 nt, Artificial Sequence
  Description of Artificial Sequence: Synthetic oligonucleotide
  Sense strand starting at position 1623 of SEQ ID NO: 1561695
gccaguacucgcuggacgu

SEQ ID NO: 1691400 - RNA, 19 nt, Artificial Sequence
  Description of Artificial Sequence: Synthetic oligonucleotide
  Antisense strand to SEQ ID NO: 1691399
acguccagcgaguacuggc

SEQ ID NO: 1691401 - RNA, 19 nt, Artificial Sequence
  Description of Artificial Sequence: Synthetic oligonucleotide
  Sense strand starting at position 2041 of SEQ ID NO: 1561695
cuucuuauuucucaccgga

SEQ ID NO: 1691402 - RNA, 19 nt, Artificial Sequence
  Description of Artificial Sequence: Synthetic oligonucleotide
  Antisense strand to SEQ ID NO: 1691401
uccggugagaaauaagaag

SEQ ID NO: 1691403 - RNA, 19 nt, Artificial Sequence
  Description of Artificial Sequence: Synthetic oligonucleotide
  Sense strand starting at position 2044 of SEQ ID NO: 1561695
cuuauuucucaccggaugu

SEQ ID NO: 1691404 - RNA, 19 nt, Artificial Sequence
  Description of Artificial Sequence: Synthetic oligonucleotide
  Antisense strand to SEQ ID NO: 1691403
acauccggugagaaauaag

SEQ ID NO: 1691405 - RNA, 19 nt, Artificial Sequence
  Description of Artificial Sequence: Synthetic oligonucleotide
  Sense strand starting at position 2066 of SEQ ID NO: 1561695
ggcuuccugcaaugaauag

SEQ ID NO: 1691406 - RNA, 19 nt, Artificial Sequence
  Description of Artificial Sequence: Synthetic oligonucleotide
  Antisense strand to SEQ ID NO: 1691405
cuauucauugcaggaagcc

SEQ ID NO: 1691407 - RNA, 19 nt, Artificial Sequence
  Description of Artificial Sequence: Synthetic oligonucleotide
  Sense strand starting at position 2111 of SEQ ID NO: 1561695
cggugcuguuguucauaaa

SEQ ID NO: 1691408 - RNA, 19 nt, Artificial Sequence
  Description of Artificial Sequence: Synthetic oligonucleotide
  Antisense strand to SEQ ID NO: 1691407
uuuaugaacaacagcaccg

SEQ ID NO: 1691409 - RNA, 19 nt, Artificial Sequence
  Description of Artificial Sequence: Synthetic oligonucleotide
  Sense strand starting at position 2235 of SEQ ID NO: 1561695
ucucuuucucauggcauga

SEQ ID NO: 1691410 - RNA, 19 nt, Artificial Sequence
  Description of Artificial Sequence: Synthetic oligonucleotide
  Antisense strand to SEQ ID NO: 1691409
ucaugccaugagaaagaga

SEQ ID NO: 1691411 - RNA, 19 nt, Artificial Sequence
  Description of Artificial Sequence: Synthetic oligonucleotide
  Sense strand starting at position 2307 of SEQ ID NO: 1561695
cgaggaagcucccuuagua

SEQ ID NO: 1691412 - RNA, 19 nt, Artificial Sequence
  Description of Artificial Sequence: Synthetic oligonucleotide
  Antisense strand to SEQ ID NO: 1691411
uacuaagggagcuuccucg

SEQ ID NO: 1691413 - RNA, 19 nt, Artificial Sequence
  Description of Artificial Sequence: Synthetic oligonucleotide
  Sense strand starting at position 2400 of SEQ ID NO: 1561695
ggccauggaugguuauaau

SEQ ID NO: 1691414 - RNA, 19 nt, Artificial Sequence
  Description of Artificial Sequence: Synthetic oligonucleotide
  Antisense strand to SEQ ID NO: 1691413
auuauaaccauccauggcc

SEQ ID NO: 1691415 - RNA, 19 nt, Artificial Sequence
  Description of Artificial Sequence: Synthetic oligonucleotide
  Sense strand starting at position 2461 of SEQ ID NO: 1561695
agcucauguucucuguuga

SEQ ID NO: 1691416 - RNA, 19 nt, Artificial Sequence
  Description of Artificial Sequence: Synthetic oligonucleotide
  Antisense strand to SEQ ID NO: 1691415
ucaacagagaacaugagcu

SEQ ID NO: 1691417 - RNA, 19 nt, Artificial Sequence
  Description of Artificial Sequence: Synthetic oligonucleotide
  Sense strand starting at position 2509 of SEQ ID NO: 1561695
caucgugaaccuuaaauag

SEQ ID NO: 1691418 - RNA, 19 nt, Artificial Sequence
  Description of Artificial Sequence: Synthetic oligonucleotide
  Antisense strand to SEQ ID NO: 1691417
cuauuuaagguucacgaug

SEQ ID NO: 1691419 - RNA, 19 nt, Artificial Sequence
  Description of Artificial Sequence: Synthetic oligonucleotide
  Sense strand starting at position 2546 of SEQ ID NO: 1561695
ggauacgggucgugggaau

SEQ ID NO: 1691420 - RNA, 19 nt, Artificial Sequence
  Description of Artificial Sequence: Synthetic oligonucleotide
  Antisense strand to SEQ ID NO: 1691419
auucccacgacccguaucc

SEQ ID NO: 1691421 - RNA, 19 nt, Artificial Sequence
  Description of Artificial Sequence: Synthetic oligonucleotide
  Sense strand starting at position 2556 of SEQ ID NO: 1561695
cgugggaaugucuggguuu

SEQ ID NO: 1691422 - RNA, 19 nt, Artificial Sequence
  Description of Artificial Sequence: Synthetic oligonucleotide
  Antisense strand to SEQ ID NO: 1691421
aaacccagacauucccacg

SEQ ID NO: 1691423 - RNA, 19 nt, Artificial Sequence
  Description of Artificial Sequence: Synthetic oligonucleotide
  Sense strand starting at position 2583 of SEQ ID NO: 1561695
augccaagcuccucgauaa

SEQ ID NO: 1691424 - RNA, 19 nt, Artificial Sequence
  Description of Artificial Sequence: Synthetic oligonucleotide
  Antisense strand to SEQ ID NO: 1691423
uuaucgaggagcuuggcau

SEQ ID NO: 1691425 - RNA, 19 nt, Artificial Sequence
  Description of Artificial Sequence: Synthetic oligonucleotide
  Sense strand starting at position 2584 of SEQ ID NO: 1561695
ugccaagcuccucgauaau

SEQ ID NO: 1691426 - RNA, 19 nt, Artificial Sequence
  Description of Artificial Sequence: Synthetic oligonucleotide
  Antisense strand to SEQ ID NO: 1691425
auuaucgaggagcuuggca

SEQ ID NO: 1691427 - RNA, 19 nt, Artificial Sequence
  Description of Artificial Sequence: Synthetic oligonucleotide
  Sense strand starting at position 2587 of SEQ ID NO: 1561695
caagcuccucgauaauguu

SEQ ID NO: 1691428 - RNA, 19 nt, Artificial Sequence
  Description of Artificial Sequence: Synthetic oligonucleotide
  Antisense strand to SEQ ID NO: 1691427
aacauuaucgaggagcuug

SEQ ID NO: 1691429 - RNA, 19 nt, Artificial Sequence
  Description of Artificial Sequence: Synthetic oligonucleotide
  Sense strand starting at position 2590 of SEQ ID NO: 1561695
gcuccucgauaauguuaau

SEQ ID NO: 1691430 - RNA, 19 nt, Artificial Sequence
  Description of Artificial Sequence: Synthetic oligonucleotide
  Antisense strand to SEQ ID NO: 1691429
auuaacauuaucgaggagc

SEQ ID NO: 1691431 - RNA, 19 nt, Artificial Sequence
  Description of Artificial Sequence: Synthetic oligonucleotide
  Sense strand starting at position 2593 of SEQ ID NO: 1561695
ccucgauaauguuaaucca

SEQ ID NO: 1691432 - RNA, 19 nt, Artificial Sequence
  Description of Artificial Sequence: Synthetic oligonucleotide
  Antisense strand to SEQ ID NO: 1691431
uggauuaacauuaucgagg

SEQ ID NO: 1691433 - RNA, 19 nt, Artificial Sequence
  Description of Artificial Sequence: Synthetic oligonucleotide
  Sense strand starting at position 2596 of SEQ ID NO: 1561695
cgauaauguuaauccaaau

SEQ ID NO: 1691434 - RNA, 19 nt, Artificial Sequence
  Description of Artificial Sequence: Synthetic oligonucleotide
  Antisense strand to SEQ ID NO: 1691433
auuuggauuaacauuaucg

SEQ ID NO: 1691435 - RNA, 19 nt, Artificial Sequence
  Description of Artificial Sequence: Synthetic oligonucleotide
  Sense strand starting at position 2607 of SEQ ID NO: 1561695
auccaaauugggugaaauu

SEQ ID NO: 1691436 - RNA, 19 nt, Artificial Sequence
  Description of Artificial Sequence: Synthetic oligonucleotide
  Antisense strand to SEQ ID NO: 1691435
aauuucacccaauuuggau

SEQ ID NO: 1691437 - RNA, 19 nt, Artificial Sequence
  Description of Artificial Sequence: Synthetic oligonucleotide
  Sense strand starting at position 2617 of SEQ ID NO: 1561695
ggugaaauuuggcaguucu

SEQ ID NO: 1691438 - RNA, 19 nt, Artificial Sequence
  Description of Artificial Sequence: Synthetic oligonucleotide
  Antisense strand to SEQ ID NO: 1691437
agaacugccaaauuucacc

SEQ ID NO: 1691439 - RNA, 19 nt, Artificial Sequence
  Description of Artificial Sequence: Synthetic oligonucleotide
  Sense strand starting at position 2651 of SEQ ID NO: 1561695
gaaauauugcauugugagg

SEQ ID NO: 1691440 - RNA, 19 nt, Artificial Sequence
  Description of Artificial Sequence: Synthetic oligonucleotide
  Antisense strand to SEQ ID NO: 1691439
ccucacaaugcaauauuuc

SEQ ID NO: 1691441 - RNA, 19 nt, Artificial Sequence
  Description of Artificial Sequence: Synthetic oligonucleotide
  Sense strand starting at position 2752 of SEQ ID NO: 1561695
ggcucaggauuccuagcaa

SEQ ID NO: 1691442 - RNA, 19 nt, Artificial Sequence
  Description of Artificial Sequence: Synthetic oligonucleotide
  Antisense strand to SEQ ID NO: 1691441
uugcuaggaauccugagcc

SEQ ID NO: 1691443 - RNA, 19 nt, Artificial Sequence
  Description of Artificial Sequence: Synthetic oligonucleotide
  Sense strand starting at position 2875 of SEQ ID NO: 1561695
gccacagaccuuugcucau

SEQ ID NO: 1691444 - RNA, 19 nt, Artificial Sequence
  Description of Artificial Sequence: Synthetic oligonucleotide
  Antisense strand to SEQ ID NO: 1691443
augagcaaaggucuguggc

SEQ ID NO: 1691445 - RNA, 19 nt, Artificial Sequence
  Description of Artificial Sequence: Synthetic oligonucleotide
  Sense strand starting at position 2937 of SEQ ID NO: 1561695
gagacuaguuuauguggga

SEQ ID NO: 1691446 - RNA, 19 nt, Artificial Sequence
  Description of Artificial Sequence: Synthetic oligonucleotide
  Antisense strand to SEQ ID NO: 1691445
ucccacauaaacuagucuc

SEQ ID NO: 1691447 - RNA, 19 nt, Artificial Sequence
  Description of Artificial Sequence: Synthetic oligonucleotide
  Sense strand starting at position 2989 of SEQ ID NO: 1561695
caugaugacuugcugagaa

SEQ ID NO: 1691448 - RNA, 19 nt, Artificial Sequence
  Description of Artificial Sequence: Synthetic oligonucleotide
  Antisense strand to SEQ ID NO: 1691447
uucucagcaagucaucaug

SEQ ID NO: 1691449 - RNA, 19 nt, Artificial Sequence
  Description of Artificial Sequence: Synthetic oligonucleotide
  Sense strand starting at position 3208 of SEQ ID NO: 1561695
acuuguuucuauggacaga

SEQ ID NO: 1691450 - RNA, 19 nt, Artificial Sequence
  Description of Artificial Sequence: Synthetic oligonucleotide
  Antisense strand to SEQ ID NO: 1691449
ucuguccauagaaacaagu

SEQ ID NO: 1691451 - RNA, 19 nt, Artificial Sequence
  Description of Artificial Sequence: Synthetic oligonucleotide
  Sense strand starting at position 3275 of SEQ ID NO: 1561695
acagccacuuccuaagaga

SEQ ID NO: 1691452 - RNA, 19 nt, Artificial Sequence
  Description of Artificial Sequence: Synthetic oligonucleotide
  Antisense strand to SEQ ID NO: 1691451
ucucuuaggaaguggcugu

SEQ ID NO: 1691453 - RNA, 19 nt, Artificial Sequence
  Description of Artificial Sequence: Synthetic oligonucleotide
  Sense strand starting at position 3441 of SEQ ID NO: 1561695
gggagcugucugggucaca

SEQ ID NO: 1691454 - RNA, 19 nt, Artificial Sequence
  Description of Artificial Sequence: Synthetic oligonucleotide
  Antisense strand to SEQ ID NO: 1691453
ugugacccagacagcuccc

SEQ ID NO: 1691455 - RNA, 19 nt, Artificial Sequence
  Description of Artificial Sequence: Synthetic oligonucleotide
  Sense strand starting at position 3442 of SEQ ID NO: 1561695
ggagcugucugggucacaa

SEQ ID NO: 1691456 - RNA, 19 nt, Artificial Sequence
  Description of Artificial Sequence: Synthetic oligonucleotide
  Antisense strand to SEQ ID NO: 1691455
uugugacccagacagcucc

SEQ ID NO: 1691457 - RNA, 19 nt, Artificial Sequence
  Description of Artificial Sequence: Synthetic oligonucleotide
  Sense strand starting at position 3693 of SEQ ID NO: 1561695
gccugucccacagggaaau

SEQ ID NO: 1691458 - RNA, 19 nt, Artificial Sequence
  Description of Artificial Sequence: Synthetic oligonucleotide
  Antisense strand to SEQ ID NO: 1691457
auuucccugugggacaggc

SEQ ID NO: 1691459 - RNA, 19 nt, Artificial Sequence
  Description of Artificial Sequence: Synthetic oligonucleotide
  Sense strand starting at position 3726 of SEQ ID NO: 1561695
ggguguacaaggcagauau

SEQ ID NO: 1691460 - RNA, 19 nt, Artificial Sequence
  Description of Artificial Sequence: Synthetic oligonucleotide
  Antisense strand to SEQ ID NO: 1691459
auaucugccuuguacaccc

SEQ ID NO: 1691461 - RNA, 19 nt, Artificial Sequence
  Description of Artificial Sequence: Synthetic oligonucleotide
  Sense strand starting at position 3792 of SEQ ID NO: 1561695
ccgugucaagagcaauaaa

SEQ ID NO: 1691462 - RNA, 19 nt, Artificial Sequence
  Description of Artificial Sequence: Synthetic oligonucleotide
  Antisense strand to SEQ ID NO: 1691461
uuuauugcucuugacacgg

SEQ ID NO: 1691463 - RNA, 19 nt, Artificial Sequence
  Description of Artificial Sequence: Synthetic oligonucleotide
  Sense strand starting at position 3852 of SEQ ID NO: 1561695
ggaugcaaugcacaauuau

SEQ ID NO: 1691464 - RNA, 19 nt, Artificial Sequence
  Description of Artificial Sequence: Synthetic oligonucleotide
  Antisense strand to SEQ ID NO: 1691463
auaauugugcauugcaucc

SEQ ID NO: 1691465 - RNA, 19 nt, Artificial Sequence
  Description of Artificial Sequence: Synthetic oligonucleotide
  Sense strand starting at position 76 of SEQ ID NO: 1561696
ggaguucucauccagguaa

SEQ ID NO: 1691466 - RNA, 19 nt, Artificial Sequence
  Description of Artificial Sequence: Synthetic oligonucleotide
  Antisense strand to SEQ ID NO: 1691465
uuaccuggaugagaacucc

SEQ ID NO: 1691467 - RNA, 19 nt, Artificial Sequence
  Description of Artificial Sequence: Synthetic oligonucleotide
  Sense strand starting at position 78 of SEQ ID NO: 1561696
aguucucauccagguaauc

SEQ ID NO: 1691468 - RNA, 19 nt, Artificial Sequence
  Description of Artificial Sequence: Synthetic oligonucleotide
  Antisense strand to SEQ ID NO: 1691467
gauuaccuggaugagaacu

SEQ ID NO: 1691469 - RNA, 19 nt, Artificial Sequence
  Description of Artificial Sequence: Synthetic oligonucleotide
  Sense strand starting at position 83 of SEQ ID NO: 1561696
ucauccagguaaucuuaga

SEQ ID NO: 1691470 - RNA, 19 nt, Artificial Sequence
  Description of Artificial Sequence: Synthetic oligonucleotide
  Antisense strand to SEQ ID NO: 1691469
ucuaagauuaccuggauga

SEQ ID NO: 1691471 - RNA, 19 nt, Artificial Sequence
  Description of Artificial Sequence: Synthetic oligonucleotide
  Sense strand starting at position 174 of SEQ ID NO: 1561696
uuuggaccuugagauuaaa

SEQ ID NO: 1691472 - RNA, 19 nt, Artificial Sequence
  Description of Artificial Sequence: Synthetic oligonucleotide
  Antisense strand to SEQ ID NO: 1691471
uuuaaucucaagguccaaa

SEQ ID NO: 1691473 - RNA, 19 nt, Artificial Sequence
  Description of Artificial Sequence: Synthetic oligonucleotide
  Sense strand starting at position 220 of SEQ ID NO: 1561696
ggaaguccucucuaaguaa

SEQ ID NO: 1691474 - RNA, 19 nt, Artificial Sequence
  Description of Artificial Sequence: Synthetic oligonucleotide
  Antisense strand to SEQ ID NO: 1691473
uuacuuagagaggacuucc

SEQ ID NO: 1691475 - RNA, 19 nt, Artificial Sequence
  Description of Artificial Sequence: Synthetic oligonucleotide
  Sense strand starting at position 1267 of SEQ ID NO: 1561696
acaccaagauguuaugagu

SEQ ID NO: 1691476 - RNA, 19 nt, Artificial Sequence
  Description of Artificial Sequence: Synthetic oligonucleotide
  Antisense strand to SEQ ID NO: 1691475
acucauaacaucuuggugu

SEQ ID NO: 1691477 - RNA, 19 nt, Artificial Sequence
  Description of Artificial Sequence: Synthetic oligonucleotide
  Sense strand starting at position 1270 of SEQ ID NO: 1561696
ccaagauguuaugaguguu

SEQ ID NO: 1691478 - RNA, 19 nt, Artificial Sequence
  Description of Artificial Sequence: Synthetic oligonucleotide
  Antisense strand to SEQ ID NO: 1691477
aacacucauaacaucuugg

SEQ ID NO: 1691479 - RNA, 19 nt, Artificial Sequence
  Description of Artificial Sequence: Synthetic oligonucleotide
  Sense strand starting at position 1273 of SEQ ID NO: 1561696
agauguuaugaguguuuau

SEQ ID NO: 1691480 - RNA, 19 nt, Artificial Sequence
  Description of Artificial Sequence: Synthetic oligonucleotide
  Antisense strand to SEQ ID NO: 1691479
auaaacacucauaacaucu

SEQ ID NO: 1691481 - RNA, 19 nt, Artificial Sequence
  Description of Artificial Sequence: Synthetic oligonucleotide
  Sense strand starting at position 1276 of SEQ ID NO: 1561696
uguuaugaguguuuaucua

SEQ ID NO: 1691482 - RNA, 19 nt, Artificial Sequence
  Description of Artificial Sequence: Synthetic oligonucleotide
  Antisense strand to SEQ ID NO: 1691481
uagauaaacacucauaaca

SEQ ID NO: 1691483 - RNA, 19 nt, Artificial Sequence
  Description of Artificial Sequence: Synthetic oligonucleotide
  Sense strand starting at position 1283 of SEQ ID NO: 1561696
aguguuuaucuauggguug

SEQ ID NO: 1691484 - RNA, 19 nt, Artificial Sequence
  Description of Artificial Sequence: Synthetic oligonucleotide
  Antisense strand to SEQ ID NO: 1691483
caacccauagauaaacacu

SEQ ID NO: 1691485 - RNA, 19 nt, Artificial Sequence
  Description of Artificial Sequence: Synthetic oligonucleotide
  Sense strand starting at position 1284 of SEQ ID NO: 1561696
guguuuaucuauggguugu

SEQ ID NO: 1691486 - RNA, 19 nt, Artificial Sequence
  Description of Artificial Sequence: Synthetic oligonucleotide
  Antisense strand to SEQ ID NO: 1691485
acaacccauagauaaacac

SEQ ID NO: 1691487 - RNA, 19 nt, Artificial Sequence
  Description of Artificial Sequence: Synthetic oligonucleotide
  Sense strand starting at position 1288 of SEQ ID NO: 1561696
uuaucuauggguuguggga

SEQ ID NO: 1691488 - RNA, 19 nt, Artificial Sequence
  Description of Artificial Sequence: Synthetic oligonucleotide
  Antisense strand to SEQ ID NO: 1691487
ucccacaacccauagauaa

SEQ ID NO: 1691489 - RNA, 19 nt, Artificial Sequence
  Description of Artificial Sequence: Synthetic oligonucleotide
  Sense strand starting at position 1290 of SEQ ID NO: 1561696
aucuauggguugugggauu

SEQ ID NO: 1691490 - RNA, 19 nt, Artificial Sequence
  Description of Artificial Sequence: Synthetic oligonucleotide
  Antisense strand to SEQ ID NO: 1691489
aaucccacaacccauagau

SEQ ID NO: 1691491 - RNA, 19 nt, Artificial Sequence
  Description of Artificial Sequence: Synthetic oligonucleotide
  Sense strand starting at position 1375 of SEQ ID NO: 1561696
auaacuuaaguguguaaca

SEQ ID NO: 1691492 - RNA, 19 nt, Artificial Sequence
  Description of Artificial Sequence: Synthetic oligonucleotide
  Antisense strand to SEQ ID NO: 1691491
uguuacacacuuaaguuau

SEQ ID NO: 1691493 - RNA, 19 nt, Artificial Sequence
  Description of Artificial Sequence: Synthetic oligonucleotide
  Sense strand starting at position 1386 of SEQ ID NO: 1561696
guguaacaauagguuacau

SEQ ID NO: 1691494 - RNA, 19 nt, Artificial Sequence
  Description of Artificial Sequence: Synthetic oligonucleotide
  Antisense strand to SEQ ID NO: 1691493
auguaaccuauuguuacac

SEQ ID NO: 1691495 - RNA, 19 nt, Artificial Sequence
  Description of Artificial Sequence: Synthetic oligonucleotide
  Sense strand starting at position 1397 of SEQ ID NO: 1561696
gguuacauacgcuaguguu

SEQ ID NO: 1691496 - RNA, 19 nt, Artificial Sequence
  Description of Artificial Sequence: Synthetic oligonucleotide
  Antisense strand to SEQ ID NO: 1691495
aacacuagcguauguaacc

SEQ ID NO: 1691497 - RNA, 19 nt, Artificial Sequence
  Description of Artificial Sequence: Synthetic oligonucleotide
  Sense strand starting at position 1424 of SEQ ID NO: 1561696
gcuggaaugcuacacaauc

SEQ ID NO: 1691498 - RNA, 19 nt, Artificial Sequence
  Description of Artificial Sequence: Synthetic oligonucleotide
  Antisense strand to SEQ ID NO: 1691497
gauuguguagcauuccagc

SEQ ID NO: 1691499 - RNA, 19 nt, Artificial Sequence
  Description of Artificial Sequence: Synthetic oligonucleotide
  Sense strand starting at position 1451 of SEQ ID NO: 1561696
gcguguuggcaaugauacu

SEQ ID NO: 1691500 - RNA, 19 nt, Artificial Sequence
  Description of Artificial Sequence: Synthetic oligonucleotide
  Antisense strand to SEQ ID NO: 1691499
aguaucauugccaacacgc

SEQ ID NO: 1691501 - RNA, 19 nt, Artificial Sequence
  Description of Artificial Sequence: Synthetic oligonucleotide
  Sense strand starting at position 1452 of SEQ ID NO: 1561696
cguguuggcaaugauacuu

SEQ ID NO: 1691502 - RNA, 19 nt, Artificial Sequence
  Description of Artificial Sequence: Synthetic oligonucleotide
  Antisense strand to SEQ ID NO: 1691501
aaguaucauugccaacacg

SEQ ID NO: 1691503 - RNA, 19 nt, Artificial Sequence
  Description of Artificial Sequence: Synthetic oligonucleotide
  Sense strand starting at position 1458 of SEQ ID NO: 1561696
ggcaaugauacuuaccgau

SEQ ID NO: 1691504 - RNA, 19 nt, Artificial Sequence
  Description of Artificial Sequence: Synthetic oligonucleotide
  Antisense strand to SEQ ID NO: 1691503
aucgguaaguaucauugcc

SEQ ID NO: 1691505 - RNA, 19 nt, Artificial Sequence
  Description of Artificial Sequence: Synthetic oligonucleotide
  Sense strand starting at position 1464 of SEQ ID NO: 1561696
gauacuuaccgauauggca

SEQ ID NO: 1691506 - RNA, 19 nt, Artificial Sequence
  Description of Artificial Sequence: Synthetic oligonucleotide
  Antisense strand to SEQ ID NO: 1691505
ugccauaucgguaaguauc

SEQ ID NO: 1691507 - RNA, 19 nt, Artificial Sequence
  Description of Artificial Sequence: Synthetic oligonucleotide
  Sense strand starting at position 1491 of SEQ ID NO: 1561696
acuacuugaugccagguaa

SEQ ID NO: 1691508 - RNA, 19 nt, Artificial Sequence
  Description of Artificial Sequence: Synthetic oligonucleotide
  Antisense strand to SEQ ID NO: 1691507
uuaccuggcaucaaguagu

SEQ ID NO: 1691509 - RNA, 19 nt, Artificial Sequence
  Description of Artificial Sequence: Synthetic oligonucleotide
  Sense strand starting at position 2311 of SEQ ID NO: 1561696
cugacguuccgggagaagu

SEQ ID NO: 1691510 - RNA, 19 nt, Artificial Sequence
  Description of Artificial Sequence: Synthetic oligonucleotide
  Antisense strand to SEQ ID NO: 1691509
acuucucccggaacgucag

SEQ ID NO: 1691511 - RNA, 19 nt, Artificial Sequence
  Description of Artificial Sequence: Synthetic oligonucleotide
  Sense strand starting at position 2321 of SEQ ID NO: 1561696
gggagaagucacggaucau

SEQ ID NO: 1691512 - RNA, 19 nt, Artificial Sequence
  Description of Artificial Sequence: Synthetic oligonucleotide
  Antisense strand to SEQ ID NO: 1691511
augauccgugacuucuccc

SEQ ID NO: 1691513 - RNA, 19 nt, Artificial Sequence
  Description of Artificial Sequence: Synthetic oligonucleotide
  Sense strand starting at position 2414 of SEQ ID NO: 1561696
ugagcacgauccugaagaa

SEQ ID NO: 1691514 - RNA, 19 nt, Artificial Sequence
  Description of Artificial Sequence: Synthetic oligonucleotide
  Antisense strand to SEQ ID NO: 1691513
uucuucaggaucgugcuca

SEQ ID NO: 1691515 - RNA, 19 nt, Artificial Sequence
  Description of Artificial Sequence: Synthetic oligonucleotide
  Sense strand starting at position 2576 of SEQ ID NO: 1561696
agggcaucauccucaagga

SEQ ID NO: 1691516 - RNA, 19 nt, Artificial Sequence
  Description of Artificial Sequence: Synthetic oligonucleotide
  Antisense strand to SEQ ID NO: 1691515
uccuugaggaugaugcccu

SEQ ID NO: 1691517 - RNA, 19 nt, Artificial Sequence
  Description of Artificial Sequence: Synthetic oligonucleotide
  Sense strand starting at position 2873 of SEQ ID NO: 1561696
ccgagaccagucuauggua

SEQ ID NO: 1691518 - RNA, 19 nt, Artificial Sequence
  Description of Artificial Sequence: Synthetic oligonucleotide
  Antisense strand to SEQ ID NO: 1691517
uaccauagacuggucucgg

SEQ ID NO: 1691519 - RNA, 19 nt, Artificial Sequence
  Description of Artificial Sequence: Synthetic oligonucleotide
  Sense strand starting at position 3411 of SEQ ID NO: 1561696
aguggagccuucggacaua

SEQ ID NO: 1691520 - RNA, 19 nt, Artificial Sequence
  Description of Artificial Sequence: Synthetic oligonucleotide
  Antisense strand to SEQ ID NO: 1691519
uauguccgaaggcuccacu

SEQ ID NO: 1691521 - RNA, 19 nt, Artificial Sequence
  Description of Artificial Sequence: Synthetic oligonucleotide
  Sense strand starting at position 3636 of SEQ ID NO: 1561696
ggaggagggugauguugau

SEQ ID NO: 1691522 - RNA, 19 nt, Artificial Sequence
  Description of Artificial Sequence: Synthetic oligonucleotide
  Antisense strand to SEQ ID NO: 1691521
aucaacaucacccuccucc

SEQ ID NO: 1691523 - RNA, 19 nt, Artificial Sequence
  Description of Artificial Sequence: Synthetic oligonucleotide
  Sense strand starting at position 3639 of SEQ ID NO: 1561696
ggagggugauguugauagu

SEQ ID NO: 1691524 - RNA, 19 nt, Artificial Sequence
  Description of Artificial Sequence: Synthetic oligonucleotide
  Antisense strand to SEQ ID NO: 1691523
acuaucaacaucacccucc

SEQ ID NO: 1691525 - RNA, 19 nt, Artificial Sequence
  Description of Artificial Sequence: Synthetic oligonucleotide
  Sense strand starting at position 3645 of SEQ ID NO: 1561696
ugauguugauagugaugaa

SEQ ID NO: 1691526 - RNA, 19 nt, Artificial Sequence
  Description of Artificial Sequence: Synthetic oligonucleotide
  Antisense strand to SEQ ID NO: 1691525
uucaucacuaucaacauca

SEQ ID NO: 1691527 - RNA, 19 nt, Artificial Sequence
  Description of Artificial Sequence: Synthetic oligonucleotide
  Sense strand starting at position 3648 of SEQ ID NO: 1561696
uguugauagugaugaagaa

SEQ ID NO: 1691528 - RNA, 19 nt, Artificial Sequence
  Description of Artificial Sequence: Synthetic oligonucleotide
  Antisense strand to SEQ ID NO: 1691527
uucuucaucacuaucaaca

SEQ ID NO: 1691529 - RNA, 19 nt, Artificial Sequence
  Description of Artificial Sequence: Synthetic oligonucleotide
  Sense strand starting at position 3935 of SEQ ID NO: 1561696
cuuacuuugccauggucaa

SEQ ID NO: 1691530 - RNA, 19 nt, Artificial Sequence
  Description of Artificial Sequence: Synthetic oligonucleotide
  Antisense strand to SEQ ID NO: 1691529
uugaccauggcaaaguaag

SEQ ID NO: 1691531 - RNA, 19 nt, Artificial Sequence
  Description of Artificial Sequence: Synthetic oligonucleotide
  Sense strand starting at position 191 of SEQ ID NO: 1561697
ccacucccuugcugagaaa

SEQ ID NO: 1691532 - RNA, 19 nt, Artificial Sequence
  Description of Artificial Sequence: Synthetic oligonucleotide
  Antisense strand to SEQ ID NO: 1691531
uuucucagcaagggagugg

SEQ ID NO: 1691533 - RNA, 19 nt, Artificial Sequence
  Description of Artificial Sequence: Synthetic oligonucleotide
  Sense strand starting at position 309 of SEQ ID NO: 1561697
cucuucguugacugguuua

SEQ ID NO: 1691534 - RNA, 19 nt, Artificial Sequence
  Description of Artificial Sequence: Synthetic oligonucleotide
  Antisense strand to SEQ ID NO: 1691533
uaaaccagucaacgaagag

SEQ ID NO: 1691535 - RNA, 19 nt, Artificial Sequence
  Description of Artificial Sequence: Synthetic oligonucleotide
  Sense strand starting at position 312 of SEQ ID NO: 1561697
uucguugacugguuuagga

SEQ ID NO: 1691536 - RNA, 19 nt, Artificial Sequence
  Description of Artificial Sequence: Synthetic oligonucleotide
  Antisense strand to SEQ ID NO: 1691535
uccuaaaccagucaacgaa

SEQ ID NO: 1691537 - RNA, 19 nt, Artificial Sequence
  Description of Artificial Sequence: Synthetic oligonucleotide
  Sense strand starting at position 314 of SEQ ID NO: 1561697
cguugacugguuuaggaaa

SEQ ID NO: 1691538 - RNA, 19 nt, Artificial Sequence
  Description of Artificial Sequence: Synthetic oligonucleotide
  Antisense strand to SEQ ID NO: 1691537
uuuccuaaaccagucaacg

SEQ ID NO: 1691539 - RNA, 19 nt, Artificial Sequence
  Description of Artificial Sequence: Synthetic oligonucleotide
  Sense strand starting at position 403 of SEQ ID NO: 1561697
ggguugguggucuagcaga

SEQ ID NO: 1691540 - RNA, 19 nt, Artificial Sequence
  Description of Artificial Sequence: Synthetic oligonucleotide
  Antisense strand to SEQ ID NO: 1691539
ucugcuagaccaccaaccc

SEQ ID NO: 1691541 - RNA, 19 nt, Artificial Sequence
  Description of Artificial Sequence: Synthetic oligonucleotide
  Sense strand starting at position 499 of SEQ ID NO: 1561697
agguucuccuacuggaaca

SEQ ID NO: 1691542 - RNA, 19 nt, Artificial Sequence
  Description of Artificial Sequence: Synthetic oligonucleotide
  Antisense strand to SEQ ID NO: 1691541
uguuccaguaggagaaccu

SEQ ID NO: 1691543 - RNA, 19 nt, Artificial Sequence
  Description of Artificial Sequence: Synthetic oligonucleotide
  Sense strand starting at position 548 of SEQ ID NO: 1561697
caggaucaguguuuaauua

SEQ ID NO: 1691544 - RNA, 19 nt, Artificial Sequence
  Description of Artificial Sequence: Synthetic oligonucleotide
  Antisense strand to SEQ ID NO: 1691543
uaauuaaacacugauccug

SEQ ID NO: 1691545 - RNA, 19 nt, Artificial Sequence
  Description of Artificial Sequence: Synthetic oligonucleotide
  Sense strand starting at position 655 of SEQ ID NO: 1561697
ccucuccaggcuugagauu

SEQ ID NO: 1691546 - RNA, 19 nt, Artificial Sequence
  Description of Artificial Sequence: Synthetic oligonucleotide
  Antisense strand to SEQ ID NO: 1691545
aaucucaagccuggagagg

SEQ ID NO: 1691547 - RNA, 19 nt, Artificial Sequence
  Description of Artificial Sequence: Synthetic oligonucleotide
  Sense strand starting at position 694 of SEQ ID NO: 1561697
uggcuauccgggcagagau

SEQ ID NO: 1691548 - RNA, 19 nt, Artificial Sequence
  Description of Artificial Sequence: Synthetic oligonucleotide
  Antisense strand to SEQ ID NO: 1691547
aucucugcccggauagcca

SEQ ID NO: 1691549 - RNA, 19 nt, Artificial Sequence
  Description of Artificial Sequence: Synthetic oligonucleotide
  Sense strand starting at position 696 of SEQ ID NO: 1561697
gcuauccgggcagagauua

SEQ ID NO: 1691550 - RNA, 19 nt, Artificial Sequence
  Description of Artificial Sequence: Synthetic oligonucleotide
  Antisense strand to SEQ ID NO: 1691549
uaaucucugcccggauagc

SEQ ID NO: 1691551 - RNA, 19 nt, Artificial Sequence
  Description of Artificial Sequence: Synthetic oligonucleotide
  Sense strand starting at position 915 of SEQ ID NO: 1561697
ccuggauucgacuaccaug

SEQ ID NO: 1691552 - RNA, 19 nt, Artificial Sequence
  Description of Artificial Sequence: Synthetic oligonucleotide
  Antisense strand to SEQ ID NO: 1691551
caugguagucgaauccagg

SEQ ID NO: 1691553 - RNA, 19 nt, Artificial Sequence
  Description of Artificial Sequence: Synthetic oligonucleotide
  Sense strand starting at position 2001 of SEQ ID NO: 1561697
aaacgucauucgcaggaga

SEQ ID NO: 1691554 - RNA, 19 nt, Artificial Sequence
  Description of Artificial Sequence: Synthetic oligonucleotide
  Antisense strand to SEQ ID NO: 1691553
ucuccugcgaaugacguuu

SEQ ID NO: 1691555 - RNA, 19 nt, Artificial Sequence
  Description of Artificial Sequence: Synthetic oligonucleotide
  Sense strand starting at position 2003 of SEQ ID NO: 1561697
acgucauucgcaggagaag

SEQ ID NO: 1691556 - RNA, 19 nt, Artificial Sequence
  Description of Artificial Sequence: Synthetic oligonucleotide
  Antisense strand to SEQ ID NO: 1691555
cuucuccugcgaaugacgu

SEQ ID NO: 1691557 - RNA, 19 nt, Artificial Sequence
  Description of Artificial Sequence: Synthetic oligonucleotide
  Sense strand starting at position 2143 of SEQ ID NO: 1561697
gcucuaaacgguggaacua

SEQ ID NO: 1691558 - RNA, 19 nt, Artificial Sequence
  Description of Artificial Sequence: Synthetic oligonucleotide
  Antisense strand to SEQ ID NO: 1691557
uaguuccaccguuuagagc

SEQ ID NO: 1691559 - RNA, 19 nt, Artificial Sequence
  Description of Artificial Sequence: Synthetic oligonucleotide
  Sense strand starting at position 2220 of SEQ ID NO: 1561697
aaguaucacgcccauugau

SEQ ID NO: 1691560 - RNA, 19 nt, Artificial Sequence
  Description of Artificial Sequence: Synthetic oligonucleotide
  Antisense strand to SEQ ID NO: 1691559
aucaaugggcgugauacuu

SEQ ID NO: 1691561 - RNA, 19 nt, Artificial Sequence
  Description of Artificial Sequence: Synthetic oligonucleotide
  Sense strand starting at position 2243 of SEQ ID NO: 1561697
uggcuaacuuggugccaau

SEQ ID NO: 1691562 - RNA, 19 nt, Artificial Sequence
  Description of Artificial Sequence: Synthetic oligonucleotide
  Antisense strand to SEQ ID NO: 1691561
auuggcaccaaguuagcca

SEQ ID NO: 1691563 - RNA, 19 nt, Artificial Sequence
  Description of Artificial Sequence: Synthetic oligonucleotide
  Sense strand starting at position 2255 of SEQ ID NO: 1561697
ugccaauggcaccauauua

SEQ ID NO: 1691564 - RNA, 19 nt, Artificial Sequence
  Description of Artificial Sequence: Synthetic oligonucleotide
  Antisense strand to SEQ ID NO: 1691563
uaauauggugccauuggca

SEQ ID NO: 1691565 - RNA, 19 nt, Artificial Sequence
  Description of Artificial Sequence: Synthetic oligonucleotide
  Sense strand starting at position 2278 of SEQ ID NO: 1561697
auugguguuucuuugauga

SEQ ID NO: 1691566 - RNA, 19 nt, Artificial Sequence
  Description of Artificial Sequence: Synthetic oligonucleotide
  Antisense strand to SEQ ID NO: 1691565
ucaucaaagaaacaccaau

SEQ ID NO: 1691567 - RNA, 19 nt, Artificial Sequence
  Description of Artificial Sequence: Synthetic oligonucleotide
  Sense strand starting at position 2282 of SEQ ID NO: 1561697
guguuucuuugaugaccag

SEQ ID NO: 1691568 - RNA, 19 nt, Artificial Sequence
  Description of Artificial Sequence: Synthetic oligonucleotide
  Antisense strand to SEQ ID NO: 1691567
cuggucaucaaagaaacac

SEQ ID NO: 1691569 - RNA, 19 nt, Artificial Sequence
  Description of Artificial Sequence: Synthetic oligonucleotide
  Sense strand starting at position 2283 of SEQ ID NO: 1561697
uguuucuuugaugaccaga

SEQ ID NO: 1691570 - RNA, 19 nt, Artificial Sequence
  Description of Artificial Sequence: Synthetic oligonucleotide
  Antisense strand to SEQ ID NO: 1691569
ucuggucaucaaagaaaca

SEQ ID NO: 1691571 - RNA, 19 nt, Artificial Sequence
  Description of Artificial Sequence: Synthetic oligonucleotide
  Sense strand starting at position 2309 of SEQ ID NO: 1561697
ggcugaauuugucauucgu

SEQ ID NO: 1691572 - RNA, 19 nt, Artificial Sequence
  Description of Artificial Sequence: Synthetic oligonucleotide
  Antisense strand to SEQ ID NO: 1691571
acgaaugacaaauucagcc

SEQ ID NO: 1691573 - RNA, 19 nt, Artificial Sequence
  Description of Artificial Sequence: Synthetic oligonucleotide
  Sense strand starting at position 2311 of SEQ ID NO: 1561697
cugaauuugucauucguuu

SEQ ID NO: 1691574 - RNA, 19 nt, Artificial Sequence
  Description of Artificial Sequence: Synthetic oligonucleotide
  Antisense strand to SEQ ID NO: 1691573
aaacgaaugacaaauucag

SEQ ID NO: 1691575 - RNA, 19 nt, Artificial Sequence
  Description of Artificial Sequence: Synthetic oligonucleotide
  Sense strand starting at position 2334 of SEQ ID NO: 1561697
cggagcagcuuccaauuau

SEQ ID NO: 1691576 - RNA, 19 nt, Artificial Sequence
  Description of Artificial Sequence: Synthetic oligonucleotide
  Antisense strand to SEQ ID NO: 1691575
auaauuggaagcugcuccg

SEQ ID NO: 1691577 - RNA, 19 nt, Artificial Sequence
  Description of Artificial Sequence: Synthetic oligonucleotide
  Sense strand starting at position 2656 of SEQ ID NO: 1561697
cggcccaucuuccaauuau

SEQ ID NO: 1691578 - RNA, 19 nt, Artificial Sequence
  Description of Artificial Sequence: Synthetic oligonucleotide
  Antisense strand to SEQ ID NO: 1691577
auaauuggaagaugggccg

SEQ ID NO: 1691579 - RNA, 19 nt, Artificial Sequence
  Description of Artificial Sequence: Synthetic oligonucleotide
  Sense strand starting at position 2754 of SEQ ID NO: 1561697
uagugagcagcuuucgcau

SEQ ID NO: 1691580 - RNA, 19 nt, Artificial Sequence
  Description of Artificial Sequence: Synthetic oligonucleotide
  Antisense strand to SEQ ID NO: 1691579
augcgaaagcugcucacua

SEQ ID NO: 1691581 - RNA, 19 nt, Artificial Sequence
  Description of Artificial Sequence: Synthetic oligonucleotide
  Sense strand starting at position 3128 of SEQ ID NO: 1561697
cacuacuuccagugaggau

SEQ ID NO: 1691582 - RNA, 19 nt, Artificial Sequence
  Description of Artificial Sequence: Synthetic oligonucleotide
  Antisense strand to SEQ ID NO: 1691581
auccucacuggaaguagug

SEQ ID NO: 1691583 - RNA, 19 nt, Artificial Sequence
  Description of Artificial Sequence: Synthetic oligonucleotide
  Sense strand starting at position 3143 of SEQ ID NO: 1561697
ggaugugacugcccuuagu

SEQ ID NO: 1691584 - RNA, 19 nt, Artificial Sequence
  Description of Artificial Sequence: Synthetic oligonucleotide
  Antisense strand to SEQ ID NO: 1691583
acuaagggcagucacaucc

SEQ ID NO: 1691585 - RNA, 19 nt, Artificial Sequence
  Description of Artificial Sequence: Synthetic oligonucleotide
  Sense strand starting at position 403 of SEQ ID NO: 1561698
cccggaauccuccagcaca

SEQ ID NO: 1691586 - RNA, 19 nt, Artificial Sequence
  Description of Artificial Sequence: Synthetic oligonucleotide
  Antisense strand to SEQ ID NO: 1691585
ugugcuggaggauuccggg

SEQ ID NO: 1691587 - RNA, 19 nt, Artificial Sequence
  Description of Artificial Sequence: Synthetic oligonucleotide
  Sense strand starting at position 517 of SEQ ID NO: 1561698
ucucauuggccagagguua

SEQ ID NO: 1691588 - RNA, 19 nt, Artificial Sequence
  Description of Artificial Sequence: Synthetic oligonucleotide
  Antisense strand to SEQ ID NO: 1691587
uaaccucuggccaaugaga

SEQ ID NO: 1691589 - RNA, 19 nt, Artificial Sequence
  Description of Artificial Sequence: Synthetic oligonucleotide
  Sense strand starting at position 529 of SEQ ID NO: 1561698
gagguuaggcugugacuca

SEQ ID NO: 1691590 - RNA, 19 nt, Artificial Sequence
  Description of Artificial Sequence: Synthetic oligonucleotide
  Antisense strand to SEQ ID NO: 1691589
ugagucacagccuaaccuc

SEQ ID NO: 1691591 - RNA, 19 nt, Artificial Sequence
  Description of Artificial Sequence: Synthetic oligonucleotide
  Sense strand starting at position 541 of SEQ ID NO: 1561698
ugacucaguuaccucagau

SEQ ID NO: 1691592 - RNA, 19 nt, Artificial Sequence
  Description of Artificial Sequence: Synthetic oligonucleotide
  Antisense strand to SEQ ID NO: 1691591
aucugagguaacugaguca

SEQ ID NO: 1691593 - RNA, 19 nt, Artificial Sequence
  Description of Artificial Sequence: Synthetic oligonucleotide
  Sense strand starting at position 659 of SEQ ID NO: 1561698
ggacaaggcuguuuaccuu

SEQ ID NO: 1691594 - RNA, 19 nt, Artificial Sequence
  Description of Artificial Sequence: Synthetic oligonucleotide
  Antisense strand to SEQ ID NO: 1691593
aagguaaacagccuugucc

SEQ ID NO: 1691595 - RNA, 19 nt, Artificial Sequence
  Description of Artificial Sequence: Synthetic oligonucleotide
  Sense strand starting at position 666 of SEQ ID NO: 1561698
gcuguuuaccuuuaaguca

SEQ ID NO: 1691596 - RNA, 19 nt, Artificial Sequence
  Description of Artificial Sequence: Synthetic oligonucleotide
  Antisense strand to SEQ ID NO: 1691595
ugacuuaaagguaaacagc

SEQ ID NO: 1691597 - RNA, 19 nt, Artificial Sequence
  Description of Artificial Sequence: Synthetic oligonucleotide
  Sense strand starting at position 1479 of SEQ ID NO: 1561698
ggaggugaucccugaaugc

SEQ ID NO: 1691598 - RNA, 19 nt, Artificial Sequence
  Description of Artificial Sequence: Synthetic oligonucleotide
  Antisense strand to SEQ ID NO: 1691597
gcauucagggaucaccucc

SEQ ID NO: 1691599 - RNA, 19 nt, Artificial Sequence
  Description of Artificial Sequence: Synthetic oligonucleotide
  Sense strand starting at position 1541 of SEQ ID NO: 1561698
cagucaggccucgaagaca

SEQ ID NO: 1691600 - RNA, 19 nt, Artificial Sequence
  Description of Artificial Sequence: Synthetic oligonucleotide
  Antisense strand to SEQ ID NO: 1691599
ugucuucgaggccugacug

SEQ ID NO: 1691601 - RNA, 19 nt, Artificial Sequence
  Description of Artificial Sequence: Synthetic oligonucleotide
  Sense strand starting at position 1588 of SEQ ID NO: 1561698
uggcaaacugcucgcuaca

SEQ ID NO: 1691602 - RNA, 19 nt, Artificial Sequence
  Description of Artificial Sequence: Synthetic oligonucleotide
  Antisense strand to SEQ ID NO: 1691601
uguagcgagcaguuugcca

SEQ ID NO: 1691603 - RNA, 19 nt, Artificial Sequence
  Description of Artificial Sequence: Synthetic oligonucleotide
  Sense strand starting at position 1696 of SEQ ID NO: 1561698
aagcuugugguagauggaa

SEQ ID NO: 1691604 - RNA, 19 nt, Artificial Sequence
  Description of Artificial Sequence: Synthetic oligonucleotide
  Antisense strand to SEQ ID NO: 1691603
uuccaucuaccacaagcuu

SEQ ID NO: 1691605 - RNA, 19 nt, Artificial Sequence
  Description of Artificial Sequence: Synthetic oligonucleotide
  Sense strand starting at position 1698 of SEQ ID NO: 1561698
gcuugugguagauggaaga

SEQ ID NO: 1691606 - RNA, 19 nt, Artificial Sequence
  Description of Artificial Sequence: Synthetic oligonucleotide
  Antisense strand to SEQ ID NO: 1691605
ucuuccaucuaccacaagc

SEQ ID NO: 1691607 - RNA, 19 nt, Artificial Sequence
  Description of Artificial Sequence: Synthetic oligonucleotide
  Sense strand starting at position 1722 of SEQ ID NO: 1561698
aggaacacuuacuuucgaa

SEQ ID NO: 1691608 - RNA, 19 nt, Artificial Sequence
  Description of Artificial Sequence: Synthetic oligonucleotide
  Antisense strand to SEQ ID NO: 1691607
uucgaaaguaaguguuccu

SEQ ID NO: 1691609 - RNA, 19 nt, Artificial Sequence
  Description of Artificial Sequence: Synthetic oligonucleotide
  Sense strand starting at position 1984 of SEQ ID NO: 1561698
ggcugcccugaaugaaaga

SEQ ID NO: 1691610 - RNA, 19 nt, Artificial Sequence
  Description of Artificial Sequence: Synthetic oligonucleotide
  Antisense strand to SEQ ID NO: 1691609
ucuuucauucagggcagcc

SEQ ID NO: 1691611 - RNA, 19 nt, Artificial Sequence
  Description of Artificial Sequence: Synthetic oligonucleotide
  Sense strand starting at position 2302 of SEQ ID NO: 1561698
ucagcuccagucugauaca

SEQ ID NO: 1691612 - RNA, 19 nt, Artificial Sequence
  Description of Artificial Sequence: Synthetic oligonucleotide
  Antisense strand to SEQ ID NO: 1691611
uguaucagacuggagcuga

SEQ ID NO: 1691613 - RNA, 19 nt, Artificial Sequence
  Description of Artificial Sequence: Synthetic oligonucleotide
  Sense strand starting at position 2583 of SEQ ID NO: 1561698
cugagaaacucuguauaac

SEQ ID NO: 1691614 - RNA, 19 nt, Artificial Sequence
  Description of Artificial Sequence: Synthetic oligonucleotide
  Antisense strand to SEQ ID NO: 1691613
guuauacagaguuucucag

SEQ ID NO: 1691615 - RNA, 19 nt, Artificial Sequence
  Description of Artificial Sequence: Synthetic oligonucleotide
  Sense strand starting at position 2623 of SEQ ID NO: 1561698
gggaaccacucagggauaa

SEQ ID NO: 1691616 - RNA, 19 nt, Artificial Sequence
  Description of Artificial Sequence: Synthetic oligonucleotide
  Antisense strand to SEQ ID NO: 1691615
uuaucccugagugguuccc

SEQ ID NO: 1691617 - RNA, 19 nt, Artificial Sequence
  Description of Artificial Sequence: Synthetic oligonucleotide
  Sense strand starting at position 2806 of SEQ ID NO: 1561698
cccauuuccuguuugugaa

SEQ ID NO: 1691618 - RNA, 19 nt, Artificial Sequence
  Description of Artificial Sequence: Synthetic oligonucleotide
  Antisense strand to SEQ ID NO: 1691617
uucacaaacaggaaauggg

SEQ ID NO: 1691619 - RNA, 19 nt, Artificial Sequence
  Description of Artificial Sequence: Synthetic oligonucleotide
  Sense strand starting at position 2959 of SEQ ID NO: 1561698
cgcugcuugggcuuuaaca

SEQ ID NO: 1691620 - RNA, 19 nt, Artificial Sequence
  Description of Artificial Sequence: Synthetic oligonucleotide
  Antisense strand to SEQ ID NO: 1691619
uguuaaagcccaagcagcg

SEQ ID NO: 1691621 - RNA, 19 nt, Artificial Sequence
  Description of Artificial Sequence: Synthetic oligonucleotide
  Sense strand starting at position 2989 of SEQ ID NO: 1561698
acagcugugcucuggaaga

SEQ ID NO: 1691622 - RNA, 19 nt, Artificial Sequence
  Description of Artificial Sequence: Synthetic oligonucleotide
  Antisense strand to SEQ ID NO: 1691621
ucuuccagagcacagcugu

SEQ ID NO: 1691623 - RNA, 19 nt, Artificial Sequence
  Description of Artificial Sequence: Synthetic oligonucleotide
  Sense strand starting at position 2991 of SEQ ID NO: 1561698
agcugugcucuggaagaca

SEQ ID NO: 1691624 - RNA, 19 nt, Artificial Sequence
  Description of Artificial Sequence: Synthetic oligonucleotide
  Antisense strand to SEQ ID NO: 1691623
ugucuuccagagcacagcu

SEQ ID NO: 1691625 - RNA, 19 nt, Artificial Sequence
  Description of Artificial Sequence: Synthetic oligonucleotide
  Sense strand starting at position 3112 of SEQ ID NO: 1561698
gguaaagugucaucgaagu

SEQ ID NO: 1691626 - RNA, 19 nt, Artificial Sequence
  Description of Artificial Sequence: Synthetic oligonucleotide
  Antisense strand to SEQ ID NO: 1691625
acuucgaugacacuuuacc

SEQ ID NO: 1691627 - RNA, 19 nt, Artificial Sequence
  Description of Artificial Sequence: Synthetic oligonucleotide
  Sense strand starting at position 3126 of SEQ ID NO: 1561698
gaagucagagguugcugau

SEQ ID NO: 1691628 - RNA, 19 nt, Artificial Sequence
  Description of Artificial Sequence: Synthetic oligonucleotide
  Antisense strand to SEQ ID NO: 1691627
aucagcaaccucugacuuc

SEQ ID NO: 1691629 - RNA, 19 nt, Artificial Sequence
  Description of Artificial Sequence: Synthetic oligonucleotide
  Sense strand starting at position 3188 of SEQ ID NO: 1561698
ggccuagagugaguuaaag

SEQ ID NO: 1691630 - RNA, 19 nt, Artificial Sequence
  Description of Artificial Sequence: Synthetic oligonucleotide
  Antisense strand to SEQ ID NO: 1691629
cuuuaacucacucuaggcc

SEQ ID NO: 1691631 - RNA, 19 nt, Artificial Sequence
  Description of Artificial Sequence: Synthetic oligonucleotide
  Sense strand starting at position 3190 of SEQ ID NO: 1561698
ccuagagugaguuaaaguu

SEQ ID NO: 1691632 - RNA, 19 nt, Artificial Sequence
  Description of Artificial Sequence: Synthetic oligonucleotide
  Antisense strand to SEQ ID NO: 1691631
aacuuuaacucacucuagg

SEQ ID NO: 1691633 - RNA, 19 nt, Artificial Sequence
  Description of Artificial Sequence: Synthetic oligonucleotide
  Sense strand starting at position 3208 of SEQ ID NO: 1561698
uuugaauuaguuggaucau

SEQ ID NO: 1691634 - RNA, 19 nt, Artificial Sequence
  Description of Artificial Sequence: Synthetic oligonucleotide
  Antisense strand to SEQ ID NO: 1691633
augauccaacuaauucaaa

SEQ ID NO: 1691635 - RNA, 19 nt, Artificial Sequence
  Description of Artificial Sequence: Synthetic oligonucleotide
  Sense strand starting at position 3209 of SEQ ID NO: 1561698
uugaauuaguuggaucaua

SEQ ID NO: 1691636 - RNA, 19 nt, Artificial Sequence
  Description of Artificial Sequence: Synthetic oligonucleotide
  Antisense strand to SEQ ID NO: 1691635
uaugauccaacuaauucaa

SEQ ID NO: 1691637 - RNA, 19 nt, Artificial Sequence
  Description of Artificial Sequence: Synthetic oligonucleotide
  Sense strand starting at position 3298 of SEQ ID NO: 1561698
cuuguauuccugcaagaca

SEQ ID NO: 1691638 - RNA, 19 nt, Artificial Sequence
  Description of Artificial Sequence: Synthetic oligonucleotide
  Antisense strand to SEQ ID NO: 1691637
ugucuugcaggaauacaag

SEQ ID NO: 1691639 - RNA, 19 nt, Artificial Sequence
  Description of Artificial Sequence: Synthetic oligonucleotide
  Sense strand starting at position 3312 of SEQ ID NO: 1561698
agacaugggcuguagucua

SEQ ID NO: 1691640 - RNA, 19 nt, Artificial Sequence
  Description of Artificial Sequence: Synthetic oligonucleotide
  Antisense strand to SEQ ID NO: 1691639
uagacuacagcccaugucu

SEQ ID NO: 1691641 - RNA, 19 nt, Artificial Sequence
  Description of Artificial Sequence: Synthetic oligonucleotide
  Sense strand starting at position 3404 of SEQ ID NO: 1561698
agcagauccuucucugaga

SEQ ID NO: 1691642 - RNA, 19 nt, Artificial Sequence
  Description of Artificial Sequence: Synthetic oligonucleotide
  Antisense strand to SEQ ID NO: 1691641
ucucagagaaggaucugcu

SEQ ID NO: 1691643 - RNA, 19 nt, Artificial Sequence
  Description of Artificial Sequence: Synthetic oligonucleotide
  Sense strand starting at position 3433 of SEQ ID NO: 1561698
aaugccaaggccugagaaa

SEQ ID NO: 1691644 - RNA, 19 nt, Artificial Sequence
  Description of Artificial Sequence: Synthetic oligonucleotide
  Antisense strand to SEQ ID NO: 1691643
uuucucaggccuuggcauu

SEQ ID NO: 1691645 - RNA, 19 nt, Artificial Sequence
  Description of Artificial Sequence: Synthetic oligonucleotide
  Sense strand starting at position 3512 of SEQ ID NO: 1561698
aggccucccgggugaauuu

SEQ ID NO: 1691646 - RNA, 19 nt, Artificial Sequence
  Description of Artificial Sequence: Synthetic oligonucleotide
  Antisense strand to SEQ ID NO: 1691645
aaauucacccgggaggccu

SEQ ID NO: 1691647 - RNA, 19 nt, Artificial Sequence
  Description of Artificial Sequence: Synthetic oligonucleotide
  Sense strand starting at position 3521 of SEQ ID NO: 1561698
gggugaauuuaugguagaa

SEQ ID NO: 1691648 - RNA, 19 nt, Artificial Sequence
  Description of Artificial Sequence: Synthetic oligonucleotide
  Antisense strand to SEQ ID NO: 1691647
uucuaccauaaauucaccc

SEQ ID NO: 1691649 - RNA, 19 nt, Artificial Sequence
  Description of Artificial Sequence: Synthetic oligonucleotide
  Sense strand starting at position 3523 of SEQ ID NO: 1561698
gugaauuuaugguagaacu

SEQ ID NO: 1691650 - RNA, 19 nt, Artificial Sequence
  Description of Artificial Sequence: Synthetic oligonucleotide
  Antisense strand to SEQ ID NO: 1691649
aguucuaccauaaauucac

SEQ ID NO: 1691651 - RNA, 19 nt, Artificial Sequence
  Description of Artificial Sequence: Synthetic oligonucleotide
  Sense strand starting at position 3560 of SEQ ID NO: 1561698
ugcugaaugcuuggaagua

SEQ ID NO: 1691652 - RNA, 19 nt, Artificial Sequence
  Description of Artificial Sequence: Synthetic oligonucleotide
  Antisense strand to SEQ ID NO: 1691651
uacuuccaagcauucagca

SEQ ID NO: 1691653 - RNA, 19 nt, Artificial Sequence
  Description of Artificial Sequence: Synthetic oligonucleotide
  Sense strand starting at position 3661 of SEQ ID NO: 1561698
cagagcaccuugguuugaa

SEQ ID NO: 1691654 - RNA, 19 nt, Artificial Sequence
  Description of Artificial Sequence: Synthetic oligonucleotide
  Antisense strand to SEQ ID NO: 1691653
uucaaaccaaggugcucug

SEQ ID NO: 1691655 - RNA, 19 nt, Artificial Sequence
  Description of Artificial Sequence: Synthetic oligonucleotide
  Sense strand starting at position 3662 of SEQ ID NO: 1561698
agagcaccuugguuugaaa

SEQ ID NO: 1691656 - RNA, 19 nt, Artificial Sequence
  Description of Artificial Sequence: Synthetic oligonucleotide
  Antisense strand to SEQ ID NO: 1691655
uuucaaaccaaggugcucu

SEQ ID NO: 1691657 - RNA, 19 nt, Artificial Sequence
  Description of Artificial Sequence: Synthetic oligonucleotide
  Sense strand starting at position 3664 of SEQ ID NO: 1561698
agcaccuugguuugaaagu

SEQ ID NO: 1691658 - RNA, 19 nt, Artificial Sequence
  Description of Artificial Sequence: Synthetic oligonucleotide
  Antisense strand to SEQ ID NO: 1691657
acuuucaaaccaaggugcu

SEQ ID NO: 1691659 - RNA, 19 nt, Artificial Sequence
  Description of Artificial Sequence: Synthetic oligonucleotide
  Sense strand starting at position 3755 of SEQ ID NO: 1561698
uaguuuggacuuugacaca

SEQ ID NO: 1691660 - RNA, 19 nt, Artificial Sequence
  Description of Artificial Sequence: Synthetic oligonucleotide
  Antisense strand to SEQ ID NO: 1691659
ugugucaaaguccaaacua

SEQ ID NO: 1691661 - RNA, 19 nt, Artificial Sequence
  Description of Artificial Sequence: Synthetic oligonucleotide
  Sense strand starting at position 3758 of SEQ ID NO: 1561698
uuuggacuuugacacauua

SEQ ID NO: 1691662 - RNA, 19 nt, Artificial Sequence
  Description of Artificial Sequence: Synthetic oligonucleotide
  Antisense strand to SEQ ID NO: 1691661
uaaugugucaaaguccaaa

SEQ ID NO: 1691663 - RNA, 19 nt, Artificial Sequence
  Description of Artificial Sequence: Synthetic oligonucleotide
  Sense strand starting at position 3851 of SEQ ID NO: 1561698
cccuguuuacuauggaaau

SEQ ID NO: 1691664 - RNA, 19 nt, Artificial Sequence
  Description of Artificial Sequence: Synthetic oligonucleotide
  Antisense strand to SEQ ID NO: 1691663
auuuccauaguaaacaggg

SEQ ID NO: 1691665 - RNA, 19 nt, Artificial Sequence
  Description of Artificial Sequence: Synthetic oligonucleotide
  Sense strand starting at position 53 of SEQ ID NO: 1561699
ggaagcaguguuuaaaugu

SEQ ID NO: 1691666 - RNA, 19 nt, Artificial Sequence
  Description of Artificial Sequence: Synthetic oligonucleotide
  Antisense strand to SEQ ID NO: 1691665
acauuuaaacacugcuucc

SEQ ID NO: 1691667 - RNA, 19 nt, Artificial Sequence
  Description of Artificial Sequence: Synthetic oligonucleotide
  Sense strand starting at position 60 of SEQ ID NO: 1561699
guguuuaaauguuggcaau

SEQ ID NO: 1691668 - RNA, 19 nt, Artificial Sequence
  Description of Artificial Sequence: Synthetic oligonucleotide
  Antisense strand to SEQ ID NO: 1691667
auugccaacauuuaaacac

SEQ ID NO: 1691669 - RNA, 19 nt, Artificial Sequence
  Description of Artificial Sequence: Synthetic oligonucleotide
  Sense strand starting at position 171 of SEQ ID NO: 1561699
ggaacaguugagugcuaca

SEQ ID NO: 1691670 - RNA, 19 nt, Artificial Sequence
  Description of Artificial Sequence: Synthetic oligonucleotide
  Antisense strand to SEQ ID NO: 1691669
uguagcacucaacuguucc

SEQ ID NO: 1691671 - RNA, 19 nt, Artificial Sequence
  Description of Artificial Sequence: Synthetic oligonucleotide
  Sense strand starting at position 174 of SEQ ID NO: 1561699
acaguugagugcuacagaa

SEQ ID NO: 1691672 - RNA, 19 nt, Artificial Sequence
  Description of Artificial Sequence: Synthetic oligonucleotide
  Antisense strand to SEQ ID NO: 1691671
uucuguagcacucaacugu

SEQ ID NO: 1691673 - RNA, 19 nt, Artificial Sequence
  Description of Artificial Sequence: Synthetic oligonucleotide
  Sense strand starting at position 235 of SEQ ID NO: 1561699
ggacgaggaaauggucauu

SEQ ID NO: 1691674 - RNA, 19 nt, Artificial Sequence
  Description of Artificial Sequence: Synthetic oligonucleotide
  Antisense strand to SEQ ID NO: 1691673
aaugaccauuuccucgucc

SEQ ID NO: 1691675 - RNA, 19 nt, Artificial Sequence
  Description of Artificial Sequence: Synthetic oligonucleotide
  Sense strand starting at position 238 of SEQ ID NO: 1561699
cgaggaaauggucauuggu

SEQ ID NO: 1691676 - RNA, 19 nt, Artificial Sequence
  Description of Artificial Sequence: Synthetic oligonucleotide
  Antisense strand to SEQ ID NO: 1691675
accaaugaccauuuccucg

SEQ ID NO: 1691677 - RNA, 19 nt, Artificial Sequence
  Description of Artificial Sequence: Synthetic oligonucleotide
  Sense strand starting at position 245 of SEQ ID NO: 1561699
auggucauuggugggcaaa

SEQ ID NO: 1691678 - RNA, 19 nt, Artificial Sequence
  Description of Artificial Sequence: Synthetic oligonucleotide
  Antisense strand to SEQ ID NO: 1691677
uuugcccaccaaugaccau

SEQ ID NO: 1691679 - RNA, 19 nt, Artificial Sequence
  Description of Artificial Sequence: Synthetic oligonucleotide
  Sense strand starting at position 247 of SEQ ID NO: 1561699
ggucauuggugggcaaaga

SEQ ID NO: 1691680 - RNA, 19 nt, Artificial Sequence
  Description of Artificial Sequence: Synthetic oligonucleotide
  Antisense strand to SEQ ID NO: 1691679
ucuuugcccaccaaugacc

SEQ ID NO: 1691681 - RNA, 19 nt, Artificial Sequence
  Description of Artificial Sequence: Synthetic oligonucleotide
  Sense strand starting at position 271 of SEQ ID NO: 1561699
ggaugucacuaugggugua

SEQ ID NO: 1691682 - RNA, 19 nt, Artificial Sequence
  Description of Artificial Sequence: Synthetic oligonucleotide
  Antisense strand to SEQ ID NO: 1691681
uacacccauagugacaucc

SEQ ID NO: 1691683 - RNA, 19 nt, Artificial Sequence
  Description of Artificial Sequence: Synthetic oligonucleotide
  Sense strand starting at position 520 of SEQ ID NO: 1561699
agccaaagcccucaaauga

SEQ ID NO: 1691684 - RNA, 19 nt, Artificial Sequence
  Description of Artificial Sequence: Synthetic oligonucleotide
  Antisense strand to SEQ ID NO: 1691683
ucauuugagggcuuuggcu

SEQ ID NO: 1691685 - RNA, 19 nt, Artificial Sequence
  Description of Artificial Sequence: Synthetic oligonucleotide
  Sense strand starting at position 1023 of SEQ ID NO: 1561699
ggagucggguccuaaggaa

SEQ ID NO: 1691686 - RNA, 19 nt, Artificial Sequence
  Description of Artificial Sequence: Synthetic oligonucleotide
  Antisense strand to SEQ ID NO: 1691685
uuccuuaggacccgacucc

SEQ ID NO: 1691687 - RNA, 19 nt, Artificial Sequence
  Description of Artificial Sequence: Synthetic oligonucleotide
  Sense strand starting at position 1537 of SEQ ID NO: 1561699
ggaaaguuuggacguggga

SEQ ID NO: 1691688 - RNA, 19 nt, Artificial Sequence
  Description of Artificial Sequence: Synthetic oligonucleotide
  Antisense strand to SEQ ID NO: 1691687
ucccacguccaaacuuucc

SEQ ID NO: 1691689 - RNA, 19 nt, Artificial Sequence
  Description of Artificial Sequence: Synthetic oligonucleotide
  Sense strand starting at position 1539 of SEQ ID NO: 1561699
aaaguuuggacgugggaaa

SEQ ID NO: 1691690 - RNA, 19 nt, Artificial Sequence
  Description of Artificial Sequence: Synthetic oligonucleotide
  Antisense strand to SEQ ID NO: 1691689
uuucccacguccaaacuuu

SEQ ID NO: 1691691 - RNA, 19 nt, Artificial Sequence
  Description of Artificial Sequence: Synthetic oligonucleotide
  Sense strand starting at position 1986 of SEQ ID NO: 1561699
ggagugugcgugucugacu

SEQ ID NO: 1691692 - RNA, 19 nt, Artificial Sequence
  Description of Artificial Sequence: Synthetic oligonucleotide
  Antisense strand to SEQ ID NO: 1691691
agucagacacgcacacucc

SEQ ID NO: 1691693 - RNA, 19 nt, Artificial Sequence
  Description of Artificial Sequence: Synthetic oligonucleotide
  Sense strand starting at position 2054 of SEQ ID NO: 1561699
gguggagacucggagaaug

SEQ ID NO: 1691694 - RNA, 19 nt, Artificial Sequence
  Description of Artificial Sequence: Synthetic oligonucleotide
  Antisense strand to SEQ ID NO: 1691693
cauucuccgagucuccacc

SEQ ID NO: 1691695 - RNA, 19 nt, Artificial Sequence
  Description of Artificial Sequence: Synthetic oligonucleotide
  Sense strand starting at position 2463 of SEQ ID NO: 1561699
ggagcaggcuucucgaaca

SEQ ID NO: 1691696 - RNA, 19 nt, Artificial Sequence
  Description of Artificial Sequence: Synthetic oligonucleotide
  Antisense strand to SEQ ID NO: 1691695
uguucgagaagccugcucc

SEQ ID NO: 1691697 - RNA, 19 nt, Artificial Sequence
  Description of Artificial Sequence: Synthetic oligonucleotide
  Sense strand starting at position 2491 of SEQ ID NO: 1561699
ccggcuugcugcccagaaa

SEQ ID NO: 1691698 - RNA, 19 nt, Artificial Sequence
  Description of Artificial Sequence: Synthetic oligonucleotide
  Antisense strand to SEQ ID NO: 1691697
uuucugggcagcaagccgg

SEQ ID NO: 1691699 - RNA, 19 nt, Artificial Sequence
  Description of Artificial Sequence: Synthetic oligonucleotide
  Sense strand starting at position 2541 of SEQ ID NO: 1561699
agaaacagucacugugcau

SEQ ID NO: 1691700 - RNA, 19 nt, Artificial Sequence
  Description of Artificial Sequence: Synthetic oligonucleotide
  Antisense strand to SEQ ID NO: 1691699
augcacagugacuguuucu

SEQ ID NO: 1691701 - RNA, 19 nt, Artificial Sequence
  Description of Artificial Sequence: Synthetic oligonucleotide
  Sense strand starting at position 2627 of SEQ ID NO: 1561699
gagagaaacuugugggcuu

SEQ ID NO: 1691702 - RNA, 19 nt, Artificial Sequence
  Description of Artificial Sequence: Synthetic oligonucleotide
  Antisense strand to SEQ ID NO: 1691701
aagcccacaaguuucucuc

SEQ ID NO: 1691703 - RNA, 19 nt, Artificial Sequence
  Description of Artificial Sequence: Synthetic oligonucleotide
  Sense strand starting at position 2628 of SEQ ID NO: 1561699
agagaaacuugugggcuuu

SEQ ID NO: 1691704 - RNA, 19 nt, Artificial Sequence
  Description of Artificial Sequence: Synthetic oligonucleotide
  Antisense strand to SEQ ID NO: 1691703
aaagcccacaaguuucucu

SEQ ID NO: 1691705 - RNA, 19 nt, Artificial Sequence
  Description of Artificial Sequence: Synthetic oligonucleotide
  Sense strand starting at position 2665 of SEQ ID NO: 1561699
uggacauccuugcaaccaa

SEQ ID NO: 1691706 - RNA, 19 nt, Artificial Sequence
  Description of Artificial Sequence: Synthetic oligonucleotide
  Antisense strand to SEQ ID NO: 1691705
uugguugcaaggaugucca

SEQ ID NO: 1691707 - RNA, 19 nt, Artificial Sequence
  Description of Artificial Sequence: Synthetic oligonucleotide
  Sense strand starting at position 2728 of SEQ ID NO: 1561699
gccaccuugaccuggagaa

SEQ ID NO: 1691708 - RNA, 19 nt, Artificial Sequence
  Description of Artificial Sequence: Synthetic oligonucleotide
  Antisense strand to SEQ ID NO: 1691707
uucuccaggucaagguggc

SEQ ID NO: 1691709 - RNA, 19 nt, Artificial Sequence
  Description of Artificial Sequence: Synthetic oligonucleotide
  Sense strand starting at position 2741 of SEQ ID NO: 1561699
ggagaagucucccaauaaa

SEQ ID NO: 1691710 - RNA, 19 nt, Artificial Sequence
  Description of Artificial Sequence: Synthetic oligonucleotide
  Antisense strand to SEQ ID NO: 1691709
uuuauugggagacuucucc

SEQ ID NO: 1691711 - RNA, 19 nt, Artificial Sequence
  Description of Artificial Sequence: Synthetic oligonucleotide
  Sense strand starting at position 2773 of SEQ ID NO: 1561699
ccagaaacuccuugcuggu

SEQ ID NO: 1691712 - RNA, 19 nt, Artificial Sequence
  Description of Artificial Sequence: Synthetic oligonucleotide
  Antisense strand to SEQ ID NO: 1691711
accagcaaggaguuucugg

SEQ ID NO: 1691713 - RNA, 19 nt, Artificial Sequence
  Description of Artificial Sequence: Synthetic oligonucleotide
  Sense strand starting at position 2821 of SEQ ID NO: 1561699
uggucugcucccugauguu

SEQ ID NO: 1691714 - RNA, 19 nt, Artificial Sequence
  Description of Artificial Sequence: Synthetic oligonucleotide
  Antisense strand to SEQ ID NO: 1691713
aacaucagggagcagacca

SEQ ID NO: 1691715 - RNA, 19 nt, Artificial Sequence
  Description of Artificial Sequence: Synthetic oligonucleotide
  Sense strand starting at position 2950 of SEQ ID NO: 1561699
ccaauaugaggucguugau

SEQ ID NO: 1691716 - RNA, 19 nt, Artificial Sequence
  Description of Artificial Sequence: Synthetic oligonucleotide
  Antisense strand to SEQ ID NO: 1691715
aucaacgaccucauauugg

SEQ ID NO: 1691717 - RNA, 19 nt, Artificial Sequence
  Description of Artificial Sequence: Synthetic oligonucleotide
  Sense strand starting at position 2953 of SEQ ID NO: 1561699
auaugaggucguugauggu

SEQ ID NO: 1691718 - RNA, 19 nt, Artificial Sequence
  Description of Artificial Sequence: Synthetic oligonucleotide
  Antisense strand to SEQ ID NO: 1691717
accaucaacgaccucauau

SEQ ID NO: 1691719 - RNA, 19 nt, Artificial Sequence
  Description of Artificial Sequence: Synthetic oligonucleotide
  Sense strand starting at position 2959 of SEQ ID NO: 1561699
ggucguugaugguaggaua

SEQ ID NO: 1691720 - RNA, 19 nt, Artificial Sequence
  Description of Artificial Sequence: Synthetic oligonucleotide
  Antisense strand to SEQ ID NO: 1691719
uauccuaccaucaacgacc

SEQ ID NO: 1691721 - RNA, 19 nt, Artificial Sequence
  Description of Artificial Sequence: Synthetic oligonucleotide
  Sense strand starting at position 3002 of SEQ ID NO: 1561699
cccuuugucuuggguugua

SEQ ID NO: 1691722 - RNA, 19 nt, Artificial Sequence
  Description of Artificial Sequence: Synthetic oligonucleotide
  Antisense strand to SEQ ID NO: 1691721
uacaacccaagacaaaggg

SEQ ID NO: 1691723 - RNA, 19 nt, Artificial Sequence
  Description of Artificial Sequence: Synthetic oligonucleotide
  Sense strand starting at position 3056 of SEQ ID NO: 1561699
auggcuuccagauagguga

SEQ ID NO: 1691724 - RNA, 19 nt, Artificial Sequence
  Description of Artificial Sequence: Synthetic oligonucleotide
  Antisense strand to SEQ ID NO: 1691723
ucaccuaucuggaagccau

SEQ ID NO: 1691725 - RNA, 19 nt, Artificial Sequence
  Description of Artificial Sequence: Synthetic oligonucleotide
  Sense strand starting at position 3280 of SEQ ID NO: 1561699
guccgucuugcugaugauu

SEQ ID NO: 1691726 - RNA, 19 nt, Artificial Sequence
  Description of Artificial Sequence: Synthetic oligonucleotide
  Antisense strand to SEQ ID NO: 1691725
aaucaucagcaagacggac

SEQ ID NO: 1691727 - RNA, 19 nt, Artificial Sequence
  Description of Artificial Sequence: Synthetic oligonucleotide
  Sense strand starting at position 3285 of SEQ ID NO: 1561699
ucuugcugaugauuggaau

SEQ ID NO: 1691728 - RNA, 19 nt, Artificial Sequence
  Description of Artificial Sequence: Synthetic oligonucleotide
  Antisense strand to SEQ ID NO: 1691727
auuccaaucaucagcaaga

SEQ ID NO: 1691729 - RNA, 19 nt, Artificial Sequence
  Description of Artificial Sequence: Synthetic oligonucleotide
  Sense strand starting at position 3368 of SEQ ID NO: 1561699
ugagauguauucuccacug

SEQ ID NO: 1691730 - RNA, 19 nt, Artificial Sequence
  Description of Artificial Sequence: Synthetic oligonucleotide
  Antisense strand to SEQ ID NO: 1691729
caguggagaauacaucuca

SEQ ID NO: 1691731 - RNA, 19 nt, Artificial Sequence
  Description of Artificial Sequence: Synthetic oligonucleotide
  Sense strand starting at position 3408 of SEQ ID NO: 1561699
acguccuucucuugguuua

SEQ ID NO: 1691732 - RNA, 19 nt, Artificial Sequence
  Description of Artificial Sequence: Synthetic oligonucleotide
  Antisense strand to SEQ ID NO: 1691731
uaaaccaagagaaggacgu

SEQ ID NO: 1691733 - RNA, 19 nt, Artificial Sequence
  Description of Artificial Sequence: Synthetic oligonucleotide
  Sense strand starting at position 3409 of SEQ ID NO: 1561699
cguccuucucuugguuuau

SEQ ID NO: 1691734 - RNA, 19 nt, Artificial Sequence
  Description of Artificial Sequence: Synthetic oligonucleotide
  Antisense strand to SEQ ID NO: 1691733
auaaaccaagagaaggacg

SEQ ID NO: 1691735 - RNA, 19 nt, Artificial Sequence
  Description of Artificial Sequence: Synthetic oligonucleotide
  Sense strand starting at position 3410 of SEQ ID NO: 1561699
guccuucucuugguuuauu

SEQ ID NO: 1691736 - RNA, 19 nt, Artificial Sequence
  Description of Artificial Sequence: Synthetic oligonucleotide
  Antisense strand to SEQ ID NO: 1691735
aauaaaccaagagaaggac

SEQ ID NO: 1691737 - RNA, 19 nt, Artificial Sequence
  Description of Artificial Sequence: Synthetic oligonucleotide
  Sense strand starting at position 3655 of SEQ ID NO: 1561699
uggugugugcuguucaucu

SEQ ID NO: 1691738 - RNA, 19 nt, Artificial Sequence
  Description of Artificial Sequence: Synthetic oligonucleotide
  Antisense strand to SEQ ID NO: 1691737
agaugaacagcacacacca

SEQ ID NO: 1691739 - RNA, 19 nt, Artificial Sequence
  Description of Artificial Sequence: Synthetic oligonucleotide
  Sense strand starting at position 3876 of SEQ ID NO: 1561699
gcuggauuccuggacucag

SEQ ID NO: 1691740 - RNA, 19 nt, Artificial Sequence
  Description of Artificial Sequence: Synthetic oligonucleotide
  Antisense strand to SEQ ID NO: 1691739
cugaguccaggaauccagc

SEQ ID NO: 1691741 - RNA, 19 nt, Artificial Sequence
  Description of Artificial Sequence: Synthetic oligonucleotide
  Sense strand starting at position 3887 of SEQ ID NO: 1561699
ggacucaggugaucauucu

SEQ ID NO: 1691742 - RNA, 19 nt, Artificial Sequence
  Description of Artificial Sequence: Synthetic oligonucleotide
  Antisense strand to SEQ ID NO: 1691741
agaaugaucaccugagucc

SEQ ID NO: 1691743 - RNA, 19 nt, Artificial Sequence
  Description of Artificial Sequence: Synthetic oligonucleotide
  Sense strand starting at position 3971 of SEQ ID NO: 1561699
uuauuagacccucagguuu

SEQ ID NO: 1691744 - RNA, 19 nt, Artificial Sequence
  Description of Artificial Sequence: Synthetic oligonucleotide
  Antisense strand to SEQ ID NO: 1691743
aaaccugagggucuaauaa

SEQ ID NO: 1691745 - RNA, 19 nt, Artificial Sequence
  Description of Artificial Sequence: Synthetic oligonucleotide
  Sense strand starting at position 42 of SEQ ID NO: 1561700
aacucagguugugugacau

SEQ ID NO: 1691746 - RNA, 19 nt, Artificial Sequence
  Description of Artificial Sequence: Synthetic oligonucleotide
  Antisense strand to SEQ ID NO: 1691745
augucacacaaccugaguu

SEQ ID NO: 1691747 - RNA, 19 nt, Artificial Sequence
  Description of Artificial Sequence: Synthetic oligonucleotide
  Sense strand starting at position 184 of SEQ ID NO: 1561700
ggaacuguccaaggcaaga

SEQ ID NO: 1691748 - RNA, 19 nt, Artificial Sequence
  Description of Artificial Sequence: Synthetic oligonucleotide
  Antisense strand to SEQ ID NO: 1691747
ucuugccuuggacaguucc

SEQ ID NO: 1691749 - RNA, 19 nt, Artificial Sequence
  Description of Artificial Sequence: Synthetic oligonucleotide
  Sense strand starting at position 618 of SEQ ID NO: 1561700
aacauugguggagguguaa

SEQ ID NO: 1691750 - RNA, 19 nt, Artificial Sequence
  Description of Artificial Sequence: Synthetic oligonucleotide
  Antisense strand to SEQ ID NO: 1691749
uuacaccuccaccaauguu

SEQ ID NO: 1691751 - RNA, 19 nt, Artificial Sequence
  Description of Artificial Sequence: Synthetic oligonucleotide
  Sense strand starting at position 787 of SEQ ID NO: 1561700
cugcaaggaugacuaagau

SEQ ID NO: 1691752 - RNA, 19 nt, Artificial Sequence
  Description of Artificial Sequence: Synthetic oligonucleotide
  Antisense strand to SEQ ID NO: 1691751
aucuuagucauccuugcag

SEQ ID NO: 1691753 - RNA, 19 nt, Artificial Sequence
  Description of Artificial Sequence: Synthetic oligonucleotide
  Sense strand starting at position 791 of SEQ ID NO: 1561700
aaggaugacuaagauaaug

SEQ ID NO: 1691754 - RNA, 19 nt, Artificial Sequence
  Description of Artificial Sequence: Synthetic oligonucleotide
  Antisense strand to SEQ ID NO: 1691753
cauuaucuuagucauccuu

SEQ ID NO: 1691755 - RNA, 19 nt, Artificial Sequence
  Description of Artificial Sequence: Synthetic oligonucleotide
  Sense strand starting at position 1083 of SEQ ID NO: 1561700
cagguucugccaugaucua

SEQ ID NO: 1691756 - RNA, 19 nt, Artificial Sequence
  Description of Artificial Sequence: Synthetic oligonucleotide
  Antisense strand to SEQ ID NO: 1691755
uagaucauggcagaaccug

SEQ ID NO: 1691757 - RNA, 19 nt, Artificial Sequence
  Description of Artificial Sequence: Synthetic oligonucleotide
  Sense strand starting at position 1169 of SEQ ID NO: 1561700
gggaacgucuacuuaauaa

SEQ ID NO: 1691758 - RNA, 19 nt, Artificial Sequence
  Description of Artificial Sequence: Synthetic oligonucleotide
  Antisense strand to SEQ ID NO: 1691757
uuauuaaguagacguuccc

SEQ ID NO: 1691759 - RNA, 19 nt, Artificial Sequence
  Description of Artificial Sequence: Synthetic oligonucleotide
  Sense strand starting at position 1243 of SEQ ID NO: 1561700
cagauaauucucuguggua

SEQ ID NO: 1691760 - RNA, 19 nt, Artificial Sequence
  Description of Artificial Sequence: Synthetic oligonucleotide
  Antisense strand to SEQ ID NO: 1691759
uaccacagagaauuaucug

SEQ ID NO: 1691761 - RNA, 19 nt, Artificial Sequence
  Description of Artificial Sequence: Synthetic oligonucleotide
  Sense strand starting at position 1244 of SEQ ID NO: 1561700
agauaauucucugugguag

SEQ ID NO: 1691762 - RNA, 19 nt, Artificial Sequence
  Description of Artificial Sequence: Synthetic oligonucleotide
  Antisense strand to SEQ ID NO: 1691761
cuaccacagagaauuaucu

SEQ ID NO: 1691763 - RNA, 19 nt, Artificial Sequence
  Description of Artificial Sequence: Synthetic oligonucleotide
  Sense strand starting at position 1245 of SEQ ID NO: 1561700
gauaauucucugugguaga

SEQ ID NO: 1691764 - RNA, 19 nt, Artificial Sequence
  Description of Artificial Sequence: Synthetic oligonucleotide
  Antisense strand to SEQ ID NO: 1691763
ucuaccacagagaauuauc

SEQ ID NO: 1691765 - RNA, 19 nt, Artificial Sequence
  Description of Artificial Sequence: Synthetic oligonucleotide
  Sense strand starting at position 1355 of SEQ ID NO: 1561700
gucuccaggcauugaugaa

SEQ ID NO: 1691766 - RNA, 19 nt, Artificial Sequence
  Description of Artificial Sequence: Synthetic oligonucleotide
  Antisense strand to SEQ ID NO: 1691765
uucaucaaugccuggagac

SEQ ID NO: 1691767 - RNA, 19 nt, Artificial Sequence
  Description of Artificial Sequence: Synthetic oligonucleotide
  Sense strand starting at position 1503 of SEQ ID NO: 1561700
agaauuaagagguggcaca

SEQ ID NO: 1691768 - RNA, 19 nt, Artificial Sequence
  Description of Artificial Sequence: Synthetic oligonucleotide
  Antisense strand to SEQ ID NO: 1691767
ugugccaccucuuaauucu

SEQ ID NO: 1691769 - RNA, 19 nt, Artificial Sequence
  Description of Artificial Sequence: Synthetic oligonucleotide
  Sense strand starting at position 1504 of SEQ ID NO: 1561700
gaauuaagagguggcacaa

SEQ ID NO: 1691770 - RNA, 19 nt, Artificial Sequence
  Description of Artificial Sequence: Synthetic oligonucleotide
  Antisense strand to SEQ ID NO: 1691769
uugugccaccucuuaauuc

SEQ ID NO: 1691771 - RNA, 19 nt, Artificial Sequence
  Description of Artificial Sequence: Synthetic oligonucleotide
  Sense strand starting at position 1555 of SEQ ID NO: 1561700
auuagugaauuccuugcca

SEQ ID NO: 1691772 - RNA, 19 nt, Artificial Sequence
  Description of Artificial Sequence: Synthetic oligonucleotide
  Antisense strand to SEQ ID NO: 1691771
uggcaaggaauucacuaau

SEQ ID NO: 1691773 - RNA, 19 nt, Artificial Sequence
  Description of Artificial Sequence: Synthetic oligonucleotide
  Sense strand starting at position 1559 of SEQ ID NO: 1561700
gugaauuccuugccauaag

SEQ ID NO: 1691774 - RNA, 19 nt, Artificial Sequence
  Description of Artificial Sequence: Synthetic oligonucleotide
  Antisense strand to SEQ ID NO: 1691773
cuuauggcaaggaauucac

SEQ ID NO: 1691775 - RNA, 19 nt, Artificial Sequence
  Description of Artificial Sequence: Synthetic oligonucleotide
  Sense strand starting at position 2000 of SEQ ID NO: 1561700
aguccaggagccugaauau

SEQ ID NO: 1691776 - RNA, 19 nt, Artificial Sequence
  Description of Artificial Sequence: Synthetic oligonucleotide
  Antisense strand to SEQ ID NO: 1691775
auauucaggcuccuggacu

SEQ ID NO: 1691777 - RNA, 19 nt, Artificial Sequence
  Description of Artificial Sequence: Synthetic oligonucleotide
  Sense strand starting at position 2007 of SEQ ID NO: 1561700
gagccugaauaucuguaca

SEQ ID NO: 1691778 - RNA, 19 nt, Artificial Sequence
  Description of Artificial Sequence: Synthetic oligonucleotide
  Antisense strand to SEQ ID NO: 1691777
uguacagauauucaggcuc

SEQ ID NO: 1691779 - RNA, 19 nt, Artificial Sequence
  Description of Artificial Sequence: Synthetic oligonucleotide
  Sense strand starting at position 2009 of SEQ ID NO: 1561700
gccugaauaucuguacauu

SEQ ID NO: 1691780 - RNA, 19 nt, Artificial Sequence
  Description of Artificial Sequence: Synthetic oligonucleotide
  Antisense strand to SEQ ID NO: 1691779
aauguacagauauucaggc

SEQ ID NO: 1691781 - RNA, 19 nt, Artificial Sequence
  Description of Artificial Sequence: Synthetic oligonucleotide
  Sense strand starting at position 2010 of SEQ ID NO: 1561700
ccugaauaucuguacauug

SEQ ID NO: 1691782 - RNA, 19 nt, Artificial Sequence
  Description of Artificial Sequence: Synthetic oligonucleotide
  Antisense strand to SEQ ID NO: 1691781
caauguacagauauucagg

SEQ ID NO: 1691783 - RNA, 19 nt, Artificial Sequence
  Description of Artificial Sequence: Synthetic oligonucleotide
  Sense strand starting at position 2054 of SEQ ID NO: 1561700
agggccacuccuugacuau

SEQ ID NO: 1691784 - RNA, 19 nt, Artificial Sequence
  Description of Artificial Sequence: Synthetic oligonucleotide
  Antisense strand to SEQ ID NO: 1691783
auagucaaggaguggcccu

SEQ ID NO: 1691785 - RNA, 19 nt, Artificial Sequence
  Description of Artificial Sequence: Synthetic oligonucleotide
  Sense strand starting at position 2055 of SEQ ID NO: 1561700
gggccacuccuugacuaua

SEQ ID NO: 1691786 - RNA, 19 nt, Artificial Sequence
  Description of Artificial Sequence: Synthetic oligonucleotide
  Antisense strand to SEQ ID NO: 1691785
uauagucaaggaguggccc

SEQ ID NO: 1691787 - RNA, 19 nt, Artificial Sequence
  Description of Artificial Sequence: Synthetic oligonucleotide
  Sense strand starting at position 2067 of SEQ ID NO: 1561700
gacuauauuuaccagugga

SEQ ID NO: 1691788 - RNA, 19 nt, Artificial Sequence
  Description of Artificial Sequence: Synthetic oligonucleotide
  Antisense strand to SEQ ID NO: 1691787
uccacugguaaauauaguc

SEQ ID NO: 1691789 - RNA, 19 nt, Artificial Sequence
  Description of Artificial Sequence: Synthetic oligonucleotide
  Sense strand starting at position 2080 of SEQ ID NO: 1561700
aguggauuccauugugagu

SEQ ID NO: 1691790 - RNA, 19 nt, Artificial Sequence
  Description of Artificial Sequence: Synthetic oligonucleotide
  Antisense strand to SEQ ID NO: 1691789
acucacaauggaauccacu

SEQ ID NO: 1691791 - RNA, 19 nt, Artificial Sequence
  Description of Artificial Sequence: Synthetic oligonucleotide
  Sense strand starting at position 2085 of SEQ ID NO: 1561700
auuccauugugaguagaag

SEQ ID NO: 1691792 - RNA, 19 nt, Artificial Sequence
  Description of Artificial Sequence: Synthetic oligonucleotide
  Antisense strand to SEQ ID NO: 1691791
cuucuacucacaauggaau

SEQ ID NO: 1691793 - RNA, 19 nt, Artificial Sequence
  Description of Artificial Sequence: Synthetic oligonucleotide
  Sense strand starting at position 2141 of SEQ ID NO: 1561700
ggcaaccucugaucuacau

SEQ ID NO: 1691794 - RNA, 19 nt, Artificial Sequence
  Description of Artificial Sequence: Synthetic oligonucleotide
  Antisense strand to SEQ ID NO: 1691793
auguagaucagagguugcc

SEQ ID NO: 1691795 - RNA, 19 nt, Artificial Sequence
  Description of Artificial Sequence: Synthetic oligonucleotide
  Sense strand starting at position 2614 of SEQ ID NO: 1561700
gggccaagcucuguaugaa

SEQ ID NO: 1691796 - RNA, 19 nt, Artificial Sequence
  Description of Artificial Sequence: Synthetic oligonucleotide
  Antisense strand to SEQ ID NO: 1691795
uucauacagagcuuggccc

SEQ ID NO: 1691797 - RNA, 19 nt, Artificial Sequence
  Description of Artificial Sequence: Synthetic oligonucleotide
  Sense strand starting at position 2615 of SEQ ID NO: 1561700
ggccaagcucuguaugaaa

SEQ ID NO: 1691798 - RNA, 19 nt, Artificial Sequence
  Description of Artificial Sequence: Synthetic oligonucleotide
  Antisense strand to SEQ ID NO: 1691797
uuucauacagagcuuggcc

SEQ ID NO: 1691799 - RNA, 19 nt, Artificial Sequence
  Description of Artificial Sequence: Synthetic oligonucleotide
  Sense strand starting at position 2617 of SEQ ID NO: 1561700
ccaagcucuguaugaaagu

SEQ ID NO: 1691800 - RNA, 19 nt, Artificial Sequence
  Description of Artificial Sequence: Synthetic oligonucleotide
  Antisense strand to SEQ ID NO: 1691799
acuuucauacagagcuugg

SEQ ID NO: 1691801 - RNA, 19 nt, Artificial Sequence
  Description of Artificial Sequence: Synthetic oligonucleotide
  Sense strand starting at position 2762 of SEQ ID NO: 1561700
cacugaaaguuguuacagu

SEQ ID NO: 1691802 - RNA, 19 nt, Artificial Sequence
  Description of Artificial Sequence: Synthetic oligonucleotide
  Antisense strand to SEQ ID NO: 1691801
acuguaacaacuuucagug

SEQ ID NO: 1691803 - RNA, 19 nt, Artificial Sequence
  Description of Artificial Sequence: Synthetic oligonucleotide
  Sense strand starting at position 3046 of SEQ ID NO: 1561700
cugguaauagacugauacu

SEQ ID NO: 1691804 - RNA, 19 nt, Artificial Sequence
  Description of Artificial Sequence: Synthetic oligonucleotide
  Antisense strand to SEQ ID NO: 1691803
aguaucagucuauuaccag

SEQ ID NO: 1691805 - RNA, 19 nt, Artificial Sequence
  Description of Artificial Sequence: Synthetic oligonucleotide
  Sense strand starting at position 3055 of SEQ ID NO: 1561700
gacugauacuaugugacca

SEQ ID NO: 1691806 - RNA, 19 nt, Artificial Sequence
  Description of Artificial Sequence: Synthetic oligonucleotide
  Antisense strand to SEQ ID NO: 1691805
uggucacauaguaucaguc

SEQ ID NO: 1691807 - RNA, 19 nt, Artificial Sequence
  Description of Artificial Sequence: Synthetic oligonucleotide
  Sense strand starting at position 3215 of SEQ ID NO: 1561700
ggcgaagugcuuuaccaca

SEQ ID NO: 1691808 - RNA, 19 nt, Artificial Sequence
  Description of Artificial Sequence: Synthetic oligonucleotide
  Antisense strand to SEQ ID NO: 1691807
ugugguaaagcacuucgcc

SEQ ID NO: 1691809 - RNA, 19 nt, Artificial Sequence
  Description of Artificial Sequence: Synthetic oligonucleotide
  Sense strand starting at position 3217 of SEQ ID NO: 1561700
cgaagugcuuuaccacaca

SEQ ID NO: 1691810 - RNA, 19 nt, Artificial Sequence
  Description of Artificial Sequence: Synthetic oligonucleotide
  Antisense strand to SEQ ID NO: 1691809
ugugugguaaagcacuucg

SEQ ID NO: 1691811 - RNA, 19 nt, Artificial Sequence
  Description of Artificial Sequence: Synthetic oligonucleotide
  Sense strand starting at position 3392 of SEQ ID NO: 1561700
cccaguguuuccuuaggga

SEQ ID NO: 1691812 - RNA, 19 nt, Artificial Sequence
  Description of Artificial Sequence: Synthetic oligonucleotide
  Antisense strand to SEQ ID NO: 1691811
ucccuaaggaaacacuggg

SEQ ID NO: 1691813 - RNA, 19 nt, Artificial Sequence
  Description of Artificial Sequence: Synthetic oligonucleotide
  Sense strand starting at position 3422 of SEQ ID NO: 1561700
ccugaauucucaguaugaa

SEQ ID NO: 1691814 - RNA, 19 nt, Artificial Sequence
  Description of Artificial Sequence: Synthetic oligonucleotide
  Antisense strand to SEQ ID NO: 1691813
uucauacugagaauucagg

SEQ ID NO: 1691815 - RNA, 19 nt, Artificial Sequence
  Description of Artificial Sequence: Synthetic oligonucleotide
  Sense strand starting at position 3577 of SEQ ID NO: 1561700
ccuggagcuucccuggaaa

SEQ ID NO: 1691816 - RNA, 19 nt, Artificial Sequence
  Description of Artificial Sequence: Synthetic oligonucleotide
  Antisense strand to SEQ ID NO: 1691815
uuuccagggaagcuccagg

SEQ ID NO: 1691817 - RNA, 19 nt, Artificial Sequence
  Description of Artificial Sequence: Synthetic oligonucleotide
  Sense strand starting at position 3579 of SEQ ID NO: 1561700
uggagcuucccuggaaaca

SEQ ID NO: 1691818 - RNA, 19 nt, Artificial Sequence
  Description of Artificial Sequence: Synthetic oligonucleotide
  Antisense strand to SEQ ID NO: 1691817
uguuuccagggaagcucca

SEQ ID NO: 1691819 - RNA, 19 nt, Artificial Sequence
  Description of Artificial Sequence: Synthetic oligonucleotide
  Sense strand starting at position 3598 of SEQ ID NO: 1561700
cccuucuugccagaugcaa

SEQ ID NO: 1691820 - RNA, 19 nt, Artificial Sequence
  Description of Artificial Sequence: Synthetic oligonucleotide
  Antisense strand to SEQ ID NO: 1691819
uugcaucuggcaagaaggg

SEQ ID NO: 1691821 - RNA, 19 nt, Artificial Sequence
  Description of Artificial Sequence: Synthetic oligonucleotide
  Sense strand starting at position 3723 of SEQ ID NO: 1561700
agggauauccuuugagcac

SEQ ID NO: 1691822 - RNA, 19 nt, Artificial Sequence
  Description of Artificial Sequence: Synthetic oligonucleotide
  Antisense strand to SEQ ID NO: 1691821
gugcucaaaggauaucccu

SEQ ID NO: 1691823 - RNA, 19 nt, Artificial Sequence
  Description of Artificial Sequence: Synthetic oligonucleotide
  Sense strand starting at position 3842 of SEQ ID NO: 1561700
acucuuugcccguaaccaa

SEQ ID NO: 1691824 - RNA, 19 nt, Artificial Sequence
  Description of Artificial Sequence: Synthetic oligonucleotide
  Antisense strand to SEQ ID NO: 1691823
uugguuacgggcaaagagu

SEQ ID NO: 1691825 - RNA, 19 nt, Artificial Sequence
  Description of Artificial Sequence: Synthetic oligonucleotide
  Sense strand starting at position 49 of SEQ ID NO: 1561701
ucugacaacuuucgcagua

SEQ ID NO: 1691826 - RNA, 19 nt, Artificial Sequence
  Description of Artificial Sequence: Synthetic oligonucleotide
  Antisense strand to SEQ ID NO: 1691825
uacugcgaaaguugucaga

SEQ ID NO: 1691827 - RNA, 19 nt, Artificial Sequence
  Description of Artificial Sequence: Synthetic oligonucleotide
  Sense strand starting at position 105 of SEQ ID NO: 1561701
accacuggcucagauaaau

SEQ ID NO: 1691828 - RNA, 19 nt, Artificial Sequence
  Description of Artificial Sequence: Synthetic oligonucleotide
  Antisense strand to SEQ ID NO: 1691827
auuuaucugagccaguggu

SEQ ID NO: 1691829 - RNA, 19 nt, Artificial Sequence
  Description of Artificial Sequence: Synthetic oligonucleotide
  Sense strand starting at position 161 of SEQ ID NO: 1561701
gcuuaacaagguuauguua

SEQ ID NO: 1691830 - RNA, 19 nt, Artificial Sequence
  Description of Artificial Sequence: Synthetic oligonucleotide
  Antisense strand to SEQ ID NO: 1691829
uaacauaaccuuguuaagc

SEQ ID NO: 1691831 - RNA, 19 nt, Artificial Sequence
  Description of Artificial Sequence: Synthetic oligonucleotide
  Sense strand starting at position 260 of SEQ ID NO: 1561701
ccuugaagcucccuaggua

SEQ ID NO: 1691832 - RNA, 19 nt, Artificial Sequence
  Description of Artificial Sequence: Synthetic oligonucleotide
  Antisense strand to SEQ ID NO: 1691831
uaccuagggagcuucaagg

SEQ ID NO: 1691833 - RNA, 19 nt, Artificial Sequence
  Description of Artificial Sequence: Synthetic oligonucleotide
  Sense strand starting at position 261 of SEQ ID NO: 1561701
cuugaagcucccuagguaa

SEQ ID NO: 1691834 - RNA, 19 nt, Artificial Sequence
  Description of Artificial Sequence: Synthetic oligonucleotide
  Antisense strand to SEQ ID NO: 1691833
uuaccuagggagcuucaag

SEQ ID NO: 1691835 - RNA, 19 nt, Artificial Sequence
  Description of Artificial Sequence: Synthetic oligonucleotide
  Sense strand starting at position 512 of SEQ ID NO: 1561701
uguccacucuaaguacaaa

SEQ ID NO: 1691836 - RNA, 19 nt, Artificial Sequence
  Description of Artificial Sequence: Synthetic oligonucleotide
  Antisense strand to SEQ ID NO: 1691835
uuuguacuuagaguggaca

SEQ ID NO: 1691837 - RNA, 19 nt, Artificial Sequence
  Description of Artificial Sequence: Synthetic oligonucleotide
  Sense strand starting at position 532 of SEQ ID NO: 1561701
agagcaagcccauguguuu

SEQ ID NO: 1691838 - RNA, 19 nt, Artificial Sequence
  Description of Artificial Sequence: Synthetic oligonucleotide
  Antisense strand to SEQ ID NO: 1691837
aaacacaugggcuugcucu

SEQ ID NO: 1691839 - RNA, 19 nt, Artificial Sequence
  Description of Artificial Sequence: Synthetic oligonucleotide
  Sense strand starting at position 537 of SEQ ID NO: 1561701
aagcccauguguuucgaau

SEQ ID NO: 1691840 - RNA, 19 nt, Artificial Sequence
  Description of Artificial Sequence: Synthetic oligonucleotide
  Antisense strand to SEQ ID NO: 1691839
auucgaaacacaugggcuu

SEQ ID NO: 1691841 - RNA, 19 nt, Artificial Sequence
  Description of Artificial Sequence: Synthetic oligonucleotide
  Sense strand starting at position 565 of SEQ ID NO: 1561701
acuaguuuguauucccauu

SEQ ID NO: 1691842 - RNA, 19 nt, Artificial Sequence
  Description of Artificial Sequence: Synthetic oligonucleotide
  Antisense strand to SEQ ID NO: 1691841
aaugggaauacaaacuagu

SEQ ID NO: 1691843 - RNA, 19 nt, Artificial Sequence
  Description of Artificial Sequence: Synthetic oligonucleotide
  Sense strand starting at position 636 of SEQ ID NO: 1561701
ugcucaaauugccuuggau

SEQ ID NO: 1691844 - RNA, 19 nt, Artificial Sequence
  Description of Artificial Sequence: Synthetic oligonucleotide
  Antisense strand to SEQ ID NO: 1691843
auccaaggcaauuugagca

SEQ ID NO: 1691845 - RNA, 19 nt, Artificial Sequence
  Description of Artificial Sequence: Synthetic oligonucleotide
  Sense strand starting at position 681 of SEQ ID NO: 1561701
uauguaaagugugaacaga

SEQ ID NO: 1691846 - RNA, 19 nt, Artificial Sequence
  Description of Artificial Sequence: Synthetic oligonucleotide
  Antisense strand to SEQ ID NO: 1691845
ucuguucacacuuuacaua

SEQ ID NO: 1691847 - RNA, 19 nt, Artificial Sequence
  Description of Artificial Sequence: Synthetic oligonucleotide
  Sense strand starting at position 1162 of SEQ ID NO: 1561701
ggugguaaguuacuguagu

SEQ ID NO: 1691848 - RNA, 19 nt, Artificial Sequence
  Description of Artificial Sequence: Synthetic oligonucleotide
  Antisense strand to SEQ ID NO: 1691847
acuacaguaacuuaccacc

SEQ ID NO: 1691849 - RNA, 19 nt, Artificial Sequence
  Description of Artificial Sequence: Synthetic oligonucleotide
  Sense strand starting at position 1163 of SEQ ID NO: 1561701
gugguaaguuacuguaguc

SEQ ID NO: 1691850 - RNA, 19 nt, Artificial Sequence
  Description of Artificial Sequence: Synthetic oligonucleotide
  Antisense strand to SEQ ID NO: 1691849
gacuacaguaacuuaccac

SEQ ID NO: 1691851 - RNA, 19 nt, Artificial Sequence
  Description of Artificial Sequence: Synthetic oligonucleotide
  Sense strand starting at position 2056 of SEQ ID NO: 1561701
gcagaauuauuuguuucuu

SEQ ID NO: 1691852 - RNA, 19 nt, Artificial Sequence
  Description of Artificial Sequence: Synthetic oligonucleotide
  Antisense strand to SEQ ID NO: 1691851
aagaaacaaauaauucugc

SEQ ID NO: 1691853 - RNA, 19 nt, Artificial Sequence
  Description of Artificial Sequence: Synthetic oligonucleotide
  Sense strand starting at position 2086 of SEQ ID NO: 1561701
uuguucugguuuccaaaua

SEQ ID NO: 1691854 - RNA, 19 nt, Artificial Sequence
  Description of Artificial Sequence: Synthetic oligonucleotide
  Antisense strand to SEQ ID NO: 1691853
uauuuggaaaccagaacaa

SEQ ID NO: 1691855 - RNA, 19 nt, Artificial Sequence
  Description of Artificial Sequence: Synthetic oligonucleotide
  Sense strand starting at position 2119 of SEQ ID NO: 1561701
cucuuucuauagcaggaua

SEQ ID NO: 1691856 - RNA, 19 nt, Artificial Sequence
  Description of Artificial Sequence: Synthetic oligonucleotide
  Antisense strand to SEQ ID NO: 1691855
uauccugcuauagaaagag

SEQ ID NO: 1691857 - RNA, 19 nt, Artificial Sequence
  Description of Artificial Sequence: Synthetic oligonucleotide
  Sense strand starting at position 2122 of SEQ ID NO: 1561701
uuucuauagcaggauaugu

SEQ ID NO: 1691858 - RNA, 19 nt, Artificial Sequence
  Description of Artificial Sequence: Synthetic oligonucleotide
  Antisense strand to SEQ ID NO: 1691857
acauauccugcuauagaaa

SEQ ID NO: 1691859 - RNA, 19 nt, Artificial Sequence
  Description of Artificial Sequence: Synthetic oligonucleotide
  Sense strand starting at position 2124 of SEQ ID NO: 1561701
ucuauagcaggauauguua

SEQ ID NO: 1691860 - RNA, 19 nt, Artificial Sequence
  Description of Artificial Sequence: Synthetic oligonucleotide
  Antisense strand to SEQ ID NO: 1691859
uaacauauccugcuauaga

SEQ ID NO: 1691861 - RNA, 19 nt, Artificial Sequence
  Description of Artificial Sequence: Synthetic oligonucleotide
  Sense strand starting at position 2131 of SEQ ID NO: 1561701
caggauauguuagugacua

SEQ ID NO: 1691862 - RNA, 19 nt, Artificial Sequence
  Description of Artificial Sequence: Synthetic oligonucleotide
  Antisense strand to SEQ ID NO: 1691861
uagucacuaacauauccug

SEQ ID NO: 1691863 - RNA, 19 nt, Artificial Sequence
  Description of Artificial Sequence: Synthetic oligonucleotide
  Sense strand starting at position 2132 of SEQ ID NO: 1561701
aggauauguuagugacuau

SEQ ID NO: 1691864 - RNA, 19 nt, Artificial Sequence
  Description of Artificial Sequence: Synthetic oligonucleotide
  Antisense strand to SEQ ID NO: 1691863
auagucacuaacauauccu

SEQ ID NO: 1691865 - RNA, 19 nt, Artificial Sequence
  Description of Artificial Sequence: Synthetic oligonucleotide
  Sense strand starting at position 2133 of SEQ ID NO: 1561701
ggauauguuagugacuauu

SEQ ID NO: 1691866 - RNA, 19 nt, Artificial Sequence
  Description of Artificial Sequence: Synthetic oligonucleotide
  Antisense strand to SEQ ID NO: 1691865
aauagucacuaacauaucc

SEQ ID NO: 1691867 - RNA, 19 nt, Artificial Sequence
  Description of Artificial Sequence: Synthetic oligonucleotide
  Sense strand starting at position 2429 of SEQ ID NO: 1561701
cagggaucucuguggcaac

SEQ ID NO: 1691868 - RNA, 19 nt, Artificial Sequence
  Description of Artificial Sequence: Synthetic oligonucleotide
  Antisense strand to SEQ ID NO: 1691867
guugccacagagaucccug

SEQ ID NO: 1691869 - RNA, 19 nt, Artificial Sequence
  Description of Artificial Sequence: Synthetic oligonucleotide
  Sense strand starting at position 2448 of SEQ ID NO: 1561701
ccgggagucuuugcaugag

SEQ ID NO: 1691870 - RNA, 19 nt, Artificial Sequence
  Description of Artificial Sequence: Synthetic oligonucleotide
  Antisense strand to SEQ ID NO: 1691869
cucaugcaaagacucccgg

SEQ ID NO: 1691871 - RNA, 19 nt, Artificial Sequence
  Description of Artificial Sequence: Synthetic oligonucleotide
  Sense strand starting at position 2451 of SEQ ID NO: 1561701
ggagucuuugcaugagaau

SEQ ID NO: 1691872 - RNA, 19 nt, Artificial Sequence
  Description of Artificial Sequence: Synthetic oligonucleotide
  Antisense strand to SEQ ID NO: 1691871
auucucaugcaaagacucc

SEQ ID NO: 1691873 - RNA, 19 nt, Artificial Sequence
  Description of Artificial Sequence: Synthetic oligonucleotide
  Sense strand starting at position 2452 of SEQ ID NO: 1561701
gagucuuugcaugagaauu

SEQ ID NO: 1691874 - RNA, 19 nt, Artificial Sequence
  Description of Artificial Sequence: Synthetic oligonucleotide
  Antisense strand to SEQ ID NO: 1691873
aauucucaugcaaagacuc

SEQ ID NO: 1691875 - RNA, 19 nt, Artificial Sequence
  Description of Artificial Sequence: Synthetic oligonucleotide
  Sense strand starting at position 2454 of SEQ ID NO: 1561701
gucuuugcaugagaauucu

SEQ ID NO: 1691876 - RNA, 19 nt, Artificial Sequence
  Description of Artificial Sequence: Synthetic oligonucleotide
  Antisense strand to SEQ ID NO: 1691875
agaauucucaugcaaagac

SEQ ID NO: 1691877 - RNA, 19 nt, Artificial Sequence
  Description of Artificial Sequence: Synthetic oligonucleotide
  Sense strand starting at position 2460 of SEQ ID NO: 1561701
gcaugagaauucugaaaga

SEQ ID NO: 1691878 - RNA, 19 nt, Artificial Sequence
  Description of Artificial Sequence: Synthetic oligonucleotide
  Antisense strand to SEQ ID NO: 1691877
ucuuucagaauucucaugc
